United States Patent Application Publication US 2009/0070897 A1 - sequence listing, part 2

SEQ ID NO: 3870 - protein, 195 aa, Azolla filiculoides
DEHGEVVAEIRKPDMAPYLGLHYPATDIPQASRFLFMKNRLRMVCDSRAVAVRVIQDTQLRQPLSLAGSTLRAPHGCHSQYMENMGSIASLVMAVIVNDKGECGSSNGSNPQPRPRMRKLWGLVVCHHTTMRAVPFPLRSACELLVQVFGLQLNMEAELAAQMRDKHILRTQMLLCDMLLRDAPIGIVSKSDPNI

SEQ ID NO: 3871 - protein, 194 aa, Azolla filiculoides
DEHGEVLAEIRRSDLEPYLGLHYPATDIPQASRFLFMKNRVRLIYDCRAQPVRIIQDKELRQPLSLAGSTLRAPHSCHGQYMANMGTIASLVMAVVVNDNDEETGNRTQRLNPSPKMRRLWGLVVCHHTTPRVVPFALRSACEFLMQVFGLQLNMELELAAQMREKHILRTQTLLCDMLLRDAPIGIVSESPSI

SEQ ID NO: 3872 - protein, 461 aa, Desulfovibrio desulfuricans G20
MHAPVSSPRHPAKRFARTAALWLVVATLLHASPALAEDAPAMLSQQHGNILWTLIAAILVMLMQAGFAMVECGFTRAKNAGNILMKNFVDFAAGSLVFFLVGYAFMFGADAGGFIGTSGFALAHVDPATEGGMWDLTFWFFQSVFAATAATIVSGGIAERTRFASYIIVSVLVTGIIYPVSGHWAWGGLAGNAGWLEGLGFADFAGSTVVHSVGGWVALAGAIVVGPRAGKYGPDGSVRAIPGHNIPLAALGVFILWFGWFGFNPGSTTTADGTIGYIAVNTSLAACAGTVTAMLTAWIRFGKPDASITMNGALAGLVGITAGCYELSPSGAIIVGIICGFVVVLSIEFLDKILKIDDPVGAVSVHGVCGAIGTLMVGLLAHPSYGGSTGLVYGGDASLLMVQALGVAVVFAWAFGMGLVVFRIVAAVAGLRVSPEEELKGLDITEHGSESYNGFQIFTVE

SEQ ID NO: 3873 - protein, 439 aa, Schizosaccharomyces pombe [sequence omitted]

SEQ ID NO: 3874 - protein, 405 aa, Leuconostoc mesenteroides subsp. mesenteroides ATCC 8293
MAKLTVSDLELSGKKVLMRVDFNVPIKAGVIGNDNRIVAALPTIKYVLENNGRAILFSHLGRIKSEDDKKELSLAPVAARLGELLGKDVKFVPQTRGEELESAINALQDGEVLMVENTRFEDVVDGEVVKNESKNNPELGKYWASLGDDLFINDAFGTAHRAHASNVGIASNVSQAAAGFLMEKEIKFLGDAVANPVRPFVAIIGGAKVSDKIEIVKSLLNKADKVIVGGGMAYTFDAAKGNKIGNSLFEADKVELAKELMAEAGDKLVLPIDSIAADAFSNDAKTEVVDAEDGIPDGYMGLDIGPKSVKLLQDTLSDAKTVVWNGPMGVFEMSNFAKGTLAIGEELVKVTENGGTTIVGGGDSTAAVQQLGVADKLTHISTGGGASLEYLEGKELPGIASISEK

SEQ ID NO: 3875 - protein, 487 aa, Streptococcus mutans
MPITIKTMLITYADSLGKNLKELNENIENYFADAVGGVHLLPFFPSTGDRGFAPIDYHEVDSAFGDWDDVKRLGEKYYLMFDFMINHISRQSKYYKDYQEKHEASAYKDLFLNWDKFWPKNRPTQEDVDLIYKRKDRAPKQEIQFADGSVEHLWNTFGEEQIDLDVTKEVTMDFIRSTIENLAANGCDLIRLDAFAYAVKKLDTNDFFVEPEIWTLLDKVRDIAAVSGAEILPEIHEHYTIQFKIADHDYYVYDFALPMVTLYSLYSGKVDRLAKWVKMSPMKQFTTLDTHDGIGVVDVKDILTDEEITYTSNELYKVGANVNRKYSTAEYNNLDIYQINSTYYSALGDDDQKYFLARLIQAFAPGIPQVYYVGFLAGKNDLELLESTKEGRIINRHYYSSEEIAKEVKRPVVKALLNLFTYRIQSAAFDLDGRIEVETPNEENIVIERQNKDGSHIATAEINLQDMTYRVTENDQTISLSMISCQT

SEQ ID NO: 3876 - protein, 560 aa, Gloeobacter violaceus PCC 7421
MTDTMRRSKVEQIKENSHNLRGRLREELQQPETTHFAEESVQLLKFHGIYQQDDRDERKARKDAGLEPDYAFMVRTKNPGGYAPAAFYLAMDRLADALGSGTLRVTTRQGLQLHGIRKHNLREAIATISTQLGSTLGACGDINRNVMAPPAPFTARPYAVAREAAAAIADMLTPHTGAYFEVWQDEALVYSGEPEVEPIYGETYLPRKFKIAVAVEGDNSVDIYTQDLGVIPVFEDGERLLGYNLTVGGGLGMTHAKPETFPRQADHLGFVSSEDMLEAVKAVVLVQRDHGDRYNRRHARLKYLIHDRGLGWFRAQVETYLGKPLQPWRTVAPWVFHDYLGWQPQGDGRYCLGIWIENGRIKDEGAFRLKSALREIVERFEVDLILTPTQNALLVDVAPEVRAPIDAILQSAGVRPVQAVSNAERYAMACPAWPTCGLALTESERALPGIIAELEAKLTELDLAQEQISIRMTGCPNGCARPYMGEIGFVGSAPGAYNLYLGGNLASTRLNWVFRERVKREDILAVLGPLFSYFKRERAPGESFGDFCLRKGRADLEAHL

SEQ ID NO: 3877 - protein, 226 aa, Clostridium tetani E88
MVIIDLLKGVVYMKFFIDTANVEEIKKVAKWGVLDGVTTNPTLIAREGRDLKEVIEEICSIVDGPISAEVISLESEKMVEEAKELIKIHKNIVIKVPMCEEGLKAVSELTKLGIKTNVTLIFSAQQALLAAKAGATYVSPFLGRIDDIGSFGIQLVEDIVTIFTNFGIESEIICASIRTPIHVLECARVGGDIATVPYKVFAQMLKHPLTDRGIEQFLEDYKSMNK

SEQ ID NO: 3878 - protein, 554 aa, Erwinia carotovora subsp. atroseptica SCRI1043
MCSIFGVLDLKSDPVELRKKALELSRLMRHRGPDWSGVYASDKAILAHERLSIVDVNTGAQPLYNAERTHILAVNGEIYNHQALRQQYGDRYAFQTGSDCEVILALYQEKGPEFLDELRGMFAFALYDSEKDAYLIGRDHLGIIPLYMGYDEHGNLYVASEMKALVPVCRTIKEFPAGSYLWSKDGEIREYYQRDWFDYDAVKDNETDKVALHDALEEAVKSHLMSDVPYGVLLSGGLDSSVISAITKKYAARRVEDDARSEAWWPQLHSFAVGLEGAPDLKAAQEVAKHLGTVHHEIHFTVQEGLDAIRDVIYHIETYDVTTIRASTPMYLMSRKIKAMGIKMVLSGEGSDEVFGGYLYFHKAPNAKELHEETVRKLLALHQYDCARANKAMSAWGVEARVPFLDKNFLDVAMRINPRDKMCGNGKMEKHILRECFESYLPHSVAWRQKEQFSDGVGYSWIDTLKEVAANQVTDQQLETARFRFPYNTPGSKEAYLYREIFEELFPVSSAAECVPGGPSVACSSAKAIEWDESFKTLDDPSGRAVGVHQSAYK

SEQ ID NO: 3879 - protein, 256 aa, Pseudomonas putida KT2440
MNDQRKGDHAEPTTHFGYQDVPESQKAKKVAEVFHSVAAKYDLMNDVLSGGMHRLWKRFTIELSGVRSGNRVLDIAGGTGDLAAKFSRLVGPTGQVVLADINDSMLKVGRDRLLDRGVAGNIEFVQADAEKLPFPDNHFDCVTIAFGLRNVTHKDAAIRSMLRVLKPGGRLLILEFSKPTNKLMSKAYDAYSFAFMPLAGKLITNDAESYRYLAESIRMHPDQETLKSMMVEAGFDRVTYHNMTSGIVAVHRGIKP

SEQ ID NO: 3880 - protein, 438 aa, Oryza sativa
MAAERKDVGILAMDIYFPPTCVLQDELENHDGVSKGKYTIGLGQDSMAFCTEVEDVISMSETVIDKSKSIKTWLMQIFEECGNTDIEGVDSSNACYGGTAALFNCVNWVESNSWDGRYGLVVCTDSAVYAEGPARPTGGAAAIAMLIGPNAPVSFESKYRGSHMAHVYDFYKPDLASEYPVVDGKLSQTCYLMALDSCYNVFCKKYEKLEGKQFSIHDADYFVFHSPYNKLVQKSFARLYYNDFLRKCSTVEDGSREKLEPYSGLSSEESYQSRELEKASQQVAKHLYDSKVQPITLIPKQVGNMYTASLYAALASVMHNKNETLAGQRIVMFSYGSGLTSTMFSFKINEGQHPFILSNIAGILDVSKKLESRHVVAPEKFVAALKLMEHRYGAKDFTTSQDTSLLAPGTYYLTHVDSMYRRFYAVKGQAVTEVSNGH

SEQ ID NO: 3881 - protein, 275 aa, Escherichia coli
IGQALALLLKTQLPSGSELSLYDIAPVTPGVAVDLSHIPTAVKIKGFSGEDATPALEGADVVLISAGVARKPGMDRSDLFNVNAGIVKNLVQQVAKTCPKACIGIITNPVNTTVAIAAEVLKKAGVYDKNKLFGVTTLDIIRSNTFVAELKGKQPGEVEVPVIGGHSGVTILPLLSQVPGVSFTEQEVADLTKRIQNAGTEVVEAKAGGGSATLSMGQAAARFGLSLVRALQGDQGVVECAYVEGVGQYARFFSQPLLLGKNGVEERKSIGTLSA

SEQ ID NO: 3882 - protein, 242 aa, Akebia trifoliata
MGRGRVGLRRIENKINRQVTFAKRRNGLLKKAYELSVLCDAEVALIIFSNRGKLYEFCSSSSMFKTLERYQKCNFGAPEPNVSTREALEHSSHQEYLKLKARVEGLQRSQRNLLGEDLGPLSGKELETLERQLDMSLKQIRSTRTQYMLDQLSDYQRREQMLSEANKALRRRLEEGSQPNPHQWDPNVQVVNFGRQQAPAQGEGFFQHIECEPTLHIGYQPDQITVAAAGPSMNNYMQGWIG

SEQ ID NO: 3883 - protein, 453 aa, Prochlorococcus marinus subsp. marinus str. CCMP1375
MNYSFDLIVLGAGSGGLAAAKRAASYGARVAIVEGDRVGGTCVIRGCVPKKLLVYGSQYGEYLKNAPSFGVKLTASKIEPSILLKNVRNEVDRLNKLHIDLLEKSNVVLIKGWGSIAGPNSVVVKSKDVQDQAIELFAEKILIAVGGRPSFPEIPGASLGWTSDDVFLQEGFPDKVVVVGAGFIACEFACILNGLGVKVKQLVRGRNLLKNFDNEVAFNLQQSMESSGIEFQFASEVNSIEGEIGDLNLVVNHDSNIKSGAVIFATGRKPFIEGLNLEKVDIRTSNNRINVDNKNSTNISNIFAIGDVTDKVNLTPVAIEEGRVFADNNYSDKNRYVNYEFIPKAVFSQPELAYVGKTEEESKRIYGESNIKIYRANFKPMSKMLVKSKEKCFLKLIIEKNSNKVVGCHMLGEHASEIIQMAAISMNMGATKLDFDQTMALHPTISEEFVTMK

SEQ ID NO: 3884 - protein, 423 aa, Clostridium tetani E88
MEKNNYSKEVKKTYTPLLAIEEASRCLLCYDAPCSKNCPVDTKPDEFIRSLRFKNLKGAAETIRKNNILGGVCSRLCPYDKYCQKNCTRGKIDKPIDIGSLQRYLIEFEKNIRLDTLNKVEINKEKVAIIGSGPGGLSAAASLAQKGYKVNIFEKKEKFGGWLTYGIPEYRLPQNLVDYEIDIIRKLGVEFKANCNVGKDITIDDLKEKGFEAILLACGQQQSKELNIEGIKLKGVLKGTEFLSEAKLSNGNLEVGQKVIVIGGGDVAIDSAVTAKLLGAEDVKIVYRRNIEKMPSNKNERIYAHNLNIPIFTGIKPYSLIGNNEKVISFKGVGMFDDSSLELEVDTVIFAIGQELEDLSYIDELKIENNEVLVDENLNTSIEGIFACGDIIKGNKTVVDAVATGKRVAIEIEEYIRRKGDVR

SEQ ID NO: 3885 - protein, 104 aa, Triticum aestivum
  unsure (1)..(104): unsure at all Xaa locations
MGPTVVAWGATSVDPFQGLKSTEGLHVRRRYNGARLGSVRNGGRVRCMQVWPIEGMKKFETLFYLPPFSTGALLKQVDYLXIRSKWGPCLEVSKGGFIFREHNA

SEQ ID NO: 3886 - protein, 290 aa, Zea mays
MSAGRQAYWCYQCRQRVRPRGREMVCPYCDSGFVAEMDDVDALMSHFVGTDPDFHRDPRFGIMEAISAVMRHGMAGMNREVDVRGRPNFFSDLEMEFGSGPWLLFRGQLPGHLTEDNGFDVFVNGRRGGGGGSMRRANIADYFVGPGLDDLIEQLTQNDRRGPPPAAQSSIDAMPTVKITQRHLSGDSHCPICKEKFEMGSEEAREMPCKHLYHSDCIVPWLEQHNSCPVCRYELPPQGSATGASCSRARSTDQSQSSSSSSSSGRTSGRQRRRNPFSFLWPFRSSSSSR

SEQ ID NO: 3887 - protein, 275 aa, Escherichia coli
IGQALALLLKTQLPSGSELSLYDIAPVTPGVAVDLSHIPTAVKIKGFSGEDATPALEGADVVLISAGVARKPGMDRSDLFNVNAGIVKNLVQQVAKTCPKACIGIITNPVNTTVAIAAEVLKKAGVYDKNKLFGVTTLDIIRSNTFVAELKGKQPGEVEVPVIGGHSGVTILPLLSQVPGVSFTEQEVADLTKRIQNAGTDVVEAKAGGGSATLSMGQAAARFGLSLVRALQGEQGVVECAYVEGDGQYARFFSQPLLLGKNGVEERKSIGTLSA

SEQ ID NO: 3888 - protein, 320 aa, Magnaporthe grisea 70-15
MSRQINQPSNQIKLTNVSLVRLKKGKKRFEIACYKNKVLEWRSGIETDLDNVLQIPNVFLNVSKGQTAPSADLAKAFGKDVPVADVILEILNKGDIQVGDKERAQQLERVHNEVVGIVASKLVDPRTKRVYTTGMIEKALDMLSSQAHTQQQQQQQQNKSAADGKTESSSGTATPTTAAASENGEAAGGKSSKLLWTGVVTTKNAKLQALEAMKALIAHQPIPVARARMRLRIACSTSVLKQAVKAPKTEDGEQKAPGTVKDKILGYIEQVENQDVVGSEWEVTGFVEPGAFKAVSDFIGNETKGQGRVEVLDMAVTHED

SEQ ID NO: 3889 - protein, 89 aa, Triticum aestivum
IGSVPESIEPVKMSKHAGWGVMTTPRSGETEDTFIADLAVGLSPGQIKTGAPCRSEGFAKYNQFLRIEEELGNPPVYPALKFRAPVEPY

SEQ ID NO: 3890 - protein, 464 aa, Oryza sativa (japonica cultivar-group)
MAASPAAAAAAATVSSFVSPSSFSSVKASKPDRLRPARRAAAVNVRCVSSPPATETSFKTKVPRNANMAKLQAGYLFPEIARRRAAHLLKFPDAKIISLGIGDTTEPIPDVITNAMAERAHALSTVDGYSGYGAEQGEKKLRAAIAATYYADLGIEETDIFVSDGAKCDISRLQVLFGSNVKIAVQDPSYPAYVDSSVIMGQTGLYQEDVQKYGNIEYMKCSPENGFFPDLSSVPRTDIIFFCSPNNPTGAAASRDQLTKLVKFAKDNGSIIVYDSAYAMYISDDSPKSIFEIPGAKEVAIETASFSKYAGFTGVRLGWTVVPKELLFSDGHPVAKDFNRIVCTCFNGASNISQAGGLGCLSPEGLKAMSDVVGFYKENTKIIVDTFTSLGFNVYGAKNAPYVWVHFPGRNSWDVFAEILEKAHVVTTPGSGFGPGGEGFVRVSAFGHRENIIEAARRLKQLYK

SEQ ID NO: 3891 - protein, 347 aa, Sulfolobus solfataricus
  unsure (1)..(347): unsure at all Xaa locations
XRAVRLVEIGKPLSLQEIGVPKPKGPQVLIKVEAAGVCHSDVHXRQGRFGNLRIVEDLGVKLPVTLGHEIAGKIEEVGDEVVGYSKGDLVAVNPWQGEGNCYYCRIGEEHLCDSPRWLGINFDGAYAEYVIVPHYKYXYKLRRLNAVEAAPLTCSGITTYRAVRKASLDPTKTLLVVGAGGGLGTXAVQIAKAVSGATIIGVDVREEAVEAAKRAGADYVINASMQDPLAEIRRITESKGVDAVIDLNNSEKTLSVYPKALAKQGKYVXVGLFGADLHYHAPLITLSEIQFVGSLVGNQSDFLGIXRLAEAGKVKPXITKTXKLEEANEAIDNLENFKAIGRQVLIP

SEQ ID NO: 3892 - protein, 497 aa, Cladosporium fulvum
MSLSVQLETPSAGKYEQPTGLFINNEWVKPVSGKFFDVINPTDESVICQVAEADEKDVDIAVAAARKAFEGPWRQETPENRGKLLVKLAELFEKNLDLFASVKALDNGKAFNMAKVDIGMCAGCLRYYGGWADKIEGKVVDTTPDTFNYIKKEPIGVCGQIIPWNFPLLMWAWKIGPAVATGNTVVIKTAEQTPLGAYVAANLIKEAGFPPGVVNVISGFGKVAGAAIASHMDIDKVAFTGSTVTGRTILKAAAGSNLKKVTLELGGKSPNIVFDDADIDNAISWVNFGIFFNHGQRCCAGSRIYVQEGIYDKFLQRFKERAQKNVVGDPFAADTFQGPQVSQVQFDRIMGYIQAGRDAGATVEIGGNRKGDKGYFIEPTIFANVTEDMKIMQEEIFGPVCSISKFKTKEDAIKVGNATPYGLAAAVHTRNLNTAIEVSNALRAGTVWVNTYNTLHHQLPFGGFKESGIGRELGEDALANYTQTKTVSIRLGDALFG

SEQ ID NO: 3893 - protein, 440 aa, Oryza sativa (japonica cultivar-group)
MPVNMISKLLEKAVLPALDVAPPVKIGGPRRTSVLRNPNMEKLQKGYLFPEISIKREEHLKKYPDAKVISLGIGDTTEPIPSIVTSAMAEYALALSTPEGYQGYGPEQGHKNLRKEIADKVYPDMGIKESEVFISDGAQCDIARLQTLFGPNVTIAVQDPTFPGYVDNGVIMGQTGKADDGGRYAGIEYMRCAPENAFFPDLSRVRRTDVIFFCSPNNPTGHAASREQLRQLVELARRNGSIIVFDSAYSSYISSSSSSSTPRSIYEIPGAREVAIEVSSFSKFAGFTGVRLGWAVVPDELLYSDGVPVARDFDRVVCTCFNGASGIAQAGGVACLSTEEGRGAVARVVGVYRENARVLVETFRSLGKEVHGGGDAPYVWVRFPGRRSWDVFAEILEKTHVITVPGSGFGPGGEGFIRVSAFNSRDKVLEACQRLKSFLA

SEQ ID NO: 3894 - protein, 486 aa, Vibrio vulnificus CMCP6
MEVTAHYIGGKPFVGDTGESFATLNPATGEVLAHIEQADERVLGHAIESAKLGFSVWSSMSAAERSRCLLKAAQLIRDHNDELAELEVRDTGKPIQEASVVDIATGADVIEYFAGLVNGLGGEQQSLGSNQFFYTRREPLGICAGIGAWNYPIQIAMWKAAPALAAGNAMIFKPSEETPLSALKLAELFTQAGVPDGVFNVVQGDYRVGQMLTAHPEIDKVSFTGESGTGKKVMADSAATLKPVTMELGGKSPLIIFDDADLDDAVSAAMVANFYTQGEVCTHGTRVYVQRAMYDAFVEQLKERTEKLIVGDPMNMETQIGSLISKSHLEKVLGAISSAKESGATLLTGGFQVTERGLEKGCFVAPTVFVDCRDEMPHVQNEIFGPVMSVLVFDDEDEVIARANNTQYGLAAGVFTQNLSKAHRVIHQLQAGICWINTWGNSPAEMPVGGYKLSGIGRENGQETLLHYTQTKSVFVELGAFDSPYA

SEQ ID NO: 3895 - protein, 535 aa, GIBBERELLA ZEAE PH-1
MGWNTHASGTNDPPEVRNWRIHLIATVASMSALAIGYDTSVIGGTMALTSFMRDFGLDLVEKTQRDTIQGNIVSTFQAGCFFGALCTFPIAEKWGRRKTIMAAACIFLLGGALMTAANGNLNMIYAGRAVAGLGLGASSLTVPVYISETAPPSIRGRLIGIFEIASQGGGMLGFWINYATDRTIDVNTKTQWIVPLGLQLLPGAGLALGMLWCPESPRWLARGDRFEEAEKILSQIRGMTPDHEYIRREMGDIRAQVEERSTNKMSKKQMFMKLFQKGVRNRMGIGMALMFLQSFTGVNIITYYAPRIFESLGIPGTSLKLFSTGFYGISKTLGMVLFTFWVVEKVGRRKGLIWGAALGCIPMLYIGGYVMKADPAAAAAAGVVNRDGWGYLAIVCVYINAIIICATWQGITWTYASEIFPLDIRMLCVAITTADTWLGSFIIARSTPYMISDLGYGAYFFFGSILVLMGIWSLFFVPETKGITLEDMDALFAKPVYKTVWAQMRGKPVLEGNAANRSDSPFDEDDEKARELRIP

SEQ ID NO: 3896 - protein, 174 aa, Clostridium perfringens str. 13
MEDKNRNILLSEEQIKEQIAIVGKKLTEDYKDKNLYVLSLLRGSFIFAADLVRAIDTKAQIGFMTTSSYGHGEESTGIVKVVNDIPDNIEGLDVLIVDDIIDSGITMDFVINHVKSLGAKSVKTCTLLDKPSRRKVDLKPDYCCFEIEDLFVVGYGLNYGDHYRNIPYIFNWEK

SEQ ID NO: 3897 - protein, 449 aa, Zea mays
  unsure (1)..(449): unsure at all Xaa locations
MMAASGAYAAQLPAVPEWLNKGDNAWQLTAATLVGIQSMPGLVVLYGSIVKKKWAVNSAFMALYAYASSLLVWVLAGFRMAFGERLLPFWGKAGVALSQGYLVRRASLSATAHXATPRTEPLYPEATLVLFQFEFAAITLAGVSXQIAGQQLMRPAADRSILFPRXRLTTMVGPRLKSDRERFSPNNILLMIAGGGLLWMGWAGFNGGAPYAANIAASVAVLNTNVSAATSLLTWTCLDVIFFGKPSVIGAVQGMMTGLVCITPGAGLVQTWAAVIMGVFAGSVPWFTMMILHKKVALLTRVDDTLGVFHTHAVAGLLGGVLTGLLATPELLEIESPVPGLRGAFYGGGIRQLGKQLAGAAFVVAWNVVATSLILLAIGLLVPLRMPEDQLMIGDDAAHGEEAYALWGDGEKFDATRHDAVRVAGGMDREGSAEQRLSGMGARGVTIQL

SEQ ID NO: 3898 - protein, 424 aa, Bordetella pertussis Tohama I
MDNAELTRRKEAATPRGVGVMCNFYADRAENAELWDTEGRRYIDFAGGIAVLNTGHRHPQLMQALQAQMSRFTHTAYQIVPYASYIQLAERINQLAPGDFAKKTALFTTGAEAVENAVKIARTATGRPAVVAFGAAFHGRTLLGMALTGKVVPYKVGFGPFPADIYHVPYPNALHGVSTDDALAALGTLFKTDVDPRRVAAIIIEPVQGEGGFNICPPAFMQALRALCDDHGILLIADEVQTGFGRTGKLFAMEHYGVAADLTAMAKSLAGGMPLSAVCGRAEVMDAPPPGGLGGTYAGNPLAVAAALEVIRIIETEDLLARGTRLGHQLRDHLEAQRHDAPEIAEVRALGAMVAVEFRQPGSDAPSPEFARQVQARALEQGLLLLTCGSDGNVIRFLFPLTIPEAVMREALDILARTLRGQNA

SEQ ID NO: 3899 - protein, 243 aa, Citrus sinensis
MGRGRVQLKRIENKINRQVTFSKRRAGFLKKAHEISVLCDAEVAVIIFSHKGKLFEYSTGSCMEKILERYERYAYAERQLIAPDPESQRNWPLECNNLKAKIDLLQKDQRHYLGEDLESLSLKDIQQLEQQLDTALKHIRSRKNQLMQESISELQKKEKSIEEQNNLLVKQIKEREKAAAQQAQWGNQIQNQVPNTLSFLLPQPPPCLRLGGAYQEQASEMRRNELNLTLEPVCSCSLGCFAG

SEQ ID NO: 3900 - protein, 270 aa, Lotus japonicus
MGESSAPNGLNGAHEVVVNVNKDASKTIEVSDTNFTVSFLQKVIAELVGTYFFIFAGCASIVVNKNNDNVVTLPGIALVWGLAVMVLVYSLGHISGAHFNPAATIAFASTKRFPWKQVPAYVSAQVLGSTLASGTLRLIFSGKHNQFAGALPTGSNLQAFVIEFIITFFLIFILFGVATDDRAIGEVAGIVVGSTVLLNVLFAGPITGASMNPARSIGSAFVHNEYRGIWIYLLSPTLGAVAGAWVYNIVRYTDKPLREITKNVSFLKGI

SEQ ID NO: 3901 - protein, 472 aa, Vibrio vulnificus CMCP6
MNMSQNVYQFIDVQRVDPAKKPLQIRKIEFVEIYEPFTKQQATAQADRCLDCGNPYCEWKCPVHNYIPQWLKLANEGRILEAVELSHQTNSLPEVCGRVCPQDRLCEGSCTLNDDFGAVTIGNIEKYITDKAFEMGWKPDMSKVEWTDKKVAIIGAGPAGLAAADILVRNGVKPVVFDRYPEIGGLLTFGIPSFKLEKGVMENRRRIFSEMGVEFRMNVEVGKDVQMQELLEEYDAVFLGVGTYKYMRAGLENEDASGVYDALPFLISNTYKVMGLEHDQPFIDMAGKNVVVLGGGDTAMDCVRTSIRQGAANVVCAYRRDEENMPGSRREVKNAKEEGVNFMFNLQPLSIDVDTRGQVTGVKVVQTALGEPDEAGRRRPEPVAGSEHVLPADVVIMAFGFQPHQMSWLEPYGVELDQWGRIKAAAKQTYQFQTSNEKIFAGGDAVRGSDLVVTAIDEGRKAAEGILDYLEL

SEQ ID NO: 3902 - protein, 209 aa, Zea mays
GSPGDGAPYDNEYDYLFKIVLIGDSGVGKSNILSRFTRNEFCLESKSTIGVEFATRTLQVEGKTIKAQIWDTAGQERYRAITSAYYRGAVGALLVYDITKKQTFENIQRWLRELRDHADSNIVIMMVGNKSDLNHLRSVAEEDGQALAEKEGLSFLETSALEALNVEKAFQTVLSDIHQIISKKALAAQEAAGSGPPGQGTTINIADPS

SEQ ID NO: 3903 - protein, 474 aa, Betula pendula
MASSREFKEKRAEAAAKLAASDLEDVKREREYEEQAKMEREELSLQQQQEDRPGVIGSVLKAVHETYEHAKEAVVGKTEETAESTRESGENAAEKARKTKDSAAEKTRETKKCAAEKAKEYKDYTAEKARETTEKARETKDSAAEKARETKDSAAEKAKEYKDYTAEKTRETRESAKEKAKEAAEKAKETKDSALGKAEEYKDYAAEKAKEAKDKTVGKASEYKDYAAEKAKETKDSALGKAEEYKDYTAEKEKEVKDKTVGKAGEYKDYAAEKAKETKDYTAEKTIEGKDTTLSKLGELKESAADAARRAMGFLSGKKDEVTQKTEETKEATKEKLSEAEEEARRKMEELKVRGEENKDDADRKDREDNKVNEADRGTAATANIFSSLPSVTEAIKRKLTQPSDVVDETRAAREHGSTGRKEAGKVVVDVEETRPGYIAAKLKESDQMAGQTFNDPGRRDDEGGIRLDRQGKM

SEQ ID NO: 3904 - protein, 497 aa, Bordetella pertussis Tohama I
MSTLPPLSHWESLAAGLTLRNQAFIDGRWHDGQAGPLAAINPATGQLLAEVTACSQADIDQAVAAARRAFESGVWSRMPRRERKQCMLRLAALIREHAEELALIETLNMGKPIGDTMAFDIPETAHTYAWYAETIDKQYDEIAPTDADALATITREPLGVVAAVVPWNYPLLMASWKVAPALAAGNSVILKPAEQSSLSALRLAELALQAGIPAGVLNVVPGAGPVAGRALGLHMDVDCLAFTGSTATGKRFMEYSGQSNLKQVWLECGGKSPHIIFDDCPDLDRAALAAAIGIFNNQGEVCIAGSRLYVQAGIYDTFVSKVEACARAMQPGNPLDPASPMGAMVDERQMARVLEYVESGRREGARLRMGGERVRADSGGYYIEPTIFECARPDLTIVREEIFGPVLAVTRFDGEDEVVAQANASAYGLGSGLWTADLSRAHRVSRRLRAGLVWVNCYFDGDVTVPFGGVKQSGFGRDKSLHALDKYTSLKTTWIRL

SEQ ID NO: 3905 - protein, 189 aa, Leptospira interrogans serovar lai str. 56601
MKEGASFMYSKYFIWFMTLGIFLPLAGIFAKGSFYDFKVKDIKGNEVSLSKYKGKVVMVVNVASKCGYTYQYEHLEKVYKKYKDQGFAVVGFPANNFGGQEPGTDQEIETFCRIQKGASFDMMSKISVKGKDIHPLYSYLIQNSPNPGEVEWNFEKILISKNGTIEARYRSSVEPDSSAVTQKIETLLK

SEQ ID NO: 3906 - protein, 387 aa, Oryza sativa (japonica cultivar-group)
MSLEEAPVLTIFSSTPEKLKVLSQGFLQQQEQEHLEDSTARQNENCNYAKGKWVADKKRPLYSGNECKQWLSKMWACRMMQRADFSYENFRWQPHGCQMPEFTGPNILKRLRHKTLAFVGDSLGRQQFQSMMCIATGGKYSPEVEDVGWKYGLVKAPGALRPDGWAYWFPGTNSTILFYWSASLSELELLNTTDSVTSYALHLDRPVTFLKKYLHSFDVLVLNTGHHWNRGKFNGNHWELYADGKPVGKGRLADLNRAKNLTLYSIARWVDSELVRYPQVKAFLRTISPRHFVNGDWNTGGSCGNTVPLSNGSEVLQDHSSDLPVESAVNGTRVKILDITAVSQLRDEGHISNSTFKGRASTGINDCLHWCLPGIPDMWNELLFAQI

SEQ ID NO: 3907 - protein, 357 aa, Populus deltoides
MGSLETERKIVGWAATDSTGHLAPYTYSLRDTGPEDVFIKVISCGVCHTDIHQIKNDLGMSHYPMVPGHEVVGEVVEVGSDVTRFKVGDVVGVGVIVGSCKNCHPCKSEIEQYCNKKIWSYNDVYTDGKPTQGGFAESMVVHQKFVVRIPDGMSPEQAAPLLCAGLTVYSPLKHFGLKQSGLRGGILGLGGVGHMGVKIAKAMGHHVTVISSSDKKREEAMEHLGADEYLVSSDVESMQKAADQLDYIIDTVPVVHPLEPYLSLLKLDGKLILMGVINAPLQFVTPMVMLGRKSITGSFIGSMKETEEMLEFCKEKGVASMIEVIKMDYINTAFERLEKNDVRYRFVVDVAGSKLIH

SEQ ID NO: 3908 - protein, 429 aa, Xanthomonas campestris pv. phaseoli
MNHSRSHALFAQAQTLLPGGVNSPVRAFKSVGGEPFFVARADGPYLFDVDDNRYIDYVGSWGPMIAGHNHPAVREAVEQSIRNGLSFGAPCAAEVTMAQTIARLVPSCEMVRMVNSGTEATLSAVRLARGATGRNRIIKFEGCYHGHGDSFLVKAGSGMLTLGVPTSPGVPAGLSELTATLSFNDFEGATALFDEIGAEVAAVIIEPVVGNANCIPPQAGYLQHLRTLCTRHGALLIFDEVMTGFRVALGGAQAHYGVTPDLTTFGKIIGGGMPVGAYGGRRDLMEQVAPAGPIYQAGTLSGNPVAMAAGLAMLELVQEPGFHTRLSEATSMLCEGLEDAARAAGIAVTTNQVGGMFGLFFTDDVVESYAQATACDITSFNRFFHAMLQRGVYLAPSAYEAGFMSSAHDEAVIEATLAAAREAFADVAR

SEQ ID NO: 3909 - protein, 446 aa, Burkholderia fungorum LB400
MTEQKKKLEKLSGVKGMNDILPQEAGLWEFFETTVKSMLRSYGYQNIRTPIIEHTQLFKRGIGEVTDIVEKEMYSFTDALNGENLTMRPENTAAVVRAAIEHNMLYDGPKRLWYIGPMFRHERPQRGRYRQFHQVGVEALGFAGPDADAEIIMMCQRLWDDLGLMGIKLELNSLGLAHERAAHRVELIAYLEKHMDVLDEEAKRRLYTNPLRVLDTKNPAMQEVAQNAPKLIDFLGEESRAHFEGLQRILKANNIPFTINQRLVRGLDYYNLTVFEWVTDKLGAQGTVAAGGRYDPLIEQLGGKPTAACGWAMGIERILELLKEEQLVPEDEGCDVYVVHQGEAAREQAFIIAERLRDTGLDVILHCSADGQTASFKSQMKRADASGAAFAVVLGEDEIANGTVGVKPLRDTNADGGKNEQHNVPAEDLTEFLINAMVATAEDGDD

SEQ ID NO: 3910 - protein, 285 aa, Lactobacillus johnsonii NCC 533
MKFNSVEDTYTLNNGVKIPIIGFGTWQTPDGDVAKHVVEAALNSGYRHIDTAAAYGNEESVGEGIKNSGINRHDLFITTKLWNADHGYKEAKAAIDKSLQNLGTDYLDLYLIHWPNPLALRDHWAEANAESWRAMEEAVKAGKIRAIGVSNFRKHHLEELLKTAEIKPAVNQIMLNPSDLQSDVVKVNEELGLLSEAYSPLGTGGLLGNEVVNEIANEVGKSPAQVLIRWSLEHGFLPLPKSVHDKYIAANIDVFDFELNDEQMSKLDSLHGVSDLATDPDTANF

SEQ ID NO: 3911 - protein, 443 aa, Lactobacillus johnsonii NCC 533
METIKNIIIGFGKGGKTLAKFLAQKGEEVLVIEKSNKMYGGTCINIACLPSKRLIIEAANGVSYVDAVNGKNEMTAQLREKNYHMLADEKTVTVLDGEAHFIADHEIEVKLPNGKKVQYKGDRIFINTGAVPVMLPIPGLKESKYILDSTQAMDEKKMPKNLTIIGAGYIGLEFASMFAKYGSKVTVLDHNKEFLAREDEDISNAVRKDMEDAGIKFELGADIEKITDETSDAKITYQINEERKTINADRILVATGRKPNTENLGLENTAIETTDRGAIKVDDFLRTTVDNVWAIGDVKGGLQFTYISLDDFRIIKDQLFGTGARMVSDRKVVPYSVFISPALSQVGLNEKQANKLGKEYKLFKLPVTAIPKAKVAKDNRGLFKALVDPETEKILGATLYGIESYELINMISLAMKAHLSYTVLRDQIYTHPTMSEAFNDLFK

SEQ ID NO: 3912 - protein, 362 aa, Bradyrhizobium japonicum USDA 110
MKAAVLYEVNKPLVIEDVSLPKPGPREVLIRTSVAGLCHSDLHFMEGLYPHPLPAVLGHESAGVVEQVGSDVTYVKPGDHVVTCLSVFCGTCDNCTTGRTVLCTDTTVKLLPGVSDRMQWSRSEKLHQFLNLSSFAEQMLVHENAIVKIRKEMPLDLAALIGCGVITGYGAVVNTAKVTAGETVAVIGCGGVGMAAINGAQIAGAGRIIAIDTNPAKLQLATKLGATDIINPADGDVVKQVRDLTNGGVHHSFEVLGRKETAEQAFAMLASGGTATIVGMIPFGQKIELHGFDFLRERKIQGSSMGSNHFRVDMPRLVDFYLRGRLHLEDWISAKLKLSEINEGFANMKAGKTLRSVIVFDS

SEQ ID NO: 3913 - protein, 547 aa, Erwinia carotovora subsp. atroseptica SCRI1043
MANHPRAGQPARQSDLINVAQLTSQYYVLRPEIGNTAHAVKFGTSGHRGSAGRHSFNEPHILAIAQAIAEERKKQGISGPCYVGKDTHALSEPAFISVLEVLAANGVDVIVQLDNGFTPTPAVSNAILVHNRQGGALADGIVITPSHNPPEDGGIKYNPPNGGPADTNLTSVIETRANALLADELRDVKRITLDQALQSGHVHEQDLVQAYVEGLTSVVDMAAIQRAGLKLGVDPLGGSGIAYWQRIAEHYKLDLTLVNDAVDQTFRFMSLDHDGVIRMDCSSEFAMAGLLALRDKFDLAFANDPDYDRHGIVTPAGLMNPNHYLAVAINYLFQHRPQWGQSVAVGKTLVSSAMIDRVVADLGRKLVEVPVGFKWFVDGLYDGSFGFGGEESAGASFLRFDGTPWSTDKDGIIMCLLAAEITAVTGKNPQQHYDELAQRFGAPSYNRIQASATHAQKAALSKLSPEQVSASTLAGDPITARLTAAPGNGASIGGLKVMTENGWFAARPSGTEEAYKIYCESFLGVEHRERIEKEAVEIVSAVLASAK

SEQ ID NO: 3914 - protein, 390 aa, Clostridium thermocellum ATCC 27405
MIDLAHYKHIESAVIHGGIYGDFHTGSVNTPIYQTSTFEQDGLGKPRSNWEYSRTGNPTRAALEALIAELEGGSRGFAFSSGMAAIDAVLHLFQSGDSVIISDNVYGGTFRILDKIFKQYGLNYKIVDTTDLAALESAFTSDVKALLLESPANPLLKVTDIAAAAEIARSKGALTVVDNTFMTPYLQRPLELGADIVVHSATKYLGGHSDVIAGLVIVKDGELAEKLHFIQNAVGAVAGPFDSFLLIRSIKTLAVRMEAHVANAEKLAEALKSNPAVKNVYYPGLKSAQGYEIQKRQAKNGGAMISFELHNNYDINRFFEGLELIALAESLGGVESLVCHPSSMTHASVPKEIREKIGITDTLIRLSVGIENYDDLKNDLFSAIKGARVL

SEQ ID NO: 3915 - protein, 267 aa, Shigella flexneri 2a str. 301
MIDDAVAWAKQQSNDRAQQIVDATDKLAVNIGLEILKLVPGRISTEVDARLSYDTEASIAKAKRLIKLYNDAGISNDRILIKLASTWQGIRAAEQLEKEGINCNLTLLFSFAQARACAEAGVFLISPFVGRILDWYKANTDKKEYAPAEDPGVVSVSEIYQYYKEHGYETVVMGASFRNIGEILELAGCDRLTIAPALLKELAESEGAIERKLSYTGEVKARPARITESEFLWQHNQDPMAVDKLAEGIRKFAIDQEKLEKMIGDLL

SEQ ID NO: 3916 - protein, 319 aa, Fragaria x ananassa
MAKVPSVTLSSCGDDIQTMPVIGMGTSSYPRADPETAKAAILEAIRAGYRHFDTAAAYGSEKDLGEAIAEALRLQLIKSRDELFITTKLWASFAEKDLVLPSIKASLSNLQVEYIDMYIIHWPFKLGKEVRTMPVERDLVQPLDIKSVWEAMEECKKLGLARGIGVSNFTSSMLEELLSFAEIPPAVNQLEMNPAWQLKKLRDFCKAKGIHVTAYSPLGAARTKWGDDRVLGSDIIEEIAQAKGKSTAQISLRWVYEQGVSIVTKSYNKERMRQNLDIFDFCLTEEELEKMSHLPQRKGVTFASILGPHDIVLEVDEEL

SEQ ID NO: 3917 - protein, 510 aa, Pseudomonas syringae pv. tomato str. DC3000
MTATPKPLVLIILDGFGHSESHEGNAILAAKMPVMDRLYKTMPNGLISGSGMDVGLPDGQMGNSEVGHMNLGAGRVVYQDFTRVTKAIRDGEFFENPTICAAVDKAVSAGKAVHIMGLLSDGGVHSHQDHLVAMAELAVRRGADKIYLHAFLDGRDTPPRSAKKSLELMDETFARLGKGRIATIIGRYFAMDRDNRWDRVSTAYNLIVDSSAEFHAATGVAGLEAAYARDENDEFVKATRIGEPANVEDGDAVVFMNFRADRARELTRVFVEDDFKDFERARQPKVNYVMLTQYAASIPAPSAFAAGSLKNVLGEYLADNGKTQLRIAETEKYAHVTFFFSGGREEPFPGEERILIPSPKVATYDLQPEMSAPEVTDKIVDAIEHQRYDVIIVNYANGDMVGHSGIMEAAIKAVEYLDVCVGRITDALEKVGGEALITADHGNVEQMTDDATGQAHTAHTSEPVPFVYVGKRQLKVREGGVLADVAPTMLQLLGMEKPQEMTGHSILVEE

SEQ ID NO: 3918 - protein, 159 aa, Brassica napus
MSESNKKISLISSEGEAFEVSEAVAREFEIVAHMLEDGCSGSSIPITTVDSNILGKVIEYCTKHVEVGNVEGNSEKAEKDLEEFDKRFIAVEMNTLFSLILAANYLNVKGLLNIGCQKVADTIKDMKPEEVRSIFNIENDYTPAEEEVVRKENEWAFQP

SEQ ID NO: 3919 - protein, 382 aa, Desulfovibrio desulfuricans G20
MRKTVYFIEGDGIGPEVWNAARPVIDKAVELAYGNGRSLEWKELLAGEKAYAETGTYLPQETLDTLAGAELAIKGPLGTPVGKGFRSLNVTMRQTLDLYACIRPIRYFEGIESPVKHPERVNMVVFRENTEDVYAGIEYKADTDEARKLIAFLRDELGANVDERCAVGIKPMSEKGSKRLVRRAMDFALAQGLPSVTLVHKGNIMKFTEGGFRQWGYELAHDEYAGRAVTEAQAAAGETGLVVKDRIADAMFQEVLIRPEQYSVVATSNLNGDYISDALAAQVGGLGLAPGVNMSDTLAFFEATHGTAPTIAGKDMANPGSLILCGGMLLEHLGWHEAATRIHTAMNTVIGNRTVTVDLASQMQGASTVGCRQFGELLGAAL

SEQ ID NO: 3920 - protein, 396 aa, Streptomyces coelicolor A3(2)
MKAVTWQGKRDVRVEEVPDPKIQEPTDAVIRVTSSGLCGSDLHLYEVLTPFMTPGDILGHEPMGIVEEVGPEVTNLKPGDRVVVPFQIACGHCYMCDTGLPTQCETTQVTGEGMGAPLFGYTRLYGAIPGGQAEYLRVPQAQFGPIKVPEGPADDRFVYLSDVLPTAWQAVEYAAVPQGGSLAVLGLGPIGDMACRIARLKGIDKVFGVDLVPERLERARERGVETFDLRSFDNEKELVSAIQDRTGGRGPDAVIDAVGTEAHGGAVAKLVQQTAAVLPRAIGGPLAERFSIDRLAALYTAIDLVRRGGTISLSGVYGGMADPMPMLTMFDKQIQLRMGQANVRRWSDEIVPYLTDDDPLGVDGFATHRMPLADAPHAYEMFQKKQDGAVKVLMQP

SEQ ID NO: 3921 - protein, 195 aa, Haemophilus influenzae R2846
MKQKIVLATGNKGKVKEMADVLSDFGFEVIAQTDLGIESPEETGLTFVENALLKARYASEKSGLPAIADDSGLVVSALNGAPGLYSARYAGEEGNDAKNREKLLAELAHIAQDQRQAKFVSCIVFLQHPTDPSPIIAEGECCGVIGFEEKGENGFGYDSLFFSPEQGCTFAELETVEKKKISHRAKALSVLKSKL

SEQ ID NO: 3922 - protein, 345 aa, Glycine max
ASRCLKCGEHSGGEWTCPLHNHIPQWIELVKAGNIDAAVELSHQTNTLPEITGRVCPQDRLCEGACTIRDEHGAVTIGNIERYISDQALAKGWRPDLSHVTKVDKRVAIIGAGPAGLACADVLTRNGVGVTVYDRHPEIGGLLTFGIPSFKLDKSLLARRREIFSAMGIHFELNCEVGKDVSLDSLLEQYDAVFVGVGTYRSMKAGLPNEDAPGVYDALAFLIANTKQVMGLEELPEEPFINTAGLNVVVLGGGDTAMDCVRTALRHGASNVTCAYRRDEANMPGSKKEVKNAREEGANFEFNVQPVALELNEQGHVCGIRFLRTRLGEPDAQGRRRPVPVEGSE

SEQ ID NO: 3923 - protein, 387 aa, Bacillus cereus ATCC 14579
MEQFINPRVKDIQISGIRQFSNMIQNYDNLISLTIGQPDFPTPSLVKEAAKRAITENYTSYTHNAGLLELRKAACNFVKDNYDLHYSPENETIVTIGASEAIDVAFRTILEPGTEVILPAPIYPGYEPIIRLCGATPVFVDVRETGFRLTAEALKNAITEKTRCIVLPYPSNPTGVTLSTEELKDIVDVLKDKNIFVLSDEIYSELVYEQKHTSIAHFPEMREKTIVINGLSKSHSMTGWRVGLLFAPSYLAGHILKVHQYNVTCATSIAQYAAIEALTAAKDAPKMMRHQYKKRRDYVYNRLTQMGLTVEKPTGAFYLFPYVGHLTSSSFDFALDLVKEAGLAVVPGTAFSEYGEGYLRLSYAYSIETLKEGCDRLEAFLMKKAKS

SEQ ID NO: 3924 - protein, 271 aa, Haemophilus influenzae R2846
MQHKLIAFIGGGNMAQAIILGLLKQGYPAEQIIVNDPNEEKRAFFANLGVATSENNVESVIKAEVVLLAVKPQMMAEVCSPLSAVDFSDKLLISIAAGISTERLNALIPSLKSIVRVMPNTPALVGEGMAGLFAPKNTSENYRTFAQDLLGAVGRTVWVNDETQMHAVTAASGSSPAYFFLMLEAMQKALIKMNIDEKTARELVQQAMLGAAKMVTENPQIALSTLRENVTSKGGTTAAALAVFDAQHFNQTIEQAMQACLSRSQEMETLF

SEQ ID NO: 3925 - protein, 426 aa, Pseudomonas aeruginosa PAO1
MSKTNESLLKRRQAAVPRGVGQIHPVVAERAENSTVWDVEGREYIDFAGGIAVLNTGHLHPKVIAAVQEQLGKLSHTCFQVLAYEPYIELAEEIAKRVPGDFPKKTLLVTSGSEAVENAVKIARAATGRAGVIAFTGAYHGRTMMTLGLTGKVVPYSAGMGLMPGGIFRALAPCELHGVSEDDSIASIERIFKNDAQPQDIAAIIIEPVQGEGGFYVNSKSFMQRLRALCDQHGILLIADEVQTGAGRTGTFFATEQLGIVPDLTTFAKSVGGGFPISGVAGKAEIMDAIAPGGLGGTYAGSPIACAAALAVLKVFEEEKLLERSQAVGERLKAGLREIQAKHKVIGDVRGLGSMVAIELFEGGDTHKPAAELVSKIVVRAREKGLILLSCGTYYNVIRFLMPVTIPDAQLEKGLAILAECFDELA

SEQ ID NO: 3926 - protein, 187 aa, Bifidobacterium longum NCC2705
MRIADVEEDIDHELVSKEQIDAKIHEMAALASEDYRDKNPLLVAVLKGAVNTLVAFTEAMSIPVQIDFMSLSSYGSGTVSSGEVTVRQDLSADVRGRHILIVEDIVDSGRTLAWLVAELKRRGAASVEVFALLSKPSRREVDVDVKYAGYEIPDEFVVGFGLDFDERYRNLDSIAVLKPSVYQGVQA

SEQ ID NO: 3927 - protein, 450 aa, Streptococcus pyogenes M1 GAS
MVIPYDYIVIGGGSAGIASANRAAMHGAKVLLAEGKEIGGTCVNLGCVPKKVMWYGAQVADILGTYAKDYGFDFKEKAFDFKQLKANRQAYIDRIHASYERGFEQNGVDRIYDYAVFKDAHTVEIAGQLYTAPHILIATGGHPVFPDIEGAQYGISSDGFFALDEVPKRTAVVGAGYIAVELAGVLHALGSKTDLFIRHDRPLRSFDKTIVDVLVDEMAVNGPRLHTHAEVAKVVKNTDESLTLYLKDGQEVEVDQLIWAIGRKPNLEGFSLDKTGVTLNDKGYIETDAYENTSVKGIYAVGDVNGKLALTPVAVAAGRRLSERLFNGKTDEKLDYQNVATVIFSHPVIGSVGLSEEAAVKQYGQEAVKTYQSRFTSMFTAITNHRQPCLMKLVTVGDTEKIVGLHGIGYGVDEMIQGFAVAIKMGATKADFDNTVAIHPTGSEEFVTMR

SEQ ID NO: 3928 - protein, 393 aa, Moorella thermoacetica ATCC 39073
MAKLTLKDLELNNKRVLVRVDFNVPLEAGRVTDNTRIRAALPTIEYLLDHGARVILMSHLGRPKGKVKEELRLDPVARELESLLGRQVHKVNDCVGPEVEAAAAALKPGEVLLLENLRFHPEEEKNDPGFARQLASLADVYVNDAFGAAHRAHASTEGVAHYLPAAAGFLLQKEIETLGKALADPERPFVAIIGGAKVSDKISVIRNLLTKVDTLIIGGGMANTFLKAQGYAMGKSLVEEDQVPLAQELIQLAAQKGVKMLLPRDLVVAQEFKADAPHQVVAVNAVPDGWMALDIGPETARAYAGALEGARTVVWNGPMGVFEMEAFAHGTEAVARAVAAVDGMTIVGGGDSVAAVEKMGVAGKIGHISTGGGASLEFLEGKALPGVVALTEK

SEQ ID NO: 3929 - protein, 502 aa, Moorella thermoacetica ATCC 39073
MILDGFGLGPEGEGNAISQGRLPNYRRLLAGYPHTRLRASGEAVGLPAGQMGNSEVGHLNIGAGRIVYQELTRISKAIRDGSFFSNAALVGAVRAAREHGGALHLMGLVSDGGVHSHLDHLYALLDLAKREGLERVYIHAFLDGRDVPPASAAGYLEQVEDECRQKGIGAIATIMGRYYAMDRDRRWERTARAYRALVAGEGHQASSPSEAIRASYERDITDEFVEPAVITRDGRPLATVREGDSVVFFNFRADRARQLTRAFVDRDFDAFERPGGRLDIQFVCLTQYDVTIPAPVAFPPQVLQNVLGEVIAGAGLKQLRIAETEKYAHVTFFFNGGVEEPFPGEDRLLIPSPKVATYDQKPSMSAREVTDAVLERLDKYDFIVLNFANPDMVGHTGDLAAAIAAVETVDECIGRIVQAMAERRAPLLLTADHGNAEEMREPDGEPHTAHTSNLVPFILVDDRYRGASLREGALEDVAPTVLDILHIQQPAEMTGKSLIVKG

SEQ ID NO: 3930 - protein, 323 aa, Triticum aestivum
MSSALDQLKATGTTVVSDSGDFASIGKYKPQDATTNPSLILAASKKEEYAKLIDVAIDYAKQKGGSVDQQVDDALDRLLVEFGKEILKIIPGKVSTEVDARYSFDTEASVNKALHLIELYGEQGISKDRILIKIAATWEGIKAAEILQRDHGINTNLTLMFSLVQAIGAAEAGAYLISPFVGRILDWFKASTKKEYTKEEDPGVLSVKQIFNYYKKFGYNTIVMGASFRNTGEITELAGCDYLTISPNLLEDLLNSSDSVPKKLDASQASSLDIEKKSYIKDEALFRFDFNEDQMAVEKLREGISKFAPVAVTLKGILKEKLS

SEQ ID NO: 3931 - protein, 393 aa, Arabidopsis thaliana
MRSLLHRTILLTSPSHSLIRRTSLSAMATTASSSLLLPSISLNNLSSSKNASFGFAAKNLSRSRISMSVSAGSQSTTVHDSLFADYKPTSAFLFPGQGAQAVGMGKESQSVGAAGELYKKANDILGYDLLDICVNGPKEKLDSTVISQPAIYVTSLAAVELLRVREGGEQIINSVDVTCGLSLGEYTALAFAGAFSFEDGLKLVKLRGEAMQAAADAAKSAMVSIIGLDSEKVQQLCDAANQEVDEADKVQIANYLCPGNYAVSGGLKGIEVVEAKAKSFKARMTVRLAVAGAFHTSFMEPAVSRLEAALAATEIRSPRIPVISNVDAQPHADPDTIKKILARQVTSPVQWETTVKTLLSKGLKSSYELGPGKVIAGIFKRVDKSASFENISA

SEQ ID NO: 3932 - protein, 305 aa, Petroselinum crispum
MALDLMNNNSYKFRSKMEETAVQEAAAAGLQSVENLIKAISQSNHQTAYLSSSSSSETGDTDYRAVTDVAVNKFKKFISLLDKNRTGHARFRRGPVQEKTGVEMLVNPIQNQIQNHGSDGFQVYRPTAVHPVQPVQPVQIQPVQLVQPVQRLPPVPKKENISTTINFAAPAVAVAAPATSFMSSLTGDTDGSGFQITNMSGFSSGSRPVSSLKRKCSSMNDVSAKCSGSSSGRCHCPKKKKLRVKKVVRMPAISMKTSDIPPDDFSWRKYGQKPIKGSPHPRGYYKCSSVRGCPARKHVERAVDD

SEQ ID NO: 3933 - protein, 428 aa, Moorella thermoacetica ATCC 39073
MTTISDIYAREILDSRGNPTVEVEVFLESGGWGRAAVPSGASTGAYEAVELRDKDPKRYGGKGVLDAVNNINAIIAPELVGSDALDQREIDRQLIEMDGTPNKGKLGANAILGVSLAVAKAAADALGLPLYRYLGGVNAHTLPVPMMNILNGGKHADNNVDIQEFMVMPAGASDFASALRMGAEVFHSLKAVLQSKGLNTAVGDEGGFAPNLRSNVEAIEVLLEAIAKAGYEPGKDCFIALDPASTELYKDGKYVFAGEGVTRTSDEMVEFWASLVDKYPIISIEDGLAEDDWEGWQNLTKRLGHKVQLVGDDLFVTNTERLSRGIEMGAANAILIKVNQIGTLTETLEAIEMAKKAGYTAVVSHRSGETEDTTIADIVVAVNAGQIKTGAPSRTERVAKYNQLLRIEEELDAAALYPGLKAFYNLKK

SEQ ID NO: 3934 - protein, 400 aa, Magnaporthe grisea 70-15
MVRIEPFHVEQWMDKYETKQNVLNVSETCVSSQSIDDLLELSNDKSSICSVFSTSRKLTYGAILGSESLRSSVAGLYSTEAGTRLSPENVLITPGAIFANFLLYYTLIGPGDHIVCVYPTYQQLYSVPQSLGAEVSLWRLSKENSYVPNMEELTGLVKTNTKMIVVNNPNNPTGAPIPRGTLEEIVQFARRRNIIVFSDEVYRPLFHSLQKHVDQPPSILSMNYDKAIATGSMSKAWSLAGVRVGWVACRDRSIIETMATARDYTTISVSQLDDQLASFALSDPVRPALLDRNMKLAHRNLCLLEDFVKTHDKICSWVKPQAGTTAFIQLSKQGKPVDDEKFCIDAINTINVMLVPGSKCFGNGVDGDFKGYIRLGYACETDVLKEALKRLGGYIEQNLS

SEQ ID NO: 3935 - protein, 581 aa, Glycine max
MCGILAVLGCSDDSRAKRVRVLELSRRLKHRGPDWSGLHQHGDCFLAHQRLAIVDPASGDQPLFNEDKSVIVTVNGEIYNHEELRKQLPNHNFRTGSDCDVIAHLYEEHGEDFVDMLDGIFSFVLLDTRDNSFIVARDAIGVTSLYIGWGLDGSVWISSEMKGLNDDCEHFECFPPGHLYSSKERGFRRWYNPPWFSEAIPSAPYDPLVLRHAFEQAVIKRLMTDVPFGVLLSGGLDSSLVASITSRYLANTKAAEQWGSKLHSFCVGLEGSPDLKAAKEVADYLGTVHHEFTFTVQDGIDAIEDVIYHIETYDVTTIRASTPMFLMSRKIKSLGVKWVISGEGSDEIFGGYLYFHKAPNKEEFHRETCRKIKALHQYDCLRANKSTFAWGLEARVPFLDKAFINAAMSIDPEWKMIKRDEGRIEKWILRRAFDDEEHPYLPKHILYRQKEQFSDGVGYSWIDGLKAHAAKHVTEKMMLNAGNIYPHNTPKTKEAYYYRMIFERFFPQNSARLTVPGGASVACSTAKAVEWDAAWSNNLDPSGRAALGVHISAYENQNNKGVEIEKIIPMDAAPLGVAIQG

SEQ ID NO: 3936 - protein, 123 aa, Gloeobacter violaceus PCC 7421
MTVFVGNLPFSVTEQDITEAFSEYGTVKSVKIPTDRETGRPRGFAFVEMADEEEAKVIESLDGATWDNRQIRVNKAEPRPERSGGGGGGGGYRGGGAGGGGGGGGGGYRGGGAGGGGGQRPRY

SEQ ID NO: 3937 - protein, 499 aa, Glycine max
MAAMQRPLKRTIAIAKLRACFSSLRPAAAADIVASPPPQLPPFDHQPHPYNGPFADEVLAKRKTFLGPSVFHYYKKPCRCVSDQAKIYGFSKLNIVEGKMQYLYDDSGRRYLDAFAGIVTVSCGHCHPEILNAITEQSKLLQHATTIYLHHTIGDFAESLAAKMPGNLKVVYFVNSGSEANELAMMMARLYTGSLGMISLRNAYHGGSSSTLGLTALNTWKYPIPEGHVHHVMNPDPYRGAFGADAASYANDVQDHIDYGTSGKVAGFIAETMQGVGGAVELAPGYLKLVYDIIHKAGGVCIADEVQTGFGRTGSHYWGFETQGVIPDIVTMAKGIGNGLPLGAVVTTPEIASVLAQKIQFNTFGGNPVCSAGGLAVLRVLDKEKRQAHCADVGSHLLERLRFLMERHDRNVRGRGLMVGIELVTDRDNKTPAKAETAVVFEKLRELGVLVGKGGLHGNVFRIKPPMCFSKDDAGMVVSRSLNLDADSRFYFGAFFQAK

SEQ ID NO: 3938 - protein, 171 aa, Nicotiana benthamiana
DQVYGTSEGEEVGDAETIADGNDERESKRRAIEVQTSEAASSASHRAVAEPRIIVQTTSEVDLLDDGYRWRKYGQKVVKGNPYPRSYYKCTSQGCNVRKHVERAPSDPKSVITTYEGKHNHDVPAARNSSHNTANNSVSQMSPHTPVVDKQDATRRIGFSNNEQQPIALLR

SEQ ID NO: 3939 - protein, 275 aa, Escherichia coli
IGQALALLLKTQLPSGSELSLYDIAPVTPGVAVDLSHIPTAVKIKGFSGEDATPALEGADVVLISAGVARKPGMDRSDLFNVNAGIVKNLVQQVSKTCPKACIGIITNPVNTTVAIAAEVLKKAGVYDKNKLFGVTTLDIIRSNTFVAELKGKQPGEVEVPVIGGHSGVTILPLLSQVPGVSFTEQEVADLTKRIQNAGTEVVEAKAGGGSATLSMGQAAARFGLSLVRALQGEQGVVECAYVEGDGQYARFFSQPLLLGKNGVEERKSIGTLSA

SEQ ID NO: 3940 - protein, 275 aa, Escherichia coli
IGQALALLLKTQLPSGSELSLYDIAPVTPGVAVDLSHIPTAVKIKGFSGEDATPALEGADVVLISAGVARKPGMDRSDLFNVNAGIVKNLVQQVSKTCPKACIGIITNPVNTTVAIAAEVLKKAGVYDKNKLFGVTTLDIIRSNTFVAELKGKQPGEVEVPVIGGHSGVTILPLLSQVPGVSFTEQEVADLTKRIQNAGTEVVEAKAGGGSATLSMGQAAARFGLSLVRALQGEQGVVECAYVEGDGQYARFFSQPLLMGKNGVEERKSIGTLSA

SEQ ID NO: 3941 - protein, 89 aa, Neurospora crassa
MLSQLTLCAQVYVPTVFENYVADVEVDGRHVELALWDTAGQEDYDRLRPLSYPDSHVVLICFAIDSPDSLDNVSEKVSIPPAYLARPCL

SEQ ID NO: 3942 - protein, 496 aa, Zea mays
ITMDPTKFRPSSSHDTTVTTTNAGAPVWNDNEALTVGPRGPILLEDYHLIEKVAHFARERIPERVVHARGASAKGFFECTHDVTSLTCADFLRAPGVRTPVIVRFSTVIHERGSPETIRDPRGFAVKFYTREGNWDLLGNNFPVFFIRDGIKFPDVIHAFKPNPRSHVQEYWRVFDFLSHLPESLHTFFFLFDDVGVPSDYRHMEGFGVNTYTFVSAAGKAQYVKFHWKPTCGVRCILTDEEAALVGGRNHSHATQDLYDSIAAGSFPEWTLYVQVMEPDTEEQYDFDPLDDTKTWPEDLLPLRPVGRLVLDRNVDNFFNENEQLAFGPGLVVPGIYYSDDKMLQCRVFAYADTQRYRLGPNYLMLPVNAPRCAHHNNHYDGAMNFMHRDEEVDYYPSRHAPLRQAAPPTPLPPRPVAGRREKATIRKPNDFKQPGERYRSWDADRQDRFVRRFADSLGHPKVSQELRSIWIDLLAKCDASLGMKIATRLNMKPNM

SEQ ID NO: 3943 - protein, 252 aa, Schedonorus pratensis
MASCNALLLFFSAAFCFLARLAAGDYGSWQSAHATFYGEADASGAMGGACGYGNLYSTGYGTNTAALSTALFNDGAACGSCYELKCDAAVGTYCRAGSITITATNLCPPNYALPNDAGGWCNPPRAHFDMAEPAYLQIGVYRAGIVPVNYRRVPCVKKGEIRFTINGHSYFNLVLVTNVAGAGDVQSVSIKGSSTGWQAMSRNWGQNWQSNADLDGQSLSFKVTISDGRTIVSNNAAPAGWQFGQTFEGGQF

SEQ ID NO: 3944 - protein, 233 aa, Streptococcus pyogenes SSI-1
MDIFGEFLGTVLLVLLGNGVVAGVVLPKTKTHASGWIVIASGWGIAVAVAVFISGKVAPAHLNPAVSLAFAMSGTIAWSTAIAYSLAQLLGAMLGSTLVFLQFRPHYLAAESQADILGTFATDPAIRDTSSNLLSEIFGTFVLMLGILAFGLYDMPAGLGTLCVGTLVIGIGLSLGGTTGYAINPARDLGPRLVHAILPLNNKGDSDWSYAWIPVVGPIIGAALAVLLFQVMS

SEQ ID NO: 3945 - protein, 171 aa, Pseudomonas aeruginosa PAO1
MKTLVDHLAQYAAYHRDRRNIFSHFIGIPMIVLSIAVLLARPALGFGLSPALLLALAAALFYLRLDLRFGVAMTALLALTVWGAAQLAAGTTAAWLGWGVGLFVVGWIIQFVGHYYEGRKPAFVDDLSGLIVGPLFVLAELAFLLGLRGDVQREVEERAGPTCIREHKRAA

SEQ ID NO: 3946 - protein, 454 aa, Borrelia burgdorferi B31
MSTDKSKTRELILNGNLYKVLFLISFPIVITNIIQAFYDLTDMFYVGKLGAMPLSALSLAGPVNFFIIAIAMGMATGSISLMSKCIGEGNFSRFSRYAGQLIVLNFVLSLFVTICAFFFIDHLLDLLGVKGELKELSRVYFYVTIFAIPIMFLSISITYILNAQGETILSMTIVLFANIVNFILDPILIFSFNMGITGAAWATLFSKLLTVVFYLFLTYRLNYGLKIHLKDLVIDIRSIKEIVNLGLPSTFGQIMVSLSFFIFNYIVIEISPKFLAAYGLTNTIISFLFLPAMGIGTGIISIVGQNLGAKKVNRVEEVLKKGFFISLAILLIINSIVIFNKQFILRLFTNDLEVLNYANNYLLLTTIGTFGYGLQQVFFGGLIGSGRTKIAMIVIFIRLWLIRLPVVFIFQYFGIMENSLGYAFIISNYLAIIILIAFTCTRYWVKPILIKKYK

SEQ ID NO: 3947 - protein, 214 aa, Streptococcus pyogenes SSI-1
MKFFLDTANVAAIKAINELGVVDGVTTNPTIISREGRDFETVIKEICDIVDGPISAEVTGLTADAMVEEARSIAKWHDNVVVKIPMTTEGLKATNILSKEGIKTNVTLIFTVSQGLMAMKAGATYISPFIGRLEDIGTDAYQLISDLREIIDLYDFQAEIIAASIRTTAHVEAVAKLGAHIATIPDPLFAKMTQHPLTTNGLKTFMEDWASFKK

SEQ ID NO: 3948 - protein, 426 aa, Escherichia coli K12
MNSNKELMQRRSQAIPRGVGQIHPIFADRAENCRVWDVEGREYLDFAGGIAVLNTGHLHPKVVAAVEAQLKKLSHTCFQVLAYEPYLELCEIMNQKVPGDFAKKTLLVTTGSEAVENAVKIARAATKRSGTIAFSGAYHGRTHYTLALTGKVNPYSAGMGLMPGHVYRALYPCPLHGISEDDAIASIHRIFKNDAAPEDIAAIVIEPVQGEGGFYASSPAFMQRLRALCDEHGIMLIADEVQSGAGRTGTLFAMEQMGVAPDLTTFAKSIAGGFPLAGVTGRAEVMDAVAPGGLGGTYAGNPIACVAALEVLKVFEQENLLQKANDLGQKLKDGLLAIAEKHPEIGDVRGLGAMIAIELFEDGDHNKPDAKLTAEIVARARDKGLILLSCGPYYNVLRILVPLTIEDAQIRQGLEIISQCFDEAKQ

SEQ ID NO: 3949 - protein, 579 aa, Zea mays
  unsure (1)..(579): unsure at all Xaa locations
MASISGAAAPPSSAVCRLRLRRHLLLRPSHLRLRAPHSIADLSRSSNSAPSPARPALGSGPENGSGGVRAVEKDPIKLWERYVEWLYQHKELGIFVDVSRMGFTEEFLRQMEPRMQQAFVDMRELEKGAIANPDEGRMVGHYWLRDPALAPNSFLRNKIETALDRILAFSQDVVSGXGIGGSALGPQFVAEALAPDNPPLKIRFIDNTDPAGIDHQIAQLGPELATTLVIVISKSGGTPETRNGLLEVQKAFRDAGLQFSKQGVAITQENSLLDNTARIEGWLARFPMFDWVGGRTSEMSAVGLLPAALQGIDIKEMLVGAALMDEETRNTVVSHYXITRTTCSDGMIIYIVSCQTCLSFYXQVKANPAALLALCWYWASEGIGKKDMVVLPYKDSLLLLSRYLQQLVMESLGKEFDLDGNRVNQGLTVYGNKGSTDQHAYIQQLREGVQNFFVTFIEVLRDRPAGHDWELEPGVTCGDYLFGMLQGTRSALYANDRESISVTVQEVTPRAVGALIALYERAVGIYASLVNINAYHQPGVEAGKKAAGEVLALQKRVLTVLKEAMYGTSDLCSFCFSVK

SEQ ID NO: 3950 - protein, 276 aa, Zea mays
MMAEAWTPVPFPPTAPCFWLHDTHSVFWRGGDAWTAAENKLFEKALAQIDRNAPDRWEKVAEVVRTKTVDDVRNHYHDLENDVGFIEAGLVPFPHYSGSVPSFGFTHHEDWDGGFRRGYCLKRARGSDPERKKGVPWTEEEHKLFLMGLKKYGRGDWRNISRKYVTTRTPTQVASHAQKYFIRLNSGGKDKRRSSIHDITTVNLPDEDRGNAPPSAVTTTTNPSVALPDMKPFIAPLQDALGVSHPYGNVKLEPKSSLVAGLGFNDSVLLMHCGQL

SEQ ID NO: 3951 - protein, 330 aa, Oryza sativa (indica cultivar-group)
MITMDLMSGYGRVDEQVAIQEAAAAGLRGMEHLILQLSQTGTSERSPAPAPAQEQQQQQQVDCREITDMTVSKFKKVISMLNRTGHARFRRGPVVAQSSGPAASEPAPVRSSPSAVSRPMTLDFTKAASGYGKDAGFSVSGISAASSSFLSSVTGDGSVSNGRGGGSSSLMLPPPPATSCGKPPLSSAAAAMSAGVGHKRKCHDHAHSENIAGGKYGSTGGRCHCSKRRKHRVKRTIRVPAISSKVADIPADDFSWRKYGQKPIKGSPFPRGYYKCSTLRGCPARKHVERDPADPSMLIVTYEGEHRHTPSAAGQDHPPAPPPPLALPLA

SEQ ID NO: 3952 - protein, 143 aa, Triticum aestivum
  unsure (1)..(143): unsure at all Xaa locations
MSYLLPHLHSGWAVDQAILAEEERLVMIRFGHDWDETCMQVDLLILSGVAETIKNFAVIYLVDITEVPDFNTMYELYDPSTVMFFFRNKHIMIDLGTGNNNKINWAMKDKQEFVDIVETVYRGARKALXLVIAPMDYSTKYRY

SEQ ID NO: 3953 - protein, 475 aa, Exiguobacterium sp. 255-15
MKSYQLVVIGGGAAGMTIAAGAASLGAHVALIEKHTHLGGDCLHYGCVPSKALIEAAHDVHVMKQTAAKYNVTLNGEAVYSKTKASVDRARNIIQSHDGTKRFKDLGVDVYIGEASFLSANEVEVAGQLVVGEKFAISTGSQPIIPPIEGLDTIPYLTNETIFEQTERPERLLVIGGGAIGLELSQAYAHLGTEVTVIEGAKSLMPKEDRSMVEVLQRQIEQELTLHLDTTVTSVRKAAKGIEVTVKTGEESRVIETDAVLVAVGRKPRIDALRLDRAGVHVEKGYVQVDGSLRTNQRHIFAVGDTIQSLPFTHVAGLEGKTVVTNALFGLRTKPDYRAVPWVTFTTPELFHLGLTEEEARQKYSDIKVYETGLDEVDRFVINGRTEGHVKLIADKRGKLIGAHAIGEQAGEWMQEVVYAMARKDKVGQLSRVVHPYPIRGAAVQRAADLYWRERLFDGPLPKWLKRYFDWKQGE

SEQ ID NO: 3954 - protein, 202 aa, Zea mays
  unsure (1)..(202): unsure at all Xaa locations
ADAWADAWADAWADAWALLPIVGGVALASLTEASFNWAGFWSAMASNVTFQSRNVLSKKLMVKKEESLDNINLFSIITVMSFFLLAPVTLLTEGVKASPPVLHPAGLNLKQVYTRSLIACXCFHAYQQVSYMILARVSPATRSVGIRVERPAVIVTSALFFRTPVSTINSLGLHLFLLLLLTIVFPFLYSQLKRLKPKPKAA

SEQ ID NO: 3955 - protein, 427 aa, Burkholderia fungorum LB400
MSAIVDIIGREILDSRGNPTVECDVLLESGTMGRAAVPSGASTGSREAIELRDGEAGRYGGKGVLKAVEHINTEISEAIMGLDASEQAFLDKTLLELDGTDNKSRLGANAMLAVSMAVAKAAAEEAGLPLYRYFGGSGAMQLPVPMMNIVNGGAHANNSLDIQEFMIVPVSQPTFREALRCGAEVFHALKKILSDRGMSTAVGDEGGFAPNFGSNDECLSTILQAIEKAGYRAGEDVLLALDCAASEFYHDGKYQLAGEGLQLSSTEFTDYLANLADKFPIVSIEDGMHESDWAGWKTLTDKLGKKVQLVGDDLFVTNTRILKEGIEKGIANSILIKINQIGTLTETFAAIEMAKRAGYTAVISHRSGETEDSTIADIAVGLNAGQIKTGSLSRSDRISKYNQLLRIEEDLGDIASYPGKSAFYNLR

SEQ ID NO: 3956 - protein, 354 aa, Nicotiana tabacum
DPHTVDVDGKLYSAKNILISVGGRPFIPDIPGSEYAIDSDAALDLPTKPNKIAIVGGGYIALEFAGIFNGLKSEVHVFIRQKKVLRGFDEEIRDFVGEQMSLRGIEFHTEESPQAIIKSADGSLSLKTSRGTVEGFSHIMFATGRRPNTKNLGLETVGVKMTKNGAIEVDEYSRTSVPSIWAVGDVTDRINLTPVALMEGGALAKTIFADEPTKPDYRNVPAAVFSQPPIGQVGLMEEQAIKEFGDVDVYTANFRPLKATISGLPDRVFMKLIVCAKTSKVLGLHMCGDDAPEIVQGFAIAVKAGLTKADFDSTVGIHPTSAEEFVTMRTPTRKVRSSPSEGKAEHDIKAAAGV

SEQ ID NO: 3957 - protein, 187 aa, Oryza sativa (japonica cultivar-group)
MAKPSGGGLLDLEHHFAFYGAYHSNAVNVFIHTLFVWPIFLTALLLLHLAAPSAHAAAAGAAVYGAFYLLLDRRAGALAALLCFLCWAASAALAARLGFSAGWKVVLVAQLFCWTMQFIGHGVFEKRAPALLDNLVQAFLMAPFFVLLEALHKFVGYEPYPGFHAKVQKLIDEARKEWEDKKAKKMT

SEQ ID NO: 3958 - protein, 344 aa, Bacteroides thetaiotaomicron VPI-5482
MKSVIVPAPGKIEIREVETPVINAYQALVKTEMVALCNATDSKLIAGHFPGVDTYPLALGHENAGIVVAVGEKVRNFKVGDRAIGGLISDFGAQGINSGWGGFSEYVVVNDFEVLKEEGLATPEQGCWDSFEIQNSVPAHVQPEEAVISCTWREVLGAFKDFNLTPGKKVIVVGSGPVGLSFVKLGKLFGLGQIDIVDMLPAKLEVARRMGADNGYTPAEISTPEFIAAAGRSYDAVIDAVGLDVVVNSVLPLVKMGGDVCVYGVMTKNPTFDLSKAPYNFDLHMHQWPTRSEEKAAMTTLAQWIEEGTLSASDFITHRFKIEEIEEAFAAVKRGEVLKCVLTF

SEQ ID NO: 3959 - protein, 380 aa, Oryza sativa
MVAGAEVMHQVVPLLEASFHRRCSVKGVDEVSPPVEEMSPEAASEAAIEVPELMVKAPVESLQFSPNIRSGSFADIGPRRYMEDEHIRIDDLSGHLGSLLMCPAPNAFYGVFDGHGGPDAAAYMKRHAIRLFFEDSEFPQALEEDESFYESVEKSIHNAFLSADLALADDLAISRSSGTTALAALIFGRQLLVANAGDCRAVLCRKGVAVEMSRDHRPTYDAEHERITECGGYIEDGYLNGVLSVTRALGDWDMKMPQGSRSPLIAEPEFQQTTLTEDDEFLIIGCDGIWDVMSSQHAVTIVRKGLRRHDDPERCARELAMEAKRLQTFDNLTVIVICFGSELGGGSPSSEQAPIRRVRCCKSLSSEALCNLKKWLEPNE

SEQ ID NO: 3960 - protein, 426 aa, Helicobacter pylori 26695
MLTIKDIHALEVMDSRGNPTIQASVVLSDNTKASAIVPSGASTGKREALELRDNDKTRFLGKGVLRACENVNSVIKHHLIGLEAINQAFVDERLRALDGTPNYANLGANAVLGVSMALARASAKALNLPLYRYLGGANALTLPVPMLNIINGGTHANNSIDFQEYMIMPLGFESFKEALRASAEVYHTLKKLLDGKNQLTSVGDEGGFAPNFSNNVEPLEVISQAIEKAGYKLGEEIALALDVASSELVDENFNYHLKGENKILDSHELVAYYKELVAKYPIVSIEDGLSEDDWEGWAFLSKELGRQIQLVGDDLFVTNASLLQKGIEKNIANAVLIKPNQIGTISETLETIRLAKHHAYQCVMSHRSGESEDSFIADFAVALNTGEIKTGSTARSERIAKYNRLLEIEHELKGGIYIGKELFKHG

SEQ ID NO: 3961 - protein, 430 aa, Arabidopsis thaliana
MALAMMIRNAASKRGMTPISGHFGGLRSMSSWWKSVEPAPKDPILGVTEAFLADPSPEKVNVGVGAYRDDNGKPVVLECVREAEKRLAGSTFMEYLPMGGSAKMVDLTLKLAYGDNSEFIKDKRIAAVQTLSGTGACRLFADFQKRFSPGSQIYIPVPTWSNHHNIWKDAQVPQKTYHYYHPETKGLDFSALMDDVKNAPEGSFFLLHACAHNPTGVDPTEEQWREISQLFKAKKHFAFFDMAYQGFASGDPARDAKSIRIFLEDGHHIGISQSYAKNMGLYGQRVGCLSVLCEDPKQAVAVKSQLQQLARPMYSNPPLHGAQLVSTILEDPELKSLWLKEVKVMADRIIGMRTTLRESLEKLGSPLSWEHVTKQIGMFCYSGLTPEQVDRLTSEYHIYMTRNGRISMAGVTTGNVGYLANAIHEVTKSS

SEQ ID NO: 3962 - protein, 347 aa, Streptomyces avermitilis MA-4680
MRATTIHAPYDMRVEDVPEPVVRQPTDAVVRVLRACICGSDLWAYRGEAARQPGQRIGHEFLGIVEETGSEVTGVRRGDLVVAPFMWSDGVCDYCREGLTTSCEHGGFWGSVGHDGGQGEAVRVPYADGTLVQLPKDAASDEHLLSALLTLSDVMGTGHHAALGAGARPGATVAVVGDGAVGLCAVLAAKRLGAERIIALGRHEVRTDIARRFGATDVVAERGEAAVEAVRELTRGQGAHCVVEAVGTEQSMRTAVDITRDGGAIGFVGVPHGSGTGLDLGVMFDRNIALRGGVAPVRAYIPELLPDILAGRIDPSPVFDRTVDLEGVPEGYKAMDERTALKVLVTN

SEQ ID NO: 3963 - protein, 499 aa, Leuconostoc mesenteroides subsp. mesenteroides ATCC 8293
  unsure (1)..(499): unsure at all Xaa locations
MKAAVWHGVKDVRVEDVELKPTKSNEVVVRVAYAGICGSDLHEYLEGPVFIPVDQPDELTGGQAPLTMGHEFSGVIEKVGPDVANFKVGDHVSINPTVTKGISSDDLDVYDGYSFIGLSTDGGFTSYVNVPEDNLYHLPEEFSLKLAATIEPTAVAVQAIKEADLRFGEKVVIFGAGPIGVLVAAAAKAAGATKIVAVDLSEIRLRKALEMGATDVINPSQVPDTVAAIKNIIPGGADASFEVAGVQPTFEQAIDATRPRGSVVIVSIFAKPISFNPMQLMNAGVKLTTTIAYSKETFQQTVALVSSGQINVEPVITDTISLDSIVSDGFESLTSDKSQAKXXXXXXXXXXXXXXXXXXXXXXXXXXXXXXXXXXXXXXXXXXXXXXXXXXXXXXXXXXXXXXXXXXXXXXXXXXXXXXXXXXXXXXXXXXXXXXXXXXXXXXXXXXXXXXXXXXXXXXXXXXXXXXXXXXXXXXLEHKAIISWHNGFYRCFITDCFCW

SEQ ID NO: 3964 - protein, 145 aa, Neurospora crassa
MPDFGEHVDNGIFEQILEMDDDDKREFSKSLVTNFFDQAEETFVKIEEVLNNEKLDNGKRLETLSSLGHFLKGSSATLGFNKIRDSCQIIQQYGHKLTVDGAAEPNEQVCLEKIQAALKTARNDKNVLADMMLNETHGFFQPDDE

SEQ ID NO: 3965 - protein, 347 aa, Sinorhizobium meliloti 1021
MDATDSPLDWVLTMAPYRRDAEHLEALLAQNGLPVRRAEGVEELTALLEQGPGVLVATHEALNPEVLEVIRRYLIDQPEWSEMPLVILLDRAVPQARVRAELSAAWPRSRQLYYQRPVTTLELLSGIQSILLARLRQRDIRDRIEREIELRRELNHRVKNILASISSIFQMTRRRAVSLDEFAEDFAGRLAALANVHSAVFQADGEAVEFSSVVELTFSPYRVRGTDRLVFTGPTVLLRPDAATTLALCLHELATNALKYGALSTPEGRVSLQWSVSEEADLLSLEWVESGGPSVSEPSRSGYGTRYIRSALSSQFGTPPVILFHPQGLRCIVSGPLSRVSPRQPEV

SEQ ID NO: 3966 - protein, 501 aa, Oryza sativa
MARHHGNHSLLPEMVQPNNEQLNQPLPLGQKLFVHAGNDAALKIGPSYHGNVAIRSNDLPSSSRVAQYSGHRVKNTGTLHNSYVHYPAGSSGGHVSYNPQTEPVITYPHRSEGEFARGSSQIDNRTAAVKRKNPVIYPEYSINGDGYCAGSSSSTQFSNYPQPAPFSESLHRQMPPSVGPINWNDQSLVNQEGSQRNVRARHNFNNISLEPRPVHSTSNVSQSTSMKRNGPSFSTRMRTMPSGASGMHSGEMPYTMGSSNSSVPVPTLQGSSSSAIFASGVFAPRHVHGDTVPSYIHLPSVASSSSTAIPHEVIIPSYQPATSATTSTPMRASQPLPVRAVASSRHARNVLIGHANSGRNRRARSSYYGIQPLMIDAQQLIMMQQFALRESREAQDPHRAMRLDIDNMSYEDLLALGESIGNVCTGLVDEKISGCVREVIYCSSDEQQNDQDDGKCAICLEEYKDNSLLGILKCNHDFHTDCVKKWLKEKNSCPICKSAAA

SEQ ID NO: 3967 - protein, 392 aa, Pseudomonas aeruginosa PAO1
MWFNGFLDLSPWQLVAVTLVLTHITIVSVTVYLHRYSAHRALDLHPALQHFFRFWLWLTTGMNTREWTAIHRKHHAKCETVEDPHSPVHKGLFTVLRAGAELYKAEAKNQDTLRIYGKNCPDDWIERNLYSRFPIGGVVLMALIDLALFGALGLTVWAVQMVWIPFWAAGVVNGLGHAVGYRNFECRDAATNLVPWGILIGGEELHNNHHTYPNSAKLSVKKWEFDLGWAWIKLFSFLRLARVARVAPIAHRVEGKHSLDMDTAMAILNNRFQIMAQYRKLVIAPLVKQEVAKADESVRHLFRRAKRLLSRETSLLQDRHHVRIDSMLAHSQALKVIYEKRLALQQIWAKTSANGHDMLAAIKDWVHEAEASGIQSLKEFAAQLKTYSLRPA

SEQ ID NO: 3968 - protein, 187 aa, Zea mays
  unsure (1)..(187): unsure at all Xaa locations
ITMDPTKFRPSSSHDTTVTTTNAGAPVWNDNEALTVGPRGPILLEDYHLIEKVAHFARECIPERVVHARGASAKGFFECIHDPTSLTCANFXLRAPGVRTSVIARFSTVXIHDRGSPENNPRPRAGFAGKFYTPRGXWNLLANNFPVFFLRYRLQFPPKGFRGSKPQPRGSHGARRNGRGDSNFPDR

SEQ ID NO: 3969 - protein, 194 aa, Thermosynechococcus elongatus BP-1
MPILAQAVLASHNAGKVKEFQGWLQPWIGELVALPAAIEIAETADSFVANACLKAATAAKVMGEWAIADDSGLAVHALQGAPGIYSARYGATDAERIERLLREMADVSDRAAEFICVIALARPDGTIAVTTEGRCAGEILTAPRGQGGFGYDPVFWVPSQQRTFAEMSPVEKQQVSHRGQALQRLREYFQTLNP

SEQ ID NO: 3970 - protein, 510 aa, Trichodesmium erythraeum IMS101
MTETIQRKMKLNSFDKFKAEKDGLAVKTEIEHFAKIGWEAIDKTDRNHRLKWLGVFFRPVTPGKFMLRMRMPNGMLSSQQMRVLAGIVQRYGDDGNADITTRQNLQLRGIAIEDIPDIFNRLEKVGLTSVQSGMDNVRNITGSPVAGIDATELYDTRELIKQVQDMITDNNKGNFEFTNLPRKFNIAIAGCRDNSVHAEINDIAFIPAYKNDKFGFNVLVGGFFSAKRCEAAIPLNAWVEPNQVIALCRAILEVYRDYGLRENRQKSRLMWLIDEWGLTKFRSQVEKQIGLTLETEALKDEILWEKRDHIGIYKQKQPGLNYIGLNIPVGRLYAVDMFDLARLAEVYGNGEIRLTVEQNVIIPNVPDSRLETFRSEPLLKKFSFEPQPLTRAVVSCTGSQFCNFALIETKNRALAIAKELETELSIPKPVRIHWTGCPNSCGQPQVADIGLMGTKVRKNGKMVDGVNLYMGGKVGKDAQLGSCVQKSIPCEDLKPILRSLLIKNFAAQPK

SEQ ID NO: 3971 - protein, 480 aa, Arabidopsis thaliana
MAVSSSSFLSTASLTNSKSNISFASSVSPSLRSVVFRSTTPATSHRRSMTVRSKIREIFMPALSSTMTEGKIVSWIKTEGEKLAKGESVVVVESDKADMDVETFYDGYLAAIVVGEGETAPVGAAIGLLAETEAEIEEAKSKAASKSSSSVAEAVVPSPPPVTSSPAPAIAQPAPVTAVSDGPRKTVATPYAKKLAKQHKVDIESVAGTGPFGRITASDVETAAGIAPSKSSIAPPPPPPPPVTAKATTTNLPPLLPDSSIVPFTAMQSAVSKNMIESLSVPTFRVGYPVNTDALDALYEKVKPKGVTMTALLAKAAGMALAQHPVVNASCKDGKSFSYNSSINIAVAVAINGGLITPVLQDADKLDLYLLSQKWKELVGKARSKQLQPHEYNSGTFTLSNLGMFGVDRFDAILPPGQGAIMAVGASKPTVVADKDGFFSVKNTMLVNVTADHRIVYGADLAAFLQTFAKIIENPDSLTL

SEQ ID NO: 3972 - protein, 419 aa, Hordeum vulgare
MTVDRKGAQAAAAAAATSAPFEIPALQPGRTCGAEESTRSHVLVEPIGSSDLLCNEYALLAQQNPKGDALPVASILRKKRPRRSRDGPNSVSETIKRWKEVNQQLEHDPQGAKRARKPPAKGSKKGCMQGKGGPENTQCGFRGVRQRTWGKWVAEIREPNRVSRLWLGTFPTAEVAAQAYDEAARAMYGPLARTNFPVQDAQAAPAVAVPVATEGVVRGSSASCESTTTSNHSDVASSSHNKQRQIQAPEISSRSDLLESTQSVEYSQQQSVPDAVSSIAMSTSEEDVYEPLEPISNLPDGEADCFDIEELLKLMEADPVEVDPVTVGSWNEFQDAGANARGSWNEFQCARANTGVSWNANAGMEMGQQEPLYLDGLDQGMLEGMLHSDYPFPVWISEDRPMHNPAFHDAEMSEFFEGL

SEQ ID NO: 3973 - protein, 309 aa, Saccharomyces cerevisiae
MSAVFNNATLSGLVQASTYSQTLQNVAHYQPQLNFMEKYWAAWYSYMNNDVLATGLMFFLLHEFMYFFRCLPWFIIDQIPYFRRWKLQPTKIPSAKEQLYCLKSVLLSHFLVEAIPIWTFHPMCEKLGITVEVPFPSLKTMALEIGLFFVLEDTWHYWAHRLFHYGVFYKYIHKQHHRYAAPFGLSAEYAHPAETLSLGFGTVGMPILYVMYTGKLHLFTLCVWITLRLFQAVDSHSGYDFPWSLNKIMPFWAGAEHHDLHHHYFIGNYASSFRWWDYCLDTESGPEAKASREERMKKRAEKNAQKKTN

SEQ ID NO: 3974 - protein, 734 aa, Trichodesmium erythraeum IMS101
MKTTKTACPYCGVGCGLEVSPPATPGKVTNRDSKGNPTWQVRGDRSHPSSQGKVCLKGATVGEALDKSRLKYPMMRNTLDEAFRRVTWEEAFRRIVNQIQKVRFSQGPDAICMYGSGQFQTEDYYVAQKLLKGCLGTNNFDANSRLCMSSAVSGYIQSFGSDGPPCCYDDLEKTDCAFLIGTNTAECHPIIFNRLRASKKRNKKVKMIVVDPRRTKTAEVADLHLAIRPGTDIDLLNGIANLLIQWGLLDAMFIDECTKGFPEYVNIIRQYPPGLVARHCGIRLDELETAARYWGKSERVLSLWSMGMNQSSEGTAKVRTLINLHLMTGDIGKPGTGPFSLTGQPNAMGGREAGGLAHLLPGYRMVKNSQHRAEVEKLWELTPGKISDVPGRSAWEMIMALERKEIGCLWIAATNPAVSMPDLKRTKAALLRSPFTIYQDAYYPTETAEYAHLLLPAAQWGEKTGTMTNSERVVTLCPAFREPLREAKADWEIFAEVGRRLGFTNHFNFADSEAVRAEFLELTRDRPCDMTGITYQRLQEKGPTQWPCPDSSGVSQERLYTDFRFNTPDGRARFAAYYSQGLAEPPNPDYPFILTTGRLYGHWHTQTRTGRIEKIRKMYPLPFMEIHPQDAQRLEISDNDWVEVRSRRGYSRFPAKITKAITPGTVFVPMHWGALWAHQAEANTLTHPQACPESGQPELKACAVQLQPVKFQAAPIALWASKKSTPLGEVKSSK

SEQ ID NO: 3975 - protein, 292 aa, Bacillus subtilis subsp. subtilis str. 168
MKKVRKAIIPAAGLGTRFLPATKAMPKEMLPIVDKPTIQYIIEEAVEAGIEDIIIVTGKSKRAIEDHFDYSPELERNLEEKGKTELLEKVKKASNLADIHYIRQKEPKGLGHAVWCARNFIGDEPFAVLLGDDIVQAETPGLRQLMDEYEKTLSSIIGVQQVPEEETHRYGIIDPLTSEGRRYQVKNFVEKPPKGTAPSNLAILGRYVFTPEIFMYLEEQQVGAGGEIQLTDAIQKLNEIQRVFAYDFEGKRYDVGEKLGFITTTLEFAMQDKELRDQLVPFMEGLLNKEEI

SEQ ID NO: 3976 - protein, 139 aa, Glycine max
  unsure (1)..(139): unsure at all Xaa locations
VLLSLNVPLYKHIANIAGTKKLVLPVPAFHVINGAPHAGNKLAMQEFMVLPVGTSLFFFSLKXGVEVYHNXXPLIKKXYGQDAANGGDEGGFCPKLPQNQRNACELVQHRPSPKPGTTGQRLSFGTWLAAGFLNFNHGR

SEQ ID NO: 3977 - protein, 473 aa, Anabaena variabilis ATCC 29413
MYNKITPPTTGEKITFKNGEPVVPDNPIIPFIRGDGTGIDIWPATEKVLDAAVAKAYQGKRKISWFKIYAGDEACDLYGTYQYLPEDTLTAIREYGVAIKGPLTTPVGGGIRSLNVALRQIFDLYACVRPCRYYAGTPSPHKNPEKLDVIVYRENTEDIYLGIEWKQGSEIGDRLISILNKELIPATPEHGKKQIPLDAGIGIKPISKTGSQRLVRRAIKHALTLPKHKQQVTLVHKGNIMKYTEGAFRDWGYELATSEFRQETVTERESWILSNKEKNPNISLEDNARQIDPGFDALTPEKKAQIVKEVETVLNSIWETHGNGKWKEKVLVNDRIADSIFQQIQTRPDEYSILATMNLNGDYLSDAAAAIVGGLGMGPGANIGDSCAVFEATHGTAPKHAGLDRINPGSVILSGVMMLEYLGWQEAADLIKKGLSDAIANSQVTYDLARLLEPPVEPLKCSEFADAIIKHFG

SEQ ID NO: 3978 - protein, 275 aa, Escherichia coli
IGQALALLLKTQLPSGSELSLYDIAPVTPGVAVDLSHIPTAVKIKGFSGEDATPALEGADVVLISAGVARKPGMDRSDLFNVNAGIVKNLVQQVAKTCPKACIGIITNPVNTTVAIAAEVLKKAGVYDKNKLFGVTTLDIIRSNTFVAELKGKQPGEVEVPVIGGHSGVTILPLLSQVPGVSFTEQEVADLTKRIQNAGTEVVEAKAGGGSATLSMGQAAARFGLSLVRALQGEQGVVECAYVEGDGQYARFFSQPLLLGKNGVEERKSIGTLSA

SEQ ID NO: 3979 - protein, 417 aa, Candida maltosa
MSLSNKLSVKDLNVTGKRVFIRVDFNVPLDGKTITNNQRIVAALPTIKYVEEQKPKCIILASHLGRPNGERNEKYSLAPVAAELEKLLGQKVTFLDDCVGPEVTKAVDSATEGQIFLLENLRFHIEEEGSAKDKDGKKTKADPEAVKKFREQLTSLADVYVNDAFGTAHRAHSSMVGLEVPERAAGFLMSKELEYFAKALENPQRPFLAILGGAKVSDKIQLIDNLLDKVDMLIVGGGMAFTFKKVLNNMPIGDSLFDEAGAKNVENLVAKAKKNNVELILPVDFVTADKFDKDAEVSTADDVTGIPDKWMGLDCGPKSRKLFADAVAKAKTIVWNGPPGVFEFDKFAEGTKSLLDDAVKSAEVGNIVIIGGGDTATVAKKYGVVDKLSHVSTGGGASLELLEGKELPGVTALSNKA

SEQ ID NO: 3980 - protein, 403 aa, Glycine max
MKNGIMECSVCHSKLVSPSAKTISRAYDRHKSRISSKQRALNVFLVVGDCVLVGFQPILVYMSKVDGKFNFSPISVNFLTEITKVFFAIVMLLLQARHQKVGEKPLLSISTFVQAARNNVLLAVPALLYAINNYLKFIMQLYFNPATVKMLSNLKVLVIALLLKVIMKRRFSIIQWEALALLLIGISVNQLRSLPEGTTALGLPVTMGAYIYTLIFVTVPSLASVYNEYALKSQYDTSIYLQNLFLYGYGAIFNFLGILGTVVVKGPSSFDILQGHSKATMLLIANNAAQGILSSFFFKYADTILKKYSSTVATIFTGIASAVLFGHTLTMNFVIGISIVFISMHQFFSPLSKVKDEQNGVLELHDVHDKQRSKESFINMAAGANEEATHRVGHDERQPLLPS

SEQ ID NO: 3981 - protein, 75 aa, Zea mays
PVPPFDEVTPVPNRIQRGGQICFSCQQSLYNPDGQSNLHVRCPKCNQHFCLDCDIYIHESLHNCPGCESQRSIAS

SEQ ID NO: 3982 - protein, 411 aa, Pseudomonas aeruginosa UCBPP-PA14
MAESRPARRFARIDRLPPYVFNITAELKMAARRRGEDIIDLSMGNPDGPTPPHIVEKLCTVAQREDTHGYSTSRGIPRLRRAISHWYRDRYDVQIDPESEAIVTIGSKEGLAHLMLATLDHGDTILVPNPSYPIHIYGAVIAGAQVRSVPLVPGIDFFNELERAIRESIPKPRMMILGFPSNPTAQCVELDFFERVVALAKQYDVMVVHDLAYADIVYDGWKAPSIMQVPGAKDIAVEFFTLSKSYNMAGWRIGFMVGNPELVSALARIKSYHDYGTFTPLQVAAIAALEGDQQCVRDIARQYQQRRDVLVKGLREAGWMVENPKASMYVWAKIPEPYAHLGSLEFAKKLLQDAKVSVSPGIGFGDYGDDHVRFALIENRDRLRQAVRGIKSMFRADGLLSPQRKVDSLAE

SEQ ID NO: 3983 - protein, 175 aa, Triticum aestivum
  unsure (1)..(175): unsure at all Xaa locations
MAPAVMASSATTVAPFQGLKSTAGLPVSRRSSGSLGSVSNGGRIRCMQVWPIEGIKKFETLSYLPPLSTEXALLKQVDYLIRSKWVPCLEFSKVGFVFREHNSSPGYYDGRYWTMWKLPMFGCTDATQVLNEVEEVKKEYPDAYVRVIGFDNLRQVQCVSFIAFRPPGCEESGKA

SEQ ID NO: 3984 - protein, 458 aa, Oryza sativa
MASVAVPEWLNKGDNAWQMLSATLVALQGFPGLALFYAGAVTRKCALTSAFMALYAMAATMPCWALWAHNMAFGHRLLPFVGRPAPALAQHYMLTQALLPFTLHLHSNGEVETAAVAPLYPSASMVFFQWASAGVTVGLVAGAVLGRMSVKAWMAFVPLWTTLSYTVGAYSIWGGGFLFHWGVMDYSGGYVVHLAAGVSGYTAAYWVGPRRKEEEEMTMAGGGNLVAMVAGAGILWMGWTGFNGGDPFSANTDSSVAVLNTHICTTTSILAWVCCDIAVRGRPSVVGAVQGMITGLVCITPAAGLVQGWAALLMGVASGTLPCYTMNAAMSFKVDDTLGILHTHAVSGVLGGVLTGVFAHPTLCDMFLPVTGSRGLVYGVRAGGVQVLKQVAAALFVAAWNVAATSIILVVVRAFVPLRMTEDELLAGDIAVHGEQAYYFSSGTNCSLSHETIEVGNS

SEQ ID NO: 3985 - protein, 250 aa, Pseudomonas aeruginosa PAO1
MSRLPLIGVTACTKQIGLHPYHIAGDKYLRAVVNGAGGLPLIIPALGESIDQAALLDSVDGLLFTGSPSNVEPRHYSGPASEPGTLHDSDRDATTLPLVRAAIDAGIPVLGICRGFQEMNVAFGGSLHQKVHEVGTFMDHREPADQPLEVQYAPRHAMHVQPGGVLAGIGLPSEFQVNSIHGQGVDRLAPGLRVEALAPDGLVEAISVEGAKAFALGVQWHPEWQVLTNPNYLAIFQAFGKACSKRAGQR

SEQ ID NO: 3986 - protein, 366 aa, Bacillus caldotenax
MGNYRIAVLPGDGIGKEVTSGAVEVLKAVGIRFGHEFTFEYGLIGGAAIDEAGTPLPEETVRLCRESDAVLLGAVGGPKWDDNPPHLRPEKGLLAIRKQLDLYANLRPVVCYDSLVSRSPLKPDLVQGVDFVIVRELTGGIYFGQPSAVVENGEEKAVDTLLYKKEEIERIVRMAFELARGRRKKVTSVDKANVLSSSRLWREVAEEVANEFPDVTLEHMLVDMRMQLIRAPKQFDVIVTENMFGDILSDEASMLSGSLGMLPSASLSASGPSLYEPVHGSAPDIAGMNKANPIAAILSAAMMLRLSFGLTAEAGGRARVWQALALGSGSRLGQRRPHLSTNEMVEEIKAAVLDYTAIAQIMTVYA

SEQ ID NO: 3987 - protein, 273 aa, Gloeobacter violaceus PCC 7421
MTAQSPATQATPISWVFVGFMAFIHLGALAALWQFSWSALALAIFLHWALGCLGITLGFHRLLSHRSFTVPKPLEYFLALLGTLCLQGGPVLWVAHHRLHHAHSDTEADPHDSNRGFWWSHWGWMFYMPEERLNFDHYSRYAKDLARDPVHRFLNRNMIPLQLAFAALLYLLGGWPFVLWGIFVRLVVVFHCTWLINSACHQWGYRSHQTDDHSTNLWWAAILAYGEGWHNNHHAMPRSARHGLAWWEIDVTWSVIWILSKLGLARNVQLPTS

SEQ ID NO: 3988 - protein, 333 aa, Saccharomyces cerevisiae
MSEPSEKKQKVATSSLEQLKKAGTHVVADSGDFEAISKYEPQDSTTNPSLILAASKLEKYARFIDAAVEYGRKHGKTDHEKIENAMDKILVEFGTQILKVVPGRVSTEVDARLSFDKKATVKKALHIIKLYKDAGVPKERVLIKIASTWEGIQAARELEVKHGIHCNMTLLFSFTQAVACAEANVTLISPFVGRIMDFYKALSGKDYTAETDPGVLSVKKIYSYYKRHGYATEVMAASFRNLDELKALAGIDNMTLPLNLLEQLYESTDPIENKLNSESAKEEGVEKVSSINDEPHFRYVLNEDQMATEKLSDGIRKFSADIEALYKLVEEKM

SEQ ID NO: 3989 - protein, 498 aa, Lycopersicon esculentum
MAIVTVIGATIGILIALFFVKSFYTLWWWPKMIEKKLKKEGIHGQPYQFLFGNLKEMTRMSREAKKKPLVNHDIVPWVNPFILHLSKTYERLFVMWAGPTPRITVTDPKLIKEVVNRHNEFQKPQANAFIDMFVTGLASYNGQKWDHHRKILNPAFHIEKIKRLYPAFCECCDEMINRWEDLVSKTGSCELDVADEFLNVGGDVISRAAFGSNIEEGRTIFILQKEQCDLILASPFTLFFPLLRFFPTESNRRARYIYKKVLSLIKGIIEKKEDAMRRGVSESDDILGLLLKGGLSTTEIIEECKEFYLAGQDTTTALLSWTLVALSMHPEWQDKARNEVFQVLGKNKPKFEDLNQLKIMNMIFQEVLRLYPALTLMRSTSKDTKLGEMTIPAGVQIFVPIYIAHRDPQVWGDDALIFNPNRFSEGVSKAAKEPLYFPFGWGPRMCIGNNFGMAEAKLVLSQILQRFWFKLSPSYVHAPQAILVMKPQYGAQIILNKL

SEQ ID NO: 3990 - protein, 315 aa, Oryza sativa (japonica cultivar-group)
MMKESYMEVLPPAPAHYFVGQAAAAGGWFLPDRRGGGGAWSQEENKVFEQALAALDRNDPERWERVALLLPGKTVADVMTHYDDLENDVCFIEAGLVPFPHYGAAGGGGGSGFTLDWDGGDDPAGLGFKRSCYMVGGKRARGPDQERKKGVPWTEEEHKLFLMGLKKYGRGDWRNISRNFVTSRTPTQVASHAQKYFIRLNSGGKDKRRSSIHDITTVNLPDDDHGNPSPSPPPSVLTAHSSSSAAAVSEQFGVLVDGKPPPPPLGRGAGHHHFMPHPYAQVKIEAGNSHVAGGGRLDDSVLVQMQCGQLMQPLG

SEQ ID NO: 3991 - protein, 139 aa, Triticum aestivum
  unsure (1)..(139): unsure at all Xaa locations
MAPTVMASSVTSVAPFQGLKSTAGLPVSRRSNGASLGSVSNGGRIRCMQVWPIEGIKKFETLSYLPXLNTXXLLKQVDYLXRSXKWVPCLRXSTRVGFXFREQNASPGXTKGRYWXMWXKLPMFRMHPNPRKNQGGGKE

SEQ ID NO: 3992 - protein, 455 aa, Triticum aestivum
MPTANVRAAQPGADRRLSTLVRHLLPSSPRTSAATATSADSSLQPFPTMASPSVFAGIAQGPEDPILGVTVAYNKDPSPVKVNLGVGAYRTEEGKPLVLNVVRRAEQMLIQNESRVKEYLPITGLADFNKLSAKLIFGADSPAIQENRVATVQCLSGTGSLRVGGEFLARHYHERTIYIPQPTWGNHPKVFTLAGLTARSYRYYDPATRGLDFQGLLEDLSSAPSGAIVLLHACAHNPTGVDPTLEQWEQIRQLMRSKALLPFFDSAYQGFASGSLDKDAQSVRMFVADGGELLMAQSYAKNMGLYGERVGALSIVCGSADIAVKVESQLKLVIRPMYSNPPLHGASIVATILKDSAMFDEWTLELKAMADRIISMREQLFNALKIRETPGDWSHIIKQIGMFTFTGLNSDQVAFMRQEYHIYMTSDGRISMAGLSSRTVPHLADAIHAAVTKLK

SEQ ID NO: 3993 - protein, 317 aa, Actinobacillus pleuropneumoniae serovar 1 str. 4074
MKVALLGAAGGIGQTLALLLKLRLPVGTDLALYDISPVTPGIAVDISHIPTSVSAVGYSGEDPSEALKGANLVIITAGVARKPGMTRADLFNINADIVKNLVEKVAEVCPKACIGIVTNPVNTLVPIAAEVLRKAGVYDKRKLFGVTTLDVVRAKTFTSELKEKHVETVKVPVIGGHSGPTILPLLSQALSEGLPLSFTQEEIEALTYRIQNAGTEVVEAKAGGGSATLSMAESGARFAVAVFKALLGEDCVRYAYVESKEGSGYPEFFAHPVRFGLTGVEELLPIGKLSEYEQAKLGELKPVLEADIALGKNFVNP

SEQ ID NO: 3994 - protein, 457 aa, Bacillus subtilis subsp. subtilis str. 168
MKKQSNIWLYFFGALGGALYGYDTGVISGAILFMKKELGLNAFTEGLVVSSLLVGAILGSGAAGKLTDRFGRKKAIMAAALLFCIGGLGVALAPNTGVMVLFRIILGLAVGTSTTIVPLYLSELAPKHKRGALSSLNQLMITVGILLSYIVNYIFADAEAWRWMLGLAAVPSLLLLIGILFMPESPRWLFTNGEESKAKKILEKLRGTKDIDQEIHDIKEAEKQDEGGLKELFDPWVRPALIAGLGLAFLQQFIGTNTIIYYAPKTFTNVGFGNSASILGTVGIGTVNVLMTLVAIKIIDKIGRKPLLLFGNAGMVISLIVLALVNLFFNNTPAASWTTVICLGVFIVVFAVSWGPVVWVMLPELFPLHVRGIGTGVSTLMLHVGTLIVSLTYPILMEAIGISYLFLIYAAIGIMAFLFVRFKVTETKGRSLEEIEQDLRDKNGQGGAAGKQQTVGT

SEQ ID NO: 3995 - protein, 457 aa, Wolbachia endosymbiont of Drosophila melanogaster
MNEYDITVIGSGPGGYIAAIRAAQLGFKTAIVEKEKNLGGICLNWGCIPTKSLLRASEVYRLIKRSKEFGIEVKGANFDIQSIVKYSRNVVDKLSSGVAYLMKKNNIKVHQGFGKLAGNGTIKVVSDKEEQEIVSKHIILATGVRARNLPGIEADGDLIWNAQHAMTPERLPKSLLIIGSGAIGIEFASFYSTLGVDVTIIEIKSTILPLEDKDISDLAQEIFTKQGIKIYTNSSVKALTKSKDSAQVLLSSGESKEFERVIVAVGIQANIENIGLENTKIKLSPSGFIETNEWYETSESNVYAIGDVAGPPCLAHKASHEAVICIEKIAGKNAHALKKECIPNCTYSHPQIASIGLTEEQAIKGGYDIKIGKFHSNFNGKSVALSETEGLVKTIIDKKTGEILGSHMIGAEVTELISNFALAKQLEGTDFDIKSTIFPHPTISEMIHESVLAADVK

SEQ ID NO: 3996 - protein, 497 aa, Spinacia oleracea
MAFPIPARQLFIDGEWREPIKKNRIPVINPSTEEIIGDIPAATAEDVEVAVVAARRAFRRNNWSATSGAHRATYLRAIAAKITEKKDHFVKLETIDSGKPFDEAVLDIDDVASCFEYFAGQAEALDGKQKAPVTLPMERFKSHVLRQPLGVVGLISPWNYPLLMATWKIAPALAAGCTAVLKPSELASVTCLEFGEVCNEVGLPPGVLNILTGLGPDAGAPLVSHPDVDKIAFTGSSATGSKVMASAAQLVKPVTLELGGKSPIVVFEDVDIDKVVEWTIFGCFWTNGQICSATSRLLVHESIAAEFVDKLVKWTKNIKISDPFEEGCRLGPVISKGQYDKIMKFISTAKSEGATILYGGSRPEHLKKGYYIEPTIVTDISTSMQIWKEEVFGPVLCVKTFSSEDEAIALANDTEYGLAAAVFSNDLERCERITKALEVGAVWVNCSQPCFVQAPWGGIKRSGFGRELGEWGIQNYLNIKQVTQDISDEPWGWYKSP

SEQ ID NO: 3997 - protein, 293 aa, Saccharomyces cerevisiae
MESTSGERSENIHEDQGIPKVILPADFNKCSRTDLVVLISRMLVSLIAINENSATKKSDDQITLTRYHSKIPPNISIFNYFIRLTKFSSLEHCVLMTSLYYIDLLQTVYPDFTLNSLTAHRFLLTATTVATKGLCDSFSTNAHYAKVGGVRCHELNILENDFLKRVNYRIIPRDHNITLCSIEQKQKKFVIDKNALGSLDLDSYSYVNRPKSGYNVLDKYYRRIVQLVGSFNASPDKSRKVDYVLPPNIDIVSESGSQTTQLKGSSSPNSHSSQKRYSEAKDAHIYNKRSKPD

SEQ ID NO: 3998 - protein, 222 aa, Bacillus cereus ATCC 14579
MRFFIDTANLEDIKKAYKLGVLAGVTTNPSLVAKEGVKFEDRIAEICQAVPKVESVSAEVTPDAVTAEEMIAQAEELIKINGGDKNVTIKLPMTLAGLEACRYLTEKGVKTNVTLIFTVNQALLAARAGATYVSPFLGRLDDISEDGVLLVAKIAELFDVHQLDTQIIAASVRHPDHVTRVAMAGAHIATIPYKVIEQLAMHPLTDQGIEKFAADWAKAPKL

SEQ ID NO: 3999 - protein, 827 aa, Haemophilus influenzae R2846
MNLSRRDFMKANAAMAAATAAGLTIPVKNVVAAESEIKWDKGVCRFCGTGCAVLVGTKDGRVVASQGDPDAEVNRGLNCIKGYFLPKIMYGKDRLTQPLLRMTNGKFDKNGDFAPVSWDFAFKTMAEKFKEAFKKNGQNAVGMFSSGQSTIWEGYAKNKLWKAGFRSNNVDPNARHCMASAAVAFMRTFGMDEPMGCYDDIEQADAFVLWGSNMAEMHPILWSRITDRRISNPDVRVTVLSTYEHRSFELADHGLIFTPQTDLAIMNYIINYLIQNNAINWDFVNKHTKFKRGETNIGYGLRPEHPLEKDTNYKTAGKMHDSSFEELKQLVSEYTVEKVSKMSGLDKVQLETLAKLYADPTKKVVSYWTMGFNQHTRGVWVNQLIYNIHLLTGKISIPGCGPFSLTGQPSACGTAREVGSFPHRLPADLVVTNPKHREIAERIWKLPKGTVSEKVGLHTIAQDRAMNDGKMNVLWQMCNNNMQAGPNINQERLPGWRKEGNFVIVSDPYPTVSALSADLILPTAMWVEKEGAYGNAERRTQFWRQQVKAPGEAKSDLWQLMEFAKYFTTDEMWTEDLLAQMPEYRGKTLYEVLFKNGQVDKFPLSELAEGQLNDESEYFGYYVHKGLFEEYAEFGRGHGHDLAPFDMYHKARGLRWPVVEGKETLWRYREGYDPYVKEGEGVAFYGYPDKKAIILAVPYEPPAESPDNEYDLWLSTGRVLEHWHTGTMTRRVPELHRAFPNNLVWMHPLDAQARGLRHGDKIKISSRRGEMISYLDTRGRNKPPRGLVFTTFFDAGQLANSLTLDATDPISKETDFKKCAVKVEKAA

SEQ ID NO: 4000 - protein, 281 aa, Escherichia coli
MSQTSTLKGQCIAEFLGTGLLIFFGVGCVAALKVAGASFGQWEISVIWGLGVAMAIYLTAGVSGAHLNPAVTIALWLFACFDKRKVIPFIVSQVAGAFCAAALVYGLYYNLFFDFEQTHHIVRGSIESVDLAGTFSTYPNPHINFVQAFAVEMVITAILIGLILALTDDGNGVPRGPLAPLLIGLLIAVIGASMGPLTGFAMNPARDFGPKVFAWLAGWGNVAFTGGRDIPYFLVPLFSPIVGAIVGAFAYRKLIGRHLPCDICVVEEKETTTPSEQKASL

SEQ ID NO: 4001 - protein, 1360 aa, Streptomyces verticillus
SARGEPSGAVTGRPVSGEPSGTLTGQSVPGEPSGTATDGPVPGEPSVTATGQLASGEPPMTATDIASAAASQVAALRADWRGHDYPRFVAALKMAASHCYAAALAAFLPRPDAPFTAADLLRVGTVPRHATFLSAVLPELRRHRLVGRDDSGGYRLLRTRFDDTKALRDLILRFPRYAPEGRLALHGLRVLRAAGDHRPVEHLLSDGGLADLEQLYDTGVIGRFHNRLAQALLRVVVERWPDDRPLRVLEVGAGTGGTTAALLPLLPPERTRYVFTDVSPAFLTRAEHRFAAYDFLTFRTLDLDADPAAQGLPEGGFDVVVAANALHTARSVEAAVRNVAALAAPNGLLLAVESHDPYVLAPLFGALDTFWDRTDHHERPHSPLLTADRWAALFTRCGFTDVVRTGDDTAPCRDDFSVLLATAPRRPTPHPYPYPHPSPPGPGRHWTVVAETRGELPLAREVAARLPGPGDGPAHSVEAVDDVPAHRPSTPSRGATGICLILGAHQLPEPAATVTLTTRRAALLRRITAACPRRPDGARTALTVVTRPSGALPPPERPLAPEDAAVWGVMRTLANEEPELDVRTISLDRTGRTETDARRLARELLTATGETEVALTRSGGRFAPRELPLPAGHITTTAEHATAYALEIRTPGLSYRPAWVECAPEPVGPGEVAIDVRAAALNYRDIMQAVGLLPAEADEGTFTEAGPGLECAGVVTAVGDGVTTVRPGDRVFALAPASLASRTRTVVQAVGRMPHTMSFAEAATLPVVYATVHYSLHDLARLRPGETVLVHGGAGGVGLAALRYAHLRGARVIATAGTPAKRELLRHLGADHVLDSRGLDFAAHVRDVTDGRGVDVVVNSLAGEAITRGLELLRPGGRFVELGKRDIYENQPLLLRPFRHNLAFFGVDLTSLAFDPDQGARLFAEVTRRVHDGSYRPLPHSAYPAARVAEAFRLLQHSRHVGKVVVTFDPLDEPAVVERPVTAPRFGSQGTYLVTGGTSGFGAAGARWLADRGVRRLALVSRRGPHAPEAAGLLADLAARGVTATAYAADAADPDGMRRVIRLIDATGHPVDGVLHCAMHLDDDPLADLTDERFAAVLTPKTTGAAVLERLLADRPLETFLLYSSDTTFLGNIRQAAYVAANLHLEALARQRRQRGLPAQTLAWGAIDETGYVARNDLARTLTAVGIEPLSPREALTTAGLLISQGATVAGVGRYNWARLRGVLPLLASPRCASLLPEDLQEADHTHEEILRILATMPYEEAARAVAATLARLMADVLHLDERNIDHDRRLDEYGLDSLMLAELLVSLRKRFDIDIPPLELLRSGGTITDISHLVLLRLGITADDPEPPARDAEQSVGER

SEQ ID NO: 4002 - protein, 320 aa, Vitis vinifera
MRNPASASTSKTPCCTKVGLKRGPWTPEEDELLANYVKREGEGRWRTLPKRAGLLRCGKSCRLRWMNYLRPSVKRGQIAPDEEDLILRLHRLLGNRWSLIAGRIPGRTDNEIKNYWNTHLSKKLISQGIDPRTHKPLNPKPNPSPDVNAPVSKSIPNANPNPSSSRVGEIGSNHEVKEIESNENHKEPPNLDQYHSPLAADSNENWQSADGLVTGLQSTHGTSNDDEDDIGFCNDDTFPSFLNSLINEDVFGNHNHHQQQQQQQQLQQVQQPSNVIAPLPHPAISVQATFSSSPRTVWEPAALTSTSAPLVHDQKHSMSP

SEQ ID NO: 4003 - protein, 244 aa, Listeria monocytogenes EGD-e
MKPVIGITGNRLVKGVDVFYGHRVTYTQQRYVDAIQKVGGFPIALPIDDPSVAVQAISLVDGLLLTGGQDITPQFYLEEPSQEIGAYFPPRDSYEIALVRAALDAGKPIFAICRGMQLVNVALGGSLYQDISQVETKALQHLQRVDEQLGSHTIDIEPTSELAKHHPNKKLVNSLHHQFIKKLAPSFKVTARTADGMIEAVEGDNLPSWYLGVQWHPELMFQTDPESEQLFQALVDESKKTMVK

SEQ ID NO: 4004 - protein, 367 aa, Staphylococcus aureus subsp. aureus Mu50
MKDTQLAQITLTDDSTGAIANPIHLSTAYKHPKLGQSTGFDYTRTKNPTRSTFETCFAKLEHGIASFATSSGMSAIQLICNLFKPHDEILVSFDLYGGTFRLFEFYEQQYDIKFKYVDFTDYEQVEKEITDKTVALFIEPISNPQMIAIDVKPYYQLCKAKGLLSIIDNTFLTPYLSTPLAEGADIVLHSATKYIGGHNDVLAGVVTVKDESLAQQLFDFHNMTGATLSPIDSYLLLRGLKTLHLRIERAQSNARKLAKKCQSLQAIDEVLYSGQTGMLSLRLNKAYSVAKLLENLDICIFAESLGGTETLVTFPYTQTHVDMPDAEKDKRGIDEYLIRLSLGVENYEDIERDIIQALDKAQIGEIV

SEQ ID NO: 4005 - protein, 371 aa, Zea mays
MCGGAIIFDYIPARRRVSTADFWPGSEADAEDIHASHSPDPQRAPPPRAKAKPGRRKNQYRGIRQRPWGKWAAEIRDPVKGVRVWLGTYPTAEEAARAYDAEARKIRGKKAKVNFPDDDATGTRHRPTNAANAARLVAPPPPPKACADEMFNNLKNDDGDNNNNDDLFAMFAFGDNKKEAVPAAKPAAAEGGSGSGSGSFLVPAPAMAAAVPGNKRRSSATNIMVSVSDDQSSNSYGSGSSDLVGSWSWDDAAAAAAMTSDYTSSVFAPASYSYMQGGAPKRMRSSYGGAPPSLAHDAAMPGFGLDKVSYHHYQALPPYYVGSSNASVGNLGLLQQADDAPAPQDGARAGDIWSLDELLMLAAGGSLESSA

SEQ ID NO: 4006 - protein, 510 aa, Listeria monocytogenes EGD-e
MSKSPVAIIILDGFGKRAETVGNAVAQANKPNFDRYWADFPHGELKAAGLDVGLPEGQMGNSEVGHTNIGAGRIVYQSLTRIDKAIEEGEFQENKALNNAFTHTKENNSDLHLFGLLSDGGVHSHINHLVALLETAKDKGVKNVYIHAFLDGRDVAPQSSLEYLETLQKAISDLNYGAIATVSGRFYAMDRDKRWERVEKAYKAIVSAEGEKFEDPIELVKASYANDKNDEFVVPAIITKDGKPVATVKDNDAVIFFNFRPDRAIQLSNAFTDKEWDHFDRGADHPKNIKFVTMTLYNPSIDAEVAFEPIEMKNVIGEVLSNEGLSQLRIAETEKYPHVTFFMNGGRNEEFPGENRILINSPKVETYDLQPEMSAYEVTDALVEDIKNDKHDAIILNFANPDMVGHSGMLEPTIKAIEAVDENLGRVVDLILEKGGSAIIFADHGNSETMSTPEGKPHTAHTTVPVPVIVTKKGVTLREGGRLADVAPTMLDLLGVKKPAEMTGESLIQK

SEQ ID NO: 4007 - protein, 270 aa, Pyrus caucasica
AHYKSEADVGEAFAEAFKTGLIKREELFITTKIWNSDHGHVVEACKNSLEKLQLDYLDLYLVHYPMPTRHNAIGKTASLLGEDKVLDIDVTISLQQTWEGMEKTVTLGLVRSIGLSNYDLFLTRDCLAYSKIKPAVSQFETHPYFQRDSLVKFCIKHGVLPTAHTPLGGAAANKDMFGSVSPLDDPILNDVAKKYGKSVAQICLRWGIQRKTAVIPKSSKIQRLKENLVVLEFQLSDEDMQLIYSIDRKYRTSLPSKTWGLRRVCKGEFV

SEQ ID NO: 4008 - protein, 596 aa, Glycine max
  unsure (1)..(596): unsure at all Xaa locations
MSSSFSVRFLAPLPPSSSSCFPTSSLPKTWLCAAATPTVAXVNHHLLLXEVEASRLEPRVEERDGFWVLKEEYRGGISPQEKVKLEKDPMKLFMEGGIEELAKMSLEEIESSKHTKDDIDVRLKWLGLFHRRKQHHGRFMMRLKLPNGVTTSAQTRYLASVIRKYGNHASADVTTRQNWQIRGVVLPDVPEILKGLDEVGLTSLQSGMDNVRNPVGNPLAGIDPDEIVDTRPYNNLLSQFITANSRGNPAMSNLPRKWNVCVVGSHDLFEHPHINDLAYMPANKDGRFGFNLLVGGFFSAKRCAEAIPLDAWVSADDVIPLCKAVLEAYRDLGFRGNRQKTRMMWLIDELGIEVFRSEVEKRMPGKQLERASEEELVKKKWERRDYLGVHPQKQDGLSYVGIHIPVGRVQADDMDELARLVDKYGTGELRLTVEQNIIIPHVDSNKIDALLNEPLLKGRFSPEPSLLMKTLVACTGNQFCGQAIIETKERALKVTEEVERQVAVTRPVRMHWTGCPNTCGQVQVADIGFMGCMARDDNGKATEGVDIFLGGRIGSDSHLAQVYKKGVPCKDLVPVVVDILVKHFGAVLRNREEGED

SEQ ID NO: 4009 - protein, 396 aa, Listeria monocytogenes EGD-e
MAKKVVTDLDLKDKKVLVRVDFNVPMKDGKITNDNRIVAALPTIEYILEQNGKAILFSHLGKVKTEEDKEGKSLRPVAVRLSELLGKEVKFVPTTRGPELEKAIDELKDGEVLLFENTRFEDIDGKKESKNDPELGKYWASLGDVFVNDAFGTAHRAHASNVGIASNLESAAGFLMEKEIKFIGGVVDNPARPLVAILGGAKVSDKIGVIENLLTKADKVLVGGGMTFTFMAAQGQEIGKSLLEADKVELAKGLLEKAGDKLVLPVDAVVSKEFSNDAPFHTVSADSIPADEMGLDIGQATIDLFTKELQGAKTVVWNGPMGVFELSNFAKGTIGVCEAIANLTDATTIIGGGDSAAAAMDLGFADKFTHISTGGGASLEYLEGKELPGVASISDK

SEQ ID NO: 4010 - protein, 393 aa, Borrelia burgdorferi
MSIKTVKDFSSFAGKRALVRCDFNVPLKEGSISDDTRIRAALSTIEYLKERGARIVLVSHLGRPDGKKNPKYSLKPVANRLSELLGQDVKMLSDCIGSEVVNSTLQMKDGDVVLLENVRFYAEEEKNDKNFAKKLSENGDVFVNDAFGAAHRAHASTVGVADYSPSVGGFLMEKEDNSLGGILKNPERPSVSIIGGSKVSSKIAVLESLLSKSNVVVIGGGMAYTFLHSEGYSIGKSLLEDEYIGIASSFLKKAKELGVKVILPLDHIVADDFNKNSIPEYIDSFNIPENKIGMDIGANTLKEIENVVKTAKTIIWNGPLGVFEFDSFSKGTAKVAEMVASCSGLTVVGGGDSVAAVNKFNLSDKITHVSTGGGASLEYLEGRILPGIKVLEN

SEQ ID NO: 4011 - protein, 386 aa, Dactylis glomerata
MEGVEESNREAVQSCHRVLSLLSNPHGQLVPHKELVEATGEAVSKFGSVATKIATNGNGRQGHARVRKKINQPMPMFDSSLFLETTASAADAAAAKTSQPGPDTILRLFPRYQQVEGSSSKDPVRIPAQFPRRLLLENPSVGSNGPARGPPVQLVQPVSVAPPAGTPAPALPAAHLHFIQQQQSYQRFQLMHQMKLQSEMMKRGGLGEQGGSNGGVNLKFASSNCTGSSSRSFLSSLSMEGSMASLDVSRSSRPFQLVSGSQTSSTPELGLMQRKRCAGKEDGSGRCATGGRCHCAKKRKLRIRRSIKVPAISNKVADIPADEFSWRKYGQKPIKGSPHPRGYYKCSSVRGCPARKHVERCVDDPAMLIVTYEGDHNHNRAAAQPA

SEQ ID NO: 4012 - protein, 183 aa, Tropheryma whipplei str. Twist
MVITFTCTPYAVNCKHMKPLLSEAVIHRRLAQLALQIDEDYRGTSIVLLGVLKGSIMLMADLSRLLSSDLRIEWVTLSSYGNDTVSSGSIRIVHDLDADIRDRHVLIIEDIVDSGLTLGWLLAKMRERRPASIEACVLLRKPHARGTDVRYLGFDIPDEFVIGYGMDYAEKYRNLKSVYVLEQ

SEQ ID NO: 4013 - protein, 483 aa, Streptomyces violaceus
MTQGPLTTEAGAPVADNQNSETAGVGGPVLVQDQLLLEKLAHFNRERIPERVVHARGAGAYGTFTLTRDVSRWTRAAFLSEVGKRTETFLRFSTVAGSLGAADAVRDPRGWALKFYTEEGNYDLVGNNTPVFFIKDAIKFPDFIHTQKRDPYTGSQEADNVWDFWGLSPESTHQVTWLFGDRGIPASYRHMNGYGSHTYQWNNEAGEVFWVKYHFKTDQGIKNLTQDEANRLAGEDPDSHQRDLREAIERGDFPTWTVQVQIMPAADAAGYRFNPFDLTKVWPHEDYPPVEIGTLELNRNPENIFAEVEQSIFSPAHFVPGIGPSPDKMLQGRLFAYGDAHRYRVGINADHLPVNRPHATEARTHSRDGFLYDGRHKGAKNYEPNSFGGPVQTDRPLWQPTPVTGVTGDHAAPSHAEDDDFTQAGDLYRLMSEDEKGRLIDNLSGFIAKVSRDDIAERAIGNFRRADEDFGKRLEAAVQALRG

SEQ ID NO: 4014 - protein, 480 aa, Microbulbifer degradans 2-40
MSKCPYQTTSAGSPVADNQNSQTAGPRGPVLMQDYQLLEKLAHQNRERIPERVVHAKGWGAFGTFTVTKDISKYTRAKIFDTVGKQTPLLTRFSTVAGELGAADAERDVRGFAVKFYTEEGNWDLVGNNTPVFFIRDPLKFPDFIHTQKRHPKTNLRSPTAMWDFWSQSPESLHQITILMSDRGLPTDVRHINGYGSHTFSFWNNDGERFWVKFHFKTQQGHRHWTNEEAEKVVGKTRESTQEDLFSAIENGNYPKWTVNVQIMPEADAEKTSYNPFDLTKVWPHSEYPLIEVGEMELNRNAENYFAEIEQAAFSPSNVVPGIGFSPDKVLQARIFSYADAHRYRIGTHYEALPVNAPKCPVHHYHKDGSMNFFGNKSGSTDAYYEPNSFGGAVQNPDVAEPPLKISGDADRYNHREGNDDFSQPAALFNLFDDGQKQRLFNNIAGAMQGVPQNIIDKQLALFDKVDPAYGAGIRAALKA

SEQ ID NO: 4015 - protein, 605 aa, Glycine max
MTGVETMGKNENQSVEKNEKSVIDEEPKINYRGWKVMPFIIGNETFEKLGTIGTLANLLVYLTTVFNLSSLTATNIINIFTGSASLSTLLGAFLCDTYFGRYKTLGFCTIASFLGLLVIQLTAWIKKMHPPHCGSESITCTGPTTGQMTFLLAGFGLLIVGAAGIRPCNLAFGVDQFNPNTESGKKGINSFFNWYFFTYTFAQMVSLSLIVYIQSNVSWAIGLGIPAALMLISCTLYYTGSNYYVKVKATGPAPLTSLAQAVVVAIKKRRLNLSEYPLDSSLFAYVSPQSINSKLLHTSQFRFLDKAAIITPQDGINPDGSASDPWSLCSMQQVEELKCLLRVIPIWFAGIFFYIAIVQQNTMLVFQALQSDRRILSTNFKILAASYTIFQMLSLTIWLPIYDRILVPSLQRVTKKEGGITVLQRIGFGMFLSILCTMVSGVVEERRRTLALTNPIGLEPRKGAISSMSGLWLVPQLTLAGLSDAFAIVGQVEFFYKQFPENMKSLAASLFFCGLAGSSYLSSLLISIIHRATAKSSTGNWLPQDLNKGRLDYFYYIITALAVVNFGYFILCAKWYKYKGTGSSSSGDLQLDQVSKPSERTVNTV

SEQ ID NO: 4016 - protein, 285 aa, Zea mays
MAAPPVQPVPTAAAAAVNGDAFRLGFVGAGNLAESIARGVAASGVLPASAIRTAPHRRPERGEAFASFGACLLQTNAHVVDDSDVIVISVKPQIVKQVLLQLRPRLSEKKLLVSIAAGIKMQDLQDWSGQRRIIRVMANTPSAVGQAASVMCLGEMATQDDENRVRKLFSAIGKVWTAEEKYFDAVTGLSGSGPAYIFLAIEAMADGGVAAGLPRDLALGLASQTVLGAATMVSQTGKHPGQLKDQVTSPAGTTIAGIQELEKGAFRGTLISAVVAAANRCRELS

SEQ ID NO: 4017 - protein, 653 aa, Triticum aestivum
  unsure (1)..(653): unsure at all Xaa locations
MIPLCASSSPSTPAIIAPRPRRLRHRTTTPSLPHSRSPHRHLVLASSSPAPTPRPLARAHRPGAVATAAEMVFSVTKKETKPYEGQKPGTSGLRKKVTVFQQPHYLANFVQSTFNALPADQVKGATIVVSGDGRYFSKDAXVQIIAKMAAANGVRLVWVGQDSLLLTEYVAAIIRKRISSDVAKATGASVYEVRHKPRGPTVDFVIKYNMGNGGPAPKSVTDKIFSNTXSVTEYLIAXDLPNFDISLLGVTSFTGPEGPFDVDVFDSATDYIKLMKTIFDFESIKKLLASPKFSFCFDGLHGVAGAYAKRMFVDELGASESSLLNCVPKEDFGGGHPDPNLTYAKELVDRMGLGKTSNVEPPEFGAAADGDADRNMVLGKRFFVTPSDSVAIIAANAVQSIPYFASGLKGVARSMPTSAALDVVAKNLNLKFFEVPTGWKFFGNLMDAGMCSVCGEESFGTGSDHIREKDGIWAVLAWLSILAYKNKDNLGGDKLVTVEDIVLQHWGXTYGRHYYTRYDYENVDAEAAKELMANLVKMQSSLSDVNKSIKEIQPTVADVVSADEFEYKDPVDGSVSKHQGIRYLFGDGSRLVFRLSGTGSVGATIRIYIEQYEKDSSKTGRASSDALSPLVDVALKFSKIKEYTGRSAPTVIT

SEQ ID NO: 4018 - protein, 114 aa, Musa acuminata
VQFGAFIVATILKDRELYHEWTIELKAMADRIINMRQQLFDALRARGTPGDWSHIIKQIGMFTFTGLNTEQVTFMTKEYHIYMTSDGRISMAGLSSKTVPHLVDAIHAAVTSMK

SEQ ID NO: 4019 - protein, 199 aa, Leavenworthia stylosa
SVGEEVTDLQPGDHVLPIFTGECGECPHCHSEESNMCELLRINTERGGMILDGESRFSINGKPIHHFLGTSTFSEYTVVHSGQVVKINPKAPLDKVCIVSCGLTTGLGATLNVAKPKKGQSVAVFGLGAVGLGAAEGARIAGASRIIGVDLNSKRFEEAKKFGVTEFVNPKEHNKPVQQVIAEMTNGGVDRSVECTGSV

SEQ ID NO: 4020 - protein, 199 aa, Leavenworthia stylosa
SVGEGVTDLQPGDHVLPIFTGECGHCPHCHSEESNMCELLRINTERGGMILDGESRFSINGKPIHHFLGTSTFSEYTVVHSGQVVKINPKAPLDKVCIVSCGLTTGLGATLNVAKPKKGQSVAVFGLGAVGLGAAEGARIAGASRIIGVDLNSKRFEEAKKFGVTEFVNPKEHNKPVQQVIAEMTNGGVDRSVECTGSV

SEQ ID NO: 4021 - protein, 503 aa, Pectobacterium carotovorum
MSNSFCVVYKGSDTDINNIQRDFDGKGEALSNGYLFIEQNGHYQKCEMERGTAYLIGSLYNRTFLIGLAGVWEGEAYLANDAELLALLFTRLGANALALAEGDFCFFIDEPNGELTVITESRGFSPVHVVQGKKAWMTNSLKLVTAAEGEGALWFEEEALVCQSLMRADTYTPVKNAQRLKPGAVHVLTHDSEGYSFVESRTLTTPASNQLLALPREPLLALIDRYLNAPLEDLAPRFDTVGIPLSGGLDSSLVTALASRHFKKLNTYSIGTELSNEFEFSQQVADALGTHHQMKILSETEVINGIIESIYYNEIFDGLSAEIQSGLFNVYRQAQGQVSCMLTGYGSDLLFGGILKPGAQYDNPNQLLAEQVYRTRWTGEFATHGASCYGIDIRHPFWSHSLISLCHALHPDYKIFDNEVKNILREYADSLQLLPKDIVWRKKIGIHEGSSVNQAFANVLGSTVDNYQTKSRFTYRVYQAFLRGRLSITDVTPSQLKDLIKKD

SEQ ID NO: 4022 - protein, 311 aa, Zea mays
  unsure (1)..(311): unsure at all Xaa locations
ASAALPATTRASDPASAASTSRASAAASRASAAASRLKKKEANASPARNPAKKHRLTFSIPGQPLSAAGEVGVAIRHLRAVDPALAAVIDAHEPPVFQCPHRPFHSLVRSILYQQLAFKAAASVYSRFLALLGGEASVAPDAVLALSPHQLRQIGVSPRKASYLHDLARKYASGILSDASIVNMDDRSLAAMLTMVKGIGAWSVHMFMIFSLARPDVLPSADLGVRKGVQMLYALQDVPRPSQMDRLCERWRPYRSVGAWYMWRLIESKVPQPAPPIPALPSPDGQIMLQQQQQQSVIQMIIPFXMLPGMG

SEQ ID NO: 4023 - protein, 250 aa, Bacillus caldolyticus
MKKKCIAMLLAGGQGSRLRSLTKNIAKPAVPFGGKYRIIDFTLSNCTNSGIDTVGVLTQYQPLLLHSYIGIGSAWDLDRRNGGVTVLPPYSASSGVKWYEGTANAIYQNMNYIEQYDPDYVLVLSGDHIYKMDYQQMLDYHIAKQADATISVIEVPWEEASRFGIMNTNENMEIVEFAEKPANPKSNLASMGIYIFNWPLLREYLQIDNADPHSSHDFGKDVIPRLLRENKRLVAYPFKGYWKDVGTVKS

SEQ ID NO: 4024 - protein, 267 aa, Gloeobacter violaceus PCC 7421
MGCRARGRILCSGRESLGRSWQNMYRPFLEHLQQKLQSSFDLQSLTIPAGLDYRISERGRESTTIRSWCYTCSELRKIRYTYIDGGEHAQVFNSVIYPAHRYDLPLLGIDLLAFGKKKNLIVLDFQPLFRDKAYLARYIEPMRILRERYGDVAQDVEMKFYDANQYFSKYLLFARTDAETVAGRVFTAYCDYLDLYWQLLASAAPLGDAQDIRRIVKAQKDYDQYSADRDPASGLFSSYFGHEWAERFLYEFLFEDAVPLAVGQPGR

SEQ ID NO: 4025 - protein, 295 aa, Haemophilus influenzae R2846
MKAIIPVAGLGTRMLPATKAIPKEMLTLVDKPLIQYVVNECVAAGIKEIVLVTHSSKNAIENHFDTSFELETMLEKRVKRQLLEEVRSICPKNVTIMHVRQGNAKGLGHAVLCGRPLVGNESFAVMLPDVLLAEFSADQKKENLAAMIQRFNETGASQIMVTPVPQENVSSYGVADCGGIELNGGESAKINSIVEKPSIEGAPSNLAVVGRYVFSAAIWDLLEKTPIGVGDEIQLTDAIDMLIEKETVEAFHMTGETFDCGDKIGYMEAFVEYGIRHEKLGKEFKSFIKNLAKTL

SEQ ID NO: 4026 - protein, 313 aa, Listeria monocytogenes EGD-e
MTKIAFVFPGQGAQKVGMGQDVAAEYPEAKKIYDDADERLGFSITEIITEGPIELLTKSENAQPALVSTSVAILRALETYGVKADYVAGHSLGEYSALVAGGFLEASDAIYLVRKRGELMEAAVPNGAGAMAAVLGVDRETLKTITEEVTKEGDAVQLANLNCPGQIVISGTTAGVEKAGEKAKESGAKRVLPLAVSGPFHSSLMEPAALAFRDVLAEVKISDGQIPVVNNVDAKETTDKSEISDKLIKQIYSPVLWEDIVEELIKNGVDTFVEIGSGKVLAGLIKKINRDVTVLSAGDAESVKSVAATLKGE

SEQ ID NO: 4027 - protein, 251 aa, Glycine max
MLGKTRKVSARGEEVAANYAFGPSEDDVIIKHRLLTRTTTTRGDPPLKKIQKDPPLKNLQKKFTSFVSEVDKDEDNNYNECDKLARAFLQELTTFEIPLLKSKAIVEANIREKENFNELKEEMNRQILQAQDDIEDLKKQLEESKVERRHKEECEAIRKLIAMQPPRSETMKVISELENEIAALDAENTAGSRLLELRKKQFALLLHVVDELQNTIEEEQKSLVEEMRMATEELKNGMEDTNGGAEAMAID

SEQ ID NO: 4028 - protein, 509 aa, Glycine max
MASNDSDSQMKIVHGDAGYILEDVPHFADYIPNLPTYPNPLRSNPAYSVVKQYFVHMDDTVPQKVVVHKDSPRGVHFRRAGPRQKVYFKSDEVHACIVTCGGLCPGLNTVIREIVCGLSYMYGVNKVLGIDGGYRGFYSKNTITLTPKVVNDIHKRGGTILGTSRGGHDTGKIVDSIQDRGINQVYIIGGDGTQRGATVIYEEVRRRGLKVAIAGIPKTIDNDIPVIDKSFGFDTAVEEAQRAINAAHVEAESIENGIGVVKLMGRYSGFIAMYATLASRDVDCCLIPESPFYLEGKGGLFEFIQKRLKENGHMVIVIAEGAGQDLLTESMQAMDQKDASGNKLLQDVGLWISHKIKDHFARKDKIPINLKYIDPTYMIRAIQSNASDNVYCTLLAQSAVHGAMAGYTGFTVGLVNGRHTYIPFNRINERQNKVVITDRMWARLLSSTNQPSFLSPKDLEEAKKAEQPPTELLEGNNCNDVGDAGKEEQPPKDEQESGNHADNGIKTEN

SEQ ID NO: 4029 - protein, 542 aa, Methanococcoides burtonii DSM 6242
MTSSKILVVEDELITAMDIKNILEGFGYSVPATVASGEEAIEKVEEFSPDLVLMDIMLEGDMDGIQTAEQIHAHSNIPVVYLTAYADNDTLHRAKITGPFGYLLKPFEEKELHTIIEIALYKHKMENKLIESEEKYSTLVEKGNDGIIIIQDSVLKYVNKKMLDMTKFSFDEANELPFVNFVSPDHIDLVKDRYEKRIRGEAIQPNYEIEILTKDGKYIPVEINESYIQYKGKPAEMAIIRDITESKKATAALMRSEQKFRDLTENIAEMIYSANHKTFENTYCNKAVENIFGYSVDEWLSDPCLWEKSIYPEDVERVFSAYGEMQTSLENRVLEYRIRRKDGELRWVENHVTWLIEKETGVVSISGILHDITDHKNAELAIMNAKIAAESANKSKSEFIANMSHELRTPLNSIIGFSDIIHSESYGPLNENQKRYAFNILKSGKHLLDIINGILDLSKFEAGIMEIKREEFLINDVIKETNHTMLPLCMGKNIDISFVTIQPTYNQSCMTNLYTKRLEAQTIVGINGIPAIAFRIASITGI

SEQ ID NO: 4030 - protein, 874 aa, Candida albicans SC5314
MTMTTHFLYDRIRGCFLSSLVVGHVTFFVWFPGQPTRFSFDQLQTVTDAFKLDSSNLRKQLSDFLERENKLTLLASKDPLLSRNLTANANTEAKTKQSKIADESFAQLLQGLSGPPLTVAFASDGGNAEAVAKKVNRQALGRGLKSVVLQMDDLSVEDLPTETNVVFITSTSGQGEFPTNGKQFWDGVKNTTDLDLSGIRFSVFGLGDSQYWPRKEDKHYYNKPAKDLFAKLKLYGGVELADIGLGDDQDADGFSTGFNEWIPKIWAALGVDNVEGVEEPKPITNEDMKIGSDYLRGTIVEGLNDQSTGAISAVDQQLTKFHGIYMQDDRDIRDERKAQGLEPAYTFMVRVRLPGGIATPDQYLKMDELADERGNGTLKLTTRATFQLHGVVKHDLKPAIRGMNSALMDTLAACGDVNRNVMVSALPHNAKVHGQVSQIGALISEFLLPKTTAYHEIWLQGDDAGDKPGYREAWENRKEGPTKKKTLVAGNVLADVEPQYGVTYLPRKFKIVITVPPYNDVDVYAHDVGLIAIVEDNEVVGFNVLAGGGMGSTHNNKKTYPRTGSMLGYVSKDQVHIACEKIMLVQRDFGDRTNRKHARLKYTIDDLGVDVFKAKVEELLGYKFDEPRPFKIESNIDYFGWCKDELGYNHFTAFIENGRIENTPELPQKTGLRKIAEFLKSGNRSGEFRLTGNQHILISNVSDQDLDEVKKLLAQYKLDNTDFSALRKSSAACVAFPTCGLAMAESERYLPVLITKLEEALEEYGLRHDSIVMRMTGCPNGCARPWVAEVALVGKAYGAYNLMLGGGHHGQRLNKIYRYSIKEDEILDILKPLFKRWSLERNENEPFGDWCIRAGIIAETTEGKYFHDDIPEDA

SEQ ID NO: 4031 - protein, 522 aa, Oryza sativa
MNSAAAAAACASAPAWVVGGGAGGGARSARGPCGIRVCGLGGEAVALRSLRISQGAAVRRAAVAARAAAENGVAGSGGFDYDLVIIGAGVGGHGAALHAVEEGLKTAIIEGDVVGGTCVNRGCVPSKALLAVSGRMRELHDEHHMKSLGLQGKQKVRYGKVGFPDKEITARNIIIATGSVPFVPKGIEVDGKTVFTSDHALKLESVPDWIAIVGSGYIGLEFSDVYTALGSEVTFVEALDQLMPGFDPEIAKLAQRVLINPRNIDYHTGVFASKITPAKDGKPVQIELIDAKTKEHKETLEINVVTQRGFIPVDERMRVMDADGNVVPNLYCIGDANGKLMLAHAASAQGISVVEQISGRDHILNHLSIPAACFTHPEISMVGLTEPQAREKADKEGFEISVVKTSFKANTKALAENEGDGLAKLIYRPDTGEILGVHILGLHAADLIHEASNAIALGTRLQDIKFAVHAHPTLSEVLDELFKAAKPREGPERKPKHPPQPLLKVLSFVTRLLTSQKRNRQP

SEQ ID NO: 4032 - protein, 199 aa, Leavenworthia uniflora
SVGEGVTDLQPGDHVLPIFTGECGECPHCHSEESNMCELLRINTERGGMILDGESRFSINGKPIHHFLGTSTFSEYTVVHSGQVVKINPKAPLDKVCIVSCGLTTGLGATLNVAKPKKGQSVAVFGLGAVGLGAAEGARIAGASRIIGVDLNSKRFEEAKKFGVTEFVNPKEHNKPVQQVIAEMTNGGVDRSVECTGSV

SEQ ID NO: 4033 - protein, 554 aa, Candida albicans SC5314
MGSSTNNTQSKATPSVLENEVNSSKSSVVSSTSSAKGLLRETTNHGTMETSSVQISESESRPSKMVLVLTLASSISGFMFGYDTGYISSALVQIGTDLSNKILTSGEKEFITSATSLGALLGAVVGGVLANLIGRRRVLLGSNIIFVVGTIIQLAARTVWTMIAGRFVLGWGVGIASLIAPLMISELAPAKYRGRLIVTNVIFITGGQLIAYFINWGLTRVSHGWRVSVGLCMVPPVLQFVLFWFLPDTPRFYVMNGNFEKARQVLRKVHVDPSDEFVNATIDEMIASDSTVPGNGPLQKAWKSIKIIHTTPGNFRALILACGLQGIQQFTGFNSLMYFSATIFETIGFHNATAVSIIIAATNFVFTGIAICIIDKVGRRRILLVGMPCMCISLIVCAVAFHYLNVDFSTGTVVSRGINGWGIVVIIGMILYVASYAIGIGNAAWVGVELFSDVNVRSIGAMYAACTNWAGSLVIASTFLTMLENITPTGTFSFFAGLCFIAFFFVYFLLPDTAGLELEETTDFLSNGFNVKQAAQLSKERKKHSKFAKSKPTV

SEQ ID NO: 4034 - protein, 338 aa, Leavenworthia uniflora
  unsure (1)..(338): unsure at all Xaa locations
TGQIIRSKAAVAWEAGKPLVMEEVEVAPPQKHEVRIKILFTSLSHTDVYFWEAKGQTPLFPRIFGHEAGGIVESVGEEVTDLQPGDHVLPIFTGECGDCPHCHSEESNMCDLLRINTERVGMIHDGESRFSINGKPIHHFLGTSTFSEYTVVHSGQVAKINPEAPLDKVXIVSCGLSTGLGATLNVAKPKKGQSVAVFGLGPVGLGAAEGARIAGASRIIGVDLNSNRFEQAKKFGVTEFVNPKEHDKPVQQVIAEMTNGGVDRSVECTGSVQAMIQAFECVHDGWGVAVLVGVPSKDDAFKTHPMNFLNERTLKGTFFGNYKPKTDIPGVVEKYMNK

SEQ ID NO: 4035 - protein, 334 aa, Mycobacterium bovis AF2122/97
MRAVVITKHGDPSVLQVRQRPDPPPPGPGQLRVAVRAAGVNFADHLARVGLYPDAPKLPAVVGYEVAGTVEAVGDGVDPNRVGERVLAGTRFGGYCEIVNVAATDSVVLPDALSFEQGAAVPVNYATAWAALHGYGSLRAGERVLIHAAAGGVGIAAVQFAKAAKAEVHGTASPQKHQKLAEFGVDRAIDYRRDGWWQGLGPYDVVLDALGGTSLRRSYTLLRPGGRLVGYGISNMQHGEKRSMRRVAPHALSMLRGFNLMKQLEESKTVIGLNMLRLWDDRRTLEPWIAPLTKALNDGTILPIVHAIVPFAEAPEAHRILAARENVGKVVLVP

SEQ ID NO: 4036 - protein, 379 aa, Leavenworthia stylosa
  unsure (1)..(379): unsure at all Xaa locations
MTTTGRIIRSXAGVAWEAGKPLVIEEVEVAPPQKHEVRIKILFTSLWHTDVYFWEAKGQTPLFPRIFGHEAGGIVESVGEGVTDLKPGDHVLPIFTGECGDCPHCHSEESNMCDLLRINTERRGMIHDGESRFSINGKPIHHFLGTSTFSEYTVVHSGQVAKINPKAPLDKVWIVSWGLSTGLGAILNVAKPKKGQSVAVFGLGAVGLAAAEGARIAGASRIIGVDLNSKRFEEAKKFGVTEFVNPKDYDKPVQQVIAEMTNGGVDRSVECTGSVQAMIQAFECVHDGWGVAVLVGVPSKDDAFKTHPMNFLNEKTLKGTFFGNYKPKTDIPGVVEKYMNKELELEKFITHTVPFSEINKAFDYMLKGESIRCIITMGA

SEQ ID NO: 4037 - protein, 554 aa, Corynebacterium glutamicum ATCC 13032
MAHERAGQLAQPEDLIDVAELVTAYFTRKPDVNNPDQQVAFGTSGHRGSALDSAFNEDHILATTQAIVDYRNQQPKNWVGPLFIGRDTHALSEPAMISALEVLIANDVEVLVDADGRYTPTPAVSHAILRHNDGIILGTAGPSRPYADGIVITPSHNPPRDGGFKYNPANGGPADTDATDWIANRANDILRGDLADVKRVPVSGVLDERTTAYDFKGIYIADLPNVVNIDAIREAGVRIGADPMGGASVDYWGAIAETHGLNLTVVNPHVDSTFRFMTLDTDGKIRMDCSSPHAMASLIDNRDKFDVATGNDADADRHGIVTPDAGLMNPNHYLAVAIEYLFAHRPGWSADTAVGKTLVSSSMIDRVVAQLGRTLVEVPVGFKWFVPGLISGEIGFGGEESAGASFLRMDGTTWSTDKDGLILDLLAAEIIAVTGKTPSQRYAELAEEFGAPAYARTDAEANREQKAILKALSPEQVTATELAGEAITAKLTEAPGNGAAIGGLKVTTENAWFAARPSGTEDKYKIYAESFKGEEHLAQVQKEAQALVSEVLGQ

SEQ ID NO: 4038 - protein, 223 aa, Leavenworthia crassa
GQTPLFPRIFGHEAGGIVESVGEGVTDLQPGDHVLPIFTGECGECPHCHSEESNMCELLRINTERGGMILDGESRFSINGKPIHHFLGTSTFSEYTVVHSGQVVKINPKAPLDKVCIVSCGLTTGLGATLNVAKPKKGQSVAVFGLGAVGLGAAEGARIAGASRIIGVDLNSKRFEEAKKFGVTEFVNPKEHNKPVQQVIAEMTNGGVDRSVECTGSVQAMIQ

SEQ ID NO: 4039 - protein, 171 aa, Oryza sativa (indica cultivar-group)
MEHKETGCQQPKGPILCINNCGFFGSAATMNMCSKCHKEMIMKQEQAKLAASSIDSIVNGGDSGKEPIIAGHAEVAVAQVEVKTLVAQPAEIAGPSEGVTVNPKGREGPNRCSTCRKRVGLTGFNCRCGNLYCAMHRYSDKHDCQFDYRTAARDAIAKANPVVKAEKLDKI

SEQ ID NO: 4040 - protein, 245 aa, Gloeobacter violaceus PCC 7421
MTLYEPFLERAQQVLTRRLELAPYPIPVGFERKEALVRGEAVVTTSTAWQSPKLRQIRAAHVQGGGALQVLNFVISPRLEYDLPFFGADLVTLPGGHLIALDMQPLFRDDPAYQAKYTEPIVPLFEAHRAHLEWGGDFPEEARPFFSPAFLWTRPKETGTVETRVFAAFVDYLNAYLDFVERAEPVTHPEGLAAVERAQLRYLHYRAEKDPARGMFRRFYGPEWTEEYIHGFLFDLERRREAVHR

SEQ ID NO: 4041 - protein, 355 aa, Chara corallina
LELRDGGKDFMGKGVLKAVSNVNDIIAPALIGKDVTEQTAIDKFMVEDLDGTQNEWGWCKQRLGANAILAVLLAVCKAGAGAKKIPLYQHIANLAGNSKLVLPVPSFNIINGGSHAGNKLAMQEFMILPTGASSFQEAMKIGSEVYHHLKSIIKKKYGQDATNVGDEGGFAPNIQDNKEGLELIKAAIEKAGYTGKVTIGMDVAASEFYSDKTKMYDLDFKTEHNDGSKRITGDQLIQLYESFCSEYPLVSIEDPFDQDDWEHYAKLTALIGEKVQIVGDDLLVTNPKRVAKAIAEKSANALLLKVNQIGSVTESIEAVRMSKKAGWGVMTSHRSGETEDTFIADLAVGLATGQI

SEQ ID NO: 4042 - protein, 139 aa, Glycine max
  unsure (1)..(139): unsure at all Xaa locations
MELVAESERTLYPYVTGSSVVAIKYKDGILMAADMGGSYGSTLRNKSVERIKPIGKHSLLGASGEISDFQEMVRYLDQLMLYDNMWEEGNSVRPREVHXMWPVLMYKRRXKVNPWGKCTGAGYGENSHESLGMGSKLGV

SEQ ID NO: 4043 - protein, 380 aa, Leavenworthia stylosa
MTTTTGQIIRCKAAVAWEAGKPLVMEEVEVAPPQKHEVRIKILFTSLCHTDVYFWEAKGQTPLFPRIFGHEAGGIVESVGEGVTDLQPGDHVLPIFTGECGHCPHCHSEESNMCELLRINTERGGMILDGESRFSINGKPIHHFLGTSTFSEYTVVHSGQVVKINPKAPLDKICIVSCGLTTGLGATLNVAKPKKGQSVAVFGLGAVGLGAAEGARIAGASRIIGVDLNSKRFEEAKKFGVTEFVNPKEHNKPVQQVIAEMTNGGVDRSVECTGSVQAMIQAFECVHDGWGVAVLVGVPSKDDAFKTHPINFLNERTLKGTFFGNYKPKSDIPGVVEMYMNKELELEKFITHKVPFSEINKGFDYMLKGEGIRCIITMGA

SEQ ID NO: 4044 - protein, 355 aa, Nitella opaca
LELRDGGKDFMGKGVLKAVSNVNDVIAPALIGKDPTEQTALDNFMVEELDGTQNEWGWCKQRLGANAILAVSLAVCKAGAGAKKIPLYQHIANLSGNTKLVLPVPSFNIINGGSHAGNKLAMQEFMILPTGASSFKEAMKMGSEVYHHLKSIIKKKYGQDATNVGDEGGFAPNIQDNKEGLELIKAAIEKAGYTGKVTIGMDVAASEFYDEKTKMYDLDFKTENNDGSKRISGDEIIQLYKSFCDEYPLVSIEDPFDQDDWEHYAKFTALIGEKVQIVGDDLLVTNPKRVAKAVAEKSANALLLKVNQIGSVTESIEAVRMSKKAGWGVMTSHRSGETEDTFIADLAVGLATGQI

SEQ ID NO: 4045 - protein, 370 aa, Pseudoalteromonas tunicata
MIPNQWYAILRTQDVKKKPVGIKRLEKLLVLYRDTAGELVCLDDRCPHKGVKLSLGQQHGDLIACPYHGFQYDQQGDCVHMPVLGQKGNVPKGMCVKSYKVKEELGLIWFWFGDVRQEHEYPDIPMFKQLKEYKGHYSYYGWDAPINYTRYVESVCEIYHIPFVHKGSAINIWDPKGGRVDNFECKVEDTLITSDFILRPDDDRTAEETLVARKPWTRGWRFGIDVQMPNLILIRSDVFDVIFIPTPIDENTCWVCVCYQEPKRDLLLPLIKPLPIPFWGPVRPWYMCRIERFVQQAKDMAVIAHQEPKVSHPKANRLIPLDKVNAHYIRFREKLIREAKEQQQVKELAKSNPEFAAPTLEQIIGIEEVH

SEQ ID NO: 4046 - protein, 550 aa, Zea mays
MASSASLQRFLLPSPHAAATAASPSSRLRRTGRARAAVSVPPPAAAGEQVPTERLEPRVEERAGGYWVLKDKYRAGLNPQEKVKLEKEPMALFMEGGIQDLARVPMEQIDAAKLTKDDVDVRLKWLGLFHRRKHQYGRFMMRLKLPNGVTTSEQTRYLASVIEAYGADGCADVTTRQNWQIRGVTLPDVPAILDGLRAVGLTSLQSGMDNVRNPVGNPLAGVDPHEIVDTRPYTNLLSSYVTNNSQGNPTITNLPRKWNVCVIGSHDLYEHPHINDLAYMPAVKDGEFGFNLLVGGFISPKRWAEALPLDAWVAGDDVVPVCKAILEAYRDLGSRGNRQKTRMMWLIDELGMEVFRSEVEKRMPNGVLERAAPEDLVDKRWERRDYLGVHPQKQEGLSYVGLHVPVGRLQAADMFELARLADEYGTGELRLTVEQNIVLPNVSNERLDALLAEPLLQEQRLSPRPSMLLRGLVACTGNQFCGQAIIETKARALQVAREVEKRVAVPRPVRMHWTGCPNSCGQVQVADIGFMGCLTKDSDGKIVEAADIFV

SEQ ID NO: 4047 - protein, 297 aa, Xanthomonas campestris pv. campestris str. ATCC 33913
MSKRIRKAVFPVAGLGTRFLPATKTVPKEMLPIIDKPLIQYAVDEAIQAGCDTLIFVTNRYKHSIADYFDKAYELEQKLERAGKLEQLELVRHALPEGVRAIFVTQAEALGLGHAVMCAKAVVGDEPFAVLLPDDLMWNRGDAALTQMADVAEASGGSVIAVEDVPHDKTASYGIVSTDAFDGRKGRINAIVEKPKPEVAPSNLAVVGRYVLSPKIFEYLESTGAGAGGEIQLTDAIAELLKQEQVDAFRFEGRRFDCGAHIGLIEATVHFALEHEKHGAPAKEIIRSALAAADARG

SEQ ID NO: 4048 - protein, 355 aa, Nitellopsis obtusa
LELRDGGKEFMGKGVLKAVSNVNDIIAPAVIGMDPADQTKIDELMVQQLDGTQYEWGWCKQKLGANAILAVSLAVCKAGAGVLNVPLYQHIANLAHNPNLILPVPSFNIINGGSHAGNKLAMQEFMILPTGASSFKEAMKMGTEVYHNLKSIIKKKYGQDATNVGDEGGFAPNIQDNKEGLELIKEAIAKAGYTGKVTVGMDVAASEFYTEASKTYDLNFKTDNNDGSGKISGQQIIELYQSFCEDYPMVSIEDPFDQDDWEHYAKFTALIGEKVQIVGDDLLVTNPKRVAKAIAEKSCNALLLKVNQIGSVTESIEAVRMAKKAGWGVMTSHRSGETEDSFIADLAVGLATGQI

SEQ ID NO: 4049 - protein, 346 aa, Gloeobacter violaceus PCC 7421
MVRTLIDIRSLTIDPNCWYAVAQSAELKTEPRSITLWGEAIALFRGADGVAHAVEDRCPHRQVKLSHGRVVEGSLECAYHGWRFDGDGRCTHVPYREGSLPGCRLRTYPVREHDGFVWLFAGDPGRAHAVEPLRLPEWDHLNYIASVAPIACAAHYSYLIENLMDMHHGHLHERFQAWGAAHLEKLEEHPGRIDALYEAQSYYRIDRIWSVAQLFVPALRRAHPEALAVSYVYPHWRARLGEDFRLYCLLCPEGERSTRAYLVHFTSLEAFPDLHKLPVPFRRFVKDRCFGSAQGMLAGLIRQDVQMIEEEQRAYDRDPQRRNWEVNRSIAAVQRLWRQQKKADVS

SEQ ID NO: 4050 - protein, 391 aa, Oryza sativa (japonica cultivar-group)
MQYLFDEDGRRYLDAFGGIATVCCGHCHPDVVEAMVNQAKRIQHSTVLYLNHAIADFAEALAAKMPGDLKVVFFTNSGTEANELALMIARLYTGCHDIISLRNGYHGNAAGTMGATAQCNWKFNVVQTGVHHALNPDPYRGAFGSDGEKYARDVQEIIDFGTTGRVGGFISEAIQGVGGIVELAPGYLPAVYNMVRKAGGLCIADEVQAGVARTGSHFWGFESHGVIPDIVTMAKGIGNGIPIGAVVTTPEIAQVLTRRSYFNTFGGNPVSTAGGHAVLKVLEKEKLQENAFVVGSYLKERLNKLKEKHDIIGDVRGKGFLLGVELVTDRQKKTPAKVEIGHVMNHMKDMGVLVGKGGFYGNVFRVTPPLCFTKEDSDFFIEAMDISLSKL

SEQ ID NO: 4051 - protein, 359 aa, Pycnococcus provasolii
VELRDKDTAPDDYMGKDVLQAVSHVNREITTLHVGKVPTDQKAIDVAMIALDGTENKGRLGANAILTASIAVCKAGAAESGVPLWRHIGKLANNVTFVLPVPAFIIINGGSHAGNRLAFQEYMILPTGASSLTEAMKMGSEVYHKLKDIIKAKYGQDSVNVGDEGGFAPSLENNEEGLKLIVEAIEVAGYTGKVKIGMDVAASEFLVPAASEIAIYKYDLDFKAPEGAAKDEKLAAMPGDELRALYASFVQNYPVISIEDPFDQDDAENTTALTADDLCQIVGDDLLVTNPKRVQRAIDGKWCNALLLKVNQIGSVSEAIEAVGMSKNAGWGVMTSHRSGETEDSFIADLAVGLATGQI

SEQ ID NO: 4052 - protein, 76 aa, Glycine max
  unsure (1)..(76): unsure at all Xaa locations
EAIRKLIAMQXXRSETMKVISELENEIAALDAENTAGSRLLELRKKQFALLLHVKSMLPDTKSMLEITDTDYSLRW

SEQ ID NO: 4053 - protein, 405 aa, Xanthomonas campestris pv. campestris str. ATCC 33913
MSFRDPADAPCSAATAAVRAGIDRDTAYGAVTPPIVLSSNFSFDGFGNKRQYDYTRSGNPTRDLLGEALAELEGGAGGVITSTGMGAINLVLNALLQPGDTLVVPHDAYGGSWRLFNALAKKGHFALITADLTDPRSLADALAQSPKLVLIETPSNPLLRITDLRFVIEAAHKVGALTVVDNTFLSPALQKPLEFGADLVLHSTTKYVNGHSDVVGGAVIARDAELHQQLVWWANALGLTGSPFDAFLTLRGLRTLDARLRVHQENADAIAVLLDEHAAVNQVYFPGLASHPGHALAARQQKGFGAMISFELNGGEAAVRAFVDGLRYFTLAESLGGVESLIAHPASMTHAAMTAEARAAAGISDGLLRLSVGIESAEDLLIDLRAGLARAEAAVSAVARKQVDA

SEQ ID NO: 4054 - protein, 301 aa, Zea mays
  unsure (1)..(301): unsure at all Xaa locations
MMLAILARRRAXEAVLRRPQAAAGAAVSAWRAYAAAGEESDVVVVGGGPGGYVAAIKAAQLGLKTTCIEKRGTLGGTCLNVGCIPSKALLHSSHMYHEAKSSFAHHGVKFSNLEVDLPGMMAQKDKAVAGLTKGIEGLFKKNKVTYVKGFGKLSSPSEVSVDLIDGGSTVVKGKNIIIATGSDVKSLPGITIDEKKVVSSTGALCLSEIPKKLVVIGAGYIGLEMGSVWNRLGSEVTGVEFAPDIVPSMDGXEVRQQFQRMLEKHKVKFMLKTKVVGCDTSGDGVKLTLTLWENPIYFWDW

SEQ ID NO: 4055 - protein, 431 aa, Neisseria meningitidis Z2491
MAQKIQSVKGMNDLLPVEQKDFKLTAAFWQAFEDTVGRWTRTYGYQQIRTPIVEQTGLFVRSIGEETDVVGKEMYTFSDSNDSLSLSLRPEGTASCLRAVVEHNFLYNSPQKLWYMGPMFRRERPQKGRYRQFHQVGIEALGFEGPDIDAEIIAMSADLWEKLGIREYLTLEINSLGNREERAAHRAALVEYLTRYEDKLDEDSKRRLKTNPLRVLDTKNPDLQEICNAAPRLVDYLGEASQNHYARFKAMLDGLGIQYIENPRLVRGLDYYNQTVFEWTTDKLGAQATVCGGGRYDGLIEELGGKPAPSIGFAMGIERLLLLVSEYGSLEVNAAPDVYAMHQGEGADLQVMKYAQALRAQGFNVMQHSGYQSLKAQMKKADNSGARFALIVAQDELANGTVTLKDMNGAHDQQTVAAADLTNTLQQWKNA

SEQ ID NO: 4056 - protein, 362 aa, Geobacter sulfurreducens PCA
MAQVFKVAVLPGDGIGPEVMAEALRVLDAVEAKYDVKFERTHANVGGAGIDIEGKALPETTVNICKAADAILFGSVGGPKWESLPPDEQPERGALLPLRKIFGLYANLRPAIIFPSLTGASSLKEEVIAGGFNVLVIRELTGGIYFAQPKGIEGEGRDRVGFDTMRYSVPEIERITHVAFQAARKRGKKVCSIDKANVLSSSVLWREVVTGIAKEYPDVELSHMYVDNAAMQLVRWPKQFDVILCENMFGDILSDEAAMLTGSLGMLPSASLAEGTFGMYEPSGGSAPDIAGQGIANPIAQILSMGMMLKFSFGMVDAADAIDNAVATVLDQGFRTRDIYQQKDGEKLVNTKEMGDAIIAAL

SEQ ID NO: 4057 - protein, 295 aa, Actinobacillus pleuropneumoniae
MKVIIPVAGLGTRMLPATKAIPKEMLTIADKPLIQYIVNECVAAGIKEIVLVTHSSKNAIENHFDTSFELETMLEKRVKRQLLEEVRSIVPKDVTLMHVRQGQAKGLGHAVLCGRAVVGNEPFAVVLPDVILADFTANQKTENLAAMIKRFNETQHSQIMVAPVPREDVSSYGVADCDGVEIPAGETAKIVKMVEKPSVEEAPSNLAVVGRYVFSAGIWDLLEKTPVGVGDEIQLTDAIDMLIEQETVEAFHMTGRTFDCGDKLGYMQAFTEYSLRHDKFGNNFKEFIKKLAKTL

SEQ ID NO: 4058 - protein, 431 aa, Bifidobacterium longum NCC2705
MATEHEEKLGTEDSKWLGEYSQVHMNVFGTPLRVMDHGQGAHIWDVDGNEYLDFLAGIAVNSLGYAHPKWVKAVADQAAKVAHISNYFASEPQIELASKLVKLAGAPEGSKVYFGNSGAEGNEAALKLAKLYGRTLPGALPSIGGKPARILAMTHGFHGRTMGALSATWKPGIRKPYDPLVPNIEFVRAGDKVALHDAFAQTGLGRYGKGPVAAVILELIQGEAGVQPLGADYVKFVRELCDINHALLIIDEVQTGIGRTGKWFAFQRDDLSGGVTPDMVTFAKGVAGGFPMGGMIAFGEKLAALFTPGSHGSTFAGNPLGAAAGLATLDVIEDENLVANAEARGEQLRDGIMATGNPLFVSVRGRGLLDAVELKHPCSHAVMNYCLEHGLIVNAVAPNALRFAPPLIVTAQDVDQALAILKDVPTDLPDD

SEQ ID NO: 4059 - protein, 532 aa, Sorghum bicolor
MSIKSETNERSSTIQSAGHRICSIVKLCYQHLMLAVSYALYLFLAPIILATLVLHLSRHTSADDDLIVSARSTLTANLPFTVVVVAAAATAVYLMRRPRAVYLLDLACYKPGAEHAVTRETFMRLVVGYGTFSDDSLAFQRKILERSGLGQGTYLPKALTSSPPNPCMAEARREAEAVMFGAVDQLLAKTGVRAGDIGIVVVNSGLFSPTPSLSAMIVHHYKLRRDVSSYNLAGMGCSASLISVDLAKQLLQVQRNTYALVVSLEIMAASAYVGNTRSMLVPNCIFRMGGAAVLLTNHGTERRRAKYQLLHTVRTHQGADDRAYRCVYQEEDESGHVGVALSKDLMSVAAEALKTNITTLGPRVLPMSEKMKMMLVGGKAAVVQVLGVQQQGQGGSRSRPYIPDLTTAFEHFCIHAGGRAVLDTVERSLDLSAWHMEPSRMTLYRWGNTSSSSLWYELAYTEAKGRVRRGHRVCQIAFGSGFKCNSAVWRALRTIDPAKESAAAGNPWVEEIHRFPVEVPQVERVDVAAMAS

SEQ ID NO: 4060 - protein, 281 aa, Leavenworthia uniflora
MTTTTGQIIRCKAAVAWEAGKPLVMEEVEVAPPQKHEVRIKILFTSLCHTDVYFWEAKGQTPLFPRIFGHEAGGIVESVGEGVTDLQPGDHVLPIFTGECGECPHCHSEESNMCELLRINTERGGMILDGESRFSINGKPIHHFLGTSTFSEYTVVHSGQVVKINPKAPLDKVCIVSCGLTTGLGATLNVAKPKKGQSVAVFGLGAVGLGAAEGARIAGASRIIGVDLNSKRFEEAKKFGVTEFVNPKEHNKPVQQVIAEMTNGGVDRSVECTGSVQAMIQ

SEQ ID NO: 4061 - protein, 376 aa, Zea mays
NSARGNILNNAGVTLIEGRGKIVDPHTVSVNGKLYTAKHILVSVGGRPSMPDIPGIEHVIDSDAALDLPSKPEKIAIVGGGYIALEFAGIFNGLKSEVHVFIRQKKVLRGFDEEVRDFVAEQMSLRGITFHTEQSPQAITKSNDGLLSLKTNKENFGGFSHVMFATGRRPNSKNLGLEAVGVEMDKNGAIVVDEYSRTSVDSIWAVGDVTNRVNLTPVALMEGGAFAKTVFGNEPTKPDYRAIPSAVFSQPPIGQVGLTEEQAIEEYGDVDVFVANFRPLKATLSGLPDRVLMKILVCATSNKVVGVHMCGDDAPEIIQGIAIAVKAGLTKQDFDATIGIHPTSAEEFVTMRSPTRKIRKSSTDQVESKDEVVSKQ

SEQ ID NO: 4062 - protein, 839 aa, Sorghum bicolor
MTRLLSSYLLTVIFTVFLLLLKASAAGTPSDTLSSSSNITDGETLVSSGSSFTLGFFSPAGVPAKRYLGVWFTMSPEAICWVANQETPLNNTSGVLVVDDSTGTLRLLDGSGHTAWSSSSSTTTTSSAPPPPVVLPQAQLLDSGNLVVRDQSTGDVLWQWFDHPGNTYLAGMKFGKNLRTGAEWTTTSWRASNDPAPGDYWRSLDTRGLPDTITWHGNVKMYRTGPWNGQWFSGIPEMASYLDLYSNQLVVGADEIAYSFNTTAGAPISRLLLNENGVMHRLGWDPVSLVWTSFAEAPRDVCDNYAMCGAFGLCNMNTASTMFCSCAVGFSPVNPSQWSMRETHGGCRRDVPLECGNGTTTDGFKMVRAVKLPDTDNTTVDMGVTLEQCRERCLANCACVAYAAADIRGGDHGCVMWTDAIVDVRYIDKGQDMYLRLAKSELVEKKRNVVLIILLPVTTCLLALMGMFFVWVWCRRKLRGKRRNMDIHKKMMLGHLDETNTLGDENLDLPFFSFDDIVSATNNFAEDNMLGQGGFGKVYKGILGENREVAIKRLSQGSGQGTDEFRNEVVLIAKLQHRNLVRLLGCCIHGDEKLLIYEYLPNKSLDSFIFDAARKNVLDWPTRFRIIKGISRGVLYLHQDSRLTIVHRDLKTSNILLDADMNPKISDFGMARIFGGNQQEANTNRVVGTYGYMSPEYAMDGAFSVMSDTYSLGVILLEIISGLKITSTHSTSFPSLLAYAWSLWNDGKAMDLVDSFVLESCSANEALRCIHIGLLCVQDNPNSRPLMSTVVFMLENETTLLSVPKQPMYFSQWYLEAQGTGENTNSSMNNMTVTVLEGR

SEQ ID NO: 4063 - protein, 350 aa, Methanopyrus kandleri AV19
MIPSERVGIVGYGAYVPRYRIKAEEIAAVWGDDVDSIKSGLMIEEKSVPSETEDSATIAVEAAKNAVARAEIDPKDIGAIYVGSESPPYAVKPTATIVAAAIGATPDLTAADYEFACKAGTAAIQTCAGLVASGMIKYGLAIGADTAQGAPGDPLEYTAAAGGAAFVIGRKKLVAEMEGTYSYTTDTPDFWRREGQPYPRHGGRFTGAPAYFKHIIRAARGLMEELDLSPEDFDYAVFHQPNGKFPRKVARSLGFEPEQVEPTIVVDRVGNTYSGSSLLGFTAALDRAEPGDRILVVSYGSGAGSDAFSFVVTERIEEVREKAPLLEEYLEDRVYVTYGEYAKMKKKLKF

SEQ ID NO: 4064 - protein, 1525 aa, GIBBERELLA ZEAE PH-1
MDVPHDKEGQDISQPEQKDNEEQQHNPSSTTLPSESYPPPPQSSTASSSTFRPSGPDVLPGLQTNTHNNNNATPTRTTRAASSAAPSEQNSVSNSETPFSPWSVSSDKQLGYHSAASDVSGDRVFPIRSVISVDPSSSKITNNDYFHALPQCDGRGIPVKVPSTSRADIGPDLRRSDTVPANYHSRAHSERIDALMRRKNTMSGPMSRIQLDANRHGSSTAPLELDISMSDNEADADADTETEESGVMGHASANVSAGGLEPDASSAGYSSADISHVTARFTHVVTDDGHAVITGRDGVLQRCEDEPIHAPGAVQTFGVLVALREENDGCFVARYVSENSVRMLGYTPKQLFQLKNFLDILTEEQQDNLLDHIDFIRDEDADPAINGPEVFSLSIRPPKCKSTKLWCAIHINPAHPDLIICEFELDDDVEYPLRPADEMTPDTPHDTLQSNPTLEEIEDSTEVLSKPLRILRSARKRRGEQGAMQVFDIMSQVQEQLSSATNLEAFLKVLVGIVKELTGFHRVMIYQFDSSFNGKVVTELVDTSMTRDLYKGLHFPASDIPRQARDLYKLNKNCLPNKRRPRHSARHEPLLSASHVAYSYHYLKNMAVRSSMSISINAFNELWGLISCHSYGNHGMRVSFPIRKMCRLVGDTASRNIERLSYASRLQARKLINTAPTDKNPSGYIIASSEDLLKLFDADFGLLSIKGETKLMGPVEQSQEALAMLEYLRMRQLTSVVASQDVSEDFPDLRYPPGFQVVAGLLYVPLSVGGSDFIVFFRKGQIKEVKWAGNPYEKFVREGTAGYLEPRKSFKTWHETVVGKCREWNEEQVETAAVLCLVYGKFIEVWRQKEKALQNSKLTRLLLANSAHEVRTPLNAIINYLEIALEGSLDQETRDNLARSHSASKSLIYVINDLLDLTKTEEGQNLVKDEVFDLASCIREATGPFLNDAKRKGIHYTIVQHPGLPQFVHGDERRIRQALSNVTANAFAHTHKGHVKVEVFVSEIRDQQAVVDFVIEDSGIGMSAGQLDTLFRDLEQVSSEDAPTSSSLDDMPREMRTLGLGLAVVARIVRNMDGQLRLKSEVGQGSRFVVQLPFLLSDQYSGSHLKSAPAGRGNQSFNSTSTASTAPDALRAAPEGEITLVDRASTMASAGDISLKGSGASQRSMGSHTSHSSRGSRGSHQSDADRLINAIQTPLSLNEREGTEFPIQGGRGSRSNSMRAESRGAISLDGRSASPSDQQPQSPVSTKPRSEPGSTEVMDSKTPIRAVKMPDDYTDMPQKPQPSEQSGVLFEMKTIDRPVAKAGTESVTSAGTQMTDQQHLQVLVAEDDPINMKILRKRLERVGHGVHHTVNGEDCAAAFRERSSEFDVVLMDMQMPIVDGLTSTKMIRSMEASADYHGHSALANTNHRIPVFAVSASLVEREKQKYIDAGFDGWILKPIDFKRLNTLLAGISDEEVRNSCLYESGQWERGGWFHPRSLVGGSEASDETTPRAEHDAKDKDIGETAIISEDAKETGGAGEAKPDND

SEQ ID NO: 4065 - protein, 322 aa, Leavenworthia crassa
GQTPLFPRIFGHEAGGIVESVGEGVTDLQPGDHVLPIFTGECGDCPHCHSEESNMCDLLRINTDRVGMIHDGESRFSIKGKPIHHFLGTSTFSEYTVVHSGQVAKINPEAPLDKVCIVSCGLSTGLGATLNVAKPKKGQSVAVFGLGAVGLGAAEGARIAGASRIIGVDLNSNRFEQAKKFGVTEFVNPKEHDKPVQQVIAEMTNGGVDRSVECTGSVQAMIQAFECVHDGWGVAVLVGVPSKDDAFKTHPMNFLNERTLKGTFFGNYKPKTDIPGVVEKYMNKELELEKFITHTVPFSEINKAFDYMLNGEGIRCIITMGA

SEQ ID NO: 4066 - protein, 322 aa, Leavenworthia stylosa
  unsure (1)..(322): unsure at all Xaa locations
GQTPLFPRIFGHEAGGIVESVGEEVTDLQAGDHVLPIFTGECGDCPHCHSEESNMCDLLRINTERVGMIHDGESRFSIKGKPINHFLGTSTFSEYTVVHSGQVAKINPEAPLDKVRIVSCGLSTGLGATLNVAKPKKGQSVAVFGLGAVGLGAAEGARIAGASRIIGVDLNSNRFEQAKKFGVTEFVNPKEHDKPVQQVIAEMTNGGIDRSVECTGSVQAMIQAFECVHDGWGVAVLVGVPSKDDASRTHPMXXLXERTLKGTFFGNYKPKPDIPGVVEKYMNKELELEKFITHTVPFSEINKAFDYMLNGEGIRCIITMGA

SEQ ID NO: 4067 - protein, 825 aa, Alcaligenes faecalis
GCPNDRITLPPANAQRTNMTCHFCIVGCGYHVYKWPELEEGGRAPEQNALGLDFRKQLPPLASTLTPAMTNVVTEHDGARYDIMVVPDKACVVNSGLSSTRGGKMASYMYTPTGDGKERLSAPRLYAADEWVDTTWDHAMALYAGLIKKTLDSDGPQGVFFSCFDHGGAGGGFENTWGTGKLMFSAIQTPMVRIHNRPAYNSECHATREMGIGELNNAYEDAQLADVIWSIGNNPYESQTNYFLNHWLPNLQGATTSKKKERFPNENFPQARIIFVDPRETPSVAIARHVAGNDRVLHLAIEPGTDTALFNGLFTYVVEQGWIDKPFIEAHTKGFDDAVKTNRLSLDECSNITGVPVDMLKRAAEWSYKPKASGQAPRTMHAYEKGIIWGNDNYVIQSALLDLVIATHNVGRRGTGCVRMGGHQEGYTRPPYPGDKKIYIDQELIKGKGRIMTWWGCNNFQTSNNAQALREAILQRSAIVKQAMQKARGATTEEMVDVIYEATQNGGLFVTSINLYPTKLAEAAHLMLPAAHPGEMNLTSMNGERRIRLSEKFMDPPGTAMADCLIAARIANALRDMYQKDGKAEMAAQFEGFDWKTEEDAFNDGFRRAGQPGAPAIDSQGGSTGHLVTYDRLRKSGNNGVQLPVVSWDESKGLVGTEMLYTEGKFDTDDGKAHFKPAPWNGLPATVQQQKDKYRFWLNNGRNNEVWQTAYHDQYNSLMQERYPMAYIEMNPDDCKQLDVTGGDIVEVYNDFGSTFAMVYPVAEIKRGQTFMLFGYVNGIQGDVTTDWTDRDIIPYYKGTWGDIRKVGSMSEFKRTVSFKSRRFG

SEQ ID NO: 4068 - protein, 322 aa, Exiguobacterium sp. 255-15
MSLKRIAILTSGGDAPGMNAAVRAVTRKAIFHGLEVFGVYNGYQGLINGDLVQLNLGSVGDIIQRGGTFLRSARCPEFRTEEGRAKAVVNLKKFEIDALVVVGGDGSYRGAQKLTGLGFPTIGLPGTIDNDIPGTDYTIGFDTALNTALEAIDKIRDTASSHERTYVIEVMGRDAGDIALYAGLAGGAESILVPERPEDLKEVLNRIQSGVNRGKKHSIVIVAEGAGRAQDVGDEIAKETGLDTRVTVLGHVQRGGAPTAADRVLASRMGAYAIDILLEGKQGRVVGVRGGKMVDLDIDEALDENKHELDLEILELSKQLSI

SEQ ID NO: 4069 - protein, 90 aa, Escherichia coli
DLMAVGRYVLSADIWAELEKTAPGAWGRIQLTDAIAELAKKQSVDAMLMTGDSYDCGKKMGYMQAFVKYGLRNLKEGAKFRKSIKKLLSE

SEQ ID NO: 4070 - protein, 216 aa, Oryza sativa (japonica cultivar-group)
MVAGDSQARLLVLALLRLLLDPAAAAAAEPELFRRHSDYRATVPARGISVDFVWAPFESNLTRLLHEDLRLAPRTPDVLVLGSGLWHMLHVTDAARYGDALASVVDAAKSLRSPLPVPPPHMFWLGLPLLVNHMLNTDAKKVHMNDTILQAYDLEVEQRGLLQRDGGPFLLLDVGKLSRGCGQQCTADGMHYDGDVYDAVLHIMLNALVIESQQRI

SEQ ID NO: 4071 - protein, 299 aa, Oryza sativa (japonica cultivar-group)
MAAEAAPEWVEKGDNAWPLAAATLVGLQSVPRLVILYGDCGAVGPRTEKDREAFPPNNVLLTLAGAGLLLWMGWTGFNGGAPYAANVDASVTVVNTHLCTATSLLVWLLLDSFVFGRLSVISAVQGMITGLVCVTPAARLVLHKRSRLLARVDDTLAVLHTHGVAGSLSGVLTGLLLLAEPRFARLFFGDDPRYVGLAYAVRDGRAGSGLRQVGVQLAGIAFVVALNVAVTSAVCLAVRVAVPQLAGGGDAIHGEDAYAVWGDGETYEQYSVHGGGSNHGGFPMTANPVASKADEMIWI

SEQ ID NO: 4072 - protein, 347 aa, Agrobacterium tumefaciens str. C58 (U. Washington)
MKTHRIALIPGDGIGQSVTDAAWQVLNAVAKTSGFVLEGTEFPWSCAFYKETGAMMPKDGIETLRGFDAIMLGAVGWPAEVPDSVSLHGLLLPIRKAFVQYANIRPHRLLSGVQGPLKADGFDILCIRENTEGEYSGAGGRVHQGTEDEVAVETSIFTRKGVERILRFGFEQAQKRRGKLASITKSNAQKYSMVFWDEVTHKLAAEYPDVEVSSYHIDAMAARMVMAPESLDVVVASNLFGDILTDLGAAIQGGLGFAASANINPDRSAPSMFEPVHGSAPDIAHLGIANPIAAIWSGAMMFEHLGEKDAAAKIMAALETATGRGIGTVPGKDKTDTITAAVLAALA

SEQ ID NO: 4073 - protein, 382 aa, Oryza sativa
MPLISTTPIVIFGVTSAPFQSASSPEFNYPAVFNFGDSNSDTGGRVAAGFESIAPPYGSTFFGSPSGRFCDGRLIIDFLMDAMDMPFLNAYLDSVGAPNLRAGVNFAQAGCSITPATATSVSPFSFGLQIKQFFAFKDKVTKLLSKAGDTYRRYIPQSDYFSRGLYTFDIGQNDLAGEFYWKTEDQVAASIPTILLEFETGLKKLYEQGARKFWIHNTGPLGCLPQNVAFFGKDRSQLDELRCVAKHNRVAKLFNLQLHALCTKLRGEFAGASITYVDIYTIKYSLIANYSRYGFENPIQACCGYGGPPLNYDSRVPCGQTASLNGNLVTAKGCKDSTEFVNWDGIHYTEAANFHIASQILTGRYSDPPFADKMPFLIKPKF

SEQ ID NO: 4074 - protein, 457 aa, Agrobacterium tumefaciens str. C58
MLSNSLIELDRAHLVHPVSSFRGHEKLGVRVLKSASGATVTDMTGHQLIDGFAGLWCVNAGYGHDSIVEAAAKQMRELPYATAYFDIGSEPAIRLASELADRAPGDLNHVYFTLGGSDAVDSTIRFIRYYWHAKGQPQRDQFISIEQGYHGSTTAGSGLTALPAFHAGFGVPYDWQHKIPSHYAYRNPAGSDPAAIIASSLQILKDKIEAIGPDRVAAFYAEPIQGSGGVLVPPPGWIKAMRELCSSYGILFVADEVITGFGRTGPLFACADEDIVPDFITAAKGLTSGYVPMGAVFMADHVYDTIADFAGEAAIGHGYTYSAHPVSAAVGLEVLKLYEGGLLENGRRAGQRLMAGLEGLRNHPLVGDVRGRGMLAAIELVTDKDKKTPLPAAAAPARKVFDRAWENGLIVRAFANGILGYAPPLCCTDGEIDAIVERTLKTLDQTLEDPAVRAAMA

SEQ ID NO: 4075 - protein, 156 aa, Haemophilus influenzae
NRTNTPVLVDGKDVMPEVNAVLAKMKDFCQRIISGEWKGYTGKAITDVVNIGIGGSDLGPYMVTEALRPYKNHLNMHFVSNVDGTHIAETLKKVNPETTLFLVASKTFTTQETMTNAQSARDWLLKAAKDESAVAKHFAALSTNAKDVEKFGIDTN

SEQ ID NO: 4076 - protein, 398 aa, Puccinia triticina
MCGTSSAMDPVFQSINPSLYDPQRVLDSEEFEILTDMNKVKAYSDDNKNIACCYNDKQQLNMVKKPMPEVHPGQVLVRVRATGICGSDIHFWKHSRVGEKMVVKHECGAGHESAGEVIALGEGVTDLEVGDRVAIETGIPCSKPTCEMCRTGQYNACPEIMFWFTSPYHGLMTRYHAHPSCWLHKLPPNVSYEEGSLLEPLAVALAGIERAGVRLGDPVLICGAGPIGLVTLLACHAAGACPIAITDLSEGRLDCAKRLVPSVSTFKISLGESETDVAGQIQAAMGCKPRVAMECTGFESSIATAIFSVKFGGKVFVIGVGKDKQTLPFMHMAENEIDLQFQFRYANQYPKAIRLVSTGLIDVKPLITHRFVLEKAIEAFNTAADPKSGSMKVQVVDY

SEQ ID NO: 4077 - protein, 1533 aa, ASPERGILLUS NIDULANS FGSC A4
MDGQRQQPYVPAPPPSASQPSQAHIMPLPPPPPRYPPAQPQNVMPPPPPGPPPGSAYGTSKLTNPQLQSQSTLGWSNWGGRGIPQYLPPPPPPPMTHANQSSFARPSAVQNNNATSATYVPQPGTFGPGVGIPPFDVPSHSYDAPNTMVASERPRPPPNAPYGHGTSNASAYQLDGTIPSTPLTHTAPFSHETSHDVPSSAVPTGSPFKSVPQSASQANDLTKSSSHRHNNSNTTVGGMSASEAAVQWPLDRVLLWLAKNGFSHEWQETFKTLEIEGADFLELGHGQNGRPNLGKMHTVVYPQLAKECEANGTAFDLTRERDEGKRMRKLIRLIHDDAGPDNGGTFNKQHDFDDGHGSVPDEGPEFSPNINNVAQAPGSPSLNATNVSNSPNLKAPKYSHKPRSFTTPGSISHDSTTAELAMTEGSSTMLPRSDFSRNVLGTIGIDHQRKSPSMSSDNGVFAIPPHRPHEGSPKSGSPAAQHATLYAAPVSSATDLNAKYDARFGHNRVNSGERRYYETLKHDGSRPSPQTTQTAGDNASSYPKDHRMGFLNFFKKKSARNSDPNNPSPDDNTPDSPIYSKYHFNSSDVSVNERPLSASLSDYERMMMVRTKPAHRGKRFIFATMDGWNYRLIDTTDIDSVEKLRASICQNLGIYDWPDAQIFLTEPGQLEHDEPLNDTFLTLCQRSKSDSIGSLKLFVKTPHNVAGLGVSMPDRSAVSPTSAIPRKPLDGEAASRLSPLKPSSPQQLKPPASRLPLRDIQNSAAGTSPVDGEPDGSLQDQERKPQKSYRPTPAPLPRPDAYSETGYRRKEVINFDKPRISPYEDKKSEVLVPFRKPPSAPQESNTLSKVNSLRKKDGDRPRPHRSNQPPGIKEMMADMGMMSSLIGKPSSPNSGNTTATEDAHSSIDSAVDKSSQSTPPLTNTSYSPTTTATTTTTTTTASSSLSRSASQKRKSVGPEFDFEETQVSFQRSPALEEDSDDDSDDGLFAIPLANTKNSVKPGSPDTQARPRKPSLTVDTEAKPRTGLSVSFKSPSATRETFASSGGDASNSTAPYFIASNSPEEEKTPIRRNSLRNSFATGDVWASRPPVEGVIDQLDDFFPDIDLDAPYLDEQGTSPPSSPASKVAIDNELNRKDKQENSHHGMQPPPAPEDNTLGSSEPTMTSHGQGIVARRNVSRSGGGLTRMKSIREVAKGANQATRQRSVAASSGNKRSGDVHRRKSTKMFGAKIMQISPRRGSQLSQLDPIPQNSISSSSKPQRQPTFRIIRGQLIGKGTYGRVYLGMNADNGEVLAVKQVEINPRLAGQDTDKIKEMVAALDQEIDTMQHLEHPNIVQYLGCERGELSISIYLEYISGGSIGSCLRKHGKFEESVVKSLTRQTLEGLSYLHNQGILHRDLKADNILLDLDGTCKISDFGISKKSNDIYGNDSSNSMQGSVFWMAPEVIQSQGQGYSAKVDIWSLGCVVLEMFAGRRPWSKEEAIGAIFKLGSLSQAPPIPDDVSMNVTPAALAFMWDCFTVSNPSYSSFLRARSEV

SEQ ID NO: 4078 - protein, 496 aa, Bifidobacterium longum NCC2705
MSEQFDLVIIGAGPGGYSTALRAAELGMKVALVERDATVGGTCLNRGCIPSKALITATHTIDTVHRAAELGVNASVNGIDFGTLRDYRLRVVKTMVGGLAGLLAHRGITVFRANAAFHADETAPATSNHIVHLVPSPDQSDILTYHKADVPEPSGPTMDLTATNIVIATGAKPRPLPGNPFAGALIDSTQALEVNEFPSSAVIIGAGAIALEFASMWNAAGSKVTLLIRKDRVLSAWDRRAGTTLTRELKRHGVNIITRASVTHVDTGANLGATVHYTCEGQDGEQSVWGEIALVAIGRDPITDPAWGVTIDDHGHVATDAYGRTDKPGVWAVGDVTAGHALAHRAFEQGIVIAETIAGLNPKPVDEATVPQIVFSFPEAASVGLTVEQAQAREDLIEIKETNYPMLANARMLMSGTAGSLTIVSGCDAANPDTPRVLGVHMVSQMASDIIAEAEQLVGNHVPLADAARLVHPHPTFSETLGEALLKADGRPLHTR

SEQ ID NO: 4079 - protein, 163 aa, Candida albicans SC5314
MSDFYEFAPNDIKGTPYSFKKLQGKVVLIVNVASKCGFTPQYKGLQDLKQKFADQPVEILGFPCNQFGHQEPGTNEEIEKYCREYFGVTFPVLSKVETNGKNAEPVYKFLKSQKPGLLGLHRIMWNFEKFLIDQDGNVVARFSSFTKPETIGLRIEEMLKHQA

SEQ ID NO: 4080 - protein, 309 aa, Oryza sativa (japonica cultivar-group)
MRRWLAEGVMELAVGAPESNSSFSSSPSGATPSSGGPMWWVSGCHGTVYSLAVMLPSLAFVGFLAWQARRSFRRLSYGRSHVVVVAYYALLWAVAVLNLLWCFLQAWQCMPDRAFSWNVLSLFTKSGMLFLEVSLIAFLLQGNETSGFESLARTFVISGAVVAADVLLKTIYVFGFGVSLFIDVDQGTGGKWGLWFLHKLVLTGVYGLIVFMYHSRWRDRLPAKPAYYNYVCAMLLLNGISLFGCFLVATGAGFGLWLYNLTSVCYHSLYLPLLYVTFLADFFQEEDMLLENVYYSEMKDAGFFDADWD

SEQ ID NO: 4081 - protein, 554 aa, Pseudomonas syringae pv. syringae B728a
MAYYRTPSDVTALPAWQALNKHRQAMQNFSMREAFNTDPQRFSQFTLSSAGLFLDYSKNLITTETRDLLVSLAGEVGLKDAIKAQYDGELVNSSEGRPALHTALRRPVGDKLKVNGVDVMPDVHRVLNQMTELVGRIHDGLWRGYTEKPITDVVNIGIGGSFLGPELVSEALVAYAHKGVRCHYLANIDGSEFHELSMKIRAETTLFIVSSKSFNTLETLKNAQAARAWYLAQGGSEVELHRHFIAVSSNNAAAVAFGIREENIFPMWDWVGGRYSLWSAIGLPIALAIGMSNFKELLSGAYTMDQHFQSAPFEQNMPVLLGLLGVWYGNFWNAQSHAILPYDHYLRNITKHLQQLDMESNGKSVRQDGTPTSTDTGPVIWGGVGANGQHAYHQLLHQGTQMIPADFIVPIVSFNPVADHHQWLYANCLSQSQALMMGKTRAEAEAELREKGMDEQEVQKLAPHKVIPGNRPSNTLVVERISPRRLGALVAMYEHKVFVQSVIWGTNAFDQWGVELGKEMGKAVYQRLTGGTEEQADDASTQGLINYFRGRHRG

SEQ ID NO: 4082 - protein, 179 aa, Oryza sativa (japonica cultivar-group)
MRRWLAEGVMELAVGAPESNSSFSSSPSGATPSSGGPMWWVSGCHGTVYSLAVMLPSLAFVGFLAWQARRSFRRLSYGRSHVVVVAYYALLWAVAVLNLLWCFLQAWQCMPDRAFSWNVLSLFTKSGMLFLEVSLIAFLLQGNETSGFESLARTFVISGAVVAADVLLKVCHCSIVQAE

SEQ ID NO: 4083 - protein, 767 aa, Tolypothrix sp. PCC 7601
MVSEFQAQSINVNSLKEAAIHVCSQIQPHGVLLVLGEPELNILQISSNTWSVFGILPEDVLQKKLEDLLDPFQIERIKAGILEGNLDYINPTKIWVRKKGDEYVVFDAVFHRNPEGLLILELEPAISQENIPFLSFYHLARASINQLEKTTNLRDFCQIIVQEVRKVTGFDRVMLYKFDDDGHGSVIAEEKLDSMEPYLGLHYPESDIPKPARKLFASNFIRLIPDAHAEPVQILPINHPQSQQPIDLTNSILRTAANCHLEYLHNMGVGASLTISLIKDGKLWGLIACHHQTPKYVSYEFRKACEFLGRVIFTEISTREETEDYDYRMNLAYIQTVLVEYMSQEENFIDGLVKHQPNLLNLTSAQGAAVCFGDRCTVIGQTPKEEDLNFLLQWLKNNVREEVFYTDSLPRIYPDAEKFKNVASGLLAIPISKRNYVLWFRPEVIQTVNWGGNPNEAFEVSQTEGNLRLVPRKSFELWKENVQLTSLRWKAVEIKAALELRKAIINIVLRQADELAQLAHDLERSNAELKKFAYVASHDLQEPLNQVANYVQLLEMRYENELDEDAKEFINFAVEGVSLMQTLIDDVLAYSKVDMQASAFQLTEVETPLNRSLSNLRGRIHETGAMITHDPLPTVMADSTQLMQLFQNLIANAIKFRSEQPPKIHIGAERLEDEWLFSVQDNGIGLEPRFSDRIFVIFQRLHTREEYPGTGMGLAICKKIIECHRGRIWVESQLGEGATFYFTIPVGGRERERRNGRQTQKDLFGRG

SEQ ID NO: 4084 - protein, 449 aa, Arabidopsis thaliana
MKTTHFSSSSSSDRRIGALLRHLNSGSDSDNLSSLYASPTSGGTGGSVFSHLVQAPEDPILGVTVAYNKDPSPVKLNLGVGAYRTEEGKPLVLNVVRKAEQQLINDRTRIKEYLPIVGLVEFNKLSAKLILGADSPAIRENRITTVECLSGTGSLRVGGEFLAKHYHQKTIYITQPTWGNHPKIFTLAGLTVKTYRYYDPATRGLNFQGLLEDLGAAAPGSIVLLHACAHNPTGVDPTIQQWEQIRKLMRSKGLMPFFDSAYQGFASGSLDTDAKPIRMFVADGGECLVAQSYAKNMGLYGERVGALSIVCKSADVAGRVESQLKLVIRPMYSSPPIHGASIVAVILRDKNLFNEWTLELKAMADRIISMRKQLFEALRTRGTPGDWSHIIKQIGMFTFTGLNPAQVSFMTKEYHIYMTSDGRISMAGLSSKTVPHLADAIHAVVTKAV

SEQ ID NO: 4085 - protein, 765 aa, Tolypothrix sp. PCC 7601
MLQLIYNNFIVSLSPENSPENAAIAPFEVDLTNCDREPIHIPGSIQPHGMLLALTEPELTIVQVSRNTDEILGVAATEFINQPLSRLLDAQQIDFFRNCLAQEDLTLVNPIELTIAVGENARAFDGIIHRSDRLLILELEPVLHQKNYTFFNFYHLVKAALSKVQNASTLDELCQIIVKHVRQMNGFDRVMIYRFDENWHGTVIAEDKSAHLSPYLSLRYPASDIPKQARQLYRDNWLRLIPDVDYQPVALLPHHNPVTNQPTDLSHSVLRSVSPLHIEYLHNMGVKASMSISLLKNQKLWGLIACHHESPKYVPYEIRSACEFLGQMTSLELAAKEDSENTEYKMQLKAVQSKLVEYMAAANNFVDGLIGQEPNLLDLVNATGAAVCINGEYQTLGRTPQHREIEQLINWLSQHTQEEVFHTNCLSELLPEASEWKDVASGLMALSISKSQKSYLLWFRPEALQTVDWAGNPHKPVELADDGSLRLSPRKSFDLWKEIVQRQSLPWESYEIEAVWNFRSAIVGVVLRKADELAKMNVELQRSNDELDAFAYIASHDLKEPLRGIHHYSSFLIEDYGNRLDDEGIGRLRTLIRLTQRMENLIDSLLHFSRLGRVELGIQPTDLNDLVQRVIDVLSARIQETGATIRIPRPLPTIMCDRVQVSAIFTNLIANGIKYNDKPEIWVEIGYLEPITLYVRDNGIGIRDRHFESIFRIFKRLHGPTQYGGGTGAGLTIAKKVVERHGGKIWVESTYGEGSTFYFTLQEVK

SEQ ID NO: 4086 - protein, 278 aa, Acinetobacter sp. ADP1
MSATLKSNITFIGGGNMAQALIGGLIARGLPSTRIMVSDPVEAIRQVLQEKEIQALNNNVEAIQHADVVVLAVKPQVLATVLKPLQGLFDGKLIVSIIAGAEIETIAELSGTDRIVRVMPNTPALVQTGAHGLYANENVGSDDRDLASQILAATGLTIWVNSEAQIDAVTAVSGSGPAYFFYLMESMIRAGKNMGLDEKVATALTLQTALGAAQMAITSSNTPSELRKNVTSPNGTTQAALEVFDRAQISQNIQTALAAAQKRSQELAHELSDSTKTT

SEQ ID NO: 4087 - protein, 483 aa, Oryza sativa
MAAPSVAVDNLNPKVLNCEYAVRGEIVIHAQRLQQQLQTQPGSLPFDEILYCNIGNPQSLGQKPVTFFREVIALCDHPCLLEKEETKSLFSADAISRATTILASIPGRATGAYSHSQGIKGLRDAIAAGIASRDGYPANADDIFLTDGASPGVHMMMQLLIRNEKDGILCPIPQYPLYSASIALHGGALVPYYLNESTGWGLEISDLKKQLEDSRLKGIDVRALVVINPGNPTGQVLAEENQRDIVKFCKNEGLVLLADEVYQENIYVDNKKFNSFKKIARSMGYNEDDLPLVSFQSVSKGYYGECGKRGGYMEITGFSAPVREQIYKVASVNLCSNITGQILASLVMNPPKAGDASYASYKAEKDGILQSLARRAKALENAFNSLEGITCNKTEGAMYLFPQLSLPQKAIDAAKAANKAPDAFYALRLLEATGIVVVPGSGFGQVPGTWHIRCTILPQEEKIPAIISRFKAFHEGFMAAYRD

SEQ ID NO: 4088 - protein, 465 aa, Glycine max
  unsure (1)..(465): unsure at all Xaa locations
MASSVLSAASHSVSPSCSLSTTHKGKPMIRDNTLGFHRGPNSFSSSRSRGRISMAVAVNVSRFEGIPMAPPDPILGVSEAFKVDNSDVKLNLGVGAYRTEELQPYVLNVVKKAENLMLERGDNKEYLPIEGSAAFNKGTAELLLGAEHPAIKQQRVATVQGLSGTGSLRLGAALIERYFPGAKVLISAPTWGNHKNIFNDASVPWSEYRYYDPKTVGLDFEGMIEDIKSAPEGSFILLHGCAHNPTGIDPTPEQWEKIADVIQEKNHIPFFDVAYQGFASGSLDEDAASVRLFVARGMEVLVAQSXYSKNLGLYAERIGAINVVSSSPESAARVKSQLKRIARPMYSNPPVHGARIVADVVGNPVLFNEWKAEMEMMAGRIKNVRQQLYDSITSKDKSGKDWSFILKQIGMFSFTGLNKNQSXDNMTNKWHVYMTKDGRISLAGLSLAKCEYLADAIIDSYHNVS

SEQ ID NO: 4089 - protein, 547 aa, Pseudomonas aeruginosa PAO1
MSELIRVPDIGNGEGEVIELLVKPGDKVEADQSLLTLESDKASMEIPSPKAGVVKSIKAKVGDTLKEGDEILELEVEGGEQPAEAKAEAAPAQPEAPKAEAPAPAPSESKPAAPAAASVQDIKVPDIGSAGKANVIEVMVKAGDTVEADQSLITLESDKASMEIPSPASGVVESVSIKVGDEVGTGDLILKLKVEGAAPAAEEQPAAAPAQAAAPAAEQKPAAAAPAPAKADTPAPVGAPSRDGAKVHAGPAVRMLAREFGVELSEVKASGPKGRILKEDVQVFVKEQLQRAKSGGAGATGGAGIPPIPEVDFSKFGEVEEVAMTRLMQVGAANLHRSWLNVPHVTQFDQSDITDMEAFRVAQKAAAEKAGVKLTVLPILLKACAHLLKELPDFNSSLAPSGKALIRKKYVHIGFAVDTPDGLLVPVIRDVDRKSLLQLAAEAADLADKARNKKLSADAMQGACFTISSLGHIGGTGFTPIVNAPEVAILGVSKATMQPVWDGKAFQPRLMLPLSLSYDHRVINGAAAARFTKRLGELLADIRTLLL

SEQ ID NO: 4090 - protein, 476 aa, Arabidopsis thaliana
MALQRQLLKRATSDIYHRRAISLLRTDFSTSPSIADAPPHIPPFVHQPRPYKGPSADEVLQKRKKFLGPSLFHYYQKPLNIVEGKMQYLYDESGRRYLDAFAGIVTVSCGHCHPDILNAITEQSKLLQHATTIYLHHAIGDFAEALAAKMPGNLKVVYFVNSGSEANELAMMMARLYTGSLEMISLRNAYHGGSSNTIGLTALNTWKYPLPQGEIHHVVNPDPYRGVFGSDGSLYAKDVHDHIEYGTSGKVAGFIAETIQGVGGAVELAPGYLKSVYEIVRNAGGVCIADEVQTGFGRTGSHYWGFQTQDVVPDIVTMAKGIGNGLPLGAVVTTPEIASVLASKILFNTFGGNPVCSAGGLAVLNVIDKEKRQEHCAEVGSHLIQRLKDVQKRHDIIGDVRGRGLMVGIELVSDRKDKTPAKAETSVLFEQLRELGILVGKGGLHGNVFRIKPPMCFTKDDADFLVDALDYSISRL

SEQ ID NO: 4091 - protein, 292 aa, Tropheryma whipplei TW08/27
MKGIILAGGTGSRLWPITKCISKQLMPVYDKPMIYYPLSTLMMADIREILVITTTQDYDQFRRLLGDGGQWGIKLSYAQQLSPGGLAQAFLIGESFIASESIALVLGDNIFHGSGLGTSLRQHRSIQGALIFAYHVSNPKDYGVVTFDADGKAVSIEEKPESPKSNFAVPGLYFYDNQVVDIAKQIPLSARGELEISSVNNFYLEKDQLRVYPLARGTSWLDTGTFDSLVQASEYVRVIEQRQGFKVGCVEEIAWRAGWIDDDQLAKLANGLMKSGYGKYLHYLLSGKHGFS

SEQ ID NO: 4092 - protein, 161 aa, Candida albicans SC5314
MSQFYELAPKDAKGEPYPFEQLKGKVVLIVNVASKCGFTPQYKGLEELNKKFADQPVQILGFPCNQFGHQEPGSNEEIGSFCSLNYGVTFPVLDKIEVNGDNTDPVYKYLKSQKSGVLGLTRIKWNFEKFLIDQNGKVIERFSSLTSPESIGTKIEELLKK

SEQ ID NO: 4093 - protein, 229 aa, Candida albicans SC5314
MVKSNVESAWETMEDTFSEIQNKFHQIYKPIDTGKPDEDDETTKKESLDITDDSTLSVSPITQLLYLARSKFYDLTPLDNSKSPFPFKNLRGKVVLIVNVASRCGFSFQYNGLEQLNKRFANDDFVLLGVPCNQFLWQEPGTNDQIVTKCKKKYDVSFQILDKINVNGEQADPVYKFLKAQKEGLWGTNRVKWNFEKFLIDKNGRVVERYSTFTRPVAITPRIEQLLES

SEQ ID NO: 4094 - protein, 348 aa, Saccharomyces cerevisiae
MSIPETQKAIIFYESNGKLEHKDIPVPKPKPNELLINVKYSGVCHTDLHAWHGDWPLPTKLPLVGGHEGAGVVVGMGENVKGWKIGDYAGIKWLNGSCMACEYCELGNESNCPHADLSGYTHDGSFQEYATADAVQAAHIPQGTDLAEVAPILCAGITVYKALKSANLRAGHWAAISGAAGGLGSLAVQYAKAMGYRVLGIDGGPGKEELFTSLGGEVFIDFTKEKDIVSAVVKATNGGAHGIINVSVSEAAIEASTRYCRANGTVVLVGLPAGAKCSSDVFNHVVKSISIVGSYVGNRADTREALDFFARGLVKSPIKVVGLSSLPEIYEKMEKGQIAGRYVVDTSK

SEQ ID NO: 4095 - protein, 565 aa, Streptomyces coelicolor A3(2)
MAATPPKPAAATPRRKVSRHRGEGQWAAGHFTPLNGNEQTKKDDDGLNVRTRIETIYSKRGFDSIDPGDLRGRMRWWGLYTQRRQGIDGGKTAILEPEELDDRYFMLRVRIDGGALTTAQLRVVGEISQEFARGTADITDRQNVQYHWIRIEDVPEIWNRLEGVGLSTVTACGDTPRVMIASPVAGIAEDEIIDGTPALEEMKRRVLNNPAYSNLPRKFKTAISGSPVQDVVHEINDVAFVGVEHPEHGPGFDLWVGGGLSTNPKLGVRLNAWVPIDDVPDVYEGVISIFRDYGYRRLRNRARLKFLVADWGAEKFRQVLEDEYLKRKLTDGPAPAEPSSRWRDHIGVHRQKDGRYYVGFAPRVGRVDGTILTKVADLAEAHGSGRVRTTVEQKMIVLDVEEGRVDSLVESLEALDLSARPSTFRRGTMACTGIEFCKLAIVETKARGASLIDELERRLPDFDEPLTINLNGCPNACARIQTADIGLKGQLMLDEHGEQVEGYQVHLGGALGLEAGFGRKVRGLKVTAQELPDYVERVLKRFQAEREDGERFAAWAARASEEALS

SEQ ID NO: 4096 - protein, 172 aa, Triticum aestivum
GYVERLGHGGFESSWRKDAMDWICKVHSYYNFGPLTLCLSVNYMDRFLSSFDLPHDKSWMQQLMSVACLSLAVKMEETVAPLPVDLQVCDEYYAFEPRNIKRMELIVMETLKWRMHSVTPFSFLCYFLDKFNEGKPPSYMLVSRCAELIVATVKDYRFLSFRPSEIAAAVVL

SEQ ID NO: 4097 - protein, 488 aa, Oryza sativa (japonica cultivar-group)
MVQPNNEQLNQPLPLGQKLFVHAGNDAALKIGPSYHGNVAIRSNDLPSSSRVAQYSGHRVKNTGTLHNSYVHYPAGSSGGHVSYNPQTEPVITYPHRSEGEFARGSSQIDNRTAAVKRKNPVIYPEYSINGDGYCAGSSSSTQFSNYPQPAPFSESLHRQMPPSVGPINWNDQSLVNQEGSQRNVRARHNFNNISLEPRPVHSTSNVSQSTSMKRNGPSFSTRMRTMPSGASGMHSGEMPYTMGSSNSSVPVPTLQGSSSSAIFASGVFAPRHVHGDTVPSYIHLPSVASSSSTAIPHEVIIPSYQPATSATTSTPMRASQPLPVRAVASSRHARNVLIGHANSGRNRRARSSYYGIQPLMIDAQQLIMMQQFALRESREAQDPHRAMRLDIDNMSYEDLLALGESIGNVCTGLVDEKISGCVREVIYCSSDEQQNDQDDGKCAICLEEYKDNSLLGILKCNHDFHTDCVKKWLKEKNSCPICKSAAA

SEQ ID NO: 4098 - protein, 467 aa, Sinorhizobium meliloti 1021
MRTGKAWVWQLRRAAERTRRPFAGDNSPTFTVEHTHRMYPCHVFCNPLIGTIQMKACSRSERREGSKKMEAAKASKPDVSAVYAVDLSQRPVSQGDAAREKAALLQLARRMHEAPGEMLRRFVELAMELTGGISAGISLLEETEPPPVFRWHHLKGILSPFNGATTPRDFSPCGITLDRSAPTLTIHPERVYDWIPPGLFLPEVLLVPLYIGRTEPLGTLWIVADRIEHFHCGHAATMQELAGFIGIALKMVRSEEELQQALEQQELLTREMGHRLKNLFTILDSMVRISARSTDNKDDLVALLSGRLHALAAAHSLVKPSFSDVQGAASSLAELLSIVLEPHEQPAISGKRRLSLTGPTVLCGEQSVNGLALVFHELATNAAKYGSLCGDLGTVDVVWQIDGDDLGITWREDGGAQATSSSPASKGFGSTLVEATVIRQFGGTLSYDWRSTGLSVHIVIPLCRLAQ

SEQ ID NO: 4099 - protein, 404 aa, Yersinia pestis CO92
MSPIEKSSKLDNVCYDIRGPVLKEAKRLEEEGNKVLKLNIGNPAPFGFDAPDEILVDVIRNLPTAQGYCDSKGLFSARKAIMQHYQARNIRDLTVEDIYIGNGVSELIVQSMQALLNLGDEMLVPAPDYPLWTAAVSLSSGKAIHYMCDEESGWFPDLDDIRSKITPRTRGIVIINPNNPTGAVYSKELLLEIVEIARQNDLIIFADEIYDKILYDDAQHHSIAALAPDLLTVTFNGLSKTYRVAGFRQGWMVLNGPKKHAKGYIEGLEMLASMRLCANVPMQHAIQTALGGYQSISEFIQPGGRLYEQRDRAWELINQIPGVSCVKPQGALYMFPRIDQKRFNLKDDQKLVLDLLLQEKVLLVQGSAFNWPYPDHVRIVTLPRVDELEMAVRKLGRFLETYHQ

SEQ ID NO: 4100 - protein, 347 aa, Bifidobacterium longum NCC2705
MSETMKAAIFVEPGKMTVEEVPKAMLEQDDDIVIRVVRTCVCGSDLWFFRGLSGQAAHSQVGHESIGVVEEVGAAVESVKPGDFVVVPFPYSCGKCPVCKAGFESVCPHGGYFSACQAEYLRVPEADGTVVKVPGSPEDYSDEQLASLLTISDVMSTGYHAAVSAEVKPGDTAVVMGDGAVGLCGVIAAKMRGATRVIAMSRHEDRAALAREFGATDIVPERGQEAIDKVLEMTGGYGADAVLECVGSKQSFDTAIGLIRRGGVIGRVGLPHDVEISAEGTFYGNIGIKGGPAPVRHYDLDEGLLDAVLKGEINPGRVFTAEYDLDHIQDAYEAMDQRKVIKALIRF

SEQ ID NO: 4101 - protein, 382 aa, Xanthomonas campestris pv. campestris str. ATCC 33913
MPVTTKLPKVGTTIFTVMSQLAAEHGAVNLGQGFPDFAVPQRLVDALGQAMAAGHNQYPPMTGVAALRQAIAGKAQRCYGAQVDADTEITVTSGATEAIFNAIHAVVRAGEEVIVLDPAYDCYEPAIDLAGARAVHVALDPQTFAVDWDALRAAITPKTRLLMINSPHNPSGAMLSAADMQTLTELLHGTDIFLLSDEVYEHIVFDGRRHESVLRWPELRARAFVISSFGKTYHCTGWKIGYAIAPPALSAEFRKVHQYNTFTSFGPAQHAFAAMLRDEPEHDEQLGAFYQAKRDRFREQLLTTRLVPLPVPGGYFQLVDYSAISDLPDTEFVKWLTVEKGVAAIPLSPFYETAPAGQRLARLCFAKNDATLDAAIARLQQL

SEQ ID NO: 4102 - protein, 456 aa, Listeria monocytogenes EGD-e
MQQTVTYGAKWKQFLTIFTPIVITQLTLFSMTFFDTTMSGNYSNQALAGVAIGSSFWAPVNAAFSGLLMAITPIIAQLIGAKKEKQVKNTVHNGLYIALFLAFILILINFLVVPMILTHMPVTAEVADIARHFLNGICIGIPAFFISAILRSFIDSLGLTRVTMLITLCTVPFNIFLNYCFIFGNFGFPEMGGAGSGYATGITYWLVVLVSVILIQTQTRLRKFGVFKGLTALRFSKIKEIIGIGVPNGLTILFETSIFSAVTILMGAFGTETIAAHQSANSVCTLLYAFPLSVASTLTILGGYETGAKRLKDAKQYRHIGMAAAILIGCVNGAILFFFRDIIAGFYTNDPALSNLIMHFLVYAILFQFADAVLSPVLGALRGYKDVTVTSIVAFISYWLIGLPVGYGLSFTNLGPFGYWIGLSTGLFVAAFILSIRVRKTEQKLSFNTKDAEISN

SEQ ID NO: 4103 - protein, 380 aa, Zea mays
  unsure (1)..(380): unsure at all Xaa locations
MARLRVAPPLAVLLLVLLSTAARPSLAQPSNNNSTSSQRHSRTTTGGGFTPTTVIVLVALISALVVLTLFSIYINRCAPTRPAPPRRPSRYAPPDHHQQAGGSAAHPDRRGGGARAGLDKEVVESFPTAVYGDVKARVAARSGSGSGPLECAVCLAAFEDQDELRVLPACCHVFHPDCIDPWLAGAVTCPLCRADLTAAAAPYYPPXSSDGSGSGSNLAARPHEAVREETDDDEERGEARLVAACTPEXVVASLGAAPHHHEFHYRRTQSAMDVPDRHTLRLPEHVMKELTAVRGHRRAASLXAYPXXAXXTPGWLAXIXRSVSWQRPSRTDPDAVDDSGGSKRVVPINGTPAERPSGGSGDDATDDMEKPGHDALLNQV

SEQ ID NO: 4104 - protein, 432 aa, Wigglesworthia glossinidia endosymbiont of Glossina brevipalpis
MKKNLIISNVRGSKDITPECMHIWNYVETKIIKIVDSYNYKEIRFPIMEFAKLFSKAIGDDNIVVNKEMYIFLDKNKHELALRPEGTAGCVRSCIFNKLLKNNITRLWYMGPMFRYERPQKGRQRQFSQLGIEIFGSDSYSAEFELISISNRIWKSLNINKHVYLELNSIGNLQERQTYQIELKKFLLIHEDKIKKFFLNDITKNPIKIFNTNNKYIKNLLKQAPKIIDSIGINSRNTFFYLCDILKNLKIPYKINPFLFRGLDYYNDIVFEWMSKEINNTKIAICSGGRYDNLVKNMGGIYTPAVGCAIGLERLIMLVSSLSKEIKKKSSIDICIIPINIKIEKEVLIFSEKLRDIFSYKLRIKVDNSQKNFKKKLKDADKLGSKIVIILGENEIKNKQITIKNLSTRKQYTLYIDDAIEKIKKIFTKNIQ

SEQ ID NO: 4105 - protein, 426 aa, Triticum aestivum
  unsure (1)..(426): unsure at all Xaa locations
KEMIVSMAVAGAIIGAAVGGWANDRFGRRTSILVADLLFFAGAVVMASATGPVQLVVGRVLVGLGVGMASMTAPLYISEASPARIRGALVITNGFLITGGQFLSYLINLAFTKAPGTWRWMLGVAGLPAVFQFVLMLFLPESPRWLYRKGRVEEAEAILRKIYTAEEEVTREMQELKESVEAEARERGSSERVSLTALVKTPTVRRALVAGVGLQVFQQLVGINTVMYYSPSIVQLAGFASNQTALALSLVTSGLNALGSIVSIYFIDRTGRRKLLVISLVGVIASLALLSAVFHQDHHTLARRRQAPRPDTSMAPSHARATGRAAPAGTAPGASRPSSTGCGFCASGAGKQAAPGRVPAVERDGARRVPRRGATVVHARLPEPIRLAGDVRAGSVHRLLLPREMGHGXLDRQLKRXNRWRXPRVF

SEQ ID NO: 4106 - protein, 47 aa, Zea mays
  unsure (1)..(47): unsure at all Xaa locations
QEHPEWEIKNGAVFFQKAKESXPCKEIPSLQLINQTLSYARELERIV

SEQ ID NO: 4107 - protein, 342 aa, Zea mays
MVRMSSSSSASGVNLTEQIENVFDQLISKIEQADPDFDPRPFLKQLNVLGRYEPIKRNVYFTKRYIEDYGISCHCKPSPGSSVVCGRDCYCSMLFSCCSSQCECDIACTNKSFQHRPLTKTKLIKTEKCGHGLVAEDEIKKGEFVIEYVGEVIDDRTCENRLWTMKRLDDTDFYLCEVSSNMVIDATNKGNLSRFINHSCEPNTAMQKWTVDGETRVGIFALRDIKIGEELTYDYKFVQFGAAQVCHCGSSKCRKMLGTTKYSGSSQNHRTKKKKRKTSCENCIQQFLRLWHPRQKMYVGCWIVDFDQGTKMHTLKFIDHHTEKFDLKEEEWHFLEVDSDED

SEQ ID NO: 4108 - protein, 161 aa, Triticum aestivum
  unsure (1)..(161): unsure at all Xaa locations
MAPTVMASSATSVAPFQGLKSTAGLPVSRRSNGASLGSVSNGGRIRCMQVWPIEGIKKFETLSYLPPLSTEALLKQVDYLIRSKWVPCLEFSKVGFIFREHNASXPGYYDGRYWTMWKLPMFXGCTDATQVINEVEEVKKGVPLXRTFRLLXSKTCARVQC

SEQ ID NO: 4109 - protein, 205 aa, Triticum aestivum
  unsure (1)..(205): unsure at all Xaa locations
MAPTVMASSATSVAPFQGLKSTAGLPVSRRSNGASLGSVSNGGRIRCMQVWPIEGIKKFETLSYLPPLSTEALLKQVDYLIRSKWVPCLEFXSKVGFIFREHNASPGXYYDGRYWXTMWKLPMFGXCTDATQVINEVEESRRSXPDAYVPHIGFDNMXQVQCVSSSASSNGLQDPARLNTNHTGNINAMRFALMLWFFHYLLLSR

SEQ ID NO: 4110 - protein, 238 aa, Wolbachia endosymbiont of Drosophila melanogaster
MSTIKIEKKSQLVKEVFDSVASRYDTMNDIMSLGMHRLWKDKMVNSVHFTKNSKVLDVAGGTGDIAIRVVRKEPSAKVTVCDINQNMLNRGRDKAINSNQINFDWVCASAESLPFEDSEFDYCTIAFGIRNVSDRKKALNEAHRVLKPHGKFICLEFAPMHYQNEIFTKLYDLYSFKVIPKIGSIVAKDKSSYEYLVRSIREFPTQADFKMEIEEVGFKNVEFHNMSYGIVALHIGTK

SEQ ID NO: 4111 - protein, 462 aa, Nostoc sp. PCC 7120
MAKNDKINFSTPSGFPEFLPSEKRLELYLLDTIRRVYESYGFTPIETPAVERLEVLQAKGNQGDNIIYGLEPILPPNRQAEKDKSGDTGSEARALKFDQTVPLAAYIARHLNDLTFPFARYQMDVVFRGERAKDGRFRQFRQCDIDVVGREKLSLLYDAQMPAIITEIFEAVNIGDFVIRINNRKVLTGFFQSLNISETQIKSCISIIDNLEKIGEAKVKLELEKEGINPEQTQKIIDFVKIDGSVDDVLDKLKHLSQTLPESEQFNLGVSELETVITGVRNLGVPDKRFCIDLAIARGLNYYTGTVYETTLIGHEALGSICSGGRYEELVGTFIGEKMPGVGISIGLTRLISRLLKAGILNTLPPTPAQVVVVNMQDELMPTYLKVSQQLRQAGLNVITNFEKRQLGKQFQAADKQGIRFCVIIGADEAAAQKSSLKDLQSGEQVEVALADLAEEIKRRLT

SEQ ID NO: 4112 - protein, 215 aa, Oryza sativa
ELLKTAIEKAGYTGKVVIGMDVAASEFYTEDQTYDLNFKEENNDGSQKISGDSLKNVYKSFVSEYPIVSIEDPFDQDDWVHYAKMTEEIGDQVQIVGDDLLVTNPTRVAKAIKDKACNALLLKVNQIGSVTESIEAVKMSKRAGWGVMTSHRSGETEDTFIADLAVGLSTGQIKTGAPCRSERLAKYNQLLRIEEELGAAAVYAGAKFRAPVEPY

SEQ ID NO: 4113 - protein, 461 aa, Zea mays
MAPANVRAAQAQAQAPSADRRLSTLVGHLLPSSPRRAAADTSATSTLESFPTMASQGSSVFAALEQAPEDPILGVTVAYNKDPSPMKVNLGVGAYRTEEGKPLVLNVVRRAEQMLINNPSRVKEYLPITGLAEFNKLSAKLIFGADSPAIQENRVATVQCLSGTGSLRVGGEFLARHYHERTIYIPQPTWGNHPKVFTLSGLNVRSYRYYDPATCSLHFEGLMEDLGSAPSGSIVLLHACAHNPTGVDPTIEQWEQIRQLMRSKSLLPFFDSAYQGFASGSLDKDAQSVRMFVADGGELLMAQSYAKNMGLYGERVGALSIVCKSADVAVRVESQLKLVIRPMYSNPPLHGASIVATILRDSEMFNEWTLELKAMADRIINMRQQLFNALKSRGTPGDWSHIIKQIGMFTFTGLNSEQVAFMRQEYHIYMTSDGRISMAGLSMRTVPHLADAIHAAVTQLK

SEQ ID NO: 4114 - protein, 441 aa, Chlamydophila pneumoniae J138
MIENDFPEASNFESSHFYRDKVGVIILCGGEGKRLSPLTNCRCKPTVSFGGRYKLIDIPISHAISAGFSKIFVIGQYLTYTLQQHLFKTYFYHGVLQDQIHLLAPEARQGDQIWYQGTADAIRKNLLYFEDTEIEYFLILSGDQLYNMDFRSIVDTAIRTHVDMVLVAQPIPEKDAYRMGVLDIDSEGKLIDFYEKPQEKEVLKRFQLSSEDRRIHKLTEDSGDFLGSMGIYLFRRDSLFSLLREEEGNDFGKHLIQAQMKRGQVQTLLYNGYWADIGTIESYYEANIALTQKPHAEKRGLNCYDDNGMIYSKNHHLPGAIITDSMISSSLLCEGCVINTSHVSRSVLGIRSKIGENSVVDQSIIMGNARYGSPSMPSLGIGKDCEIRKAIIDENCCIGNGVKLQNLKGYIKYDSPDKKLFVRDNIIIVPQGTHIPDNYIF

SEQ ID NO: 4115 - protein, 281 aa, Physcomitrella patens
MGRGKIEIKKIENTTSRQVTFSKRRGGLLKKAHELAVLCDAEVALVIFSSTGKHFEFASSGSMRDIIERYRKNSDGAVKRGTNTDLLGREVIKLKQQVERLESSQRHMLGEDLSALKVSDLLELEQQLDQGASRVRARKNQLILEEIEDLRRKEHELMIANEALRKKIADAEGAAEAAARANFPDARLESPKPFASDFSRDMSVSSQLAASVYPHPNLLQAQRSQTSLQLGRLSEQQIPSTEEGCAGESSLKWDHPHFHIPNRLHANISPSVRTYKLHVDR

SEQ ID NO: 4116 - protein, 368 aa, Nitrosomonas europaea ATCC 19718
MKTRAAVAWQAGQPLTIEEVDLAGPRTGEVLVEIKATGICHTDYYTLSGADPEGLFPAILGHEGAGIVVEVGADVKSLRPGDHVIPLYTPECRECKFCLSRKTNLCQAIRATQGRGLMPDGTSRFSLDGKAIMHYMGTSTFSNYIVVPEIALAKIREDAPFDKACYIGCGVTTGIGAVLFTAKVEVGANVAVFGLGGIGLNVIQGARMAGADKIIGIDLNPEREALGRQFGMTHFIDPSQVENVVDAVIQLTDGGADYSFECIGNTTVMRQALECTHKGWGRSIIIGVAKAGAEISTRPFQLVTGRKWEGSAFGGARGRSDVPRIVDWYMDGKISIDPLITHILKLEEINEGFKLMEAGESIRSVVVF

SEQ ID NO: 4117 - protein, 273 aa, Thermosynechococcus elongatus BP-1
MPNNTIVPRVPALGIIGCGRMAEAMLARLLAKGLLPDHVWVSARSPQRQQYLAHTYGVRVTTNLEVATAETLLLAVKPQVLADIESELADTPVAQEMGVVLSIMAGIHSGRLRRLFPQRLIFRAMPNTPAQVGAGVIALASDSAASELEIQKIKNLLGVLGQVVAVSEGQMDAVTALSGSGPAFVALIVEALCDAGVAVGLSRSLTQELVYGTIAGTVQLLKERGLHPAQLKDAVASPAGTTIAGLEVLEAAGMRGTLMQTVKAAYERSQALN

SEQ ID NO: 4118 - protein, 396 aa, Acinetobacter sp. ADP1
MHSQNDELEYQLDTLAIRTGHTRSFEGEHAEPIFLTSSFVYENAAEAAAKFSGEVSGNIYSRFTNPTVAMFEKRLAAMDGAERAVATSSGMGALLSVCMAFLKAGDHVICSRAVFGSIVALFEKYVAKFAVDITFVDLNDLDAWKNAMRPETKMLFIESPSNPLAEIADIPALAEIAHAHNAMLVVDNSFCTPALQQPLKLGADLVMYSATKYIDGQGRALGGAVTGSHKLLEEVFGVVRTLGPSMSPFNAWVFLKGLETLRLRMKAHCENAQQLAEWLDQHKNVEKVYYAGLPQHIGHERATKQQQGFGGIVSFVVKGGREGAWKVIDNTQFISITGNLGDVKSTITHPATTTHGKLSPEAKQAAGIQEGLIRVSVGLEDISDIIRDLDRGLALI

SEQ ID NO: 4119 - protein, 177 aa, Oryza sativa (japonica cultivar-group)
MEFGGTQMLGVSILRLFSMCQHFVITVTRTKYKEPTKALIYWPNLSNPGGNPAWMMLLLLMENILFDMIVLAGMGLWTLLEGFLLLANALAILNEDRFLGPRGWSMSEVSGNGQTKSLKGQIVGLIYATQFLRMPLIALNVLIIVVKLGLSDIQIFSLQVPFLMEILPTMVMPYVRP

SEQ ID NO: 4120 - protein, 451 aa, Exiguobacterium sp. 255-15
MLETTTLSGKIQQFMKIFFPILVTQVAFYLISFFDTVMAGRYGSADLAGVGVGASLWAPVYTGLTGILLAVAPLVSQAMGARKEREVKRIVIQALYVSVVIIVLTVLLGLVLVNPILNQMELSDQARHVARIYLVMLGFGIIPMFVFFVLRTLIDSLGKSNITMTLLLFSLPINVAFNYLFIFGKFGFPELGGIGAGVATAITYWILCIAVIGVVLKGELFQRLGILRRFYKPDVTRIKELVLLGAPIGLAIFSEVSIFSAVTLLLGAYGDVVIGAYQAAINFASFVYMIPLSAASALTITVGFEMGAKRVKDAVQYVWIGLLLCLVVSLFSGGLLYVQNERIAALYSNDPAVIKMAAHFMILAIFFQLSDAVAAPTQGALRGFKDVNVTFILTITAYWVIGLPLGFYFERFTELGPDGYWWGLIIGLAVGASLLLLRLMHLVRKSKEVVK

SEQ ID NO: 4121 - protein, 540 aa, Gloeobacter violaceus PCC 7421
MKKTTTLHPLRVARCRQSIAVLSALLVSCSFLPAPLFAAESGSKSDIRTAQSTKSVKLAADAPVAEVPIAFAPKSALGELHVDGGTVVFNTSTGTYAINGSIQPGVARGVSLGVPVEGLEDGEAPGVMVFDFLSIHLGPGVVVSVEGDGALILTSGDSAYLGATVDLKGGSGEAGAVDAGGGGGGGGGFHIFAGGDLQFAGSIDVGGGDGGTGAQVAGIPFGGGGGLARGGGSRGGKGSYAFAGGNGGNGGDGNPVLNRLGRKVGNLRGGGGGGGGGYSGLGGNGAAAGGAAGGNGAAGKCPAAAAGGVGGQGGRLGVVFGGKGGNGGAAPNGGVGGNGGNGSPNGGGGGGGGGGGDRCVRLPFFGPVPIPAKGGQGGRGGGGGSTGEPGTPQPKKAAAPQVRMALSSDEPPAMVGGGGGGGSVVLGSQTGLLTLSGTIRTEGGAGAEEAGSSGALTLIAAEGRLLIEPNASFNGSEPLAGGAEVTAQFPYSEYLPTGGGGGGGAGGPGQVIFYEEEPCPPGTATDGLIPICIIEGPVEF

SEQ ID NO: 4122 - protein, 215 aa, Solanum tuberosum
MKDKEVKTRMKRGFWKPEEDLILKNCVETHGEGNWATISEKSGLMRSGKSCRLRWKNYLRPNIKRGMMSEDEKDLIIRLHKLLGNRWSLIAGRLPGRTDNEVKNFWNTHLNNKRSCRGKKKHVKSKEANTQSTQGKMQEYPAETVSNQEVATKTVLDSWIEEMQDFNCSLLSPLTMNNMPFLEDEPFIPILDDIVLLEAFTSTGKEAWNEIQPFL

SEQ ID NO: 4123 - protein, 319 aa, Wigglesworthia glossinidia endosymbiont of Glossina brevipalpis
MNQLDYIKKFTNVVIDSGNIKYIKKYSPKDVTTNPSLILRESKSKHYYPLLMDAISYAKKKGGNLNSYIINANDKLLVNIGREILKIIDGRISIEIDVRLSFSYLDLIIRAKKIISLYNSYGIENNRILIKIAATWEGIQAAKFLEKSGINCNLTLIFSLVQAIACAESNVYLISPFVGRVNDWYIKNFKLNKNSKIDPGVKLVYKIFYFYQKYGYKTFVMGASFRNIDQIISIIGCDAITISPDFVNKLNNLKLKKIKNFIRVNLESKIKKNKLLEKEFRWKFNQNFMAVEKLSEGIRLFLRDQKKIDSFFLKKFKSG

SEQ ID NO: 4124 - protein, 248 aa, Mesembryanthemum crystallinum
MAGLAFGRFDDSFSWASIKAYIAEFISTLLFVFAGVGSCIAFNKLTADAALSPSGLVAVAVCHAFALFVAVSVGANISGGHVNPAVTFGLAVGGQITILTGVLYWIAQLAGSVAGCFLLKAATGGLTTPIHSVASGVGAIEAVVMEIIITFALVYTVYATAVDPKRGSVGTIAPIAIGFIVGANILAAGPFSGGSMNPARSFGPALASGDFHDHWVYWVGPLIGGGLAGLTYSNVFMHHEHAPLSSEY

SEQ ID NO: 4125 - protein, 440 aa, Tuber borchii
MITKIHARSVYDSRGNPTVEVDLTTTDTGLHRAIVPSGASTGQHEAIELRDKDKTKWAGKGVLKAVENVNTIIAPALIKEKFDVKDQATIDKFLIDLDGTPNKAKLGANAILGVSLAVAKAGAAAKKVPLYAHVADLAGTKKPFVLPVPFMNVINGGSHAGGRLAFQEFMIVPSEAPSFTEAMRQGAEVYQILKTLTKKKYGQSAGNVGDEGGWPDIQTVEEALDLITDAIDKAGYTGQIKIAMDVASSEFYKEDAKKYDLDFKNPDSDSSKWLTYQELADLYKSLAQRYPIVSIEDPFAEDDWEAWAHFYKTSDFQIVGDDLTVTNPIRIKRAIDEKSCNALLLKVNQIATLTESIQAAKDSYSAGWGVMVSHRSGETEDVTIADIVVGLRAGQIKTGAPARSERLAKLNQILRIEEELGEQAIYAGTSSEPPHLYIFI

SEQ ID NO: 4126 - protein, 359 aa, Solanum tuberosum
MAKSSENEHPIKAFGWATRHTSGVLSPFNFSRRVTGEKHVQFKVMYCGICHSDLHQLKNEWGNTKYPMVPGHEVVGVVIEVGSKVEKFKVGDKVGVGCMVGSCRKCENCTVDLENYCPRQIPTYNGYSLDGTLTFGGYSDMMVSDEHFVVRWPENLSMDAAPLLCAGITTYSPLKYFGLDKPGMHIGVVGLGGLGHMAVKFAKAFGTKVTVISTSANKKQEAIERLGADSFLISRDPEQMKAAMNTLDGIIDTVSAVHPILPLLMLMKSHGKLVMVGAPEKPVELPVFPLLMGRKLVAGSCIGGMKETQEMLDFAAKHNITPDIEVVPMDYVNTALERLLKSDVKYRFVLDIGNTLNKK

SEQ ID NO: 4127 - protein, 545 aa, Wigglesworthia glossinidia endosymbiont of Glossina brevipalpis
MCSIFGILNIKNNSISLRKKALKCSNLMKHRGPDSNGIYCDEDVILVHERLSIIDVKSGNQPLFNNSKTNVLIMNGEIYNYEEIKKNLIHDYSFNTNSDNEVVLALYKKFGLNFLNKLNGMFAFILYDIEKKIYLIGRDHIGMIPLYMGYDCDNNLYISSEMKALIPVCNYIKEFPIGSYLCNLNKKIIKYYKRNWFEFDSIKNCLLSYKKIKHSLKKSVLNHLKSEVPFGILLSGGLDSSIIASIASKELNYKNLNKKLKSFSIGLENSPDLHSSRICARYLNTDHCEVKFTEQDGLDVIKKVIYYVETYDITTIRASIPMYLISQKIKSSGIKMILSGEGADEIFGGYLYFHNAPSEKDLHDELVRKLKSLHIYDCARANKSMLAFGIEARFPFLDKKFLDVAMRINPKHKMCNKNRIEKYILRKSFINYLPNNILWRQKEQFSDGVGYKWIDSIKNFSKKIISDKKFNNAIHKFPYNTPLSKEEYLYREIFENFFPLPSAAECVPQEKSIACSSEIASKWSKYRNLNFDPSGRSLDIHISKN

SEQ ID NO: 4128 - protein, 180 aa, Nicotiana tabacum
MASSVLSSAAVATRTNVAQANMVAPFTGLKSAASFPVSRKQNLDITSIASNGGRVQCMQVWPPYGKKKYETLSYLPDLSEEQLLSEIEYLLKNGWVPCLEFETERGFVYRENNKSPGYYDGRYWTMWKLPMFGCTDATQVLAEVGEAKKAYPEAWIRIIGFDNVRQVQCISFIAYKPEGY

SEQ ID NO: 4129 - protein, 214 aa, Oryza sativa
  unsure (1)..(214): unsure at all Xaa locations
LGFDETELRLGLPGAGELAARSSGKRGFAETIDLKLKLQPAAPAAVSGEEGAQEDKEDADAXRRPPTRAQVVGWPPVRSFRKNVLAEKCKAAALVKVSMDGAPYLRKIDVAMYKSYPELSMAFQNMFTSFTIGIYGKCGSHQQLKESNKLRDDLEYVPTYEDKDGDWMLVGDVPWEMFVESCKRLRIMKGSEAIGLGQYYCLNRNSVQSFRSKC

SEQ ID NO: 4130 - protein, 360 aa, Saccharomyces cerevisiae
MSYPEKFEGIAIQSHEDWKNPKKTKYDPKPFYDHDIDIKIEACGVCGSDIHCAAGHWGNMKMPLVVGHEIVGKVVKLGPKSNSGLKVGQRVGVGAQVFSCLECDRCKNDNEPYCTKFVTTYSQPYEDGYVSQGGYANYVRVHEHFVVPIPENIPSHLAAPLLCGGLTVYSPLVRNGCGPGKKVGIVGLGGIGSMGTLISKAMGAETYVISRSSRKREDAMKMGADHYIATLEEGDWGEKYFDTFDLIVVCASSLTDIDFNIMPKAMKVGGRIVSISIPEQHEMLSLKPYGLKAVSISYSALGSIKELNQLLKLVSEKDIKIWVETLPVGEAGVHEAFERMEKGDVRYRFTLVGYDKEFSD

SEQ ID NO: 4131 - protein, 437 aa, Saccharomyces cerevisiae [sequence omitted]

SEQ ID NO: 4132 - protein, 159 aa, Corynebacterium glutamicum ATCC 13032
MTSIHDISVTLNDGTETTMADWAGHLLLIVNVASKCGLTPQYEGLQKLYEEYQDRGFFVIGVPCNQFNGQEPGTDAEVCAFAQNQYDVTFPLLSKTEVNGEGAHPLYKVLKEATDGSEIEWNFEKFLVDAEGNTIKRFAPRTEPSAAEVVEAIEENLPI

SEQ ID NO: 4133 - protein, 395 aa, Neisseria meningitidis Z2491
MNTLLKQLKPYPFARLHEAMQGISAPEGMEAVPLHIGEPKHPTPKVITDALTASLHELEKYPLTAGLPELRQACANWLKRRYDGLTVDADNEILPVLGSREALFSFVQTVLNPVSDGIKPAIVSPNPFYQIYEGATLLGGGEIHFANCPAPSFNPDWRSISEEVWKRTKLVFVCSPNNPSGSVLDLDGWKEVFDLQDKYGFIIASDECYSEIYFDGNKPLGCLQAAAQLGRSRQKLLMFTSLSKRSNVPGLRSGFVAGDAELLKNFLLYRTYHGSAMSIPVQRASIAAWDDEQHVIDNRRLYQEKFERVIPILQQVFDVKLPDASFYIWLKVPDGDDLAFARNLWQKAAIQVLPGRFLARDTEQGNPGEGYVRIALVADVATCVKAAEDIVSLYR

SEQ ID NO: 4134 - protein, 672 aa, Oryza sativa
  unsure (1)..(672): unsure at all Xaa locations
MPRTAAGVDVEDLLVRVKNGADAELAEVAREVAALAEQGRLGEDDDEDGVLVPALLARLAAAGGAEARVRVMAALRRLARCVGCESKERLASIEALSSIVRSLSRDVDETREAIALLLDLSDIPQVRQRIGRIKGSIVMLVTLRNAHEPGTHDDAEKLLHMLSSNPQNVLLMAEAGYFRPLIHYLKEGSDMNKILMATAISKMFLSEPMKSSLGEDGAVEPLVEMFISXNLAAKHSALGALLNLSSSLQNAENLINSGITGPLLQLLFSVTSVLMTLREPASAILAAIAQSERILLHKDVAPQMLSLLNLSSPVIQLHLLRALNSISGHTNAKRARAKIRQNGGVQLLLPFLTEKNIDIKIAALNFISNLSKDASQELAEQIRDTHLNIFVKIISSPTSGNEKAAAIGILSNLPVTDKKITELLTEANLLPLLISLLEINITAPLTPLRTSLLEGIAGVLIRFTVPWDKKLQSLAVGHGVVPCLVKLLSEGSIKAKSKAATSLAQLSQNSLALRKTKLPRWLCVAPSAETYCLVHNSQCTVKSTFCLVKAGAVSPLIQILEDDNREADGAVLEALATLMQDEIWENGSKVIEKASGVHALLRIAEAGNSTSQEKAIWMLERIFRLEAHRERYGEIAQALLIDLAQKGDPILKPMIGKILAHLELLQTQSSYF

SEQ ID NO: 4135 - protein, 239 aa, Tropheryma whipplei TW08/27
MGTNIHIDMVIHGKHTAEIRKMFNRVAQAYDRTNLVLSFLQDAHWRRAACKMLGVTAGEEVLDVGAGTGASTRTVARTGAAVTGIDISPRMLQIARNRCKRFQNITWRLTNGDLPFPDKSFDAILMVFCLRNVSNIQGFLCDAARVLKPGGRLVVCEFSHPRRFVAPFYRLYLRYVLPRLAKLISSDPAAYEYLTESIEDWYEVDELAFMLEQCGFQNTSWKRLSFGAVALHRALRGPE

SEQ ID NO: 4136 - protein, 606 aa, Zea mays
MCGILAVLGCADEAKGSSKRSRVLELSRRLKHRGPDWSGLRQVGDCYLSHQRLAIIDPASGDQPLYNEDQSVVVAVNGEIYNHLDLRSRLAGAGHSFRTGSDCEVIAHLYEEHGEEFVDMLDGVFSFVLLDTRHGDRAGSSFFMAARDAIGVTPLYIGWGVDGSVWISSEMKALHDECEHFEIFPPGHLYSSNTGGFSRWYNPPWYDDDDDEEAVVTPSVPYDPLALRKAFEKAVVKRLMTDVPFGVLLSGGLDSSLVATVAVRHLARTEAARRWGTKLHSFCVGLEGSPDLKAAREVAEYLGTLHHEFHFTVQDGIDAIEDVIYHTETYDVTTIRASTPMFLMSRKIKSLGVKMVISGEGSDELFGGYLYFHKAPNKEELHRETCRKVKALHQYDCLRANKATSAWGLEARVPFLDKEFINAAMSIDPEWKMVQPDLGRIEKWVLRKAFDDEEQPFLPKHILYRQKEQFSDGVGYSWIDGLKAHATSNVTDKMLSNAKFIFPHNTPTTKEAYYYRMVFERFFPQKSAILTVPGGPSVACSTAKAIEWDAQWSGNLDPSGRAALGVHLAAYEHQHDPEHVPAAIAAGSGKKPRTIRVAPPGVAIEG

SEQ ID NO: 4137 - protein, 187 aa, Fragaria x ananassa
MRKPCCEKTETTKGAWSIQEDQKLIDYIQKHGEGCWNSLPKAAGLRRCGKSCRLRWINYLRPDLKRGSFGEDEEDLIIRLHKLLGNRWSLIAGRLPGRTDNEVKNYWNSHLKKKILKTGTTLRPNKPHENNHAPNNKLVKLFNKMDDEVVDEVSSADSAAGCLVPELNLDLTLSIKTSTGMADPQVA

SEQ ID NO: 4138 - protein, 310 aa, Oceanobacillus iheyensis HTE831
MKGILLAGGSGTRLSPSTDSLNKHLLPVYDKPMIYYPLSVLMLGGLKEIMIISTPEDISRFERLLGDGSQLGISITYRVQEEPKGIPEALIIAEDFIGTEDVTLMLADNIFYGQGFTTLLRKAIKDHQHATVFGYRVKDPERFGVVEFDHNQKAISIEEKPEDPKSDFAVTGLYMYDYRAVNIAKNLEPSDRGELEITDINKEYLKCNQLDVELLGRGFAWMDAGTQEALFDAAEFIKTTQQRQGFKIACLEEIAFYMGYISKEALYERGKTMEKNDYGQYLMEIADRKHHQQYWDSIDHHPMLGLVENE

SEQ ID NO: 4139 - protein, 191 aa, Oryza sativa
MLPMVTTISPQVAMSYTSPRTHAAMAKPSGGGLLDLEHHFAFYGAYHSNAVNVFIHTLFVWPIFLTALLLLHLAAPSAHAAAAGAAVYGAFYLLLDRRAGALAALLCFLCWAASAALAARLGFSAGWKVKRAPALLDNLVQAFLMAPFFVLLEALHKFVGYEPYPGFHAKVQKLIDEARKEWEDKKAKKMT

SEQ ID NO: 4140 - protein, 548 aa, Wigglesworthia glossinidia endosymbiont of Glossina brevipalpis
MKNINPTKTKSWNLLKKHFNNMKKVNIKDLFEKDKNRFSSFSICFDDIILIDYSKNIITKETIKKLIQLAKECDLNNAILSMFCGKKINYTENRAVLHTALRNHKNISIEIDGINIIPKIKKVLNKMKNFCSDLIDGNWKGFTGERITHIVNIGIGGSDLGPYMVTEALKFYKNHLNVYFVSNIDGTHITEILKYLSPKNTLFLIASKTFTTQETITNAYSAKDWFLKYAKDKKYLSRHFIALSSNIDEVKKFGINTENIFELWNWVGGRYSLWSCMGLSIALSIGFNNFEKLLRGAYAMDQHFLKQPFEKNIPIILGLISIWYNNFFNFETESILVYDQYMHLFSSYFQQVNMESNGKSIDRNGNLVNYQTGSILWGGYGTNSQHAFYQLMHQGTKIVPCDFIVPIISHNPVSDHHQKLLANFFAQTKALAFGKKSENNHIKLYKYDSNKIKILPFKILPGNRPTNSILIKEINPYNLGSLIAMYEHKIFTQGVVLNINSFDQWGVELGKQLSKKLFSILRKEKILNTSSYDSSTNGLINFYKLWKK

SEQ ID NO: 4141 - protein, 561 aa, Burkholderia fungorum LB400
MTTLKITGMTCDSCAAHVKEALEKVPGVQSALVSYPKGTAQLAIEAGTSSDALTTAVAGLGYEATLADAPPTDNRAGLLDKMRGWIGAADKPSGNERPLQVVVIGSGGAAMAAALKAVEQGAHVSLIERGTIGGTCVNVGCVPSKIMIRAAHIAHLRRESPFDGGIAATVPAIDRSKLLAQQQARVEELRHAKYEGILDGNPAITVVHGEARFKDEQSLVVRLNDGGERVVAFDRCLVATGASPAVPPIPGLKESPYWTSTEALVSDTLPERLAVIGSSVVALELAQAFARLGSQVTILARNTLFFRDDPSIGEAVTAAFRAEGIKVLEHTQASQVAHVNGEFVLTTGHGEVRADKLLVATGRTPNTRSLALDAAGVTVNAQGAIVIDKGMRTSTPHIYAAGDCTDQPQFVYVAAAAGTRAAINMTGGDAAINLTAMPAVVFTDPQVATVGYSEAEAHHDGIETDSRTLTLDNVPRALANFDTRGFIKLVIEEGSGRLIGVQVVAPEAGELIQTAVLAIRNRMTVQELADQLFPYLTMVEGLKLAAQTFSKDVKQLSCCAG

SEQ ID NO: 4142 - protein, 274 aa, Glycine max
MEIVPIPADSYNLGFIGAGKMAESIARGAVRSGVLPPSRIRTAVHSNPARRDTFESFGVTVLPSNDDVVRESNVVVFSVKPQLVKDVVFKLTPLLTKNKLLVSVAAGTKLKDLQEWAGNDRFIRVMPNTPAAVGEAASVMSLGGSATEEDGNIIAKLLGSIGKIWKAEEKYFDAITGLSGSGPAYVYLAIEALADGGVAAGLPRDLSLSLASQTVLGAASMVIQTGKHPGQLKDDVTSPGGTTITGIHELENGGFRGTLMNAVVAATKRSRELS

SEQ ID NO: 4143 - protein, 459 aa, Bacillus cereus ATCC 14579
MSKLVVIGGGPAGYVAAITAAQNGKGVTLIDEAELGGTCLNVGCMPTKSLLESAEIHDIVRKANDYGVTLNTGSISIDWNQIQARKSQIVMQLVQGIQYLMKKNKIKVVKGKAKFETDHRVRVVQGNKEEVVDGESFIIASGSEPTELPFAPFDGKWILNSSHAMSLESVPSSLLIVGGGVIGCEFASIYSRLGTKVSIVEMAPQLLPGEDEDIANILREKLEKDGVKIFTGAVLKGLNNYKKQASFEYEGITHEVTPEFVLVSVGRKPRVQQLGLEKAGVQFSNKGISVNEHMQTNVSHIYAAGDVIGGIQLAHVAFHEGTTAALHASGEDVKVNYHAVPRCIYTAPEIASVGLSEKGAREQYGDILIGEFPFTANGKALILGEQVGKVKVIVEPKYQEIVGISIIGPYATELIGQGTVMIHTEVTADIMRDYIAAHPTLSEAIHEALMQAVGHAVHA

SEQ ID NO: 4144 - protein, 417 aa, Azospirillum brasilense
MERILGGMSLPDLGTFALVNDRLDRLSDYPFTRLAALLSGVTPRANAEPIMMSVGEPQHQPPAIIDETLRANAHLWGKYPPVGGTPEFREAVGAWLARRYALPDGLFDAEKSVLPVSGTREALFLLALLAVPPSKAGRQPAVLMPNPFYAPYEGAALLAGAESVFLPSTRETGFLPDLDALTPELLERTALFYLCTPANPQGAAADAAYLERAIGLARRYGFILAVDECYAEIYLDKPPVGALQVASGLAHDGKPWANILVFHSLSKRSSAAGLRSGFVAGDPELMSRFTRLRSYSNAGMPLPVLAASAALWRDEAHVEENRALYRAKFDAAEASLKGRYGYYRPDGGFFLWLEVGDGEEATRRLWAEGGIRVLPGAYLTRCNPGEANPGAPFIRIALVNDAETVAHACGTIARILG

SEQ ID NO: 4145 - protein, 558 aa, Mycobacterium bovis AF2122/97
MSFLVVVPEFLTSAAADVENIGSTLRAANAAAAASTTALAAAGADEVSAAVAALFARFGQEYQAVSAQASAFHQQFVQTLNSASGSYAAAEATIASQLQTAQHDLLGAVNAPTETLLGRPLIGDGAPGTATSPNGGAGGLLYGNGGNGYSATASGVGGGAGGSAGLIGNGGAGGAGGPNAPGGAGGNGGWLLGNGGIGGPGGASSIPGMSGGAGGTGGATGLLGWGANGGAGGLGDGVGVDRGTGGAGGRGGLLYGGYGVSGPGGDGRTVPLEIIHVTEPTVHANVNGGPTSTILVDTGSAGLVVSPEDVGGILGVLHMGLPTGLSISGYSGGLYYIFATYTTTVDFGNGIVTAPTAVNVVLLSIPTSPFAISTYFSALLADPTTTPFEAYFGAVGVDGVLGVGPNAVGPGPSIPTMALPGDLNQGVLIDAPAGELVFGPNPLPAPNVEVVGSPITTLYVKIDGGTPIPVPSIIDSGGVTGTIPSYVIGSGTLPANTNIEVYTSPGGDRLYAFNTNDYRPTVISSGLMNTGFLPFRFQPVYIDYSPSGIGTTVFDHPA

SEQ ID NO: 4146 - protein, 399 aa, Bacillus cereus ATCC 14579
MAVEVVMPKLGMAMKEGIITNWNIKAGDNVAKGELIASINSEKIETEIEAPADGTVLDIAVSEDEGVPPGTVICYIGKPNEKVEMQESTHVVEEKTFNIEVQNVQNQEPNGKEVAKQRIKISPVAKKIAKSENLGIKVLVGTGPGGRITKADVLKALEVRGIVPEISEQEESNVIPVTGMRKAIANRMHASLQNSAQLTLTMKVDVTDLVALHKEIAKVVQKRYDNKLTITDFVSRAAVLALGEHKEMNSAYIDDAIHQFEHVHLGMAVALEKGLIVPAIRFANNLSLVELSKEIKNVAQKARAGSLSSDDMHGTTFTISNLGSFGIEYFTPVLNTPETGILGIGAIEHVPVYKGKKLKKGSMLPLSLTFDHRVLDGAPAAAFLRTIKHYLEEPITILL

SEQ ID NO: 4147 - protein, 510 aa, Saccharomyces cerevisiae
MPTSGTTIELIDDQFPKDDSASSGIVDEVDLTEANILATGLNKKAPRIVNGFGSLMGSKEMVSVEFDKKGNEKKSNLDRLLEKDNQEKEEAKTKIHISEQPWTLNNWHQHLNWLNMVLVCGMPMIGWYFALSGKVPLHLNVFLFSVFYYAVGGVSITAGYHRLWSHRSYSAHWPLRLFYAIFGCASVEGSAKWWGHSHRIHHRYTDTLRDPYDARRGLWYSHMGWMLLKPNPKYKARADITDMTDDWTIRFQHRHYILLMLLTAFVIPTLICGYFFNDYMGGLIYAGFIRVFVIQQATFCINSMAHYIGTQPFDDRRTPRDNWITAIVTFGEGYHNFHHEFPTDYRNAIKWYQYDPTKVIIYLTSLVGLAYDLKKFSQNAIEEALIQQEQKKINKKKAKINWGPVLTDLPMWDKQTFLAKSKENKGLVIISGIVHDVSGYISEHPGGETLIKTALGKDATKAFSGGVYRHSNAAQNVLADMRVAVIKESKNSAIRMASKRGEIYETGKFF

SEQ ID NO: 4148 - protein, 147 aa, Triticum aestivum
  unsure (1)..(147): unsure at all Xaa locations
MSASSSSAPAAAVATSTRLILVHGTGHGGWCWYKVATLLRAAGHRVDAPDLAACGADARRLSDPPTFEDYXRAVLVGHSFGGMSVALAAEEFPDKVAAAVFLTAFMPDCAGPRTRVIEQVPVSDWMDSVVDEEHVPPSVFLGPDFVR

SEQ ID NO: 4149 - protein, 186 aa, Arabidopsis thaliana
MEKVDVYDELVNLKATELRLGLPGTEETVSCGKSNKRVLPEATEKEIESTGKTETASPPKAQIVGWPPVRSYRKNNVQTKKSESEGQGNYVKVSMDGAPYLRKIDLTMYKQYPELMKSLENMFKFSVGEYFEREGYKGSDFVPTYEDKEGEWMLVGEVPWEMFVSSCKRLRIMKGSEVKGLGCGGL

SEQ ID NO: 4150 - protein, 334 aa, Saccharomyces kluyveri
MAPHVNKKQKLSNSLEQLKATGTVVVSDTGDFESIAKYTPQDATTNPSLILAAAKKENYAKLIDTAVEYGKKQGKTLEDKVDQAVDMLLVEFGKAILNIVPGRVSTEVDARLSFDKDATVAKALHIIKLYEDAGISRERVLIKIASTWEGIQAAKELEEKHGIHVNLTLLFSFSQAVAAAEAKVTLISPFVGRILDWYKASTGKDYTAETDPGVKSVRKIFNYYKKYGYDTIVMGASFRNVGEIKALAGVDFLTISPGLLDELMSSEDPVPQVLDAEAAKSEDLAKVSFISDEAKFRFELNEDAMATEKLSEGIRKFSADIVTLFELIEKKIKA

SEQ ID NO: 4151 - protein, 176 aa, Glycine max
MAIKSETYKSLELGAPSKSHASGTPLVLLNLSSNWERSILKNEKLLLTTRKKNDPVTIFHGSKAPNLSVTHYMERILKYSHCSPSCFVIAQIYMDRFFQKKGGYLTSFNAHRLLITSVMVAVKFLDDKYYSNAYYAKVGGVSTEEMNRMELEFLFNLEFRLFVTTELFLKYCEKLG

SEQ ID NO: 4152 - protein, 504 aa, Solanum tuberosum
MAISTLARRKATTFLSSRLLYSTSKYSFSLTRGFASGSDENDVVVIGGGPGGYVAAIKAAQLGLKTTCIEKRGTLGGTCLNVGCIPSKALLHSSHMFHEAQHSFANHGVKFSSVEVDLPAMMGQKDKAVSNLTRGIEGLFKKNKVNYVKGYGKFLSPSEISVDTVEGGNSVVKGKNIIIATGSDVKGLPGITIDEKKIVSSTGALALTEIPKRLVVIGAGYIGLEMGSVWGRLGSEVTVVEFASDIVPTMDGEVRKQFQRALEKQKMKFMLNTKVVSVDATGDGVKLTLEPSAGGDQTILEADVVLVSAGRVPFTSGLGLDTIGVETDKAGRILVNERFATNVPGVHAIGDVIPGPMLAHKAEEDGVACVEFIAGKEGHVDYDMVPGVVYTHPEVAYVGKTEEQVKSLGVDYRVGKFPFLANSRAKAIDDAEGIVKVIAEKESDKILGVHIMSPNAGELIHEAVLALQYGASSEDIARTCHAHPTMSEALKEAAMATYDKPIHM

SEQ ID NO: 4153 - protein, 382 aa, Azotobacter vinelandii
MIQSKLPNVGTTIFTTMSQLAAQTGAINLSQGFPDFDGPQALREAVGHHVMAGHNQYAPMTGLPALREQVARKIARSYGRQVDMDEEITITPGATEAIFCAVQALVRPGDEVIVLDPCYDSYEPSVELAGGRCVHVPLALPDFSIDWQRLADALSPRTRLIILNSPHNPSGALLSRDELEQLARLIRGFDIYLVSDEVYEHLIYDGVRHASVLAHEELYARAFVVSSFGKTYHVTGWKTGYVVAPPALSAELRKVHQFITFCGVSPLQWALADYMAACPEHVDELPIFYQAKRDLFCDLLAGSRFTFTRAPGTYFQLADYSAIRDDLDDVEMSLWLTREHGVATIPVSVFYQSPPAGLRLVRFCFAKREETLRQAAERLCRV

SEQ ID NO: 4154 - protein, 425 aa, Bacillus subtilis
MSKVHQSACPLNCWDSCGFLVTVDDGKVTKVDGDPNHPITEGKICGRGRMLETKTNSPDRLRYPMKKQNGEFVRISWEQALDEIADKLREIKETSETTAVLHSHDYANNGLLKALDQRFFNGYGGVTEIVGSICWGSGIEAQSWDFGRSYGHGPLDIYNSKHVVVWGRNVSRTNMHLYHHLQQVKKKGATITVIDPIFNPTAKLADRYISVKPGMDGWLAAAVLKVLIEMGRTDETFISEHSVGFDDVKELLKTVSLEEFIVKTETSMEELEYLAGLYADGPVSTFMGLGMQRYKNGGGTIRWIDALVAASGNVGIKGGGANFGNVQIGESFAKTKLTLPELKTTSRSFSMMTQAEEVLTAADPAIEMIIVTCGNPLTQVPNTNKVRQAFEKVPMTVAIDSIMTDTAELCDYVLPTATVFEEEDI

SEQ ID NO: 4155 - protein, 231 aa, Echinochloa crus-galli var. formosensis
VLPVFTGECKECAHCKSAESNMCDLLRINTDRGVMIGDGKSRFSINGKPIYHFVGTSTFSEYTVMHVGCVAKINPVAPLDKVCVLSCGISTGLGASINVAKPPKGSTVAIFGLGAVGLAAAEGARIAGASRIIGVDLNAARFEEARKFGCTEFVNPKDHDKPVQQVLAEMTNGGVDRSVECTGNINAMIQAFECVHDGWGTAVLVGVPHKDAEFKTHPMNFLNERTLKGTF

SEQ ID NO: 4156 - protein, 429 aa, Oceanobacillus iheyensis HTE831
MPYITDVYAREVLDSRGNPTIEVEIFTESGAFGSAIVPSGASTGEYEAVELRDGDKDRYLGKGVQKAVENVNDLIAPELIGIDVTRQNIIDALMIDLDGTENKGKLGANAILGVSMAAAHAAANYLEVPLYNYLGGFNAKTLPTPMMNILNGGEHADNNVDIQEFMIMPVGAPTFKEALRTGAEIFHALKKVLTSKGYNTAVGDEGGFAPNLGSNEEALQTIVEAIEAAGYKPGEEVKLAMDVAASEIYSDGKYNLKGEGVVRSSEEMVDWYEEMISKYPIISIEDGLDENDWDGFKILTDRLGDKVQLVGDDLFVTNTNKLSKGIDQGIGNSILIKVNQIGTLTETFEAIEMAKRAGYTAVISHRSGETEDVTIADIAVATNAGQIKTGAPSRTDRVAKYNQLLRIEDELAGMGEYGGLASFYNLANK

SEQ ID NO: 4157 - protein, 316 aa, Vibrio vulnificus YJ016
MSNKLEQLRKLTTVVADTGEIDAIKKYQPEDATTNPSLILKAAQIAEYAPLIDASIEYAKTQSDDKAQQIQDTCDMLAVNIGKEILKTIPGRISTEVDARLSYDMEGSVAKARQLVKMYNDAGITNDRILIKLASTWEGIRAAEILEKEGINCNLTLLFSFAQARACAEAGVFLISPFVGRIMDWYKAKEGRDFEAQEDPGVLSVTKIYNYYKEYGYKTVVMGASFRNIGEILELAGCDRLTIAPALLAELEAAEGEVVEKLVDSKGAAERPAPMTHAEFLWEHNQDPMAVEKLAEGIRNFAVDQGKLEAMIAAKL

SEQ ID NO: 4158 - protein, 409 aa, Yersinia pestis KIM
MGSVMTDKLAVNRNTFDQVILPVYAPAQFIPVKGKGSRVWDQQGTEYIDFAGGIAVTALGHCHPALVSALHQQGETLWHTSNVFTNEPALRLAQKLIAATFADRVFFANSGAEANEAAFKLARHYAIERHSPYKTKIIAFHNAFHGRTLFTVSVGGQPKYSDGFGPKPADIIHVPFNDLAAVKAVMDDHTCAVVLEPIQGEGGITSATPEFLQGVRALCDQHNALLVFDEVQSGMGRSGKLFSYMHYGVTPDILTTAKALGGGFPISAMLTTEEIASVMTVGTHGTTYGGNPLACAVAEAALDVINTPEVLNGIEQRHGLFVQALQSINSKYDVFSDIRGMGLLIGAELTAKYRGQAREFLAAAAANGLMILNAGPDVLRLAPSLVIELEDIQQGMARLEKAMASVIKG

SEQ ID NO: 4159 - protein, 495 aa, Triticum aestivum
MASKGERDVEIHVSSPPPDDRDAARPLLPAACEAYSVSAAILPFFFPALGGLLYGYDIGATSGATISLKSPTSSGTAWHDLSSVQTGLVVSGSLYGALIGSATAFTIADFLGRRRELVVSSIMYLIGALLTAVAPNFLIMVVGRFLYGIGIGLAMHAAPMYIAETAPSQIRGMLISLKEFFIVLGMLLGYIVGNLFVEVISGWRYMYATSAPICVIMGIGMCWLPCSPRWLLLCATQGKGDLRETKECAPPCSCRLRGPASPDLVSERVTLLLEEPAHVGEEFQPGFGGCFQGRGLLAIVIGCGLVFFQQVTGQPSVLYYAATIFQSAGFSGASDATRVSILLGVLKLIMTGVAVLVVDKLGRRPLLIGGVSGIAVSLFLLSSYYTLFTGAPYVAVIALLLYVGCYQLSFGPIGWLMISEVFPLKLRGRGLSVAVLVNFASNALVTFAFSPLEDLIGTGVLFASFGVIAVASLTFIFCIVPETKGLTLEEIEAKL

SEQ ID NO: 4160 - protein, 394 aa, Nicotiana tabacum
MSCAVAISNSPAFSPASRVPVTKSLCKSASFSSSSPNSSKTLTKFPSFTSSSSSSSSSSSSSPSSPSLQFQILRLQKPLQASASTNRIRNSTECSTSAPVLKRKRPAKLDIPVVSTTFGNFPATPAAATADFVEVEGDGYYVCCKRGRRGPMEDRYSALVDLQGDSKEGIFGIFDGHGGAKAAEFAAENLNKNIMDELVNRKDDDVVEALKNGYLKTDSEFLNQEFRGGSCCVTALVRNGDLVVSNAGDCRAVVSRGGIAETLTSDHKPSRKDEKDRIKTSGGYVDCCNGVWRIQGSLAVSRGIGDRYLKQWIIAEPETKVVGLHPELEFLVLASDGLWDKVSNQEAVDAARPLCTGISKPQPLSASKSLIDLAVSRGSVDDISVMIIQLQRFC

SEQ ID NO: 4161 - protein, 428 aa, Azotobacter vinelandii
MSKNIQAIRGMNDILPEQTPLWRYFEKSVAGLLDGYGYRQIRMPIVEFTELFKRSIGEVTDIVEKEMYTFEDRNGDSLTLRPEGTASCVRAVLEHGISGGGQVQKLWYVGPMFRHERPQKGRYRQFHQIGVEVFNLPGPDIDAELIVLTWRLWGLLGLREAVTLELNSLGSSEARARYREALVEYLSARFERLDEDSQRRLSSNPLRILDSKNPETQALLVDAPKLADYLDEDSRQHFEGLKARLDVAGIPYVINPKLVRGLDYYGKTVFEWVTDKLGAQGTVCAGGRYDGLVEQLGGKPTPAVGFAMGVERLVLLLETLERVPAELSRQVDVYFCAFGEAAELAALGLAERLRDALPGLRLAVNAGAGSFKSQLKKADKSGALYALVLGEDELAGRIVGLKSLRAEGEQQSVGWDELGERLAACLRA

SEQ ID NO: 4162 - protein, 396 aa, Glycine max
  unsure (1)..(396): unsure at all Xaa locations
MQSAAFTFSPSLPLRNPSPNYWRRPSLSLRLSAKHGNSNSDDVNSNGVSSTFFTRRSWTLPPSSSFKFRPLPPRAAESAVPESAPVENPLFKTLELGALFGLWYLFNIYFNIYNKQVLKAFHYPVTVTVVQFAVGTVLVALLSGVMLGAILPLAAVHTLGNLFTNMSLGKVAVSFTHTIKAMEPSFSVTLSAMXLFLSPVLSVVFLGEFPTPGVAGSLVTIVGXVALAFVTETSSNWAGFWSNILSKKTNQSRNVFSKKAMVNKEDSMDNITLFSIITVMSFFLLAPVAIFMEGVKFTPAYLQSAGVNVRQLYIRSLLAALCFHAYQQVSYMILQRVSPVTHSVGNCVKRVVVIVSSVIFFQTPVSPVNAFGTAIALAGVFLYSRVKRIKAKPKTA

SEQ ID NO: 4163 - protein, 135 aa, Haemophilus influenzae
EDLTPALEGADVVLISAGVARKPGMDRSDLFNINAGIVRGLIEKVAVTCPKACVGIITNPVNTTVAIAAEVLKKAGVYDKRKLFGVTTLDVLRSETFVAELKGLNVSRTSVPVIGGHSGVTILPLLSQVQYAKWN

SEQ ID NO: 4164 - protein, 209 aa, Chlamydia muridarum
MKILIASSHGYKVRETKAFLKKIGEFDIFSLVDYPSYTPPKETGETPEENAIQKGVFAAQTFRCWTIADDSMLIIPALGGLPGKLSASFSGEHASDKDHRKKLLEEMLLLENPIDRSAYFECCVVLVSPFGKIFKAHASCEGTIVFKERGSSGFGYDPLFSKHDYKQTYAELPEEIKNQVSHRAKALAKLQPYVEMAFANHLLARNESL

SEQ ID NO: 4165 - protein, 135 aa, Haemophilus influenzae
EDPTPALEGADVVLISAGVARKPGMDRSDLFNINAGIVRGLIEKVAVTCPKACVGIITNPVNTTVAIAAEVLKKAGVYDKRKLFGVTTLDVLRSETFVAELKGLNVSRTSVPVIGGHSGVTILPLLSQVQYAKWN

SEQ ID NO: 4166 - protein, 332 aa, Prunus persica
MAKGPVRVLVTGAAGQIGYALVPMIARGVMLGADQPVILHLLDIPPAAEALNGVKMELVDAAFPLLKGVVATTDVVEACTGVNIAVMVGGFPRKEGMERKDVMSKNVSIYKSQASALEKHAAANCKVLVVANPANTNALILKEFAPSIPEKNITCLTRLDHNRALGQVSERLNVQVSDVKNVIIWGNHSSSQYPDVNHATVKTPSGEKAVRELVADDAWLTGEFITTVQQRGAAIIKARKLSRALSAASSACDHIRDWVLGTPEGTWVSMGVYSDGSYNVPSGLIYSFPVTCQNGEWKIVQGLSIDEFSRKKLDATADELSEEKALAYSCLS

SEQ ID NO: 4167 - protein, 512 aa, Oceanobacillus iheyensis HTE831
MSQNKLAALIILDGFAIRDEVKGNAVKQANTPNFDRFWNQYAHNQLEASGKAVGLPDGQMGNSEVGHLNIGAGRIVYQSLTRVNVSIDEGDFYEVDAFIKSVEHAKKHDKALHLFGLLSDGGVHSHINHLFALLRLAKKHELENVFVHAFLDGRDVGPKTASKYIKETQDVMDELGVGQFATISGRYYSMDRDKRWDRVKKCYDAMVYGEGPSYKSAQEVVDDNYANEIYDEFVIPSVITDDNDEPVATIKDEDSIIFYNFRPDRAIQISRTFANEDFRDFERGDKAPKKLDFVMLTNFSETVDGYVAYQPVNLDNTVGEVLAQNNLNQLRIAETEKYPHVTFFMSGGREKEFPGEKRILIDSPKVATYDLKPEMSVYEVTDALLKELDKGEQNAIILNFANPDMVGHSGKLQPTIDAIEAVDECLGKVIDKITELGGHAIITADHGNSDEVMTLEDKPMTAHTTNPVPVIVTKDDIELRDGGILADLSPTLLDLLNVEKPKEMTGNSLIKK

SEQ ID NO: 4168 - protein, 393 aa, Oceanobacillus iheyensis HTE831
MNKKTINDLQVEGKRVFTRVDFNVPLKDGEITDDTRIRAALPTIEQLTAQGAKVILASHLGRPKGTVVEELRLDPVADRLSDLLGKEVLKTDQVYGEEVDQAISELENGGVLLIENVRFEAGEEKNDPELVEAFANMADLYVNDAFGAAHRAHASTTGVAEKLPAAAGKLMEKEIEALGNALENPERPFTAIVGGAKVKDKISVIDNLLDKVDNLIIGGGLAYTFIKAQGHEIGKSLLEEDKIDLAKEFMNKAKEKGVNFVLPVDAIVADDFSEEANTKIVDIDKIPSDWEALDIGTKTREKYSSIVKDSKLVIWNGPMGVFELNAFAGGTKAVAEALASTEGYSIIGGGDSAAAVEKFGLAEEMDHVSTGGGASLEFMEGKVLPGLAALNDK

SEQ ID NO: 4169 - protein, 697 aa, Deinococcus radiodurans R1
MIEWPRDAELWPTVPAPPPYPPPMTATRDVLLTCPLDCPDACRLKITIERQPDGSEKAVKLTGDPAHPYTRGFACAKTVHYPARQNHPERPLYPLRRVNPKTDPEPQWERVTWDEALDDIAGRLRQLIAERGPQSILPYHYAGNMGLLEGSHVHALWRALGAAELEETICASAGTAAWEVGYGTRLAVDPLDVPHARLIVLWGINSLSTHSHLTPQITAARKNGARVVCVDPYRNRTAAFADEHLKIRPGTDAALALGVMRELFVNGWTDAEYLAQATEGVDDLRAAAEEWSPQRTAEVTGLTADEVRDFARLIGTTRPTYIRVGYGMTRYENGATALRAVTLLPALTGDWRYRGGGCVMSTSGTFKLNRRRLGAAHVTRPEAPRVNMNELANALDPAVGFGALFVYNCNPAVVSPDSGRVRAGMRRDDLLVVVLEQAMTESARLADYVLPATTFMESPDLYTSYGHFWLGYNPAELTPPGECRPNSWVFAELARRLGVEEPSVYWTADDLMAELLDTDHPFLDGLTPERLKAEGTVRLNVPDGFLPYAYGAETPSGKVQLAPAPRFVPVQAELNADFPLRLLTPPAHHFLNSTYGNLGNLNRAEGGEPQVLLCPADAAASGVQDGEYARLTSEQGEVRRRVKVTDAAQPGVAVVEGTWWGLTAPDGRSINELTAQTLTDLGGGSTFHNTRIRVSPA

SEQ ID NO: 4170 - protein, 256 aa, Pseudomonas aeruginosa PAO1
MNDPRKGADAEPTTHFGYQNVPESQKAKKVAEVFHSVAAKYDLMNDLMSGGIHRLWKRFTIELSGVRSGNRVLDIAGGTGDLTRQFSRLVGPTGEVVLADINASMLKVGRDKLLDKGVSGNVSFVQADAEKLPFPDNHFDCVTIAFGLRNVTHKDEAIRSMLRVLKPGGRLLVLEFSKPSSNLLSKAYDAYSFSLLPLMGKLVTNDSESYRYLAESIRMHPDQETLKAMMVEAGFDRVTYHNMTGGIVALHRGIKP

SEQ ID NO: 4171 - protein, 565 aa, Glycine max
  unsure (1)..(565): unsure at all Xaa locations
MQSSISLSSSYAPTISGPRHSFPLSGRTLAPSNLRFCGLRRQAFTSTPLNHHFRLRRRRLPHSAAVSAALSANGTSPKSFDYDLLIIGAGVGGHGAALHAVEKGLKTAIVEGDVRPGTCVNRGCVPSKALLAVSGRMRELRSDHHLKSFGLQVSAAGYDRQGVADHANNLASKIRNNLTNSMKALGVDILTGFGTILGPQKVKVGSSDKIVTAKDIIIATGSVPFVPKGIEIDGKTVITSDHALKLESVPDWIAIVGSGYIGLEFSDVYTALGSEVTFIEALDQLMPGFDPEISKLAQRVLINPRNIDYHTGVFATKITPARDGKPVLIELIDAKTKEPKDTLEVDAALIATGRAPFTQGLGLENIDVVTQRGFVPVDEHMRVIDANGKLVPHLYXIGNANGKMMLAEKTTEGGISVVEQVTGRDLVLGHLSIPAAGLTHPEISMVGLTEPQAREKGEKEGFEVSVAKTSFKANTKALAENEGEGLAKLIYRPDNGEILGVHIFGLHAADLIHEASNAIALGTRIQDIKFAVHAHPTLSEVLDELFKSAKVKAQASSPVSEPVAV

SEQ ID NO: 4172 - protein, 470 aa, Geobacillus stearothermophilus
MVVGDFAIETETLVVGAGPGGYVAAIRAAQLGQKVTIVEKGNLGGVCLNVGCIPSKALISASHRYEQAKHSEEMGIKAENVTIDFAKVQEWKASVVKKLTGGVEGLLKGNKVEIVKGEAYFVDANTVRVVNGDSAQTYTFKNAIIATGSRPIELPNFKFSNRILDSTGALNLGEVPKSLVVIGGGYIGIELGTAYANFGTKVTILEGAGEILSGFEKQMAAIIKKRLKKKGVEVVTNALAKGAEEREDGVTVTYEANGETKTIDADYVLVTVGRRPNTDELGLEQIGIKMTNRGLIEVDQQCRTSVPNIFAIGDIVPGPALAHKASYEGKVAAEAIAGHPSAVDYVAIPAVVFSDPECASVGYFEQQAKDEGIDVIAAKFPFAANGRALALNDTDGFLKLVVRKEDGVIIGAQIIGPNASDMIAELGLAIEAGMTAEDIALTIHAHPTLGEIAMEAAEVALGTPIHIITK

SEQ ID NO: 4173 - protein, 692 aa, Solanum tuberosum
MTEYSLPTMNLWNNSTSDDNVSMMEAFMSSDLSFWATTNSTTTNSASAAVVGVNSNLLHTNNNNPSVFPLSSSTSVSAAAAVDATKSMPFFNQETLQQRLQALIDGARETWTYAIFWQSSVVDFSSPSVLGWGDGYYKGEEDKAKRKLAVSSPAYIAEQEHRKKVLRELNSLISGAPAGTDDAVDEEVTDTEWFFLISMTQSFVNGSGLPGQALYSSSPIWVAGTEKLAASHCERVRQAQGFGLQTIVCIPSANGVVELGSTELIVESSDLMNKVRVLFNFSNDLGSGSWAVQPESDPSALWLTEPSSSGMEVRESLNTVQTNSVPSSNSNKQIAYANENNHQSGNGQSCYNLQQQQNNPPQQQTQGFFTRELNFSEFGFDGSSNRNGNASLSCKPESGEILNFGDSTKKSASSANVNLFTGQSQFGAVEENNNNKNKKRSATSRGSNEEGMLSFVSGTVLPSSGMKSGGGGGEDSEHSDLEASVVKEADSSRVVEPEKRPRKRGRKPANGREEPLNHVEAERQRREKLNQRFYALRAVVPNVSKMDKASLLGDAISYINELKSKLQNTESDKEDLKSQIEDLKKESRRPGPPPPNQDLKIGGKIVDVDIDVKIIGWDAMIGIQCNKKNHPAARLMAALMELDLDVHHASVSVVNDLMIQQATVKMGSRHYTEEQLRVALKSKIAETPLESR

SEQ ID NO: 4174 - protein, 646 aa, Solanum tuberosum
MTDYRLWSNSNTTNTSDDNMMMDAFLSSDPSSFWPNRTSISPTPVNGGVGETMPFFNQESLQQRLQALIDGARESWAYAIFWQSSSTSDFATPSVLGWGDGYYKGEENKNKRRASSSSTNFVAEQEHRKKVLRELNSLISGVQATGAGSGGDDAVDEEVTDTEWFFLISMTQSFANGNGLPGLAMYSSSPIWVTGTEKLAGSQCERARQAQGFGLQTIVCIPSANGVVELGSTELIFESSDLMNKVKYLFNFNIDMGSVTGSGSGSCAVHPEPDPSALWLTDPSSSVVEAKDSLINSSSRDVQLVFGNENSENGTQNQQHSQQTQGFFTKELNFSGYGFDGSSTRNKNGNSSISCKPETREILNFGDSSKKSGSLFSGQSQFGPGTGLGLMEENKNNNKKRSLASRGNNEKGMLSFVSGVILPTSTMGKSGGGGNFDHSDLEASVVKEAIVEPERKPRKRGRKPANGREEPLNHVEAERQRREKLNQRFYALRAVVPNVSKMDKASLLGDAIAYINELKSKVQNSDLDKEELRSQIESLRKELANKGSSNYSSSPPSNQDLKIVDMDIDVKVIGWDAMIRIQCSKKNHPAARLMAALKDLDLDVHHASVSVVNDLMIQQATVKMGSRLYAQEQLTIALTSKFAESR

SEQ ID NO: 4175 - protein, 467 aa, Neisseria meningitidis Z2491
MKKIQADVVVIGGGTAGMGAFRNARLHSDNVYLIENNVFGTTCARVGCMPSKLLIAAAEARHHALHTDPFGVHLDKDSIVVNGEEVMQRVKSERDRFVGFVVADVEEWPADKRIMGSAKFIDEHTVQIDEHTQITAKSFVIATGSRPVILPQWQSLGNRLIINDDVFSWDTLPKRVAVFGPGVIGLELGQALHRLGVKVEIFGLGGIIGGISDPVVSDEAKAVFGEELKLHLDAKTEAKLDADGNVEVHWEQDGEKGVFVAEYMLAAVGRRPNVDNIGLENINIEKDARGVPVADPLTMQTSIPHIFIAGDASNQLPLLHEAADQGKIAGDNAGRYPNIGGGLRRSTIGVVFTSPQIGFVGLKYAQVAAQYQADEFVIGEVSFKNQGRSRVMLVNKGHMRLYAEKATGRFIGAEIVGPAAEHLAHLLAWAHQMKMTVPQMLDMPFYHPVIEEGLRTALRDADAKLKA

SEQ ID NO: 4176 - protein, 445 aa, Geobacillus stearothermophilus
MAISFDYSNALPFMQENELDYLSEFVKAAHHMLHERKGPGSDFLGWVDWPIRYDKNEFSRIKQAAERIRNHSDALVVIGIGGSYLGARAAIEALSHTFHNQMNDTTQIYFAGQNISSTYISHLLDVLEGKDLSINVISKSGTTTEPAIAFRIFRDYMEKKYGKEEARKRIYVTTDRTKGALKKLADQEGYETFVIPDNIGGRYSVLTAVGLLPIAVAGLNIDRMMEGAASAYHKYNNPDLLTNESYQYAAVRNILYRKGKAIELLVNYEPSLHYVSEWWKQLFGESEGKDQKGLFPASVDFTTDLHSMGQYVQEGRRNLIETVLHVKKPQIELTIQEDPENIDGLNFLAGKTLDEVNKKAFQGTLLAHVDGGVPNLIVELDEMNEYTFGEMVYFFEKACGISGHLLGVNPFDQPGVEAYKKNMFALLGKPGFEDEKAALMKRLSK

SEQ ID NO: 4177 - protein, 505 aa, Agrobacterium tumefaciens str. C58
MRTPKPVVLTILDGWGLNEDTSSNAPVLANTPTMDRLFATCPNATLTTFGPNVGLPTGQMGNSEVGHTNIGAGRIVAMDLGQIDLAIEDGSFFRNAAMLDFAATVKAAGGVAHLMCVVSDGGVHGHILHGQAAVKLMVSHGLKVVVHAITDGRDVAPQSAEDFVAALVASLPQGASIGTVIGRYYAMDRDNRWERVEKAYDAMVLGKGEHARDAVSAVAQSYANKVTDEFILPTVIDGYEGFKAGDGLFCLNFRADRAREILLAIGADDFDGFAREKPVLSALLGMVEYSTRHSDFMTTAYPKRDIVNTLGAWVAKQGLTQFRLAETEKYPHVTFFLNGGKEEPEVGEDRFMPKSPKVATYDLQPEMSAAEVTEKFVEVIGKGYDLIVTNYANPDMVGHTGDLQAAIKACEAVDRGLGAVVAALEKVGGAMLVIADHGNCETMVDPVTGGPHTAHTTNPVPVILFGGPEGAKVHDGILADVAPTLLQLMNVPLPPEMTGKSLIDL

SEQ ID NO: 4178 - protein, 568 aa, Vibrio vulnificus YJ016
MLKQVTDWLARDPDPRTREELQYLIDEKMTEELQDRFRGRLEFGTAGLRGKVGSGPNRMNRLVVQETATGLGHYLIETIRDAAARGVVIGYDGRTDSKQFAHDTAAVLTALGIKVYLTHKVAPTPVVAFGVKQFNAAAAVVVTASHNPPEYNGFKVYWENGAQIIPPHDAGIAAEIEQATHKPIPLMSLSDAEKHGLLVWLKEDYYQTYRQAMNTHPLLKSGHAVDISIAYTAMHGVGAEMAETLLADAGFTHVLSVPEQQEPDGTFPTVNFPNPEEAGAMDMVMNLAKTVDAEIACANDPDADRFAVAVRKPDGNYQMLTGDQVGALFANYLLSSVDASKQLVGNTIVSSRLLADIAKQHGAHYYQTLTGFKWLTNVAMTQQSDDKQFLFAYEEALGYTVGNKVWDKDGLSALVAFAQLTAHLKENGLTLWDKLEQLYRQHGFYFNAQRSIALSPDSPPIGDQLRAKPPKTIAGQKVTVIEDLKASLRYVTNGVTEAINLPASDVLIYHLEDRSRVIVRPSGTEPKLKCYYEVISDFPAELDYQTAQFKAESKMNALIAAHQQSLSS

SEQ ID NO: 4179 - protein, 603 aa, Mycobacterium bovis AF2122/97
MSFVIAAPETLVRAASDLANIGSTLGAANAAALGPTTELLAAGADEVSAAIASLFAAHGQAYQAVSAQMSAFHAQFVQTFTAGAGAYASAEAAAAAPLEGLLNIVNTPTQLLLGRPLIGNGANGAPGTGQAGGAGGLLYGNGGAGGSGAPGQAGGPGGAAGLFGNGGAGGAGGDGPGNGAAGGAGGAGGLLFGSGGAGGPGGVGNTGTGGLGGDGGAAGLFGAGGIGGAGGPGFNGGAGGAGGRSGLFEVLAAGGAGGTGGLSVNGGTGGTGGTGGGGGLFSNGGAGGAGGFGVSGSAGGNGGTGGDGGIFTGNGGTGGAGGTGTGNQLVGGEGGAGGAGGNAGILFGAGGIGGTGGTGLGAPDPGGTGGKGGVGGIGGAGALFGPGGAGGTGGFGASSADQMAGGIGGSGGSGGAAKLIGDGGAGGTGGDSVRGAAGSGGTGGTGGLIGDGGAGGAGGTGIEFGSVGGAGGAGGNAAGLSGAGGAGGAGGFGETAGDGGAGGNAGLLNGDGGAGGAGGLGIAGDGGNGGKGGKAGMVGNGGDGGAGGASVVANGGVGGSGGNATLIGNGGNGGNGGVGSAPGKGGAGGTAGLLGLNGSPGLS

SEQ ID NO: 4180 - protein, 425 aa, Agrobacterium tumefaciens str. C58
MAEFVITMPDVGEGVAEAELVEWNVKPGDIVHEDMVLAAVMTDKATVEIPSPVAGIITWLAVTVGNTVPVKAPLVRIETDVAAAAPNGSAPEAEAPSRMTEEEAPADMTEAPPPVETQPAARQTEEAPSAPVAEPHHKPLASPAVRQRADDLDIDLIKVKGTGPDGHITHADLDGFLTVRARPERPEPMTPHDSAVEEVKVTGLRRKIAEKMVLSVSRIPHITYVEEIDVTELEDLRATMNGNRRSGQPKLTILPFLMRALVKAVADHPGMNAIFDDEKGVVSHYEAVHIGIATQTPAGLTVPVVRHAETLGLWDCAEEVARVAEAARTGTAHREELMGSTITISSLGALGGVVSTPIINHPEVAIIGVNKIMTRPVWDGNRFVPRKMMNLSSSFDHRVVDGWDAAVFIQAVKALLEKPALIFIE

SEQ ID NO: 4181 - protein, 190 aa, Isoetes velata
DEHGEVVAEIRRSDLEPYLGLHYPATDIPQASRFLFMKNRVRMIYDCSAPPVKIIQDKDLRQPISLAGSTLRAPHGCHSHYMGIMGSIASLVMAVITNDNDEEYGGRGYQQKGRKLWGLVVCHHTSSRAVPFPLRSACEFLMQVFGLQLNMEVELAAQLREKHILRTQTLLCDMLLRDAPIGIVSQSPNI

SEQ ID NO: 4182 - protein, 192 aa, Juniperus phoenicea
DDHGEVISEIRRADLEPYLGLHYPATDVPQASRFLFMKNKVRMICDCYANPVEVVEDKRLLRELILCGSSLRRPHGCHAEYMSNMGSIASLVIAVTINAKEEDVDTDAQQQQQKGRRLWGLVVCHHTSPRFVPFPLRYACEFLMQVFAIQLNKEDDLADQLREKHILRTQTLLCDMLLRDAPMGIIREKPNI

SEQ ID NO: 4183 - protein, 185 aa, Glycine max
SRKIKALGVKMVLSGEGSDEIFGGYLYFHKAPNKKEFHEETCRKIKALHLYDCLRANKSTAAWGVEARVPFLDKEFINVAMSIDPEWKMIRPDLGRIEKWVLRNAFDDDKNPYLPKHILYRQKEQFSDGVGYSWIDGLKDHANKQVTDATMMAANFIYPENTPTTKEGYLYRTIFEKFFPKVDFI

SEQ ID NO: 4184 - protein, 240 aa, Bacillus cereus ATCC 10987
MRDKSVASSYVTTVKLDSFREIAYSKELKRKLLAEFIGTFTLVFAGTGAIIVNSITQSLTHIGVAITFGLVVLALIYSFGHISGAHFNPAVTIALLSAKEISRREAILYILIQMIGASFASLFLLSIFGDIANLGATLPSQSWTQSFILEFVLTFILMMVIFASATHGKATKSFAGVAIGSTVALEAMFGGPISGASMNPARSFGPALISGTFEYLWIYLVATTLGALLAAIVYKFIHEQ

SEQ ID NO: 4185 - protein, 250 aa, Zea mays
  unsure (1)..(250): unsure at all Xaa locations
MSRRYDSRTTIFSPEGRLYQVEYAMEAIGNAGSALGILAADGVVLVGEKKVTSKLLQTSRSAEKMYKIDSHLACAVAGIMSDANILINTARLHAQRYALSYQEPIPVEQLVQSLCDTKQGYTQFGGLRPFGVSFLFAGWDKHHGFQLYMSDPSGNYGGWKAAAVGANSXAAQSMLKQDYKDALTREEAVGLALKVLSKTMDSTSLTAEKLELAEVFLQPDTGEVQYQVCSPEALGKLLAKSGLTQPTPEA

SEQ ID NO: 4186 - protein, 328 aa, Lactococcus lactis subsp. lactis
MEKINYLLPEESAEMTLNQVKSLRQIEGRLRKLFSLKNYQEVMPPSFEYTQLYTALESNGKTFNQEKMFQFIKHEGQSITLRYDFTLPLVRLYSQIKDSTSARYSYFGKIFRKEKRHKGRSTENYQIGIELFGESADKSELEILSLALQVIEQLGLNKTVFEIGSAKFFQRLCQLADGSTELLTELLLKKDLSGLNAFIEKNNFSKELRGLLKEIFITNELSRLENLVTNTKDDVLISSFDQLKEFSEKLSMIKPIIIDLGMVPKMDYYTDLMFKAYSSAANQPILSGGRYDQLLSNFQEEAFAIGFCCHMDTILKALERQELEEDND

SEQ ID NO: 4187 - protein, 403 aa, Neisseria meningitidis Z2491
MIIDVKVPMLSESVSEGTLLEWKKKVGEAVARDEILIDIETDKVVLEVPSPQAGVLVEIVAQDGETVVADQVLARIDTAATAAAEAPAAATAAAEAPAAAPAEAAPAAAPAAAQNNAAMPAAAKLAAESGVDVNALQGSGRDGRVLKEDVQNAAAKPAAAAAPAVALPAGARPEERVPMSRLRARVAERLLASQQENAILTTFNEVNMKPIMDLRAKYKEKFEKEHGVKLGFMSFFVKAAVAALKKYPVVNASVDGKDIVYHGYFDIGIAIGSPRGLVVPILRDADQMSIADIEQAIVDYAKKAKDGKIAIEDLTGGTFSITNGGTFGSMMSTPIINPPQSAILGMHATKERAVVENGQVVVRPMMYLALSYDHRIIDGREAVLTLVAIKDALEDPARLLLDL

SEQ ID NO: 4188 - protein, 477 aa, Neisseria meningitidis Z2491
MSQYDVVVIGAGPGGYVAAIRAAQLGFKTACVDAGVNKAGNAPALGGTCLNVGCIPSKALLQSSEHFHAAQHEFAEHGITVGDVKFDVAKMIERKDAIVTKLTGGVKFLFQKNKVTSLFGTASFAGKNGDAYQIEVDNKGEKTVIEAKHVIVATGSVPRPLPQVAIDNVNVLDNEGALNLTEVPAKLGVIGSGVIGLEMGSVWNRVGAEVTILEAAPTFLAAADQQIAKEAFKYFTKEQGLSIELGVKIGDIKSEGKGVSVAYETAAGEAKTEVFDKLIVAIGRIPNTKGLNAEAVGLEKDERGFIKVDGECRTNLPNVWAIGDVVRGPMLAHKASDEGVAVAERIAGQKPHIDFNNVPFVIYTDPEIAWVGKTEEQLKAEGVEYKKGTSGFGANGRALAMGKAKGTVKVLADAKTDRILGVHMIGPVVSELLTEGVTALEFFASSEDIARIIHAHPTLSEVVHEAALAADKRALHG

SEQ ID NO: 4189 - protein, 505 aa, Brucella suis 1330
MNKVEFSRTVKPAFAKRYGNFIGGKWVEPRSGRYFENTSPVNGQVLCEVARSDAADVEAALDAAHAARELWGRTSVAERALILNRIADRIEENLPALAAAETWDNGKPIRETTNADLPLAVDHFRYFAGVIRAQEGGISEIDHDTVAYHFHEPLGVVGQIIPWNFPLLMATWKLAPALAAGNCVVLKPAEQTPASILVLMELIADILPPGVVNIVNGFGLEAGKPLASSPRIAKIAFTGETTTGRLIMQYASQNLIPVTLELGGKSPNIFFKDVAAEDDDFLDKAIEGFVMFALNQGEVCTCPSRALIQESIYDRFMKKALKRVEAIVQGDPLDPATMIGAQASSEQLEKILSYLDIGRQEGAEVLAGGERNMLPGDLAGGYYVKPTVFKGHNKMRIFQEEIFGPVVSVATFKDDAEALSIANDTLYGLGAGIWTRDGTRAYRFGRAIKAGRVWTNCYHAYPAHAAFGGYKQSGIGRENYLKMLDHYQNTKNMLVSYSPKKLGFF

SEQ ID NO: 4190 - protein, 344 aa, Brucella suis 1330
MAKTMKAAVVRAFGKPLTIDEVPIPQPGPGQIQVAIQASGVCHTDLHAAEGDWPVKPNPPFIPGHEGVGFVSAVGSGVKHVKEGDRVGIPWLYTACGHCRHCLGGWETLCEEQLNTGYSVNGGFAEYVVADPNFVGHLPKNIDFNEIAPVLCAGVTVYKGLKVTDTKPGDWVVISGIGGLGHMAVQYARAMGLNVAAVDIDDRKLDLARRLGATVTVNAKTVADPAAYIRKETDGGAQGVLVTAVSPKAFEQALGMVARGGTVSLNGLPPGDFPLSIFNMVLNGVTVRGSIVGTRLDLQESLDFAADGKVKATIQTGKLEDINAIFDDMRQGNIEGRIVMDLTQ

SEQ ID NO: 4191 - protein, 508 aa, Zea mays
MGEEKQRRDGHGGKNKYAVACSIIGSIISILMGYDTGVMTGAMLFIKEDLKTNDTQVQVLAGILNVCALVGSLTAGRVSDWVGRRRTISLAACIFLAGSVLMGLSPNFGTLLAGRCVAGVGVGYALMIAPVYAAEISSAHIRGSVTSLPEICISFGILIGYVANYLLAKLPLVYGWRAMLGLGALPSAVLAVAVLAMPESPRWLVMQGRVEQAHAVLRRVSDTAGEADVRLAEIKTAAGLADDDDGSPRGVGKGVWKEMFLHPTPPVRRILVAAFGVHFFQHLTGIEAVVLYSPRIFKAAGIATRSEILAATIGVGVTKTVFIMTAILLVDRIGRRPLYLSSLAGIIASLACLGLGLTVVERSVPRHSPTWAMALSIATVFTFIASFSIGVGPITWAYSTEVYPLRLRAQGASVGVAINRVMNAGVSMTFVSLYNAVTIGGAFFLFAGLAVLAAMFFYFLCPETQGRPLEEIEEVFGRGWRARLLSWDEAVVELPMSNTTDGNTKARP

SEQ ID NO: 4192 - protein, 215 aa, Capsicum annuum
MNIFRSYYSDPLTESSSSFSDSSIYSPNRAIFSDEEVILASNNPKKPAGRKKFRETRHPVYRGVRKRNSGKWVCEVREPNKKSRIWLGTFPTAEMAARAHDVAAIALRGRSACLNFADSAWRLPVPASSDTKDIQKAAAEAAEAFRPLKLEGISKESSSSTPESMFFMDEEALFCMPGLLTNMAEGLMLPPPQCAEIGDHVETADADTPLWSYSI

SEQ ID NO: 4193 - protein, 477 aa, Brucella suis 1330
MTFHQNLIAGEWVGGDDIANINPSDTNDVVGTYARATAEDTKAAIAAAKAAFPAWSRSGILERHAILRKTADEILARKEELGRLLSREEGKTLVEGIGETIRASQIFDFFAGECLRLAGEVLPSARPGIGVEVTREPVGVVGIITPWNFPIAIPAWKIAPALCYGNTIVFKPAELVPGCSWAIADILHRAGLPKGVLNLVMGKGSVVGQTILDSADVNAVTFTGSTGTGKRVAAASIEHNRRFQLEMGGKNPVVVLDDADLNVAVESVVNSAFFSTGQRCTASSRIIVTEGIHDKFVAAAIEKLKTVVVDNALKPGTHIGPVVDETQLQQDMDYIELGRKEGAKLAFGGERLNRETPGFYLQPALFTEATNQMRISREEIFGPVASVIRVKDYEEALATANDTSFGLSSGICTTSLKYATHFKRNSEAGMVMVNLPTAGVDFHVPFGGRKGSSFGPREQGRYAAEFYTTVKTAYTLA

SEQ ID NO: 4194 - protein, 162 aa, Oryza sativa
  unsure (1)..(162): unsure at all Xaa locations
MAPTVMASSATSXAPFQGLKSTAGLPVSRRSTNSGFGNVXNGGRIKCXXVWXIXGXKKFETLSYLPPLXVXDLLXXIXXLLXSXWVPCLQFXXVGFXYRENHRSPXXYXXRXWTXXXLPXFGCTDXTXVLXXLQEAXKXYPXAFVRIIXFHNXRXVXLXNFI

SEQ ID NO: 4195 - protein, 385 aa, Oryza sativa
VDARRTASSNLARKQIDVKRVRATILTIQYLIKNGAKVILSSHLGRPKGVTPKFSLAPLVPRLSELLGIQVTKAEDVIGPDVEKLVSELPNGSVLLLENVRFYKEEEKNDPEFAKKLASLADLYVNDAFGTAHRAHASTEGVTKFLKPSVAGFLLQKELDYLVGAVSSPKRPFAAIVGGSKVSSKIGVIESLLEKCDILLLGGGMIFTFYKAQGLSVGSSLVEEDKLELATSLLAKAKEKGVSLLLPSDVIIADKFAPDANSQVVPASAIPDGWMGLDIGPDSVASFSSTLETTQTVIWNGPMGVFEFDKFAVGTEAIAKKLADLSGKGVTTIIGGGDSVAAVEKVGVADVMSHISTGGGASLELLEGKELPGVIALDEAVTVAV

SEQ ID NO: 4196 - protein, 516 aa, Chlorobium tepidum TLS
MVQKLIFILTGVLLMLGIAMGGDLHAYTQPDPSGAKVGVTADISAANPGKPTAAEITDQIGKNKVSINMVWVLITGFLVMFMQAGFAMVEAGLTRAKNAAHTMSMNMMIYPIGMLGFFVSGFAIMFGGLGTLGTLGGYEGLNQEFAINLFGHTIGLFGMKGFFLNNVYDVGVFALFLFQMVFMDTTATIPTGSMAERWKFSAFAIYGIFVGTIIYPLYGNWVWGGGWLATLGSNFGLGHGHVDFAGSSVVHMTGGVLALVGAIIIGPRIGKYNKDGSPNAIPGHNIPMAIVGAFILAFGWFGFNPGSTLAGTDLRISVVAVNTMIASATGAAASMLYMWLFKTKKPDPTMMINGLLAGLVAITAPSAFVNVQAAALIGLISGVLVIEAAFFIEKVLKIDDPVGAVAVHGVNGAWGCLALGLFADGTYGDGWNGVAGPVTGLFYGNPGQFYAEVIGVLANIIYVGAIGWVVFKLIDVTIGNRVNPDDELDGLDIPEMGVEGYCGIRLDKNSETPLSK

SEQ ID NO: 4197 - protein, 489 aa, Exiguobacterium sp. 255-15
MSEKRLTTNQGVPIGDNQNSRTAGRRGPTLLEDYQLIEKMAHFDRERVPERVVHARGFGAHGVFTVKNSMKKYTKAAFLQNEGTEVPVFARFSTVIHGTHSPETLRDPRGFSVKFYTEEGNWDFVGNNLPVFFIRDSMKFPDMVHSLKPDPRTNIQDPDRYWDFMTLRPESTNMLMHLFTDEGIPASYRKMRGSSVHAFKWVNAHGNTVYVKLRWVPKVGVHNLSADEATEIQGKDFNHASNDTYQAIEDGEFPEWDLFVQVLDPADVDNFDFDPLDATKDWFEDVIPFQHVGTMVLNKNVDNYFAETESVGFNPGVLIPGMLPSEDKLLQGRLFSYSDTQRYRIGTNYQQLPINCPFAQVNNYQRDGAMPVGQQTSPVNYEPNRYQDEPKQTPEYTEENQPLYDDIHGRLEIEKTNNFGQAGEVYRRMTEEEQTALLNNLVDDLKQVRHENTVLLAICNFYRADESLGKKLSEALQVDIQPFLQQMQK

SEQ ID NO: 4198 - protein, 211 aa, Xylella fastidiosa Ann-1
RIPRHQFDQADITELEALRVQINKENATSNKNGTGIKLTVLAFLIKASAAALKKFPTFNASLDATGETLTLKKYFHIGFAADTPNGLVVPVIRNVDQKGIVEIAQETSDLAKKARDGKLTPADMSGGCFSISSLGGIGGTAFTPIINAPEVAILGVSKSLIQPIWDGTQFAPKMLLPLSLSYDHRVIDGALAAHFTTYLSQILADMRRVLL

SEQ ID NO: 4199 - protein, 432 aa, Burkholderia cepacia
  unsure (1)..(432): unsure at all Xaa locations
LNDDATFWRNARHHLVRYGGTFEPMIIERAKGSFVYDADGRAILDFTSGQMSAVLGHCHPEIVSVIGEYAGKLDHLFSEMLSRPVVDLATRLANITPPGLDRALLLSTGAESNEAAIRMAKLVTGKYEIVGFAQSWHGMTGAAASATYSAGRKGVGPAAVGSFAIPAPFTYRPRFERNGAYDYLAELDYAFDLIDRQSSGNLAAFIAEPILSSGGIIELPDGYMAALKRKCEARGMLLILDEAQTGVGRTGTMFACQRDGVTPDILTLSKXTLGAGLPLAAIVTSAAIEERAHELGYLFYTTHVSDPLPAAVGLRVLDVVQRDGLVARANVMGDRLRRGLLDLMERFDCIGDVRGRGLLLGVEIVKDRRTKEPADGLGAKITRECMNLGLSMNIVQLPGMGGVFRIAPPLTVSEDEIDLGLSLLGQAIERAL

SEQ ID NO: 4200 - protein, 446 aa, Oryza sativa (japonica cultivar-group)
MAATIVSVKARQIFDSRGNPTVEVDVCCSDGTFARAAVPSGASTGVYEALELRDGGSDYLGKGVSKAVDNVNSVIAPALIGKDPTSQAELDNFMVQQLDGTKNEWGWCKQKLGANAILAVSLAICKAGAIIKKIPLYQHIANLAGNKQLVLPVPAFNVINGGSHAGNKLAMQEFMILPTGAASFKEAMKMGVEVYHNLKSVIKKKYGQDATNVGDEGGFAPNIQENKEGLELLKTAIEKAGYTGKVVIGMDVAASEFYNDKDKTYDLNFKEENNDGSQKISGDSLKNVYKSFVSEYPIVSIEDPFDQDDWEHYAKMTAEIGEQVQIVGDDLLVTNPTRVAKAIQEKSCNALLLKVNQIGSVTESIEAVKMSKRAGWGVMTSHRSGETEDTFIAELAVGLATGQIKTGAPCRSERLAKYNQLLRIEEELGAAAVYAGAKFRAPVEPY

SEQ ID NO: 4201 - protein, 603 aa, Xylella fastidiosa Ann-1
MTVIEIKVPDIGDYSKVPVIEVLVTVGDHVVKNQGILTLESDKATLEVPSMNNGIVKELKVNVGDLLSQGDVILLLETEDTTAPPSPSNAATSDTTSPPPPSPQPAASKATAPDQQHSDIKCRMVVLGAGPGGYTAAFRAADLGLDTVLVERYPNLGGVCLNVGCIPSKALLHAAAVIDEAAHASTFGIDFGKPKITLDTLREYKQNVVNKLTAGLAGMAKQRKVRTVTGIAHFVSPNTLDITAADGSTQRLHFQQCIIATGSHPVKLPNFPWDDPRIMDSTDALELAEVPKKLLVVGGGIIGLEMATVYNALGSHVTIVEFMDQIIPGTDKDLVKPLADRMKKQGIEIHLNTKASHVKADKKGITVSFEAPTQGTQPTLKTSTYDRVLVAVGRTPTGNNIGAEKAGVNVTERGFIPVDRQMRSNVPHIFAIGDIVGNPMLAHKATHEGKLAAEVAAAETESGKHREWVARVIPSVAYTNPEIAWIGMTETEAKAKSLNIGVAKFPWAASGRAIGIGRTEGFTKLIFDEDTHRIIGGAIVGVHAGDLLAEIGLAIEMGTEAEDISHTIHAHPTLSESIAMSAEVYDGTITDLYLPKKPATSAK

SEQ ID NO: 4202 - protein, 158 aa, Bradyrhizobium japonicum USDA 110
MSAIYDFKANSLLGEEVPMRRFEGQVLLIVNTASKCGFTPQYRGLEDLYRDLSPRGFAVLGFPCNQFGAQEPGQASEIQEFCSTNYDVTFPLFEKIDVNGANAHPLYEYLKRQQSGLLGASIKWNFTKFLVDRAGRVIARYAPTARPEGLRQQIETLL

SEQ ID NO: 4203 - protein, 269 aa, Magnaporthe grisea 70-15
MDHRPQAWGRPRDDVYGAYDASYLQTAGPKAATQSPVVTGTSVVGLKFKDGVVIAADNLASYGSLARFSSTHRLRSFANSSVVGFGGDVSDMQYLDRHLNELAIDEAYANPADESTESSRDSSLNAQNLHKYLSKLLYGRRNKFDPLWNQILVAGLDADDKPFLASADLLGTTFSAPALASGYGSMLAIPIMRRAVPSEEEAAKLSREEAVAVVKECMKVLFYRDARSSDSYSLAVVTKEGVELSTDEKLEQQSWAFADRIKGYGTQTV

SEQ ID NO: 4204 - protein, 253 aa, Bacillus subtilis
MNLTDKTVLITGGASGIGYAAVQAFLNQQANVVVADIDEAQGEAMIRKENNDRLHFVHTDITDEPACQNAIRSAVDKFGGLDVLINNAGIEIVAPIHEMELSNWNKVLNVNLTGMFLMSKHALKYMLKSGKGNIINTCSVGGVVAWPDIPAYNASKGGVLQLTRSMAVDYAKHNIRVNCVCPGIIDTPLNEKSFLENNEGTLEEIKKEKAKVNPLLRLGKPEEIANVMLFLASDLSSYMTGSAITADGGYTAQ

SEQ ID NO: 4205 - protein, 400 aa, Xylella fastidiosa Ann-1
MSIHDVHEGTCHVTTSAVRAGIDSDTAHGAVTPPIVLSSNFSFERFGHKRKYDYTRSANPTRDLLGEALAELEGGAGGVVTATGIAAITLVLHALLRPGDRLVVPHDAYGGSWRLFNALAQKGHFELITVDLTDARSLVEALALPPKLVLIETPSNPLLRITDLGAVIEAAHRVGALTVVDNTFMSPVLQRPLEFGADLVLHSTTKYINGHSDVVGGVVVARDVAHYQQLVWWANALGLTGSPFDAFLTLRGVRTLDARLRVHQENAQMIAALLEGHGVVKHVHYPGLASHPGHVLAGRQQKGFGAMLSFELQGGEEAVRAFVSGLRYFTLAESLGGVESLIAHPASMTHAAMTPEARAKAGISDGLLRLSVGIEASEDLIVDLVAGLGRAQAVREECKV

SEQ ID NO: 4206 - protein, 287 aa, Oryza sativa (japonica cultivar-group)
MEVLPPMDHYASRGNWFMARKWSPEENKQFERALAGLDLRCPDWDRVARAIPGRSALEVMNHFRDLELDVQQIENGMVPFPVYGAAAAGGAFTLQWDGAHGVGDFRNAYRFGGGGGGKRHFGRTPEQERKKGVPWTEEEHKLFLLGLKKYGKGDWRNISRNFVQTRTPTQVASHAQKYFIRLNSGGKDKRRSSIHDITTVNLTDDRPPSPSQSSLISNQSNTSTLTAAVAPFSSTADVKPQNAANASFNSPSRTLGMAGYGMGLQDQGLQCGGPLHDQLAASRSILF

SEQ ID NO: 4207 - protein, 325 aa, Glycine max
  unsure (1)..(325): unsure at all Xaa locations
SSSILYEYSIKEYTETEQFDLGLTWKHPIVWNSPHAPLYASRFSMGSGNERGAIAISLKLIQGLVAINNVKERCKFQANVLQIVPXWYVKXIYYHTLQLVVDERPQALTDFVERMRVSPSEDKVSPGVMEMVLQCPCEMKSAVXLSIVFDKGFLHIDEYPPDANQGFDIXPSAIISFPDXHAGLQFSDXISKQVHHCXSKLQKKSPVLSYTEVLLVPLTTPDFSMPYNVITITCTVFALYFGSLLNVLQRRVGEEERLLKDKVANKAVFLRRVLSKLSAKLRGRSLELTPPAPSWSSSSSFVTPKLILRVLVVAGIAFAWQYYSQ

SEQ ID NO: 4208 - protein, 197 aa, Medicago truncatula
MSGSRFIKCVTVGDGAVGKTCLLISYTSNTFPTDYVPTVFDNFSANVVVDGSTINLGLWDTAGQEDYNRLRPLSYRGADVFLLAFSLISKASYENIAKKWIPELRHYAPGVPIILVGTKLDLRDDSQFFQDHPGAAPITTAQGEELRKLIGAPVYIECSSKTQKNVKAVFDSAIKVVLQPPKQKKTKRKGQKACSIL

SEQ ID NO: 4209 - protein, 375 aa, Arabidopsis thaliana
MPLSLQSPPCATLSASIRKGRWKTLAAGFSVTPLPAVNFSLRRSIPRILASASSSSSPASSSLEAGENNELNAVSAFSEIVPDTVVFDDFERFPPTAATVSSALLLGICGLPDTIFRNAVDMALADSSCAGLETTESRLSCFFNKAIVNVGGDLVKLVPGRVSTEVDARLAYDTNGIIRKVHDLLRLYNEIDVPHDRLLFKIPATWQGIEAARLLESEGIQTHMTFVYSFAQAAAASQAGASVIQIFVGRLRDWARNHSGDTEIESAIKSGEDPGLALVKRSYNYIHKYGYKSKLMAAAVRNKQDLFSLLGVDYVIAPLKVLQSLKDSPAIPDDEKYSFVRKLTPETATHYHFTNKELVKWDQLSLASSMGPASV

SEQ ID NO: 4210 - protein, 197 aa, Medicago truncatula
MSASRFIKCVTVGDGAVGKTCLLISYTSNTFPTDYVPTVFDNFSANVVVNGSTVNLGLWDTAGQEDYNRLRPLSYRGADVFILAFSLISKASYENVSKKWIPELKHYAPGVPIILVGTKLDLRDDKQFFVDHPGAVPITTAQGEELRKLINAPAYIECSSKSQQNVKAVFDAAIRVVLQPPKQKKKKSKAPKACSIL

SEQ ID NO: 4211 - protein, 375 aa, Arabidopsis thaliana
MPLSLQSPPCATLSASIRKGRWKTLAAGFSVTPLPAVNFSLRRSIPRILASASSSSSPASSSLEAGENNELNAVSAFSEIVPDTVVFDDFERFPPTAATVSSALLLGICGLPDTIFRNAVDMALADSSCAGLETTESRLSCFFNKAIVNVGGDLVKLVPGRVSTEVDARLAYDTNGIIRKVHDLLRLYNEIDVPHDRLLFKIPATWQGIEAARLLESEGIQTHMTFVYSFAQAAAASQAGASVIQIFVGRLRDWARNHSGDTEIESAIKSGEDPGLALVKRSYNYIHKYGYKSKLMAAAVRNKQDLFSLLGVDYVIAPLKVLQSLKDSPAIPDDEKYSFVRKLTPETATYYHFTNKELVKWDQLSLASSMGPASV

SEQ ID NO: 4212 - protein, 197 aa, Medicago truncatula
MSASRFIKCVTVGDGAVGKTCLLISYTSNTFPTDYVPTVFDNFSANVVVNGSIVNLGLWDTAGQEDYNRLRPLSYRGADVFILAFSLISKASYENVSKKWIPELKHYAPGVPIILVGTKLDLRDDKQFCIDHPGAVPITTAQGEELRKLINAPAYIECSSKSQENVKAVFDAAIRVVLQPPKQKKKKNKAQKACSIL

SEQ ID NO: 4213 - protein, 302 aa, Triticum aestivum
LGVRPALQERSGTRTEGEGEERGTPHHTTKARPPDRARAFLRRGEPSQAQIESPPPESMDGSHSHAAGGGEGTQRTLNPYVTGNSVIAMKYKDGVIMACDTGASYGSTLRYKSVERIKEVGKHSLIGGSGEFSDFQEILRYLDELTLNDHMWDDGNSLGPKEIHAYLTRVMYNRRNKFDPLWNSLVLGGVKKGPKGDEKYLGMVNMIGTHFEENHIATGFGNHMAIPILRGEWREDMTFEEAVKLIEKCLLVLLYRDRSSINKFQIAKITTEGSTIYPPYALKTNWGFAAFENPSKGAVGTW

SEQ ID NO: 4214 - protein, 430 aa, Chlamydophila pneumoniae J138
MTVTLPKGVFDIFPYLADAKQLWRHTSLWHSVEKAIHTVCMLYGFCEIRTPIFEKSEVFLHVGEESDVVKKEVYSVLDRKGRSMTLRPERTAAVVSAFLEHGASHRSDIKFYYILPMFRYERQQAGRYRQHHQFGVEAIGVRHPLRDAEVLALLWDFYSRVGLQHMQIQLNFLGGSETRFRYDKVLRAYLKESMGELSALSQQRFSTNVLRILDSKEPEDQEIIRQAPPILDYVSDEDLKYFNEILDALRVLEIPYAINPRLVRGLDYYSDLVFEATTTFQEVSYALGGGGRYDGLISAFGGASLPACGFGVGLERAIQTLLAQKRIEPQFPHKLRLIPMEPDADQFCLEWSQHLRRLGIPTEVDWSHKKVKGALKAASTEQVSFVCLIGERELISQQLVIKNMSLRKEFFGTKEEVEQRLLYEIQNTPL

SEQ ID NO: 4215 - protein, 334 aa, Escherichia coli CFT073
MWIKVAAAEQHILVYQYNKEFRMKVAVLGAAGGIGQALALLLKTQLPSGSELSLYDIAPVTPGVAVDLSHIPTAVKIKGFSGEDATPALEGADVVLISAGVARKPGMDRSDLFNVNAGIVKNLVQQVAKTCPKACIGIITNPVNTTVAIAAEVLKKAGVYDKNKLFGVTTLDIIRSNTFVAELKGKQPGEVEVPVIGGHSGVTILPLLSQVPGVSFTEQEVADLTKRIQNAGTEVVEAKAGGGSATLSMGQAAARFGLSLVRALQGEQGVVECAYVEGDGQYARFFSQPLLLGKNGVEERKSIGTLSAFEQNALEGMLDTLKKDIALGEEFVNK

SEQ ID NO: 4216 - protein, 96 aa, Rubrobacter xylanophilus DSM 9941
MPLEELRGLPDGEVISALTAVRGIGRWSAQMFLIFHLRRPDVLPAADLGIRRAAALLYGLPELPAEELLERLAAPWRPWRTTACLYLWRSLDALPA

SEQ ID NO: 4217 - protein, 254 aa, Bacillus amyloliquefaciens
MNLTDKTVLITGGASGIGYAAVQAFLNQQANVVVADIDEAQGEAMIRKENNDRLHFVQTDITNEPACQNAILSAVDKFGGLDVLINNAGIEIVAPIHEMELSDWNKVLNVNLTGMFLMSKHALKYMLKSGKGNIINTCSVGGVVAWPDIPAYNASKGGVLQTDAFYRPSIIAKHNIRVNCVCPGIIDTPLNEKSFLENNEGTLEEIKKEKAKVNPLLRLGKPEEIANVMLFLASDLSSYMTGSAITADGGYTAQ

SEQ ID NO: 4218 - protein, 83 aa, Zea mays
EEPPEVTKARNDNSHGTNFPDSPEPIYGTQYLPRKFKVAVTAAGDNSVDILTNDIGVVVVSDDAGEPIGFNIYVGGGMGRTHR

SEQ ID NO: 4219 - protein, 599 aa, Bradyrhizobium japonicum USDA 110
MKPTDIAAPDYFHKVVDCQWACPAHTPVPEYIRLIAQGRYSDAYMINWKSNVFPGILGRTCDRPCEPACRRGRVEETPVAICRLKRVAADFKDDITQRLPRPSPKNGKRVALVGGGPASLTVARDLAPLGYHCTVFDADPEAGGMMRSQIPKFRLPNSVIDEETGYILNLGVEFKGGHRIESMKALLTEKYDAIFVGSGAPRGRELDIPGRKEAAANIHIGIDWLSSVSFGHTDKIGKRVIVLGGGNTAMDCCRTARRLGGEKVTVIVRSGFEEMKASPWEKEDAIHEDIPILNYMVPVAFKHVAGKLIGVTFQHVKAEYDAKGRRNLVPSGDPEQTIPCDDVLVAVGQENAFPWIERDCGIAFDKWNMPQVDPKTFVSTNPKVFFGGDAAFGPKNIIWAVAQGHDAALSIHRLLSGEDITERPLPEVHVSSQKMGIHEWSYDNDISVDKRFKVPHRDKVIALKDIRTEVELGYDVKLALGEAHRCLNCDVQTVFSTSLCIECDACVDICPMDCITFTENGEEPDLRQRLKAPSLHPDQDLYVSSDLKTGRVMVKDEDVCLHCGLCAERCPTGAWDMQKYLIEMTHAGSACPTKSRSAA

SEQ ID NO: 4220 - protein, 184 aa, Triticum aestivum
  unsure (1)..(184): unsure at all Xaa locations
ATSVAPFQGLKSTAGLPVSRRSNGASLGSVSNGGRIRCMQVWPIEGIKKFETLSYLPPLSTEALLKQVDYLIRSKWVPCLRXSKLXHLPVEHNAXPGYYDGPGIGMWXLPXFGCTDXTQVINKWRRSRRYPDAIPHNFTTQAVALSNCKIRKAKHNILHSFECLVPPNYFYCKLFHFKWSKTSH

SEQ ID NO: 4221 - protein, 375 aa, Arabidopsis thaliana
MPLSLQPPPCATLSASIRKGRWKTLAAGFSVTPLPAVNFSLRRSIPRILASASSSSSPASSSLEAGENNELNAVSAFSEIVPDTVVFDDFERFPPTAATVSSALLLGICGLPDTIFRNAVDMALADSSCAGLETTESRLSCFFNKAIVNVGGDLVKLVPGRVSTEVDARLAYDTNGIIRKVHDLLRLYNEIDVPHDRLLFKIPATWQGIEAARLLESEGIQTHMTFVYSFAQAAAASQAGASVIQIFVGRLRDWARNHSGDTEIESAIKSGEDPGLALVKRSYNYIHKYGYKSKLMAAAVRNKQDLFSLLGVDYVIAPLKVLQSLKDSPAIPDDEKYSFVRKLTPETATHYHFTNKELVKWDQLSLASSMGPASV

SEQ ID NO: 4222 - protein, 641 aa, Rhodospirillum rubrum
MCGLVGIYHPTASRPVDRALVEAMNQRQFHRGPDDGGVFIGPGIGLGHRRLSIVDLGGGRQPMTNDGGGVVLVYNGELYNNAELVAELKAAGHVFRTASDTETVIHAWEEWGEDSVRHLRGMFAYALWDDRSQTLFLARDRLGIKPLHYTCLADGRVMFGSELKSLTGVEDIPKVVDPLAIEDFLAYGYVPDPRSIFKDILKLEAGHTLTFRRGEAPGRPHCYWDVSFTTPSRPAKTDDLCAEVIDRLDEAVRCHLVADVPVGAFLSGGVDSSAMVALMAGATDRPVETCSIAFSEARFDESAYAKTVAERYGTHHRVHTLPAQALSEVGPLTAIYDEPFADSSALPTLKVCQAARETVTVALSGDGGDELFAGYRRYRFHTAEEAVRRILPQAARGPLFGALGRVYPKLDWAPQVLRAKSTFQALGRDRVEGYFNAVSVIPDGLRRGLYSKTMRAELAGYGASEVLRRHMTRAPADHPLSIAQYVDLKTWLPGDILTKVDRASMATSLEVRVPMLDHRFVEWTAGLSPDLKLSGGTGKYLLKRALRPLLPDEVLYRRKMGFSIPLTDWLRGPWSGRTRALAGRSALVTSGLFDGAAVAKLVEQHLGGNWDHGAALYALIVLDDFLTAHVGAACLPARMSA

SEQ ID NO: 4223 - protein, 806 aa, Haemophilus influenzae R2846
MSNFNQISRRDFVKASSAGAALAVSNLTLPFNVMAKETQRLNENNQERIVWSACTVNCGSRCPLRMHVKDNRITYVETDNTGTETYNLDHQVRACLRGRSMRRRVYNPDRLKYPMKRIGKRGEGKFKRISWDEALTEIADALKRNIKKYGNESIYLNYGTGTLGGTMAKSWPPASTMIARFMNCIGGYLNHYGDYSTAQIAVGLDYTYGGGWALGNGMADIENTKLIVLFGNNPAETRMSGGGLTYCIEQAKARSNAKMIIIDPRYNDTGAGREDEWIPIRPGTDAALVSALAYVMIQENLVDQPFLDKYCVGYDEKTLPADAPKNGHYKAYILGYGNDGIAKTPEWAAKITSIPAERIIKLAREIGSTKPAFISQGWGPQRRSNGELISRAIAMLPILTGNVGIHGGNTGARESAYSIPFVRMPTLKNPVKASIPMFLWTDAIIRGTEMTALTDGIRGVDKLSSPIKVIWNYASNCLINQHAQINRTHDILQDDTQCEMIITIDNHMTSTAKYSDILLPDCTTSEQMDFALDAFVSNMAYVIFADQVIKPSFECRPIYDMLSDLAEKMGVKEKFTEGRTQEEWLRHIYKQSREKLPELPTFEEFRQQGIFKKVDPNGFKVAYKDFRDNPEAHPLKTPSGKIEIYSSRLAEIAKTWKLAEDDVIHPLPIHAQSFEHYGDPLMEKYPLQLSGFHYKARTHSTYGNVDVLKAANPQEVWMNPIDAEPRNIKNGDMIRIFNDRGEVRINVKITPRIIPGVVALSEGAWYAPDKDRIDHSGCINVLTTQRPSPLAKGNPQHSNLVQVERL

SEQ ID NO: 4224 - protein, 561 aa, Neurospora crassa
MPPTGNPFNFARITLLALVEVLIVKKTSYRHVLAISTTSLVLAILAINYVFFLAWKLYLYPVYFHPLSKFPAPKVVDLWRVLARFRGKVPPGQLLLELAERTPNDGIIILQGGFGTSMLITKPAPLADILVHHPYDFVKHDAIRNFLRPILGDGLVIVEGEQHRFLRKNTQPAFKFGHIKELYSTMWTKAIEMNHVLKEELREKGNDTSVEINAWAGKVTLDIIGIAAFGRDFHVLERPDHPLVKNYADLLEPGPAKFAYFFLALTLSRKFVDLFPWEISRRFNRTTSNIRRICAELVRERKAAIEKLGDDQFDILSLLIRSNNFSEAELADQLLTFLTAGHETTSSAFTWAVYKLAQDGEMQSTLRSELKRALPDFPRFAPGQDIAIILEHLPYLNGVMNETLRLYPTVPMTVRTATCDTTVLGHPIKKGTEIMISPWLINRYSDNWPSASTEFVPERWIDQEGKHIAEDGTEQPTQKPNNTGGVTSNYAQMTFLHGPRSCIGQGFAKAELRCLLATFVLAFEWKLGMDEKDVMPDGVITIKPNNGMHLILRSLDGHQKG

SEQ ID NO: 4225 - protein, 292 aa, Oryza sativa (japonica cultivar-group)
MEHLERRGLAQGAYDGADPLDIGGFGDATGVDDAAEDVGDDLPLLDEVPAQDDLLRVVLIVADRGGGGGGRGSGISRGVAIRRGRGGHRDGDARCRLLPPELISLLSRAPTTETSSPPSAAMQQRRPASGRPSGTDGSDFSYRMVVDSRYQRVADGKSRLGRLILVQALHQVAGGALLLLALSKGAEMNKFAVMSVAAGLLAIVLGEIGRRRTMAVLLRMYTSLSSIAVAFSVACIIRSELFFKITKQNTESITSHELLEVVRVALGVLLQLVVIATTTRLLQNMSPPRRAS

SEQ ID NO: 4226 - protein, 375 aa, Arabidopsis thaliana
MPLSLQSPPCATLSASIQKGRWKTLAAGFSVTPLPAVNFSLRRSIPRILASASSSSSPASSSLEAGENNELNAVSAFSEIVPDTVVFDDFERFPPTAATVSSALLLGICGLPDTIFRNAVDMALADSSCAGLETTESRLSCFFNKAIVNVGGDLVKLVPGRVSTEVDARLAYDTNGIIRKVHDLLRLYNEIDVPHERLLFKIPATWQGIEAARLLESEGIQTHITFVYSFAQAAAAAQAGASVIQIFVGRLRDWARNHSGDNEIESAIKSGEDPGLALVKRSYNYIHKYGYKSKLMAAAVRNKQDLFSLLGVDYVIAPLKVLQSLKDSPAIPEDEKYSFVRKLTPETATHYHFTNKELVKWDQLSLASSMGPASV

SEQ ID NO: 4227 - protein, 448 aa, Bacillus pseudofirmus
MSNEREMQNKKDQQLESFRVEDEGKKLTTNQGLKVSEDEFSLKAGERGPTLMEDFHFREKMTHFDHERIPERIVHARGFAAHGEFQVYDSMKEFTKAKFLQDPSVKTPVFVRFSTVAGSKGSAETVRDARGFATKFYTEEGNYDLVGNNIPVFFIQDAIKFPDLVHALKPEPHNEIPQAQSAHDTFWDFIANNQESAHMVMWAMSDRSIPRSFRMMEGFGVHTFRFVNEEGKAHFVKFHWKPVLGIHSLVWDEAQKIAGKDPDFHRRDLWESIENGDYPEYELGVQLISEEDEFNFDFDVLDPTKIWPEEEVPVKIIGKMTLNRNVDNVFAETEQVAFHPGHVVPGIDFTNDPLLQGRLFSYTDTQLIRLGGPNFHELPINRPVCPFHNNQRDGYGRQTINKGQVSYHKNSLAANTPQPASEEEGGYAHYQEKVEGRKVRKRSESFKD

SEQ ID NO: 4228 - protein, 385 aa, Thermus thermophilus
MRGLSRRVQAMKPDAPVAVNAKALELRRQGVDLVALTAGEPDFDTPEHVKEAARRALAQGKTKYAPPAGIPELREALAEKFRRENGLSVTPEETIVTVGGSQALFNLFQAILDPGDEVIVLSPYWVSYPEMVRFAGGVVVEVETLPEEGFVPDPERVRRAITPRTKALVVNSPNNPTGAVYPKEVLEALARLAVEHDFYLVSDEIYEHLLYEGEHFSPGRVAPEHTLTVNGAAKAFAMTGWRIGYACGPKEVIKAMASVSRQSTTSPDTIAQWATLEALTNQEASRAFVEMAREAYRRRRDLLLEGLTALGLKAVRPSGAFYVLMDTSPIAPDEVRAAERLLEAGVAVVPGTDFAAFGHVRLSYATSEENLRKALERFARVLGRA

SEQ ID NO: 4229 - protein, 185 aa, Xylella fastidiosa Temecula1
MMSNFTISQILARADLLVDRPSIDVAIAHIADDIARDYQGDVPLFVTIMHGGLPFAGQLALELGQRGQDIELDSLHATRYRGEQTGGALVWRHYPVSAMSGRRVILVDDILDEGHTLSEIRQWCLKRGATDVSLVVLMIKCHDRCIPNMRADYYGVEVPDRYVFGFGMDIAGQLRGIPAIYAMRQ

SEQ ID NO: 4230 - protein, 437 aa, Saccharomyces cerevisiae
MAVSKVYARSVYDSRGNPTVEVELTTEKGVFRSIVPSGASTGVHEALEMRDGDKSKWMGKGVLHAVKNVNDVIAPAFVKANIDVKDQKAVDDFLISLDGTANKSKLGANAILGVSLAASRAAAAEKNVPLYKHLADLSKSKTSPYVLPVPFLNVLNGGSHAGGALALQEFMIAPTGAKTFAEALRIGSEVYHNLKSLTKKRYGASAGNVGDEGGVAPNIQTAEEALDLIVDAIKAAGHDGKVKIGLDCASSEFFKDGKYDLDFKNPNSDKSKWLTGPQLADLYHSLMKRYPIVSIEDPFAEDDWEAWSHFFKTAGIQIVADDLTVTNPKRIATAIEKKAADALLLKVNQIGTLSESIKAAQDSFAAGWGVMVSHRSGETEDTFIADLVVGLRTGQIKTGAPARSERLAKLNQLLRIEEELGDNAVFAGENFHHGDKL

SEQ ID NO: 4231 - protein, 497 aa, Mesorhizobium loti
MKGDDGLTVTQSLTRRLKNPELFDDLAGVPGRKAEQSTRRFSVFNPSTGELLAELPDMDVRDVSKAIDKAEAAQEHWAALTARERSDILWEWHQLILDHSEDLAAILTAEMGKPLAEAKSEIAHAAAYLQWYAEEANRIYGETISPPSNDRRMLVIKQPIGVVGAITPWNFPASMVARKISPALAAGCAIVLKPAEQTPLVAGAMFTLARMAGFPDGVLNLIYASEGDAVGRELCSNPKVRKISFTGSTEVGRLLMRECSDQIKRTSFELGGNAPFIVFDDADVDAAVDGALQAKFRNAGQTCVSANRLYVQSSVYNEFCDKFTKRVSALRVGDGFEPEVAIGPLIDKCALAKIEDHIRDAVRQGGKIRCGGNRIGESGTFFEPTVITDVERTMRVAQEETFGPLAPIIRFNDPDQVVREANDTIYGLAAYFYASNLKRVWRVAETLEYGMVGINTGRMSSEAAPFGGMKQSGIGREGSRHGLEDYLEMKYLCMGGL

SEQ ID NO: 4232 - protein, 454 aa, Zea mays
MCSSSASAPRRAAALSSEELMRMEQDCSAHNYHPIPMVFSKGEGSHIVDPEGNKYIDFLSAYSAVNQGHCHPKVLRALIEQAERLTLSSRAFYNDKFPIFAEYLTSMFGYDMMLPMNTGAEGVETAIKLARKWGYEKKHIPKNEALLVSCCGCFHGRTLGVISMSCDNDATRGFGPLVPGHLKVDFGDIDGLKKIFEELGDRICGFLFEPIQGEAGVVIPPDGYLKGVRDLCSKHNVLMIADEIQTGIARTGKMLACDWENIRPDMVILGKALGAGVVPVSAVLADRDVMLCIRPGEHGSTFGGNPLASAVAVASLKVVRDEGLVERAAKLGQEFRDQLQKVQQKFPQILREVRGRGLLNAVDLNNDALSPASAYDICIKLKERGILAKPTHDTIIRLAPPLTISPEELAEASKALSDVLEHDLPQLQLQKQIKKPESEAEKPVCDRCGRDLYG

SEQ ID NO: 4233 - protein, 255 aa, Rubrobacter xylanophilus DSM 9941
MPGRLEGKVAVITGAASGIGRESARRFAEEGAGVCVVDLDPSGGKEVAASVDGLYVRADVTDPKDVQRMYREAADYFGRLDVLFNNAGISPPEDGSILETSIDAWQRVQDANLKSVYLCCKYGIPYLLENGGGSVINTASFVAVMGAATSQISYTASKGGVLAMSRELGVQFARQGVRVNALCPGPVDTPLLQELFAKDPEKAKRRLVHLPMGRFAKAAEIANAALFLASDESSYVTASTFLVDGGLSGAYVTPE

SEQ ID NO: 4234 - protein, 430 aa, Rubrobacter xylanophilus DSM 9941
MDAAVDRAKRAFPGWRDVPPAERARLLGRLAEALDAEREDLARTESLNVGKPLSAARAEMKMVVDTFAYYAGAPERLLGETIPVAGGVDMTFREPLGVVGLIVPWNFPLQITSWKVAPALAAGNTVVLKPAELTPLTALKLERIAGEAGIPEGVLNVVVGPGEIVGKRLVEHPEVAKIAFTGSTEVGRKIMAGAAGTVKRVTLELGGKSASIVFADADLEKAAAAAPLAVFDNAGQDCCARSRILVERGAFERFMSLLEPAVKELRVGDPQDETTQMGPLISASHREKVASYVTEEAPVAIRGEAPDGKGFWYPPTVLAPVSNKDRVAREEIFGPVAAVIPFEDEEEAVRLANDTIYGLSGSVWTRDVARALRVARRVETGTLSINSNTSVRVSTPFGGFKQSGVGRELGPHALEHYTEVKNVFVATEEG

SEQ ID NO: 4235 - protein, 241 aa, Rubrobacter xylanophilus DSM 9941
MRPRVGITAAVERISYGAWKEVEAALSPIGYVRAVSEAGGRALLLPPDPEDAERPEDVLGLIDALVLTGGAGDVDPARYGQRPHPRTGPVQPGRDAYEILLARAAVERDLPVLGICRGMQILNVAFGGSLEQHLPEVVGHEDHRRVPGKFSEHEVSLKPGSLAARACGGERIGAKSHHHQGIRDVGEGFVPTGWAADGTVEAIEMPGKRFVLGVLWHPEEDRESRLIRALVEEVHLVDRGS

SEQ ID NO: 4236 - protein, 284 aa, Physcomitrella patens
MGRGKIEIKKIENTTSRQVTFSKRRGGLLKKAHELAVLCDAEVALVIFSSTGKLFEYASSGSIRDIIDRYKKGSDGMQNGARNDFMGCEVVKLREQLEQLKASHRHMLGEDLSLLKVPDLLQLEQQLDLGASRVRARKNQLILEEVESLRRKEHELLIANEDLRQKLADAQGIADAVTARANVSESPRPLTSALTRDIVMSSQQQEVTVHPHPNLRDAQRSQTSLQLGMFSSESYLPSSSRGPSEHPIPVGPEGCAGESAMRWEHPHFHSQNRLHANISPSVRI

SEQ ID NO: 4237 - protein, 113 aa, Zea mays
MFEFIWSLVGPPSRRAPNQILPPSPQQPAHISLWRIEGRKEEMGGGMEVHKNRWIEEWNAGRENLEFNFRWTRRSLAVVGLFGLAVPILVYKGIVREFHMQDEDAGRPYRKFL

SEQ ID NO: 4238 - protein, 827 aa, Actinobacillus pleuropneumoniae serovar 1 str. 4074
MSSSLSTSRRQFLKNMSLMAASMAMPNFLVPRANAEASQAVENGWKITGAQWGAVRAKIENGRIAEIKPFELDKHPTEMINGIKDLVYGEARIRYPMVRLDWLKNRHNSNRTQCGDNRFVRVSWDEALDLFYEELERIQQNYGPWALHTANVGWRSSGQFHSCGNHMIRAIAMHGSSVGTVGDYSTGAGQTILPYVLGSTEVYSQGTSWEVILKETENLIFWASDPVKNLQVGWNCETHESYGYLEQLKQKVAEQKINVISIDPVKSKTQNFLGCKQLYINPQADVPFMLAIAHTLYRENLYDKAFIDMYTLGFEQFVPYLLGETEDKIEKTAEWAAPICGIEAEEIRKFARMLAGKRTQLIFGWAIQRQQHGEQPYWMGAVLAAMLGQIGLAGGGISYAHHYSSIGVSSSGAAMPGAFPSTLDKDQVAKYTNKDYQGYSEVIPVARTTDSLLHSGETIDYNGRKITYAPYKMAIFSGCNQWSRQSDLNKMKRAFQKLETVVSINYSWTATCRFSDIVLPACTPFERNDIDAYGSYSNRGVLAMQKLIEPLYESRPDFEIFKDLCRRFGKEKEYCRGIDEMAWLERLYKDCRNENRGKFEMPPFAEFWQKGYVLFPEGKPWVRHADFREDPELHALGTPSGFIEIFSRKIASFGYADCKGHPMWFEKAERSHGGPKSDKYPFWLQSVHPDKRLHSQLCEAKSLRETYSVQGREPFYMNPQDAAKLGIKDGDLVRVYNERGQVLVGAVLSDNFPSGVVRLQEGAWFSPLDESVGAIDTYGCPNTLTLDIGASSLSQATCVSTCLVNVEKWQGDAPAANGFSGPTEVAR

SEQ ID NO: 4239 - protein, 205 aa, Nitrosomonas europaea ATCC 19718
MALVFWEQAVNDLSARDPVMHRIIQCYSDSMPEERGNAFATLARAIVGQQISVKAAASVWQKVTTLIPEITPEALIATEIDLLRTCGLSARKVDYLRDLSRHFLEGTLVTVNWHDLDDETLIRKLVEVKGIGRWTAEMFLIFHLHRPDVLPLDDIGLQRAVSLHYNASQPVAKQAIRTIAESWQPWRSVATWYLWRSLDPIPVIY

SEQ ID NO: 4240 - protein, 63 aa, Edwardsiella ictaluri
VANAIANSDAFSIAGGGDTLAAIDLFGIADKISYISTGGGAFLEFVEGKKLPAVVMLEERAKQ

SEQ ID NO: 4241 - protein, 189 aa, Glycine max
MISGHWNVTDVCNALLGGFAAITAGCSVVEPWTAIVCGFVASVVLIACNKLAEKVKFDDPLEAAQLHGGCGAWGVIFTALFAKKEYVSQVYGEGRAHGLFMRGGGKLLAAHVIQILVIVGWVSATMGPLFWGLNKLKLLRISSEDELAGMDLTRHGGFAYAYEDDESHKHGIQLRKVGPNASSTPTTDE

SEQ ID NO: 4242 - protein, 194 aa, Triticum aestivum
GRVGSVTRASIKPTRIASRAFVSTWNSVPQGPPDAILGVTEAYKRDTSPNKMNLGVGAYRDDGGKPYVLTSVKKAEKVMMEKNLDKEYAGITGVPAFTKAAGELAYGEDSSVIKDNRLVISQSISGTGALRIGAEFLKAWYPHAKNIIVPNPTWGNHIPIMKNAGLSLEKYTYFDKNTNGLNIDGMLEDLHKAP

SEQ ID NO: 4243 - protein, 385 aa, Thermus aquaticus
MRGLSRRVQAMKPDAVVAVNAKALELRRQGVDLVALTAGEPDFDTPEHVKEAARRALAQGKTKYAPPAGIPELREALAEKFRRENGLSVTPEETIVTVGGSQALFNLFQAILDPGDEVIVLSPYWVSYPEMVRFAGGVVVEVETLPEEGFVPDPERVRRAITPRTKALVVNSPNNPTGAVYPKEVLEALARLAVEHDFYLVSDEIYEHLLYEGEHFSPGRVAPEHTLTVNGAAKAFAMTGWRIGYACGPKEVIKAMASVSRQSTTSPDTIAQWATLEALTNQEASRAFVEMAREAYRRRRDLLLEGLTALGLKAVRPSGAFYVLMDTSPIAPDEVRAAERLLEAGVAVVPGTDFAAFGHVRLSYATSEENLRKALERFARVLGRA

SEQ ID NO: 4244 - protein, 253 aa, Xylella fastidiosa Temecula1
MSESSEKTSTTHFGFRQVAAKDKKTLVAEVFTSVSRRYDLMNDLMSLGIHRAWKRYFVATAQVKSGDRVLDLAGGTGDIAMLLKNRVGAEGSIVLGDINASMLSVGRDRLIDRGVVARLDYVQCNAEALPFQDKCFDLVTMSFGLRNVTDKDAALREMFRVLKVGGQARVLEFSAVTAEWFKPIYDFHSFQVLPRLGRLFARDAASYRYLAESIRKHPPQEELQAMMGSAGFERCGYRNLTGGIVAIHSGYKY

SEQ ID NO: 4245 - protein, 386 aa, Leuconostoc mesenteroides subsp. mesenteroides ATCC 8293
METEERKMKFDTQLIHGGISVDQSTGAVSVPIHMASTFKQTKIGEAKYEYSRSGNPTREAVESLIADLENGTAGFAFASGSAAISTIFSLFSSGDHIIVGNDVYGGTFRLIDNVLKRTGQTFTIVDTRDLSAIQEAIQDNTVAIYLETPTNPLLRISDIKAISELAHRHNLLSIVDNTFASPYVQKPIDLGVDIVVHSASKYLGGHSDLIAGLVVTKGEKLSEKIKFLQNAIGAILAPQESWLLQRGMKTLGLRMRAHQSNAQTIFDYLKTQDKVGKIYFPGDPDNPDHALAKQQMNGFGAMISFELKAGLDPEQFISNLKIVTLAESLGALESLIEIPAKMTHGAIPRNIRLSHGIQDELIRLSVGVEDIEDLIEDLEQGFNQLK

SEQ ID NO: 4246 - protein, 375 aa, Arabidopsis thaliana
MPLSLQSPPCATLSASIQKGRWKTLAAGFSVTPLPAVNFSLRRSIPRILASASSSSSPSSSSLEAGENNELNAVSAFSEIVPDTVVFDDFERFPPTAATVSSALLLGICGLPDTIFRNAVDMALADSSCAGLETTESRLSCFFNKAIVNVGGDLVKLVPGRVSTEVDARLAYDTNGIIRKVHDLLRLYNEIDVPHERLLFKIPATWQGIEAARLLESEGIQTHITFVYSFAQAAAAAQAGASVIQIFVGRLRDWARNHSGDNEIESAIKSGEDPGLALVKRSYNYIHKYGYKSKLMAAAVRNKQDLFSLLGVDYVIAPLKVLQSLKDSPAIPEDEKYSFVRKLTPETATHYHFTNKELVKWDQLSLASSMGPASV

SEQ ID NO: 4247 - protein, 375 aa, Arabidopsis thaliana
MPLSLQSPPCATLSASIQKGRWKTLAAGFSVTPLPAVNFSLRRSIPRILASASSSSSPASSSLEAGENNELNAVSAFSEIVPDTVVFDDFERFPPTAATVSSALLLGICGLPDTIFRNAVDMALADSSCAGLETTESRLSCFFNKAIVNVGGDLVKLVPGRVSTEVDARLAYDTNGIIRKVHDLLRLYNEIDVPHDRLLFKIPATWQGIEAARLLESEGIQTHMTFVYSFAQAAAASQAGASVIQIFVGRLRDWARNHSGDTEIESAIKSGEDPGLALVKRSYNYIHKYGYKSKLMAAAVRNKQDLFSLLGVDYVIAPLKVLQSLKDSPAIPDDEKYSFVRKLTPETATHYHFTNKELVKWDQLSLASSMGPASV

SEQ ID NO: 4248 - protein, 120 aa, Triticum aestivum
MGGAEEELTAQETALYDRQIRVWGVDAQKRLSKAHVLVCGVNGTTIEFCKNIVLAGVGSLSLMDDHMVTEDDLNSNFLIPHDESVYGGKSRAEVCCESLKDFNPMVRVAVAKGNPSLIDG

SEQ ID NO: 4249 - protein, 201 aa, Zea mays
TSPSSFLLSSLSPHAQWRGLARTAPPPNNNSNTTNAGNAAVDLAARVKPKRTRKSVPRESPSQRSSVYRGVTRHRWTGRFEAHLWDKNSWNESQNKKGKQVYLGAYDDEDAAARAYDLAALKYWGPDTILNFPASAYEAELKEMEGQSREEYIGSLRRKSSGFSRGVSKYRGVARHHHNGRWEARIGRVFGNKYLYLGTYG

SEQ ID NO: 4250 - protein, 298 aa, Oryza sativa (japonica cultivar-group)
MMAQAPMSTGGGAMELGGGGHESVERRRRHQHHFVLVHGLCHGAWCWYKAAAALRRAGHRATALDMAASGAHPARVDEVRTFEDYSRPLLDALAALPPAGGDGDDEERVVLVGHSQGGFSVALAAERFPERVAAVVFLTAAMPPVGRPMSATTVEHVNYVGVEFFLDSMELEQQNADIPGNPVIFGPNFMAQILYHLSPQEDLTLGLSLIRPTNKFTGDALMRDPGLLTKERYGSTRRVFVVVEDDRGIPVEFQRRMIAENPGVEVVDFAGADHMAMISSPAKLAELLVRIADKAHEP

SEQ ID NO: 4251 - protein, 196 aa, Nostoc sp. PCC 7120
MTKILIVATSNAGKLREMQAYLANTDWELTLKPTELEVEETGDTFASNACLKASEVAKATGNWAIADDSGLQVDALNGLPGVYSARYGKTDGERISRLLKELGSEVNRQAQFVCVVAIASPDGAIALQAEGICRGEILHAPLGSGGFGYDPIFYVPEKQLTFAEMTPELKKSVSHRGKAFAALLPKMAAMLSSSAE

SEQ ID NO: 4252 - protein, 237 aa, Hordeum vulgare subsp. vulgare
MPSRPAPFIHRLRLLRSAVVSPSSAPLPCSRPRLAVPFAQPPIRAPAFAAAGSPLLRPVGARFSLSSNMAAAASSASSVHDFTVEDASGKDVDLSTYKGKVLLIVNVASQCGLTNSNYTELAQLYEKYKDQGFEILAFPCNQFGGQEPGTNEEIVQFACTRFKAEYPIFDKVDVNGDNVAPVYKFLKSSKGSLFGDNIKWNFSKFLVDKDGNVVDRYAPTTSPLSIEKDIKKLLASS

SEQ ID NO: 4253 - protein, 361 aa, Arabis stelleri
CKAAVAWEAGKPLVMEEVEVAPPQKHEVRIKILFTSLCHTDVYFWEAKGQTPLFPRIFGHEAGGIVESVGEGVTDLAPGDHVLPIFTGECGDCPHCHSEESNMCDLLRINTERGGMIHDGESRFSIDGKPIYHFAGTSTFSEYTVIHSGQVAKINPDAPLDKVCIVSCGLSTGLGATLNVAKPKKGQSVAIFGLGAVGLAAAEGARIAGASRIIGVDLNSKRFDEAKKFGVTEFVNPKDHDKPVQQVIAEMTDGGVDRSVECTGSVQAMIQAFECVHDGWGVAVLVGVPSKDDAFKTHPMNFLNERTLKGTFFGNYKPKTDIPGVVEQYMNKELEIEKFITHAVPFSEINKAFDYMLKGEG

SEQ ID NO: 4254 - protein, 388 aa, Buchnera aphidicola str. Sg (Schizaphis graminum)
MNLRKMTELNITGKKILIRTDLNVPIKNGVIQSDARILAALPTIEIAIEKKAKIIILSHLGRPKEGCYTKKYSLFPIFEYLKKKLKKTKIYFSDNHLKKVEINSGEILILENVRFNVGELKNDENLSKEYANLCDIFVMDAFGSAHRMQSSTYGIGKFVKIACAGPLLISEINNLKKALKNPKRPMVAIVGGAKVSTKFNVLNKLAAISDTIIVGGGIANTFLAIDNKIGKSLHEPKFILKAKKLRDKYNNIVIPIDSRVGKNFSHKEKCTIKLSSNIEKNEEIMDLGDKTIKKIIKILKKSKTILWNGPVGVFEFPNFRKGTEMIAKAIAENNGFSIAGGGDTLSVIDMFQIKDKISYISTGGGAFLEFIEGKKLPAMKMLEENFHK

SEQ ID NO: 4255 - protein, 171 aa, Hordeum vulgare subsp. vulgare
MGAAESSSKLGGSVHDFVVKDVRGNDVELSRYKGKVLLIVNVASRCGLANSNYTEMGQLYEKYREKGLEILAFPCNQFAGQEPDSDEKIVEFACDRFQAQFPIFRKVDVNGNNAAPLYKFLKSERGGLFGERIKWNFTKFLVDKEGHVMNRYAPTWSPLGIENDIKKLLEV

SEQ ID NO: 4256 - protein, 165 aa, Hordeum vulgare subsp. vulgare
MAAASSATSVHDFTVKDASGKDVDLSVYKGKVLLIVNVASQCGLTNSNYTELSQLYPKYKDQGFEILAFPCNQFGGQEPGTNDEIVQFACTRFKAEYPIFDKVDVNGNNVSPLYKFLKSSKGGFFGDSIKWNFSKFLVDKEGHVVDRYAPTTSPMSIEKDIKKLL

SEQ ID NO: 4257 - protein, 361 aa, Arabis flagellosa
CKAAVAWEAGKPLVMEEVEVAPPQKHEVRIKILFTSLCHTDVYFWEAKGQTPWFPRIFGHEAGGIVESIGEGVTDLAPGDHVLPIFTGECGDCPHCHSEESNMCDLLRINTERGGMIHDGESRFSINGKPIHHFVGTSTFSEYTVVHSGQVAKINPDAPLDKVCIVSCGLSTGLGATLNVAKPKKGQSVAIFGLGAVGLAAAEGARIAGASRIIGVDLNSKRFDEAKKFGVTEFVNPKDHDKPVQQVIAEMTDGGVDRSVECTGSVQAMIQAFECVHDGWGVAVLVGVPSKDDAFKTHPMNFLNERTLKGTFFGNYKPKTDIPGVVEKYMNKELELEKFITHTVPFSEINKAFDYMLKGES

SEQ ID NO: 4258 - protein, 361 aa, Arabidopsis lyrata subsp. kawasakiana
CKAAVAWEAGKPLVMEEVEVAPPQKHEVRIKILFTSLCHTDVYFWEAKGQTPLFPRIFGHEAGGIVESVGEGVTDLQPGDHVLPIFTGECGDCPHCHSEESNMCDLLRINTERGGMIHDGESRFSINGKPIHHFLGTSTFSEYTVVHSGQVAKINPDAPLDKVWIVSCGLSSGLGATLNVAKPKKGQSVAIFGLGAVGLAAAEGARIAGASRIIGVDLNPQRFDQAKEFGVTEFVNPRDHDKPVQQVIAEMTNGGVDRSVECTGSVQPMIQAFECVHDGWGVAVLVGVPSKDDAFKTHPMNFLNERTLKGTFFGNYKPKTDIPGVVEKYMNKELELEKFITHTLPFSEINKAFDYMLKGES

SEQ ID NO: 4259 - protein, 359 aa, Arabis hirsuta
  unsure (1)..(359): unsure at all Xaa locations
IRCKAAVAWEAGKPLVMEEVEVAPPQKHEVRIKILFTSLCHTDVYFWEAKEQTPLFPRIFGHEAGGIVESVGEGVTDLAPGDHVLPIFTGECGDCPHCHSEESNMCDLLRINTERGGMIHDGESRFSIDGEPIXHFVGTSTFSEYTVIHSGQVAKINPDAPLDKVCIVSCGLSTGLGATLNVAKPKKGQSVAIFGLGAVGLAAAEGARIAGASRIIGVDLNSKRFDEAKKFGVTEFVNPKDHDKPVQQVIAEMTXGGVDRSVECTGSVQAMIQAFECVHDGWGVAVLVGVPSKDDAFKTHPMNSLNERTLKGTXFGNYNPKTDIPGVVEQYMNKELEIEKFITHAVPFSEINKAFDYML

SEQ ID NO: 4260 - protein, 357 aa, Helicobacter pylori 26695
MKASIYDFTLKELSQLLKPSFRAKQLYLWLYAKYKTSFKDMQNNFSKDFIAYLEREFALRTIEITHVRESVDGSKKYLFKSLRDNHTFEAVLLKMKDKKIDAETNAILEREKYTVCVSCQIGCQVGCSFCFTQKGGFVRNLKASEIIQQALLIKEDNNLPLEKALNIVFMGMGEPLNNLDEVCKAIEIFNTGMQISPKRITISTSGVADKIPILAGKNLGVQLAISLHAVDDKTRSSLMPLNKKYNIECVLNEVRKWPLEQRKRVMFEYLLIKDLNDSLDCAKKLLKLLNGIKSKVNLILFNPHEGSKFERPSLENARMFADFLNSKGLLCTIRESKALDIEAACGQLREKKLSQQI

SEQ ID NO: 4261 - protein, 296 aa, Streptomyces roseochromogenes subsp. oscitans
MRGILLAGGTGSRLWPVTRAVSKQLIPVFDKPMIYYPLTTLMMAGIREILVITRPEDQRQFRHLLGDGSQLGLRLEYAVQEQPEGIAQAFVLGAEFIGDQSVALVLGDNIFHGGGLGTRLREYSDPVGGRIFAYVVADPTAYAVVEFDEAGMAVSIEEKPADPKSRYAVPGLYFYDNRVVEVARGLVPSERGELEITAVNETYLRWGQLRVTALDRGTAWLDTGTFTSLVQASEYVRVVEERQGLKIGCVEEVAWRCGLIENDQLRELSRPLLKSGYGQYLLDLLAERELKELKVS

SEQ ID NO: 4262 - protein, 216 aa, Glycine max
MAHRVDHEYDYLFKIVLIGDSGVGKSNILSRFTRNEFCLESKSTIGVEFATRTLQVEGKTVKAQIWDTAGQERYRAITSAYYRGAVGALLVYDITKRQTFDNVQRWLRELRDHADSNIVIMMAGNKSDLSHLRAVSEDDGQALAEREGLSFLETSALESTNIEKAFQTILTEIYHIVSKKALAAQEAAVGTTLPGQGTTINVGDASGNTKRGCCSP

SEQ ID NO: 4263 - protein, 586 aa, Xylella fastidiosa Temecula1
MSPQTSLSILLHPGSPAPMSSSSIEDIKGKSHRLRGSLLESLANPTTGALGESDQTLIKYHGSYQQDDRDLREERRRQKLEPAYQFMIRTRTPGGVITPQQWLQLDAIATRYANHSLRVTTRQAFQFHGVIKRELKTTMQAINAALIDTLAACGDVNRNVQVAANPLLSRAHADLYTDAAHLSEHLLPNTRAYYEIWLDEKKVAGAGEEEEPIYGPHYLPRKFKIGFAAPPINDVDVFANDLGFIAVIVDNTLLGYNVTIGGGMGTTHGDPDTWPRVGNIIGFITRADLITISTAIVTTQRDFGNRTLRKRARFKYTIDDRGLDCIVGEIQQRAGITLQPARPFVFEHNGDRYGWIEGEDGHWHLTLSLPAGRIADTEGSTLLSGFREIAQLGIGEFRMTPNQNVVIAGISPGQRAAIDALVTQYGLDTGNRAPTALGRHAMACVALPTCGLAMAEAERYLPDFNAKLQPILEKYGLAEAPILLRISGCPNGCSRPYLAEIALVGKAPGRYNLMLGGDQRGQRLNTLYRENITETEILAALEPLLGRYQQKRLPSEGFGDFLHRTGIIALPPYPTHRHVISSTLQA

SEQ ID NO: 4264 - protein, 375 aa, Arabidopsis thaliana
MPLSLQSPPCATLSASIQKGRWKTLAAGFSVTPLPAVNFSLRRSIPRILASASSSSSPSSSSLEAGENNELNAVSAFSEIVPDTVVFDDFERFPPTAATVSSALLLGICGLPDTIFRNAVDMALADSSCAGLETTESRLSCFFNKAIVNVGGDLVKLVPGRVSTEVDARLAYDTNGIIRKVHDLLRLYNEIDVPHERLLFKIPATWQGIEAARLLESEGIQTHITFVYSFAQAAAAAQAGASVIQIFVGRLRDWARNHSGDNEIESAIKSGEDPGLALVKRSYNYIHKYGYKSKLMAAAVRNKQDLFSLLGVDYVIAPLKVLQSLKDSPAIPEDEKYSFVRKLTPETATHYHFTNKELVKWNQLSLASSMGPASV

SEQ ID NO: 4265 - protein, 348 aa, Agrobacterium tumefaciens str. C58
MAIARGYAATDASKPLTPFTFERREPNDDDVVIDIKYAGICHSDIHTVRNEWHNAVYPIVPGHEIAGVVRAVGSKVTRFKVGDHVGVGCFVDSCVGCATRDVDNEQYMPGLVQTYNSVERDGKSATQGGYSDHIVVREDYVLSIPDNLPLDASAPLLCAGITLYSPLQHWNAGPGKKVAIVGMGGLGHMGVKIGSAMGADITVLSQTLSKKEDGLKLGAKEYYATSDASTFEKLAGTFDLILCTVSAEIDWNAYLNLLKVNGTMVLLGVPEHAIPVHAFSVIPARRSLAGSMIGSIKETQEMLDFCGKHDIVSEIETIGIKDVNEAYERVLKSDVRYRFVIDMASLDA

SEQ ID NO: 4266 - protein, 544 aa, Nitrosomonas europaea ATCC 19718
MSTLTRSPAWLALSAHQTEIANRPLRTLFDEDPQRFDKFSLQFKDLLLDYSKQPVDATTIRLLLALAEQQKLVDWLGRMANGEKINFTESRAALHIALRANSPVFMDGVDVTQEVRRVLRQIEQFVQKIHNQSHRGYSGLPITDVVNIGIGGSDLGPVMVTEALKPYHLPQLRTHFVSNLDGAHLSDTLQHINPATTLFVIASKTFTTQETLANAHSARKWFLAGGGSKQDIAAHFVAVSTNREAVSQFGIDPDNMFEFWDWVGGRYSLWSAIGLPIALAVGMEHFHSLLAGAQAMDDHFLTAPFEQNLPVILGLIGIWQINFFHITSQAILPYDQSMHRFPAYLQQLEMESNGKRVTRNGEAVDYSTGIIIWGEPGTNGQHAFYQLLHQGTQKFTADFLAPCRCHHPLSEHHPMLLANFFAQTEALMRGKTEQEVRSELANQNLSADLVEHLLPHRVFPGNHATTSILFKKLDPATLGMLIALYEHKVFVQSVIWEINPFDQWGVELGKQLAGKILAELALDKPVTGHDASTNGLINFYRAQQ

SEQ ID NO: 4267 - protein, 321 aa, Glycine max
MDGDGEELTAQETALYDRQIRVWGADAQRRLSKSHVLVYGMKGTVAEFCKNIVLAGVGSLTLVDDRAATEEMLSSNFLIPPDENAYSGKTLGELCCNSLKDFNPMVRVSIEKGDLSSFDVEFFSKFDVVVVSCCSLSAKKLANDKCRKLSKRVAFYAVDCRDSCGEIFVDLQDYKYSKKKQDETVKCDLKYPSFEDALSVPWRALHRRMSKLYYAMRVIEKFEEAEGRSAGEVSIADFSGVLKLKKEICTAQSLNESQVPDSLLKRLVTNAIEFPPVCAIIGGILGQEVIKAISGKGDPLKNFFFFDAFDGKGIIEDISPK

SEQ ID NO: 4268 - protein, 363 aa, Crucihimalaya himalaica
  unsure (1)..(363): unsure at all Xaa locations
IRCKAAVAWEAGKPLVXEEVEVAPPQKHEVRIKILFTSLCHTDVYFWEAKGQTPLFPRIFGHEAGGIVESVGEGVTDLQPGDHVLPIFTGECGDCRHCHSEESNMCDLLRINTERGGMIHDGESRFSIKGKPIHHFLGTSTFSEYTVVHSGQVAKINPDAPLDKVCIVSCGLSTGLGAVLNVAKPKKGQSVAVFGLGAVGLAAAEGARIAGASRIIGVDLNSKRFDEAKKFGVTEFVNPRDHDKPVQQVIAEXTDGGVDRSVECTGSVQAMIQAFECVHDGWGVAVLVGVPSKDDAFKSHPMNFLNERTLKGTFFGNYKPKTDIPGVVEKYMNKELELEKFITHTVPFSXINKAFDYMLKGES

SEQ ID NO: 4269 - protein, 217 aa, Hordeum vulgare subsp. vulgare
MDVGALSSDYSSGTPSPVGADGGNSEGFSTYMTVSSAPPKRRAGRTKFKETRHPVYKGVRRRNPGRWVCEVREPHSKQRIWLGTFETAEMAARAHDVAALALRGRAACLNFADSPRRLRVPAVGASPDEIRRAAVEAAEAFLPAPDQSNAPAEEVAAAPTMQFAGDPYYGMDDGMDFGMQGYLDMAQGMLIAPPPLVGPSATAGDGDDDGEVSLWSY

SEQ ID NO: 4270 - protein, 363 aa, Olimarabidopsis pumila
IRCKAAVAWEAGKPLVMEEVEVAPPQNHEVRIKILFTSLCHTDVYFWEAKGQTPLFPRIFGHEAGGIVESVGEGVTDLQPGDHVLPIFTGECGDCRHCHSGESNMCDLLRINTERGGMIHDGESRFSINGKPIHHFLGTSTFSEYTVVQSGQVAKINPDAPLDKVCIVSCGLSTGLGATLNVAKPKKGQSIAIFGLGAVGLAAAEGARIAGASRIIGVDLNSKRFDQAKEFGVTEFVNPRDHDKPVQQVIAEMTDGGVDRSVECTGSVQAMIQAFECVHDGWGVAVLVGVPSKDDAFKTHPMNLLNERTLKGTFFGNYKPKTDIPGVVEKYMNKELELEKFITHTVPFSEINKAFDYMLKGES

SEQ ID NO: 4271 - protein, 151 aa, Glycine max
  unsure (1)..(151): unsure at all Xaa locations
LKSMAGFPTTKTNNDITCIVSNRGKLQCMHVWPPLGKKKAETLCYLTDLDDAQLANEVQYLLRKGWIPCWELESEHGCMYREHNMSPGYYYGLYXTMWKLTMLGCTDAYHVLNELQEANTAYPSGYIRIIGFDSVRQLLCISYIIYKRSRF

SEQ ID NO: 4272 - protein, 362 aa, Arabidopsis korshinskyi
RCKAAVAWEAGKPLVMEEVEVAPPQKHEVRIKILFTSLCHTDVYFWEAKGQTPLFPRIFGHEAGGIVESVGEGVTDLQPGDHVLPIFTGECGDCRHCHSEESNMCDLLRINTERGGMIHDGESRFSINGKPIHHFLGTSTFSEYTVVHSGQVAKINPDAPLDKVCIVSCGLSTGLGATLNVAKPKKGQSVAIFGLGAVGLAAAEGARIAGASRIIGVDLNSKRFDQAKEFGVTEFVNPKDHDKPVQQVIAEMTDGGVDRSVECTGSVQAMIQAFECVHDGWGVAVLVGVPSKDDAFKTHPMNLLNERTLKGTFFGNYKPKTDIPGVVEKYMNKELELEKFITHTVPFSEINKAFDYMLKGES

SEQ ID NO: 4273 - protein, 363 aa, Crucihimalaya wallichii
IRCKAAVAWEAGKPLVMEEVEVAPPQKHEVRIKILFTSLCHTDVYFWEAKAQTPLFPRIFGHEAGGIVESVGEGVTDLQPGDHVLPIFTGECGDCRHCHSEESNMCDLLRINTERGGMIHDGESRFSIKGKPIHHFLGTSTFSGYTVVHSGQVAKINPDAPLDKVCIVSCGLSTGLGAVLNVAKPKKGQSVAVFGLGAVGLAAAEGARIAGASRIIGVDLNSQRFDEAKEFGVTEFVNPRDHDKPVQQVIAEMTDGGVDRSVECTGSVQAMIQAFECVHDGWGVAVLVGVPSKDDAFKSHPMNFLNERTLKGTFFGNYKPKTDIPGVVEKYMNKELELEKFITHTVPFSEINKAFDYMLKGES

SEQ ID NO: 4274 - protein, 596 aa, Zea mays
MASSASLQRFLPPYPHAAASRCRPPGVRARPVQSSTVSAPSSSTPAADEAVSAERLEPRVEQREGRYWVLKEKYRTGLNPQEKVKLGKEPMSLFMEGGIKELAKMPMEEIEADKLSKEDIDVRLKWLGLFHRRKHQYGRFMMRLKLPNGVTTSEQTRYLASVIEAYGKEGCADVTTRQNWQIRGVTLPDVPAILDGLNAVGLTSLQSGMDNVRNPVGNPLAGIDPDEIVDTRSYTNLLSSYITSNFQGNPTITNLPRKWNVCVIGSHDLYEHPHINDLAYMPAVKGGKFGFNLLVGGFISPKRWEEALPLDAWVPGDDIIPVCKAVLEAYRDLGTRGNRQKTRMMWLIDELGMEAFRSEVEKRMPNGVLERAAPEDLIDKKWQRRDYLGVHPQKQEGMSYVGLHVPVGRVQAADMFELARLADEYGSGELRLTVEQNIVIPNVKNEKVEALLSEPLLQKFSPQPSLLLKGLVACTGNQFCGQAIIETKQRALLVTSQVEKLVSVPRAVRMHWTGCPNSCGQVQVADIGFMGCLTKDSAGKIVEAADIFVGGRVGSDSHLAGAYKKSVPCNELVPIVADLLVERFGAVPREREEDEE

SEQ ID NO: 4275 - protein, 347 aa, Streptomyces coelicolor A3(2)
MSRSLNLAVIPGDGIGQEVVAEGLKVLSAVLPQDVKLETKEFDFGARRYHATGETLTDADLDALKAHDAILLGAIGDPSVPSGVLERGFLLKLRFAFDHHVNLRPSKLLPGVATPLAGQPEIDFVVVREGTEGPYTGNGGTIRKGTEHEVATEVSVNTAYGVERVVRDAFARAQARPRKKLTLVHKNNVLTFAGHLWTNIFNKVAAEYPEVTTDYLHVDAATIFLVTDPARFDVIVTDNLFGDIITDLAAAVSGGIGVAASGNINPSGDFPSMFEPVHGSAPDIAGQGKADPTATVLSVALLLRHLGYEDEAARIEDAVSADLGERGDLPARSTSEIGDTLAARVAG

SEQ ID NO: 4276 - protein, 363 aa, Arabidopsis suecica
IRCKAAVAWEAGKPLVMEEVEVAPPQKHEVRIKILFTSLCHTDVYFWEAKGQTPLFPRIFGHEAGGIVESVGEGVTDLQPGDHVLPIFTGECGDCPHCHSEESNMCDLLRINTERGGMIHDGESRFSINGKPIHHFLGTSTFSGYTVVHSGQVAKINPDAPLDKVCIVSCGLSTGLGATLNVAKPKKGQSVAIFGLGAVGLAAAEGARIAGASRIIGVDLNSQRFDQAKEFGVTEFVNPKDHDKPVQQVIAEMTNGGVDRSVECTGSVQAMIQAFECVHDGWGVAVLVGVPSKDDAFKTHPMNFLNERTLKGTFFGNYKPKTDIPGVVEKYMNKELELEKFITHTVPFSEINKAFDYMLKGES

SEQ ID NO: 4277 - protein, 431 aa, Prochlorococcus marinus str. MIT 9313
MKRVLAIILGGGAGTRLYPLTKMRAKPAVPLAGKYRLIDIPISNCINSSINKMYVLTQFNSASLNRHLGQSYNLSAAFGQGFVEVLAAQQTPESPSWFEGTADAVRKYQWLFQEWDVDEYLILSGDQLYRMDYSLFVEHHRRSGADLTVAALPVDAEQAEGFGLMRTDSDGNIQEFREKPKGESLKAMAVDTSRFGLSAESARNKPYLASMGIYVFSRATLFDLLHKNPSHKDFGKEVIPEALARGDRLQSYVFDEYWEDIGTIGAFYEANLALTQQPNPPFSFYDEKFPIYTRPRYLPPTKLVDAQITESIIGEGSILKSCSIHHCVLGVRSRVESDVVLQDSLVMGSDFYESSEERTLLRQGGGIPLGVGQGTTVKGAILDKNTRIGNNVTIVNKDHVEEADRADEGFYIRNGIVVVVKNATISDGTVI

SEQ ID NO: 4278 - protein, 480 aa, Neisseria meningitidis Z2491
MKQLAMYINGRFENDFNGEWRNVLNPSTEEAIAREPKGGKADVDRAVAAARAAQPAWERLPAVERGAYLRKIAQGIRERADELTDTIVAEGGKTKDLARVEVMFTADYLDYQAEWARRYEGEIIQSDRPRENILLFKRPLGVIAGILPWNFPFFLIARKMGPALVTGNTIVVKPSSVTPINCHIFAEIVDAVGLPAGVFNVVNGPGAEIGNALSAHPQVDMVSLTGSVEAGRQVMEAASANITKVSLELGGKAPAIVLKDADLDLAVKSILASRVGNTGQICNCAERVYVHSSLKDAFIEKMTAAMKGVRYGNPAEAEAGALEMGPLIEERAVKAVAEKVERAVKQGAKLVCGGKRAEGRGYFFEPTLLTDTDNSMDIMKEETFGPVLPVSAFDTLDQVIALANDCEFGLTSSVYTTNLNEAFYVTRRLQFGETYINRENFEAMQGFHAGWKKSGIGGADGKHGLEEYLQTQVVYLETDI

SEQ ID NO: 4279 - protein, 934 aa, Campylobacter jejuni subsp. jejuni NCTC 11168
  unsure (1)..(934): unsure at all Xaa locations
MSSVGENIKLTRRSFLKMAALSSLATPLLARSETLREASADELKEAYEGSKKVKTVCTACSVGCGIIAEVQNGVWVRQEIAQDHPVSSGGHCCKGSDMIDMVRSHVRLKYPMKKENGEWKRISYEQALSEIGEKLAAYRKENPESVMFLGSAKLNNEQAYYIRKFAAFFGTNNVDHQARIXHSATVAGVANTFGYGAMTNHLGDIQRSKCIIIIGANPAVNHPVGFRHFLKAKEKGAKLIVVDPRFTKSAAKADIYARIRPGTDIAFMYGMLKIIFDEGLEDTKYLDERVFGIDKIREEAAKWTVEEVENVTGISKELLVQITHEVAKNKPTTLIWAMGLTQHTVGTSNTRLAPIVQMVLGNIGKFGGGVNILRGHDNVQGASDMACLSENLPGYYPLNEATWRYYAKIWGVDYEWLLGNFVSKDWMHKTGLSLARWWAAALNGKDGNDAIDNAGTPLKALVVMGNGITSTAQQVKVKEGLEALELLVLADPFVNEAGIIAERKDGIYLLPAATQFETSGSVTATNRSGQWRFKVVDPLYESMEDQEILFELAKKLGFYEDFTKTLRDEKGEIVWPENATREIAKAVRSIGLNGWSPERLKKHTLYWDKFDEVTLEGKDEVAGEYYGLPWPCWSDKHPGSPVLYNTDIEVAKGGMGFRNNFGLEYEGESLLAKNAPLNSPIDTGYPQITKDNIEKVLGITLSAQEKEKMGSTWSYDDSNIIATKCIEKGIVPYGNAKARAVVWTFKDKIPLHREPLHSPRNDLVQKYPSFEDQKALYRVDTKFVSVQQAKDYSKEFPLNLVTARLVNLNGAGMENRASMYLTRLTPEMFCEINPELAKEQDIKAGDMIWVHSPEGTKIHVRVKVNPGVAKDMIFLPFHFTGVMQGVDLTHNFPEGTKPYASGESANTVTNYGYDIMCQIPETKGGLCRISKDGK

SEQ ID NO: 4280 - protein, 108 aa, Streptococcus gordonii
DPGFLGLDIGPKSIAKFDEALTGAKTVVWNGPMGVFENPDFQAGTIGVMDAIVKQPGVKSIIGGGDSAAAAINLGRRDKFSWISTGGGASMELLEGKVLPGLAALTEK

SEQ ID NO: 4281 - protein, 358 aa, Haemophilus influenzae R2846
MQSYNIAVLAGDGIGPEVMAEAIKVLNKVQEKFGFKLNFNEFFVGGAAIDHCGYPLPAETLKGCDEADAILFGSVGGPKWTNLPPDQQPERGALLPLRKHFKLFCNLRLATLYKGLEKFCPLRADIAAKGFDMVVVRELTGGIYFGQPKGREGESSQTKAFDTEVYYKYEIERIARAAFEAAMKRNKKVTSVDKANVLQSSILWRETVTEIAKDYPEVTLEHIYIDNATMQLIKAPESFDVLLCSNIFGDIISDEAAMITGSMGMLPSASLNEEGFGLYEPAGGSAPDIAGKGIANPIAQILSAAMMLRYSFNLNEAADAIESAVQKVLANGHRTADLADDSTPVSTSEMGTLIAQAI

SEQ ID NO: 4282 - protein, 1171 aa, Oryza sativa
MASGSRATPTRSPSSARPAAPRHQHHHSQSSGGSTSRAGGGGGGGGGGGGGAAAAESVSKAVAQYTLDARLHAVFEQSGASGRSFDYTQSLRASPTPSSEQQIAAYLSRIQRGGHIQPFGCTLAVADDSSFRLLAYSENTADLLDLSPHHSVPSLDSSAVPPPVSLGADARLLFAPSSAVLLERAFAAREISLLNPLWIHSRVSSNPFYAILHRIDVGVVIDLEPARTEDPALSIAGAVQSQKLVVRAISRLQALPGGDVKLLCDTVVEHVRELTGYDRVMVYRFHEDEHGEVVAESRRSNLEPYIGLHYPATDIPQASRFLFRQNRVRMIADCHAAPVRVIQDPALTQPLCLVGSTLRSPHGCHGQYMANMGSIASLVMAVIISSGGDDDHNIARGSIPSAMKLWGLVVCHHTSPRCIPFPLRYACEFLMQAFGLQLNMELQLAHQLSEKHILRTGTLLCDMLLRDSPTGIVTQSPSIMDLVKCDGAALYYHGKYYPLGVTPTEVQIKDIIEWLTMCHGDSTGLSTDSLADAGYSGAADLGDAVSGMAVAYITPSDYLFWFRSHTAKEIKWGGAKHHPEDKDDGQRMHPRSSFKAFLEVVKSRSLPWENAEMDAIHSLQLILRDSFRDSAEGTSNSKAIVNGQVQLGELELRGIDELSSVAREMVRLIETATVPIFAVDTDGCINGWNAKVAELTGLSVEEAMGKSLVNDLIFKESEETVNKLLSRALRGDEDKNVEIKLKTFGPEQSKGPIFVIVNACSTRDYTKNIVGVCFVGQDVTGQKVVMDKFINIQGDYKAIVHNPNPLIPPIFASDENTCCSEWNTAMEKLTGWSRGEVVGKLLVGEVFGNCCRLKGPDALTKFMIVLHNAIGGQDCEKFPFSFFDKNGKYVQALLTANTRSRMDGEAIGAFCFLQIASPELQQAFEIQRHHEKKCYARMKELAYIYQEIKNPLNGIRFTNSLLEMTDLKDDQRQFLETSTACEKQMSKIVKDASLQSIEDGSLVLEKGEFSLGSVMNAVVSQVMIQLRERDLQLIRDIPDEIKEASAYGDQYRIQQVLCDFLLSMVRFAPAENGWVEIQVRPNIKQNSDGTDTMLFPFRFACPGEGLPPEIVQDMFSNSRWTTQEGIGLSICRKILKLMGGEVQYIRESERSFFHIVLELPQPQQAASRGTS

SEQ ID NO: 4283 - protein, 300 aa, Streptococcus equi subsp. zooepidemicus
MTKVRKAIIPAAGLGTRFLPATKALAKEMLPIVDKPTIQFIVEEALKAGIEEILVVTGKAKRSIEDHFDSNFELEYNLQAKGKTELLKLVDETTAINLHFIRQSHPRGLGDAVLQAKAFVGNEPFVVMLGDDLMDITNPSAKPLAKQLIEDYDCTHASTIAVMRVPHEEVSNYGVIAPQGKAVKGLYSVETFVEKPSPDEAPSDLAIIGRYLLTPEIFAILENQAPGAGNEVQLADAIDKLNKTQRVFAREFKGERYDVGDKFGFMKTSLDYALKHPQVKDDLTDYIIKLSKQLNKDVKK

SEQ ID NO: 4284 - protein, 453 aa, Ralstonia metallidurans CH34
MPPGLPRLASLIADAPPDAQDNPEIPRFRCRQRPAACPDIANTAVKPIQKSHKLQNVCYDIRGPVLEKAKQMEEEGHKIIKLNIGNLAVFGFDAPEEIQQDMMRNLPNSAGYSDSKGIFAARKAIMHYTQEKKIQGVGLDDIYVGNGASELIVMAMNALLNSGDEMLVPAPDYPLWTAAVSLSGGTPVHYVCDEANEWMPDLDDIRRKITPNTRGIVIINPNNPTGALYSDELLKEIVAIAREHGLIIFADEIYDKVLYDGNTHTSIGSLSTDVLTVTFNGLSKNYRSCGYRAGWMVVSGDKRPALDYIEGLNMLSSMRLCANVPGQWAIQTALGGYQSINDLVTEGGRLRRQRDLAYELITKIPGVTCVKPKAALYLFPKLDLSMYPIQDDQEFIYELLQESKVLLVQGTGFNWGAPDHFRIVFLPHEEDLREAITRVGRFLESYRKRHGTA

SEQ ID NO: 4285 - protein, 129 aa, Triticum aestivum
MDPAATQPPPPPPPPYLPPRLVIDGAGGGSGAAARACRHHAYSRKQKSLGLLCSNFVALYDRDDVETVGLDDAARRLGVERRRIYDIVNVLESVGILVRRAKNRYTWIGFEGVPAALKELKERTLREMS

SEQ ID NO: 4286 - protein, 381 aa, Haemophilus influenzae Rd KW20
MRSIFSLFLEDVMTQQYAIDTLLAQAGNRSDERTGAVSAPIFLSTAYGHCGIGESTGFDYTRTKNPTRTVLEETIAKLENGDRGFAFSSGMAAIQVLMTLFTAPDEWIVSSDVYGGTYRLLDFSYKNNNSVKPVYVNTASASAIEAAINPNTKAIFIETPSNPLMEECDVVEIAKLAKKHNLMLIVDNTFLTPVLSRPLDLGADVVIHSGTKYIAGHNDALVGLIVAKGQELCDRIAYIQNGAGAVLSPFDSWLTIRGMKTLSLRMKRHQENAQAIAEFLKAQPQVESVLYPNKGGMLSFRLQDEAWVNTFLKSIKLITFAESLGGTESFITYPATQTHMDIPESERVARGITNTLLRFSVGIEDVEDIKADLLQAFANLK

SEQ ID NO: 4287 - protein, 349 aa, Xylella fastidiosa Temecula1
MFINAYGAHAGDKPLESMQIARRAPGAHDVQIDIHYCGVCHSDIHQVRAEWAGTLFPCVPGHEIVGRVSAIGTHVQGFKAGDLVAVGCMVDSCKDCQECDAGLENYCDGMIGTYNFPTQDAPGHTLGGYSQKIVVHERFVLRIRHPEAQLAAVAPLLCAGITTYSPLRHWNAGPGKKVGIVGIGGLGHMGIKLAHAMGAYVVAFTTSESKRQDAKALGADEVVVSRDEERMAAHVKSFDLILNTVAASHSLDPFLTLLKRDGTLTLVGAPVTPHPSPEVFNLIFKRRSIAGSLIGGIAETQEMLDFCAEHGIVADIELIRADGINEAYERMMKGDVKYRFVIDNATLAA

SEQ ID NO: 4288 - protein, 425 aa, Xylella fastidiosa Temecula1
MMSNSPQTPLVTRQRLSEVRYEIRGELARRARELEAEGRKLIKLNIGNPGAFGFRAPEHLQRAIADDMGRTDPYTHQQGLPIAREAIAAAYARRHYPDVDADRVFVGNGVSELIDLSLRALLNPGDEVLVPSPDYPLWSAATILNDGRPVYYRCAPENGFQPDAVEIETLVSSRTRAIVLINPNNPSGANYSQELLERIVAISVKHHLLLLVDEIYDQILYDGAVFVPVAPLAGTHPCITFSGLSKVHRACGWRVGWALLSGSSIQVDNLRNAMDLLGALRLCANVPGQYAIDAAVNGPDTITPLCSPGGPLYETRRAVIDACAASEHLSLVVPAGALYAFPSVVGPAARHFDDYAFALELMNEEGVLVVPGSSFNVPYRDHFRVTLLPDAGLIREVFSRIDRALSRRAEVAEKVVPLKSRSAAA

SEQ ID NO: 4289 - protein, 472 aa, Zea mays
MATALARRGAAALARWRGMCSSSASAPRSAAALSSEELMRMEQDCSAHNYHPIPMVFSKGEGSHIVDPEGNKYIDFLSAYSAVNQGHCHPKVLRALIEQAERLTLSSRAFYNDKFPIFAEYLTSMFGYDMMLPMNTGAEGVETAIKLARKWGYEKKHIPKNEALLVSCCGCFHGRTLGVISMSCDNDATRGFGPLVPGHLKVDFGDIDGLKKIFEELGDRICGFLFEPIQGEAGVVIPPDGYLKGARDLCSKHNVLMIADEIQTGIARTGKMLACDWENIRPDMVILGKALGAGVVPVSAVLADKDVMLCIRPGEHGSTFGGNPLASAVAVASLKVVRDEGLVERAAKLGQEFRDQLQKVQQKFPQILREVRGRGLLNAVDLNNDALSPASAYDICIKLKERGILAKPTHDTIIRLAPPLTISPEELAEASKALSDVLEHDLPQLQLQKQIKKPESEAEKPVCDRCGRDLYG

SEQ ID NO: 4290 - protein, 350 aa, Brassica oleracea
  unsure (1)..(350): unsure at all Xaa locations
PLVMEEVEVAPPQKHEVRIKILFTSLCHTDVYFWEAKGQTPLFPRIFGHEAGGIVESVGEGVTDLQPGDHVLPIFTGECGDCPHCHSEESNMCDLLRINTERGGMIHDGESRFSINGKPIHHFLGTSTFSEYTVVHSGQVAKINPEAPLDKVCIVSCGLSTGLGATLNVAKPKKGQSVAIFGLGAVGLAAAEGAKIAGAGRIIGVDLNPKRFEEAKEFGVTEFVNPXEHDKPVQQVIAEMTNGGVDRSVECTGSIQAMIQAFECVHDGWGVAVLVGVPSKDDAFKTHPMNLLNERTLKGTFFGNYKPKTDIPGVVEKYMNKELELEKFITHTVPFSEINKAFDYMLKGES

SEQ ID NO: 4291 - protein, 429 aa, Nostoc punctiforme
MSKFLDTAIEAIAAREILDSRGRPTIEAEVHLANGVVGLAQVPSGASTGSFEAHELRDGDKSRYGGKGVLKAVKNVKEALAPKLLGLDALNQELLDRTMIAIDGSPNKSSLGANAILGVSLAAAKAGAESLDIPLYRYLGGPLANLLPVPLMNVINGGAHASNNVDFQEFMIVPIGATSFREALRWGAEVFATLSQVLDEKGLLTGVGDEGGFAPNLESNQVALELLVAAIKKAGYKPGEEVALALDVAASEFYKNGQYVYDGKPHAPAEFIDYLGQLVDQYPIVSIEDGLHEEDWQSWQLLTQKLGSQVQLVGDDLFVTNATRLQRGIEEKAANAILIKLNQIGSLTETLETIDLATRNSIRSVISHRSGETEDTTIADLAVATRAGQIKTGSLCRSERVAKYNRLLRIEDELGDRAVYAGAVGLGPK

SEQ ID NO: 4292 - protein, 218 aa, Triticum aestivum
  unsure (1)..(218): unsure at all Xaa locations
MGGRVDHEYSYLFKMVLIGDSGVGKSNILSRFTRNHFSLDSKSTIGVEFATKSLQMEGKTIKAQIWDTAGQERYRAITSAYYRGAVGALLVYDITKKQSFDNVNRWLRELRDHADSSIVIMMVGNKSDLTHLRAVSEDQGKALAEKEGLFFLETSAMEAVNVVEAFQTIITEVYGIVNKRALAXAKAAAAAAVPLPSQGKTISIDSTAGNSKKACCNT

SEQ ID NO: 4293 - protein, 306 aa, Pseudomonas putida
MSSLFAFPGQGAQQVGMLQRLPEGCGQLLEEASDVLGQQVLEMDSQQALQNTRAVQLCLLLSGVAWARWLMQRSPAPDYVAGLSIGAYPAAVVAGALGFADAVRLVALRGELMQGAYPQGYGMTALSGLDLASVERLLIEVGGEVYVANLNSDNQIVIAGSDTAMAEVAAKARRLGQGVARRLAVSVPSHCRLLDGPAAQLASAFASVELQRPRITYLSGSSARPVFDPQHLRDDLAGNMARVVDWRATLRNAYERGVRLHLEMPPGSVLGGLARPVFEQGRVVAVEGTRWDTLDALLRQEVAGDR

SEQ ID NO: 4294 - protein, 131 aa, Triticum aestivum
  unsure (1)..(131): unsure at all Xaa locations
WIGQKVQIVGDDXLVTNPTRVAKAXINEKTCNALLLKVNQIGSVTESIEAVRMSKRAGWGVMASHRSGETEDTFIPLLAVGPSTGQIKTGAPCRSERLAKYTQLLRXIEEELGDAAVYAGXAKFRAPVEPY

SEQ ID NO: 4295 - protein, 513 aa, Vibrio parahaemolyticus RIMD 2210633
MVSTHWRATMQMSKSFLLITVGLASTSLQAQTLTRDNGAPVGDNQNSITAGENGSVLLQDVHLIQKLQRFARERIPERVVHARGTGAHGEFVASGDFSDLTVSAPFTEKGKVTPVFVRFSTVIHSKGSPETLRDPRGFATKFYTEQGNWDLVGNNLPVFFIRDSIKFPDMVHSLKPSPVTNVQDPNRFFDFFSHEPSATHMLTWVYSNLGTPASYRTMDGFGVHAYKWINQQGDVNYVKFQWKSQQGIKSLRPNKVTEMQGKDFNHLTNDLYAAIGRGNYPKWDLYVKVLSPEALSKLDYNGLDATKVWLNVPDRKVGTMTLNRLPENFFLETEQSAFAPSNLIPGIEPSEDRLLQGRLFAYADTQLYRLGANLFQLPVNRPLTSVNNHNQNGLSNNAQLSNGDVNYEPSRKLNLAEDNQFKAVETKLVGTVQQKAISKPRDFYQAGVLYRSMNEQDRSDLIANLAGDLNKVIDKDIKATMVSYFYRADKEYGSRLAEATDTNLSQVKNKAMM

SEQ ID NO: 4296 - protein, 746 aa, Cyanothece sp. PCC 8801
MTNSAKTLCPYCGVGCGLEVLPPAQPGKPTNRDSQGTPIWQVRGDRSHPSSQGKVCVKGATVSESLDKNRLKYPMMRDSLDESFRRVSWDEALEAIVHRIQTVLQTQGPDGLSMYGSGQFQTEDYYIAQKLFKGFLGTNNFDANSRLCMSSAVAGYTQSFGSDGPPCCYEDLELTDCAFLIGTNTAECHPIVFNRLRQHHKQNRKVKMVVVDPRRTKTAEVADLHLAIKPGTDIDLFNGIAHLLMRWGTIDTYFIDECTQNFPAYAEVISHYPPELVARNCEIRLDDLETAAKYWAKSERVLSLWSMGMNQSSEGTAKVRTLINLHLMTRNIGKPGAGPFSLTGQPNAMGGREAGGLANILPGYRVITNPQHCAEMEQFWGRPPGSIRPQRGLTGVEMMRALETGDIGFLWIAATNPAVSMPDVKRTQEALRRSPFTVYQDAYYPTETSEYAHILLPAAQWSEKTGVMTNSERVVTLCPEFRDPPGEARPDWAVLAEVGRRLGFVEAFRFNSSAEVFAEFVQCTEGRPCDYSGLSHDRLRQQGPLQWPYPYQWPSPEGEEEKEQNRTNKRLYTDLRFNTPDGRARFAAYHSKGLAEPPDTDYPFILTTGRLYGHWHTQTRTGHIPKIRKMHPTPFIEIHPRDAARFKIEENSLVEVRSRRGVARFPAMITEAIAPGTVFVPMHWGALWADDAEANALTHPIACPSSLQPELKACAVQLEKVTIPTGSLHGEPSELDLKRNQALTRK

SEQ ID NO: 4297 - protein, 413 aa, Streptomyces avermitilis MA-4680
MDDGRGAGGFGGGPAVRALDTEAVHAGRDDLARQGLHAAPIDLSTTYPSYDSRAEAARIDAFAADGAEPAGPPVYGRLGNPTVARFETALARLEGTDSAVAFASGMAALSAVLLVRNAMGLRHVVAVRPLYGCSDHLLTAGLLGSEVTWVDPAGVADALRPDTGLVMVESPANPTLAELDLRALAHACGSVPLLADNTFATPVLQRPAEHGARLVLHSATKYLGGHGDVMAGVVACDEEFARGLRQIRFATGGVLHPLAGYLLLRGLSTLPIRVRAASSNAAELARRLAADPRVARVHYPRIGGAMIAFEVYGDPHEVIAGVRLITPAVSLGSVDSLIQHPASISHRIVDAADRRGAGVSDRLLRLSVGLEDVEDLWADLDGALGTDRLPETAGAGREPSRTALRLPERAADR

SEQ ID NO: 4298 - protein, 414 aa, Schizosaccharomyces pombe
MISSAVILVGGPSRGTRFRPLSFDVPKPLFKIGGREMIYHHLAALSKIESVKDVFLVGFYDESVFKDFINEVASHFPSFNRIKYLREYNCLGTGGGLYHFRDQILKGHTSNVFVMHADVCCSFPLQELLNVHHEKKALVTLMATKVSKEDASNFGCLVEEPSTGRVLHYVDKPSSYLSNIISCGIYIFDASIFDEIKKAYERRLEEVEKQLRSLDEGMEDYLSLETDVLAPLCSDSSKAIYAYNTPEFWRQIKTAGSAVPANSLYLQKAYHDGTLPKPDTEAEIIQPVFIHPNAIVSKGAKIGPNVSIGARVRIEDGARIRNSIIQEDCEISANAVVLHSILSRHCKIGKWSRVEGSPTLPSQHSTTIMRNSVKVQAITVMGADCIVHDEVRVQNCLVLPHKEIKVGLVGEIVM

SEQ ID NO: 4299 - protein, 484 aa, Rhodospirillum rubrum
MTTRLTTTAGAPVADNQNSLTAGPRGPVLLQDYQLIEKLAHQNRERIPERVVHAKGWGAHGTLTITHDISRYTRAKLFSAVGKTTPVLARFSTVAGELGAADAERDVRGFSLKFYTEEGNWDLAGNNTPVFFVRDPLKFPDFIHTQKRHPRTHLRSPTAMWDFWSLSPESLHQVTILMSDRGLPLDPMHMNGYGSHTYSFWNDAGERFWVKFHFKTQQGHAHLTNAAAKVVVGESRESYQEALFGTIESGHFPRWTLFVQIMAEREAETTPYNPFDLTKVWPHGDFPLIEVGVLELNRNAENYFAEIEQAAFSPSNVVPGIGHSPDKMLQARVFAYADAHRYRLGTHYEALPVNAPLSPVNHYHKDGPMRFFPNNPNADAYYEPNSFGGPKEDPSVKEPPLRINGDADHYNHREGNDDYVQVGALFALFDEGERQRLFSNIAEAMAGVPEEIIRRQLVHFHRADPAYGEGVAKALGLAPVSQPA

SEQ ID NO: 4300 - protein, 917 aa, Botryotinia fuckeliana
MPSLHGLWSHINVTLANLTNNRDEDGDHIDSDTPRSGVATPQPDPSDKRTPGILHSFYGQVGLGSSSSQNSAKHISRTSQNPNTSALEGHYTSPRQRFEAEGALLKATPSSLDERRIDGGVEKENSLLPPHELLGSSQISKQQYPYPTPPVSHPSSLHKVKLSDASFEDIGNNVQKTAAPTDRDCISESIPSHARRASSMTPLSNIVTPSNVHAAHFSNPSDTPSEHKLSTPPLSRLNSEFHKSPSYDRLKKLTCDGLKSIPSTPTRALSNQTSKSDQSVMSTNSEHVAQNGKSGASERPAVTPRTDSSMGGTVVPPKGKLTVKINEARGLRRSVDPYVVAVFQRNELVSKGPQSEEDDEDDGNSHSPGGIPIGGIPIGGIPITRSGSDSGRSMAIPMKSRQSSNTSLSEYRDFKNKGRKMFTHPKWDAEAVFDVVGSDTRVNITIYDRAQQAEEFLGHVDLQANLVENVDAPVSGWFQLRGKDMTSNAGNVGEVHVEISFQRTEKRHYGPDDFQILKLIGKGTFGQVYQVRKKDTKRIYAMKVLQKKVIVQKKEVAHTVGERNILVRTATADSPFIVGLKFSFQTPTDLYLVTDYMSGGELFWHLQKEGRFDEQRAKFYIAELILALEHLHKHDIVYRDLKPENILLDANGHIALCDFGLSKANLTKNATTNTFCGTTEYLAPEVLLDEAGYTKMVDFWSLGVLVFEMCCGWSPFYAEDTQQMYKNIAFGKVRFPRDTLTTEGRNFVKGLLNRNPKHRLGATDDAEELKRHPFFQDIDWHALTQKLITPPFKPKLKSETDTSNFDPEFTNALNGASSLNARAAALAAGMATSTPLSPGMQANFKGFTFVDESSIEENMKDRIKDEYEDRMDQDNNDPERDWEDTFDIPDKSRMDRMSGVVRNHNEDERMFNGDDFH

SEQ ID NO: 4301 - protein, 167 aa, Triticum aestivum
  unsure (1)..(167): unsure at all Xaa locations
MAPTVMASSATSVAPFQGLKSTAGLPVSRRSNGASLGSVSNGGRIRCMQVWPIEGIKKFETLSYLPPLSTEALLKQVDYLIRSKWVPCLEFSKVGFIFREHNASPGYYDGRYWTMWKLPMFGCTDATQVINEVEEVKKXNXDXYVGIIGSQHRKVNASLHNGQDPEG

SEQ ID NO: 4302 - protein, 183 aa, Triticum aestivum
MEGGKKQHHHFVLIHGARPGAWSWYRVATALEAAGHRVTAPDMAGCGASPGRGEEVASFEDYSRPLLDAVAALPEGEQAVLVAHSFGGQSLALAMERHPEKVSVAVFVTATMPAAGKPMTYAFNQLSQGKGPDFFMDCALGSAGDPRNPDKTFLFGPKYMARRVYQLSPPEDLTLGIAMVRPS

SEQ ID NO: 4303 - protein, 271 aa, Brucella suis 1330
MQDKVVLVGCGNMGFAMLRGWLDSGILKAGDVHVVEPAEALRERAALAHVHVYADAADLPADLQPRMVLVAVKPQMMANVLPAYKRFAPASTFVSVAAGIPVALFESHLGKDVAVIRCMPNTPAAIGKGMLVTFKNANVSDANEAFVTSLLKTSGKVASVDEEGLMDAVTAVSGSGPAYIFHFIEALTDAGVNLGLPRETAALLAMQTVMGAGALADASTDSPSKLREQVTSPNGTTAAALDVLMGGDRLKELVAEAVKAAHKRSVELGKS

SEQ ID NO: 4304 - protein, 797 aa, Mycobacterium bovis AF2122/97
MSFVLAMPEVLGSAATDLAALGSVLGAADAAAAATTTGIVAAVQDEVSAAIAALFSAHGRAYQVASAQAAAVHAQFVEALSAGAGAYASAEAAGAAVLANPAQSVQQDLLAAVNAQSVALTGRPLIGNGANGAPGTGANGAPGGWLLGNGGAGGSAAAGSGLPGGAGGAAGLFGTGGAGGAGGSSTVGDGGAGGAGGSGGWLLGTGGVGGVGGLGAGAGGAGGVGGAGGLLGAGGHGGAGGLGAVTGGVGGAGGAGGLLAGLLAGPGGAGGTGGRGFLNDGGVGGAGGNAGLLFGAGGTGGSGGAGLGGDGGAGGAGGNAGVLFGNAGSGGTGGFGDTDGGAGGAGGDAGWLGSGGVGGAGGFGETGDGGVGGAGGKAGLLIGNGGAGGAGVLIGNGGNAGIGGTGPTAGDTGAGGISGLLLGADGFNAPASASPLHTLKQQALAAINAPTQTLTGRPLIGNGTPGAVGSGATGAPGGWLLGDGGAGGSGAAGSGAPGGAGGAAGLWGTGGAGGAGGWLLGDGGAGGIGGASTVLGGTGGGGGVGGLWGAGGAGGAGGTGLVGGDGGAGGAGGTGGLLAGLIGAGGGHGGTGGLNTNGDGGVGGAGGNAGMLAGPGGAGGAGGDGENLDTGGDGGAGGSAGLLFGSGGAGGAGGFGFLGGDGGAGGNAGLLLSSGGAGGFGGFGTAGGVGGAGGNAGWLGFGGAGGIGGIGGNANGGAGGNGGTGGQLWGSGGAGGEGGAALSVGDTGGAGGVGGSAGLIGTGGNGGNGGTGANAGSPGTGGAGGLLLGQNGLNGLP

SEQ ID NO: 4305 - protein, 909 aa, Mycobacterium bovis AF2122/97
MSWVMVSPELVVAAAADLAGIGSAISSANAAAAVNTTGLLTAGADEVSTAIAALFGAQGQAYQAASAQAAAFYAQFVQALSAGGGAYAAAEAAAVSPLLAPINAQFVAATGRPLIGNGANGAPGTGANGGPGGWLIGNGGAGGSGAPGAGAGGNGGAGGLFGSGGAGGAGGNAFGAGEVGGAGGAGGNAMLFGAGGAGGAGGAGGNAGMLFGAAGVGGVGGFSNGGATGGAGGAGGAGGLFTTGGVGGAGGAGGDGGDGGAGGLFGAGGTGGAGGFGTAVLAGTGGAGGPGGAGGLFGAGGEGGSGGSGNLTGGAGGAGGNAGTLATGDGGAGGTGGASRSGGFGGAGGAGGDAGMFFGSGGSGGAGGAGGSGGFGLPSGGKGGAGGDAGMLFGSGGSGGAGGISRSVGDGAAGGAGGAPGLIGNGGNGGNGGASTGGGDGGPGGAGGTGVLIGNGGSGGTGATLGKAGIGGTGGVLLGLDGFTAPASTSPLHTLQQDVINMVNDPFQTLTGRPLIGNGANGTPGTGADGGAGGWLFGNGGNGGQGTIGGVNGGAGGAGGAGGILFGTGGTGGSGGPGATGLGGIGGAGGAALLFGSGGAGGSGGAGAVGGNGGAGGNAGALLGAAGAGGAGGAGAVGGNGGAGGNGGLFANGGAGGPGGFGSPAGAGGIGGAGGNGGLFGAGGTGGAGGGSTLAGGAGGAGGNGGLFGAGGTGGAGSHSTAAGVSGGAGGAGGDAGLLSLGASGGAGGSGGSSLTAAGVVGGIGGAGGLLFGSGGAGGSGGFSNSGNGGAGGAGGDAGLLVGSGGAGGAGASATGAATGGDGGAGGKSGAFGLGGDGGAGGATGLSGAFHIGGKGGVGGSAVLIGNGGNGGNGGNSGNAGKSGGAPGPSGAGGAGGLLLGENGLNGLM

SEQ ID NO: 4306 - protein, 452 aa, Mycobacterium bovis AF2122/97
MSFLFAQPEMLGAAATDLASIGSAISTANAAAAAATTRVLAAGADEVSAAVAALFSGHAQTYQALSTQAAAFHQQIVQTLTSTAGAYASAEAANVEQQLLGAINAPTMALLGRPLIGHGADGAPGTGQAGGAGGILYGNGGNGGSGATGQAGGAGGAAGLIGHGGAGGLGGTGASGGAGGAGGWLWGNGGAGGNGGVGVAGDPGGVGGAGGAGGAAGLWGSGGSGGTGGQGGVGGGKSGDGGTGGIGGAGGGGGWLHGDGGAGGHGGQGGTGVSSGGNGGAGGTGGDGRGLSGSGGAGGHGGQTGVGGKVGENNFGGAGGAGGTGGLIGNGGAGGTGGKGGDGFGVFGKGGAGGTGGRGGAAGLIGDAGTGGTGGKGGTAGEDGTGGNGGTGGNGGAAVLIGNGGGGGAGGNGGAGNDGTPGNGGGGGVGGTGGTLFGQPGQPGPPGQPGPA

SEQ ID NO: 4307 - protein, 406 aa, Burkholderia fungorum LB400
MHAVPPLEQDTGDATVDVSPAQAASQKSAHAPAQAANDAPVRDLRRVGIHPDYWYPLAWSHEVKRGKTHGVTFAGDPIVLARTEGGKVFALEDRCAHRQVPLHQGVVDGESIRCGYHGWTYDCSGKCIDVPYLGRERLPNGVRSYPCREVEGLIFVFPGNAALAEQRPLPDLSSVSDKKYKTRRFGRPVNCHYSFMHENLMDMNHQFLHRKQMGQMRARSLGRRTGEGWVEVDYTFARMAGQQPIGEAIVFGQSRKTGGDNDKDVMTIRTEYPYQTLQIRTSEQTLVMNLWIVYVPLDREQRTNRTFGLLSIRKPGVPGVLNLAWPLLVWFTERIFKEDREIVEAEQRAHDSQGADWNHEVFPVINELRALLRERGAPDQVVGAGTGDTEVIRFWDSRNGSPLAKS

SEQ ID NO: 4308 - protein, 102 aa, Zea mays
VGNWWRPTRACAREASTAPLVGISSDSLLDPRVAGAVCSAACLRGCPNIVDLYANLAAGEGVAFSELCEVHRANPRRAMAQLQSSGEAHDAPASAPSPTPSP

SEQ ID NO: 4309 - protein, 203 aa, Mycobacterium leprae
MLVAQSFSAINPGPTAELYLGDIKSVMLTQEQIQARIAELGAQIGHDYRDRSPASDQDLLLVTVLKGAVIFVTDLARAIPLPTQFEFMAVSSYGSSMSSSGVVRILKDLDRDIHDRNVLIVEDVVDSGLTLSWLLRNLATRRPQSLQVCTLLRKPDALRANVDITYVGFDIPNDFVVGYGLDYDERYRDLPYIGMLDPRVYQQ

SEQ ID NO: 4310 - protein, 500 aa, Mesorhizobium sp. BNC1
MELQDYAQHIGGEAVAAADGETYITHNPANGRPWGRFPAGKSADVARAVAAAMEALRGSWGSMAPTRRGRLLIEWARAISVNAEKIARLETAQNGKIFRDCLNQARDLENWLYYYGGQADKIEGTVVPLLRQSILNYTLREPLGVIGIITPWNSPASLTMSSAAPALAAGNAIVIKPSEVTPASILEIARLAEEAGIPKGVINVVTGGRNAGEALVDHPDIAKIAFTGSVEAGRAIAERAGKRLIGCTLELGGKSPNIVFPDADLARAEAGVLGGIFASTGQTCVAGSRAYVHESLFDSFVERLATRARQIVLGDPMDPRTQMGPVSTELQLQKDERLVAEALSEGAVKIAGGERVSPPGCEDGYFYAPTVLTKLNPAASILKTEVFGPVLSVLPFKSEDDVVAMANDSPFGLAAGFWTRDFARAHRLARRLEAGTVWINMYRAFAFNSPMNGHKQSGIGWQNGSEAIFQYLKTKSVWCETDEDYGDMFARAQPASTGRE

SEQ ID NO: 4311 - protein, 262 aa, Oryza sativa
MSVAAEGKEKGVGGGGGGAGAGACELCGAAARVYCGADEATLCWGCDAQVHGANFLVARHARALLCRGCARPTPWRAAGPRLGPTASLCERCVRRGGGGRGGGGGGGAAGGGGRGGGGDEEMGGEGDEVEEDEDEVVVVVVEEDEDDEDEEGEGEGENQVVPWAEEAEATPPPVASSTLSSTREARPQRREPPPTASRRTSRARRRSRACAGTRPRLTMAVVAGATRPPPPGTAVASAADSLPPGIGRDRPRISAGRGWRSR

SEQ ID NO: 4312 - protein, 598 aa, Prochlorococcus marinus str. MIT 9313
MTEGQTTSGQAADLKFAACLASGAEQSKFEQFKADSCYLLDPLAAELENSSDHFSNDAVQLLKFHGSYQQDNRDNRQKGAGKDWQMMLRLRSPGGRIPPALFLALDDLSNRLGNGSLRATTRQAFQIHGVRKEDLREVISTIIRSMGSTLAACGDITRNVMAPAAPYEKGGYPAARQLANEIADVLSPTAAEGSYLDLWVNGNATYRIRPSRRVKKVRTRQHQGNVFSGDAKEPLYGTTYLPRKFKCAVTVPGDNSVDLLTNDIGLVVFTAANGEIKGCNVYVGGGMGRTHNNEQTFARTADPLGYVAAEHVLDLVQSILALQRDYGDRKTRRHARMKYLLNDHGISWFKQELKSKYFLHPIKALRPEPKSKLEDYLGWHQQSVGQWFVGLPLLSGRLEGDLKKGLRQLVETFQLEIRLTPNQDLLLCNIGTSQRSSVRKGLAALGIRAPEAPAMLARHAMACPALPLCGLAVTEAERTLPALLERIDAQLRRLEITKSILIRMTGCPNGCARPYMAELALVGSGVDQYQLWLGGTPNLQRLAKPYLQRMPLDQLESTLEPLLLSWKQAGGRRSLGDHVNKLGDQAVLGLLSGNGQAP

SEQ ID NO: 4313 - protein, 326 aa, Oryza sativa
MNVPIVDPLQGDFPETIEEFLQYGSMKCIAFNRRGTLLAAGCANGTCVIWDFETRGIARELHDKDCTAPITSVAWSKYGHHLLASATDKSLTLWHVVNEKKIARITLQQTPLSVRLHPGGPSTPSICLACPLSSAPILVDLNTGSTTVLPAFLSDNGNLPAPNTRNKFSDGSPPFTPTAPPVAARGDLIYVGNSKGEILIIDSKSIKVHAVIPIPGGTVVKDIVFSRDGRYLLTNSNDRVIRVYDNLLPVKGSGEEIEKISSNNISYESHYEKLKANGASCLAISCELLDAIAKIPWKAPCFSGDSEWIVGASASKGEHRLCIMNR

SEQ ID NO: 4314 - protein, 406 aa, Campylobacter jejuni subsp. jejuni NCTC 11168
MLNNTLFFKQSEIHTISSYANRINDEVKSGDIGYYHLIDTSLNLIDESLQFIQDKEYVKNIVLVGMGGSSCGVKALRDMLFNEKSNQRELFILDNTSSHSFNKTLEKIKLEESLFLIISKTGSTIEVVSLFKLLIEHFKLDMQELKKYFVFITDKDSKLHQEGENLGIKCFFIPANVGGRFSILSAVGIVPLCFCGYNAKALLEGAKACFEDFFTHKKDEILQKAYHYCTHKNANINVLFSYSDAFKGFNEWYIQLIAESLGKKQGYKRIGLTPIALIGARDQHSFLQLIMDGPKNKTVTFLKIKDAQKAPIIPDIHFKFLDSLSNKVNLHELLNAQCDATMHALIAENLSVDVIELEKLDAWHAGYLMYYYELFTSTCGVMLGINTYDQPGVEVGKLILKNILNS

SEQ ID NO: 4315 - protein, 274 aa, Campylobacter jejuni subsp. jejuni NCTC 11168
MLQTCIFPAAGYGTRFLPATKTLPKEMLPILTKPLIHYGVDEALEAGMENMGFVTGRGKRALEDYFDISYELEHQISGTKKEYLLDEIRSLINRCTFTFTRQNQMKGLGDAVLKGRPLVGDEAFGVILADDLCVNEEGLNVMAQMVKIYEKYRCTIIAVMEVPKEQVSNYGVISGNFVEENLIMVNSMIEKPSPDEAPSNLAIIGRYILTPDIFGILENTKAGKNGEIQLTDALLTQATNGMVLAYKFQGKRFDCGSVEGFVEATNYFYEKSKC

SEQ ID NO: 4316 - protein, 155 aa, Pyrobaculum aerophilum str. IM2
MKYKFRNVVLGGTFDTLHSGHVKLLATATLIGDRILIGLTSDSFASTYKQYKVRPFSVRLANLRNLMSLIAPEREVAYVEIHDPYGPAVFDPRLEAIVASIETAPRALQINDERAKRGLRPMEVFIISTVRDGYGHTLSSTYIRRVLERPESKQS

SEQ ID NO: 4317 - protein, 497 aa, Pseudomonas syringae pv. syringae B728a
MTTLTRADWEQRARNLKIEGRAFIQGEYTAASSGETFDCISPVDGRMLAKVASCDAADAQRAVDSARSAFNSGVWSRLAPAKRKATMIRFAGLLEQNAEELALLETLDMGKPISDSLGVDIPGGARALSWSGEAIDKLYDEVAATPHDQLGLVTREPVGVVAAIVPWNFPLMMACWKLGPALSTGNSVILKPSEKSPLTAIRIAQLAIEAGIPAGVLNVLPGYGHTVGKALALHMDVDTVVFTGSTKIAKQLMIYAGESNMKRVWLEAGGKSPNIVFADAPDLQAAASAAASAIAFNQGEVCTAGSRLLVERSIKDRFLPMVIEALSAWKPGNPLDPATTVGALVDTQQMNTVLSYIEAGHSDGAKLVAGGKRILQETGGTYVEPTIFDGVNNAMKIAQEEIFGPVLSVLTFDTAEEAIQIANDTQYGLAAAVWTANISKAHLTAKALRAGSVWVNQYDGGDMTAPFGGFKQSGNGRDKSLHAFDKYTELKSTWIKL

SEQ ID NO: 4318 - protein, 238 aa, Zea mays
PAVSRYQKKEFHDETCRKIKALHLYDCLRANKATSAWGVEARVPFLDKSFISVAMDIDPEWKMIKRDLGRIEKWVIRNAFDDEERPYLPKHILYRQKEQFSDGVGYSWIDGLKDHASQHVSDSMMMNAGFVYPENTPTTKEGYYYRMIFEKFFPKPAARSTVPGGPSVACSTAKAVEWDASWSKNLDPSGRAALGVHDAAYEDTAGETPASADPVSDKGLRPAIGESLGTPVASATAV

SEQ ID NO: 4319 - protein, 291 aa, Rubrobacter xylanophilus DSM 9941
MRRLARENNLDLSKIEGTGPAGRIVERDVRAALERGEARVEEGPAEAAAPAAAPAPEPTGAPGTTLKEPSRMQRIIGERMQQAKREIPHFYATVEARVDELLALRGELNERLAEEGVKLSINDFVMKACAVALRKFPMLNALWTREGIELHERVDLAMAVALEEGLITPVIRDAANKPLSVISGEAKDLASRAREGRLKPDEYQGGTFTVSNMGMFGVESFSAIINPPQAAIVAVSSVIRRPDFDEEGNVVPRSTMKLTLSADHRIANGADGARYMSEVKRLLENPMLLLV

SEQ ID NO: 4320 - protein, 187 aa, Triticum aestivum
  unsure (1)..(187): unsure at all Xaa locations
MAPNYEMAASILLCAEDSSSIFGFGDGEEAAAGARAEGSPYCGGDDEFAAGFPLPSEECVARWVATEAEHMPREDYAERLRAGGVDLRVRMDAVDWIWKVHTYYGFGPVTACXLAVNYMDRFLSLYQIPEGKAWMTLLLSCACLSLAMEMDDAPQPQAIEVPGGDARFVEAKTTIXKMELLVLSTLK

SEQ ID NO: 4321 - protein, 381 aa, Medicago sativa
MARIELSRHMPLVTLIVLVLCTTPPIFASTHCDFPAIFSFGASNVDTGGLAAAFRAPPSPYGQTYFNRSTGRFSDGRIIIDFIAQSFRLPYPSPYLNSLGSNFTHGANFATAGSTINIPTSILPKGILSPFSLQIQYIQFKDFISKTKLIRDQGGVFATLVPKEDYFSKALYVFDIGQNDLTIGFFGNKTIQQVNATVPDLVNNYIENIKNIYNLGARSFWIHSTGPKGCAPVILANFPSAIKDSYGCAKQYNEVSQYFNLKLKEALAQLRSDLPLAAITYVDIYSPKYSLFTNPKKYGFELPYVACCGYGGEYNIGAGCGATINVNGTKIVAGSCKNPSTRITWDGTHYTEAANKIVFDQISTGAFNDPPISLDMACYRK

SEQ ID NO: 4322 - protein, 184 aa, Synechocystis sp. PCC 6803
AFSNPSDFPMKLIDSRGRIFGIVSLLDLGAALIILMVAVGIFVLPGSSGKSILAQANAASIELTTIVRGLNVLDPQVVLDEFKAEKTNIIIRNQPAGQVEVVNVQELPRNLAVPQPDGSVKSLPDPRPESNYSRDMLLTLKGRGDFTSTGMVLGGQKVKIGTVLELEGKNYNFNASVVGINQPK

SEQ ID NO: 4323 - protein, 72 aa, Triticum aestivum
MGKMPVRMKAVVYALSPFQQQVMPGLWKDITTKIHHKVSENWISATLLITPVVGTYQYAMYYKEQEKLSHRY

SEQ ID NO: 4324 - protein, 72 aa, Glycine max
  unsure (1)..(72): unsure at all Xaa locations
MASSMISSPAGTTVNPAGAGMDAAWAGLNFMAAXHSKKTNSDIPSIASSGSRVHRMQVWPTTGMRKFETLYY

SEQ ID NO: 4325 - protein, 238 aa, Arabidopsis thaliana
MNLKATELCLGLPGGAEAVESPAKSAVGSKRGFSETVDLMLNLQSNKEGSVDLKNVSAVPKEKTTLKDPSKPPAKAQVVGWPPVRNYRKNMMTQQKTSSGAEEASSEKAGNFGGGAAGAGLVKVSMDGAPYLRKVDLKMYKSYQDLSDALAKMFSSFTMGNYGAQGMIDFMNESKLMNLLNSSEYVPSYEDKDGDWMLVGDVPWEMFVESCKRLRIMKGSEAIGLAPRAMEKYCKNRS

SEQ ID NO: 4326 - protein, 175 aa, Oryza sativa
MAPSVMASSATSVAPFQGLKSTAGLPVNRRSSSSSFGNVSNGGRIRCMQVWPIEGIKKFETLSYLPPLTVEDLLKQIEYLLRSKWVPCLEFSKVGFVYRENHRSPGYYDGRYWTMWKLPMFGCTDATQVLKELEEAKKAYPDAFVRIIGFDNVRQVQLISFIAYKPPGCEESGGN

SEQ ID NO: 4327 - protein, 587 aa, Treponema denticola ATCC 35405
MDKNEILNRAKKYVSEEKEVKFAEEVKALIEKNDEKELYDRFYRDLEFGTAGLRGIIGGGTNRMNPLVIKNATQGLADYLIEAKSEKAKAGSLSAVIAYDSRRFSDVFAKTAALIFAANNIRCYLFSSLRPTPELSYAIRELGCDTGIVVTASHNPPEYNGYKAYWSDGAQITPPHDLGIIKKVGEVSSIKMMSEEEALKNGKLVIIDKEIDEKYWAMLKKKISRQEIIKNMASKVKIVYTPLHGTGAMHVEKVLGEMGFNVISVPEQREPDGNFPTVSYPNPEDPKALKMAMDLAIKEGADILMATDPDADRFACAVKNDAGEMQLISGNQMGALFADYICLTLKEQNKLPQNAAIVRSIVTSPLSDLIAASYNVQSEECLTGFKWICGVAERMVSTGSHSYLYGYEESFGYNFGTEVRDKDGIASSAICAEMTLYWRSKGKSLLDRLNEIFSQFGFYGEKTINMVYPGAEGLKIMQDMMVRVRERNLSEIAGVKVKTIRDIQESTEYSPLEPAKKTKVTLPKSNVLQYYLEDGSIICIRPSGTEPKIKIYIIHSEKVVSSVEEAKKQSDKKIAEFEKEFNGVLNA

SEQ ID NO: 4328 - protein, 513 aa, Lolium rigidum
MVMEMEPSSATLFFLSVVTLVILVSLVSRKPSSKLRRPPGPRDLPFVGSLHHLLTSQPHVALRNLAKTHGPVMRLRLGQVEAVVVSSSAAAQEVLRDNDLSFASRPNLLATEIMCYGNLDVAFAPYGAYWRALKKLCVLELLSSRKVRQFKPVRDSETMSLIKEICAAGKGGKPVKLRSLLVKCTSSVTGKATFGERCDIDLREQFMAAMEVAQIHSSGFCVGDLFPSLGFLDVATGMRYQLWRARQQLDNVVDKIISDCEARREEKKSTPTGDEDLLSLMLRIRDEGGSDFPIETINIKAIIVDLFTAGTETTSSTAEFVMSELMRNPKVMKKAQEEVWRMMENKSPQDHENHMDELPYLRMVIKETMRLHPVVPLLLPRLCRESCHVGGFEITKGTRVIINAWALATSPENWNEPEEFRPERFEDSVVVNDKGTQFKLMPFGGGRRMCPGDGFALATLELMVARLLYYFEWSLPDGMRPDELDMDVKVGTTSRRRNELRVVASPCRIPIEI

SEQ ID NO: 4329 - protein, 264 aa, Prochlorococcus marinus str. MIT 9313
MERVRGACQSPILILLAIVLPFPSTSGPAIHPLIESLAARIRQRRAQLPELSPFALDSVMESISGQLDGEELLISNELHRCRGMRKLHLEIARLGGGLQVLHCVFFPDPRFDLPIFGADIVAGPAGISAAIVDLSPVGLTMPEALLHGLESLPIPAFQQVRELPEWGSIFSPFVQFIRPASSQEESWFVDLADGYLKALISSVIDATPDASDAASTIQRHKSQLSYCIQQKRNDKTRGVLEKAFNPQWADRYIEEILFEDPPPL

SEQ ID NO: 4330 - protein, 475 aa, Prunus armeniaca
MSTLKARSVQARASDGDLENLVPSKPQGKSSGTVFPFVGVACLGAILFGYHLGVVNGALEYLSKDLGIAENAVLQGWVVSALLAGATVGSFTGGALADKFGRTRTFQLDVIPLAIGAFLCATSQSVQTMIVGRYLLAVGIGITSAIVPLYISEISPTEIRGALGSVNQLFICIGILGALVAGLPLAANPLWWRTMFGVAIVPSVLLALGMAASPESPRWLFQQGKISEAEKAIKTLYGKERVSEVMHDLTSATQGSVEPEAGWFDLFSSRYWKVVSVGAALFLFQQLAGINAVVYYSTSVFRSAGITSDVAASALVGAANVFGTAVASSLMDRQGRESLLLISFGGMAASMLLLSLSFTWKVLAPYSGPLAVAGTVLYVLSFSLGAGPVPALLLPEIFASRIRAKAVSLSLGMHWISNFVIGLYFLSFVTKFGISSVYLGFAGVCLLAVLYISGNVVETKGRSLEEIERALSVST

SEQ ID NO: 4331 - protein, 245 aa, Triticum aestivum
HASETVEFKPFQDQKPGTSGLRKKVVVFQQPHYSEAFITSILLSIPEGVEGSNLVIGGDGRYFNPEAIQLIAKIGAAYGVKKLIIGQNGILSTPAASHVIRIRKATGGILLTASHNPGGPKNDFGIKYNLANGGPAPESVTNKIYEFSKTLTSYKIADIPDVDITTVGTQTYGALEVEVIDSTADYVAMLKDIFDFDLIKKFFSSHPDFKVLFDGLHGVTGPYGKAIFEQELGLSNSTQNCIPSP

SEQ ID NO: 4332 - protein, 263 aa, Zea mays
  unsure (1)..(263): unsure at all Xaa locations
MAAPETSACGAGPALLFPSSSSSSSSARVEAVVVFTICDSFVRRPDQAERVIGTLLGSVLPDGTVHVRNAYVVPHSESADQVALDIEYHHNMYASHQKVNPKEVLVGWFSTGFGVSGGSTLIHEFYSREVQSPIHLTVDTGFTMGEASIKAYVSSNLSLGDRHLAAQFQEIPLDLKMLDAEKVGFEMLKSTMVEKLPNDLEGMESSMQNLYALIDEIYKXYVDDVVEARVAPDHKIGRFIADTVSSMAKLSPASFYRVFNDKI

SEQ ID NO: 4333 - protein, 358 aa, Campylobacter jejuni subsp. jejuni NCTC 11168
MQYKILENNRIASKGYAMLSKDAKFTPFEFSRHAIGDNDILIKILYAGICHSDIHTARSEWGEATYPCVPGHEIAGEVIAVGKNVSKFKVGDYAGVGCMVNSCGECDACKRSQEQFCENGKTIFTYNSCDVFHGNENTYGGYSNNIVVSEKFAVCVPKDAPMEKVAPLLCAGITTYSPLKFSNIKEGSSVAVAGFGGLGMMAVKYAVKMGAKVSVFARNENKKADALAMGVSSFYTSCDKNAVKERFDLIISTIPTPYNPAIYLDLLKFGGEMAIVGLPPHEVAPSISVITFVHKAGKKVYGSLIGGIAETQEMLDFSLKHGIYPETELITPQEIDKAYENLTSGKAKFRYVIDMTKE

SEQ ID NO: 4334 - protein, 353 aa, Escherichia coli O157:H7 EDL933
MLYTSQTTPEKDQKMSMIKSYAAKEAGGELEVYEYDPGELRPQDVEVQVDYCGICHSDLSMIDNEWGFSQYPLVAGHEVIGRVVALGSAAQDKGLQVGQRVGIGWTARSCGHCDACISGNQINCEQGAVPTIMNRGGFAEKLRADWQWVIPLPENIDIESAGPLLCGGITVFKPLLMHHITATSRVGVIGIGGLGHIAIKLLHAMGCEVTAFSSNPAKEQEVLAMGADKVVNSRDPQALKALSGQFDLIINTVNVSLDWQPYFEALTYGGNFHTVGAVLTPLPVPAFTLIAGDRSVSGSATGTPYELRKLMRFAARSKVAPTTELFPMSKINDAIKHVRDGKARYRVVLKADF

SEQ ID NO: 4335 - protein, 823 aa, Rhodospirillum rubrum
MSKMSPPTAFAAQTRRTFLKASAAAGALGLVAPSLLSAGVARAAEDGEVLTGSHWGAFRATVKGGKMTAIKPWEKDPHPSHQLTGVMDSIYSPTRIKYPMVRRAFLEKGPGASPETRGAGDFVRVTWDQALDLVAKELTRVRKDHGPTSIFAGSYGWMSPGKLHNCRSLVRRLLNQTGGFVSSSGDYSTGASQVIMPHVMGTLEVYEQPTVWPVVVEHSDLVVFWGADPMTTNQIGWLIPDHGAYVGLKALKESGKKVICIDPVRTETCDYLGAEWIAPKPQTDMAMMLGVAHTLYTEKLHDQSFLDDYTFGFDRFLPYLTGESDKTPKSAEWASAICGIPAEVIKDLARRIVKGRTMLASGWSMQRQHHGEQIHWMLVTLASMVGQIGLPGGGFGLSYHYANGGSPSATGPVLPAISDGSAAVKGAAWLAAGGAASIPVARVVDMLMNPGKEFDFNGTKAIYPDTKLIYWTGGNPFAHHQNRNRMVEAFRKVETFIVHDFQWTATARHADIVLPATTSYERNDIEQIGDYALSSVLAMKKVVEPVFEARSDFDILAAVAERLGTRDAFTEGKDEMGWIKEFYDNALGQAKAKGVTMPDFETFWKGEGVVSFPISDEAKAFVRYSAFREDPLLEPLGTPTGKIEIYSKNIEKMGYDDCPAHPTWMEPVERLDGPGAKFPLHITTSHPKSRLHSQLCGTKLRDSYTVAGREPCLINEADAKARGISNGDVVRVFNDRGQILAGAVVTNAIRPGVIRVNEGGWYDPTEPTKPGSLCKYGDVNVLTVDIGTSKLAQGNCGHTAIGDVEKYAEAAPAVTVFAAPKNA

SEQ ID NO: 4336 - protein, 591 aa, Sinorhizobium meliloti 1021
MCGICGEVRFDGGSPSVTAVSIMADVLAPRGPDASGVVVRGNVGLGHRRLRILDLSDKSQQPMVDSDLGLSLVFNGCIYNFRELRLELEEKGYRFFSSGDTEVILKAWHAWGEECVSRFHGMFAFVIHERDSGRVVMARDRFGIKPLYIAEVQGALRFASALPALVKAGGVDTSIDVAALHNYMTFHAVVPPPRTILNGVRKLPPATLRVYERDGSFEDRRYWDPPYRRQAGDAAISREEWQEQLLDALRIAVKRRMVADVPVGVLLSGGVDSSLIVGLLAEAGQRGLMSFSVGFEEANGEKGDEFVYSDLIAGHFGTDHRKIFVPSADLMGALPGTIAAMSEPMVSYDNVGFYLLSKEVSKHVKVVQSGQGADEVFGGYHWYPPLMNSNDVVADYGKAFRDRSHAVLTTQLSDAWIADHDVSGDLLNEHLLREGAATPVDQALRLDSNVMLVDDPVKRVDNMTMAWGLEARVPFLDHELVELAARMPPEEKLRDGGKGILKDVARRVIPSEVIDRKKGYFPVPQLKYIAGPYLDLIRDTLRSQKARERGLFQDAYLDRLFQEPSDHITPLRGSELWQVGLLEMWLEAQGV

SEQ ID NO: 4337 - protein, 603 aa, Oryza sativa
  unsure (1)..(603): unsure at all Xaa locations
PLILLMHRVSQVPSNRYHSVDGGRDPDAPARRRRXAAEAFGCAPTPAKALEKKLLDLELPPFPAPAKKAAAKVVAAAPKKKLAGGAGGYVLEDVPHLTDYLPNLPSFPNPLQNHPAYSVVKXSEPPLFFFSDSGDLFSLFGLFQVCNXRSFCRQYFVNADDTVAKKIVVHKGSARGTHFRRAGPRQRVFFQPDEVSAAIVTCGGLCPGLNTVIRELVCGLHDMYGVTSVVGIEGGYRGFYARNTVELTPRSVNGIHKRGGTVLGTSRGGQDTGKIVDSIQDRGINQVYIIGGDGTQKGAATIHAEVQRRGLKCAVVGVPKTIDNDIAVIDRSFGFDTAVEEAQRAINAAHVEAESAENGVGVVKLMGRNSGFIAMYATLASRDVDLCLIPESPFYLEGKGGLLEFAEKRLRENGHMVIVVAEGAGQDVIARSMRLADAHDASGNKVLLDVGLWLCAKIKDHFKKKANFPITLKYIDPTYMIRAVPSNASDNVYCSLLAHSAIHGAMAGYTGFTVAPVNGRHAYIPFYRITEKQNKVVITDRMWARVLCSTNQPCFLSTEDVEKAGQDDEEPIVPLVEGENSLVKAPPLLANAGDGAALCNGAA

SEQ ID NO: 4338 - protein, 583 aa, Arabidopsis thaliana
MASQLDLIGGDYIAGISINPPTNSRVTSVYSEVQASRIDHTLPLPSVFKTPFKIIDGPPSSSAGHPEEIEKLFPNLFGQPSALLVPNQSNEVSSDQKLKIGVVLSGGQAPGGHNVICGIFGFKNLICDCIFVVGLIDYLQEYARGSSLFGFRGGPAGIMKGKYIELTSEFVYPYRNQGGFDMICSGRDKIETPEQFKQAEETVTKMDLDGLVVIGGDDSNTNACLLAEHFRAKNMKTLVIGCPKTIDGDLKSKEVPTSFGFDTACKVKMIGNVMIDARSTGKYYHFVRLMGRAASHITLECALQTHPNITIIGEEVFEKKLTLKNVTDNIVDVIYKRAENGYNYGVILVPEGLIDFIPEVQQLISELNEVLAEGNVDEEGQWKKNLKKETLEIFEFLPQTIQEQLMLERDPHGNVQVAKIETEKMLIQMVETELEKKKTEGTYEREFMGKSHFFGYEGRCGLPTNFDATYCYALGYGAGSLLQSGKTGLISSVGNLAAPVEEWTVGGTALTSLMDVERRHGKFKPVIKKAMVELEGAPFKKFASQREEWALKNRYISPGPIQFKGPGSDARNHTLMLELGAQA

SEQ ID NO: 4339 - protein, 923 aa, Mycobacterium tuberculosis H37Rv
MSFVVTAPPVLASAASDLGGIASMISEANAMAAVRTTALAPAAADEVSAAIAALFSSYARDYQTLSVQVTAFHVQFAQTLTNAGQLYAVVDVGNGVLLKTEQQVLGVINAPTQTLVGRPLIGDGTHGAPGTGQNGGAGGILWGNGGNGGSGAPGQPGGRGGDAGLFGHGGHGGVGGPGIAGAAGTAGLPGGNGANGGSGGIGGAGGAGGNGGLLFGNGGAGGQGGSGGLGGSGGTGGAGMAAGPAGGTGGIGGIGGIGGAGGVGGHGSALFGHGGINGDGGTGGMGGQGGAGGNGWAAEGITVGIGEQGGQGGDGGAGGAGGIGGSAGGIGGSQGAGGHGGDGGQGGAGGSGGVGGGGAGAGGDGGAGGIGGTGGNGSIGGAAGNGGNGGRGGAGGMATAGSDGGNGGGGGNGGVGVGSAGGAGGTGGDGGAAGAGGAPGHGYFQQPAPQGLPIGTGGTGGEGGAGGAGGDGGQGDIGFDGGRGGDGGPGGGGGAGGDGSGTFNAQANNGGDGGAGGVGGAGGTGGTGGVGADGGRGGDSGRGGDGGNAGHGGAAQFSGRGAYGGEGGSGGAGGNAGGAGTGGTAGSGGAGGFGGNGADGGNGGNGGNGGFGGINGTFGTNGAGGTGGLGTLLGGHNGNIGLNGATGGIGSTTLTNATVPLQLVNTTEPVVFISLNGGQMVPVLLDTGSTGLVMDSQFLTQNFGPVIGTGTAGYAGGLTYNYNTYSTTVDFGNGLLTLPTSVNVVTSSSPGTLGNFLSRSGAVGVLGIGPNNGFPGTSSIVTAMPGLLNNGVLIDESAGILQFGPNTLTGGITISGAPISTVAVQIDNGPLQQAPVMFDSGGINGTIPSALASLPSGGFVPAGTTISVYTSDGQTLLYSYTTTATNTPFVTSGGVMNTGHVPFAQQPIYVSYSPTAIGTTTFN

SEQ ID NO: 4340 - protein, 478 aa, Xylella fastidiosa Temecula1
MSEHYDVVVIGAGPAGYHAAIRAAQLGLKVACVDAALGKDGKPALGGTCLRVGCIPSKALLDSSRQYWNMGHLFNEHGISFKDAKMDIATMIARKDKIVKQFTGGIAMLFKANKITPYYGFAQLQPGNVVKVKQHEGKNIELKGANVILASGSDSVELPFATFDGETIVDNIGALDFTKVPKRLAVIGAGVIGLELGSVWKRLGAEVTILEAMPNFLAAVDADVAKTAAKEFKQQGLDIKLGAKVSRTEISSKNNKKEVIVTYTDASGKQTLTVDKLLVAVGRKAATKGLLADGTGVQLNERGQIVVDEHCHTGVDGVWAIGDCVRGPMLAHKGFEEGIAVAELIAGLPGHVNFETIPWVIYTEPEIAWVGKTEQELKADNIPYKAGSFPFAAVGRAVAMAEPSGFAKVLAHAETDRVLGLHLIGVNVSELVHEGVLAMEFSGSADDLARICHAHPTLSEAIHDAAMAVSKRSIHKAN

SEQ ID NO: 4341 - protein, 242 aa, Akebia trifoliata
MGRGRVQLKRIENKINRQVTFSKRRSGLLKKAYEISVLCDVEVACIVFSDKGRLYEFSTESRMERILERYERCSLAAEEIATIDPQSQGSLPLESRRLKARLDVLQKTQRRFMGEDLDSMSIKEIQNLEQQLDASLKQIRLRKNQLMYESICELQKKETALQEQNNQLGKKIKEKEKTLTQQVNWEQPNQGQNSPAFLQSQTLVSLNIGGPYQARSGEEEERVQSHTQPSTVLPPWMLGHVN

SEQ ID NO: 4342 - protein, 549 aa, Brucella suis 1330
MARDATKLEATVAKLKKHWAESAPRDMRAAFSADPGRFGRYSLCLDDLLFDWSKCRVNDETMALLKELAVAADVEGRRAAMFAGEHINNTEDRAVLHVALRDTSSKEVLVDGHNVLPDVKHVLDRMAAFADGIRSGALKGATGRKITDIVNIGIGGSDLGPVMATLALAPYHDGPRAHFVSNIDGAHIADTLSPLDPASTLIIVASKTFTTIETMTNAQTARKWVADTLGEAAVGAHFAAVSTALDKVAAFGIPEDRVFGFWDWVGGRYSVWSAIGLPVMIAVGPDNFRKFLAGAHAMDVHFRDAPLEKNLPVMLGLIGYWHRAICGYGSRAIIPYDQRLSRLPAYLQQLDMESNGKSVTLDGKPVSGPTGPVVWGEPGTNGQHAFFQLLHQGTDTIPLEFIVAAKGHEPTLDHQHEMLMANCLAQSEALMKGRTLDEARAQLQAKNLPASQVERIAPHRVFSGNRPSLTLIHDMLDPYALGRLIALYEHRVFVEAQIFGINAFDQWGVELGKELATELLPVVSGKEGASGRDASTQGLVAHLHARRKA

SEQ ID NO: 4343 - protein, 391 aa, Xylella fastidiosa Temecula1
MSTEVKVPVLPESVSDATIASWHKKAGEIVKRDENIVDLETDKVVLEVPSPVDGVLKEIKFDAGSTVTSNQVLAIIEEGSIVTAPSPAPSQVIDQKPVAVSAPAAKSNVDSLPPGARFTATTEGIDPAQIEGSGRRGAVTKEDIINFAKQNGAARASGTRLEERIPMTRIRQRIAERLMQSKNSTAMLTTFNEINLAKVSNIRKELQEEFQKAHGIKLGFMSFFVKAAANALQRFPLVNASIDGTDIIYHGYSDISIAVSTDKGLVTPVLRNVERMSFADIEHRIADYAKKARDGKLSLEELQGGTFTVTNGGTFGSLLSTPIVNPPQSAILGMHTIKERPIAENGNIVIAPMMYVALSYDHRIIDGKDSVQFLVDIKNQLEDPGRMLFGL

SEQ ID NO: 4344 - protein, 364 aa, Chlamydia muridarum
MSIEVRIPNIAESISEVTVSALLVASGDFVQENQGILEIESDKVNQLIYAPCSGRVEWSVSVGDTVAVGSVVGTICKLENQDTPSIHEQMPFSLVEQESDAQIISFPSSVRQDPPAEGKTFVPLKEIERDSSDKKESRESMSAIRKTISRRLVQALHDSAMLTTFNEVCMGPIIALRKEKQEAFVSKYGVKLGFMSFFVKAVVDSLKKYPRVNAYINGNEIVYRHYYDISIAVGTDRGLVVPVIRNCDRLSCGEIEVQLADLASRARDGKLAIHELEGGSFTITNGGVYGSLLSTPIINPPQVGILGMHKIEKRPVVKDDSIIIADMMYVAMSYDHRIIDGKEAVGFLVNVKELLEQPELLLTI

SEQ ID NO: 4345 - protein, 156 aa, Glycine max
MNKGAAGGLGGGAGSGPTAAAAAAAAQKQKTLLQRVEGDIANIVDNFNHLVNVARVNDPPVRNSQEAFMMEMRAARMVQAADSLLKLVSELKQTAIFSGFASLNDHVEERRIEFNQLAEKTDRTLSRVGEEAAASLKGLESHYSSSVQKIIQNPQP

SEQ ID NO: 4346 - protein, 499 aa, Mesorhizobium sp. BNC1
MNRFELPSSKLYIGGRWEEGSGAEIVSIFSGDGSVNRVIKGASRADGERAIERALKAQSDPAWRNLKPHERARFLHRIADGIETNAARIAFIQTRDTGKTLRETTALVASAAGTFRYFAGALESLDDTLTAPRGDYLSMSVHEPLGLVSAITPWNSPIASDAQKVAPALAAGNAVLLKPASWSPLVSLELARIVEAAGLPQGLFSVLPGAGREIGNLLVEHPAISRVSFTGGTATGRMLARQAAEKLMPISLELGGKSPTIVFADADIDLAIAGILFGVFSSSGQSCIAGSRLFVERSIYESFVDRLVAATKKLVVGDPFDERTQVAPLVHFDHRDAVAAQVAAAVEAGAEVLCGAAIPTGADYDRGAYYLPTILAGLENDDPICREEVFGPVLCVLPFDDEADVIAQSNANDYGLACGIWTRDFPKAWRTARAITTGTVWINTYKQFSISTPFGGEKDSGMDREKGREGIRAYMAQKSVYVDLTGKPHPWARWPEAGA

SEQ ID NO: 4347 - protein, 690 aa, Mycobacterium avium subsp. paratuberculosis str. k10
MEGFVLNIVLGVSMAPSSIQMVVLEGEYADGATVEEDAIDVTGADDAATASAPDRVISAILGTREGAADAGLQLSSIGVTWTDQLEAAALRDALAARRIDNVMLVSAFLAAAALAQNVGGAMGYERTAVLLVEPDTATLAVVETSDGSIPDVYKQQIRAESYGDAAGQLSAMVAGLEKLESLPGGLLLVGSGVDVAPLKQVLQTTTFLDVSVAEEPETALARGAALAAANAPLFASSTAALAYAQDPGTGAVDQYSLPDYLYVPVGPEPGDDELAYSAVGDEDAESPTVVIEKLFLPEDSEPRRRPVLLVGSGLAVVGISAVLALEIALAIGIRTTGTVALQPTPNQHLIVPTEQAPAPPPVQASAPQPKISVPEPVAAPKPLSLPVAAPLPAAPPPAAPPLPEAPPIPAAPPVVPVPVVVPPVPVPVPVRIPVPDPVSPPQLLAPPRLSVPQPVQPPVRVPQPPSPPQVGGTVPQSPPQHQTPPGEGTPPKPDSPGNYGGGHAPTPGAGGSGGSGGGHVPTPGAGGSGGGHVPTPGAGGSGGGHVPTPGAGGPGGTGGSGGGHVPTPGAGTPGGSGGGHLPIPGAGSTPGGSGGGHLPTPGAGTPGGGLGGFGGGHAPAPGGGLGGFGGGHAPAPGGGLGGFGGGHAPAPGGGLGGFGGGHAPAPGGGLGGSGGGHSGGGLGGLGGGHK

SEQ ID NO: 4348 - protein, 363 aa, Burkholderia fungorum LB400
MTSPNTTQGAADPIQSYLNQGLRNYWYPVAPSWQVGDAPVGITRLGDQIVLWRDKEGKVRALEDRCPHRGARLSLGWNLGGSVACWYHGIEVDGGGTVTKVPAVSNCPLEGQKCVKSYPVEEHAGAIFLWFGDDAHKEPAPLVLPEELVGEEYASFLCMSHWKCNYQYAIDNVMDPMHGAYLHATSHSMAEGDKQADMRVRKTETGLMFEKIGQRDVNFDWVELGETGCLWMRLAIPYKKKFGPGGNFGIIGFAVPVDEDNCQVYFWRTRKVQGWQRDAWRFMYRNRLEGLHWAVLEQDRYVLESMAPNARDHEFLYQHDVGMTRVRRMLRQRAQQHFADLDAHRAQAVSATPAAAEAGHSHA

SEQ ID NO: 4349 - protein, 278 aa, Oryza sativa
MAQAPMSTGGGAMELGGGGHESVERRRRHQHHFVLVHGLCHGAWCWYKAAAALRRAGHRATALDMAASGAHPARVDEVRTFEDYSRPLLDALAALPPAGGDGDDEERVVLVGHSQGGFSVALAAERFPERVAAVVFLTAAMPPVGRPMSATTVEHVNYVGVEFFLDSMELEQQNADIPGNPDLTLGLSLIRPTNKFTGDALMRDPGLLTKERYGSTRRVFVVVEDDRGIPVEFQRRMIAENPGVEVVDFAGADHMAMISSPAKLAELLVRIADKAHEP

SEQ ID NO: 4350 - protein, 516 aa, Nostoc punctiforme PCC 73102
MTNSDLERVTVRPTDEYNQKLVSYVHPPNWVNPQPADVYDLVVIGAGTAGLVVAAGAAGLDLGLKVALIEKHLMGGDCLNVGCVPSKTIIRSARVVGEIWDAKDLGVNIPQHNIDVDFPKVMARMRRIRADISPNDSAERFQKLGVDVFLGSGRFASKNTVEVGGKTLRFKKAVIATGARAAQLSIPGIEKAGYLTNETVFSLIQRPERLAVIGGGPIGCELAQAFRRLGSEVVLFHSGSHLLNKEDAEAAEILQKVLIREGIRVVLNSKLEEVVTVTEGKRLYFSSNSHRDSVTVDEILVGAGRSPNVENLNLEAVGVEYDKHQGVKVNDYLQTTNPKIYAAGDICMNWKFTHAADAAARIVIKNTLFSPFGIGRSKLSSLVMPWVTYTDPEIAHVGMYEHEAQKLGIEVTTIKIPFSSVDRAIADGEESGFLKIHHKKGSDEIIGATIVSSHAGEMISEVTTAMVNKLGLSKLSSVIHPYPTQAEAIKKAADAYRRTLLTSNTKKLLGFLTKLS

SEQ ID NO: 4351 - protein, 484 aa, Rhodococcus erythropolis
MQALTSSVPLVIGDQLTPSSTGATFDSINPADGSHLASVAEATAADVARAVEAAKAAARTWQRMRPAQRTRLMFRYAALIEEHKTELAQLQSRDMGKPIRESLGIDLPIMIETLEYFAGLVTKIEGRTTPAPGRFLNYTLREPIGVVGAITPWNFPAVQAVWKIAPALAMGNAIVLKPAQLAPLVPVALGELALEAGLPPGLVNVLPGRGSVAGNALVQHPSVGKVTFTGSTEVGQQIGRMAADRLITASLELGGKSALVAFGDSSPKAVAAVVFQAMYSNQGETCTAPSRLLVERPIYDEVVELVQARVEAARVGDPLDPDTEIGPLISAEQRESVHSYVVSGTEEGATLISGGDQSPTGAPEQGFYYRPTLFSGVTADMRIAREEIFGPVLSVLPFEGEEEAITLANDTVFGLAAGVFTRDVGRALRFAQTLDAGNVWINSWGVLNPASPYRGFGQSGYGSDLGQAAIESFTKEKSIWARLD

SEQ ID NO: 4352 - protein, 484 aa, Pirellula sp.
MLDFGTAGTQTLGRREIIGTAVEQRASDEQRSNIGQSKLNQRVFLWSLTSSLAGFLFGFDTVVISGAEKAIQGLWALGDFQHGLALSAALWGTVIGSLVGGWPTDKFGRKKTLLWIGILYLVSAIWSGFATDVFSFMIARFIGGLGVGISTVAAPLYISEISPPKHRGTLTGLFQFNIVFGIMVAFASNYLIGTWGNENAWRWMLAVEAIPALIFTVMCISLPSSPRWLIAVKKDQAAGMSVLKQLRPDASDEEVQRTVDEIVASLRAESDLTPAEPFWSRRLFTPISIAFLVAFFNQLSGINAVLYFSPRIFELAGMGEQAALLQSIGIGITNLIFTFVGLYLIDRLGRRTLLLIGSAGYILSLGTCAYAFQSETFSIVPACIFAFIASHAMGQGAVIWVLISEVFPNEHRAAGQSLGSFTHWIFAALLTLVFPAVVETFHPAAIFGFFCFMMVLQGLWVITMLPETKGISLEQMEAKLGIRV

SEQ ID NO: 4353 - protein, 263 aa, Zea mays
MDGFPKSVGGGGPNIPAGSHPAGGSQAAAGGGATQRTQYPYVTGNSVIALKYKDGVIMACDTGASYGSTLRYKSVERIKAVGKHSIIGASGEFSDFQEILRYLDELTLSDHMWDDGNSLGPKEIHSYLTRVMYNRRNKFDPLWNSLVLGGVKKGPKGDEKYLGMVNMIGTHFEENHVATGFGNHMAIPILRAEWRDDMTFEEAVKLVEKCLVVLLYRDRSSINKFQIAKITSEGSTIYPPYSLKTYWGFTHFENPAQGAVGSW

SEQ ID NO: 4354 - protein, 228 aa, Streptomyces avermitilis MA-4680
MPLRSAGSGKASRDAVHHPLFARSYARISVTAETRLGMGGVRDRLLAGLSGRVIEIGAGNGLNFAHYPGAVSEVVAIEPERLLRQLAVEAALRCDVPVDVVPGAAEALPVKSEAFDAAVVSLVLCSVRDVSRALGELRRVLRPGGTLRFFEHGAGGGRAMAATQRALDRTVWPRLNGGCHLTRDAVSAVREAGFELGPYRRMLLPEKGPRLPTSYCVLGTAWRPGSAD

SEQ ID NO: 4355 - protein, 169 aa, Clarkia similis
SFYQLIHQGRVIPCDFIGVVKSQQPVYLKGEVVNNHDELMSNFFAQPDALAYGKTPEELKKENVSEHLIPHKTFTGNRPSLSILLPTLDAYRIGQLLAIYEHRVAVQGFVWGINSFDQWGVELGKSLATQVRKQLHASRVKGEPVEEGFNFSTKTLLTRYLQATSDVPA

SEQ ID NO: 4356 - protein, 266 aa, Clostridium perfringens str. 13
MNKKIGFIGCGNMGSAMVLGILKSGIVCKENIIASCSRESSAERIKNELGINTTLDNKEVCNNSDIIFLAVKPYMYEKVIKEIRDCVDLNKTIVTIAAGINLSDVEKWFKKETKIVKTMPNTPALIGEAMSAICPNELVNEEELKEVMDIFNAFGKSEVLSEKDFHGFIALCGSSPAYVYMFIEAMADAAVREGISRDKAYKLAAQSVLGSAKMVLETGEHPAKLKDNVCSPGGTTIEAVLELEETGFRSSVMSAMKKCSKKSKKM

SEQ ID NO: 4357 - protein, 178 aa, Clarkia similis
SFYQLIHQGRVIPCDFIGVVKSQQPVYLKGEVVNNHDELMSNFFAQPDALAYGKTPEELKKENVSEHLIPHKTFTGNRPSLSILLPTLDAYRIGQLLAIYEHRVAVQGFVWGINSFDQWGVELGKSLATQVRKQLHASRVKGEPVEEGFNFSTKTLLTRYLQATSDVPADPSTLLPNI

SEQ ID NO: 4358 - protein, 457 aa, Mycobacterium tuberculosis H37Rv
MSFVNVAPQLVSTAAADAARIGSAINTANTAAAATTQVLAAAHDEVSTAIAALFGSHGQHYQAISAQVAAYQERFVLALSQASSTYAVAEAASATPLQNVLDAINAPVQSLTGRPLIGDGANGIDGTGQAGGNGGWLWGNGGNGGSGAPGQAGGAGGAAGLIGNGGAGGAGGQGLPFEAGANGGAGGAGGWLFGNGGAGGVGGAGGAGTTFGVAGGDGGTGGVGGHGGLIGVGGHGGDGGTGGTGGAVSLARAGTAGGAGGGPAGGIGGAGGVGGAGGAAGAVTTITHASFNDPHGVAVNPGGNIYVTNQGSNTVSVIDPVTNTVTGSITDGNGPSGVAVSPVTGLVFVTNFDSNTVSVIDPNTNTVTGSIPVGTGAYGVAVNPGGNIYVTNQFSNTVSVIDPATNTVTGSPIPVGLDPTGVAVNPVTGVVYVTNSLDDTVSVITGEPARSVCSAAI

SEQ ID NO: 4359 - protein, 270 aa, Escherichia coli K12
MKSLFKVTLLATTMAVALHAPITFAAEAAKPATAADSKAAFKNDDQKSAYALGASLGRYMENSLKEQEKLGIKLDKDQLIAGVQDAFADKSKLSDQEIEQTLQAFEARVKSSAQAKMEKDAADNEAKGKEYREKFAKEKGVKTSSTGLVYQVVEAGKGEAPKDSDTVVVNYKGTLIDGKEFDNSYTRGEPLSFRLDGVIPGWTEGLKNIKKGGKIKLVIPPELAYGKAGVPGIPPNSTLVFDVELLDVKPAPKADAKPEADAKAADSAKK

SEQ ID NO: 4360 - protein, 409 aa, Zea mays
MASQGSSVFAALEQAPEDPILGVTVAYNKDPSPMKVNLGVGAYRTEEGKPLVLNVVRRAEQMLINNPSRVKEYLPITGLAEFNKLSAKLIFGADSPAIQENRVATVQCLSGTGSLRVGGEFLARHYHERTIYIPQPTWGNHPKVFTLSGLNVRSYRYYDPATCSLHFEGLMEDLGSAPSGSIVLLHACAHNPTGVDPTIEQWEQIRQLMRSKSLLPFFDSAYQGFASGSLDKDAQSVRMFVADGGELLMAQSYAKNMGLYGERVGALSIVCRSADVAVRVESQLKLVIRPMYSNPPLHGASIVATILRDSEMFNEWTLELKAMADRIINMRQQLFNALKSRGTPGDWSHIIKQIGMFTFTGLNSEQVAFMRQEYHIYMTSDGRISMAGLSMRTVPHLADAIHAAVTQLK

SEQ ID NO: 4361 - protein, 542 aa, Zea mays
MSAAQLLRHSRKLRSLQNPVGCENFSFVRHFSSGSGSFIARENGIGKRTRGTRFSQHNQPAKQLETFSAGVNGSCTWRIASNSLTPSAASWLSGSFSCGQVVSARPFSSSADLPPHQEIGMPSLSPTMTEGNIAKWLKKEGDKVSPGEVLCEVETDKATVEMECMEEGYLAKIIHGDGAKEIKVGEVIAITVEEEGDIEKLKDYKPSSSAEPVAPAEPKAEPEPSQPKAEEKKPTQAPEAKTPKIEEASQSGDRIFASPLARKLAEDNNVPLSSVKGTGPDGRILKADIEDYLASVAKGGLRESFADPGLGYVDIPNAQIRKVTANRLLASKQTIPHYYLTVDARVDKLVQLRGELNPLQDASGGKKISINDLVIKAAALALRKVPQCNSSWMNDFIRQYHNVNINVAVQTEHGLFVPVIRDADKKGLGAIAEEVKQLAQKARDNSLKPADYEGGTFTVSNLGGPFGIKQFCAIINPPQSAILAIGSAEKRVIPGSADGQFEFGSFMSATLSCDHRVIDGAIGAEFLKAFKGYIENPTSMLL

SEQ ID NO: 4362 - protein, 1164 aa, Neurospora crassa
MSQPIERVFPIRLSILESSAFLRNVSDDLLSVVPVTQQLSNQHLSPPSSDGSRCEPLPSATDRQANPQDSSSAASSYNYTYPSSFNKGNGGDDSLLSETFEYALLADGSHGVIQKARRAFTTCDEEPIHIPGAIQSYGMLVALKLVDERVAGPSRYLPRICSENSAFVCHYQPSELLSLDSFYQVMPNFQRHLFDVQLRHIRQGYDSTKKEQEPVVFAFSFSDPDGRLIPCWCAAHYLGGDTDLFICEFELQDYSMHPLATPAMSDPGNPIDTLGSDHLDFATACSIQSKVQPAFPNPELISKGFDPSTSSVEVIGMATKIQTQFSEAATVPDLLETIVSIVKEVTRFHRVMVYQFDRDYNGTVVAELMDPKASNDVYRGLHFPASDIPPQARKLYMINKVRVLFDRSQRTSRLIGRDVSDMDVPLDLTHAYLRAMSPVHLKYLSNMGVRSSMSMSLESDGKLWGLIVCHSYGPAATRVPFSIRELSFFVGLAASTCLQKLLNSERLQAHRIIETLRGRGRPDECITSSSHELLNLFDCDCGFLVIEGEARTIGRLSSYIEAITLLKYLFFRGSRTILFSHNIGDDFKDLHFPSGFKAIAGVLYIPLSSTTDDCVVFYRKNQIREVHWAGRPSLAGKIGRLEPRNSFKKWTEVVDGTSKAWSIEHTNLAAMAQLLYGSFIQVWREKETAINDTRLKRLLLHDASHQVRNPLNAVINCLEIALEKHLDDGTKQVLTTSYTASKSLIYVIDDLLSLTGSITGSVPLLDEPFHLPNCLEEVLCPLRRLGQEKGIQLIMIPSTGPTQYVRGDPTSLQRSLSILVANAIQHTTSGQVVVKWYETAMNPENTVIHISITDTGPGFSERELDDMFQEFEQVPDEDFDEATSKPHAVRDNVLRVGVGLAFVARFVKQRNGQLKVKSTKGRGSTFTLEIPFAVSSHCSSIASRRRDASPLPVLTMPGPLTFGAGSSVPSDRSTFGTSRDSKPSPPIIRPGSSTADTSPRDFQTPSPHHYTVIVADDNMINVQILERRLTKLGHRVLVSRDGQECFNLFASNRSTVDFVLMDLNMPVVDGFASIRMIRDQEYSHPTPSRVVQCCGRTPIFAVSGMLRRGQEQQCKEAGFDGWMPKPVDMKRLVRCLAGGLDPNARRMCVYDEKRFELGGWFDAE

SEQ ID NO: 4363 - protein, 145 aa, Schizosaccharomyces pombe
TSLGALLGGIIAGALADFFGRKPVIAIASIIIIVGSIVQVTAHHLWHMIVGRFVIGWGVGIASLIIPLYLSEIAPSKIRGRLVIIYVLLITAGQVIAYGIDTAFEHVHNGWRWMVGLAMVPAAFQLFILIWLPESPRLLVKKERS

SEQ ID NO: 4364 - protein, 358 aa, Nostoc sp. PCC 7120
MKALILSGGRGTRLRPLTYTGAKQLVPVANKPILWYGIEEMVAAGITDIGIIISPETGAEVQSKTGDGKLFGANITYILQEQPAGLAHAVTVARPFLKDSPFVMYLGDNLIQQGDLSNFLQKFIQEQPDALILLREVVNPSAFGVAKVDDTGRVLQLVEKPKVPPSNLALVGVYFFSPIIHDSIARIQPSSRGELEITDAIQRLIDDKRQVLACNLYGWWLDTGKKDDLLEANRLILDTCLTTSNLGEVDAKSQIIGRVQIGVNSQIINCTIRGPVVIGNNCYLENCFIGPYSSIANNTTLIDSDLEHSVILEGAKISGIDQRIIDSVIGQRAQLTIAPRRPKALRFLIGDDCQIELT

SEQ ID NO: 4365 - protein, 108 aa, Triticum aestivum
  unsure (1)..(108): unsure at all Xaa locations
FRVIVYALMAKLESSGESYGQNGPDMVKGCLQQIPCYGRKEVLCVSLTLXTCDKGDIMEPIEXCKTCKVRCSVMGSAAEIFXIKHVCEEEGGSYTDTLDEWQFKASTG

SEQ ID NO: 4366 - protein, 332 aa, Anabaena variabilis ATCC 29413
MTKNLLEQLREMTVVVADTGDIQAIEKFTPRDATTNPSLITAAAKMPEYQEIVDQTLLQAKKDAGAGASKGQIVSLAFDRLAVSFGLKILQIIPGRVSTEVDARLSYDTEATITKARELIAQYKAAGIGPERVLIKIASTWEGIKAAEILEKEGIHCNLTLLFGLHQAIACAEAGITLISPFVGRILDWYKKETGRDSYPSAEDPGVISVTTIYNYYKKFGYTTEVMGASFRNIGEITELAGSDLLTISPGLLGELQATIGELPRKLDPAKAATLDIEKISIDKATFDKMHAADRMAYDKLDEGIKGFTKALEELETLLAERLARLEVVASH

SEQ ID NO: 4367 - protein, 430 aa, Mycobacterium avium subsp. paratuberculosis str. k10
MDSDGTIGGVTTHQLPVHSSAHHRQQRTFAQSSKLQDVLYEIRGPVHQHAARLEAEGHRILKLNIGNPAPFGFEAPDVIMRDMIQALPYAQGYSDSQGILPARRAVVTRYELVDGFPRFDVDDVYLGNGVSELITMTLQALLDNGDEVLIPSPDYPLWTASTSLAGGTPVHYLCDETQGWQPDIADLESKITERTKALVVINPNNPTGAVYSGEILSQMVDLARKHELLLLADEIYDKILYDDAKHINVASLAPDMLCLTFNGLSKAYRVAGYRAGWLAITGPKDHAGSFIEGINLLANMRLCPNVPAQHAIQVALGGHQSIEDLVLPGGRLLEQRDVAWSKLNEIPGVSCVKPAGALYAFPRLDPEVYDITDDEQLVLDLLLQEKILVTHGTGFNWPAPDHLRIVTLPWARDLAAAIERLGNFLVGYRQ

SEQ ID NO: 4368 - protein, 131 aa, Triticum aestivum
  unsure (1)..(131): unsure at all Xaa locations
MAPTVMASSATSVAPFQGLKSTAGLPVSRRSNGASSAAXHNGGRIRCMQVWPIEGIKKFETLSYLPPXSTEALLKQXDYLIRXKWVPCLELARXGXFREHKXSPGYXDGXYWTXGXAMFGALXHTGXNXVE

SEQ ID NO: 4369 - protein, 246 aa, Helicobacter pylori 26695
MKKEKHLKQEKIINMFDDIASSYDQANRLMSFGLDVKWRERACEHAFLFLENKKALRLVDVACGTGDMLVAWQKSALNCGIEFKECLGIDPSNNMLELAIKKCEELENKASFIQAQAKDLKGVENNSVDILSIAYGLRNVVERQEALKEFFRVLKPRGVLVILEFLKKDNPTWLDKISGFYTNKVLPLVGGAISKNYGAYSYLPQSIEGFLSLEGLKHELRNAGFEILRTEDSIAQISTTMLVKKN

SEQ ID NO: 4370 - protein, 474 aa, Zea mays
  unsure (1)..(474): unsure at all Xaa locations
MDMALASKASPPPWNATAAEQXIPKRDKAAANDSTYLNPQAHDSVLGIILGGGAGTRLYPLTKKRAKPAVPLGANYRLXXXPVSNCLNSNISKIYVLTQFNSASLNRHLSRAYGSNIGGYKNEGFVEVLAAQQSPDNPNWFQGTADAVRQYLWLFEEHNVMEFLILAGDHLYRMDYEKFIQAHRETNADITVAALPMDEKRATAFGLMKIDEEGRIIEFAEKPKGEQLKAMMVDTTILGLDDVRAKEMPYIASMGIYVFSKDVMLQLLREQFPEANDFGSEVIPGATSIGKRVQAYLYDGYWEDIGTIAAFYNANLGITKKPMPDFSFYDRFAPIYTQPRHLPPSKVLDADVTDSVIGEGCVIKNCKINHSVVGLRSCISEGAIIEDSLLMGADYYETEADKKLLAEKGGIPIGIGKNSCIRRAIIDKNARIGDNVKVFQTDVPTVKNINLDFSLGYYIILDMPFCPLIFNIYF

SEQ ID NO: 4371 - protein, 168 aa, Clarkia similis
SFYQLIHQGRVIPCDFIGVVKSQQPVYLKGEVVNNHDELMSNFFAQPDALAYGKTPEQLKKENVSEHLIPHKTFTGNRPSISILLPTLDAYRIGQLLAIYEHRVAVQGFVWGINSFDQWGVELGKSLATQVRKQLHASRVKGEPVEGFNFSTKTLLTRYLEATSDVPT

SEQ ID NO: 4372 - protein, 807 aa, Neurospora crassa
MPGGSWRALGCRRYLLYLPKIPGPGRAVVNTSTSTSRCGRGLLQNSSISSKIPPPQPTPIANHLPSNIPLRTLSAHAAARDDPSTHSHGNRKQGSSSFLAPHPAERLRYSEDGDGDDSNDYGSSESSWIDTGDIAEQLDHEDPLRQRLYDTLEDDTLVGVVHHRHPKRHRHSGKHVHYHESVSSSSAHSSRPSGQAGVVDKEAIRIPDAAPRTVSRAERLIASIMAGTRNPIHGLTGKPLIYFTSIFVSLGVFLFGYDQGVMSGIITGPYFKDYFNQPTSAQIGTMVAILEIGALISSLLVGRIGDIIGRRKTILYGSCIFFVGGALQTMATDMAMMMTGRIIAGLGVGMLSTIVPVYQSEISPPHNRGKLACIEFSGNIIGYTTSVWVDYFCGFLEGNISWRLPLLMQCIMGALLGLGSLIIVESPRWLLDNDHDEEGIVVIANLYGGGDIHNPRARDEFREIKMGVLLARQEGERTYSEMFKRYSRRVFIAMSAQALAQLNGINVISYYAPLVFESAGWVGHDAVLMTGFNGITYLLSTIPPWYIVDRWGRRHILLTGAVAMVLSLSAISYFLYLDTHWTPSAVVVMVMIYNAAFGYSWGPIPWLYPPEILPLKIRSKGASLSTATNWAFNFLVGEMTPILQELIHWRLYLIHAFFCAVSFVIGEYLLTATPQGIQLTEFPVYFLYPETCGVRLEDMDALFGDSTNAFGTPTVSTPSLHAEVDPLVGPGSPVPRLDIRGRPLASAAIPGLPIDPPDEVEIINKSSSNQNRGGIGGLLSRLVGRRGRGSAEGSDSGSYAPLRQGDD

SEQ ID NO: 4373 - protein, 88 aa, Oryza sativa
  unsure (1)..(88): unsure at all Xaa locations
PASSVVPTIKFLMGXGAKVILASHXGRPKGVTPKYSLKPLVPRLSELLGVDVVMANDCIGEEVQKLAATLPDGGVLLLENVGLQGGRE

SEQ ID NO: 4374 - protein, 496 aa, Zea mays
  unsure (1)..(496): unsure at all Xaa locations
MTMDPTKFRPSSSHDTTVTTTNAGAPVWNDNEALTVGPRGPILLEDYHLIEKVAHFDRERIPERVVHARGASAKGFFESTHDVTSLTCADFLRAPGVRTPVIVRFSQVIPEPGSGRTIRDARGFAVKFYTREGNWDLLGNNFPVFFIRDGIKFPDVIHAFKPNPRSHVQEYWRVFDFLSHLPESLHTFFFLFDHVGVPSDYRHMEGFGVNTYTFVSAAGKAQYVKFHWKPTCGERSILTDEEARVGGRNHSHTQDLYDSIAAEGSFPEWTLYVQVMDPAQQEQYDFDPLDDTKTWPEDLLPLRPVGRLVLDRNVDNFLNENEQLAFGPGLVVPGIYYSDDKMLQCRVFAYADTQRYRLGPNYLMLPVNAPRCGTHNNHYDGAMNLMHRDEEVDYYPSRHARRCGRAAPTPLPPRPVAGRREKATIRKPNDFKQPGERYRSWDADRQDRFVXRRFADSLGHPNVSQXLRSIWIDLLAKVDASLGMKIATRLNMKANM

SEQ ID NO: 4375 - protein, 274 aa, Pelobacter acidigallici
MEQYYMVIDVAKCQDCNNCFMGCMDEHELNEWPGYTASMQRGHRWMNIERRERGTYPRNDINYRPTPCMHCENAPCVAKGNGAVYQREDGIVLIDPEKAKGKKELLDTCPYGVMYWNEEENVAQKCTMCAHLLDDESWAPKMPRCAHNCGSFVYEFLKTTPEAMAKKVEEEGLEVIKPELGTKPRVYYKNLYRFEKNYVTAGILVQGDCFEGAKVVLKSGGKEVASAETNFFGEFKFDALDNGEYTVEIDADGKSYSDTVVIDDKSVDLGFIKL

SEQ ID NO: 4376 - protein, 169 aa, Clarkia similis
SFYQLIHQGRVIPCDFIGVVKSQQPVYLKGEVVNNHDELMSNFFAQPDALAYGKTPEQLKKENVSEHLIPHKTFTGNRPSLSILLPTLDAYRIGQLLGIYEHRVAVQGFVWGINSFDQWGVELGKSLATQVRKQLHASRVKGEPVEEGFNFSTKTLLTRYLQATSDVPA

SEQ ID NO: 4377 - protein, 536 aa, Anabaena variabilis ATCC 29413
MTDTATTPKASLNKFEKFKAEKDGLAIKSEIEKIASLGWEAMDETDRDHRLKWVGVFFRPVTPGKFMMRMRMPNGILTSDQMRVLAEVVQRYGDDGNADITTRQNIQLRGIRIEDLPHIFNKFHAVGLTSVQSGMDNIRNITGDPIAGLDADELYDTRELVQQIQDMLTNKGEGNREFSNLPRKFNIAIAGGRDNSVHAEINDLAFVPAFKEGIGDWVLGGGEESSTHQKVFGFNVLVGGFFSAKRCEAAIPLNAWVTAEEVVALCRAVLEVYRDNGLRANRLKSRLMWLIDEWGIDKFRAEVEQRLGKSLLYAAPKDEIDWEKRDHIGVYKQKQEGLNYVGLHIPVGRLYAEDMFELARIADVYGSGEIRMTVEQNIIIPNITDSRLKTLLTDPLLERFSLDPGALTRSLVSCTGAQFCNFALIETKNRALEMIKGLEAELTFTRPVRIHWTGCPNSCGQPQVADIGLMGTKARKNGKAVEGVDIYMGGKVGKDAHLGSCVQKGIPCEDLHLVLRDLLITNFGAKPRQEALVSSQ

SEQ ID NO: 4378 - protein, 144 aa, Glycine max
  unsure (1)..(144): unsure at all Xaa locations
FAFLISYDNPGILAGLGCSASSQAKRGRGLELSRIQAHRGPDWSQLHQYGDHYLAHHRLAIXDPAHGEHPLFNADYTESVPVNGEIYNHEELMXQLPNDTFQTGCDXDVIAHLHEEHGDYYMDMLDGIFSAALLDSRDSMHIVA

SEQ ID NO: 4379 - protein, 438 aa, Schizosaccharomyces pombe
MSAESLLHNTFSTEQIEVLENEYAAHNYHPLPVCFSKAKGAKVWDPEGREYLDFLSAYSAVNQGHCHPKIIEALVEQAQRVTLSSRAFYNDKFGPFAKYITEYFGYEMVIPMNTGAEAVETACKLARLWGYKAKKIPTDEAIILSCVDNFHGRTMGIISMSTDPDARDNYGPYLPNVGPKISGADRVLRYNNIEDLKYYLDTFGPKVAAFLVEPIQGEAGVMVPDDGYLEEAYKLCKAHNVLFIADEVQTGVARTGKMLCIEHSNVKPDVVILGKAISGGVYPVSAVLSSREIMLNFEPGTHGSTYGGNPLGAAVSIAALEVVKEEKLTERAAVLGEKFRTALIECKSPIVQKVRGRGLLNAVVIDESKTNGRTAWDLCLIMRSRGVLAKPTHGNIIRFSPPLVITEEDLMKGIEVIKKSLNDLPTIDMTPYAEKPIH

SEQ ID NO: 4380 - protein, 325 aa, Chloroflexus aurantiacus
MVFTAPGQPLEYRDLPVPTPQPEEVLIRVEACAVCRTDLHIIDGELPAPNLPLVPGHQIVGTIERLGERVTRWTVGQRVGVPWLGWTCGECRFCRDGRENLCDQAQFTGYTRPGGFAEYTVADQRFCFALPTDYDATAVAPLLCAGLIGYRALRLAGTGERLGIYGFGAAAHLMTQVARWQGREVFAFTRPGDTEGQRFARELGAVWAGSSTELPPVPLDAAIIFAPVGDLVPYALRAVEKGGVVVCGGIHMSQIPAFAYELLWGERVLRSVANLTREDGEAFLQIAPQIPVRTTVQTFPLTELNTALNALRQGKLQGAAVIQIS

SEQ ID NO: 4381 - protein, 306 aa, Mycobacterium tuberculosis H37Rv
MSRPEVLTPFTAIVPAAGLGTRFLPATKTVPKELLPVVDTPGIELVAAEAAAAGAERLVIVTSEGKDGVVAHFVEDLVLEGTLEARGKIAMLAKVRRAPALIKVESVVQAEPLGLGHAIGCVEPTLSPDEDAVAVLLPDDLVLPTGVLETMSKVRASRGGTVLCAIEVAREEISAYGVFDVEPVPDGDYTDDPNVLKVRGMVEKPKAETAPSRYAAAGRYVLDRAIFDALRRIDQGAGGEVQLTDAIALLIAEGHPVHVVVHQGSRHDLGNPGGYLKAAVDFALDRDDYGPDLRRWLVARLGLTEQ

SEQ ID NO: 4382 - protein, 654 aa, Prochlorococcus marinus subsp. marinus str. CCMP1375
MCGIAGLICKDRQILALDEIGSKMNTSLLNRGPDDSGIWIDNDIGILLSHTRLSVNDLSKAGHQPMLSSSNRFVLTFNGEIYNHWDLRQELEITQGSQNWKSHSDTETLIQAIECWGVYKTLTKLIGMFAFGIFDRKENKFYLARDRFGEKPIYWGITGVGTRKVLIFGSDLKALKSYPEFNNTINRESMGLFINYNYVPDPHSIYENIWKLEAGKILEIDVTDDDYSKIYPMSWWQLEDTIKNVDGREIENESEAINLLKQELIKSVKSQSKADVKITSFLSGGIDSSLVSALLQETSNSQINTFTIGFENKRFDEATYARRISNYLGSNHSELIFTNEDALNIVPKINEYYSEPFADPAAIPTLLLCNAAKSQGYTVALSGDGADELFGGYNRYTMAPKIWKYFGIIPNFMKPMLINSVNKLSTQSIDLIGSILKIRQFRERLYKITDKISYSNSLEDLYYRLIREWSDVSSITEYKYNQPFTPISNERLNQSIHELKLDPVTFMMVIDCLSYLPGNNQVKLDRASMAVGLETRSPFLDKNVGELIWRLPINLKIKNNCGKYILKEILADYIPKKLFERPKAGFATPINEWIKGPLREWAEEMLNSNKVRDEGFLNPEITTKLLNEHIQGVKDNSKKLWSALIWESWIDKNI

SEQ ID NO: 4383 - protein, 496 aa, Triticum aestivum
MARKMLKDGEAPLVADDGGTYDYDLFVIGAGSGGVRGSRTAAGFGAKVAICELPFHPISSEWLGGHGGTCVIRGCVPKKILVYGASFRGEFDDAKQFGWEINGDINYNWKKLLENKTQEIVRLNGVYKRILGGSGVTMIEGAGSIVDAHTVEVTQPDGSKQRHTTKHILIATGSRATLVDIPGKELAITSDEALSLEELPKRAVILGGGYIAVEFASIWKGLGAEVDLFYRKELPLRGFDDEMRTVVASNLEGRGIRLHPGTNLTELSKTADGIKVVTDKGDELIADVVLFATGRAPNSNRLNLEAVGVEVDQIGAIKVDEYSRTSVPSIWAVGDVTNRINLTPVALMEATCFAKTVFGGQTVKPDYKDVPCAVFCIPPLSVVGLSEQEALAEAKNDLLVYTSSFNPMKNSISKRVEKSTMKLVVDADTDKVLGAAMCGPDAAEIMQGIAVALKAGATKATFDSTVGIHPSAAEEFVTMRTLTRRVSPPSKPKTNL

SEQ ID NO: 4384 - protein, 311 aa, Zea mays
MAASVALSSGHRMPAVGLGVWRMEKADIRGLIHTALRVGYRHLDCAADYQNEAEVGDALAEAFQTGLVKREDLFITTKLWNSDHGHVLEACKDSLKKLQLDYLDLYLIHFPVATRHTGVGTTSSALGDDGVLDIDTTISLETTWHAMEELVSMGLVRSIGISNYDIFLTRDCLAYAKIKPAVNQIETHPYFQRDSLVKFCQKHGICVTAHTPLGGSTANAEWFGTVSCLDDPVIKSLADKYGKTPAQLVLRWGLQRDTVVIPKTSKVERLQENFDVFGFDISGEDMERMKAIDRKYRTNQPAKFWGIDLYA

SEQ ID NO: 4385 - protein, 399 aa, Xanthomonas campestris pv. campestris
MSNRTANSHDGERALSLATLAIHGGQSPDPSTGAVMPPIYATSTYAQSSPGEHQGFEYSRTHNPTRFAYERCVAVLEGGTRGFAFASGMAATSTVMELLDAGSHVVATDDLYGGSFRLFERVRRRTAGLDFSFVDLTDPAAFEAAIRPTTKMVWIETPTNPMLKLVDIAAIAAIARKYGLLVVVDNTFASPMLQRPLELGADLVVHSATKYLNGHSDMVGGIAVVGDNAELAEQMAFLQNSIGGVQGPFDSFLALRGLKTLPLRMRAHCENALALAQWLETHPAIEKVIYPGLTSHPQHALAKQQMSGFGGIVSIVLKGGFEAAKRFCEKTELFTLAESLGGVESLVNHPAVMTHASIPVARREKLGISDALVRLSVGVEDVGDLRGDLERALEASQSP

SEQ ID NO: 4386 - protein, 476 aa, Mycobacterium avium subsp. paratuberculosis str. k10
MRDDDSANRWSGVREAPTAPSRQLTGAVVIIALVAAISGMLYGYDTGVISWALLQLTQDFNITEGWQQVIAASILLGAVAGALTCSWLSDLRGRRGTLLMLAVVFIVGALWCADAADSVMLSLGRLVLGFAVGGATQTAPMYVAELAPPAYRGRLVLCFQIAIGVGILTATLVGAGGSISWRGPIGLACVPAAIMLWLLLRLPESPRWLVKKDNRDAARAVLEHVRPEGYDVAAELDEATELARVERTAATRGWRGLRDAWVRPALVLGCGIAVFTQLSGIEMIIYYSPTILTDDGVYRSVALQVSVCLGAAYLIAQLVGLAIIDRVGRRRLTLIMVPGAAVSLFALGLLFITSDSGRDVIPYIMICLIAFMLFNGGGLQLMGWLTGSETYPLAVRPAATALQSATLWGTNLVITLTMLSLIKAIGVGPLMWLYALFNVAAWIFVFFRMPDLTGKTLEEIEYQLSEGKFRPSDFGR

SEQ ID NO: 4387 - protein, 775 aa, Nostoc punctiforme
MSQPENTTTQATALTNHDRKPIHIPGSIQPHGILLALSTQLEIVQVSNNTQVYLCKAPEDLLGRPLSYLLEPQPVEIVKQCLVKKVGSANAFKVLINTLYGEIYFDAIAHRTEEAVILELEPTDSEFEVSFLNFHSFASEAIAKMQRTSNLGEFLHLVAQEVQKIISFDRVMVYQFDESEAGSVVAEVKREDLSPYLGLHYPATDIPAQARELYTRCFLRFLPDLTAEPVKLVPTENPTTHQHLDLSYCLLRSFDWCCAEYHQNMGVKALLVISLIQEQKLWGLISCHHQTPKYISYEVRKMCEFLGQIVSSELAHKISSSEWDYKVKLKSLQSEFLESISQADNFIDALIKPEIRLLDFVSASGAAVCLDNEINLVGTTPNIDEVRALIEWADTQVTDNLFSTDSLPKLYPEALIFKDTASGLLLLRISKVRRYYILWFRPEVIQTVHWAGNPQESIKAEGDGSYTLSPRKSFEQWQETVRLTSLPWKGCELESAIALSNAIVGIVLSKADELAKINLELERSNQELASFAYAASHDLKEPLRGIYNFSTVLLEDYAQVLDDDGIECLQTVVSLSVRMETLINALLRLSQLGQAHLREQATDLNELLNQVIDVFRASRQDSGLVDIRIPRPLPTIQCDRVLVNEVFSNLLGNAFKYNDKAEQWVEIGYLSQEEGQGVGSRGQGAGGAGEAIIHQSPIPNAPCPIFYIRDNGIGIPQHHLETIFRLFKRLHSQEKYGGGAGAGLAIVKKIVELHNGQIWVESTLGVGSIFYFTLE

SEQ ID NO: 4388 - protein, 151 aa, Zea mays
  unsure (1)..(151): unsure at all Xaa locations
MSKAGGGPGSAPGPTAAAAAAAVQKQKXLLQKADADVSSLVDNFSSLINIARVNDPPVRNSQEAFQMEMRAARMVHSADSLLKLVSELKRTAIFSGLASLNENVDRRIEVLGQQAEGTERMLERIGQEAAASLKELEAHYYSSVVRSPSYD

SEQ ID NO: 4389 - protein, 69 aa, Glycine max
  unsure (1)..(69): unsure at all Xaa locations
CRNATSAVPAGASMVAPFTGLKYIAVLPTRNTILDFAYIASNGXRAQCMHVWPPIGKKKVETLSYLPDL

SEQ ID NO: 4390 - protein, 545 aa, Vigna unguiculata
MALPHSISALSTTLTLSSSVNKPTTNKVNSFPFLSNKGTQFFTKQTRPRSGRSPLLTPARVAAPPSTVETDQSFPETEKGETEEEFNEESSSSKFTWRDHWYPVSLIEDLNPLLPTPFQLLGREIVRTTSPLPKWVAFDDKCPHRLAPLSEGRIDEDGKLQCSYHGWSFDGCGSCVKIPQAASEGPEARAVGSPKACATRFPTLVSQGLLFVWPDENGWEKASASKPPMLPDEFEKPEFATVNIQRDLFYGYDTLMENVSDPSHIEFAHHKVTGRRDRAKPLPFKMDARGSWGFSGANEGNPKISAKFVAPCYYMNKIEIDTKLPVVGDQKWVVWICSFNVPMAPGKTRSIFSARNFFQFTVPGPAWWQVVPRWYEHWTSNKVYDGDMIVLQGQEKIFLSKTKEGDDINKQYTSITFTPTQADRFVLAFRNWLRRHGNGQPEWFSSIPDLPLPSTVLSKREMLDRLEQHTLKCSSCKEAYEGFQIWQKVLIGATVIFCATSGIPADVQFRVLLAGLAIVSAALAFTLNQLQKNFEFVDYVHAEIE

SEQ ID NO: 4391 - protein, 333 aa, Acinetobacter sp. ADP1
MTDLPTTMRHIEISQSGDPDVLHIVETSLPKIKIDEILIEVKAFGINRPDVLQRKGLYPMPKDVTPIPGLEVAGIVTAIGENVSQFKVGDRVCALTNGGGYAEYCAVPETQTLPIPSNLSYIEAAAIPETYFTVWANLFDIGQLSVGETALIHGGASGIGTTALTLCHAMGIKTFCTVGSDDKVDALNKITTAINYKKHNFEEVILEQTQNKGVDVILDIVGGKYFQQNMNTLKRDGRLVILGFMGGRYAKEFDLQQLILKRAKVTGSTMRARTDQEKSEITQSLRQHVWPLLSEGKSLPLIYKSFSFEDISKAHTCMEESEHIGKIVITLTE

SEQ ID NO: 4392 - protein, 727 aa, Anabaena variabilis ATCC 29413
MTESTKTLCPYCGVGCGLEVTPPAQLNKATNRDSQGNPIWRVRGDKAHPSSQGMVCVKGATIAESLDKNRLHYPMVRDSLDQEFRRVSWDEAFDLITKRIQTVRLTQGAEAICMYGSGQFQTEDYYIAQKLMKGCLGSNNFDANSRLCMSSAVSGYIQSFGADGPPCCYEDLELTDCAFLIGTNTAECHPIVFNRLEKYHRKNHQVKMVVVDPRRTPTAEAADLHLAIKPGTDIDLLNGIAHLLMRWNMIDVGFIDDCTSNFSAYAEVIRHYSPEVVARQCGITVEDLEIAARYWGESQRVLSLWSMGVNQSSEGTAKVRTIINLHLMTGQVGKPGMGPFSLTGQPNAMGGREAGGLAHLLPGYRLVKNPQHRAEVEGFWGFPSGQISPHPGLTAWDMITGLEDGNVGLLWIAATNPAVSMPDLERTKKALLRSPFTIYQDAYHPTETTAYAHVLLPAAQWGEKTGVMTNSERRVTLCQAFRQPPREAKPDWEIFAEVGRRLGFEDKFAFGNSDQVYAEFAQLTKGRPCDMSGISHQKLQAQGPTQWPYPEMGNGDKNKRLYTDLRFHTPDGRARFGAYYSQGLAEPPDPAYPFVLTTGRLYGHWHTQTRTGRIEKIRAMHPEPFIEIHPRDAAKLGIIDHQVVEVRSRRGSAKFPAKVTKAISPGTVFVPMHWGTLWAEDAEANALTHSESCPDSLQPELKACAVQLIPISVEITAENYQLQSSQW

SEQ ID NO: 4393 - protein, 464 aa, Rhodospirillum rubrum
MTVVDRGTAHWQKLDADHHWHPFTNTKALNQKGARVIVRGEGVYLWDSEGNRILDGMAGLWCVNLGYGRTELAEAAAAQFATLPFYNTFFQTTHTPAVELAHLIASVTPGDLNHVFFASSGSEAVDTALRMARAYWVVAGKPSKTWVIGRKNAYHGSTLAGASLSGMSGMWKYGAPLVPDIAHIAQPYWYGEADAAETDPEAFGLARARLLEAKILELGAENVAAFIGEPIQGAGGVIVPPASYWPEIERICRKYDVLLIADEVICGFGRTGSWFGSQTFGITPDIMTMAKGLSSGYLPISAVAVGNRVADELINGGGEFTHGFTYSGHPVSAAVAKRTIEILRDEKIIERVHDDIGPYFQERLRTLEDHPLVGKVDGVGLIAGIALVASKSPKRFFEKGDEVGLICRDHCFAEGLVMRAVGSRMVCAPPLIISRDEVDELVRLARRCFDLTLRDVGPLIETAK

SEQ ID NO: 4394 - protein, 589 aa, Brassica napus
MSLPETKTQTLLDAWDFQGRPADRSKTGGWASAAMILCIEAVERLTTLGIGVNLVTYLTGTMHLGNATAANTVTNFLGTSFMLCLLGGFIADTFLGRYLTIAIFAAIQATGVSILTLSTIIPGLRPPRCDPTTSSHCVQANGIQLTVLYLALYLTALGTGGVKASVSGFGSDQFDDTEPKERSQMTYFFNRFFFCINVGSLMAVTVLVYIQDDVGRKWGYGICALAIVLSLSIFLAGTNRYRFKKLIGSPMTQVGTVLVAAWRNRRLELPSDPSFLYDLDDVIAAEGSMKSKQKLPHTNQFRSLDKAAIKDQEMAMTQNVYNKWTLSTVTDIEEVKQIVRMLPIWATCILFWTVHAQLTTLSVAQSETMDRHIGSFEIPPAAMAVFYIGGLLLTTAVYDRLAIPLCKKLFNYPHGLRPLQRIGLGLLLAAMGMAVAALVEIKRLRTAHAHGPTVKTLPLGFSLLIPQYLIVGIGEALIYTGQLDFFLRECPKGMKTMSTGLLLSTLALGFFFSSVLVTIVEKVTDKAHPWIADDLNKGRLYNFYWLVAVIVALNFLVFLVFSKWYVYKEKRLADLGIELEDEPDIPMGH

SEQ ID NO: 4395 - protein, 942 aa, Schizosaccharomyces pombe
MSGETVHGISCYSVVANTEDTYNQTLDFYQKLGFKKVASFGTSDSDNARVCNESLREDWMHVAGNNSAESVTIKFRLVPGELSLSPAAEDSEWRGQKSSLVFYYPNLLDLLKQLSADAIKYQAFPNEKKPDEVYVEDPLGNLIGFSDRYNPFAHANLKKSEESGAASNLESGLATPVVETLKKATTSDKPAGVKKKIAVMTSGGDSPGMNAVVRAVARIAIHRGCDAFAIYEGYEGLVQGGDMIKQLQWGDVRGWLAEGGTLIGTARCMAFRERPGRLRAAKNLISAGIDSIIVCGGDGSLTGADIFRSDWPGLVKELEDTKAITPEQAKLYRHLTIVGLVGSIDNDMSSTDVTIGAFSSLHRICEAVDSISSTAISHSRAFIVEVMGRHCGWLAVLAALATGADFVFIPERPAEVGKWQDELCNSLSSVRKLGKRKSIVIVAEGAIDSELNHISPEDIKNLLVERLHLDTRVTTLGHVQRGGIPCAYDRMLATLQGVDAVDAVLASTPDTPSPMIAINGNKINRKPLMEAVKLTHEVADAIEKKQFAHAMELRDPEFADYLHTWEGTTFIEDESHFVPKDERMRVAIIHVGAPAGGMNSATRAAVRYCLNRGHTPLAIDNGFSGFLRHDSIHELSWIDVDEWCIRGGSEIGTNRDTPDLDMGFTAFKFQQHKIDALIIIGGFEAFTALSQLESARVNYPSFRIPMAIIPATISNNVPGTEFSLGCDTCLNAVMEYCDTIKQSASASRRRVFVCEVQGGRSGYIATVGGLITGASAIYTPEDGISLDMLRKDIDHLKATFALEAGRNRAGQLILRNECASKVYTTEVIGNIISEEAHKRFSARTAVPGHVQQGGNPTPMDRARAARLAMRAIRFFETCRANDLGNDPSSAVVIGIRGTGVSFSSVADVENNETEIEMRRPKNAWWRDMHNLVNILAGKTFAD

SEQ ID NO: 4396 - protein, 1161 aa, Sinorhizobium meliloti 1021
MDRELDPPIVAIGASAGGVQALQTFFDLMPSDTGATFVVIVHLDPHARSELANILAARTRMPVTQVEDQARLESNHVYVIAPNRRLKVADGTIAALPFEEPHALRAPIDLFFRSLAEEHGSEFAVILTGAGADGAIGVKAVKEAGGIVLVQDPEEAEYASMPRNAIDTEVADFVLPIRELPHRVAELLARRDQLPSHPFRADDDDMIGRILAHVRGRTGHDFSQYKRATILRRIGRRAQIARRETFADYYNYLRENPEEAQALFSDFLISVTTFFRDPSAFEALAERVIPQLFDGKEVADAIRVWIPGCATGEETYTMGMLLIEEAARRDLSPEIQVFGSDLDEQALRIAREGRYPSTIESDLSEERLRRFFQREGDHYRVRRELRDVVLFASHSLLRDPPFSHLDMISCRNLLIYLDRQLQQQVCNTFHYALNAGGFLFLGSSESADHPGLFLTVDREARIYRAVAGGGARRPMVLPALLGPQKPEMKSTIIRTPAAGHVSDAAVHRQMLEKIAPPSMLVDESHHAIHLSENAGRFLRPSGGPVSTDATDLVREEFRFDVRAALHRAFERDEPTLSMPILADLDGQPHRVYLQVKPVVQGTERTRHALVLFIEGEAIDKTQEVVLDTLDGRPTIDEAIRRLQEELQLAQNRLRLTSEESATATEELRAANEELQSMNEEYRSTAEELETSKEELQSINEELQTVNNELKLKLESISRAHSDLQNLMAATDIATLFLDPSLRIKRFTPRLTEIFNVTPSDEGRPITDFTHYLKYKRLSDDARAVLETLRPLEHEVKSRNDGWYLVRMRPYRTVEDKIDGVVVTFLDISERRHAEEAAKESGRRLEQEMRLVELSRSPIFVWDFDDGIMQWNRGSEELYGYSREEAIGRRKEELLKTAVPGSSFDRLRRTLSEKGRWSGELNHTTKDGRVLTVESQIELVPFGERRLVLESTRDITDRKRWERRGQLLLNELSHRVKNTLAVVQSLARQTLRTTRSSEDFVERFEGRLAALASAHKLLVDSEWRGAELDALARGQLDAYAGSDRRRLQIEGEPVTLPPDLATPFGLVLHELATNAAKYGAFSTGNGQIRLSWKLGNNGRRLGVIWQERGGPPVEPPSEQGFGGVLIEKSLPGSTVHRDFQPDGVVCTIDIELPEIRPDGAEN

SEQ ID NO: 4397 - protein, 408 aa, Erwinia carotovora subsp. atroseptica SCRI1043
MSSVDILVPDLPESVADATVATWHKKPGDSVQRDEVLVEIETDKVVLEVPASEAGILDAVLEEEGATVMSRQLLGRIRRGDSSGKETGEKSQSKESTPAQRHTAGLEEEHSDALSPAIRRLIAEHNLDASAIKGSGVGGRITREDVDKHLAAQKKDSAKAAKPEAPAASPAPALGARSEKRVPMTRLRKRVAERLLEAKNSTAMLTTFNEINMQPIMDLRKQYGEAFEKRHGVRLGFMSFYIKAVVEALKRYPEVNASIDGEDVVYHNYFDVSIAVSTPRGLVTPVLRDVDALGMADIEKRIKELAVKGRDGKLTVEELLGGNFTITNGGVFGSLMSTPIINPPQSAILGMHAIKDRPMAVDGQVVILPMMYLALSYDHRLVDGRESVGFLVTVKEMLEDPARLLLDV

SEQ ID NO: 4398 - protein, 391 aa, Hevea brasiliensis
MEFPETNNNPIITLSFLLCMLSLAYASETCDFPAIFNFGDSNSDTGGKAAAFYPLNPPYGETFFHRSTGRYSDGRLIIDFIAESFNLPYLSPYLSSLGSNFKHGADFATAGSTIKLPTTIIPAHGGFSPFYLDVQYSQFRQFIPRSQFIRETGGIFAELVPEEYYFEKALYTFDIGQNDLTEGFLNLTVEEVNATVPDLVNSFSANVKKIYDLGARTFWIHNTGPIGCLSFILTYFPWAEKDSAGCAKAYNEVAQHFNHKLKEIVAQLRKDLPLATFVHVDIYSVKYSLFSEPEKHGFEFPLITCCGYGGKYNFSVTAPCGDTVTADDGTKIVVGSCACPSVRVNWDGAHYTEAANEYFFDQISTGAFSDPPVPLNMACHKTESLRTLASV

SEQ ID NO: 4399 - protein, 427 aa, Agrobacterium tumefaciens str. C58
MSSNNPGFSTLAVHAGAQPDPTTGARATPIYQTTAYAFRDADHAAALFGLKEFGNIYTRIMNPTQAVLEERVAALEGGTAALAVASGHAAQLLVFHTLMQSGDNFVAARQLYGGSINQFGHAFKGFDWQVRWADAADPASFEAQINERTRAIFIESLANPGGTFVDIAAIADVAHRHGLPLIVDNTMASPYLLRPLEHGADIVLHSLTKFLGGHGNSMGGIIVDGGTFDWSATDRFPALSQPRPEYSGVLLHQTFGNFAFAIACRVLGLRDLGPAISPFNAFLILTGIETLPLRVQRHSDNALAVAKWLKAHPKVGWVHYAGLEDSDNHAIQQHYSPKGAGSVFTFGVKGGYAAGKALVEGLQLFSHLANIGDTRSLVIHPASTTHAQLTPEQQTAAGAGPDVVRLSIGIEDVKDIIADLEQSFAKV

SEQ ID NO: 4400 - protein, 119 aa, Brassica rapa subsp. pekinensis
LMWYFLNVIFNILNKKIYNYFPYPYFVSVIHLFVGVVYCLVSWSVGLPKRAPINSDILKVLIPVAVCHAIGHVTSNVSFAAVAVSFTHTIKALEPFFNASASQFLLGQPIPITLWVSLA

SEQ ID NO: 4401 - protein, 155 aa, Escherichia coli
MKVAVLGAAGGIGQALALLLKTQLPSGSELSLYDIAPVTPGVAVDLSHIPTAVKIKGFSGEDATPALEGADVVLISAGVARKPGMDRSDLFNVNAGIVKNLVQQVSKTCPKACIGIITNPVNTTVAIAAEVLKKAGVYDKNKLFGVTTLDIIRSN

SEQ ID NO: 4402 - protein, 155 aa, Escherichia coli
MKVAVLGAAGGIGQALALLLKTQLPSGSELSLYDIAPVTPGVAVDLSHIPTAVKIKGFSGEDATPALEGADVVLISAGVARKPGMDRSDLFNVNAGIVKNLVQQVAKTCPKACIGIITNPVNTTVAIAAEVLKKAGVYDKNKLFGVTTLDIIRSN

SEQ ID NO: 4403 - protein, 424 aa, Treponema denticola ATCC 35405
MSKVLSIILGGGKGTRLYPLTMHRSKPAVPFGGKHRIIDIPLSNCINSGFRNIYIVTQFNSASLHIHIAKAYTFDTFSNGFVEILAAEQTFDNTGWYEGTADSIRKNLHHFRHQNPSHYLILAGDQLYRMDLKKFLNFHKESESDITVACTPVTREDASGFGIMKVNSDSLITEFMEKPGADKNIDDWKIPEKSLIKPNDPNKQYLASMGIYIFSAKIMEECLDSDHTDFGKEVIPAAINGKYKVSAFPHNGYWSDIGTIKSFYDATLDLTEITPKFDFYDAERPIYTHNRNLPPSKVNYAHLSRSICSEGCVITNSTINHSVIGVRSIIETGSFVEDSICMGADYYETHEEKETRLKEGSPGLGIGNHCRIRSAIIDKNVRIGNNVSIGMDQTPPDGDYGFYHVVGGIYVIVKNSVIPDNTSI

SEQ ID NO: 4404 - protein, 404 aa, Buchnera aphidicola str. Sg (Schizaphis graminum)
MIGKIKLITRDSFNKLILPVYNPAFFIPVKGKGSRLWDQKGKEYIDFSGGIAVTSLGHCHPVLNKVLRQQSKKLWHISNIFTNEPALRLADKLISSSFASRVFFANSGAEANEAAFKLARYYSSKIYNLKKNKIISFYNSFHGRTFFTVSVGGQAKYSDFFGPKPPAIMHAKFNEINSVKSIIDDNTCAVVMELIQGEGGIVPADVAFVREIRDLCYKYNALLIFDEIQTGIGRTSKLYAYEHYEVQPDILTIAKSLGSGFPISATLTTNGIASVIKPGIHGTTYGGNPLACSIAESVVNIVNTKKFLLGVEKKSKKIISELNIINKRFGLFTEIRGKGLLIGIVLRPELSEEIHNILNALFLEGVIVLTAGKNVIRLAPSLIISKRDIVEGMKRFYCALEKCL

SEQ ID NO: 4405 - protein, 254 aa, Arabidopsis thaliana
MEKKLPRRLEGKVAIVTASTQGIGFGITERFGLEGASVVVSSRKQANVDEAVAKLKSKGIDAYGIVCHVSNAQHRRNLVEKTVQKYGKIDIVVCNAAANPSTDPILSSKEAVLDKLWEINVKSSILLLQDMAPHLEKGSSVIFITSIAGFSPQGAMAMYGVTKTALLGLTKALAAEMAPDTRVNAVAPGFVPTHFASFITGSSEVREGIEEKTLLNRLGTTGDMAAAAAFLASDDSSYITGETLVVAGGMPSRL

SEQ ID NO: 4406 - protein, 168 aa, Rumex obtusifolius
MDAEVEYRCFVGGLAWATDDQSLERAFSNYGQVLESKIINDRETGRSRGFGFVTFSSEQAMRDAIEGMNGQDLDGRNITVNEAQSRGSGGGGGGYRGGGGGGYGGRREGGYNRGGGGGYGGGGGGYGGGGGGYGGGGGGYGGGRREGGYGGGGGDRYARGNSDSDWRN

SEQ ID NO: 4407 - protein, 392 aa, Bacillus cereus ATCC 14579
MKLFQPSEIVTSLPTQFFASLVAKVNKVVAAGHDVINLGQGNPDQPTPQHIVKALQDAAEKTIHHKYPPFRGHESLKEAVATFYKREYGVELNPKTEVAILFGGKAGLVELPICFTNPGDTILVPDPGYPDYLSGVALAKAHFERMPLIAENNFLPDYTNIDASIAERAKLMFLNYPNNPTGATASKDFFDETIYFANKHNILVVHDFAYGAIGFDGQKPVSFLQADGAKDIGIEIYTLSKTFNMAGWRIAFAVGNESVIETINLLQDHMYVSIFGAVQDAAREALLSSQSCVIDLVNSYESRRNALISACHSIGWNVDIPTGSFFAWLPVPKGYTSEQFSDILLEKAHVAVAPGVGFGEHGEGYVRVGLLHTEDRLREAINRIDKLNFFKK

SEQ ID NO: 4408 - protein, 431 aa, Escherichia coli
SKIVKIIGREIIDSRGNPTVEAEVHLEGGFVGMAAAPSGASTGSREALELRDGDKSRFLGKGVTKAVAAVNGPIAQALIGKDAKDQAGIDKIMIDLDGTENKSKFGANAILAVSLANAKAAAAAKGMPLYEHIAELNGTPGKYSMPVPMMNIINGGEHADNNVDIQEFMIQPVGAKTVKEAIRMGSEVFHHLAKVLKAKGMNTAVGDEGGYAPNLGSNAEALAVIAEAVKAAGYELGKDITLAMDCAASEFYKDGKYVLAGEGNKAFTSEEFTHFLEELTKQYPIVSIEDGLDESDWDGFAYQTKVLGDKIQLVGDDLFVTNTKILKEGIEKGIANSILIKFNQIGSLTETLAAIKMAKDAGYTAVISHRSGETEDATIADLAVGTAAGQIKTGSMSRSDRVAKYNQLIRIEEALGEKAPYNGRKEIKGQA

SEQ ID NO: 4409 - protein, 372 aa, Hordeum vulgare
MTVDRKGAQAAAAAAATSAPFEIPALQPGRKKRPRRSRDGPNSVSETIKRWKEVNQQLEHDPQGAKRARKPPAKGSKKGCMQGKGGPENTQCGFRGVRQRTWGKWVAEIREPNRVSRLWLGTFPTAEVAAQAYDEAARAMYGPLARTNFPVQDAQAAPAVAVPVATEGVVRGSSASCESTTTSNHSDVASSSHNKQRQIQAPEISSRSDLLESTQSVEYSQQQSVPDAVSSIAMSTSEEDVYEPLEPISNLPDGEADCFDIEELLKLMEADPVEVDPVTVGSWNEFQDAGANARGSWNEFQCARANTGVSWNANAGMEMGQQEPLYLDGLDQGMLEGMLHSDYPFPVWISEDRPMHNPAFHDAEMSEFFEGL

SEQ ID NO: 4410 - protein, 249 aa, Vitis aestivalis
MAPKEKVAGVKPSANAKEVHFRGVRKRPWGRYAAEIRDPGKKSRVWLGTFDTAEEAAKAYDSAAREFRGAKAKTNFPLVSENLNNNNQSPSQSSTVESSSREGFSPALMVDSSPLDLNLLHGGGVGVGVGVGVGAAAGYATAMRFPFQHHQFQVSSPSPAAGIVPTGGLPAANHLFYFDAMLRTGRVNQDFQRLRFDRAASDFRAALTGGVQSDSDSSSVVDLNHNDLKPRARVLIDLDLNRPPPPEIA

SEQ ID NO: 4411 - protein, 220 aa, Vitis aestivalis
MAPRDKPTGVTAGATGNKEIRYRGVRKRPWGRYAAEIRDPGKKSRVWLGTFDTAEEAARAYDAAAREFRGAKAKTNFPSPTDLAAAAATTANRSPSQSSTVESSSREALSPGAIAGPPALDLNLSHPAAAGQFSAVRYPAVGVFPIAQPLFFFEPFSRPEKPKTHRDMFDLDRAVADFHPAIAGSVHSDSDSSSVVDFNYHDRSTRLLNLDLNHPPAEVA

SEQ ID NO: 4412 - protein, 78 aa, Oryza sativa
MGLWTLLEGFLLLANALAILNEDRFLGPRGWSMSEVSGNGQTKSLKGQIVGLIYATQFLRMPLIALNVLIIVVKLVSG

SEQ ID NO: 4413 - protein, 527 aa, Clarkia similis
VEFDNIFLDYSRQQASPDTISKLYKLADAAHLKQKIDRMYNGDHINTTENRSVLHVALRAPRNSSICSDGKNVVPDVWNVLDKIKDFSDRVRNGSWIGATGKELKDVIAVGIGGSFLGPLFVHTALQTDPEASKNARGRELRFLANVDPIDVARNISGLNPETTLVVVVSKTFTTAETMLNARTLREWISSALGPSAVAKHMVAVSTNLPLVEKFGIDPNNAFAFWDWVGGRYSVCSAVGVLPLSLQYGFAVVEKFLQGAHSIDQHFSSAPFEKNIPVLLGLLSVWNVSFLGYPARAILPYSQALEKLAPHIQQVSMESNGKGVSIDGLPLPFESGEIDFGEPGTNGQHSFYQLIHQGRVIPCDFIGVVKSQQPVYLKGEVVNNHDELMSNFFAQPDALAYGKTPEELKKENVSEHLIPHKTFTGNRPSLSILLPTLDAYRIGQLLAIYEHRVAVQGFVWGINSFDQWGVELGKSLATQVRKQLHASRVKGEPVEEGFNFSTKTLLTRYLQATSDVPADPSTLLPNI

SEQ ID NO: 4414 - protein, 526 aa, Clarkia similis
VEFDNIFLDYSRQQASPDTISKLYKLADAAHLKQKIDRMYNGDHINTTENRSVLHVALRAPRNSAICSDGKNVVPDVWNVLDKIKDFSDRVRNGSWIGATGKKLKDVIAVGIGGSFLGPLFVHTALQTDPESSKNARGRELRFLANVDPIDVARNISGLNPETTLVVVVSKTFTTAETMLNARTLREWISSALGPSAVAKHMVAVSTNLPLVEKFGIDPNNAFAFWDWVGGRYSVCSAVGVLPLSLQYGFAVVEKFLQGAHSIDQHFSSAPFEKNVPVLLGLLSVWNVSFLGYPARAILPYSQALEKLAPHIQQVSMESNGKGVSIDGLPLPFESGEIDFGEPGTNGQHSFYQLIHQGRVIPCDFIGVVKSQQPVYLKGEVVNNHDELMSNFFAQPDALAYGKTPEQLKKENVSEHLIPHKTFTGNRPSISILLPTLDAYRIGQLLAIYEHRVAVQGFVWGINSFDQWGVELGKSLATQVRKQLHASRVKGEPVEGFNFSTKTLLTRYLEATSDVPTDPSTLLPNI

SEQ ID NO: 4415 - protein, 396 aa, Leptospira interrogans serovar lai str. 56601
MELPRLENVDLSGKRVFLRVDFNVPVENGKVTDKTRIEKTLPTIELLIKKGARIIIASHLGRPKGQVNPEFSLAPVVETFQSLVKSKVYFSKTVIGEDAIKLSKELKNGEILVIENVRFHKEEEENDPGFSKKLSALADIYVNDAFGAAHRAHSSTEGIARLLPAYAGLLMHKEILELSALLHKPARPFVAIIGGSKVSTKIKVLTNLFDKVNHLLIGGGMAYTFLKSRAIPIGNSLVEKEFEVQAFQLIEKAGVAGIDLQLPVDHIIGDQFNEKAKTKSVDKMGILDGWMGMDIGSKTVSNYEKIIKNAGTIFWNGPMGVFEMDKFASGTMAIAKAVAKSKAKTVVGGGDSIAAINKAGVADKITHISTGGGASLEFMEGRKLPGVEALKKKTSE

SEQ ID NO: 4416 - protein, 526 aa, Clarkia similis
VEFDNIFLDYSRQQASPDTISKLYKLADAAHLKQKIDRMYNGDHINTTENRSVLHVALRAPRNSAICSDGKNVVPDVWNVLDKIKDFSDRVRNGSWIGATGKKLKDVIAVGIGGSFLGPLFVHTALQTDPESSKNARGRVLRFLANVDPIDVARNISGLNPETTLVVVVSKTFTTAETMLNARTLREWISSALGPSAVAKHMVAVSTNLPLVEKFGIDPNNAFAFWDWVGGRYSVCSAVGVLPLSLQYGFAVVEKFLQGAHSIDQHFSSAPFEKNVPVLLGLLSVWNVSFLGYPARAILPYSQALEKLAPHIQQVSMESNGKGVSIDGLPLPFESGEIDFGEPGTNGQHSFYQLIHQGRVIPCDFIGVVKSQQPVYLKGEVVNNHDELMSNFFAQPDALAYGKTPEQLKKENVSEHLIPHKTFTGNRPSISILLPTLDAYRIGQLLAIYEHRVAVQGFVWGINSFDQWGVELGKSLATQVRKQLHASRVKGEPVEGFNFSTKTLLTRYLEATSDVPTDPSTLLPNI

SEQ ID NO: 4417 - protein, 341 aa, Streptomyces avermitilis MA-4680
MRIGVLTSGGDCPGLNAVIRSVVHRAVVDHGDEVIGFRDGWKGLLECDYLKLDLDAVSGILARGGTILGSSRVQPAHLRDGVERARGHVAELGLDAIIPIGGEGTLKAARLLSDAGLPIVGVPKTIDNDIAVTDVTFGFDTAVGVATEALDRLKTTAESHQRVLIVEVMGRHTGWIALHSGMAAGAHAIVVPERPFDIEELAAKVGERFEAGKRFAIVVAAEGAKPRAGSMDFDEGKKDVYGHERFAGIARQLSLELEERLGKEARPVILGHVQRGGTPTAYDRVLATRFGWHAVEAVHRGEFGKMTALRGTDIVMVSLAEAVETLKTVPEERYAEAECVL

SEQ ID NO: 4418 - protein, 511 aa, Pseudomonas putida KT2440
MTSTPKPLVLIILDGFGHSDIPEHNAIFAANKPVYDRLCATQPHGLISGSGMDVGLPDGQMGNSEVGHMNLGAGRVVYQDFTRVTKAIRDGEFFENPVLTGAVDKAVGAGKAVHILGLLSDGGVHSHQDHLVAMAELAAQRGAEKIYLHAFLDGRDTPPRSAQSSIELLDATFAKLGKGRIASLIGRYYAMDRDNRWDRVSAAYNLIVDSAAEYTADTALAGLEAAYARDESDEFVKATRIGEAVKVEDGDAVIFMNFRADRARELSRAFVEPDFTEFARARLPKMAAYIGLTQYSAKIPAPAAFAPSSLNNVLGEYLAKNGKTQLRIAETEKYAHVTFFFSGGREEPFEGEERILIPSPKVATYDLQPEMSAPEVTDRIVEAIEQQRFDVIVVNYANGDMVGHTGVFEAAVKAVEALDTCVGRIVDALDKVGGEALITADHGNVEQMEDECTGQAHTAHTTEPVPFIYVGKRNVKVREGGVLADVAPTMLKLLGLEKPVEMTGTSILVDA

SEQ ID NO: 4419 - protein, 586 aa, Glycine max
MEKGSMENNEKHVTENDPKIDYRGWKAMPFIIGNETFEKLGAIGTLANLLVYLTTVFNLKNITATNIINIFNGSTNFATFIGAFLSDTYFGRYKTIGFCTFTSFLGLLVIQLTAVFKNLHPPHCGKEMKTCKGPTAGQMAFLVSGFGLLLIGAAGVRPCNLAFGADQFNPNTDSGKKGINSFFNWYFFTFTFAQMVSLTLIVYVQSNVSWAIGLGIPAALMLISCVVYFMGSKIYVKVEPSGSPIAGIVQVFVVAVKKRSIKLPAEHPMLSLFNYVPPMSVNSKLPYTFQFRLLDKAAIVTPKDKIKPDGSAADPWNLCSIQQVEEAKCVVRVLPIWFAAIVYHLVIVQMHTLLVFQALQSDRRLGSSNFKIPGASFNVFLMLSMTLWLPIYDRIVVPFSLSNTPEKSGGITLLQSDGIGIFISALCMIVAGVVEEHRRSLALTNPIGVQPRKGAISSMSGLWLIPQLSLAGLSESFTAVGQVEFYYKQFPENMRSIAGSLFYCGMAGSSYLSTLLISIVHNTSEKSATGNWLPEDLNKGRLDFFYYMIAALEIMNLGYFLLCSKWYKYKEIGSSDLELNQVPKHI

SEQ ID NO: 4420 - protein, 233 aa, Streptococcus pyogenes M1 GAS
MDIFGEFLGTALLVLLGNGVVAGVVLPKTKTHASGWIVIATGWGIAVAVAVFISGKVAPAHLNPAVSLAFAMSGTIAWSTAIAYSLAQLLGAMVGSTLVFLQFRPHYLAAESQADILGTFATGPAIRDTSSNLLSEIFGTFVLMLGILAFGLYDMPAGLGTLCVGTLVIGIGLSLGGTTGYAINPARDLGPRLVHAILPLNNKGDSDWSYAWIPVVGPIIGAVLAVLLFQVMS

SEQ ID NO: 4421 - protein, 753 aa, Escherichia coli
MSQHNEKNPHQHQSPLHDSSEAKPGMDSLAPEDGSHRPAAEPTPPGAQPTAPGSLKAPDTRNEKLNSLEDVRKGSENYALTTNQGVRIADDQNSLRAGSRGPTLLEDFILREKITHFDHERIPERIVNARGSAAHGYFQPYKSLSDITKADFLSDPNKITPVFVRFSTVQGGAGSADTVRDIRGFATKFYTEEGIFDLVGNNTPIFFIQDAHKFPDFVHAVKPEPHWAIPQGQSAHDTFWDYVSLQPETLHNVMWAMSDRGIPRSYRTMEGFGIHTFRLINAEGKATFVRFHWKPLAGKASLVWDEAQKLTGRDPDFHRRELWEAIEAGDFPEYELGFQLIPEEDEFKFDFDLLDPTKLIPEELVPVQRVGKMVLNRNPDNFFAENEQAAFHPGHIVPGLDFTNDPLLQGRLFSYTDTQISRLGGPNFHEIPINRPTCPYHNFQRDGMHRMGIDTNPANYEPNSINDNWPRETPPGPKRGGFESYQERVEGNKVRERSPSFGEYYSHPRLFWLSQTPFEQRHIVDGFSFELSKVVRPYIRERVVDQLAHIDLTLAQAVAKNLGIELTDDQLNITPPPDVNGLKKDPSLSLYAIPDGDVKGRVVAILLNDEVRSADLLAILKALKAKGVHAKLLYSRMGEVTADDGTVLPIAATFAGAPSLTVDAVIVPCGNIADIADNGDANYYLMEAYKHLKPIALAGDARKFKATIKIADQGEEGIVEADSADGSFMDELLTLMAAHRVWSRIPKIDKIPA

SEQ ID NO: 4422 - protein, 284 aa, Zea mays
MAGAEVANGVHDGALDLEEGRGGGVDGAGCESSEQDGAGRRPMFSVPFVQKILAEALGTYFLIFAGCAAVAVNLRTGGTVTFPGICAVWGLAVMVMVYSVGHISGAHLNPAVSLAFATCGRFPWRQVPAYAAAQVTGATAASLTLRLLFGSAREHFFGTVPAGSDAQALVGEFIISFNLMFVVSGVATDNRAIGELAGLAVGATVLLNVLFAGPISGASMNPARTLGPALVVGRYAGIWVYFAGPICGTVAGAWAYNLIRFTDKPLREITQTSSFLRSVRRSSS

SEQ ID NO: 4423 - protein, 447 aa, Oryza sativa
MQRAAAASRATAWSTARHGAARVTASASFSGGGGIVAGAALPLRVRGGQLMSLPLLSGGRAVTARVAAAEAPLPADDADAAAGRERGALAETAQLGAMIVAWYLLNIYFNIYNKQVFLPPQEPSPSSSSPSLNPISHGESQVLQPLPFPYTITAFQLAFGSFVIFLMWALKLHPAPRISISQLAKIAPLAAGHMLGTVFTNMSLSKVAVSFTHTIKASEPFFTVLLSAFFLGEVGDTIQWVPVNRFRDEIGAEFKFVFELQTPSLLVLGSLVPIVGGVALASLTELSFNWIGFWSAMASNLLYQSRNVLSKKLLGGEEEALDDINLFSILTILSFLLSLPLMLFSEGVKFSPGYLRSTGLNLQELCVRAALAGFCFHGYQKLSYLILARVSPVTHSVANCVKRVVVIVASVLFFRTPISPVNALGTGVALGGVFLYSRLKRTKPKNA

SEQ ID NO: 4424 - protein, 490 aa, Pseudomonas putida KT2440
MARFGTQKLYIDGAYVDAGSDATFEAINPATGEVLAHVQRATEADVEKAVESAERGQKVWAAMTAMQRSRILRRAVDILRERNDELAMLETLDTGKSYSETRYVDIVTGADVLEYYAGLVPAIEGEQIPLRESSFVYTRREPLGVTVGIGAWNYPIQIALWKSAPALAAGNAMIFKPSEVTSLTTLKLAEIYTEAGLPNGVFNVLTGSGREVGTWLTEHPRIEKVSFTGGTTTGKKVMASASSSSLKEVTMELGGKSPLIICADADLDKAADIAMMANFYSSGQVCTNGTRVFIPAEMKAAFEAKIAERVARIRVGNPEDENTNFGPLVSFQHMESVLGYIAKGKEEGARVLCGGERLTAGDFAKGAFVAPTVFTDCTDDMTIVKEEIFGPVMSILTYETEEEVIRRANDTDYGLAAGVCTNDITRAHRIIHKLEAGICWINAWGESPAEMPVGGYKQSGVGRENGVSSLAQYTRIKSVQVELGGYNSVF

SEQ ID NO: 4425 - protein, 300 aa, Zea mays
MAVDLMSCGGGGAYEHLAFQEAAAAGLRSLELLASSLSPCAAGRAESPPLGQIADQAVSRFRRVINLLDRTGHARFRRAPAAAAKPIGMTETEAAPPPASGRQAVAVEPAQKTALTLDFAKPASATAPAVSATSTSFLSSVTAGGEASKGCSLAAVSSGKPPLPKRKLPPCAAAVPHHHQHQAHHPHPAERCHCSSKKKRARQGMLSRRTVRVPAAAAGSQPPHPHAPASSDIPADDYSWRKYGQKPIKGSPYPRGYYRCSSAKGCPARKHVERAADDPATLVVTYEGDHRHAAAAGHAP

SEQ ID NO: 4426 - protein, 534 aa, Triticum aestivum
  unsure (1)..(534): unsure at all Xaa locations
MPTANVRAAQPSADRRLSTLVRHLLPSSPRTSAATATSADSSLQPFPTMASPSVFAGIAQGPEDPILGVTVAYNKDPSPVKVNLGVGAYRTEEGKPLVLNVVKRAEQMLIHNESRVKEYLPITGLADFNKLSAKLIFGADSPAIQENRVATVQCLSGTGSLRVGGEFLARHYHERTIYIPQPTWGNHPKVFTLAGLTARSYRYYDPATRGLDFQGLLEDLSSAPSGAIVLLHACAHNPTGVDPTLEQWEQIRQLMRSKALLPFFDSAYQGFASGSLDKDAQSVRMFVADGGELLMAQSYAKNMGLYGERVGALSIVCGSADIAVKVESQLKLVIRPMYSNPPLHGASIVATILKDSAMFDEWTVELKAMADSIISMREQLFDALKIRETPGDWSHIIKQIGMFTFTGLNSEQVAFMRQEYHIYMTSDGRISMAXGLSSRTVPHLAYARHMAVSSLEIMISVHPPRTIVSSIVRTQFLAEVQPKGVYSVMNSWISQCVLMRVVVGYGLVHSVFRTMVLAEAQRSTSVVLIVLLQR

SEQ ID NO: 4427 - protein, 465 aa, Desulfovibrio desulfuricans G20
MAPQFCTTPVPVPPVHTGYRHIATPLPVPESLALLEEMRACEPRSVDCQPPLVWHGAQGVQVYDPYGNIWLDFTSGVLVTNIGHCQPEMVQAARAELDAHRFFSYCFATEPRIRLARRLVDMLQPHIGTACKAFIMSTGSEATENALKLARAHGRSLHPEKNVIVSFDRAFHGRTLGAQQMGGYPAAKSWIGNLDPAFVQVPFPDGLHCTDTSFNLFSRRLAQLGIAPQRVAGVIMESYQGGGASFAPEEYVRELRSFCSRHEALLIMDEVQSGFGRTGRLFAFEHYGIAPDLVCLGKAVSGGLPVSAVAGRADVLDMHDPGSMTSTHGGNPVACASAAANLEVLLRDGLTEAAAATGHILRQGLEGLRQRHAGHIMAIHGRGMVQGIHVGRTEPDGTPCPDGALAFDVTERAFRKGLLLFAPVGTGGATIKICPPLIMQPDAVLEGIDVLTQCFDEALSAETDR

SEQ ID NO: 4428 - protein, 186 aa, Zea mays
MMRETYMDVLPPVDHIAASRSGGWFPGAARLWTAAENKQFERALAGLDLCRPDWEKVARAIPGRTVREVVSHFKSLQVDVQQIESGLVPMPVYGAGAGSFTLQWDGCYGPADSRHNGYRFGSGGCGRRHHGRTPEQDRKKGVPWTEEEHRLFLLGLKKYGKGDWRNISRNYVQTRTPTQVASHAQK

SEQ ID NO: 4429 - protein, 494 aa, Exiguobacterium sp. 255-15
MQQHTKSSLNTDFTKIFINGQWRKGASDSNMTNTNPFTGETLFEISAANNDDLDDAYQSAKVAQKEWAKVPALKRQGLIEEFLKVMYEEKETIVNWLIKESGSTRIKAEGEFLASVLIVKEAATFPLRMHGEIRPSVVPGKENRIYRKALGVIGVISPWNFPFHLAVRSIATAIAIGNAVVVKPATDTPVSGGLIFASLFEKAGLPKGVLNVIVGRGSEIGDSIVEHPVPRLISFTGSTEVGRHIGELAGKHLKKTALELGGNNVFVVLDDADLDRAVESAVYSKFYHQGQICMSTNRILVAQSIHDEFVEKYVARVKELQFGDPSNGRTQVGPLINQSQVDRIMEEIEKTKAAGATVRVGGEADGNVIAPTVVTGVTNDMPLAKNEIFGPVAVIIPFKDDAEALELANSLPYGLSGAVHGSSIERATEFALQVETGMIHINDQSVNDEPHMPFGGEKDSGLGRFNGEWVLEEFSTVQWLSVMHERRQYKPFFE

SEQ ID NO: 4430 - protein, 403 aa, Nostoc punctiforme PCC 73102
MVYQPASGARDLLPLDVEKKRWIEDRLQQVFHRWGYHRIITSTLERMDTLMAGEAIQRQMVIQLQNGEDDELGLRPELTASIARTVVTRMANATYPQRLYYNANVFRRTWESRHNRQQEFYQAGVELLGAGGLLANAEVLLLVADCLAALGLRQWHLILGEAGITRSLLSAFPANLQDKVRSAIAHLDRITIDTLPLSDKLRDRAQIIMDLRGPSADVLQKVSSLDLDEEQREAVNNLKSLVELLESEKKFPLILDLSLIQTIDYYTGIVFEVVNDTESQARVLGRGGRYDQLLGLYHPQRENIPGIGFGLSIEDLYQVLLSTQQLPQVTPASNYLVVPETGSANAAAFAYAQKLRDSTDLVRVEIDLGGRDAEAIRQYARDRSIAQIAWIKADSSPKIESLR

SEQ ID NO: 4431 - protein, 416 aa, Saccharomyces cerevisiae
  unsure (1)..(416): unsure at all Xaa locations
XSKYSLAPVAKELQSLLGKDVTFLNDCVGPEVEAAVKASAPGSVILLENLRYHIEEEGSRKVDGQKVKASKEDVQKFRHELSSLADVYINDAFGTAHRAHSSMVGFDLPQRAAGFLLEKELKYFGKALENPTRPFLAILGGAKVADKIQLIDNLLDKVDSIIIGGGMAFTFKKVLENTEIGDSIFDKAGAEIVPKLMEKAKAKGVEVVLPVDFIIADAFSADANTKTVTDKEGIPAGWQGLDNGPESRKLFAATVAKAKTIVWNGPPGVFEFEKFAAGTKALLDEVVKSSAAGNTVIIGGGDTATVAKKYGVTDKISHVSTGGGASLELLEGKELPGVAFLSEKKSLSSKLSVQDLDLKDKRVFIRVDFNVPLDGKKITSNQRIVAALPTIKYVLEHHPRYVVLASHLGRPNGERN

SEQ ID NO: 4432 - protein, 259 aa, Oryza sativa (japonica cultivar-group)
MISPDAARNVVGIIGNVISFGLFLAPVPTFWRICKRKDVEEFKADPYLATLLNCMLWVFYGIPVVHPNSILVVTINGIGLLVEGTYLLIFFLYSPNKKRLRMCAVLGVELVFMLAVILGVLLGAHTHEKRSMIVGILCVFFGSIMYFSPLTIMGKVIKTKSVEYMPFFLSLVCFLNGVCWTAYALIRFDIYVTIPNGLGALFGAIQLILYACYYRTTPKKTKAAKDVEMPSVVVSGTGAAAAAGGGNTGGGSVSVTVER

SEQ ID NO: 4433 - protein, 190 aa, Marsilea quadrifolia
DEHGEVVAEIRKSDLEPYLGLHYPATDIPQASRFLFMKNRVRMICDCRSNPVRVIQDKNLRQPLSLAASTLRAPHGCHSQYMANMGSIASLVMAVIVNDNEEETSNRNQQPKMRKLWGLVVCHHTTPRAVPFQLRSACEFLMQVFGLQLNMELELAAQMREKHILRTQTLLCDMLLRDAPIGIVSESPNI

SEQ ID NO: 4434 - protein, 154 aa, Oryza sativa (japonica cultivar-group)
MKQSRSWPCDATAAAPDRRRKRGHRRALLQVLQGAAAAAATSHLIGTATGNGDKVVDKVVADLSALVIKDNSGVGGEGTTVMAPPATATKAKNRCEACRKKVGLLGFPCRCGGMFCGAHRHAGAHACSFDYKAAGREVIARQNPLVVAPKINKI

SEQ ID NO: 4435 - protein, 516 aa, Clarkia similis
RQQASPDTINKLYKLAEAAHLKQKIDRMNNGDHINSTENRSVLHVALRAPRNSVICSDGKNVVPDVWNVLDKIKDFSERVRNGSWVGATGKELKDVIAVGIGGSFLGPLFVHTALQTDPEASKNARGRELRFLANVDPIDAARNISGLNPETTLVVVVSKTFTTAETMLNARTLREWISSALGVSAVAKHMVAVSTNLPLVEKFGIDPNNAFAFWDWVGGRYSVCSAVGVLPLSLQYSFAVVEKFLQGAHSIDQHFSSAPFEKNIPVLLGLLSVWNVSFLGCPARAILPYSQALEKLAPHIQQVSMESNGKGVSIDGLPLPFESGEIDFGEPGTNGQHSFYQLIHQGRVIPCDFIGVVKSQQPVYLKGEVVNNHDELMSNFFAQPDALAYGKTPEQLKKENVSEHLIPHKTFTGNRPSLSILLPTLDAYRIGQLLGIYEHRVAVQGFVWGINSFDQWGVELGKSLATQVRKQLHASRVKGEPVEEGFNFSTKTLLTRYLQATSDVPADPSTLLPNI

SEQ ID NO: 4436 - protein, 527 aa, Clarkia similis
VEFDNIFLDYSRQQASPDTINKLYKLAEAAHLKQKIDRMNNGDHINSTENRSVLHVALRAPRNSVICSDGKNVVPDVWNVLDKIKDFSERVRNGSWVGATGKELKDVIAVGIGGSFLGPLFVHTALQTDPEASKNARGRELRFLANVDPIDAARNISGLNPETTLVVVVSKTFTTAETMLNARTLREWISSALGVSAVAKHMVAVSTNLPLVEKFGIDPNNAFAFWDWVGGRYSVCSAVGVLPLSLQYSFAVVEKFLQGAHSIDQHFSSAPFEKNIPVLLGLLSVWNVSFLGCPARAILPYSQALEKLAPHIQQVSMESNGKGVSIDGLPLPFESGEIDFGEPGTNGQHSFYQLIHQGRVIPCDFIGVVKSQQPVYLKGEVVNNHDELMSNFFAQPDALAYGKTPEQLKKENVSEHLIPHKTFTGNRPSLSILLPTLDAYRIGQLLGIYEHRVAVQGFVWGINSFDQWGVELGKSLATQVRKQLHASRVKGEPVEEGFNFSTKTLLTRYLQATSDVPADPSTLLPNI

SEQ ID NO: 4437 - protein, 569 aa, Pseudomonas sp. K-62
MQELNEVGLSVAGMTCPSCTRHVEDALLAVPGVTRAAVDYPSNKAQVTGNRLDVSALVAAVGALGYGATPTDEFESKERSVEQPGLLGKAAQWLSGERAVEKPAGQLHVAIIGTGGAAVAAALKAAENGARFTLIERGTIGGTCVNVGCVPSKIMIRAAHIAHLRRESPFDVGLSATPQLFLRDRLLAQQQARVDELRHAKYESILESNPSINLVRGSARFKDGQTLIVEAAEGDTREVAFDRCLIATGASAAIPPLPGLAGTPYWTSTEALVSERIPKRLAVIGASVVALELAQAFARLGSEVTVLARRTLFASDDPAIGEAVTAAFRAEGITVLTQTQASAVTYCDRQFILTTAQGELKVDQLLVATGRTPNTASLNLERAGVTFDSQHRILIDQGMRTSASNIYAAGDCTDQPQYVYVAAAAGTRAGINMTGGDVKLDLDAMPAVVFTDPQVATVGYSEAEAQRIGLQTESRTLTLDNVPRALANFDTRGFIKLVAEAGSGRILGVQAVTPEAGEIIQTAAIAIRARMTVQDLANQLFPYLTMVQGLKLVAQTFSKDVTQLSCCAG

SEQ ID NO: 4438 - protein, 501 aa, Cytophaga sp. KUC-1
MSNTIQRPEFKAKYDNYINGKFTAPVKGEYFDVLSPIDGKVFTKAAHSGKEDLELAVDAAYEAFKTWGKTSVTERSILLNKIAQKIEDNLEYIATVETIDNGKPIRETLAADIPLAIDHFRYFAGVIRAEESSIAELDSQTVSIALSEPLGVVAQIIPWNFPILMAVWKIAPALAAGNTIVLKPAESTPISILVLMELIGDILPPGVLNIVNGFGAELGRPLVTNKKVAKAAFTGSTTTGRLVMQYATENIIPVTLELGGKSPNIFFPSVADHDDDFFDKAIEGAVLFALNQGEICTCPSRLLIHEDIYEKFIARVIERTEAIIAGNPLDKSTMIGAQTSLVQKEKIMSYIKLGKEEGAELLTGGDENHLGGDLEGGYYIKPTLFKGHNKMRIFQEEIFGPVLAVTTFKTTEEAIEIANDTMYGLGAGVWTRDAHEIYQVPRAIQSGRVWINQYHSYPAGAPFGGYKQSGIGRENHKMMLGQYRQTKNMLISYDKKKLGFF

SEQ ID NO: 4439 - protein, 753 aa, Escherichia coli
MSQHNEKNPHQHQSPLHDSSEAKPGMDSLAPEDGSHRPAAEPTPPGAQPTAPGSLKAPDTRNEKLNSLEDVRKGSENYALTTNQGVRIADDQNSLRAGSRGPTLLEDFILREKITHFDHERIPERIVAARGSAAHGYFQPYKSLSDITKADFLSDPNKITPVFVRFSTVQGGAGSADTVRDIRGFATKFYTEEGIFDLVGNNTPIFFIQDAHKFPDFVHAVKPEPHWAIPQGQSAHDTFWDYVSLQPETLHNVMWAMSDRGIPRSYRTMEGFGIHTFRLINAEGKATFVRFHWKPLAGKASLVWDEAQKLTGRDPDFHRRELWEAIEAGDFPEYELGFQLIPEEDEFKFDFDLLDPTKLIPEELVPVQRVGKMVLNRNPDNFFAENEQAAFHPGHIVPGLDFTNDPLLQGRLFSYTDTQISRLGGPNFHEIPINRPTCPYHNFQRDGMHRMGIDTNPANYEPNSINDNWPRETPPGPKRGGFESYQERVEGNKVRERSPSFGEYYSHPRLFWLSQTPFEQRHIVDGFSFELSKVVRPYIRERVVDQLAHIDLTLAQAVAKNLGIELTDDQLNITPPPDVNGLKKDPSLSLYAIPDGDVKGRVVAILLNDEVRSADLLAILKALKAKGVHAKLLYSRMGEVTADDGTVLPIAATFAGAPSLTVDAVIVPCGNIADIADNGDANYYLMEAYKHLKPIALAGDARKFKATIKIADQGEEGIVEADSADGSFMDELLTLMAAHRVWSRIPKIDKIPA

SEQ ID NO: 4440 - protein, 523 aa, Rhodospirillum rubrum
MTSQMPPFRRPRPVVLCILDGWGHRDDPTDNAIALANTPTWDRLMATCPHSLIATSGADVGLPAGQMGNSEVGHMNIGAGRVVMQDLPRIDAALADGSVAHFPALVRFIDALRASGGTAHLLGLLSPGGVHSHQDHIAKLARVIAAAGVPVKIHAFLDGRDTPPRSALGFLETFAAAAGPEAPIATVSGRYYAMDRDKRFDRVRLAYDVLVSGKGESAADAASAVSQFYDSKDKGDEFVLPTAIAGYDGMKDGDGVFMVNYRSDRAREITQALLDPTFDGFERQPPHFAGALAMTEYSTAHNAFMDVLFGPESLNNILGQVVSEAGMTQLRIAETEKYAHVTFFFNGGRETSFPGEERILIPSPKVATYDLQPEMSAPELTDRLVEVIDAGRFDVIIVNYANGDMVGHSGILEAAIKAVEAVDGCLGRVEEAVVRAGGTMLVTADHGNAELMRDPVTGEPHTAHTTGRVDLLLVNGPEGASLADGRLADLSPTLLALIGLPQPAEMTGKTLVAKAAVAVGASH

SEQ ID NO: 4441 - protein, 246 aa, Triticum aestivum
MEFLGLLALAIAAVVGVVAGEDSTWSNGRATFYGGNDASGTMGGACGYGNMFSAGYGTNTAALSTALFNNGQSCGACFEIRCAGSGSCLPGSAVVTATNLCPANYALPNNEGGWCNPPQSHFDLAEPMFTKIAQARAGVVPVQYRRVVCVKTGGIRFTITGHSYFNLVLITNVAGAGDLTAVYVKSPSTGWLTMSHNWGANWQNGAMLNGQPLSFRVTTSDGRTITSNNVAPSGWSFGQTYAGSQF

SEQ ID NO: 4442 - protein, 285 aa, Pseudomonas tolaasii
MTTALQQPSLSSQCMAEFLGTALLIFFGTGCVAALKVAGASFGLWEISIIWGVGVSMAIYLSAGISGAHLNPAVSIALCIFADFEKRKLPFYILAQVAGAFCSAALVYTLYSNLFFDYEQTHHMVRGSQASLELASVFSTYPHALLSTAQAFLVEVVITAILMGVIMALTDDNNGLPRGPLAPLLIGLLIAVIGSAMGPLTGFAMNPARDFGPKLMTFFAGWGEMAFTGGRDIPYFLVPIFAPIVGACLGAAAYRGLIARHLPSAAPAIDEETPDTAVNGNTRIS

SEQ ID NO: 4443 - protein, 501 aa, Clarkia unguiculata
MASPALISETEAWKDLKAHLEGIKMTHLRELMGDTERCQSMMVEFDNIFLDYSRQQASPDTISKLYKLADAAYLKQKIDRMYNGDHINSTENRSVLHVALRAPRNSAICSDGKNVVPDVWNVLDKIKDFSDRVRNGSWIGATGKELKDVIAVGIGGSFLGPLFVHTALQTDPEASKNARGRELRFLANVDPIDVARNISGLNPETTLVVVVSKTFTTAETMLNARTLREWISSALGPSAVAKHMVAVSTNLPLVEKFGIDPNNAFAFWDWVGGRYSVCSAVGVLPLSLQYGFAVVEKFLQGAHSIDQHFSSAPFEKNIPVLLGLLSVWNVSFLGYPARAILPYSQALEKLAPHIQQVSMESNGKGVSIDGLPLPFESGEIDFGEPGTNGQHSFYQLIHQGRVIPCDFIGVMKSQQPVYLKGEVVNNHDELMSNFFAQPDALTYGKTPEQLKKENVSEHLIPHKTFTGNRPSISILLPTLDAYRIGQLLAIYEHRVAVQGFV

SEQ ID NO: 4444 - protein, 400 aa, Mesorhizobium loti MAFF303099
MAFLADTLSRVKPSATIAVTQKARELKNAGRDIIGLGAGEPDFDTPDNIKNAAIEAIRRGETKYPPVSGIVPLREAIAKKFKRENNLDYKPEQTIVGTGGKQILFNAFMATLNPGDEVIIPRPYWVSYPEMVAICGGTSVFADTSIENGFKLTAEVLEKAITPKTKWLLMNSPSNPSGAAYTQAELRALADVLLKHPHVWTLTDDMYEHLTYGDFAFKTIAEVEPKLYERTLTMNGVSKAYAMTGWRIGYAAGPVQLIKAMDMIQGQQTSGACTIAQWASVEALNGPQDFIARNKAIFQGRRDLVVSMLNQARGITCPSPEGAFYVYPSCAQLIGKKTKAGKVIDTDEAFCSELLEAEGVAVVFGSAFGLGPNFRISYATSDALLEEACTRIQRFTASLT

SEQ ID NO: 4445 - protein, 375 aa, Sinorhizobium meliloti
MDARAAVAIQAGKPLEVMTVQLEGPRAGEVLVEVKATGICHTDDFTLSGADPEGLFPAILGHEGAGIVIDVGPGVTSVKKGDHVIPLYTPECRACPSCLSRKTNLCTAIRATQGQGVMPDGTSRFSLNGDKIHHYMGCSTFSNFTVLPEIALAKVNPDAPFDKICYIGCGVTTGIGAVINTAKVEIGATAIVFGLGGIGLNVIQGLRLAGADMIIGVDLNNDKKPWGEKFGMTHFVNPKEVGDDIVPYLVNLTKRGADQIGGADYTFDCTGNTRVMRQALEASHRGWGKSVIIGVAGAGQEIATRPFQLVTGRTWMGTAFGGARGRTDVPKIVDWYMEGKIAIDPMITHTMPLDDINKGFELMHSGESIRSVVLF

SEQ ID NO: 4446 - protein, 380 aa, Clarkia unguiculata
MATPSLISETETWKDLKAHLEGIKKTHLRELMGDTERCQSMMVEFDNIFLDYSRQQASPDTINKLYKLADEAHLKQKIDRMYNGDHINSTENRSVLHVALRAPRNSAICSDGKNVVPDVWNVLDKIKDFSERVRSGSWVGATGKELKDVIAVGIGGSFLGPLFVHTALQTDPEASKNARGRELRFLANVDPIDAARNISGLNPETTLVVVVSKTFTTAETMLNARTLREWISSALGVSAVAKHMVAVSTNLPLVEKFGIDPNNAFAFWDWVGGRYSVCSAVGVLPLSLQYGFAVVEKFLQGAHSIDQHFSSAPFEKNIPVLLGLLSVWNVSFLGYPARAILPYSQALEKLAPHIQQVSMESNGKGVSIDGLPLPFESGEI

SEQ ID NO: 4447 - protein, 753 aa, Escherichia coli
MSQHNEKNPHQHQSPLHDSSEAKPGMDSLAPEDGSHRPAAEPTPPGAQPTAPGSLKAPDTRNEKLNSLEDVRKGSENYALTTNQGVRIADDQNSLRAGSRGPTLLEDFILREKITHFDHERIPERIVHARGSAAHGYFQPYKSLSDITKADFLSDPNKITPVFVRFSTVQGGAGSADTVRDIRGFATKFYTEEGIFDLVGANTPIFFIQDAHKFPDFVHAVKPEPHWAIPQGQSAHDTFWDYVSLQPETLHNVMWAMSDRGIPRSYRTMEGFGIHTFRLINAEGKATFVRFHWKPLAGKASLVWDEAQKLTGRDPDFHRRELWEAIEAGDFPEYELGFQLIPEEDEFKFDFDLLDPTKLIPEELVPVQRVGKMVLNRNPDNFFAENEQAAFHPGHIVPGLDFTNDPLLQGRLFSYTDTQISRLGGPNFHEIPINRPTCPYHNFQRDGMHRMGIDTNPANYEPNSINDNWPRETPPGPKRGGFESYQERVEGNKVRERSPSFGEYYSHPRLFWLSQTPFEQRHIVDGFSFELSKVVRPYIRERVVDQLAHIDLTLAQAVAKNLGIELTDDQLNITPPPDVNGLKKDPSLSLYAIPDGDVKGRVVAILLNDEVRSADLLAILKALKAKGVHAKLLYSRMGEVTADDGTVLPIAATFAGAPSLTVDAVIVPCGNIADIADNGDANYYLMEAYKHLKPIALAGDARKFKATIKIADQGEEGIVEADSADGSFMDELLTLMAAHRVWSRIPKIDKIPA

SEQ ID NO: 4448 - protein, 484 aa, Brucella suis 1330
MKSTIHSEGAAVSASVANHTPKPPLLSVDDAKALDLPRMTELFTAHLNPGQLHFMKLLGFHKVKVERAEGMYYYDQNGRRILDFFGGFGSLAFGHNHPRIIAARRKFQEELRHEIAIAFMSQYAAALAYDLAACSPGDLDMVFLGSSGSEAMEAAIKVAERAAGPKKPKIVYAENSFHGKTKGVLSITDGGLYRGEFKLVDNTVRVPFGDITAIENAFRSDPEIGTIVLETVQGGGGIIQADAEFWQKLRQLCDRYGVIWVADEVQCGFGRTGKFYAFEHYGVIPDVTALAKSLGGGKAAMAAMIARRDIYMKAYGTPKTAMIHAMATFGGIGEACITAIEAVNILYDEQLIDNSAEVGDYLLERLKELQVRYPGLLKDVRGKGMMVGLEFHDFSQAMPMVLRPMLAMLDDKLKGSLPGFIGSHLLRGHGVLVAFTEYNRNVIRLEPPLICQRAHVDEFIKALDEVLSRGIVKIVKDFIKAQIK

SEQ ID NO: 4449 - protein, 487 aa, Yersinia pestis CO92
MKTLNVDVAVIGGGTAGLGAYRAAKLLTPNVVMIEGGEYGTTCARVGCMPSKLLIAAAEAVHQIEKAPGFGIHPQGKPLINGREVMDRVKRERDRFVGFVLESVETIPAADKIQGYARFIDDNTLQVDDHTQLTSQKIIAQRIVIATGSRPSWPASWNELGDRLIINDDVFNWDDLPESVAVFGPGVIGLELGQALHRLGVQVKMFGVGGAVGPLTDSIVRDYAAKTLGDEFYLDPDVKVELMQREGDKVFIRYLDKSGRPQEIMVDYVLAATGRRPNVDKLGLENTSLILDERGVPQADRLTMQTNVPHIFIAGDASNQLPLLHEASDQARIAGVNAGGFPEVVPGLRRSPISVVFSDPQIAMVGATFRELAQKFSACGCFEIGEVSFENQGRSRVMLKNKGILRIYGEQGTGRFLGAEMMGPSAEHIAHLLAWAHQQQMTIDQMLDMPFYHPVIEEGLRTALRDLQSKLKLGADEAERCLRCPGE

SEQ ID NO: 4450 - protein, 145 aa, Triticum aestivum
  unsure (1)..(145): unsure at all Xaa locations
MASTATCEAPMQGLKYTDGLPVSRRSNSASLGSDSNGGRIRSMQEWPIEGIKKFETLSYLPPISTEALLKQVXDYXRSSSKWERCLDDSKAGHMTREHNASRGYYKRRNWTMWKLPMIGSTDATQVINEDEEGKKENPDANVRII

SEQ ID NO: 4451 - protein, 753 aa, Escherichia coli
MSQHNEKNPHQHQSPLHDSSEAKPGMDSLAPEDGSHRPAAEPTPPGAQPTAPGSLKAPDTRNEKLNSLEDVRKGSENYALTTNQGVRIADDQNSLRAGSRGPTLLEDFILREKITHFDHERIPERIVHARGSAAHGYFQPYKSLSDITKADFLSDPNKITPVFVRFSTVQGGAGSADTVRDIRGFATKFYTEEGIFDLVGHNTPIFFIQDAHKFPDFVHAVKPEPHWAIPQGQSAHDTFWDYVSLQPETLHNVMWAMSDRGIPRSYRTMEGFGIHTFRLINAEGKATFVRFHWKPLAGKASLVWDEAQKLTGRDPDFHRRELWEAIEAGDFPEYELGFQLIPEEDEFKFDFDLLDPTKLIPEELVPVQRVGKMVLNRNPDNFFAENEQAAFHPGHIVPGLDFTNDPLLQGRLFSYTDTQISRLGGPNFHEIPINRPTCPYHNFQRDGMHRMGIDTNPANYEPNSINDNWPRETPPGPKRGGFESYQERVEGNKVRERSPSFGEYYSHPRLFWLSQTPFEQRHIVDGFSFELSKVVRPYIRERVVDQLAHIDLTLAQAVAKNLGIELTDDQLNITPPPDVNGLKKDPSLSLYAIPDGDVKGRVVAILLNDEVRSADLLAILKALKAKGVHAKLLYSRMGEVTADDGTVLPIAATFAGAPSLTVDAVIVPCGNIADIADNGDANYYLMEAYKHLKPIALAGDARKFKATIKIADQGEEGIVEADSADGSFMDELLTLMAAHRVWSRIPKIDKIPA

SEQ ID NO: 4452 - protein, 552 aa, Prochlorococcus marinus subsp. marinus str. CCMP1375
MSLKNLSADSQFKVVLEAPFTDQKPGTSGLRKSTKHFQQPHYLESFVEAIFQTLHGLEDGVLVLGGDGRFGNRNGIDVIIRMAAAHGVRKVITTVDGILSTPAASHLIRTKKAVGGIILSASHNSGGPDGDFGVKVNGPNGGPASESLTDAIYAKTQILDSYQIINHDSISLELPAKYEVGGMIVEVIDGIEDYIALMQKIFDFDRIKSFLKDDFLIAFDALNAVTGPYAKRLLEDFFGAPTGTVRNGIPLEDFGGCHPDPNLTYAKDLADLLLNGSEYSFGAACDGDGDRNMILGRNCFVNPSDSLAVLTANANCVPAYSGGLLGVARSMPTSSAVDVVAKDLDISCFETPTGWKFFGNLLDSGQITLCGEESFGTGSNHVREKDGLWAVLFWLQILAHKKCSVEELMHKHWDHFGRHYYSRHDYESIASDIAQNLYETVELRLPSLIGNSFAGRQVTTADNFTYTDPVDHSITARQGLRILLDDGSRVILRLSGTGTKGATLRVYLESYVSSQGDLTQNPQNALSQLITSIDSFAEISNRTGMSRPTVIT

SEQ ID NO: 4453 - protein, 603 aa, Burkholderia fungorum LB400
MSLVEVKVPDIGDFKDVDVIEVNIKPGDVIENEQALMTLESDKASIEVPSDTAGTVREVRVKAGDKVSQGTVIALVETSGEAAPAKDAPKAPAKEAEKAPAQAEAKPQAAEAPAAAPAKAAAPAPQAGSYSGSADIECDMLVLGSGPGGYSAAFRSADLGMKTVLVERYSTLGGVCLNVGCIPSKALLHTALVIDEAEALGAHGITFAKPQIDLDKLRDFKSGVVRKLTGGLAGMAKMRKVEVVTGNGAFVDPYHMEVQTEGGKKVVKFKQAIIAAGSEAVKLPFIPEDPRVVDSTGALELRQIPQRMLVIGGGIIGLEMATVYATLGAKIDVVEMLDGLMAGADRDLVKVWEKYNSKRFANVMLKTKTTAAEAKDDGIHVSFEGEKAPAEAQRYDLVLVAVGRTPNGKKIGADKAGVAVTDRGFIDVDKQMRTNVPHIFAIGDIVGQPMLAHKAVHEGHVAAEAAHGEKAYFDALQIPSVAYTDPEVAWAGKTEDQLKAAGIKYGKAVFPWAASGRAIANGRDEGFTKLLFDEETHRVIGGGIVGLNAGDLISEVCLAVEMGADATDIGKTIHPHPTLGESIGMAAELYEGVCTDLPPQKKK

SEQ ID NO: 4454 - protein, 479 aa, Zea mays
MSVQEYLEKHLLSRKIEEAVNAAVRAKAPDPVLFIAGHMRRAAPAVITRVRARQILDGHGAPAVEVELHTNKAIHRASAAGSGALEGAAADAAGAAERRKILAKVVADSVRMINDKVSEALVGMDPQEQSQIDQAIMDLNKARHKAELGVGANAMLAVSIAACKAGAAEKEVPLYKHIANLVGKSATTLPVPAITVINGGKHAGNGLPIQEIMILPIGAKNFEEAMQMGSETYHHLKDVILEKYGSDSCNIGDHGGFAPNISSISEGLDLVIAAIERAGYNGRIKLAIDVAATDFCTGKKYDLEFKSTKKSGQNFKTADDMIEIYSQLCSEYPLVSIEQPFDKDDWEHSKKLTTLELCQVAGDDLLMSDPERIKRAVNEYTCNALVLKANQVGTVTEAIEVVKQAKDAHWGVMVSHRSGDTEDSFIADLAVGASAGQIKAGAPCRGECLTNYNQLLRIEGELGSEGVYAGENWRTVNTS

SEQ ID NO: 4455 - protein, 555 aa, Burkholderia fungorum LB400
MSQAIEVKVPDIGDYKDIPVIEVLVKAGDTVEKEQSLVTLESDKATMDVPSSAAGVVKEVKVKVGDNVSEGSLIVVLEGAEGGAAAPAPAPAAAPAAAPAPAPAAAPAAAPAPAPAASGGGLQEVKVPDIGDYKDIPVIEVAVKVGDRVEKEQSLVTLESDKATMDVPSSAAGVVKEVKVKVGDTVSEGSVIVVVEAEGGAAAPAPAPKQQAVEQPSDAPATPSPAPAAPSALAQAPVIPAGEGGARHASHASPSVRKFARELGVDVTQVQGTGPKGRITQADVTAFIKGVMTGQRAAPAGAAAPAAAGGGELNLLPWPKIDFTKFGPVDPKPLSRIKKISGANLHRNWVMIPHVTNNDEADITELEALRVQLNKENEKAGVKITMLAFVIKAVVSALKQFPTFNASLDGDNLVFKQYFHIGFAADTPNGLVVPVIRDADKKGLIDIAREMAELSKAARDGKLKPDQMQGGCFSISSLGGIGGTNFTPIINAPEVAILGLSRGATKPVWDGKQFVPRLILPLSLSYDHRVIDGAAAARFNAYLGAILADFRRVIL

SEQ ID NO: 4456 - protein, 479 aa, Agrobacterium tumefaciens str. C58
MRRKEQPWFSTGAAGGGINTATPMRIETIIFDCFRQAAEKPQEISIFRHKFTLHLHAAVASICQTCLWVYAKRRAMMAKQKVAMLTAGGLAPCLSSAVGGLIERYSDIAPEIDIIAYRSGYQGVLLGERIEITKDMREKAHLLHRYGGSPIGNSRVKLTNAADCAKRGLVKEGDNPLRVAAERLAADGITILHTIGGDDTNTTAADLAAYLGANGYDLTVVGLPKTVDNDVVPIKQSLGAWTAAEVGAAFFDNVSNEQSAAPKTFVIHEVMGRHCGWLTAATARAYIQKTRGNDYVEGLMMNTQMKNIDGIYLPEMAFDIEAEAERLKEVMDKHGYVTLFVSEGAGLDAIVAEREAAGEAVKRDAFGHVKIDTINVGGWFQKQFAGLIGAERSMVQKSGYFARSAPANGDDLRLIQGMVDLAVESALNKVSGVTGHDEDQNGKLRTIEFPRIKGGKHFDLSAKWFTEVMEHVGQPFTAA

SEQ ID NO: 4457 - protein, 419 aa, Gloeobacter violaceus PCC 7421
MIREVTMPALSSTMTEGKIVTWKKQEGDAVSRSDILLVVESDKADMDVESFDEGILANILVSDGGSAPVGSVIALIAETEAEVAEAKKRPPSGTAAAPPATVPTPAPAPSAPAPVAAATTPVSSGSNGGRIVASPNARRLAEQLGVDLASITGSGPGGRIVGEDVERAAAGAKAPAPAPAAKPASAPAPLPAAAASGQPVAFSALQQAVNRNMEAALAIPAFRVGYTITTDAFDELHKSVKSKGVTVTTMLVKAVAITLAKHPLLFAAYTESGLRYHSAVNVAVAVAMEEGGLITPVLRAADSKDLYTLAREWKDLVERARLKKLQPEEYTSGNFTLSNLGMFGVDRFDAIVPPGTSAILAIGAAKPTVVVTEAGHIAIQKQMQVNLSGDHRVFYGTDGARFLQDLAKLIEQSPQQLTL

SEQ ID NO: 4458 - protein, 511 aa, Manihot esculenta
MSVAILTSLPPQWLSILAVFLLPILTLLLFRGKDDNQKKGLKLPPGPRQLPLIGNLHQLGGQPYVDFWKMAKKYGPVMYLQLGRCPTVVLSSTETSKELMKDRDVECCSRPLSVGPGQLSYNFLDVAFSPYSDYWREMRKLFIFELLSMRRVQTFWYAREEQMDKMIEILDGAYPNPVNLTEKVFNMMDGIIGTIAFGRTTYAQQEFRDGFVKVLAATMDMLDNFHAENFFPVVGRFIDSLTGALAKRQRTFTDVDRYFEKVIEQHLDPNRPKPETEDIVDVLIGLMKDESTSFKITKDHVKAILMNVFVGGIDTSAVTITWAFSELLKNPKLMKKAQEEVRRAVGPNKRRVEGKEVEKIKYIDCIVKETFRKHPPVPLLVPHFSMKHCKIGGYDILPGTTIYVNAWAMGKDPTIWENPEEYNPDRFMNSEVDFRGSDFELVPFGAGRRICPGLAMGTTAVKYILSNLLYGWDYEMPRGKKFEDFPLIEEGGLTVHNKQDIMVIPKKHKWD

SEQ ID NO: 4459 - protein, 198 aa, Glycine max
VVGIIGNIIAGCLFLSPVPTFVRIWKKGSVEQYSAVPYLATLMNCMVWTLYGLPMVHPHSLLVVTINGAGCVIEIIYVTLFLLYSDRTKRLKVFLWLFLELVFIAVLTFVTFTLIHSVKKRSAVVGTICMLFNVAMYASPLSVMKLVITTKSVEYMPFFLSLASFGNGVSWTTYALIPFDPFIAIPNGIGTTLSVAQL

SEQ ID NO: 4460 - protein, 518 aa, Lotus japonicus
MASLSCSATDLAPLLTATTNATATAAATYLCNQLDTISRKLSDTTYAVDNTYLLFSAYLVFAMQLGFAMLCAGSVRAKNTMNIMLTNVLDAAAGGLSYYLFGFAFAFGAPSNGFIGRHFFGLKHYPSPTYDYSFFLYQWAFAIAAAGITSGSIAERTQFVAYLIYSSFLTGFVYPVVSHWLWSSDGWASPTRTTGSLLFGSGAIDFAGSGVVHMVGGIAGLWGAFIEGPRIGRFDRTGRSVALRGHSASLVVLGSFLLWFGWYGFNPGSFLTIAKAYGNNGENGNYYGQWSAIGRTAVTTTLAGCTAALTTLFSKRLLEGHWKVLDVCNGLLGGFAAITSGCSVVEPWPAIVCGFVAAWVLIGLNLVAAKMKYDDPLEAAQLHGGCGAWGVLFTGLFAKGEYVAEVYGSAGRPYGLLMGGGGKLLAAQVIEILVVCGWVTATMGPLFYGLHKTKLLRISEDDETAGMDLTRHGGFAYAYHDDDDVSTKRGVMMSRIGPGSSSPSTMNTPAASAAANDC

SEQ ID NO: 4461 - protein, 500 aa, Glycine max
  unsure (1)..(500): unsure at all Xaa locations
MATPTAYQEHLPASPHWLNKGDNAWQLTAATLVGLQSMPGLVILYASMVKKKWAVNSAFMALYAFAAVLICWVLVCHRMAFGDKLLPFWGKGAPALGQKFLTHRAKVPESTHYYNNGTVESATSEPLFATASLVYFQFTFAAITLILLAGSVLGRMNIKAWMAFVPLWLIFSYTVGAFSLWGGGFLYHWGVIDYSGGYVIHLSSGIAGFTAAYWVGPRLKSDRERFPPNNVLLMLAGAGLLWMGWSGFNGGAPYAANIDSSIAVLNTNICAATSLLVWTSLDVIFFGKPSVIGAVQGMMTGLVCITPGAGLVQSWAAIVMGILSGSIPWVTMMILHKKSSLLQKVDDTLGVFHTHAVAGLLGGLLTGLLAEPALCRLLLPVTNSRGAFYGGGGGMQFFKQLVAAMFVIGWNLVSTTIILLVIKLFIPLRMPDEQLEIGDDAVHGEEAYALWGDGEKYDPTRHGSLQSGNTFVSPYVNGARGXDHKLMSQEIRLCFAHTYV

SEQ ID NO: 4462 - protein, 274 aa, Exiguobacterium sp. 255-15
MSPVLAEFLGTALLVAFGNGVGAGVTLSKSYAKDAGWIVITLAWGFAVALSAYAVGQFSGAHLNPAVTLGLAFDGSFAWADVPGYIVAQILGGIAGASIVFVHYLPHWAETKDPAAKLGVFATSPAIPHTFANVMSELIATFLLVIGILSIGANTFSDGLNPLVVGVLIVGLGMSFGGTTGYAMNPARDLGPRIAHFILPIAGKGSSNWGYAWIPVLGPVLGGSLGGLFYRSVFSGKDTPAFVIVGLVTIVILGLCYKFGVRPNKSTSVKSKSA

SEQ ID NO: 4463 - protein, 484 aa, Proteus mirabilis
  unsure (1)..(484): unsure at all Xaa locations
MEKKKLTTAAGAPVVDNNNVITAGPRGPMLLQDVWFLEKLAHFDREVIPERRXHAKGSGAFGTFTVTHDITKYTRAKIFSEVGKKTEMFARFSTVAGERGAADAERDIRGFALKFYTEEGNWDMVGNNTPVFYLRDPLKFPDLNHIVKRDPRTNMRNMAYKWDFFSHLPESLHQLTIDMSDRGLPLSYRFVHGFGSHTYSFINKDNERFWVKFHFRCQQGIKNLMDDEAEALVGKDRESSQRDLFEAIKRGDYPRWKLQIQIMPEKEASTVPYNPFDLTKVWPHADYPLMDVGYFELNRNPDNYFSDVEQAAFSPANIVPGISFSPDKMLQGRLFSYGDAHRYRLGVNHHQIPVNAPKCPFHNYHRDGAMRVDGNSGNGITYEPNSGGVFQEQPDFKEPPLSIEGAADHWNHREDEDYFSQPRALYELLSDDEHQRMFARIAGELSQASKETQQRQIDLFTKVHPEYGAGVEKAIKVLEGKDAK

SEQ ID NO: 4464 - protein, 416 aa, Neurospora crassa
MADSDGEYASDDELKRHGKRTADGRSKQTKASWEDVKRSWDTVLETADSGLSIAEIREAEKRRRLLRDTTPLQRGIIRHLMLVLDMSFAMADKDLLPNRYRVVLNNAIGFVREYFEQNPISQLGIVGMRDGIAVRISDLSGNPAEHIENQTPSHATREILIIYGALVSIDPGDIHDTINDLVADRIRVSVVGLAGQVAICSELCKRTNNHDGNYSVAVDEVHLKELFFAATTPPVTRTPEQNTASLLMMGFPSRTLAPKDHVSFCACHAKPTREGYTCPRCGIKVCRLPIDCPICKLTLIQSTHLARSYHHLFPLKVFVEVPWSQAYKSTACYSCLTPFPARPRDSVAAAPAVLGGRAGAKGSGKQQDGEQKNPKPELKGVSESGRYACQSDTRDVEKDTAVAVPDGGPTPMVMDS

SEQ ID NO: 4465 - protein, 499 aa, Saccharomyces cerevisiae
MGGEDEILSTMEDFAAVYDVLVIGCGPGGFTAAMQASQAGLLTACVDQRASLGGAYLVDGAVPSKTLLYESYLYRLLQQQELIEQRGTRLFPAKFDMQAAQSALKHNIEELGNVYKRELSKNNVTVYKGTAAFKDPHHVEIAQRGMKPFIVEAKYIVVATGSAVIQCPGVAIDNDKIISSDKALSLDYIPSRFTIMGGGTIGLEIACIFNNLGSRVTIVESQSEICQNMDNELASATKTLLQCQGIAFLLDTRVQLAEADAAGQLNITLLNKVSKKTYVHHCDVLMVSIGRRPLLKGLDISSIGLDERDFVENVDVQTQSLLKYPHIKPIGDVTLGPMLALKAEEQAIRAIQSIGCTGSDGTSNCGFPPNVLYCQPQIGWVGYTEEGLAKARIPYQKGRVLFSQNVRYNTLLPREENTTVSPFIKVLIDSRDMKILGVHMINDDANELLSQASMAVSLGLTAHDVCKVPFPHPSLSESFKQAVQLAMANGTSPGVHVRE

SEQ ID NO: 4466 - protein, 263 aa, Lolium perenne
MASSSSVLLVVALFAVFLGSAHGIAKVPPGPNITAEYGDKWLDAKSTWYGKPTGAGPKDNGGACGYKNVDKAPFNGMTGCGNTPIFKDGRGCGSCFEIKCTKPESCSGEAVTVTITDDNEEPIAPYHFDLSGHAFGSMAKKGEEQNVRSAGELELQFRRVKCKYPDDTKPTFHVEKASNPNYLAILVKYVDGDGDVVAVDIKEKGKDKWIELKESWGAVWRIDTPDKLTGPFTVRYTTEGGTKSEFEDVIPEGWKADTSYSAK

SEQ ID NO: 4467 - protein, 289 aa, Streptococcus pneumoniae
MKGIILAGGSGTRLYPLTRAASKQLMPVYDKPMIYYPLSTLMLAGIRDILIISTPQDLPRFKELLQDGSEFGIKLSYAEQPSPDGLAQAFIIGEEFIGDDSVALILGDNIYHGPGLSTMLQKAAKKEKGATVFGYHVKDPERFGVVEFDENMNAISIEEKPEYPRSNYAVTGLYFYDNDVVEIAKSIKPSPRGELEITDVNKAYLDRGDLSVELMGRGFAWLDTGTHESLLEASQYIETVQRMQNVQVANLEEIAYRMGYISREDVLALAQSLKKNEYGQYLLRLIGEA

SEQ ID NO: 4468 - protein, 323 aa, Oryza sativa
MSRRQEICRNFQRGSCKYGAQCRYLHASPHQQQQQQQAKPNPFGFGTGSRQQQQPSFGSQFQQQQQQQQKPNPFGFGVQGANAQSRNAPGPAKPFQNKWVRDPSAPTKQTEAVQPPQAQAAHTGPCNIKGDISFEELRAKAYEEGKQGHSLQSIVEGERNLQNAKLMEFTNLLNSARPSQTPSFPTMSSFPEVKNNSSFGASQTNGPPVFSSFSQIGAATNIGPGPGSKSPASSVQHRDIDRQSQELLNGMVTPPSVMFEESVGNNKNENQDDSIWLKEKWAIGETYFQLSIVFFYGRILNRVMSKNLYNMVLKLIRLYHPGP

SEQ ID NO: 4469 - protein, 423 aa, Haemophilus influenzae R2846
MAKTIQAIRGMNDCAPTESPLWQWIEAQVRNVLNSYGYSEVRMPIVESTPLFARAIGEVTDVVSKEMYTFWDNDEQLTLRPEGTAGCVRAAIEHGWIYNNEQRLWYIGPMFRHERPQKGRYRQFHQVGVEVFGIANPEIDAELIILTYRLWKALGIDQHVTLQLNSIGSLEARANYRSALVGFLENHQDLMNDEEKERLVRNPLRILDTKNPELQKVLDNAPKLLDYLDDESREHFEQLCSLLDAVGIQYEINPKLVRGLDYYNKTVFEWVTSALGAQGTVCGGGRYDGLVEQLGGHATPSIGFAMGLERLVLLVQEVNPNVPAKSAVDIYVVYQGEGAILAAFELAEKVRSELPHLNTMLHCSGGNFKKQFKRADKSGATLALVIGESEVQNKQVVVKHLQGGTDQQTLDLVNIIDYLQTQF

SEQ ID NO: 4470 - protein, 496 aa, Mentha spicata
MELQISSAIIILVATFVASLLIKQWRKSESRQNLPPGPPKLPLVGHLHLLWGKLPQHAMADMAKKYGPVTHVQLGEVFSVVLSSREATKEAMKLLDPACADRFESIGTRIMWYDNDDIIFSPYSDHWRQMRKICVSELLSARNVRSFGFIRQDEMSRLLRHLQSSAGETVDMTERIATLTCSIICRAAFGAIINDHEELVELVKDSLSMASGFELADLFPSSKLLNLLCWNKSKLWRMRRRVDTILEAIVDEHKLKKSGEFGGEDIIDVLFRMQKDSQIKVPITTNAIKAFIFDTFSAGTETSSTTTLWVMAELMRNPAVMAKAQAEVRAALKGKTSVDVDDVQELKYMKSVVKETMRMHPPIPLIPRSCREECEVNGYKIPNKARIMINVWSMGRNPLYWEKPETFWPERFDQVSRDFMGSDFEFIPFGAGRRICPGLNFGLANVEVPLAQLLYHFDWKLAEGMKPSDMDMSEAEGLTGIRKNNLLLVPTLYKSP

SEQ ID NO: 4471 - protein, 178 aa, Glycine max
  unsure (1)..(178): unsure at all Xaa locations
MASSMISAPAGTTVNRAGAGMVATFTGLKFMAGFRTRKTNSVITCIASNGGRVQCMQAWPPVGTKKTETLSYLPDLDDAQLAXKYXYLLRKGWIPCLXFELEHGLVFRDHNRXPRYYDGLYWTMSNLSIYSFADAFXVLNELHDAKTAYPNSFIHIIGFYNIHQLHYISFISYIPAVF

SEQ ID NO: 4472 - protein, 213 aa, Pseudomonas putida
MKSYDVVIIGGGPGGYNAAIRAGQLVLSVACVEGRSTLGGTCLNVGCMPSKALLHASELYEAASGEEFAHLGIEVKPTLNLAQMMKQKDESVTGLTKGIEYLFRKNKVDWIKGWGRLDGVGKVVVKAEDGSETALQAKDVVIATGSEPTPLPGVTIDNQRIIDSTGALSLPQVPKHLVVIGAGVIGLELGSVWRRLGSQVTVIEYLDRICPGT

SEQ ID NO: 4473 - protein, 310 aa, Triticum aestivum
RRPAPPTGALCRPPRAGWARERAGGAGEPRACGRPPCSDKEATSRRGPWSPEEDLLRDSYVQEHGPGHWRAVPTSTGLMRCSKSRRLRWTNYLRPGIKRGNFTHQEEKLIVHLQALLGNRWAAIASYLPERTDNDIKNYWNTLSRTTRQVAERVQRMEEEANRRKQEEEKKPAPAAKKDQHPRPKAPQAAAAAAATPEKQEPAIGEKDKAAVDRESLEDRVRLCGDGEEVRAKAAATPTAMDAKAEHEKKAAAATCTAWKERIVGELKGLTDMKWADNTLEIARKNKEVVAVGVAAFSLGFFVSQRLFGK

SEQ ID NO: 4474 - protein, 337 aa, Petroselinum crispum
ILSPFKFSRRATGDNDVRFKVLYCGVCHSDLHMVKNEWGMTTYPIVPGHEIVGRVTEVGSKVEKFKVGDAVGVGCLVGSCLSCENCDDDSENNCAKQVQTYAFTNVDGSITYGGYADSMVADQHFVLRWPENLPLDSGAPLLCAGITTYSPLRYHGLDKPGTKVGVVGLGGLGHVAVKMAKAFGAHVTVISTSESKKQEALEKLGADEFLVSSDSDQMQAATGTLHGIIDTVSALHPVVPLLGLLKVNGKLVMVGAPEKPLELPVFPLLMGRKVLAGSNIGGLKETQEMLDFAAQHNITADVEVIPVDYVNTAMERLVKSDVRYRFVIDVANTIKTE

SEQ ID NO: 4475 - protein, 255 aa, Zea mays
MFPPGLIHHRPDATAPGDGPPRSGPGGPSLVLTADPKPRLRWTADLHERFVDAVAQLGGPEKATPKTILRTMGVKGLTLFHLKSHLQKYRLGKQSDKEGSEQSKDASYLLDAQSGMSVSPRVAAQDMKESQEVKEALRAQMEVQRRLHEQVEVQKRVQIRMEALEKYIDSILESACKMVTEQFASSGFSISNPDLPEISPGGVMCGSTDTLGSSVLNQLSVSSIDSHSPGGKPSPSGMEGPTLLQKSPELKRRSS

SEQ ID NO: 4476 - protein, 574 aa, Neurospora crassa
MASPGFPPRHLDATTGREVVYCYGCENEWYRDDYPHLDLECPRCHNDFVQIVEPDNDPRPGVQQQGHRSDSDPEEDDIEQFLERGPGSFFMRRSVYQSPDSPFNRSSGNGLEDLDSSPDRPRARPDDPGEAVLSRFADMFVELSGARPGQQGGNAFGTQPRIQRTTFTRAGDGMASFTFTTTTTAGGPAGDGPEAPAFDTLFRGLFGNIPPPGAEDPGGGQGQGQGGGPRGPPLGFATGLQDFIATLLNPQAAVHGDAVYTQEALDRIITTLMEANPQSNAAPPATQAAIEKLPKKILDEQMVGPEGKAECTICIDDMYKGEEVTVLPCKHWFHGECVTLWLKEHNTCPICRMPIEGNNPSGSNSNNNNNNNSQPSASRQEASTNSASAFASSSAPGRNPFESLNPFGSQAQSARERLRRSEQEREERLERIRNVAGIRRTDSQSEGISRRTSHSPPSRENSRFDMRSRDRDPSPPRDRGTSTAWQPNPSSNSQSNISSRYSGGLNNLWGRNNGNNGEGNSRDRDGQQQQNQQQQQQQQSSSSGNGALGWLRDHFGRGSSGSGSGADRDRERRR

SEQ ID NO: 4477 - protein, 466 aa, Rhodospirillum rubrum
MSDFDVVVIGGGPGGYVCAIRAAQLGLRVACVEKRPTLGGTCLNVGCIPSKALLQSSHLFDEANHGFAAHGITVGTLGLDMKTMMARKDEVVEANTKGIVFLFKKNKVTHVVGSARIAGAGQVVVSGEGGEQTLTTRAIVIATGSEVTPLPGVTIDEERIVSSTGALALAKVPKSLVVIGAGVIGLELGSVWRRLGAEVTVVEYLDHILPPMDGEVRKQSQRILEKQGLRFKLGRKVTAAERKGEGVSLTVEPAKGGEAETLEAETVLVAVGRRPFTDGLGLEEVGVEKTDRGFVKVDGDFQTAIEGIFAIGDVIGGMMLAHKAEDEGMALAEMLAGESAHVNYGAIPSVVYTWPEIAGVGKTEEMLKKDGVAYKVGKFPFTANARAKANGDTDGFVKILSNAETGRVLGCHIIGAQAGDLIMEVVLGMEFGASSEDIARTCHAHPQLGEAVKEAALAVNKRTIHM

SEQ ID NO: 4478 - protein, 431 aa, Rhodospirillum rubrum
MATEIIVPQLGESVSEATVAKWFKKVGDAVAADEPLVELETDKVTVEVPAPAAGTLSEIIAAEGAEVAVGAVLALLAGAGEGAAPAKPAAAPAEKKAEPEKKPEAEKKAGPEKKAEPVAAAAPKAASAPLDYPLPPAVRKLVDDNALDPARIPATGKDGRLTRDDVVAFLKAGAPAGAPASAPAPASAPAAGPAREAGPREEKVKMTRLRRRIAERLKEAQNTAAILTTFNEVDMTNLMALRNQYKESFEKKHGVKLGFMSFFVKACVKALQEMPAVNSEISGDSLIYKNYYDIGVAVGGAQGLVVPVVRDCDAKSFATIEADIAGYGKKARDGSLTMEEMAGGTFTVSNGGVYGSLMSTPIINPPQSAILGMHKTMMRPMVMPDGSIAARPMMYLALSYDHRIVDGKEAVTFLVRVKECIEDPARLLLDA

SEQ ID NO: 4479 - protein, 363 aa, Moorella thermoacetica ATCC 39073
MRDLRKRLGILTGGGDCPGLNAVIRAATKTAMSHGYEMIGFLDGYTGVVEGRYIRLDPAAISGLLHRGGTILGTNNRSNPFYFPIQENGETIYRDMSDLAIERLKEMNIEVLLVVGGDGTLAGARDFKAKGARVIGIPKTIDNDLAATDQTFGFDTAVRTATDALDKLHTTAESHHRVMVLELMGRYAGWIALYSGLAGGADVILIPEIPWNIESVLAKIEARRAEGKPFSIVVVAEGVKSPEGELVVQRRVEGSVERVRLGGIGQLVGKLIEEKSGIETRVTVLGHIQRGGSPSSYDRVLATRFGVAAAELAVRGVHGVMVCLRGSDISHVPLEEAVGKPRTIPRDHQLLAAARAIGISFGE

SEQ ID NO: 4480 - protein, 500 aa, Mentha x piperita
MELQISSAIIILVVTYTISLLIIKQWRKPKPQENLPPGPPKLPLIGHLHLLWGKLPQHALASVAKQYGPVAHVQLGEVFSVVLSSREATKEAMKLVDPACADRFESIGTKIMWYDNDDIIFSPYSVHWRQMRKICVSELLSARNVRSFGFIRQDEVSRLLGHLRSSAAAGEAVDLTERIATLTCSIICRAAFGSVIRDHEELVELVKDALSMASGFELADMFPSSKLLNLLCWNKSKLWRMRRRVDAILEAIVEEHKLKKSGEFGGEDIIDVLFRMQKDSQIKVPITTNAIKAFIFDTFSAGTETSSTTTLWVMAELMRNPEVMAKAQAEVRAALKGKTDWDVDDVQELKYMKSVVKETMRMHPPIPLIPRSCREECEVNGYTIPNKARIMINVWSMGRNPLYWEKPETFWPERFDQVSRDFMGNDFEFIPFGAGRRICPGLNFGLANVEVPLAQLLYHFDWKLAEGMNPSDMDMSEAEGLTGIRKNNLLLVPTPYDPSS

SEQ ID NO: 4481 - protein, 498 aa, Mentha x piperita
MELLQLWSALIILVVTYTISLLINQWRKPKPQGKFPPGPPKLPLIGHLHLLWGKLPQHALASVAKEYGPVAHVQLGEVFSVVLSSREATKEAMKLVDPACANRFESIGTRIMWYDNEDIIFSPYSEHWRQMRKICVSELLSSRNVRSFGFIRQDEVSRLLRHLRSSAGAAVDMTERIETLTCSIICRAAFGSVIRDNAELVGLVKDALSMASGFELADMFPSSKLLNLLCWNKSKLWRMRRRVDTILEAIVDEHKFKKSGEFGGEDIIDVLFRMQKDTQIKVPITTNSIKAFIFDTFSAGTETSSTTTLWVLAELMRNPAVMAKAQAEVRAALKEKTNWDVDDVQELKYMKSVVKETMRMHPPIPLIPRSCREECVVNGYTIPNKARIMINVWSMGRNPLYWEKPDTFWPERFDQVSKDFMGNDFEFVPFGAGRRICPGLNFGLANVEVPLAQLLYHFDWKLAEGMKPSDMDMSEAEGLTGILKNNLLLVPTPYDPSS

SEQ ID NO: 4482 - protein, 337 aa, Streptococcus pyogenes SSI-1
MKRIAVLTSGGDAPGMNAAIRAVVRKAISEGMEVYGINRGYAGMVDGDIFPLGSKEVGDKISRGGTFLYSARYPEFAQLEGQLAGIEQLKKHGIEGVVVIGGDGSYHGAMRLTEHGFPAVGIPGTIDNDIAGTDYTIGFDTAVNTAVEAIDKLRDTSSSHGRTFVVEVMGRNAGDIALWAGIASGADQIIVPEEEFDIEKVASTIQYDFEHKGKNHHIIVLAEGVMSGEAFAQKLKEAGDKSDLRVTNLGHILRGGSPTARDRVIASWMGSHAVELLKEGKGGLAVGIHNEELVESPILGTAEEGALFSLTEEGQIIVNNPHKARLDFAALNRSLSQ

SEQ ID NO: 4483 - protein, 173 aa, Triticum aestivum
MRPGVRSTVERLDRPSAYYQNRNKRRRDRDDESNQPQEPQVDPLANATTLYVGNLSFYTTEEQVYELFAKCGEIKRLVMGLDRFNKTPCGFCFVEYFTHQDALDCLKYIGGTKLDERIIRTDLDPGFEEGRQYGRGKSGGQVRDEYREDFDEGRGGVGRAIQAEERDEYAEGK

SEQ ID NO: 4484 - protein, 576 aa, Listeria monocytogenes EGD-e
MNWQEEYQKWVANDKLDSTLRKQLTNMETNEKELEDSFYRNMEFGTAGMRGVLGAGTNRMNIYTIRKASLGLAQFVAENGEEAKKRGIVIAYDPRHMSREFAFESAAVLGHHGVKSYVFDALRPTPELSFAVRHLNAFGGIVITASHNPPEYNGYKIYGEDGGQMPPTGASAVIEYINAVEDIFSVEVANQELLIENGLLEVISEKVDRPYLEKLKEVIVNKELVQERGEDLKIVFTPLHGTGGILGVPALESVGFTNIVKVDEQFVNDPDFGTVKSPNPENREAFLLAIEYGKKFGGDILVGTDPDADRLGVAVRNADGEYEVLSGNQIGAIILHYLLKQKKAQSELPANAAVLKSIVTSNLGTEIAKHYGAEMIEVLTGFKFIAEQIKHFEETGKHTFEFGYEESNGYMVKPFTRDKDAIQAVLAIAEVALVSKVAGRTLLEDLDQIYDEFGYYNEDLVSLTLSGKDGSERIKEITSSFREQLPTSMGGFVVERAEDYLRSETTWIATGKTEAIHLPTADVIKCYFEDGSWFCLRPSGTEPKIKFYFSIRGESKEESTAKLEKVKADLMQHIEA

SEQ ID NO: 4485 - protein, 293 aa, Porphyromonas gingivalis W83
MKAFVFPGQGAQFVGMGKDLYEQNPEAKAYFEKANEILGFRITDILFNGTAEELKQTKVTQPAIFLHSVILAKTMGEDFRPDMVAGHSLGEFSALVAAGAMTFEDGLRLVSKRAMAMQKACEVRPSTMAAVLGLPDEKVEEICAQVTDEVVVPANYNCPGQIVISGSVEGVDRACELLKEAGAKRALKLAVGGAFHSPLMEPAREELAKAIEETTISQPICPIYQNVTASAVTDPAEIKKNLIAQLTAPVRWTQSVLNMTADGADHFMELGPGNVLQGLVKKIAPEATTEGRQ

SEQ ID NO: 4486 - protein, 408 aa, Nostoc punctiforme
MQRVGIEKINLYAGRFCADALELANLQGKDLDYVSKQVKVKTRSVIPAYEDTVTLSVNAAKRLLSPEDARDIELLIVATESAVDFGKPVSTWVHRYCNLPPHCRSFELKHACYGLTAAVKTAAMWLQGGLTPGKKALVIGCDYSRPHLDDRDNFIGGGAAIAMLISTDPKVFEIDLHPAGFWTNEISDTFRPTARVEIGDNQTSLYSYLDALEASYTHYEKLVGGVDYDKDFQKHIYHTPFPGMPLQAHRTLLSLLEVNDSKIYEENYQKKVQEGIYFAQQVGSTYGSSTFLCLLSLLHYAQDLHAGDRISIFAYGSGCQGEFYRGTVSPGAIEYIRSLDIDRHLQERLPLSLMEYELLEYAREKYIDAPDYQPKRDSFQNAYDKLYAGQELLVLKQVKNYYRQYEWS

SEQ ID NO: 4487 - protein, 499 aa, Mycoplasma hominis
MKKIILTIIDGLGLRKERQGNAYLQAKHPCFDYLFSMCPNSVLQASGQYVGLPEGQIGNSEVGHLNIGAGRVVYTGLSLINKAIENNTFKDNEILNDVIDKTIKNNTTLHVMGLLSNGGVHSLDLHLFEILKLAHSKGLKNVSVHVFGDGRDVKPQSIKNSLETLKDLCQKFGYKISSISGRFYAMDRDSIFSRNQEAYDAILGQSKNVIENIDDYIESQYKKGIFDEFFEPAQLKDGVFVKNGDSIIFFNFRPDRARQLSHMFIGSNLYTYKPKNQVQIDNFVSLMKYEGINSKIAFKEMEVVNPLGKVLESNDIKQLRLAETQKYAHVTFFFDGGVDIEYKNENRILVDSLKVDSFADYPHMSAKEITDSLLNNIEKNDFIIMNYANPDMVGHTGNLNATIEAIEFLDSQFQRILEYVSLNHENVTWFITADHGNAEITEDENNKPATKHTTSPVMFICTDKNVNLGNGSLCDVAPTILDYLKINKPKEMTGKSLLK

SEQ ID NO: 4488 - protein, 342 aa, Agrobacterium tumefaciens str. C58
MTKTMKAAVVRAFGKPLTIEEVAIPDPGPGEILINYKATGVCHTDLHAATGDWPVKPNPPFIPGHEGAGYVAKIGAGVTGIKEGDRAGTPWLYTACGCCIPCRTGWETLCPSQKNSGYSVNGSFAEYGLADPKFVGRLPDNLDFGPAAPVLCAGVTVYKGLKETEVRPGEWVVISGIGGLGHMAVQYAKAMGMHVVAADIFDDKLALAKKLGADVVVNGRAPDAVEQVQKATGGVHGALVTAVSPKAMEQAYGFLRSKGTMALVGLPPGFISIPVFDTVLKRITVRGSIVGTRQDLEEALTFAGEGKVAAHFSWDKLENINDIFHRMEEGKIDGRIVVDLAA

SEQ ID NO: 4489 - protein, 606 aa, Triticum aestivum
MKFMKLGSNPDTFQDDGSEVRIVETELVSDITVRLGNTKFYLHKFPLLSKCARFQKLIPTTGDENIDIHIRPFPAGPKAFEICAKFCYGMVVTLNAYNVVAARCAAEYLEMNETVDKGNLIYKIDVFLSSSIFRSWKDSIIVLGTTKAHLPWSEDLKLVRHGIGSIASKANVDTSKVEWSYTYNRKKLPAENDLDMQWNGVKKQPAVPKDWWVEDLTDLDIDSYKQVISAIKTMGMVPKDAVGEAIKAYTYKKLPSLSKVSMIHGDGKVRAMLVTITCLLPSEKGSVSCSFLLKLLRATNLLKCGEMCRKELVKRIGRQLDEASVSDLLIPTVDGETTGYDIDMILSIVEEYVRQDSKNAQKHNAEVNGHVQAPSASMITVAKIVDGYLTEVAKDPNTPVLKFINLAEAISGNSRPFHDGIYRAIDMYMKEHPSLSKSDKKKLCCLMDCKKLSPEACAHAVQNERLPLRTVVQVLYHEQTRASAAATVRADSICIGSYESSRSGATTNTEDEWDGVIAVEDLSLSSKTTKLEKCHSAEKSHGSSKSTTNGKAKGGATPKKVLGKMLSSKALTGERSSSDSSDSAILRSQDHPKRTPSRSTKPSAAA

SEQ ID NO: 4490 - protein, 253 aa, Gloeobacter violaceus PCC 7421
MHEGNRSPRPMRMEAKTVKPRHPLVSRLAELLVSTWGEYLQLEPYHLPADLGFVEGQLEGDRLTIVNRCYQSRVFRKLHLELATIGPNLDILHCVMYPRPQFDLPIYGTDIVASTQMVSAAIVDLSPVRGELPPAYLAGLEPSFARCTDFGQLRNLPPWGTIFSPRCVFARVVTPTEADLFMEISRAYLRFHCEQAARAEAVDTATEAQILAGQRHYCEQQQQNDKTRRILAQAFDEAWAERYIRTVLFDLPQ

SEQ ID NO: 4491 - protein, 759 aa, Paracoccidioides brasiliensis
MASKATEGLRKIQGMVESMHPGNKKVADLARDTVDVHAPAPFTTDHGTKVSNTDNWLRAASENQTGPSLLEDQIAREKIHRFDHERIPERVVHARGTGAFGHFKLVESAEDATSAGVLTDTSRTTPVFVRFSTVQGSKGSFDTVRDVRGFATKFYTQEGNWDLVGNNIPVFFIQDAIKFDISKQSIPFSFLSRCYLSSVHAVKPERQRSPQGNCHNNFWDFVSCILKATHMFMWAMSDRAIPRILPVCRGFGVNTFVLVNRQGKRHFVKFHWMPELGVHSLVPDESFKLGGQDPDYHRKDLMEAIDNKVYPKWKFGIQVIPEEKEHEFEFDILDATKIWPEDLVPVRYIGEMELNRNVDEFFPQTEQVAFCTSHIVPGIEFSDDPLLQGRNFSYFDTQISRLGVNWEELPINRPVCPVMNHNRDGAMRHKITQGTVNYWPNRFEACPPTNPEDGGFVTYPQKITRTLSYMVSNKFANTSPAQLFYNSLSYEQLHIQNAFCFELDHCYDPVVTTDSSSDLLKSPYRSHELSQSKSALQHQTGLDVPTKGQKTINLSQEYINERQPFCTHNPRGENTILIGDGTTQSPSPLSNRGNSHECSAHHNGTKRQPIFADHEDRETGAGVIPDHNYIGQRSTLLTPRSYPVARISRSCASLGAFRHWIAEQFGHCKAIGATGEAVDLIAQVLNSLPGLNVALASSSDVVEWYGVVTSSKLHEPHTLTEGFKLFPEAKDFLGKFLYQVSQHRNYQRDMVGLTDQVAF

SEQ ID NO: 4492 - protein, 367 aa, Nostoc punctiforme PCC 73102
MYEIILPKFNNNDESYTLLYWLSDIGKPVNKEEAIAIFETSKAAFDLESEAEGILHTLPEAGDECKPGDVIGYLFETEAERQDFLNSSGKKAKITNDKSLTITKVAQELIDKHGISEENIRKLGKNIIKRPDIEKLISEQSRDEVTGLEISRQQMAIARVVTQSHTQIPKAFLLMKIYGDAATQMLSDYGKKHDIIIGLPELLIKITATLLSEFPFFFGSLIDDNRFMPGEVANIGVTLDLGKGLFIPVIKNVGEISLADIANKLMEFRLKAMRGQFNEEELNQGNISLSINMDKDSLVTIPIILPSQSCMLSLGGIQEELYLGSEQNVKNRSYINLGLAYDHRVINGREAAQFLTKIKTKVEQPSI

SEQ ID NO: 4493 - protein, 1015 aa, Erwinia carotovora subsp. atroseptica SCRI1043
MQLNRRGFFKVCAGGMAGTTLAVLGFTPTEAMASVRQYKLLRAKETRNNCTYCSVGCGVLMYSLGDGAKNAKPSIFHIEGDADHPVSRGSLCPKGAGLVDYIHSENRLLYPEYRAPGSDKWQRISWDDAIERIARLMKADRDANFQRTNAKGETVNRWLTTGMLCSSAASNETGVLDQKFARSLGMVAIDCQARLCHGPTVAALAPTFGRGAMTNNWVDIKNANVIIVMGGNPAEAHPVGFKWAVEAKTHNNAKLIVVDPRFNRSAAVADLYAPIRAGSDAAFLLGIVNYLITHEKIHREYVVSYTSASLIVREDFSFDEGLFSGYDEQTRQYDKSSWQYELDESGFAKRDNTLSHPRCVWNLLKKHVSRYTPEMVTSLCGTSAKDYETICRTLAETCVPNKTATFMYALGWTHHTNGAQIIRSAAMIQLLLGNIGMAGGGINALRGHSNIQGYTDLGLLTTNLPGYMPLPSEKQPDLKTYLTQITPTALLPDQVNYWKNTPKFFISMMKSFYGDHAQAANNWGYDWLPKWDRSYDIMVQTELMVEGKMNGYIVQGFNPVAAFSNKNKATEALSKLKYMVIIDPLITETSTFWQNYGEFNDVDTKSIQTEVFRLPSSCFAEENGSIANSGRWLQWHWAAAEPPGEAHHDGKILGKLLMRLRELYNEEGGAYSDPLMNINWNYKDPEDPTPEEIAREANGMALADIYDDSGKLILKKGQQLADFSQLRDDGTTSSFCWIYAGSWTEAGNQMDKRDNADAGLGCTPNWSWCWPQNRRILYNRASADLQGKPWDSKRKLLEWNGQRWQGIDVPDFGATVPPGKDTGPFIMLPEGLARLFSVDKLVDGPFPEHYEPIESPIGTNPLHPSVISSPVARLFARDAKTMGTAKDFPYVATTYSITELFRHWTKHARLNAIVQPEQFVEIGENLAKSKGIKAGDEVKVSSKRGYIKAKAVVTKRIKTLEIAGHSVETVGIPCHWGYEGTTRKGFLANTLTPSVGDANSQTPEYKAFLVNVEKV

SEQ ID NO: 4494 - protein, 255 aa, Eucalyptus gunnii
  unsure (1)..(255): unsure at all Xaa locations
MGRSPCCEKAHTNKGAWTKEEDDKLIAYIRAHGEGCWRSLPKAAGLLRCGKSCRLRWINYLRPDLKRGNFTEEEDEIIIKLHSLLGNKWSLIAGRLPGRTDNEIKNYWNTHIRRKLLNRGIDPATHRLINEPAQDHHDEPTISFAANSKEIKEMKNNAELNFMCNLEESADVASSARERCPDLNLELGISPPSHQLHQPEPLLRFTGRKSDLCXECNLGLKNSQNCRCSVGVIESETSVGYDFLGLKASVLDYRS

SEQ ID NO: 4495 - protein, 402 aa, Oryza sativa
MATKRSVGTLGEADLRGKKVFVRADLNVPLDDAQKITDDTRIRASVPTVKFLLEKGAKVILASHLGRPKGVTPKYSLKPLVPRLSELLGVDVVMANDCIGEEVEKLAAALPEGGVLLLENVRFYKEEEKNDPEFAKKLAAVADLYVNDAFGTAHRAHASTEGVTKFLKPAVAGFLMQKELDYLVGAVANPKKPFAAIVGGSKVSTKIGVIESLLAKVDVLILGGGMIFTFYKAQGYAVGKSLVEEDKLELATSLIEKAKAKGVSLLLPTDVVVADKFAADAESKTVAASAIPDGWMGLDVGPDAIKTSSEALDTCNTIIWNGPMGVFEFEKFAAGTDAIAKKLADLTTTKGATTIIGGGDSVAAVEKAGLADKMSHISTGGGASLELLEGKTLPGVLALDEA

SEQ ID NO: 4496 - protein, 535 aa, Glycine max
MGSISHVITTTLPHLPSTRSLGFPISHSNSRLLSLPPTRVAKQVGVFAELVSRSSTASFASVDFSVHDWKIQFHEDCQLRRPPPHLTDIFPNAPPIPSTFCLKMRTPIDRDFPGHYSLDEEWHGYINNNDRVLLKTIYYSSPTSAGAECIDPDCTWVEQWVHRAGPREKIYYKPEEVKAAIVTCGGLCPGLNDVIRQQIVITLEIYGVKNIVGIPFGYRGFSDKELTEVPLSRKVVQNIHLSGGSLLGVSRGGPGVSDIVDSLEKRGINMLFVLGGNGTHAGANAIHHECRKRRLKVSVIGVPKTIDNDILLMDKTFGFDTAVEEAQRAINSAYIEAHSAYHGIGVVKLMGRSSGFIAMQASLFSGQVDICLIPEVPFNLHGPHGVLSHLKYLLETKGSAVVCVAEGAGQNLLQKTNATDASGNVVFGDIGVYIQQETKKYFKEIGVHADVKYIDPTYMIRAIRANASDGILCTVLGQNAVHGAFAGYSGITVGLCNTHYVYFPIPEVISHPRLVDPNSRMWHRCLTSTGQPDFI

SEQ ID NO: 4497 - protein, 287 aa, Zea mays
MGRPPCCDKAGVKKGPWTPEEDIVLVSYVQEHGPGNWRAVPVSTGLMRCSKSCRLRWTNYLRPGIRRGNFTPHEEGIIVHLQALLGNRWAAIASYLPQRTDNDIKNYWNTHLKKKLRKQQAIGAIFAPPTPSEPTAGHADCRRHDMTRSSKDSHACPADSTPAADEVVTQLIAQQFAATDGDTSSSSSYSYASSTDNISKLLDGFMKSASPARDDATDTIKPSSAIDIDPFDHKSGGAALPPPKKRQQQQHLSSIENWLFDDATEQVVVQLMEEISGGSCSVPMLLY

SEQ ID NO: 4498 - protein, 435 aa, Pirellula sp. 1
MSDIIPVEVPTVGESISEVQIGNWLKQEGDWVKSGEDLVEIETEKASVQIPAPASGYLQSITKQSDEFAEVGQQIASIQVAEQPAGGDGGSSNGGSAPAAGNTASAPAPTASAPAPSSPAKSGGGFVMPAAQRLLDEHKLDASQVPATGPGGRLLKEDVLAYIRNGSSRPAPAAPPAAPAAPVAPTQQMSSPETASLMTSGGYRSEEVKPMSMLRRTIASRLVQAQQTAALLTTFNEINMAPVMAIRSKYKDAFAKKHGVKLGFMSFFAKATVEALRRYPAVNAEIRGDSMVYRNYQDIGIAIGGGKGLVVPVLRNVERMSFAEVEGSIAEYARLAGENRLQPSDLMGGTFTISNGGIYGSLLSTPIVNPPQSGILGLHSIQERPVAEDGQVVIRPMMYVALTYDHRIVDGREAVGFLVAIKETIEDPARLFLEV

SEQ ID NO: 4499 - protein, 505 aa, Helicobacter pylori 26695
MVNKDVKQTTAFGAPVWDDNNVITAGPRGPVLLQSTWFLEKLAAFDRERIPERVVHAKGSGAYGTFTVTKDITKYTKAKIFSKVGKKTECFFRFSTVAGERGSADAVRDPRGFAMKYYTEEGNWDLVGNNTPVFFIRDAIKFPDFIHTQKRDPQTNLPNHDMVWDFWSNVPESLYQVTWVMSDRGIPKSFRHMDGFGSHTFSLINAKGERFWVKFHFHTMQGVKHLTNEEAAEVRKYDPDSNQRDLFNAIARGDFPKWKLSIQVMPEEDAKKYRFHPFDVTKIWYLQDYPLMEVGIVELNKNPENYFAEVEQAAFSPANVVPGIGYSPDRMLQGRLFSYGDTHRYRLGVNYPQIPVNKPRCPFHSSSRDGYMQNGYYGSLQNYTPSSLPGYKEDKSARDPKFNLAHIEKEFEVWNWDYRADDSDYYTQPGDYYRSLPADEKERLHDTIGESLAHVTHKEIVDKQLEHFKKADPKYAEGVKKALEKHQKMMKDMHGKDMHHTKKKK

SEQ ID NO: 4500 - protein, 348 aa, Pycnococcus provasolii
VELRDGDKSMWMGKGCSKAVANLNDIIAPALVGKDPTQQKAIDDLMNKELDGTENKGKLGANAILAVSMAVCKAGAAEKDIPLYKYIAELAGNTKLILPVPAFNIINGGSHAGNKLAMQEFMTLPTGATSFTEAMKMGTEVYHNLKSVIKEKYGQDACNVGDEGDFAPNIESNKEGLDLVNQAIEKADSTGKVKIGMDVASSEFYTEDKMYDLDFKTKDNDGSQKKTGEEMLEMYKSFCSEYPVISIEDPYDQDDFENTAALTAEGVCQVVGDDLLVTNPTRVASAIEGKTCNALLLKVNQIGSISEAIEAVRMSKEAGWGVMTSHRSGETEDSFIADLAVGLATGQI

SEQ ID NO: 4501 - protein, 380 aa, ASPERGILLUS NIDULANS FGSC A4
MNFMNSTFSSTTPETYWDHYDDISAHSSHLNVAERLWAAWYAWMQNDVLATGIMSFVMHELVYFGRSLPWILIDTLGFFKNYKIQSSKIPSLREQWDCAKFVLLSHFTVELPQIWLFHPMAQFFGLSTSVPFPSFWTMAYQIAIFFVMEDTWHYFSHRALHWGPLYKAIHKIHHQYSAPFGMAAEYASPIEVMILGFGTVGCPIVWCAATGDLHIFTMPLMHTVGMSSHGVYTTFFLFGLEQIITTFTTRSSLATTPAVSGGGIMFWTQSTVPRRSGGGGITRRSAVRRKPNNAIVLEVSWNGINMSIVTPLARSTSPDMLIWDRGIPRHIDSPTAHRLGEVPGLEEPPRFSFDYIGHSSSFNNPLWDWNPYPVNGADLS

SEQ ID NO: 4502 - protein, 377 aa, Pseudomonas sp. ND6
MSHDNVQKMRIQAAVLRESGAALKVEDVLLEAPRPTEVRVRVVASGVCHTDMVVRDQLFPTPMPIILGHEGAGVVDAVGSAVTTVKPGDHVVMTYMSCGLCLPCETGHPAHCTHMHPLNFGGGRLDGSASSCSCESHAPIHDHFFGQSSFSTYAIANERNVVKVAKEAPLELLGPLGCGIQTGAGSVLNALKVEAGSSFVAFGAGAVGLAAVMAARVAGATTIIAVDVTPSRLELALELGATHVINSRDENPVERIQQITAGGANYSLECSGRAEVLRQAIDALATLGTCGIVGATKFGTEVAFNINEVMIPGKRIMGIVQGDVVANAFIPKLVDLYLQGRFPFDKLCKFYEFDQVNEAMADSERGVTIKPILRMPQ

SEQ ID NO: 4503 - protein, 616 aa, Zea mays
MDSDYGVPRELSEVQKKRALYQPEVPPCLQGTTVRVEYGDAAIAADQAGAHVISHAFPHTYGQPLAHFLRKTAVVLDAKVISEHPVVRVGIVFCGRQSPGGHNVVWGLYEAIKAHNQNSKLIGFLGGSDGLLAQRTLEITNEVLASYKNQGGYDMLGRTKDQIRTTEQVNGAMASCQALKLDALVIIGGVTSNTDAAQLAETFAEAKCATKVVGVPVTLNGDLKNQFVETTVGFDTICKVNAQLISNVCTDALSAEKYYYFIRLMGRKASHVALECALQSHPNMVILGEEVAASKLTIFDITKQICDAVQARAEKDKNHGVVLIPEGLVESIPELYALLQEIHGLHGKGVSVENISSQLSPWASALFEFLPPFIRKQLLLHPESDDSAQLSQIETEKLLAQLVETEMNRRLKEGTYKGKKFNAICHFFGYQARGALPSKFDCDYAYVLGHVCYHIIAAGLNGYMATVTNVKSPVNKWRCGAAPISSMMTVQRWSRGPSATQIGKPAVHMASVDLKGKAYDVLRQNSSRFLLEDVYRNPGPLQFEGPGADSKPISLCVEDQDYMGRIKKLQEYLEKVKSIVKPGCSQDVLKAALSAMSSVTETLNIMTSSSTGQTAL

SEQ ID NO: 4504 - protein, 375 aa, Mastocarpus papillatus
VATAGGKFSAMVPSGASTGIYEALELRDGDKSSYLGKGVDKAVANVKDKISEAIMGMDASDQGAVDAKMIELDGTEGGFKKNLGANAILGVSMAVARAGANAKGVPLYKHLNNLAGNPKMLLPVPSLNVINGGTHAGNKLAMQEFMILPVGASTFREAMKMGAETYQYLKKVIKKKYGLDATSVGDEGGFAPNIQDNTEGLKLLEEAIEMAGYTGKIKVGMDVAASEFWKEDKEVYDLDFKNDDNDGSQCLTGEKLGEMYKDFISNFPMISIEDPFDQDDWESYAKLTAAVGEGVQIVGDDLLVTNPNRIQTGIDKKACNALLLKVNQIGSITEAIQASKMSRDAGWGVMVSHRSGETEDNFIADLCVGLGTAQI

SEQ ID NO: 4505 - protein, 373 aa, Mastocarpus papillatus
VETDDGKFRAMVPSGGSTGIHEAHEMRDGDENKFSGKGVLKAIKNVNNEIAVTVIGMDPTDQEGIDQALADLDGQPDKSRLGANAILGVSMAVTRAGAAKKGIPLYKHINNLAGNPTPILPVPSFNVLNGGSHAGNPLAMQEFMILPTGAESFKEAMQVGVEVYHKLKSVIKQKYGQSSTSVGDEGGFAPNIKDSEEALELIQTAVKEAGHSDIVQIGMDVAASEFYNKETKKYNLNFKNPAGSTNPAGMKSADELLRMYKLFAANYGVISIEDPFDQDDFTSFEKMTGELNELIQIVGDDLLVTNPERIERAIERNACNALLLKLNQIGTVTEAIEANNLARNAGFGVMVSHRSGETEDSFIAALCAGLGTG

SEQ ID NO: 4506 - protein, 272 aa, Pseudomonas putida KT2440
MSKTRIAFIGAGNMAASLIGGLRAQGLDASQIRASDPGAETRSRIQAEHGIEAFEDNAQAIDGADVIVLAVKPQVMKTVCQALQPNLQDGQLIVSIAAGITCASLQSWVGARPVVRCMPNTPALLRQGVSGLYATAEVSGEQRLQAEQLLSAVGTALWLEQEQQLDAVTAVSGSGPAYFFLLIEAMTAAGEKLGLPRETASQLTLQTALGAARMAVASDVDAAELRRRVTSPAGTTEAAIKSFQASGFEAIVEQALQAAATRSAELAEQLGK

SEQ ID NO: 4507 - protein, 375 aa, Prionitis lanceolata
VTTADGKFSAMVPSGASTGIYEALELRDGDKSAYLGKGVDKAVANVKDKIAPAISGMDAADQAAVDKKMIELDGTEGGFKKNLGANAILGVSMAVARAGAAAKRVPLYKHLNDLAGSPKMLLPVPSLNVINGGSHAGNKLAMQEFMILPVGATSFREAMKMGAETYQYLKKVIKKKYGLDATSVGDEGGFAPNIQDNTEGLRLLEEAIEMAGYTGKIKVGMDVAASEFWKDDTKMYDLDFKNPDNDGSQCLSGEKLGELYKEFVAKFPMISIEDPFDQDDWESYAKLTEAVGESVQIVGDDLLVTNPDRIRTGIEKKACNALLLKVNQIGSVTEATQASQISRDAGWGVMVSHRSGETEDTFIADLCVGLGTAQI

SEQ ID NO: 4508 - protein, 301 aa, Zea mays
  unsure (1)..(301): unsure at all Xaa locations
MAIVIVVLIAAFFFLGFFSIYVRHCYGDGSSGYSANRPPAPGGAAARSRRQRGLDEAVLESFPTMAYADVKAHKAGKGALECAVCLLEFADGDELRTLPLCAHAFHADCIDVWLRAHASCPLCRAAVLDXAVTADSGGGGESSSSPPPADPDASPNGGPDHVGAASDAAPDHEGEESDGLDASPAREDQQERPSSAQPPPPPELLCALPRNVRRAASMDAVAVSTAASVAELDRLPEVAAPEEEQIGGRRKRWTGPCPSRPKASGSGHRSNLSTDWLLAPSGVPRSFFSRHSRARSSVLPL

SEQ ID NO: 4509 - protein, 383 aa, Zea mays
MAEDRSPKPIHCKAAVCRAAGEPLTIEEIVVDPPKAYEIRIRVVCTSLCHTDITFWKAKVAPVFPRILGHEAYGVVESVGEHVEGFAAGDTVVPTFLGQCERCASCASEHSNVCDAVPFVIGPGMRRDGTTRFRDARGSPLHDLLAVSSFSEYTVVDVNQVVKVDPAVPPKLACLLSCGAGTGVGAAWRSAKVEPGSTVAIFGLGSVGLAVVQGAKMCGASKIIGVDLNPDKEEVGRSFGVTDFVNPSQLDKRSVVEVIVEMTGGGVDYSFECIGVPSVMTDAFRCTKMGKGKTIVLGLGRDSDEVCLPSLELLFGRCVMGSLFGGLKPKTHIPVLAKKCMDNELQLDALVTHELGLQDINKAFDLLLQGKSLRCILWMDKDK

SEQ ID NO: 4510 - protein, 198 aa, Pseudomonas putida KT2440
MMNFQQLVLASHNAGKLKELQAMLGHSVQLHSIGEFSQVEPEETGLSFVENAILKARNAARISGLPALADDSGLAVDFLGGAPGIYSARYADGKGDAANNAKLLEALKDVPEAERSAQFVCVLALVRHADDPLPILCEGLWHGRILFEASGDQGFGYDPLFWVPERNCSSADLAPADKNQLSHRARAMALLRKRLGLA

SEQ ID NO: 4511 - protein, 315 aa, Triticum aestivum
  unsure (1)..(315): unsure at all Xaa locations
MMTMDLIGGYGRADEQVAIQEAAAAGLRGMEHLILQLSRTGTSESSPVGSSEAPEQQVDCREITDMTVSKFKKVISILNHRTGRRQVXRRGPVVAQSHXGPPCPRPAPVRASSSRSMTLDFTKASSGYGNDAGFSVSAASSSFMSSVTGDGSVSNGRGGGSSLMLPPPPSASCGKPPLASSAASTGAGGGQKRKCHDHAHSENVAGGKYGASGGRCHCSKRRKSRVRRMTRVPAISSKAAEIPADDFSWRKYGQKPIKGSPYPRGYYKCSTVRGCPARKHVERDPSDPSMLIVTYEGEHRHTPADQEPLAPLPEL

SEQ ID NO: 4512 - protein, 319 aa, Gloeobacter violaceus PCC 7421
MSEPAEQPESVKGWTRLTRRRDVLDDPYIHRYQRRHFFFFDILPAIGTVAAVALSWVWPPGPIEGSLLLGLWLVTGFGVTVGYHRLFTHRSFSAAPWVQALLAVSGSMAGQGSVISWVALHRRHHELSDQPGDPHSPNLHGQDPVGRLRGLLHAHLLWMRQHEYPNVVCYASDLLRDRSLLQVNGLYLWWVLLGLAIPALVGWWLHGHVAGLLLGFLWGGAVRMFVLGNIIWSINSFLHSFGPRLFATREHSRNSGWLALASFGESWHNNHHAFPTSASFGLDWYRLDPGYWLIWLLARLGLAWDVKVPSEEQIRLKRA

SEQ ID NO: 4513 - protein, 330 aa, Gloeobacter violaceus PCC 7421
MLYLYLGSTMETDHFPAPSSKYLPGGKVRVTTANAHLQARYRSVGLVTLGIPALGTLAALGLLAFQPLRLLDVALLLGMYVLTVFGLEVGYHRHFAHGAFKASPPVRVTLAVLGGMAASGPLIYWAATHRLHHHFPDEPGDPHSPYLKADRPLERLPGLWHAHTGWMLDSEITNCALLARDLLRDLNVSRLNRRYYLWVLLGLLLPALVGGLASATWMGALQGLLWGGMVRIFLVHQLYIGALNSVCHLLGDRPFATGDLSTNNAWLALPTLGESWHNNHHAFCSSAVTGLEWWQIDPSGWCIRLLAAVGLVWEVKIPNQATIAARRQVR

SEQ ID NO: 4514 - protein, 198 aa, Oryza eichingeri
GQTPVFPRIFGHEAGGIVESVGEGVTDLAPGDHVLPVFTGECKECPHCKSAESNMCDLLRINTDRGVMIGDGKSRFSINGKPIYHFVGTSTFSEYTVMHVGCVAKINPAAPLDKVCVLSCGISTGLGATINVAKPPKGSTVAIFGLGAVGLAAAEGARIAGASRIIGIDLNANRFEEARKFGCTEFVNPKDHDKPVQQ

SEQ ID NO: 4515 - protein, 198 aa, Oryza eichingeri
GQTPVFPRIFGHEAGGIVESVGEGVTDLAPGDHVLPVFTGECKECPHCKSAESNMCDLLRINTDRGVMIGDGKSRFSVNGKPIYHFVGTSTFSEYTVMHVGCVAKINPAAPLDKVCVLSCGISTGLGATINVAKPPKGSTVAIFGLGAVGLAAAEGARIAGASRIIGIDLNANRFEEARKFGCTEFVNPKDHDKPVQQ

SEQ ID NO: 4516 - protein, 395 aa, Gloeobacter violaceus PCC 7421
MSRLATRVASLTPSLTLAIAAKAKALAAGGVDVCGLSAGEPDFDTPAPIKAAAKAALDRGETKYGPVAGQPRLRERIARKLERENGLPYTPEQILVTNGGKQGLYNAIMALIEPGDAVLIPSPYWLSYPEMVSLAGGTSVLLPTTEATGFKITPEQLEAAITPRTRLLILNSPSNPTGMVYSRPELEAITEVVLRHDLMVLSDEIYEKLVYDGARHHSIGGLGREMFARTITSGGFSKAFAMTGWRLGYLAGPTDLIGAAGAIQSHSTSNVAAYSQAGALAALEDPQVALEVERMVRVFAERRTAMYDAVAAIPGLRCARAQGAFYLLPDISATGLNSTAFCEQLLDQFHVAAVPGIAFGSDSHVRLSYATDLDTIYKGVERLGQFVRQCLAVRA

SEQ ID NO: 4517 - protein, 586 aa, Lotus corniculatus var. japonicus
MCGILAVLGCSDFTQAKRVRVLELSRRLKHRGPDWSGLHQHGDCYLAHQRLAIVDPASGDQPLFNEDKSIIVTVNGEIYNHEELRKQLPNHQFRTGSDCDVIAHLYEEHGENFMDMLDGIFSFVLLDTRDNTFIVARDAIGVTSLYIGWGLDGSVWISSEMKGLNDDCEHFEVFPPGHLYSSRERAFRRWYNPTWFSESIPSAPYDPLAVRHAFEKAVIKRLMTDVPFGVLLSGGLDSSLVASITSRYLATTKAAEQWGSKLHSFCVGLEGSPDLKAAKEVADYLGTVHHEFTFTVQDGIDAIEEVIYHVETYDVTTIRASTPMFLMSRKIKSLGVKWVISGEGSDEIFGGYLYFHKAPNKEEFHTETCRKIKALHQYDCLRANKSTFAWGLEARVPFLDKEFINVAMNIDPEYKMIKRDEGRIEKYILRRAFDDEEKPYLPKHILYRQKEQFSDGVGYSWIDGLKDHAAKHVTDKMILNAGNIFRHNTPLTKEAYYYRMIFERFFPQNSARLTVPGGPTVACSTAKAVEWDAAWSNNLDPSGRAALGVHLSAYDDKQNNLINNKPVEFEKLIPMEAPSLGVAIHS

SEQ ID NO: 4518 - protein, 586 aa, Lotus corniculatus var. japonicus
MCGILAVLGCSDDSQAKRVRVLELSRRLKHRGPDWSGLHQHGDNFLAHQRLAIVDPASGDQPLFNEDQSIIVTVNGEIFNHEELRKQLPNHKFRTGCDCDVIAHLYEEHGENFVDMLDGIFSFVLLDTRDNSFLVARDAIGVTSLYIGYGLDGSVWIASELKGLNDDCEHFELFPPGHLYSSKEKEFRRWYNPPWFSEAIPSAPYDPLALRQAFEKAIIKRLMTDVPFGVLLSGGLDSSLVASVTARYLADTKAAKQWGSKLHSFCVGLEGAPDLKAAREVADYIGTVHHEFQYTIQDGIDAIEDVIYHVETYDVTTIRAGTPMFLMSRKIKSLGVKMVLSGEGSDEIFAGYLYFHKAPNKEELHQETCSKIKALHKYDCLRANKSTYAWGLEARVPFLDKKFIDVAMGIDPENKMIKRDEGRIEKWVLRKAFDDEENPYLPKHILYRQKEQFSDGVGYGWIDGLKDHAAKHVTDKMMLNASNIYPFNTPNTKEAYYYRMIFERFFPQNSARLSVPGGASIACSTEKAIEWDAAWSNNLDPSGRAALGVHDSAYDDQLNKSVSKGVEPEKIIPKMEVSPLGVAILS

SEQ ID NO: 4519 - protein, 265 aa, Streptomyces parvulus
MSLELTDRVMMVTGAGSGIGRAAARLLVGHGARVVLVGRTESALTETTAGLPSSHHLVVPCDVGDDKQVADCVARAVSRFGRLDGAFNNAGTFGSFGPLHQDTADNFDRVIATNLRGVWSCMRGQIEAMLTAGGGAIVNCASVAGHIGHAQSPLYSATKHAVIGLSKSVALQYAGDGIRVNVVSPGSTDTPMLRSLYADPSALAQRARRAPLGRLGKCEEVANAVVWLLSPLAAYVTGQTLGVDGGVTAGSAIPRTNATPEGQHR

SEQ ID NO: 4520 - protein, 249 aa, Fragaria x ananassa
MGRGRVELKRIENKINRQVTFAKRRNGLLKKAYELSILCDAEVALIIFSNRGKLYEFCSSSSMLKTLERYQKCSYGAMEVQKPAKELEESSYREYLKLKTRCESLQQTQRNLLGEDLGPLNTKELEQLERQLESSLKHVRSTKTQHMIDLLSDLQSKEHMLIEANRDLKTKLDEIDSRTQLRQTWEHGHDHQTMLYGTQHAQTQGLMFQPLDCNPTLQIGYNAVVSQEMPAATPAHAQPVNGFIPGWML

SEQ ID NO: 4521 - protein, 318 aa, Oryza sativa
  unsure (1)..(318): unsure at all Xaa locations
ITKPGLEPYLGLHYPATDIPQAARFLFMKNKVRMICDCRARSIKIIEDESLHLDISLCGSTLRAPHSCHLQYMENMNSIASLVMAVVVNENEDDDEVGADQPAQQQKRKKLWGLLVXPHDSPSYVLFPIAVCXEFLAHVSAVHXNKEFELERQVREKSILRMQTMLSDMLLXESSPLSIVSGTPNXMDLVKCDGAALLYGGKVWRLQNAPTESQIRDIAFWLSDVHRDSTXGLSTDSLHDAGYPGAAALGDMICGMAVAKINSKDILFWFRSHTAAEIRWGGAKHDPSDRVDSIRMHPKTVFKAFLDVVKMKSLPWMT

SEQ ID NO: 4522 - protein, 590 aa, Pseudomonas syringae pv. tagetis
MCGLAGELRFDHQPADLAAVERITHELAPRGPDAWGFHSQGPVALGHRRLKIMDLSDGSAQPMIDSHLGLSMAFNGAIYNFPELRAELESLGYQFHSGGDTEVLLKGYHAWGADMLPKLNGMFAFAIWERDSKQLFIARDRLGVKPLYLSKTDKRLRFASSLPALLKGGDISGMLDPVALNHYLNFHAVVPAPRTLLAGVEKLPPASWMRIDASGKVEQKVWWTLPYGPHDDEKNLTLEDWRDRVLDSTREAVAIRQRAAVDVGVLLSGGVDSSMLVGLLREVGVEDLSTFSIGFQDAGGERGDEFQYSDLIAKHYGTRHHQLRIQESEIIEQLPAAFRAMSEPMVSHDCIAFYLLSREVSKHCKVVQSGQGADELFAGYHWYPQVDGASDPVAAYRDAFVDRSYAEYAETVQPKWRTPNDAAGDFVRDHFAQPGASAAVDKALRLDSTVMLVDDPVKRVDNMTMAWGLEARTPFLDYRLVELSARIPGKFKLPDGGKQVLKEAARLVIPSEVIDRKKGYFPVPGLKHLQGDTLNWVRELLTDSSQDRGLFNPAMVDKLLTNPEGQLTPLRGSKLWQLAALNLWLSEQGL

SEQ ID NO: 4523 - protein, 217 aa, Oryza sativa
MSCGGAGQSGWLLEYGLVEEEIQGSDFIYMVDDPAAVSSVLLGFDVPRKEDGSGGQDNSASKKRFNELSAILEPGKPPRADKVSILSDAARLLSQLRAEAQKLKSSNESLQDSIKSLKAEKSELRDEKTRLKAERERLEQMLKGVGAATPAAPAPFVPHHAAAVAAAPAYHPAAFAQAGGKYVPYATSYAPPAAFWQWIPPTSLDTSKDPVMWPPVA

SEQ ID NO: 4524 - protein, 252 aa, Bordetella pertussis Tohama I
MGRLSGRNALITGAAVGIGAAMARRFCAEGASVLLGDIDAERGQALAAELAATGARARFARLDVTDEDSVRQAMELAEAEHGPLHILVNNAGGSSLNDRSVVEFALEEFWRAINIDLLGTVLCCRHAIPRIAAAGGGAVVNMGSIAALRGLKGRDAYTAAKGGVHALTRSMAVEFAEQRVRCNAIAPGAVLSERMARFIDEDPRVAAAVSRHLLGLPEPDEIAAMAVFLASEESRHVTGSIFQIDGGRAAAA

SEQ ID NO: 4525 - protein, 377 aa, Prionitis lanceolata
VETDDGNFRAMVPSGASTGIYEAHELRDGDPKVFNGKGVLKAIDNVNNELAVAVTDMDPTDQGGIDQALVDCDGSSDSSKSRLGANAILGVSMAVARAGAAKKGIPLYKHINNLAGNPTLMLPVPCFNVINGGSHAGNGLAFQEFMILPTGAETFKEAMRIGVEVYHKLKRTLEESYGKASTAVGDEGGFAPDIHDNEQALKLVQSAVKESGYEGVIQIGLDVAASEFYDKESGRYNLSLKTKVNGAAAGQLRSASELLHTYKLYAANYGVTSIEDPFDQDDFPSFESMTAELGEVIQIVGDDLLATNPNRIETAVERSACNALLLKLNQIGTVTEAIEANNTARDAGFGVMVSHRSGETEDPFIAALCVGLGTGQI

SEQ ID NO: 4526 - protein, 825 aa, Alcaligenes faecalis
GCPNDRITLPPANAQRTNMTCHFCIVGCGYHVYKWPELEEGGRAPEQNALGLDFRKQLPPLAVTLTPAMTNVVTEHDGARYDIMVVPDKACVVNSGLSSTRGGKMASYMYTPTGDGKERLSAPRLYAADEWVDTTWDHAMALYAGLIKKTLDKDGPQGVFFSCFDHGGAGGGFENTWGTGKLMFSAIQTPMVRIHNRPAYNSECHATREMGIGELNNAYEDAQLADVIWSIGNNPYESQTNYFLNHWLPNLQGATTSKKKERFPNENFPQARIIFVDPRETPSVAIARHVAGNDRVLHLAIEPGTDTALFNGLFTYVVEQGWIDKPFIEAHTKGFDDAVKTNRLSLDECSNITGVPVDMLKRAAEWSYKPKASGQAPRTMHAYEKGIIWGNDNYVIQSALLDLVIATHNVGRRGTGCVRMGGHQEGYTRPPYPGDKKIYIDQELIKGKGRIMTWWGCNNFQTSNNAQALREAILQRSAIVKQAMQKARGATTEEMVDVIYEATQNGGLFVTSINLYPTKLAEAAHLMLPAAHPGEMNLTSMNGERRIRLSEKFMDPPGTAMADCLIAARIANALRDMYQKDGKAEMAAQFEGFDWKTEEDAFNDGFRRAGQPGAPAIDSQGGSTGHLVTYDRLRKSGNNGVQLPVVSWDESKGLVGTEMLYTEGKFDTDDGKAHFKPAPWNGLPATVQQQKDKYRFWLNNGRNNEVWQTAYHDQYNSLMQERYPMAYIEMNPDDCKQLDVTGGDIVEVYNDFGSTFAMVYPVAEIKRGQTFMLFGYVNGIQGDVTTDWTDRDIIPYYKGTWGDIRKVGSMSEFKRTVSFKSRRFG

SEQ ID NO: 4527 - protein, 327 aa, Zea mays
  unsure (1)..(327): unsure at all Xaa locations
MGILCLGASSTLLCGEDRNNVLGLGCGNELVEVGSGHDGLDSVVGAVFPVDTDEAVRVXWGRLEYSRRKDAMEWIWKVDSYYRFGPLSLYLAVNYLEXDSLFSYDLPHDKPWMRQLLSVACLALAVKMEETVLPLPVDLQVCDVKFEFEARTIGRMELLVLATLKWRMQAVTPFTFISYFLDKFNGGKPPSMALASRCTEIIIGTLKGSTFLSFRPSEIAAASALAAVSENQVVGSSSALSASEVPINKEMIARCYELLQEQALVRKTGHINGSPSVPQSPIGVLDATCFSFRSEDVRLGSSQSNNISSSSNDNQVSKRRRLSISPI

SEQ ID NO: 4528 - protein, 142 aa, Prionitis lanceolata
LTTDLGLFRAAVPSGASTGAYEALELRDGDKSRYNGKGVLKAISNVNELIAPAVAGADVIDQAAFDAIMLELDGTENKAKLGANAILGVSMAACMAGAAAKGIPLYRHISEIAGKGSDPVIMPVPVMNVINGGSHAGNKLAM

SEQ ID NO: 4529 - protein, 494 aa, Sinorhizobium meliloti
MQNLPKLSMYIDGQWVAPASGEYIETVDPFTARPWALVPRGNAEDADRAVRAAHRAFSQGPWGKMHPTERGRIIQRFAALIEEHADALADIEVRDNGRLLAEMTHQIRYIPRWYHYYAGFADKIEGTLHPCDKPALSFSRHEPLGVCVGIVPWNAPLLLFSLKAAPALAAGNTLVMKPAEFTSATALKLMELVEKAGFPTGVINVVTGYGPEVGEPLVTHPLTRHVGFTGSTKTGAHLYSLAAKDVKRVSLELGGKSPNIVFGDADLDNAVRGVVGGIFGAVGQTCIAGSRLLVHRSIHDEFLEKLAVFTKTARIGDPRKVETQIGPIANSMQFEKVLGYIDIARREGAELILGGGRPDLEECGTGYFIEPTIFAGVSNDMRIAREEVFGPVLSAIVFDEPEEALAIANDSEFGLGAGVWTSDMRLALKMSERLEAGSVWVNTYRDISYTTPFGGYKKSGIGRENGVAGIYEYLQTKAVWLSTAEEIANPFVIG

SEQ ID NO: 4530 - protein, 198 aa, Oryza eichingeri
GQTPVFPRIFGHEAGGIVESVGEGVTDLAPGDHVLPVFTGECKECPHCKSAESNMCDLLRINTDRGVMIGDGKSRFSINGKPIYHFVGTSTFSEYTVMHVGCVAKINPAAPLDKVCVLSCGISTGLGATINVAKPPKGSTVAIFGLGAVGLAAADGARIAGASRIIGIDLNANRFEEARKFGCTEFVNPKDHDKPVQQ

SEQ ID NO: 4531 - protein, 459 aa, Moorella thermoacetica ATCC 39073
MSYQIAIIGGGPGGYVAAIRAAQLGAKVVVIEQDALGGTCLNRGCIPTKALLAGAAMVRGIKGAAAFGIDVEDYRVDYARLAARKDAVVKQLTGGIAYLFKKNKVDLIKGRGFLKGPGQIEVATADGTIENLQAENIILATGSEPALIKALGYNGRTVVTSTEALAWTEVPAELLIIGGGVIGCEFATLFATLGSKVTIVEMMPAILPMIDSEISRRFSMLLKKTGVEIKTKAQITEVKEAGGRVQATLADGQTINADKVLISIGRQFNTRGLGLEDAGITLGPKGEIVVDEYLRTSVPGIYAIGDVTNKIQLAHVASAQGLAAVTTIMGRPTKVNYDAVPSCIYTLPEIAGVGLTKEAAEGRGMKVRVGKFPFQASGKALCSGETDGMVKIIAEAESDRVVGVFIMGPHATELIAEGALAVNKGITAGELAATIHAHPTLSEAVMEAAEAVHGLSIHS

SEQ ID NO: 4532 - protein, 317 aa, Gloeobacter violaceus PCC 7421
MDAKPIFSQATSKGPRKTLDSARLKNHQRLHAVAVSSLSLLGCLAALALVCLGRPPGAVEVGLFLGGFLCTGFGVNIGLHRHFTHRSFQAVTPVRVALAILGSMAAQGPVIFWVALHRLHHEFSDQPGDIHSPHFHGEGWWGSVRGLWHAHVGWTFDHAVPNAAYYAGDLLRDRAIAPISRTYFFWVFLGLLIAAVLGGVLTGTWMGVLTGFLWGGPVRIFCWHNMIWSITSCAHFFGERPFDADDRSTNNFWFAIPTLGESWHNNHHAFPNAAMAGLEWWQIDPSGWVIRALEKLGLVWDVKIPTQAMRRAKARAI

SEQ ID NO: 4533 - protein, 291 aa, Pirellula sp.
MSVPNVDPSHQSNASANEATRPSPAAEGLDKSGERVREMFRQIAPRYDVMNHLLSLNIDKWWRRKAVQTLKIKGDDPILDLCCGTGDLAIAIADSAGSDVQVIGSDFCHAMLEIARVKESKRTRDTAGGSGRHTIPFLEADSMALPFDDDAFQCVTVAFGLRNIADTDQGLSEMARVCKPGGQVLVLEFSQPTLPVLKQAYNFYFRHVLPRIGQWMARNDKSAYEYLPESVGKFPCGDALAGRMRDVGLQHVTFRPLTLGVATIYVGEKPGGKTDHAEMAAHREREALVAT

SEQ ID NO: 4534 - protein, 183 aa, Zea mays
  unsure (1)..(183): unsure at all Xaa locations
MSVQEYLXEKHLLSRKIEEAVNAAVRAKAPDPALFIVGHMRREAPTVITRVRARQILDGRXHPALRVELHTNKAVHRASTASVGALEGAAADAAGASERRKFLARGVAYAVRVINDKVSEALVGMDPQQQTQIDQAIMXLDRARHKVPLYKHIADLVGKSATTLRVPAITVINGGRAHEDTRI

SEQ ID NO: 4535 - protein, 332 aa, Gloeobacter violaceus PCC 7421
MSSPFERAMQSNPPASPLPWQKTIIKSTAAVRNAQRMHALAILSLPAVATAAAAAIALRSGLGLLELGLFLGMYTLTMVGGITVGFHRHFTHCAFQAHPVIRVLLAVLGSMACEGPLIYWVSNHRRHHQYSDRPGDVHSPYIRAQTPLGGLRGFWHAHIGWTFDHDLTNATIFARDLIRDPLIARVSRLYYLWAALGLLLPALLGAWWTRDTNGALLGLLWGGGVRLFCSYHFTNSINSVTHLFGSRPFETGERSTNNPWLALPTGGESWHNNHHAFPNSAVFGLQPWQPDPGAWLIRLLEKLGLAREVKVPSQALIAAKAVRPQPTRSHAG

SEQ ID NO: 4536 - protein, 198 aa, Oryza alta
GQTPVFPRIFGHEAGGIVESVGEGVTDLAPGDHVLPVFTGECKECPHCKSAESNMCDLLRINTDRGVMIGDGKSRFSINGKPIYHFVGTSTFSEYTVMHVGCVAKISPAAPLDKVCVLSCGISTGLGGTINVAKPPKGSTVAIFGLGAVGLAAAEGARIAGASRIIGIDLNANRFEEARKFGCTEFVNPKDHDKPVQQ

SEQ ID NO: 4537 - protein, 479 aa, Exiguobacterium sp. 255-15
MNGKFLINGQWLDQGRERTDVKNPATGEVVGSVPNGTKSDVNDAVEAAHNAFPDWSKRTVYERAALLEKLYAKMLEKKDELARLMTLEMGKPLAESEGEVEYAANFVKWFAEEGKRAYGRIIPSHDATKRLHVIKQPVGVVAAITPWNFPAAMITRKLAPALVAGCTFVLKPPTATPLTALRLLELCQEVGIPDGVVNAVTGSGKDLGESLATHPHVAKITFTGSTEVGRTLMAQGAETIKAMSLELGGHAPILVFDDCDLDLAVRETIKSKFRNGGQTCVCGNRIYVSDSIYDEFVEKLGQETAKLKTGNGLDQETKIGPMINKAGYDKVKKHVDDATSAGARIVTGGSGQTDDDNDVYYYEATVLADVTPQMLIMNEETFGPVAPVQRVSSDEEAVHYANQTPFGLASYVFTNNYARAFKAIEHLDYGIVGWNDGVPSAAQAPFGGMKQSGVGREGGSEGLEAYLETKYVSIGGLDQ

SEQ ID NO: 4538 - protein, 549 aa, Porphyromonas gingivalis W83
MAKSALHLARMSYQPKMPASLQGAVKIIEGKATEAVSDKEEIAAIFPRTYGLPLISFAPGGERTEYPPTNVGVILSGGQAPGGHNVIAGLFDEMKLLNPDSRLFGFLMGPDGLIEHKYRELTAEVIDEYRNTGGFDMIGSGRTKLDKPEQFEAGLEILRELDIKALVIIGGDDSNTNACILAEYYASIDAGIQVIGCPKTIDGDLKNKQIETSFGFDTAAKVYSELIGNIQRDCNSARKYWHFIKLMGRSASHITLECALQTHPNICIVSEEVEANNYYLDDVVTYIAETVVRRSEAGMNFGTVLIPEGLIEFLPAMKRLIKELNEFLSQNDAEFKLIKRSAQRQYIKNKLSPENSRLYDSLPVDVARQLIADRDPHGNVQVSLIATEKLLADMTAQKLAEWAEEGRFQGRFSTLTHFFGYEGRCAMPSNFDANYCYCLGRAASILIAAGKTGYMAAIKNTADPVSEWEAGGVPMTMMMNMERRSGKMKPVIRKALVDMDGEPYRALREMRREWALSTEYVYPGPIQFFGPEHVCDSPTMTLRLEKNDR

SEQ ID NO: 4539 - protein, 362 aa, Nostoc punctiforme PCC 73102
MNLNSQTSSSIRKPKTFNNPERFIEGWYWVIPSRNLRVGEVKPVTILGRELVIYRGKDRRVTTFDAYCPHMGAHLAEGKVEGNALRCFFHHWKFDAEGMCIDIPCLDTPPSLKLQTWPTAEKYGMIWVWTGEIPQQPLPFIPELEQKECDVAIHSPFLMNCHPNVVMINAIDTQHVNTVHKLPIEIIFERQELNENAIIFSNTTNIKENSSFIKLIRLFYKNAITISICYWYGSIGIVTLGPDFFHIHTMFAVRLHEGGKAEGQILLITKKRKGFFGWLSNRVVLWLTKIAGKFFLMDDIKIVQTIKFDLKTPIKADQSIMQFINHVERQQSLMWGTWQEARSRDVESKPKRERWQDTASND

SEQ ID NO: 4540 - protein, 193 aa, Triticum aestivum
  unsure (1)..(193): unsure at all Xaa locations
IRHEPPSKLYTYIAQPWAPTVMASSATSVAPFQGLKSTAGLPVSRRSNGASLGSVSNGGRIRCMQVWPIEGIKKFETLSYLPPLSTEALLKQVDYLIRSKWVPCLEFSKVGFIFREHNASPGXYYDGRYWTMXKLPMFGCTDATQVINEVEEVKKEXYPDAYVRIIGFDNMRQVQCVSFIAFKPPGCEESGKA

SEQ ID NO: 4541 - protein, 195 aa, Oryza latifolia
GQTPVFPRIFGHEAGGIVESVGEGVTDLAPGDHVLPVFTGECKECPHCKSAESNMCDLLRINTDRGVMIGDGKSRFSINGKPIYHFVGTSTFSKYTVMHVGCVAKINPAAPLDKVCVLSCGISTGLGATINVAKPPKGSTVAIFGLGAVGLAAAEGARIAGASRIIGIDLNANRFEEARNFGCTEFVNPKDHDKP

SEQ ID NO: 4542 - protein, 312 aa, Streptococcus pyogenes M1 GAS
MTKTAFLFAGQGAQKLGMARDFYDNFAIVRKTFDQASQVLGYDLRRLIDSDELKLNQTSYTQPAILTSSIAIYRVLGLHHVKPDMVAGLSLGEYSALVASGALSFEDTLSLVAKRGRLMEEAAPQGSGKMVAVMNTDVQVIEEVCQIAAKHGVVAPANYNTPSQIVIGGQTDAVNVAVELLKERGVKRLIPLNVSGPFHTALLEPASRLLAKELERYNFSDFKIPLVGNTEANIMEKDRIPELLARQVMEPVRFYDSVATLVESGITQFIEVGPGKVLTGFVKKIDKNLLCTSVENMVSLRLFLDREDIHGN

SEQ ID NO: 4543 - protein, 163 aa, Oryza sativa
  unsure (1)..(163): unsure at all Xaa locations
NNAGGGPVLKSKAVVDANLREKESFNELQDEIQRQILQAQTDIEELKKKLEQSRGGGGYKEECEAXRKMISLQPPRSETEKLIPGLQKEXIANLEAENTACIRTLELRKKQLSLLLHVVEELQISIEDEQRSIADELRAGAEEQQNMSTDEGSGDASDAMALD

SEQ ID NO: 4544 - protein, 198 aa, Oryza latifolia
GQTPMFPRIFGHEAGGIVESVGEGVTDLAPGDHVLPVFTGECKECPHCKSAESNMCDLLRINTDRGVMIGDGKSRFSINGKPIYHFVGTSTFSEYTVMHVGCVAKINPAAPLDKVCVLSCGISTGLGATINVAKPPKGSTVAIFGLGAVGLAAAEGARIAGASRIIGIDLNANRFEEARKFGCTEFVNPKDHDKPVQQ

SEQ ID NO: 4545 - protein, 193 aa, Tropheryma whipplei str. Twist
MEIVFVSENENKIAEAREILLPLGFQSIFCGVTCRETGLTFTENAVLKAQAAVGSVKDVPIMADDSGICVDALNGMPGVLSSRWSQDGRNIDLLLWQMRDVPDVHRTAHFVCSIACVMPNTEVRTVSSVWHGRILHAPDGTGGFGYDPVFLPDGYSVSAAGLGSDLKNRISHRYKALRLMSSLLKRTYFSCHA

SEQ ID NO: 4546 - protein, 528 aa, Anabaena variabilis ATCC 29413
MDAKALWQRYQEWLYFHEGLGLYLDVSRMRFDDAFVKSLLPKFDKAFADMAELEKGAIANPDENRMVGHYWLRNPDLAPTPEIAQEIVQTLEQIEAFAEKIQTGAIHPPKANRFTDIISIGIGGSALGPQFVAEALAPEFPPLKIHFIDNTDPAGIDKILTHLRNNLASTLVLVISKSGGTPEPRNGMIEVKKAYAGQNLDFAQYAVAITSTGSNLDKVAQAEGWLATFPMYDWVGGRTSEMSSVGLVPAALQGIDVRAMLEGAKEMDDATRVPEVKNNPAALLALSWYYSGNGKGEKDMVVLPYKDSLLLFSRYLQQLVMESLGKEKDLDGKTVYQGIAVYGNKGSTDQHAYVQQLREGVPNFFATLIEVLEDRNGASPEIDPGVTSGDYLSGFLLGTRQALYENQRDSITVTIPQVNARTVGALIALYERTVGLYASLVNINAYHQPGVEAGKKAAAVILDLQTKVVGLLQKEKTALSLEQIAEKIGAADQVEAIYKILRHLQANQRGVVFQGNLGQPSSLKVSIS

SEQ ID NO: 4547 - protein, 466 aa, Burkholderia fungorum LB400
MPQHFNAVVIGTGQGGSPLAVRLGQSGRKTAVIERAAFGGTCVNVGCTPTKSYVASARAAHVARHCAELGVQVSGAISVDLAAVKARKDRIIGQSRDGVEKWLRGAQNVSVFNGHARFTGAHTLAISGPDGTVLEEISADEIFINTGTRAVVPPLEGIGRIRYYTNSNLLELTELPDHLVIVGGSYIALEFAQIFRRFGSRVTVLVRGERVLTREDADFAESVRKVLAREGVEFRFGVQPSRVEPHPHHPDEVCIGFEQNIPALEASHLLFATGREPNTDDLGLAAAGITTDRHGTIPVDGQLRTNVPGVWAIGDVNGRGAFTHTSYDDFQIVAANLLDGGARSVDTRIMAYAVFVDPPLARVGASEAEVRKAGRPALIATMPMSRVGRARERGETDGFMKVMVDRESRQILGAAIHGIEGDEAIHTFIDIMAAGAPYPTLQYAMHIHPTISELVPTLLDGLKPMQ

SEQ ID NO: 4548 - protein, 853 aa, Ipomoea trifida
MRNAAEDHRYPLWFFLISQIFIGNLAVALAVDSITPTQPLAGNRTLVSSDGLFELGFFTPNGSDQSYVGIWYKEIEPKTVVWVGNRDGASRGSAGILKIGEDGNIHLVDGGGNFIWSPTNQSAARNTVAQLLDSGNFVLRREDDENPENYLWQSFDYPTDTLLPGMKLGWDSKTGLNRYISAWKSLNDPGEGPISFKLDINGLPEIFLRNRDKIVYRSGPWNGVRFSGVPEMKPTATITFSFVMTKNERYYSFELHNKTLYSRLLVTRNGNLERYAWIPTSKIWSKFWYAPKDQCDSYKECGTFGFCDTNMSPVCQCLVGFRPKSPQAWDLRDGSDGCVRYHELECRKDGFLTMNFMKLPDTSSSFVDTTMNLDECMKMCKNNCSCTAYTNSNISNGGSGCVIWTTELLDAAVRGGRRWPSCLHPRSASDVAQGGDSGDASGRTKRIIIACGIAVGVGILLFALSALFILKRRQSKRALGKNTELRGFRDRSQDLLMNAAVIPSKREYSGETMTDEFELPLFDFSTIVVATDNFADVNKLGQGGFGCVYKGMVEGEEIAVKRLSKNSGQGVEEFKNELRLIARLQHRNLVRLLGCCVDMEEKILIYEYMENKSLDSTLFNKQRSSLLNWQTRFNIICGIARGLLYLHQDSRFRIIHRDLKASNILLDKEMNPKISDFGMARIFGGDETDANNTKRVVGTYGYMSPEYAMDGLFSVKSDVFSFGVLVLEIVTGKKNRGFYNQNNQQNLLGHAWRLWRERRGSELLDSAIGESYSLCEVMRCIQVGLLCVQEQAEDRPNMATVVLMLGSESATLPQPKHPGFCLGSRPADMDSSTSNCDESCTVNQVTVTMLDGR

SEQ ID NO: 4549 - protein, 272 aa, Nostoc punctiforme PCC 73102
MTIKFGLIGGGVMGEALLSRLIARGIYQSSEVIVSEPLPSRLDFLQQQYGVSVTTDNSEVFTQAKEVVFLAVKPQVFSAIAQELADIDIINREQSPLIISILAGVPLNQLEAAFVQLPVIRAMPNTPATVGAGITAICLGAYTNTKHHQIAQQVFSAVGEVVEVSEGLMDAVTGLSGSGPAYVALLVESLADGGVSAGLPRAIANQLALQTVLGTAKLLYETKMHPAELKDRVTSPGGTTIAGIAKLEQAGFRSALIEAVKAATERSQELGK

SEQ ID NO: 4550 - protein, 454 aa, Streptomyces parvulus
MEKTDVDRLRTLDREHMWYPWTPMTEWMARDQLVVERAEGCWLIDADGKRYLDGRSSMGMNLHGHGRSEIVEALVAQARKAGETTLYRVSHPAAVELAARLASMAPAGLQRVFFAESGSTAVETALKAAYAYWVAKGEPQRSTFVSMEGGYHGETLGTVSLRGTNGEQVDMIRKTYEPLLFPSLSFHQPHCYRCPVGQSSDSDCGLECTDSLENLLTREKGRIAAVIVEPRVQALAGVITAPEGHLAKVAEITRRHGVLLIVDEVLTGWARTGPTFSCEAEGVTPDLMTVGKALTGGYLPLSATLATEEIFGAFRESVFLSGSTYSGYALGAAVALASLDLFEKEDVPARAKALADVLTTALEPFRALTHVGDVRQLGLIAGVELVADRETRAPYPPQERVVDRICTLARDNGVLVNAVPGDVITMLPSPSMSPDDLRFLTGTLYTAVREVTEE

SEQ ID NO: 4551 - protein, 291 aa, Treponema denticola ATCC 35405
MKAIILAGGAGTRLYPLTKAVSKQILPMYDKPMIYYPLSVMMLAGIREVLIISTPRDIGLFKELFSDGNWLGMRFEYAVQDKPRGLADAFIVGEKFIGADSCALVLGDNIFYGRGFSSTLADAVSSIKDNGGALIFGYYVKDPRAYGVVDFDDKGNVLSIEEKPQNPKSNYAIPGLYFYDNEVIQIAKSIKPSARGEIEITSVNNAYLAMGKLRVEKLGRGMAWLDTGTYDGLLEASNFIATIQKRQGMYVSCIEEIAYLQKWISKTQLLNLSSSYNNEYGDYLKYIAENC

SEQ ID NO: 4552 - protein, 142 aa, Zea mays
  unsure (1)..(142): unsure at all Xaa locations
MASLFKDPSKLSAYRDRRFKGTQEEYEAALLASTTLYIGNMSFYTTEEQAYELFSRAGEIKKIIMGLDKNSKTPCGFCFVLYYSREDAEDAVKYISGTMLDDRPIRVXDFDWGFEEGRQWGRGRSGGQVRDEYRTDYDPDIL

SEQ ID NO: 4553 - protein, 437 aa, Candida albicans SC5314
MYKTQLIKSSTQARFLAVRQLSSTSQLLKWNDIPLAPPDKILGISEAYNNDSNPQKVNLGVGAYRDNSGKPIIFPSVKKAEEILLGKETEKEYTAIVGSKNFQSIVKNFIFNNSNKDANGKQLIDDGRIVTAQTISGTGSLRVIADFLNRFYSNKKILVPKPTWANHVAVFKDAGLEPEFYSYYETSKNDLDYANLKKSLTAAPEGSIVLLHACCHNPTGMDLTSEQWDEVLQIVQDKKFFPLVDMAYQGFASGKPFEDIGLIRKLTKLANENKIPSFALCQSFAKNMGLYGERTGSISIINSSGEASKAVESQLKKLIRPIYSSPPIHGSKIVEVIFDESSGLLPQWLDELDKVVGRLNTVRSKLYEKLDKSNYNWDHLLKQRGMFVYTGLSPEQVIRLRNEYSVYATEDGRFSISGINDNNVDYLANAINEVIKN

SEQ ID NO: 4554 - protein, 363 aa, Vibrio vulnificus CMCP6
MTDKTYKIAVLPGDGIGPEVMAQAHKVLDAIEKKHAIHFEREEHDVGGIAIDNHGCPLPQSTVTACEESDAVLFGSVGGPKWEHLPPNDQPERGALLPLRKHFQLFCNLRPAQIHSGLEAFSPLRADISGRGFDIVVVRELTGGIYFGQPKGREGEGANEKAYDTEIYHRFEIERIAKIAFESARLRRKKVCSIDKANVLQSSILWREVVEELAKDYPDVELSHMYIDNATMQLIKDPAQFDVMLCSNIFGDIISDECAMITGSMGMLPSASLNESKFGLYEPAGGSAPDIAGKNIANPVAQILSAALMLRYSLGEEAAAQDIENAVSQALAAGELTADLAGDKPALSTAEMGDKIAQYILNS

SEQ ID NO: 4555 - protein, 214 aa, Neurospora crassa
MANDEYDIPLPVVLIGDSGVGKSNLLSRFTRNEFNLDSKSTIGVEFATRSIQVDSKTIKAQIWDTAGQERYRAITSAYYRGAVGALLVYDISKGVTFENVNRWLKELRDHADQNIVIMLVGNKSDLRHLRAVPTEDAKKFAEENHLSFIETSALDATNVELAFQNILTEIYKIVSTKNFDNGPSGSNEGHQNLSGQSISLSQTANDPQAKSGCC

SEQ ID NO: 4556 - protein, 225 aa, Arabidopsis thaliana
MNLKETELCLGLPGGTETVESPAKSGVGNKRGFSETVDLKLNLQSNKQGHVDLNTNGAPKEKTFLKDPSKPPAKAQVVGWPPVRNYRKNVMANQKSGEAEEAMSSGGGTVAFVKVSMDGAPYLRKVDLKMYTSYKDLSDALAKMFSSFTMGSYGAQGMIDFMNESKVMDLLNSSEYVPSYEDKDGDWMLVGDVPWPMFVESCKRLRIMKGSEAIGLGKFSFLFVS

SEQ ID NO: 4557 - protein, 472 aa, Xanthomonas campestris pv. campestris str. ATCC 33913
MHRHVHEPEILADPAAFEAAEHWRQRDLAVVWHPCTQMREHPHTLPLVPIARGDGAWLIGHDGRHYLDAVSSWWTNLFGHAEPRIGAAIAQQAGRLEQVMLAGFTHAPAVQLAERLLAIAPRQPDRAPLAKVFYADNGSAGVEVALKMAFHYFHNRDEHRRTRFIALENGYHGETIGALSVGDIPLYRRVYAPLLLESIFAPSPDAYLAEPGQSAEDYALQAADALQHLLEQSPGEICALILEPRVQCAGGMRMYHPAYLRRARELCDAHGVFLIADEIATGFGRTGTLFACEQAGVMPDLLCLSKGLTGGFLPLSAVLATQQLYDAFLDDSRERAFLHSHSYTGNPLACAAALATLQIFADDDIIARNQRTAAHMTQLAAQIGEHSAVADVRQAGMIVAFELTQGGDKRTPFPAAARVGLQAYRAALARGVVLRPLGDVLYWMPPYCVDDAQLALLADTTRHAIAKAVACA

SEQ ID NO: 4558 - protein, 347 aa, Rhodomonas salina
CELRDGDDKRYLGKGVLKAVENVKSVIAPALAGMNPVEQDAVDNKMIQELDGTPNKTKLGANAILAVSLACCKAGAAQKGVPLYKHIADLAGTKKICLPVPWMNVINGGSHAGNRLAMQEFMIGPVGAKTFKEAMQMGCEVYHTLKKVIKKKYGQDACNVGDEGGFAPNIQANDEGLKLLTEAIEMAGFTGKIKIGMDVAASEFCKDKKYDLDFKNDASKPEDYLSPDALTDMYKGFCKDFPVVTIEDPFDQDDWEAYTKMTGEMECQIVGDDLLVTNPTRITTALEKKACNALLLKVNQIGSVSESIKAAKMSMDSNWGVMCSHRSGETEDCFIADLVVGLGTGQI

SEQ ID NO: 4559 - protein, 347 aa, Guillardia theta
CELRDGDKSRYLGKGVSKAVKNVEEKIAPAIKGMDPTDQEGIDKKMIEVDGTPNKTNLGANAILAVSLAVAKAGAAQKGVPLYQHFADMAGVKKYVLPVPWMNVINGGSHAGNRLAMQEFMIGATGATSFKEAVRMSCEVYHALKAVIKKKYGMDACNVGDEGGFAPNIQDNKEGLSLLTEAIANAGYTGKIKIGMDVAASEFYQDGKYNLDFKNANADPSMVVSGDELIEVYKSFTQDFPVVTIEDPFDQDDWEHYNKFNSQMPHTQIVGDDLLVTNPNRITMAIEKKACSGLLLKVNQIGTVSESIKACKMSQEQGWGVMRSHRSGETEDTTIADLVVGLATGQI

SEQ ID NO: 4560 - protein, 195 aa, Oryza officinalis
GQTPVFPRILGHEAGGIVESVGEGVSDLAPGDHVLPVFTGECKECAHCKSEESNMCNLLRINVDRGVMIGDGQSRFTIKGKPIFHFVGTSTFSEYTVIHVGCLAKINPEAPLDKVCILSCGISTGLGATVNVAKPKKGQTVAIFGLGAVGLAAMEGARLSGASRIIGVDLNPAKFEQAKKFGCTDFVNPKDHSKP

SEQ ID NO: 4561 - protein, 401 aa, Myxococcus xanthus
MTALSQSEPSLSASSDSSTDALVQKAKRHLLQNYKQPPFVLARGQGARVWDMDGREYLDLIGGIATCALGHCHPEVVAAAKAQLDSLWHVSNVFYSQPQIDLAAQLTEWSGLSRAFFCNSGAEANEALLKLTRKVMKDRGTPERFEVISFDSSFHGRTLATVTATGQAKYQKGFEPLPAGFTHVPYGDLEAVRKAVGPATAAILVEPIQGEGGVRMAPLGFLVGLRALCDEHGLLLLVDEVQTGMGRTGKPFGFMHEGIVPDGISVAKALGNGLPIGAMLCKEELGASLTPGTHGSTFGGNPVAAAAANAVVRILRRPGFLDEVQEKGAYLLARARELQGRLPAGRIQAVRGQGLLVGVQLDHKVAPVIAQVHEEGLLVNPAGDRTMLFAPPFIVTVRELD

SEQ ID NO: 4562 - protein, 254 aa, Zea mays
  unsure (1)..(254): unsure at all Xaa locations
MDVKCRRLEGKVAIVTASTMGIGLAIAERLGLEGAAVVISSRKQKNVNEAVEGLRAKGITAVGAVCHVSDAQQRKSLIETAVKSFGHIDILVSNAAANPSVDSILEMKESVLDKLWDINVKASILLIQDAAPHLRKGSSVIIISSIAGYNPEQGLTMYGVTKTALFGLPKALAXEMGPDTRVYCIAXPGFVPTRFASFLPENXPFRKELYERAKLKKLGTVENMVGVGAFLGSDDASYIRGETIVFFGGVQFRL

SEQ ID NO: 4563 - protein, 551 aa, Haemophilus influenzae R2866
MTTLFEVAQHWLNQDPDAETRAELTALLDAAKGGDKAAEAEELHARFNGRLQFGTAGLRGRLQAGSMGMNRVLVSQAAGGLAEYLKGYDKEPSIVIGYDGRKNSDVFARDTAEIMAGAGVKAYLLPRKLPTPVLAYAIQYFDTTAGVMVTASHNPPEDNGYKVYLGKANGGGQIVSPADKDIAALIDKVAAGNIQDLPRSDNYVVLNDEVVDAYIAKTASLAKEPACDINYVYTAMHGVGYEVLSKTLAKAGLPQPHVVADQVWPDGTFPTVNFPNPEEKGALDLAIKVAKEKNAEFIIANDPDADRLAVAIPDAQGNWKSLHGNVVGCFLGWYLAKQYQGKQGTLACSLVSSPALAEIAKKYGFQSEETLTGFKYIGKVSGLLFGFEEALGYLVDPDKVRDKDGISAAIVFLDLVRNLKKQGKTLADYADEFTKEFGAYVSGQISIRVSDLSEIGKLMTALRNNPPAEIAGVKVAQFIDHTKTDRQSDILVFNLENGGRLIARPSGTEPKIKFYLDARGKDPKDADRILAEFDEGVRHILRQDAYGKQDC

SEQ ID NO: 4564 - protein, 195 aa, Oryza eichingeri
GQTPVFPRILGHEAGGIVESVGEGVSDLAPGDHVLPVFTGECKECAHCKSEESNMCDLLRINVDRGVMIGDGQSRFTIKGKPIFHFVGTSTFSEYTVIHVGCLAKINPEAPLDKVCILSCGISTGLGATLNVAKPKKGQTVAIFGLGAVGLAAMEGARLSGASRIIGVDLNPAKFEQAKKFGCTDFVNPKDHSKP

SEQ ID NO: 4565 - protein, 490 aa, Debaryomyces hansenii
MAPLQAIRKYDYLVIGGGSGGVASARRAASYGAKVLLIELKFNKMGGTCVNVGCVPKKVMWYAGDLAEKRHHLKSYGLSTTDDKVKYGDFDWSTFKDKRDAYVKRLNGIYERNLKNEGVDYIYGFAHFANSNGDVEVTLTGDQELSFLEEGKEFKKDEKLVFAGSKTLIATGGYAINPPNVEGHELGTTSDGFFELQKQPKSVAVVGAGYIGVELSGIFKALGSETHLVIRGDTVLRSFDESIQNSITDYYTDKLGVNIIKQSGSVSKVEKIDGDRKKITLGNGQVLEVDELIWTMGRKSLINIGLDKVGVTLNDKQQVDVDQFQQTANPNIFSLGDVIGKVELTPVAIAAGRRLSNRLFSGDKAFENDHLDYSNVPSVIFSHPEAGSIGLSCKEAKEKYGEDQIKIYKSKFNAMYYAMMEDDSLKSPTSYKVVCAGEDEKVVGLHIVGDSSAEILQGFGVAIKMGATKKDFDSCVAIHPTSAEELVTMK

SEQ ID NO: 4566 - protein, 432 aa, Tropheryma whipplei str. Twist
MSKIKLVTAIPGPESERLHRMRQATVARGVSSTFPIYIKESHGSILIDEDGNHLIDMGCGIGVTTLGHSHPAVVDAARAQINSVWHTLFSITPYESYVEVCKLLAKNTPGDFPKKSLLLNSGAEAVENAVKISRAYTGRPTVAVLDRSFHGRTNLTSSMTYRGSLYSSDFGPTASNIVSAPNSYPLHDRLSGKEAAARTISYLETRVAARNIACLFYEPIQGEGGVIVPADGFLPALQDWCRENDIVFVADEIQSGFGRTGCFFASETDGLEPDIVCSAKGIANGLPLSAVTGRSDIVDAARPGTLGGTFTGNHVSCAAALEVFEQYKDNAPLDSASRLGDILKELLLNLQSKHPQIAEVRGRGAMFGAEFSGNHAGEMVSRVITRAAELGVIFLSSGVEGNVVRFLPNVFMDKETIEEAIGVLDSAISSVV

SEQ ID NO: 4567 - protein, 158 aa, Glycine max
MAEEHRCQAPRFCANNCGFFGSPATHNMCSKCYRDFQLKEQQSSNAKMVLNQSLVPPPPPSVISQPSSSSAPAADPASAVVVDAPRAAEELKAPQQNRCMTCRRRVGLTGFKCRCGMMLCGTHRYPEQHACEFDFTHASGEQIAKANPVVKGEKLEKI

SEQ ID NO: 4568 - protein, 626 aa, Shigella flexneri 2a str. 301
MAIEIKVPDIGADEVEITEILVKVGDKVEAEQSLITVEGDKASMEVPSPQAGIVKEIKVSVGDKTQTGALIMIFDSADGAADAAPAQAEEKKEAAPAAAPAAAAAKDVNVPDIGSDEVEVTEILVKVGDKVEAEQSLITVEGDKASMEVPAPFAGTVKEIKVNVGDKVSTGSLIMVFEVAGEAGAAAPAAKQEATPAATPAPAAGVKEVNVPDIGGDEVEVTEVMVKVGDKVAAEQSLITVEGDKASMEVPAPFAGVVKELKVNVGDKVKTGSLIMIFEVEGAAPAAAPAKQEAAAPAPAAKAEAPAAKAEGKSEFAENDSYVHATPLIRRLAREFGVNLAKVKGTGRKGRILREDVQAYVKEAIKRAEAAPAATGGGIPGMLPWPKVDFSKFGEIEEVELGRIQKISGANLSRNWVMIPHVTHFDKTDITELEAFRKQQNEEAAKRKLDVKITPVVFIMKAVAAALEQMPRFNSSLSEDGQRLTLKKYINIGVAVDTPNGLVVPVFKDVNKKGIIELSRELMTISKKARDGKLTAGEMQGGCFTISSIGGLGTTHFAPIVNAPEVAILGVSKSAMEPVWNGKEFVPRLMLPISLSFDHRVIDGADGARFITIINNTLSDIRRLVM

SEQ ID NO: 4569 - protein, 542 aa, Zea mays
  unsure (1)..(542): unsure at all Xaa locations
MSAAQLLRHSRKLRSLQNPVGCENFSFVRHFSSGSGSFIARENGIGKRTRGTRFSQHNQPAKQLETFSAGVNGSCTWRIASNSLTPSAASWLSGSFSCGQVVSARPFSSSADLPPHQEIGMPSLSPTMTEGNIAKWLKKEGDKVSPGEVLCEVETDKATVEMECMEEGYLAKIIHGDGAKEIKVGEVIAITVEEEGDIEKLKDYKPSSSAEPVAPAEPKAEPEPSQPKAEXXXPTQAPEAKTPKIEEASQSGDRIFASPLARKLAEDNNVPLSSVKGTGPDGRILKADIEDYLASVAKGGLRESFADPGLGYVDIPNAQIRKVTANRLLASKQTIPHYYLTVDARVDKLVQLRGELNPLQDASGGKKISINDLVIKAAALALRKVPQCNSSWMNDFIRQYHNVNINVAVQTEHGLFVPVIRDADKKGLGAIAEEVKQLAQKARDNSLKPADYEGGTFTVSNLGGPFGIKQFCAIINPPQSAILAIGSAEKRVIPGSADGQFEFGSFMSATLSCDHRVIDGAIGAEFLKAFKGYIENPTSMLL

SEQ ID NO: 4570 - protein, 690 aa, Sorghum bicolor
MVTLLAFRLPPLFLLLAAAAAAAAADNGNMTEAEAAAMAALVNLKKSFTDPTGRLEAWSATSPFPPCDAASPWPGVQCYKGSLVGVRLTHMNLSGTFDFGAIAKLPRLHSVNLKHNALSGPLPASLGTLRGLRALYLSSNNFSGPIPADVFANMRWLKKLYLDNNRITGPLPADAIAKAPRLMELHLDRNQIDGPVPFKLPESLKRFNVSHNRLSGTIPQSVAERYDASSFAGNPGLCGSPGSDAAVCVAAGPALPPAFPPPTAADYMAMEEETSVFVVIGIILLVILLVSGAMVLMLRQDERNSVATAWDYYAGSTTTGGAGAGASGSSKSVADAASTTAAAPRAGEAVAVDMASGGSSSSHGGGGSSSGRRMGEFVLLNEDIPAFGLPDLMKASAEVLGNGTLGSAYKAAMRNGVTVAVKRLRDMNRFGRDEFEQHVHMLGQLRHPNVLPPVGYHYRKEEKLIVSEYMPRGSLLYILHGDQSPNRVILDWQGRVRIAVGVVRGLAFLHERLGIPAGRLVSMDGADFDAPPPPPPHGNLKSGNILLGADMEPLLVDYGFFPLVNAAQAPQAMFAFRSPEGTTRGVVSARSDVYCLGVVLLELVTGRFPSQYLLSARGGTDVVHWAATAVAEGGEAELVDPAIAAAGGDAAVRLLRVGVHCASPEPECRPSVAEAAWMVEEIGSAAGGAS

SEQ ID NO: 4571 - protein, 330 aa, Arabidopsis thaliana
MADTSSRTDVSTDGDTDHRDLGSDRGHMHAAASDSSDRSKDKLDQKTLRRLAQNREAARKSRLRKKAYVQQLENSRLKLTQLEQELQRARQQGVFILSSGDQAHSTGGNGALAFDAEHSRWLEEKNRQMNELRSALNAHAGDTELRIIVDGVMAHYEELFRIKSNAAKNDVFHLLSGMWKTPAERCFLWLGGFRSSELLKLLANQLEHMTERQVMGINSLQQTSQQAEDALSQGMESLQQSLADTLSSGTLGSSSSDNVASYMGQMAMAMGQLGTLEGFIRQADNLRLQTLQQMLRVLTTRQSARALLAIHDYSSRLRALSSLWLARPRE

SEQ ID NO: 4572 - protein, 125 aa, Saccharomyces cerevisiae
MGEGLLDLRSQLGFYKFYHHNPKNVLIHSIFVPTILFSGSCMLHRVKIYQSISLTAVLSVLFSIFYCLLYLPTGLLAGVLLLLLNLALIDHRVDLTFKQELGLFIIGWIFQFVGHGVFEKRTSQR

SEQ ID NO: 4573 - protein, 467 aa, Pseudomonas aeruginosa UCBPP-PA14
MMESYDVIVIGAGPGGYNAAIRAGQLGLKVACVEGRETLGGTCLNVGCMPSKALLHASELYAAASGGEFARLGIRVSPELDLAQMMKQKDESVAALTRGVEFLFRKHKVQWIKGWARLQGEGRVGVALADGGHAQLEARDIVIATGSEPAPLPGVPVDNQRILDSTGALELAEVPRHLVVIGAGVIGLELGSVWRRLGAQVTVLEYLERICPGLDGETARTLQRALTRQGMRFRLGTRVVAARSGEQGVELDLQPAAGGATESLQADYVLVAIGRRPYTEGLGLETVGLASDRRGMLENQGQRSAAPGVWVIGDVTSGPMLAHKAEEEAIVCIERIAGHAAEMNAEVIPSVIYTQPEVASVGLGEEQLQAARREYKVGRFPFSANSRAKINHESEGFIKILSDARSDQVLGVHMIGPGVSEMIGEACVAMEFSASAEDLALTCHPHPTRSEALRQAAMDVHGRAMQN

SEQ ID NO: 4574 - protein, 250 aa, Xanthobacter sp. Py2
MSRVAIVTGASSGNGLAIATRFLARGDRVAALDLSAETLEETARTHWHAYADKVLRVRADVADEGDVNAAIAATMEQFGAIDVLVNNAGITGNSEAGVLHTTPVEQFDKVMAVNVRGIFLGCRAVLPHMLLQGAGVIVNIASVASLVAFPGRSAYTTSKGAVLQLTKSVAVDYAGSGIRCNAVCPGMIETPMTQWRLDQPELRDQVLARIPQKEIGTAAQVADAVMFLAGEDATYVNGAALVMDGAYTAI

SEQ ID NO: 4575 - protein, 81 aa, Glycine max
  unsure (1)..(81): unsure at all Xaa locations
TAKNTAPAETTDNRAGAGRXAPXTGRKAKAGHPTRKTNNDSTTRASNGGRXQGMHFLPPVGKKKGETLSYPPDLDDAQLSK

SEQ ID NO: 4576 - protein, 307 aa, Triticum aestivum
RNSDEGDRATEQRRAAASDESEGRRKKEDMDPDMGENFAYYWETQRYLESEELVDSIFVGATEDAISYYDSSSPDGSHSSSTPMGAAMPGAGMGMGGTGANKNILMERDRRRKLNEKLYTLRSVVPNITKMDKASIIKDAIEYIQQLQAEERQMEAEVSALESATGAEDDCDGGLSVDQVSSAQRKKVKRALSVSSMNDALLAAAATVASPPVEVLELRVSEVSEKVLVVSVTCSKQRDAMTKVCRALEELRLRVITANITSVSGCLMHTLFVEVDEMDRFEMKETVEAALSQLDSTGSPPLSSMSY

SEQ ID NO: 4577 - protein, 546 aa, Saccharomyces cerevisiae
MLSRSLNKVVTSIKSSSIIRMSSATAAATSAPTANAANALKASKAPKKGKLQVSLKTPKGTKDWADSDMVIREAIFSTLSGLFKKHGGVTIDTPVFELREILAGKYGEDSKLIYNLEDQGGELCSLRYDLTVPFARYVAMNNIQSIKRYHIAKVYRRDQPAMTKGRMREFYQCDFDVAGTFESMVPDSECLSILVEGLTSLGIKDFKIKLNHRKILDGIFQIAGVKDEDVRKISSAVDKLDKSPWEAVKKEMTEEKGQSEETADKIGEYVKLNGSLKEIHAVLSADANITSNEKAKQGLDDIATLMKYTEAFDIDSFISFDLSLARGLDYYTGLIYEVVTSASAPPENASELKKKAKSAEDASEFVGVGSIAAGGRYDNLVNMFSEASGKKSTQIPCVGISFGVERIFSLIKQRINSSTTIKPTATQVFVMAFGGGKDWTGYLPERMKVTKQLWDAGIEAEYVYKAKANPRKQFDAAEKAGCHIAVILGKEEYLEGKLRVKRLGQEFADDDGELVSAADIVPIVQEKLSQIHEDGLNEVTRLIKGL

SEQ ID NO: 4578 - protein, 200 aa, Triticum aestivum
  unsure (1)..(200): unsure at all Xaa locations
MVSEAANAGIDRVLWTEAEIATRVAEVASELAADISRLAEPAVVVGVATGAFLFLADLVRRVDAPLTVDLVRVKSYGDGTESSGRPRVTADLKVDPSPPPPETKPXVVVEDIVDTGNTVSCLIAHLQKKGALSISVCTFLDKPARRTVDFQLVGGGKFYRGFECPDSFVVGYGMDYAELYRNLPYVGVLKPEMYSKKTDN

SEQ ID NO: 4579 - protein, 629 aa, Desulfovibrio desulfuricans G20
MCGIAGYCGACGVADTTEKECAGRLEALLAGIVHRGPDDAGITCAHNVAIGMRRLSIIDLAGGHQPMLSGDGRYALVFNGEIYNFRELRSELAEAGYSFATNSDSEVLLKGYMAWGRGVLDRLDGMFAFAVHDRHAGTVFLARDHLGIKPLYYIHLGGVFAFCSEPAPLLELPQVRRRLDHDALAAFLSFKYVPAPDTFIKDIKKLAAGHTLEYSPRGDMLRTERYWQLQGREGSSDAGELAERLTRAVDSQMVSDVPLGVFLSGGIDSGLLTWAAAGQGGEHFTGGYTVAFDETGRKKGLRAGGSFDESRLAALSAAHLGVPLSSTTLASPAQATLDDWIRRFQEPFANTSIPANFLLCQWVARHVKVALNGSGADELFGGYDRYYAVHPPAALRALHCAAPLLRRVADMLPVGGGKNSLVHRARRYLAGCALAPAQKHAGSIRLFTDTQLAAIAPGVVPATFVQDAFAGAPQGSLLYKATWTDMQTMLPDDYLTLVDRTSMAASLEVRVPFLARDFVQYAFSLPPAAKIAGWKKKTALRALAAKHLPEDIARQPKMGFESPVGRWFRDGLGEALCRQLAQSPLQNIISVRGVQALAQSHSAGQVDAAKPLLALYTLVRWMDMYRVEL

SEQ ID NO: 4580 - protein, 347 aa, Pedinomonas minor
LELRDGDKTHYMGKSVEKAVDNINKLISPALVGMNPVNQREIDNAMMKLDGTDNKGKLGANAILAVSMAVCKAGAAEKGVPLYKHIADVAGVKKLVLPVPAFNIINGGMHAGNNMPMQEFMVLPTGAKSFKEAMKMGCEVYHTLRTLIKKKYGQDACNVGDEGGFAPNVASAEEALKMVDQAINDAGYKGKVTIGMDVAASEFYTQDKCYDLGFKMKNNDGSLKMTGKQMQELYAKFCKEFPIISIEDPFEQDDFANWTEITAANSCQIVGDDHLVTNPKRVKQAIEAKSSNALLLKVNQIGTISESIDAVRMSKEAGWGVMTSHRSGETEDSFIADLAVGLATGQI

SEQ ID NO: 4581 - protein, 310 aa, Vibrio vulnificus CMCP6
MKVAVIGAAGGIGQALALLLKNRLPAGSDLALYDIAPVTPGVAADLSHIPTHVSIKGYAGEDPTPALEGADVVLISAGVARKPGMDRADLFNVNAGIVKSLAERIAVVCPNACIGIITNPVNTTVPIAAEVLKKAGVYDKRKLFGVTTLDVIRSETFVAELKGQDPGEVRVPVIGGHSGVTILPLLSQVEGVEFSDEEIAALTKRIQNAGTEVVEAKAGGGSATLSMGQAACRFGLALVKALQGEEVIEYAYVEGNGEHASFFAQPVKLGKEGVEEILPYGELSDFEKAALDGMLETLNSDIQIGVDFVK

SEQ ID NO: 4582 - protein, 139 aa, Chlamydomonas reinhardtii
YTRKGMFRAAVPSGASTGVHEAVELRDGDKSKYLGKGVTKAVENINAIIAPALKGMDPVKQAEIDQKMKDLDGTDNKGKLGANAILAVSMAVCKAGAAEKGVPLYKHIADLAGNSKLILPVPSFNIINGGSHAGNALAM

SEQ ID NO: 4583 - protein, 140 aa, Scenedesmus rubescens
VTTYKGTFRAAVPSGASTGIHEAVELRDGDKSQWMGKGVAKAVGNVNNDIAPALLGKDPTQQKEIDDAMIALDGTENKGKLGANAILAVSMAVAKAGAAEKGVPLYKYIAQLAGNSKLVLPVPSFNVINGGEHAGNGLAM

SEQ ID NO: 4584 - protein, 576 aa, Magnaporthe grisea 70-15
MDNHADSTAKTATAGEAETERIEVHDATQRVQEQAQTDRWRSIKANPKLVLLALFASFGGFEYGYQQGILSQSLAMYRFKENFPSVVSSPTATGWLTSILQLGGILGSLTAGILSEVISRKYTMFTACCWVILGSYLYIGATAGKPDLLYAGRFFTGLGVGLFSGVGPLYNAEISAPETRGFTVSFYQFATIFGIFLSFWVGYGSNYIGGHDATQSDMAWRLPSIIQGIPAILLAGGIWFMPFSPRWLVKKGRYEEARKTLAWIRKKELDDPLVEVELLEIRAQQLFEERAFARALPQYANKENRNPWVHEIVAYVQCFKTWDNVKRVATAWLVMFFQQWSGIDAIIYYATNVFMSFGFTEGTIALLATGVTGVVFLVSTIPAMLLIDKLGRKPMLYTGSIIMFLTMVTVGIVVAKFQHDWPNNPAAGWASVILIWIYIGAFGFGWGPASWVVISEIFPLSIRARGASIGASSNWLNNFAIAFFVPPMFQTLAWGTYIFFAGFLAAGIAWIYFYLPETKDVSLEEMDRVFGSHTGAEDARLLAEAQRDVGLIDFLRRAEGKSVDVEAEEKRQEPVV

SEQ ID NO: 4585 - protein, 118 aa, Nephroselmis olivacea
VELRGGDKAKWMGKGVLKAVENLNSKIAPALIGKDPRNQRELDDLMNSLDGTENKGNFGANAILAVSMAACKAGAAEKGVPLYQHIADLAGNKKLILPVPAFNVINGGSHAGNKLAMQ

SEQ ID NO: 4586 - protein, 463 aa, Moorella thermoacetica ATCC 39073
MTGEKIISLETALQAGRQETRDLYRRYINPGLATMLALLDFDKAFVRAEGMAVWDKDGKRYLDFLGGYGALNLGHNPPEVLAAVKEAMGRPNLLQASLNPLAAALAHNLAQVTPGDLERVFFSNSGTETVEGALKLARASTGREKIIYCQNSFHGKSFGSLSVTGRQKYQRPFGPLLPGCEAVPYDDLEALEAKLSRRDAAAFIVEPIQGEGGVIVPHDGYLKGARELCDRYGSLLIIDEIQTGFGRTGYLFACEHEGVVPDIMCLAKSLGGGVMPIGAYIARPAVWDRAYGGMDKALLHTSTFGGNSLATAAGLAALQSILDQDLAGRAAAMGRYFLERLRQLKEKYDLIKDVRGRGLIIGLEFNQPVGGLLDKLTRGKVNELAGEYFGSLVAGELMNKYQVITAYTLNNPNVIRLEPPLIVGEEEIDHVVNALEAVLRGHGFLGVTLSSTRTALGSLFKRK

SEQ ID NO: 4587 - protein, 195 aa, Oryza alta
GQTPVFPRILGHEAGGIVESVGEGVTELAPGDHVLPVFTGECKECAHCKSEESNMCDLLRINVDRGVMIGDGQSRFTIKGKPIFHFVGTSTFSEYTVIHVGCLAKINPEAPLDKVCILSCGISTGLGATLNVAKPKKGQTVAIFGLGAVGLAAMEGARLSGASRIIGVDLNPAKFEQAKKFGCTDFVNPKDHSKP

SEQ ID NO: 4588 - protein, 193 aa, Methanocaldococcus jannaschii DSM 2661
MQRTLGEIMKIYFATGNPNKIKEANIILKDLKDVEIEQIKISYPEIQGTLEEVAEFGAKWVYNILKKPVIVEDSGFFVEALNGFPGTYSKFVQETIGNEGILKLLEGKDNRNAYFKTVIGYCDENGVRLFKGIVKGRVSEEIRSKGYGFAYDSIFIPEEEERTFAEMTTEEKSQISHRKKAFEEFKKFLLDRI

SEQ ID NO: 4589 - protein, 290 aa, Erwinia carotovora subsp. atroseptica SCRI1043
MMKGIVLAGGSGTRLYPITRGISKQLLPIYDKPMVYYPISVLMLAGIREILVITTPEDMPAFQRLLGDGSRFGIELSYAIQPSPDGLAQAFIIGEEFINGERCALVLGDNIYFGQSFGKKLEAVAAKEEGATIFGYQVTDPERFGVVEFDQDFRALSIEEKPVKPKSSWAVTGLYFYDRDVVEMAKQVKPSHRGELEITTLNQMYLEQNRLDVELLGRGFAWLDTGTHDSLIEASQFIHTIEKRQGLKVACLEEIAFRKGWLSIQQVADEAKVMLKTSYGQYLTQLIAEK

SEQ ID NO: 4590 - protein, 195 aa, Oryza alta
GQTPVFPRILGHEAGGIVESVGEGVIELAPGDHVLPVFTGECKECAHCKSEESNMCDLLRINVDRGVMIGDGQSRFTINGKPIFHFVGTSTFSEYTVIHVGCLAKINPEAPLDKVCILSCGISTGLGATLNVAKPKKGQTVAIFGLGAVGLAAMEGARLSGASRIIGVDLNPAKFEQAKKFGCTDFVNPKDHSKP

SEQ ID NO: 4591 - protein, 298 aa, Erwinia carotovora subsp. atroseptica SCRI1043
MTSLKAIIPVAGLGMNLLPVTKAIPKEMLPLVDRPVIEKIVNECVRAGIKEIVLVTHASKNAIENHFDTSFELESLLEERAKRQLLAEVQSICPKGVTIMNVRQGETLGLGHAVSCARPIIGDNPFVVVLPDVVLDESTADQTQENLALLISRFEETGRSQVLVKHRPYEVLPEYSVVDCEAQLVNPGDASAITSMIEKPEAPSETGSDLSAVGRYVLTADAWSLLDKAEPGAWGRIQLTDVIADMIATQQVDAVQMSGKNFNCGRKLGYAQAFVSYGLRNPEFGAEFKESIKALLKK

SEQ ID NO: 4592 - protein, 404 aa, Bacillus subtilis subsp. subtilis str. 168
MQMGDTVFMFFCALLVWLMTPGLALFYGGMVKSKNVLSTAMHSFSSIAIVSIVWVLFGYTLAFAPGNSIIGGLEWAGLKGVGFDPGDYSDTIPHSLFMMFQMTFAVLTTAIISGAFAERMRFGAFLLFSVLWASLVYTPVAHWVWGGGWIGQLGALDFAGGNVVHISSGVAGLVLAIVLGKRKDGTASSPHNLIYTFLGGALIWFGWFGFNVGSALTLDGVAMYAFINTNTAAAAGIAGWILVEWIINKKPTMLGAVSGAIAGLVAITPAAGFVTPFASIIIGIIGGAVCFWGVFSLKKKFGYDDALDAFGLHGIGGTWGGIATGLFATTSVNSAGADGLFYGDASLIWKQIVAIAATYVFVFIVTFVIIKIVSLFLPLRATEEEESLGLDLTMHGEKAYQDSM

SEQ ID NO: 4593 - protein, 479 aa, Dunaliella salina
MATVQEYIDKHQLQKKTEDVLNIAVKSKPDEPLSFLAKELLRMAPSEILKVVGRQIIDSRGNPTVEADVHTHKGMFRAAVPSGASTGIHEAVELRDGDKTKFLGKGVQKAVESINTIISPALKGMDPKNQSEVDQKMIDLDGTPNKAKLGANAILAVSLATAKAGAAEKEVPLYRHIADLAGNPKLYLPVPAFNIINGGSHAGNALAMQEFMILPTGASSFSEAMRMGTEVYHTLKGIIKAKYGQDATNVGDEGGFAPNIQSNDDGLSLVTDAIEKAGYTGKVKIGMDVAASEFITEDKMYDLNLKQQPNDGSHKKTAAQMLEMYKEFCTKYPVISIEDPFEQDDWEPAKSLTAENICQVVGDDMLVTNPIRVKRGIEQKAVNSLLLKVNQIGSLTESIEAVRMSKEAGWGVMTSHRSGETEDCFIADLAVGLSTGQIKTGAPCRSERNAKYNQLLRIEEELGENAVYAGEKWRFIEWQ

SEQ ID NO: 4594 - protein, 195 aa, Oryza latifolia
GQTPVFPRILGHEAGGVVESVGEGVTELAPGDHVLPVFTGECKECAHCKSEESNMCDLLRINVDRGVMIGDGQPRFTIKGKPIFHFVGTSTFSEYTVIHVGCLAKINPEAPLDKVCILSRGISTGLGATLNVAKPKKGQTVAIFGLGAVGLAAMEGARLSGASRIIGVDLNPAKFEQAKKFGCTDFVNPKDHSKP

SEQ ID NO: 4595 - protein, 67 aa, Zea mays
LNSPRYYSREDAEDAVKYISGTMLDDRPIRVDLDRGFEEGRQWGRGRSGVQALQTMICPCVVVVRKN

SEQ ID NO: 4596 - protein, 485 aa, Shigella flexneri 2a str. 301
MTAGDKYIEVMMSTEIKTQVVVLGAGPAGYSAAFRCADLGLETVIVERYNTLGGVCLNVGCIPSKALLHVAKVIEEAKALAEHGIVFGEPKTDIDKIRTWKEKVINQLTGGLAGMAKGRKVKVVNGLGKFTGANTLEVEGENGKTVINFDNAIIAAGSRPIQLPFIPHEDPRIWDSTDALELKEVPERLLVMGGGIIGLEMGTVYHALGSQIDVVEMFDQVIPAADKDIVKVFTKRISKKFNLMLETKVTAVEAKEDGIYVTMEGKKAPAEPQRYDAVLVAIGRVPNGKNLDAGKAGVEVDDRGFIRVDKQLRTNVPHIFAIGDIVGQPMLAHKGVHEGHVAAEVIAGKKHYFDPKVIPSIAYTEPEVAWVGLTEKEAKEKGISYETATFPWAASGRAIASDCADGMTKLIFDKESHRVIGGAIVGTNGGELLGEIGLAIEMGCDAEDIALTIHAHPTLHESVGLAAEVFEGSITDLPNPKAKKK

SEQ ID NO: 4597 - protein, 195 aa, Oryza latifolia
GQTPVFPRILGHEAGGIVESVGEGVIELAPGDHVLPVFTGECKECAHCKSEESNMCDLLRINVDRGVMIGDGQSRFTINGKPIFHFVGTSTFSEYTVIHVGCLARINPEAPLDKVCILSCGISTGIGATLNVAKPKKGQTVAIFGLGAVGLAAMEGARLSGASRIIGVDLNPAKFEQAKKFGCTDFVNPKDHSKP

SEQ ID NO: 4598 - protein, 596 aa, Oryza sativa
MEGGVHEFDGSTFRECFSLSWRNPYVLRLAFSAGIGGLLFGYDTGVISGALLYIRDDFPSVDKNTWLQEMIVSMAVAGAIIGAAIGGWANDRYGRRTSILVADALFFAGAAVMASATGPAQLVVGRVFVGLGVGTASMTSPLYISEASPARIRGALVSTNGLLITGGQFLSYLINLAFTKAPGTWRWMLGVAAIPAVVQFFLMLFLPESPRWLYRKGREEEAEAILRKIYSAEEVEREKEELKESVEAEARERSSSEKTSLVALLMTTATVRRGLVAGVGLQVFQQLVGINTVMYYSPTIVQLAGFASNQTALALSLVTAGLNAAGSLVSIYFIDRTGRRKLLVISLAGVILSLALLSAVFHEATSHSPPVGAAETAHFHGGALTCPDYSSRSSSSFWDCTRCLKAAAASAGCGFCAAGGGDKLRAGACLAAAAAASNATARDACRGEGREWYTRGCPSRYGWLAMAGLALYIAAFSPGMGTVPWIVNSEVYPLRHRGVCGGAAATANWVSNLAVAQSFLSLTDAIGAAWTFLIFGGLSVAALAFVLVCVPETKGLPIEEVEKMLEGRELRLRFWAKRRHHHGGDGDGGGEKTGGV

SEQ ID NO: 4599 - protein, 783 aa, Streptomyces parvulus
MTEGRTRREKGEHMQKPHGEESETSLSVTPPKKWAAGVPAVVHALEYSLEQTSPRRTGVDLLTMNQVGGIDCPGCAWADPAPGRRHRNEYCENGAKHINDEATTRRVTADFFREHSVADLAGRSDMWLNQQGRLTEPMIKRPGSAHYEPIGWNDALGVLAEELKSLASPDEAVFYTSGRASNEAAFVLQLFARAFGTNNLPDCSNMCHESSGFALSETLGTGKGTVGLDDLHHADLIFLVGQNPGSNHPRQLSALEEAKRNGARIVAVNPLPEAGLRRFKNPQQPRGVVGRGTRIADRFLHIKPGGDLALFQALNRLLLEAEDARPGTVLDHDFIDAHTTGFEEFARHARTVDWDDVRAATGLTREEIEKVRDEVLDSERVVVCWAMGITQHKHGVPTVREIVNFLMLRGNLGRAGTGACPVRGHSNVQGDRTMGIWEQMPDTFLDALRDEFGFEPPRAHGLDSVNSIKAMREGRVKVFLALAGNFVRAAPDSEVTEEAMRSCRLTAHISTKLNRSHTVCGDTALILPTLGRTERDVQADGEQFVTVENSMSEVHTSRGRLAPASPMLLSEIAILCRLARLTLDGRVEIPWETFEGDYHTIRDRIARIVPGFHDFNARVTRPGGFQLPNPVNEGVFNTEVGKALFTRNESVVPRAPEGHLLLQTLRSHDQWNTVPYTDNDRYRGIHGSRHVVLVNPADLSELGLAQGDRVDLVSVWADGTERRAENFQVVPYPAAKGSAAAYYPETNVLVPLDSVADISNQPTSKGIVVRLEPVPDRTQPSPA

SEQ ID NO: 4600 - protein, 350 aa, Bacteroides thetaiotaomicron VPI-5482
MLAYTYIEHGKFELREKPEPKITDARDAIVRVTLGSICTSDLHIKHGSVPRAVPGITVGHEMVGVVEEVGAEVTSVRPGDRVTVNVETFCGECFFCHHGYVNNCTDPNGGWALGCRIDGGQAEYVRVPYADQGLNRIPDTVSDEQALFVGDVLATGFWATRISEITEKDTILLIGAGPTGICTLLCSMLKNPKRIIVCEKSPERIQFVREHYPDVLITTPENCKEFVLQNSDHSGADVVLEVAGTEDSFRMAWDCARPNAIVTIVALYDKPLLFPLPEMYGKNLTFKTGGVDGCDCAEILSLIEEGKIDTTPLITHRCSLNEIEEAYRIFENKLDGVIKVAIVCQTESNK

SEQ ID NO: 4601 - protein, 199 aa, Shigella flexneri 2a str. 301
MLRCQNLPVRSDLFLNHMVRDMKHTVEVMIPEAEIKARIAELGRQITERYKDSGSDMVLVGLLRGSFMFMADLCREVQVSHEVDFMTASSYGSGMSTTRDVKILKDLDEDIRGKDVLIVEDIIDSGNTLSKVREILSLREPKSLAICTLLDKPSRREVNVPVEFIGFSIPDEFVVGYGIDYAQRYRHLPYIGKVILLDE

SEQ ID NO: 4602 - protein, 254 aa, Zea mays
MISFIYRIPHRGMLAKGRKVAGRREEMSANYAFGPQDDDAIIKHRLLTRTTTTRGEPPLKKLQKKFMSFATEIEKDADNISDCERLYKAFLHEINTFELPLLKSKAVVDANIREKESFNELQVEIERQILHAKTDIEDLKKQLEQSKIERQHKEECEAIRKLISLQPPRSETEKLIADLEKEITDLKAENVACIRTLELRKKQFALLLHVVEELQISIEDEQKSIADELRAIAGEQKMSMEEGSVGASDSMVVD

SEQ ID NO: 4603 - protein, 314 aa, GIBBERELLA ZEAE PH-1
MKAVQILGDAASPKITINSSMPKPTTIDSDILIHVHAAGITGDETTWPEVYQTPSRIPGHDISGTIDSFGPAYKGNLKIGQDVFAMIAADRGEGQAEYVVCTTEEIAPKPSSLSHAEAAVLPIPALTAWEAVEDFVKIRPDMRVLVTGASGAVGKQFVQLVKHLTQAHVTALASARNHDVLRDLGADEVIDYASPHWESSIAPVSFVFDTVGGEVLSKTWETVEEGGTIITIGDPAPAWAFGNEEAPESLKYPSVKYKHFILSPNAKRLADVASMLDKGLLRPLDVRIFPFDQGVAAWDCAKQRGRDSKVVIGF

SEQ ID NO: 4604 - protein, 155 aa, Glycine max
MSSAKKITLKSSDGEAFEVEEAVALESQTIKHMIEDDCADSGIPLPNVTSKILAKVIEYCKKHVEAANPEDKPSEDDLKAWDAEFVKVDQATLFDLILAANYLNIKSLLDLTCQTVADMIKGKTPEEIRKTFNIKNDFTPEEEEEVRRENQWAFE

SEQ ID NO: 4605 - protein, 203 aa, Vigna radiata
MGSYETELNLRATELRLGLPGSDEPQEKRPCSGSVVRSSNKRSSPELEESRCKSNINSDSSDSTTTSDHNEDSVQPAKVQVVGWPPIRSFRKNSLQQKKVEQGDGTGMYLKVSMAGAPYLRKIDLKVYKSYPELLKALQNLFKCTFGEYSEREGYNGSEYAPTYEDKDGDWMLVGDVPWNMFVSSCKRLRIIKGSEAKGLGCL

SEQ ID NO: 4606 - protein, 753 aa, Escherichia coli
MSQHNEKNPHQHQSPLHDSSEAKPGMDSLAPEDGSHRPAAEPTPPGAQPTAPGSLKAPDTRNEKLNSLEDVRKGSENYALTTNQGVRIADDQNSLRAGSRGPTLLEDFILREKITHFDHERIPERIVHARGSAAHGYFQPYKSLSDITKADFLSDPNKITPVFVRFSTVQGGAGSADTVRNIRGFATKFYTEEGIFDLVGNNTPIFFIQDAHKFPDFVHAVKPEPHWAIPQGQSAHDTFWDYVSLQPETLHNVMWAMSDRGIPRSYRTMEGFGIHTFRLINAEGKATFVRFHWKPLAGKASLVWDEAQKLTGRDPDFHRRELWEAIEAGDFPEYELGFQLIPEEDEFKFDFDLLDPTKLIPEELVPVQRVGKMVLNRNPDNFFAENEQAAFHPGHIVPGLDFTNDPLLQGRLFSYTDTQISRLGGPNFHEIPINRPTCPYHNFQRDGMHRMGIDTNPANYEPNSINDNWPRETPPGPKRGGFESYQERVEGNKVRERSPSFGEYYSHPRLFWLSQTPFEQRHIVDGFSFELSKVVRPYIRERVVDQLAHIDLTLAQAVAKNLGIELTDDQLNITPPPDVNGLKKDPSLSLYAIPDGDVKGRVVAILLNDEVRSADLLAILKALKAKGVHAKLLYSRMGEVTADDGTVLPIAATFAGAPSLTVDAVIVPCGNIADIADNGDANYYLMEAYKHLKPIALAGDARKFKATIKIADQGEEGIVEADSADGSFMDELLTLMAAHRVWSRIPKIDKIPA

SEQ ID NO: 4607 - protein, 511 aa, Streptomyces coelicolor A3(2)
MSTPEPVLAGPGILLVLDGWGSADAADDNALSLARTPVLDELVAQHPSTLAEASGEAVGLLPGTVGNSEIGHMVIGAGRPLPYDSLLVQQAIDSGALRSHPRLDAVLNEVAATSGALHLIGLCSDGQIHAHVEHLSELLAAAATHQVERVFIHAITDGRDVADHTGEAYLTRVAELAAAAGTGQIATVIGRGYAMDKAGDLDLTERAVALVADGRGSPADSAHSAVHSSERGDEWVPASVLTEAGDARVADGDAVLWFNFRSDRIQQFADRLHEHLTASGRTVNMVSLAQYDTRTAIPALVKRADASGGLADELQEAGLRSVRIAETEKFEHVTYYINGRDATVRDGEEHVRITGEGKADYVAHPHMNLDRVTDAVVEAAGRVDVDLVIANLANIDVVGHTGNLAATVTACEATDAAVDQILQAARNSGRWVVAVGDHGNAERMTKQAPDGSVRPYGGHTTNPVPLVIVPNRTDTPAPTLPGTATLADVAPTILHLLGHKPGPAMTGRPLL

SEQ ID NO: 4608 - protein, 570 aa, Escherichia coli K12
MSEKHPGPLVVEGKLTDAERMKHESNYLRGTIAEDLNDGLTGGFKGDNFLLIRFHGMYQQDDRDIRAERAEQKLEPRHAMLLRCRLPGGVITTKQWQAIDKFAGENTIYGSIRLTNRQTFQFHGILKKNVKPVHQMLHSVGLDALATANDMNRNVLCTSNPYESQLHAEAYEWAKKISEHLLPRTRAYAEIWLDQEKVATTDEEPILGQTYLPRKFKTTVVIPPQNDIDLHANDMNFVAIAENGKLVGFNLLVGGGLSIEHGNKKTYARTASEFGYLPLEHTLAVAEAVVTTQRDWGNRTDRKNAKTKYTLERVGVETFKAEVERRAGIKFEPIRPYEFTGRGDRIGWVKGIDDNWHLTLFIENGRILDYPARPLKTGLLEIAKIHKGDFRITANQNLIIAGVPESEKAKIEKIAKESGLMNAVTPQRENSMACVSFPTCPLAMAEAERFLPSFIDNIDNLMAKHGVSDEHIVMRVTGCPNGCGRAMLAEVGLVGKAPGRYNLHLGGNRIGTRIPRMYKENITEPEILASLDELIGRWAKEREAGEGFGDFTVRAGIIRPVLDPARDLWD

SEQ ID NO: 4609 - protein, 279 aa, Pseudomonas aeruginosa
MIKKYLFPAAGYGTRFLPATKAMPKEMLPVVNKPLIQYGVEEALDAGLNEISIVTGRGKRALEDHFDISYELENQIKGTDKEKYLVGIRKLLDECSFSYTRQTQMKGLGHAILTGRPLIGDEPFAVVLADDLCVNLEGDGVLTQMVKLYQKYRCTIVAVMEVNPTETNKYGVIAGDDIGDGLIRVRDMVEKPAPEDAPSNLAIIGRYILTPDIFKLIEETEPGKGGEIQITDALLKQAKDGCVIAYKFKGQRFDCGGAEGYIEATNFCYEHFYKTGKAY

SEQ ID NO: 4610 - protein, 776 aa, Streptomyces coelicolor A3(2)
MTPDKTVATACQFCNSNCRLNVDLKAGRVLAVRGEDSDPVQQGQVCVKAELMPQLVYNTERLTRPLRRVSGAKGSPHSKFEAVSWEEALHTIAKKFLALRDAGQAHTIANRTTGRMPRGTGSLVARMFAMLGSPNNTDVGPVCNDAGGNALAMTFGLGNFTNGYGTDGSTGKDDLGSARHYLFLGTNQAETHPVTFDYLLRGRKENNATLTVVDPRLTPTGAAADRWVAPKPHTDLALLLAMLHHIVQEKLYDKAFVKRWVAGFDELRRHLAKHQYTPEWAAKVTGVKADVITKMAVEYAKAKPAAIFCNAGISHQLGAFDTYRVATFLAAVTGNIGQPGGGCNFMHNTWPGDLQLPPLDADLPERREALPVGPDYFAESILTDNPYRLRAVVTQGNPLVSSANTTKVKKAFEQLDFYVYTGLFMEEAAYYADIILPVCSGLEMEGVYMRRDDRAIRWQDQAVDRVGESRPDWEIWVGLAHALAELDSRRPAAEWRAAFPERWMNYRELWDAFVTHTPGVGGMTRARMRQRTEPLRWPCPTEDHPGVSTLYLDHPSWYQAAESLDPANRGKRFLTPSGKVEISTPDLEKKLAVTGHSALPIFYTHPEVTGRNPTLSYSRKFVTNPINPQAVTHPVRLGVPGSDAVHHDFPLMGMTGRPSVVHFAEVTHWTPTGKQLNGIRFIQIHPDTARRSGIADGDEVTVESPRGSVTGTALLWEGIRADTVFVPNTFGPAQKQGDLFDDPRYEAANTLPDDRFYDNLSGQQAFKCFACRVVKA

SEQ ID NO: 4611 - protein, 492 aa, Helianthus annuus
MDPYKYRSSSAYNAPFWTTNSGAPVYNNNNSLTVGSRGPILLEDYHLVEKLANFDRERIPERVVHARGASAKGFFEVTHDITALTCADFLRAPGVQTPVIVRFSTVIHERGSPETLRDPRGFAVKFYTREGNFDLVGNNFPVFFIRDGMKFPDMVHSLKPNPKSHIQEDWRIMDFFSHHPESLHMFTFLLDDIGVPQDYRHMDGSGVNTYTLINKAGKAYYVKFHWKPTCGVKSLLEEEAIKIGGANHSHATQDLYDSIAAGNYPEWKLFIQTIDPDHEDRLDFDPLDVTKTWPEDIFPLQPVGRLVLNKNIDNFFAENEQLAFCPAIIVPGIYYSDDKLLQTRIFSYSDTQRHRLGPNYLQLPANAPKCAHHNNHYDGFMNFMHRDEEIDYFPSRYDPARHAEQYPIPPVRLSGKRDKCVIEKENNFKQPGERYRSFSPDRQERFINRVVGGLSDPRVTHEVRSIWVSYWSQADKSLGQKIASRLNVKPNY

SEQ ID NO: 4612 - protein, 397 aa, Bordetella parapertussis
MSNVNTLSALAKSGALSGKRVFIRADLNVPFDDAGRISEDTRIRASVPGIRLALDAGEAVMVTSHLGRPKEGALTEADSLAPVAQRLSELLGMQVRLVPDWVDGVSVEPGEVVLLENCRGNVGEKKDDEGLSRKMAALCDVYVNDAFGTAHRAEATTHGIARFAPVACAGPLLEAELEALGRALHDPKRPLVAIVGGSKVSTKLSILQSLADKVDQLVVGGGIANTFMLAAGLPIGKSLAEPEQVEQARAVIEIMKRRGAEVPIPTDVVCAKSFGADAAATVKAAADVAEDDMILDIGPQTAQRLADILKAAGTIVWNGPVGVFEFDQFAHGTEVVARAIADSAGFSIAGGGDTLAAIAKYGIADQTGYISTGGGAFLEFLEGKALPAVAVLQARAA

SEQ ID NO: 4613 - protein, 363 aa, Triticum aestivum
MSRTLVQPVGQKRLTNVAVVRLRKGGQRFEIACFPNKVVNWRDRVEKDLDEVLQSHNVYSNVSKGVLAKSKDLIRIFGTDDLVEICVEILEKGELQVSGKEREAQLSAQFRDIATIVMEKTISTETRRPYTMNMIERIMHEIHFAVDPNLTSKEQALRVIKKLIENPKYTIKRAPLTVRFIAPKSNLSGLMEKLDGWNAIVLSKDESADQSSVVCEIEPSILHSCEEKLKDVQGRVEVLSVSAHKESGSSTDQYDNVEDNVEKAQPVPAKESGAVAQLSETMQKQSLSSEVESQGQAPGKPQKRCKECDIFMEDKLYRDHCKSGWHKHNYTRHKNGLPPLSQEECLMEMEMADSQRGLKDYDF

SEQ ID NO: 4614 - protein, 692 aa, Magnaporthe grisea 70-15
MTTSATRPALQGLASSASSLPPRAPLGKKPILRTPQSLSVSTKRKRSDDPDDRLESSPTKRLKHVTFDLESNMTVDIGMRTLEETKREVRSALEDRVRGETEGYENLKAIFQNDRQRYLPPIVGDDEDCLKPQELIVYVVALSTCAPMLDRSCSDLIKIVTKCSWLGRDDGFCKAYTQFLAALISAQGTTLELVLAMIVEKFKDYRESAWSVPDFPKVSFDTAQDRLHGGLRYLLRLFPAARPVLCSLLAKQFPYLEESKKVHTTYVKNLLLLRKYAPDLGQDIMELIVDRLVKIDVQVQFDLDDMDDDLTAAIVMHLGSAREKDDLDIDSDESDGESIASDDSDFDAEATTIETGSTTIQKLDAIMDMLFEVYKPSFENPTSDEAKEVLGDLISDFVNLVLPTYKSRHTQFLVFHFSQYSPELMDLFVGTLFNMAFESNRPMALRQSATAYLASYVARGAAVPAEIVRNVVELLCHHVDVQMRNHADGCRGPDLRRYKHLYCLVQALLYIFCFRWRELVAWAPELVDPSEKSSYLGHDLEWIPGFKESMSRIIYSKFNPLRVCSPGIVHEFADHARLLRFMYVFPLLESNKRIHLSQFASGDYSTGGALRDTCYDPYDESGLQLEAYFPFDPYQLPTSKRWIQDDYVRWETLTGIGLGDDDLDDASIDDNLDDDGNDYEEEDTATDDGKDD

SEQ ID NO: 4615 - protein, 418 aa, Burkholderia fungorum LB400
MGTLMRQYWVPAAKSSELKRDGDPMRLMLLGEKLIAFRDSEGRVGVLDHRCPHRCASLFLGRNEESGIRCVYHGWKFDVAGRCVDMPSVPPHQDFKDKVHAKAFRTAERNGLVWVYMGDAAEPPPLPAIEANLVADCEIWCLQRDCNWLQALEGDIDTSHVGFLHVGSLKPDDLADDHPMRPTVLDRAPEYAVTNTAWGTMYGGYRPNDDGQRSWRVAHFMFPFWTQTPNNRFSSRAIARAWVPMDDEHSMLFDITCGVDEGNPAYSSTRKTGEPLFAPFEYAPATTDWFGRWRCVDDRRNDWGIDRELQRNGSQYTGIPNITMQDQAVTESMGPIIDHSYEHLAPTDQMIARTRRRLLLATQALSEQGTLPPGAQDSDVFFGARAGSFLCDPGLPFETAYATQLETATRWAGDKVVS

SEQ ID NO: 4616 - protein, 446 aa, Burkholderia fungorum LB400
MSKNDLADLLRVGPETTMGKFMRQYWLPAVLSHEVKADGDPVRLMLLGEKLIAFRDSSGRVGVLDHRCPHRCASLFVGRNEENGIRCVYHGWKFDVDGNCVDMPSVPARLDFKEKVHARAYKAVERNGLIWVYMGENQNNPPPLPAIEANMIPGSKIWCLQRQCNWLQALEGDIDTSHVGFLHVGALQPEDLPEGSPLRPTVLNRAPEYRVQNAEWGATYGAYRLAEDGRMSWRAAQFMFPFWTMTPNILFSTRAIARAWVPMDDTHVMLFDITGGVDEGNPFFTTKLKNGEPMYEKIRRKPNGTGWYDRWLPVDGLQNDWGIDREAQRNMIHYTGIDNPSMQDQAITESMGPITDHSFEHLAPTDQMIAFVRRRLTQALRNFRDDSAPAPCAFSPETYFGARSGAFWADPVVEFSTAYRVELEKAQRWPANPDGSAVEREPEVAR

SEQ ID NO: 4617 - protein, 175 aa, Triticum aestivum
MAPAVMASSATTVAPFQGLKSTAGLPISRRSGSAGLSSVSNGGRIRCMQVWPIEGIKKFETLSYLPPLSTEALLKQVDYLIRSKWVPCLEFSKVGFVFREHNSSPGYYDGRYWTMWKLPMFGCTDATQVLNEVEEVKKEYPDAYVRVIGFDNMRQVQCVSFIAFRPPGCEESGKA

SEQ ID NO: 4618 - protein, 459 aa, ASPERGILLUS NIDULANS FGSC A4
MSRPQNIGIKAIEVYFPSQCLDQTELEKHDGVSEGKYTIGLGQSKMSFCDDREDIYSIALTTLSSLMKKYNIDPNSVGRLEVGTETLLDKSKSVKSVLMQLFAPHGNTNIEGVDTVNACYGGTNALFNSINWVESSAWDGRDAVVVCGDIALYAKGAARPTGGAGCVAMLIGPDAPIIFEPGLRASYLTHAYDFYKPDLTSEYPVVDGHFSLRCYTEAVDACYKAYGAREKTLKEKTQNGTNGVTHDESKTALDRFDYVLFHAPTCKLVQKSYARMLYNDYLANPTHPSFAEVAPELRDLDYETSLTDKNVEKTFMGLTKKRFAERVRPGLDVATLCGNMYTATVYAGLCSLLSNVTFDPSQPKRLGFFSYGSGLASSLFSAKIVGDVSYIVEKLNLHKRLESRTVLSPTDYEAMCELREHAHLAKDFKPSGNPDTLFPGTYYLTEIDGMFRRKYETKA

SEQ ID NO: 4619 - protein, 508 aa, Glycine max
MNLLLAAVTLLVFYAAKFFYSNFWVPWRTERHFKRQGIGGPGYRPIFGNTSEIRRLYAEAKSEASASPPPFHHDIMGRVAPFYDRWSRAYGKTFLYWFGSTPRLAVTEPDMIKEVLMNTRGEYVKVPFNPQSKLLFGQGLVGLEGDQWALHRRIINLAFNLELVKGWVPDIVASVTKKLESWEDQRGGRDEFEIDVLRELHDLSADVISRTAFGSNYEEGKHIFNLQEQQMHLFSQAVRSVYIPGFRYLPTKKNKDRWRLEKETRESILKLIETKSNTRENARNVLSSLMCSYKNDAGGEEKLGVEEIIDECKTIYFAGKETTANLLTWALLLLAKHQEWQSKARKEVLHVIGRNRLPAADNLNDLKIVTMIINETLRLYPPAVMLMRQASKDVMLGSINIPAKTQLFLALTAVHHDREIWGEDYHNFNPMRFSPRVRPRVRFFPFGLGPRICVGQNLALVEAKIALALIIQSYSFVLSPNYMHAPILFVTLQPQYGAQIIFRKISYC

SEQ ID NO: 4620 - protein, 648 aa, Methanococcus voltae
  unsure (1)..(648): unsure at all Xaa locations
MTEFKVVHTVCPYCGTGCGIDLVVKDGKLVDTHPFKRHPVNQGKVCIKGNYCYEFVHSEDRLTVPLIRKNGELVESTWEEALDLIASKLKGYNPDEVGFFSCARGANEESYALQKFARVVMKTNNVDHCARIXHAPTVTGLGECFGSGAMTNSIGDLAEADVLFIYGSNTFEAHPLVARSIVKAKDNGTKIIAIDPRKTHTSKMADIHMKLIPGSNIDLMNAIMNVIITEGLTDDEFIKNRTENFDELKEVVSKYTPEEVAKISGIPAETIREAARLYANADKAAIMYCLGVTEYTFGVDNVKSCCNLAMITGNLGERGAGVNPLRGQNNVQGACDMGALPNVYPGYQKVGEMTSKLEELWGVEGLSPEVGLMGEEKMVADADIKKVKNALGKLDFLVVKDIFLNDKGKLADVVLPAACWAEKDGPFTNTERRVQRIRKAVEAPGEAVPDWVVVKELAQRMGYGDKFAFESASDIFDEMAKVIPQYAGMSFERLGIDGLQWPCKTPDHPGTVFLHEGKFLRPNGLGKICPVEHKAPAEMASEEYPLILTTGRIIFHYNSGTMTRRCESITNEIDENFIEMNIEDANNLGIKAGETVKVSSKRGDVKAIARVSDDIVKGVVYMSFHFNEEPTNKLTNSAYDPVSKTRRT

SEQ ID NO: 4621 - protein, 546 aa, Microbulbifer degradans 2-40
MAIHERAGKPVIDSDLINIPRLISEYYTKKPQEGALVSFGTSGHRGSSFNGTFTESHILAICQALAEYRASKSITGPMYVGIDTHALSESAFITAVEVLVANGVALKVQAGRGYTPTPVISHAILTHNQGLTSNLADGIVITPSHNPPQDGGFKYNPPNGGPADTDITDWIQKRANELIAAELAGVKRTEYTAACESELVEEVDLIQPYVDDLGSVIDMEAIAKAGVRIGVDPLGGSGIAYWDVIANTYGLNIEMVSRKVDPTFSFMTLDKDGKIRMDCSSPYAMAGLIGLKDKFDVAIGNDPDYDRHGIVTPSGLMNPNHYLAVAIQYLFSHRPQWSADLVVGKTLVSSSMIDRVAASIGRKLAEVPVGFKWFVDGLYEGTCGFGGEESAGASFLRRDGSAWSTDKDGIILGLLAAEITAVTGMDPAAHYQKLTEQFGAPVYTRIDAPASGPQKSVLKALNAQSVIAQSLAGEPITQKLTHAPGNGAAIGGLKVCTENGWFAARPSGTEEIYKIYAESFKGEEHLQQILTEAQAIVSETFKAAGV

SEQ ID NO: 4622 - protein, 554 aa, Candida albicans SC5314
MGSSTNNTQSKATPSVLENEVNSSKSSVVSSTSSAKGLLRETTNHGTMETSSVQISESESRPSKMVLVLTLASSISGFMFGYDTGYISSALVQIGTDLSNKILTSGEKEFITSATSLGALLGAVVGGVLANLIGRRRVLLGSNIIFVVGTIIQLAARTVWTMIAGRFVLGWGVGIASLIAPLMISELAPAKYRGRLIVTNVIFITGGQLIAYFINWGLTRVSHGWRVSVGLCMVPPVLQFVLFWFLPDTPRFYVMNGNFEKARQVLRKVHVDPSDEFVNATIDEMIASDSTVPGNGPLQKAWKSIKIIHTTPGNFRALILACGLQGIQQFTGFNSLMYFSATIFETIGFHNATAVSIIIAATNFVFTGIAICIIDKVGRRRILLVGMPCMCISLIVCAVAFHYLNVDFSTGTVVSRGINGWGIVVIIGMILYVASYAIGIGNAAWVGVEMFSDVNVRSIGAMYAACTNWAGSLVIATTFLTMLENITPTGTFSFFAGLCFIAFFFVYFLLPDTAGLELEETTDFLSNGFNVKQAAQLSKERKKHSKFAKSKPTV

SEQ ID NO: 4623 - protein, 85 aa, Glycine max
  unsure (1)..(85): unsure at all Xaa locations
MATIVSXKARQIFXSSWXNPTVXVDXTCSDGXFARAAVLXGXSTGIYEALELRDRGSDYLXKGVSKAVDNVNTIIXAPAXVGKXP

SEQ ID NO: 4624 - protein, 197 aa, Pseudomonas aeruginosa PAO1
MIKLEQLVLASHNAGKLKELQAMLGASVKVRSIGEFSQVEPEETGLSFVENAILKARNAARLSGLPALADDSGLAVDFLGGAPGIYSARYADGRGDAANNAKLLEAMKDVPDAERGAQFVSVLALVRHADDPLPILCEGIWEGRILREARGAHGFGYDPLFWVPERDCSSAELAPEEKNRLSHRARAMALLKQRLGL

SEQ ID NO: 4625 - protein, 430 aa, Staphylococcus aureus subsp. aureus Mu50
MAFEFRLPDIGEGIHEGEIVKWFVKAGDTIEEDDVLAEVQNDKSVVEIPSPVSGTVEEVMVEEGTVAVVGDVIVKIDAPDAEDMQFKGHDDDSSSKEEPAKEEAPAEQAPVATQTEEVDENRTVKAMPSVRKYAREKGVNIKAVSGSGKNGRITKEDVDAYLNGGAPTASNESAASATSEEVAETPAAPAAVSLEGDFPETTEKIPAMRRAIAKAMVNSKHTAPHVTLMDEIDVQALWDHRKKFKEIAAEQGTKLTFLPYVVKALVSALKKYPALNTSFNEEAGEIVHKHYWNIGIAADTDRGLLVPVVKHADRKSIFQISDEINELAVKARDGKLTADEMKGATCTISNIGSAGGQWFTPVINHPEVAILGIGRIAQKPIVKDGEIVAAPVLALSLSFDHRQIDGATGQNAMNHIKRLLNNPELLLMEG

SEQ ID NO: 4626 - protein, 428 aa, Thermosynechococcus elongatus BP-1
MGLQAPRGTRDILPAERVYWQYLETIARQILDRAAYREICTPIFEQTPLFERGIGEATDIVSKEMYTFRDRAQRSLTLRPEGTAGVVRAYIEHGLHSQGGVQRLWYLGPMFRYERPQSGRYRQFHQLGVEVLGSADPRADAEVIAVALDILQALGLKQLTLMLNSVGDREDRSAYRQALVDYLTPYKADLDPDSQERLHRNPLRILDSKDPRTQAIVKEAPRLLDYLSARSRAHFEQVQSLLQALGIAYQINPALVRGLDYYTHTAFEFQDMSLGNEGTVCGGGRYDHLVEELGGPPTPAIGWAMGLERLILLLRDRPLPARNQPYLYMVTRGAAAERQGLILAQQLRHQGYTVDVDLSGSAFGKQVKRADRVGATVCLVIGESEATDGTVQVKWLASGEQVLVPQQELLSENWRSRFLTPHDGLLSH

SEQ ID NO: 4627 - protein, 946 aa, Magnaporthe grisea 70-15
MDDDDKSKVQLVDKEGRAEPEVNGNGIVKMETQNSATDSAQRSRSPSSMLRDGETQTVDDGDKISPRNASPDAKSTRKNPQQLPMRTSKLFSHLADVTEEASRGFAILSDCVYASKALGNSGQETLDCDCEEDWRDGLNHACAEDSDCINRVTKIECVSGNCGDGCQNQRFQRKQYANVSVIKTENKGYGLRADANLEPNDFVFEYIGEVIGEELFRSRLMKYDTQRLEHFYFMSLTRTEYVDATKKGNLGRFCNHSCNPNCYVDKWVVGDKLRMGIFAMRAIKAGEELCFNYNVDRYGANPQRCYCGESNCSGILGGKTQTERTTKLPLAMIEALGIDDGDHWESSVRKPRKKKAGESEEEYVGSIQPRKLEDGEVGVVMSTLRSCKEKWVATKLLHRILAVDEERVLNRVVKFHGYEYLKTTLNTFKDDNEVVFQVLSILYKLPRVTRNKIDDSNIEPLITELSNSKHEEIAAESKKLLEVWKTLQVGYRIPRAKADRSARDNAGSFFDDRRQQAREAASAPLPRAPSPVRNAPTGPRSSMPQRNPHYVPPRRKYPQQPPRDAPALPSGWRSAIDQRTGRQYYWETANPDKKSWVRPTSEMAKANAALQAQKIQDIINQCAQPTPKPSSATHTPQPVGTPVAEPKRETWRSWPADKQRRLYENTIFPHIKYVADKYYKRLPKEDLKKFVKDVNKTLAASDYKHGRVNDPSKVEEKQQSKIRKYTRDFLDKAVKKHELRQAEKASANNKSLEDGAAEPSGSTLSGAAEGSKKSPPGTDARVQSTNDSAPRSADSPDSSATDLKRKRGESHDVENVEGAAADLTPGYTPLAKRVKETDVEEPSPPPPPPTPPPLDELDDAVMIEEATEGRRLREHEDELRLENEEAHRLQQDAVEQKRLREHEEALERENQETLLALQTDQRGPEPDGDTPMANNVNGTKMGTVMV

SEQ ID NO: 4628 - protein, 225 aa, Zea mays
  unsure (1)..(225): unsure at all Xaa locations
CSMLFSCCSSQCECDDTCTNKSFQHRPLKKTKLIKTEKCGHGLVAEDEIKKGEFVIEYVGEVXNMVIDATNKGNRSRFINHSCEPNTAMQKWTVDGETRVGIFALRDIKIGEELTYDYKFVQFGAAQVCHCGSSNCRKMLGTTKYSGSSQNHHAKKKKRKTSCENCIQQFLRLWHPHKKMYVGCWIIDFDQETKMHTLKFNDLHTEKFNLKEEEWHFLEVDFDED

SEQ ID NO: 4629 - protein, 440 aa, Burkholderia fungorum LB400
MLSHQDNEILVRVGPGTPTGQFMRLFWLPFLPSSDLSVDGQPQRVRLLGEDLLAFRDSEGRVGLVDHACPHRGAPLVFGRNENSGLRCVYHGWQFGVDGRVIETPAEPIESRLKEKVRIKSYPCRERNGIVWTYMGDASADGLPPLPNLEWNMVPVENVHFSFRVQECNWLQAVEGEIDSAHAPILHGRIDSQGAINEWTAKRDLRPVFECQRQDFGISIASRRVLDEEHHYWRVNQFLFPFYTLVPPQSKYPELSGHAWVPIDDENTLCLMFSYTPATPLYEKTRQLFEQGHQGRETGHASVNAYEPRPVTNPYAKYWTRYNLESAFQFDYDAQTKTWFSGLPGLWVQDAACQSGVAPIYDRSKENLGISDTGVAMTRRLLLENVRKLAAERVSTVQVDEPDLWMVRAVSLTLQAGASWQNDGAVHMRARLGADFGYKP

SEQ ID NO: 4630 - protein, 297 aa, Aster tripolium
MLPYSSLQEAEAAMGRSLTFAETLWFNYSANKSDYVLYCHNIPLIFFLTTFLPIVYVVIEFLFPDYAASYKIQPKIKVSLYENFKVYLGVMRTFFLLVAPILLASHPSVQMIGIRTSLPLPSLLEIASQLLVYFLIEDYTNYWIHRFFHCKWMYNNIHVVHHEYTAPTGFATQHAHWFRYWCLGIPSFLGPSIAPGHMVTFLLWLALRQFEAIENHSGYDFPWTYKKFIPFSAGAEYHDYHHYVGEKSQSNFWHPIFTYCDYLYGTDKGYRNRKKLLAQQERWSKSEGKRAKGEHMR

SEQ ID NO: 4631 - protein, 345 aa, Burkholderia fungorum LB400
MFLRNMWYVAAFSADVKPGKCLARTFLNEPVVLFRTASGSLGALIDRCSHRAMPLSEGHVDGDIIRCPYHGLEFNAAGVCAHIPGQERIPAAANVRSYPVSERDGLIWIWMGEPEKADLRSIMSNPEHRDPGWSWRPYYMHVNSNWQLLVDNILDLTHVAYIHANTIGGNPQTHFNADMSVQFDGEKVTLLRKMPNSVPPKTYVAAGGFKGNVDRWQMVEYRPCGGNVLRVNAGACEVGTGAYEGRRDNGFTLLNVHGVTPETETTTHYIWTICTDAPRESGVPDMLFDQFYETICEDERALEAQQRRINDMPDMRFVGIASDGAVSRARLLLERLHENETAVTS

SEQ ID NO: 4632 - protein, 484 aa, Oryza sativa
  unsure (1)..(484): unsure at all Xaa locations
MTTPHGLLQYSSGAFSDQVPADDSAEEHGVKDHAMLAPFTAAWQTAISPPLVIERSEGCYVYDVNGTKYLDALAGLLSTALGGSEPRLVKAATEQLNKLPFYHSFWNHTTRPSLDLAKELISMFTAREMGKVFFTNSGSEANDSQVKIVWYYNNALGRPKKKNIISRTQSYHGTTFISASLSGLPTLHQDFDLPGRFVLHTDCPHYWRFHLPGETEEEFATRLADNLENLILKQGPETIAAFIAEPVIGAGGVILPPKTYFEKIQAVVKKYDNLFIVDEVITGFERLGTMFGSDLYNIKPDLVSLAKALSSAYAPIGAILVSPEISDVIHSHSNKLGTFAHGXFTYSGHPVSCAVALEALKIYRERDIPGHVTHVAQRFQEGIKAFAAGSPIVGETRGVGLLIATEFTDNKSPYELFPFEWGVGEIFGQECKKRGMMVKVLGNLIAMSPPLIITREEIDKLVSIYGEALKATEERVAELKSKKN

SEQ ID NO: 4633 - protein, 264 aa, Pinus taeda
MAIEILLGVAPMEEGRRGRSCGSLLPSVRKVVAEFIGTFFLIFVGCGSVVVDKISNGSITHLGVSLVWGMAAMIVIYSIGHISGAHLNPAVTLALAAVKRFPWVQVPGYIVAQVFGSISAGFLLRFMFGEVAFMGATVPSGSEMQSFALEIITTSLLVFVVSAVATDTKAVGELGGLAIGATIAMNVAISGPISGASMNPARTIGSAVAGNKYTSIWVYMVGPVIGALMGAMSYNMIRETKMSEREIMKSGSFVKDMGSSESTA

SEQ ID NO: 4634 - protein, 401 aa, Pisum sativum
MISSLRQPSISISGSDVVLRKRHATLIQLRPQSFSPFSSREKSQRSVVSTKKPLHLACLGVGNFGSVKNFESEASFGQSDLVKCGAYEADRSEVEGGDGTPSEAAKKVKIGIYFATWWALNVVFNIYNKKVLNAYPYPWLTSTLSLACGSLMMLISWATRIAEAPKTDLEFWKTLFPVAVAHTIGHVAATVSMSKVAVSFTHIIKSGEPAFSVLVSRFILGETFPVPVYLSLLPIIGGCALAAVTELNFNMIGFMGAMISNLAFVFRNIFSKKGMKGKSVSGMNYYACLSILSLAILTPFAIAVEGPAMWAAGWQTALSEIGPQFIWWVAAQSIFYHLYNQVSYMSLDEISPLTFSIGNTMKRISVIVSSIIIFHTPIQPVNALGAAIAVFGTFLYSQAKQ

SEQ ID NO: 4635 - protein, 279 aa, Glycine max
  unsure (1)..(279): unsure at all Xaa locations
SSTQLILLFLTKLLSKNSSGDSISTMSNSEHNIITGHAGYVLEDVPHLSDYIPHLTTYPNPLQDNPSYSVVKEHSVDVDDTIAQKAIVHKNSPRETHFRRAGPRQKVYFESEDVYACIVTCGGLCPGVNTVIREIVCGLYHMYGVHKVLGIEGGYRGFYSCNTIPLTPKVVNDIHKRGGTILGTSQGEGGNDTLKIVDSIQDRGINQVYILGGDGTQRGASVIFEEIRRRGLKGSVVGIPESVDNDIPVIDKSXFXFDTAGEEAQRAINAAHVEAESTE

SEQ ID NO: 4636 - protein, 393 aa, Solanum tuberosum
YAFSTNFDPLQQNLWGSKPPISSLSIKDIDFKQCDKHNILSKKPLYISAVLSGFGHADESKEFKSRDPLVQCNAYEASQPQSIPIDIEFGQEAQAAATQKLKIGLYFATWWALNVVFNIYNKKVLNAFPFPWLTSTLSLAAGSLMMLVSWATKIAETPKTDFDFWKALFPVAVAHTIGHVAATVSMSKVAVSFTHIIKSGEPAFSVLVSRLLGETFPLPVYLSLLPIIGGCGLAAITELNFNLIGFMGAMISNLAFVFRNIFSKKGMKGKSVGGMNYYACLSMMSLLILIPFAIAVEGPQVWALGWQNAVSQIGPNFIWWVVAQSVFYHLYNQVSYMSLNEISPLTFSIGNTMKRISVIVSSIIIFQIPIQPINALGAAIAILGTFLYSQAKQ

SEQ ID NO: 4637 - protein, 247 aa, Bacillus cereus ATCC 14579
MKLKDKVAIITGGASGIGESTVRLFIEEGAKVVIADFSERGKELSDELNAHGYNTLFIKTDVTKEADIKQLIHETVSTYGKLDIMYANAGVADDAPANELSYEKWKRTIDINLSGVFLSDKYSIEQFLKQGTGGVIVNAGSIHSFVSLPTPTAYSSAKGGVKLLTQNLCTAYAKYGIRINAVCPGYIDTPLLGSVNPQQKEYLASLHPQGRLGTPEEVAKAVLFLASDDASFVNGTTLLVDGGYTAR

SEQ ID NO: 4638 - protein, 428 aa, Microbulbifer degradans 2-40
MSKIANVIGFEVMDSRGNPTVMAEVVLESGVVGTACAPSGASTGSREALELRDGDKSRYLGKGVLKAVANINETIKPLLVGKDVAAQRELDDIMLKADGTENKANLGANAILAVSLAAAKAAAQDKGIPLYAHIADINGTPGKYTMPVPMMNIINGGEHADNNVDIQEFMIQPVSAPNFTEALRMGAEVFHSLKKVLAGRGLNTAVGDEGGFAPNLPSNEAALEAIAEAVAAAGYKLGEEITLALDCASSEFYKDGVYDMSGEGKKFSPEEFADYLAELASKYPILSIEDGMDESDWDGWKVLTEKIGSTCQLVGDDLFVTNTKILKEGIDKSIANSILIKFNQIGSLSETLDAIKMAQEAGYTAVISHRSGETEDTTIADLAVATAAGQIKTGSLSRSDRVAKYNRLLRIEAELGEKAPYRGRAEFK

SEQ ID NO: 4639 - protein, 572 aa, Saccharomyces cerevisiae
MSPLTRTVAIKKTVKVLSKCQSGREYTQKFLQRAYSTSHANSTYYSRTKLFISSHSKALNIALLSGSLLLTYSYYSPKKILSLDTINGIKDYSTNTSGNINMPSPNPKGTETQKSQRSQNDQSVLILNDSKIEAKLHDREESHFVNRGTGIFRYDVAQLPSNHPIEDDHVEQIITIPIESEDGKSIEKDLYFFGIFDGHGGPFTSEKLSKDLVRYVAYQLGQVYDQNKTVFHSDPNQLIDSAISKGFLKLDNDLVIESFRKLFQDPNNTNIANTLPAISGSCALLSLYNSTNSILKVAVTGDSRALICGLDNEGNWTVKSLSTDQTGDNLDEVRRIRKEHPGEPNVIRNGRILGSLQPSRAFGDYRYKIKEVDGKPLSDLPEVAKLYFRREPRDFKTPPYVTAEPVITSAKIGENTKFMVMGSDGLFELLTNEEIASLVIRWMDKNMNLAPVKAEPGKLPKVIDVSEDKEAQRPAFRYKDNNSSSPSGSNPEYLIEDKNVATHLIRNALSAGGRKEYVSALVSIPSPMSRRYRDDLTVTVAFFGDSGTPSIVSNATSIVMNPEATTKPKPRL

SEQ ID NO: 4640 - protein, 273 aa, Pseudomonas aeruginosa PAO1
MSTPRIAFIGAGNMAASLIGGLRAQGVPAAQIRASDPGAEQRAKIAGEFAIDVVESNAEAVADADVVVLSVKPQAMKAVCQALAPALKPEQLIVSIAAGIPCASLEAWLGQPRPVVRCMPNTPALLRQGASGLYANAQVSAAQCEQAGQLLSAVGIALWLDDEAQIDAVTAVSGSGPAYFFLLMQAMTDAGEKLGLSRETASRLTLQTALGAAQMALSSEVEPAELRRRVTSPNGTTEAAIKSFQANGFEALVEQALNAASQRSAELAEQLGQ

SEQ ID NO: 4641 - protein, 175 aa, Triticum aestivum
MAPTVMASSATSVAPFQGLKSTAGLPVSRRSTSAGLGSVSNGGRISCMQVWPIEGIKKFETLSYLPPLTVEDLLKQIEYLLRSKWVPCLEFSKVGFVYRENHRSPGYYDGRYWTMWKLPMFGCTDATQVLKELEEAKKAYPDAFVRIIGFDNVRQVQLISFIAYKPPGCEESGGN

SEQ ID NO: 4642 - protein, 816 aa, Yersinia pestis CO92
MKETNESRLLTTGVTRRKLVQTTLVGGLAMATGAFSLPFSRTARAVQSALNPTSANDGKVIWSACTVNCGSRCPLRMHVADGEIKYVETDNTGDDDFEGLHQVRACLRGRSMRRRVYNPDRLKYPMKRIGARGEGKFKRISWEEAFETIAGSMQNIIKEYGNEAIYLNYGTGTIGGTMTRSWPPGATLLARLMNCCGGYLNQYGDYSTAQIAAGLNYTYGGWADGNSPSDIENSKLVVLFGNNPAETRMSGGGVTYYLEQAREKSNAKMIVIDPRYTDTAAGREDEWIPLRPGTDAALASALAYVMITENLVDQPFLDQYCVGYDEKTLPEGAPENSHYKAYILGQGADKTAKTPQWAAAITGIPAAKIITLGREIGSVKPAYISQGWGPQRHSNGENTSRAIAMLAILTGNVGINGGNSGAREGSYSLPFVRMPTFENPVKTSISMFLWTDAIERGPEMTATRDGVQGKDKLDVPIKFIWNYASNCLVNQHSEINRTHDILQDDKKCEMIVVIDNHMTSSAEYADIILPDCTASEQMDFCLDASSGNMAYVIFADQVIKPRFECKNIYDITSGLARHMGVEQKFTEGRTQEEWMRHLYQQSQAAIPELPSFEDFRAQGMFKKRDPAGHHVAYHDFRTDPVANPLSTPSGKIEIYSAALAEIAATWELQKDDVIDPLPVYAAGFESHVDPLIEQYPLQLTGFHYKARTHSTYGNVDVLKASCLQEMWINPMDAERRGISNGDMVRIFNGRGEVQINAKVTPRMMPGVVALGEGAWYSPDAKRIDRAGSINVLTTQRPSPLAKGNPSHTNLVQVAKA

SEQ ID NO: 4643 - protein, 636 aa, Triticum aestivum
  unsure (1)..(636): unsure at all Xaa locations
MSAAVGGAEFHGFGGAAQLPRTRMLGRPVRVAPRGATPAGGGAPSGASIRAVSTPLEKXQNKLSEAGWSIIREESKVVRYQVNEELASEAADVHDSPIQPINFQGSYQXANVQLRDQQTXAFMFLARITTGSGPCQILMAVDTQADEFGVSTLRPIRGRPVPPQSVREWNNLEVISTVIKNMGSTLGACGDLNRNVLAPAAPYVRKDILFAQETAENIAALLAPQSGAYYDLWVDGEKIMSAEEPPEVTKARNDNSHGTNFPDSPEPIYGTQYLPRKFKIAVTVAGDNSVDILTNDIGVVVVSDSAGEPVGFNLYVGGGMGRTHRIETTFPRLADPLGYVPKEDILYAIKAIVVTQRENGRRDDRRYSRMKYLLDSWGIDKFRAEVEKYYGKKFEDFHPLPEWQFNSYLGWQEQGDGKLFYGVHVDNGRLGGQAKKTLREIIEKYSLDVSITPNQNLILCGVDQAWREPITAALAQAGLLEPKDVDLLNITSMACPALPLCPLAQTEAERGILPILKRIRAVFDKVGIKDEESVVVRITGCPNGCARPYMAEVGFVGDGPNSYQIWLGGTPNQTTLAETFMNKVKLQDIEKVLEPLFSYWNSTRQEGESFGSFTNRMGFEQLKEVVNKWEGSASAA

SEQ ID NO: 4644 - protein, 449 aa, Magnaporthe grisea 70-15
MQDSMTAAALPPLVQPLAEEVQQAQTIQQPDANGDAHQASGISADEIALYDRQIRLWGMQAQEKIRSANVLLVTVKALANEIAKNLVLAGINSLTIVDHEVVTAVDFGAQFLLSEDEGHLGMNRAEAASVNLRKLNPRVNVNVDKEDIRTRGPNYFQNFSVVIATDLDPDAFNIINLATRIVNKPFYAAGSHGFYGYIFADLIEHVFVIQRDEGNVATKLQPESRTRDVIDVQVKKEGGKSIERVTKRERYSTWTLSDVAPLPEEYRKSPRRLRAVTPVLSCLRALFEFQQEKGRLPALNRREDLERFTTLATERHHKLGLPVSTLKSEVLRSFLQNIGSELAPVTAIIGGQLAQDVINVLGASQAPIQNTLIFDGNTMEANMYPLHPEDDQLGSGQLVFSSPAGVQFAVDSSNAMAAGVVPDPSLMIPPVNMAGPDIAGPGPDMTLGQ

SEQ ID NO: 4645 - protein, 394 aa, Pseudomonas aeruginosa PAO1
MSQHDQHPDAPAQAFATRVIHAGQAPDPSTGAIMPPIYANSTYIQESPGVHKGLDYGRSHNPTRWALERCVADLEGGTQAFAFASGLAAISSVLELLDAGSHIVSGNDLYGGTFRLFERVRRRSAGHRFSFVDPTDLQAFEAALTPETRMVWVETPSNPLLRLTDLRAIAQLCRARGIISVADNTFASPYIQRPLELGFDVVVHSTTKYLNGHSDVIGGIAIVGDNPDLRERLGFLQNSVGAISGPFDAFLTLRGVKTLALRMERHCSNALALAQWLERQPQVARVYYPGLASHPQHELAKRQMRGFGGMISLDLRCDLAGARRFLENVRIFSLAESLGGVESLIEHPAIMTHASIPAETRADLGIGDSLIRLSVGVEALEDLQADLAQALAKI

SEQ ID NO: 4646 - protein, 559 aa, Zea mays
MGSSGFSWTLPDHPKLPKGKPVAVVVLDGWGEANPDQYNCIHVAQTPVMDSLKNGAPEKWRLVKAHGTAVGLPSDDDMGNSEVGHNALGAGRIFAQGAKLVDQALASGKIYDGDGFNYIKESFESGTLHLIGLLSDGGVHSRLDQLQILLKGVSERGAKKIRVHILTDGRDVLDGSSIGFVETLENDLLELRAKGVDAQIASGGGRMYVTMDRYENDWDVVKRGWDAQVLGEAPYKFKSALEAVKTLRAQPKANDQYLPPFVIVDDSGNAVGPVFDGDAVVTINFRADRMVMLAKALEYADFDNFDRVRVPKIRYAGMLQYDGELKLPSRYLVSPPEIDRTSGEYLVKNGIRTFACSETVKFGHVTFFWNGNRSGYFDATKEEYVEIPSDSGITFNVAPNMKALEIAEKARDALLSGKFDQVRVNLPNGDMVGHTGDIEATVVACKAADEAVKIILDAVEQVGGIYLVTADHGNAEDMVKRNKSGKPLLDKNDRIQILTSHTLQPVPVAIGGPGLHPGVKFRNDIQTPGLANVAATVMNLHGFEAPADYEQTLIEVADN

SEQ ID NO: 4647 - protein, 469 aa, GIBBERELLA ZEAE PH-1
MAPVTKETDYLVIGGGSGGLASARMASNKFGIKATIVENKRLGGTCVNVGCVPKKVTYNAAALAEAIHDSKAYGFSVQETAPFDWSTFKTKRDAYIKRLNGIYERNLNNDKVDYVHGWARLTSKNQAEVTLDDNSKVLINAKKILVAVGGKPTIPPEIPGSEYGTNSDGFFDISTQPKKVAIVGAGYIAVEFAGMFNALGTETHLFIRHDTFLRNFDPMIQEAVTKEYERLGVKLHKRSQASKIEKDSNGKLTVTYKDDQGNESVVSDVDNLIWAIGRTPETKGIGLEEAGVKLAKSGHIIVDEYQNTDVDSIYALGDVTGEVELTPVAIAAGRRLAHRLFGGAEFSTLKLDYSNIPSVVFSHPEVGSIGLTEPEAIEKYGKDNIKVYKTSFTAMYYAMMEPEQKGPTNYKLITTGPEEKVVGLHIMGIGSGEMLQGFGVAIKMGATKADFDSCVAIHPTSAEEIVTLK

SEQ ID NO: 4648 - protein, 348 aa, Nicotiana tabacum
GDVTTRQNWQIRGVVLPDVPEILKGLDEVGLTSLQSGMDNVRNPVGNPLAGIDPHEIVDTRPYTNLLSQYVTANFRGNPAVTNLPRKWNVCVIGSHDLYEHPHINDLAYMPASKDGRFGFNLLVGGFFSPKRCAEAVPLDAWVPADDVVPVCKAILEAYRDLGTRGNRQKTRMMWLVDELGVEGFRAEVVKRMPQQKLDRESTEDLVQKQWERREYLGVHPQKQEGYSFVGLHIPVGRVQADDMDELARLADNYGSGELRLTVEQNIIIPNVENSKIESLLNEPLLKNRFSTNPPILMKNLVACTGNQFCGQAIIETKARSMKITEEVQRLVSVTKPVRMHWTGCPNS

SEQ ID NO: 4649 - protein, 456 aa, Nicotiana tabacum
MMRLKLPNGVTTSAQTRYLASVIRKYGKEGCADITTRQNWQIRGVVLPDVPEILKGLAEVGLTSLQSGMDNVRNPVGNPLAGIDPEEIVDTRPYTNLLSQFITGNSRGNPAVSNLPRKWNPCVVGSHDLYEHPHINDLAYMPATKDGRFGFNLLVGGFFSAKRCDEAIPLDAWVPADDVVPVCKAILEAFRDLGFRGNRQKCRMMWLIDELGVEGFRAEVEKRMPQQQLERASPEDLVQKQWERRDYLGVHPQKQEGYSFIGLHIPVGRVQADDMDELARLADEYGSGEIRLTVEQNIIIPNIETSKIEALLKEPVLSTFSPDPPILMKGLVACTGNQFCGQAIIETKARSLKITEEVQRQVSLTKPVRMHWTGCPNTCAQVQVADIGFMGCLTRDKNGKTVEGADVFLGGRIGSDSHLGEVYKKAVPCDDLVPLVVDLLVNNFGAVPREREETED

SEQ ID NO: 4650 - protein, 466 aa, Cytophaga hutchinsonii
MYDVVVIGSGPGGYVAAIRCAQLGMKTALIEKYSTLGGTCLNVGCIPSKALLDSSEHYYNATHTFKEHGIDVKDVKVNLKQMIDRKAGVVKQTCDGINYLMKKNKVDVHTGIGSFVDKNTIKVTAADGSVKELKTAKTIIATGSKPTSLPNVAIDKKRIITSTEALELTEVPKHLIVIGGGVIGMELGSVYARLGAKVSVVEFMDTLIPTMDKALGKELIKVSKNHLGFDFYFSHKVTGATAKGKEVTVTAEDKDGKVLELKGDYVLVATGRRPYTEGLGLEAAGVKLDERGRVAVDGHLQTNVPGIYAIGDVVVGAMLAHKAEEEGVFVAESIAGQKPHINYNLIPGVVYTWPEVAAVGYTEEQLKKDGKAYKVGNFPFKASGRARASMDLDGFVKVLADKETDEILGVHMIGPRVADMIAEAVVAMEFRASAEDISRMSHAHPTFTESFKEACLAATDNRALHI

SEQ ID NO: 4651 - protein, 514 aa, Cytophaga hutchinsonii
MAFEVKVPTVGESITEVTIGRWNKKDGEFVDVNELICEIESDKATFELNAEKSGILKLNAKEGDTVAIGTVICSIEEGAGSAAAKPAANAAPAAAPAATPAAPAPAASNAAPVEVKIPTVGESITEVTLGAWSVKSGDAVKAGDLLLEIESDKATFELHAETTGTIEILSKSGDTVAIGTVVCKIVPGAGGASQAAAPASAPAATAAASSGGANYAGGHASPAAGKILNEKGVDASAVAGSGKDGRITKEDALKASAAPAAAAKPAAAASTAAPAAKASAAGRADDRVKMTSLRKTIARRLVAVKNETAMLTTFNEVDMKPVMDMRSKYKDTFKEKYGIGLGFMSFFTKAVCMALQEFPAVNAYIDGDEIVYHNFCDVSVAVSTPKGLVVPVIRNAETMSFNEIEAEIVRLATRARDGKLSIDEMSGGTFTITNGGIFGSMLSTPIINSPQSAILGMHNIVERPVAVGGQVVIRPIMYLALSYDHRIIDGRESVGFLVRVKQLLEDPSRLLLGV

SEQ ID NO: 4652 - protein, 151 aa, Arabidopsis thaliana
MSYNSYAEMSYLLKTLTTKEEIDRVIRDTIDEVLVLRFGRSSDALAKSVRDVSKFAKVALVDVDSEDVQVYVKYFDITLFPSTIFFFNAHHMKLDSGTADHTKWVGAFHIKQDFIDVVEAIYRGAMKGKMIVQCPIPPERIPKYQLVYKDV

SEQ ID NO: 4653 - protein, 175 aa, Glycine max
MAPTVMASSATSVAPFQGLKSTAGLPVSRRSNGASLGSVSNGGRIRCMQVWPIEGIKKFETLSYLPPLSTEALLKQVDYLIRSKWVPCLEFSKVGFIFREHNASPGYYDGRYWTMWKLPMFGCTDATQVINEVEEVKKEYPDAYVRIIGFDNMRQVQCVSFIDFQPPGCEESAKA

SEQ ID NO: 4654 - protein, 282 aa, Lycopersicon esculentum
MTGGKEIIDKIKEKVGLSSSDTGRGKSKMSKNITHGYHMVEGKSHHTMEDYVFAQFKQVDENELGLFAIFDGHLSHEIPEYLRSHLFNNILNEPNFWAEPESAIRKAYRITDTTILDKAADLGKGGSTAVTAILINGQKLVVANVGDSRAVIYKNGVAKQLSIDHEPGREREIIEGKGGFVSNFPGDVPRVDGQLAVARAFGDKSLKMHLSSEPDVVVELIDDDTEFLILASDGVWKVLSNQEAADCIKDIKDARSAAKHLNEHALARGSTDDISCVVVRFQ

SEQ ID NO: 4655 - protein, 571 aa, Striga hermonthica
MCGILAVLGVSENSQAKRSRIIELSRRLRHRGPDWSGLHNHQNCYLAHQRLAIIDPTSGDQPLYNEEKTVFVTVNGEIYNHKELREKLKSHVFRTGSDCEVIAHLYEEYGEEFVNMLDGMFSFVLLDTRDNSFIAARDAIGITPLYIGWGLDGSTWFASEMKALSDDCERFMTFLPGHIYSSKSGGLRRWYNPPWYAEQIPSAPYEPLVLRAAFEKAVIKRLMADVPFGVLLSGGLDSSLVASVASRYLADSPAAQWGTQLHTFCIGLKGSPDLRAAREVADYLGTRHHEFHFTVQEGIDALEEVIYHIETYDVTTIRASTPMFLMSRKIKSLGVKMVLSGEGSDEIFGGYLYFHKAPNKEEFHEETCRKIKALHLYDCLRANKATSAWGLEARVPFLDKEFIDVAMGIDPEWKMIRPDLGRIEKWILRNAFDDEEKPYLPKHILYRQKEQFSDGVGYSWIDGLKDHANQQVTDAMLANANFVYPENTPTTKEAYYYRTVFERFFPKNAARSTVPGGPSVACSTAKAVEWDASWSKNLDPSGRAALGVHVAAYDEAKMAGEGPTANGSPKE

SEQ ID NO: 4656 - protein, 592 aa, Prochlorococcus marinus subsp. marinus str. CCMP1375
MQSIGKYVVTGAEIQLDELSSLLKKIYTDKSVEEFDYMWSQLIQILEANSDNCFEGKQIHSCPWDSTTAVLITYADGVYSSNRSTLKTLGKLIENHLGEIAPIIHLLPFLCSTSDGGFAVSSYEKIDSRFGSWDDLKNLSDKHILMADLVLNHVSASHPWVQQFKNGTNPGKNYILSPSIKNNWENVIRPRNTSLFTNIATIEGNKDVWTTFGPDQIDVNWREPKLLLEFINLIVRYLNHGIKWIRLDAIGFIWKEPSTTCLHMEQVHNLVKVLRIILEKLKRSGVLITETNVPEKENISYLKSGSEAHLAYNFPLPPLLLESLINNKADLINNWLCSWPDLPVNTGFLNFTASHDGIGLRALEGLMDSRRIHNLLISCEKRGGLVSHRRMPNGEDKPYELNISWWSAMADTGVNTNYLQFERFILSQFFVMALKGVPAFYLQAIMASENDLVSFGQSGERRDLNRQRFDENTLENSLLDPKSFASKNLKALRNAMTVRSSLKAFHPEQAMHCLSGNRSDFVIIRRGMNDCCVWAVHNMTNKKLSFSLSDNLKTEIKNSYYWNDALNNQDYKHDYMELSPYSVHWLIKKNEN

SEQ ID NO: 4657 - protein, 268 aa, Zea mays
METRQLLLVFCLLGAGMAVVVDAQAQSAPAPPPRQTPSAPPQQTQFGRTMSTFITVAISVFFFLLFVCAYINQCRLADPGAAAAAAAAAAAAGGGGGGPSRRGKRGLDPAVVATFPIVSYREVVEHKIGKGVLECAVCLTAFEDDDDLRLLPHCSHAFHPECIDPWLQSRVTCPLCRANLEKPAPAPAVAPPSPSPRLAPRQPSPPPEAVAIPVSDDGSEGGSSSCEDDRKEEAVELETLRSARRAARMPRSHSTGHSLFAAAAPPSD

SEQ ID NO: 4658 - protein, 190 aa, Zea mays
MGAKAAHRRGVLDLEAQFAFFRSQHRHPVNAAAHVLLTWPILFTNLLILHFLPLPLPVSPALALALAYAAAYLAVDRRAGAVAGLLFLAAWAASRALAARLGFALSWKLVLVTQLFCWTWQFLGHGLFEKKGPSVSDLPEVFLMEPFLIFLQILNKLFGYEPYPGFCKNVDRKIEADLRASESSSRGRTT

SEQ ID NO: 4659 - protein, 512 aa, Magnaporthe grisea 70-15
MDFVIDGWGVASEESPKNGDAIAAAETPVMDEFARSKTGYVELEASSLAVGLPEGLMGNSEVGHLNIGAGRVVWQDVVRIDQSIKTGEFSKNEVITQVIEAAKSGNGRLHLCGLVSHGGVHSKQEHLYSLLKAAKEAQVPKVFIHFFGDGRDTDPKSGVGYMEELLEKTKEIGIGQIATVVGRYYAMDRDKRWERVELAMKGLVLGEGEASEDPVKTVKERYEKGENDEFLKPIVVGGDEGRIKDGDNVFFFNYRSDRVRQITQLLGDVDRSPRPDFPYPKIKLATMTRYKLDYPFDVAFEPQKMGNVLAEWLGKQNVPQVHVAETEKYAHVTFFFNGGVEKAFALEERDESQDLVPSNKSVATYDKAPEMSADGVADQVAKRLGEQKFPFVMNNFAPPDMVGHTGVYEAAIVGCAATDKAIGKIYEACKAHNYVLFITADHGNAEEMKFPDGKPKTSHTTNKVPFIMANAPEGWSLKPVGGVLGDVAPTVLACMGLPQPEEMTGENLLVKA

SEQ ID NO: 4660 - protein, 250 aa, Zea mays
MSRRYDSRTTIFSPEGRLYQVEYAMEAIGNAGSALGILAADGVVLVGEKKVTSKLLQTSRSAEKMYKIDSHLACAVAGIMSDANILINTARLHAQRYALSYQEPIPVEQLVQSLCDTKQGYTQFGGLRPFGVSFLFAGWDKHHGFQLYMSDPSGNYGGWKAAAVGANSQAAQSMLKQDYKDALTREEAVGLALKVLSKTMDSTSLTAEKLELAEVFLQPDTGEVQYQVCSPEALGKLLANSGLTQPTPEA

SEQ ID NO: 4661 - protein, 312 aa, Nitrosomonas europaea ATCC 19718
MKAAFVFPGQGSQSVGMMNSYSELPSVRGTFNEASDILQQDLWSLVSNGPEDSLNLTTNTQPVMLAADVSIYRAWQQAGGIEPHYLAGHSLGEYAALVAAEVLTFTDALKLVRYRAKVMQETVPEGTGGMAAIVGLDDDIVSSVCTEVINAMPDTSLEPANFNAPGQVVIAGHSQAVARAVVLAKSKGAKLAVILPMSIPSHCSLMQSAAEKFALLLEEIALQPPRIPILHNADVQQHSETASIREILVRQLYRPVRWTETIQAIAAQNVKYVVECGPGKVLSGLNRRIDKNLENIALTDSGSLLKTVETLK

SEQ ID NO: 4662 - protein, 445 aa, Gossypium barbadense
MAATIVSVKARQIFDSRGNPTVEVDVETSNGIKARAAVPSGASTGIYEALELRDGGSDYLGKGVSKAVANVNTIIGPALIGKDPTEQTAIDNFMVQQLDGTQNEWGWCKQKLGANAILAVSLAVCKAGAEVKKLPLYKHIANLAGNSKLVLPVPAFNVINGGSHAGNKLAMQEFMILPVGASSFKEAMKMGVEVYHHLKSVIKKKYGQDATNVGDEGGFAPNIQENKEGLELLNTAIAKAGYTGKVVIGMDVAASEFYGTDKTYDLNFKEENNDGKQKISGDALKDLYKSFVAEYPIVSIEDPFDQDDWEHYSKLTKEIGEKVQIVGDDLLVTNPKRVAKAIAEKTCNALLLKVNQIGSVTESIEAVKMSKQAGWGVMASHRSGETEDTFIADLSVGLATGQIKTGAPRRSERLAKYNQLLRIEEELGAKAVYAGASFRAPVAPY

SEQ ID NO: 4663 - protein, 400 aa, Bradyrhizobium japonicum USDA 110
MCYRQIRGCVMRSQVRLPDPIAAVFITEQLADRQTAAPDFLREKLAIQNLAEMMSDHPDEVLPRLVKLGMEICGAHSAGISIFEPEVGQFRWHALAGELATFEGATTPRNFSPCGVCLDLAQPILMEHPERAYDWIRDAGITVPEVLLVPLTMKGAEAIGTLWLVAADTGHFNQEHARVMAELSAFTGMALRTVQTAQRLKLAVQQQETLMREMSHRIKNLFSVADSMVRMTARNAATKEELAETLSGRLHALAQANGLIRRSFGSDVAAVASLSDLVERILRPHERQPSVLEGPDLVIGEQAVNHLALIFHELATNASKYGALSHEGGRVTVTWATEAERLRMEWTESGACGVDAPKTTGFGTKLVETTIERIGGEIERDWRREGLRVRISLPLKSLRS

SEQ ID NO: 4664 - protein, 216 aa, Triticum aestivum
  unsure (1)..(216): unsure at all Xaa locations
MGGRVDHEYSYLFKMVLIGDSGVGKSNILSRFTRNHFSLDSKSTIGVEFATKSLQMDGKTIKAQIWDTAGQERYRAITSAYYRGAVGALLVYDITKRQSFDNVHRWLRELRDHADSSIVIMMVGNKSDLIHLRAISEDEGKALAEKEGLFFLETSAMEAINVEQAFQTIITEVYGIVNRKALAAKEAAAATASFPPRXNISIDSTAGNTKRACCST

SEQ ID NO: 4665 - protein, 393 aa, Listeria monocytogenes EGD-e
MDLPLSKRVKGVAPSPTLAITAKAKQMKQEGIDVIGLGAGEPDFNTPQNIIDAAIESMNKGFTKYTPSSGIIELKQAIVDKLKKDQFLNYETNQIFVGTGAKHVLYSAFQTILDPGDEVIIPVPYWVTYPEQVKLAGGIPVFVETGFDADFKISAADFEKAITKKTKAIVLNSPNNPSGMCYTKEELIAIGEVAEKHQIYILSDEIYEKLYYGNKADLVSIASLSDRLYDLTIVINGVSKAYSMTGWRIGYAAANKEIIAGMSKLADHLTSNPTANAQYAALEAYVGSQEVPEKMYQAFEERMERFYPELNSIPGFKPKKPDGAFYFFIEVKEAAHKKGFQDVDAFVAALLEEAKVAVIPGSGFGMPDYIRLSYATNPDLFQEAINRIKSFMK

SEQ ID NO: 4666 - protein, 220 aa, Porphyromonas gingivalis W83
MKFFIDTANLDQIREANDMGVLDGVTTNPSLMAKEGISGKDNCMRHYLAICEIVDGDVSAEVIATDYEGMIREGEELAALHPQIVVKVPCTAEGIKAIKYFSDKGIRTNCTLIFTVGQALLAAKAGASYVSPFVGRLDDIASDGIKLVENIVAMFGFYRYETEVLAASIRHTQHIIQCLEAGADVATCPLNAIKGLLKHPLTDSGLKAFLEDHRRVNEGK

SEQ ID NO: 4667 - protein, 441 aa, Oryza sativa (japonica cultivar-group)
MMKPQHGGMAGHGGGRTRSPFLTSYALTLAFITFVSVLYFKDFSSTLHQPFLTRPPPHRRQIARPRAPSHHHGGGSSSGGGDVVPPFAVGAAAAAGCDVGVGEWVYDEAARPWYEEEECPYIQPQLTCQAHGRPDTAYQHWRWQPRGCSLPSFNATLMLEMLRGKRMMFVGDSLNRGQYVSLVCLLHRSIPESSKSMETFDSLTVFRAKNYNATIEFYWAPFLAESNSDDAVVHRIADRIVRGTALEKHARFWKGADILVFNSYLWWMTGQKMKILQGSFEDKSKDIVEMETEEAYGMVLNAVVRWVENNMNPRNSRVFFVTMSPTHTRSKDWGDDSDGNCYNQTTPIRDLSYWGPGTSKGLMRVIGEVFSTSKVPVGIVNITQLSEYRKDAHTQIYKKQWNPLTPEQIANPKSYADCTHWCLPGLQDTWNELLYSKLFFP

SEQ ID NO: 4668 - protein, 449 aa, Arabidopsis thaliana
MNHNSNLVLPSHQTETQTQDETDISVWRFRGSDNAAKASSVTMRVIVYKLFDECSLDVKKPLLPLAHGDPSVYPCYRTSILVENAVVDVLRSGKGNSYGPAAGILPARQAVADYVNRDLTNKVKPNDVFITVGCNQGIEVVLQSLARPNANILLPRPSYPHYEARAVYSGLEVRKFDLLPEKEWEIDLPGIEAMADENTVAMVIINPNNPCGNVYSYDHLKKVAETAKKLGIMVITDEVYCQTIFGDKPFVPMGEFSSITPVITLGGISKGWIVPGWRIGWIALNDPRGILKSTGMVQSIQQNLDITPDATTIVQAALPEILGKANKELFAKKNSMLKQNVELVCDRLKEIPCLVCNKKPESCTYLLTKLKLPLLEDIEDDMDFCMKLAKEENLVLLPGVALGLKNWIRITIGVEAQMLEDALERLNGFCKRHLKKTESSFQALSNGKI

SEQ ID NO: 4669 - protein, 429 aa, Microbulbifer degradans 2-40
MSFPLSSSSFSDKKNAFYAQSGGAAAVLNASAAGVVAGVMAHKDKIENLYIGRNGILGALHEDMVVVNTHDDNLIDDLLHAPAGAFGSCRYKLKSIEESEREYARILEVFKAHNIGYFFYNGGGNSQDTSCKLAKYAAKKNYPLQCIGIPKTIDNDLSGTDCSPGYGSVAKYVAVSILEASMDLASMHQTSTKVFVMEVMGRDSGWIAAAAGLAADERNLGPDLIIFPEVPYEEYKFYAELNRIVARKGFCVVVVAEGVRGPDGNHLTSTANKDAFGHTQLGGAASIIAGRIREVTGHKTHFAVCDYLQRAARHIASKTDVDQSFLVGKKAVEFAANGYSNVMMAIVRESEQPYRWSVGTVPLVEAANSRNALPAGFISKCGFHITDACRRYLAPLIAGESYPSYQNGLPAYRVFNSVAVPKKLEEFTL

SEQ ID NO: 4670 - protein, 397 aa, Microbulbifer degradans 2-40
MFDRLSLLSADPILGLIGQFTADSNPNKIDLGVGVYRDAQGHTPILATVKKAESILWEAEQTKSYIGPAGNQQFNRLVLELILGDEHTALADNRAIAMQTPGGCGALRVAAELIVAANPKAKIWVSDPTWGNHVPLLGDSGMEIATYPYYDYESHGIRFADMLTTLRESAVAGDLVLVHACCHNPSGADLSLAQWLQLTNLCAEKGLIPFVDMAYQGFGDGLDQDAAGLRMMADQLPEVIFAYSCSKNFGLYRERIGAVGVVAANTERATAVASQIMRIVRGIYSMPPSHGAAIVETILADPVLCQAWVDELALMRNRIQTMRQALLDAMTAQGYGDRFHFITGEKGMFSFLGLTPEQVQRLIKEHSVYMVDSSRINVAGLTPTNIDPLVKALTAVL

SEQ ID NO: 4671 - protein, 437 aa, Candida albicans SC5314
MYKTQLIKSSTQARFLAVRQLSSTSQLLKWNDIPLAPPDKILGISEAYNNDSNPQKINLGVGAYRDNSGKPIIFPSVKKAEEILLGKETEKEYTAIVGSKNFQSIVKNFIFNNSNKDANGKQLIDDGRIVTAQTISGTGSLRVIADFLNRFYSNKKILVPKPTWANHVAVFKDAGLEPEFYSYYETSKNDLDYANLKKSLTAAPEGSIVLLHACCHNPTGMDLTSEQWDEVLQIVQDKKFFPLVDMAYQGFASGKPFEDIGLIRKLTKLANENKIPSFALCQSFAKNMGLYGERTGSISIINSSGEASKAVESQLKKLIRPIYSSPPIHGSKIVEVIFDESSGLLPQWLDELDKVVGRLNTVRSKLYEKLDKSNYNWDHLLKQRGMFVYTGLSPEQVIRLRNEYSVYATEDGRFSISGINDNNVDYLANAINEVIKN

SEQ ID NO: 4672 - protein, 249 aa, Ralstonia eutropha JMP134
MLVENKVIIVTGAASPRGIGKATARALSAQGAHVVILDLKLEEAQSAAAELGPRHLGLACDVTDKAACERAALAVVERFGRIDGLVNNAGITQPLRTLDIQAANFDAVVDVNLRGTLYMSQAVLPQMKEQKRGSIVCMSSVSAQRGGGIFGGPHYSAAKAGVLGLARAMAREFGGDGIRVNSITPGLIQTDITGDKLTADMRADIIKGIPLGRLGDAGDVANACLFLASDLSSYLTGITLDVNGGMLIH

SEQ ID NO: 4673 - protein, 167 aa, Staphylococcus aureus subsp. aureus Mu50
MHGGHTTDDYTGAVTTPIYQTSTYLQDDIGDLRQGYEYSRTANPTRSSVESVIAALENGKHGFAFSSGVAAISAVVMLLDKGDHIILNSDVYGGTYRALTKVFTRFGIEVDFVDTTHTDSIVQAIRPTTKMLFIETPSNPLLRVTDIKKSAEIAKEHGLISVVDTHL

SEQ ID NO: 4674 - protein, 247 aa, Arabidopsis thaliana
MEDIVDQELSNYWEPSSLLQNEYFEYDSWPLEEAISGSYDSSSPDGAASSPASKNIVSERNRRQKLNQRLFALRSVVPNITKMDKASIIKDAISYIEGLQYEEKKLEAEIRELESTPKSSLSFSKDFDRDLLVPVTSKKMKQLDSGSSTSLIEVLELKVTFMGERTMVVSVTCNKRTDTMVKLCEVFESLNLKILTSNLTSFSGMIFHTVFIEADEEEQEVLRLKIETGIGAYNETQSPTLSIDSLY

SEQ ID NO: 4675 - protein, 206 aa, Staphylococcus aureus subsp. aureus Mu50
MTPYYQNPLDLGIDIVLHSATKYLGGHSDVVAGLVATSDDKLAERLAFISNSTGGILGPQDSYLLVRGIKTLGLRMEQINRSVIEIIKMLQAHPAVQQVFHPSIESHLNHDVHMAQADGHTGVIAFEVKNTESAKQLIKATSYYTLAESLGAVESLISVPALMTHASIPADIRAKEGITDGLVRISVGIEDTEDLVDDLKQALDTL

SEQ ID NO: 4676 - protein, 464 aa, Glycine max
MANTLYNGATCRIPLRDQSLAFSRHVSRSLSFLPITRAAKQPNAIAVKASSHSDFDVDLSLSPRVNAVKPSKTVAISDHATALVQAGVPVIRLAAGEPDFDTPAPIAEAGINAIREGYTRYTPNAGTMELRQAICHKLKEENGITYTPDQVVVSNGAKQSIAQAVLAVSSPGDEVIIPAPFWVSYPEMARLADATPVILPTLISDNFLLDPKLLESKITERSRLLILCSPSNPTGSVYPKELLEEIARIVAKHPRLLVLSDEIYEHIIYAPATHTSFASLPGMWDRTLTVNGFSKAFAMTGWRLGYIAGPKHFVAACGKIQSQFTSGASSIAQKAAVAALGLGHAGGEAVSTMVKAFRERRDFLVQSFREIDGIKISEPQGAFYLFLDLSFYYGREAEGFGKIVDSESLCQYLLEVGQVALVPGSAFGDDTCIRISYAESLTTLQAAVERIKKALVPLSSAALV

SEQ ID NO: 4677 - protein, 381 aa, Medicago truncatula
MAKIELSRHIPLVTLIVLVLCITPPIFATKNCDFPAIFSFGASNVDTGGLAAAFRAPPSPYGETYFHRSTGRFSDGRIILDFIARSFRLPYLSPYLNSLGSNFTHGANFASGGSTINIPKSILPNGKLSPFSLQIQYIQFKEFISKTKLIRDQGGVFATLIPKEDYFSKALYIFDIGQNDLTIGFFGNKTIQQVNATVPDIVNNYIENIKNIYNLGARSFWIHGTGPKGCAPVILANFPSAIKDSYGCAKQYNEVSQYFNFKLKEALAELRSNLSSAAITYVDIYTPKYSLFTNPEKYGFELPFVACCGYGGEYNIGVGCGASININGTKIVAGSCKNPSTRIIWDGVHYTEAANEIVFSQILTGVFNDPPISLDRACYRK

SEQ ID NO: 4678 - protein, 510 aa, Zea mays
  unsure (1)..(510): unsure at all Xaa locations
MMIARRLLRPNAPAQASSLLKHVMTGTASLQGYADSLLDATVRHFGSAPSAQPEENGFKGHGMLAPFTAGWQSNDLHPLIIERSEGSYVYDINGNKYLDSLAGLWCTALGGSEPRLVKAATEQLNKLPFYHSFWNRTTKPSLDLAQEILSMFTAREMGKVFFTNSGSEANDSQVKLVWYYNNALGRPNKKKFIARSKAYHGSTLISASLTGLPALHQKFDLPAPFVLHTDCPHYWRYHLPGETEEDFATRLATNLENLILKEGPETIAAFIAEPVMGAGGVIPPPKTYFDKVQAVVKKYDILFIADEVITAFGTLGTMFGCDYYNIKPDLVSLAKALSNAYVPIGATLVSPEISDVIHSQSNKLGSFAHGFTYSGHPVACAVAIEALKLYRERDIPGHVKQIAPKFQDGIRALADSPIIGEIRGLGMIMGTEFTNNKSPTDLFPAEWXVGAIFGEECQKRGMLVRVAGDAIMMSPTLIMTPGEVDELVRIYGEALKATEERVAALQSKKN

SEQ ID NO: 4679 - protein, 348 aa, Kluyveromyces marxianus
MSIPTTQKGVIFYENGGQLYYKDIPVPKPKSNELLINVKYSGVCHTDLHAWKGDWPLDTKLPLVGGHEGAGVVVAMGDNVKGWKIGDLAGIKWLNGSCMNCEECELSNESNCPDADLSGYTHDGSFQQYATADAVQAAHIPAGTDLAQVAPILCAGVTVYKALKTAEMKAGDWVAISGAAGGLGSLAVQYAKAMGFRVLGIDGGEGKEELFKSLGGEVFIDFTKSKDIVGEVIKATNGGAHGVINVSVSEKAIESSIEYCRSNGTVVLVGLPKDAKCKSDVFNQVVKSIHIVGSYVGNRADTREALDFFCRGLVNAPIKVVGLSTLPEIYEKMEQGKVLGRYVVDTSK

SEQ ID NO: 4680 - protein, 205 aa, Zea mays
MELDADNLSATELRLGLPGTSSSSSSDDWQKKPSPSVGAKRALDDGTKSEASGTSTAAGDLDFDHDHDTAAPPKAQVVGWPPVRAYRKNTFQAAAAAKKVEQKQKQQQQGGLYVKVSMDGAPYLRKVDLRMYKGYRELREALDALFTNSFSAAAEGGGDHHQHAIAYEDKDGDLMLAGDVPWDMFISSCKKLRIMKGSASESEAR

SEQ ID NO: 4681 - protein, 525 aa, GIBBERELLA ZEAE PH-1
MSKTDQKACLIVIDGWGIPSADSPKDGDAITNAKTPVMDALYKDSKGYTELEASSLAVGLPEGLMGNSEVGHLNIGAGRVVWQDVVRIDQTIKNGELSQNDVIKKTFQSAAGGNGRLHLCGLVSHGGVHAKQTHLYALLKAAKEYGVPKVIIHFFGDGRDTDPKSGAGYMQELVDNIKEIGVGEIGTVVGRYFAMDRDKRWDRLEIALKGLILGEGEASEDPVATVKARYEQGGDMNKDEFLTPIIVGGDDRRIKDDDTVFFFNYRSDRVRQITQLLGDVDRSPLPDFQYPKIKPLVTMTQYKVDYPFEIAFKPQHMGNVLAEWLGKQNVEQVHIAETEKYAHVTFFFNGGVEKVFPLETRDQSQDLVPSNKSVATYDLAPEMSADGVADQVVKRLGEQKFPFVMNNFAPPDMVGHTGVYDAAVIGCEATDKAIGKILEGCKKAGYVLFITADHGNAEEMKFADGKPKTSHTTNKVPLLMANYPEGWSLKKTTEGVLGDVAPTVLAAMGLPQPEEMTGKSLLEKA

SEQ ID NO: 4682 - protein, 508 aa, Arabidopsis thaliana
MVHADGHNFPGSDPNPHMNKFAFGCAIVASIISIIFGYDTGVMSGAQIFIRDDLKINDTQIEVLAGILNLCALVGSLTAGKTSDVIGRRYTIALSAVIFLVGSVLMGYGPNYPVLMVGRCIAGVGVGFALMIAPVYSAEISSASHRGFLTSLPELCISLGILLGYVSNYCFGKLTLKLGWRLMLGIAAFPSLILAFGITRMPESPRWLVMQGRLEEAKKIMVLVSNTEEEAEERFRDILTAAEVDVTEIKEVGGGVKKKNHGKSVWRELVIKPRPAVRLILIAAVGIHFFEHATGIEAVVLYSPRIFKKAGVVSKDKLLLATVGVGLTKAFFIIIATFLLDKVGRRKLLLTSTGGMVFALTSLAVSLTMVQRFGRLAWALSLSIVSTYAFVAFFSIGLGPITWVYSSEIFPLRLRAQGASIGVAVNRIMNATVSMSFLSMTKAITTGGVFFVFAGIAVAAWWFFFFMLPETKGLPLEEMEKLFGGGGPRGDRDGLEIQTKTISIGGFS

SEQ ID NO: 4683 - protein, 206 aa, Gloeobacter violaceus PCC 7421
MQTSDTLLLAEAVGHLKRSDPILAAIIERVGDCSYQTSAAGTHFDAVVRAIVYQQLSGKAAATIHKRLCDLFDGRPPLPAELLAVEAAALRGVGLSRQKLNYLKSLAAQVESGALAIETLHILEDQAILAELMRLKGIGRWTAQMFLMFRLGRPNVLPEGDLGIQKAIQLAYSLKALPSPKQMAAVSEPWHPYCTIACWYLWRSLE

SEQ ID NO: 4684 - protein, 289 aa, Glycyrrhiza uralensis
MEGKEQDVSLGANKFPERQPIGTAAQTQDDGKDYKEPPPAPLFEPNELTSWSFYRAGIAEFVATFLFLYITILTVMGVNRSESKCKSVGIQGIAWAFGGMIFALVYCTAGISGGHINPAVTFGLFLARKLSLTRAVFYMVMQCLGAICGAGVVKGFEGKTLYGKYNGGANFVNSGYTKGDGLGAEIVGTFVLVYTVFSATDAKRSARDSHVPILAPLPIGFAVFLVRLATIPITGTGINPARSLGAAIIFNKDRGWNDHWIFWVGPFIGAGLAALYHVVVIRAIPFKSK

SEQ ID NO: 4685 - protein, 101 aa, Zea mays
  unsure (1)..(101): unsure at all Xaa locations
SVDILTNDLGAAVASNDAGEPIGSNIYVAGGMXRTHRVETTFYQLPDPLSYVPXDDIVYAIKAIAVTHRENGPTDYRMYSMIKYXIDRRGIDRYRTEVEKY

SEQ ID NO: 4686 - protein, 530 aa, Arabidopsis thaliana
MEASISFLGSTKPNISLFNPSSNVLPRRDFPLPALKLKKVSVLPRILHQKRLIRAQCSDGFKPEEDDGFVLEDVPHLTKFLPDLPSYPNPLKESQAYAIVKRTFVSSEDVVAQNIVVQKGSKRGVHFRRAGPRERVYFRSDEVKACIVTCGGLCPGINTVIREIVCGLNNMYGVNNILGIQGGYRGFYSKNTMNLTPKVVNDIHKRGGTFLQTSRGGHDTAKIVDNIQDRGINQVYIIGGGGTQKGAEKIYEEVERRGLQVAVSGIPKTIDNDIAVIDKSFGFDTAVEEAQRAINAAHVEVESVENGVGIVKLMGRYSGFIAMIATLANRDVDCCLIPESPFFLEGKGGLFEFIEERLKENRHMVIVIAEGAGQDYVAQSMRASETKDASGNRLLLDVGLWLTQQIKDHFTNVRKMMINMKYIDPTYMIRAIPSNASDNVYCTLLAQSAVHGAMAGYSGFTVGPVNSRHAYIPISQVTEVTNTVKLTDRMWARLLASTNQPSFLTGEGALQNVIDMETQEKIDNMKISSI

SEQ ID NO: 4687 - protein, 394 aa, Bifidobacterium longum NCC2705
MSAEYNAKFANTDIATRAIHAGQEPDPTTGAVVTPIFATSTFKQDGVLGLRGGHDYSRSINPTRTSFDEQLAAVEGGKYALSFSSGLAAIDVLLRSTIKPGDNILLGNDVYGGTYRLLSKVFVPWGVGLDVVNITDLKAVETALASKHYQYVWVETPSNPLLNITDIAATTEVAHKYGTKVAVDNTFASPALQHPLADGADVVVYSTTKYIGGHSDVVGGAVVVNDEETREKVAFLQNAAGAVPSPFDSWLDIRGLKTLDLRVKRHSANALKVAEWLESQPSDVIERVWYPGLESHPGHEIAARQMHGGFGGIVSVQLAAGAEAAKHFVDHTQIFTLAESLGGVESLIEVPAAMTHASVAGTTLQVPANLVRISVGIENADDLIADLKQALDRI

SEQ ID NO: 4688 - protein, 805 aa, Actinobacillus pleuropneumoniae
MSITRRGFLKGTSASMTALAASGGIALPFVAKAETKDNVAGQAQDEKVVWSACTVNCGSRCPLRMHVKDNQILYVETDNTGTEPYNLDHQVRACLRGRSMRRRVYNPDRLKYPMKRVGKRGEGKFKRISWDEALTEIAQSLRKNIEKYGNESIYLNYGTGTLGGTVTKSWPPGSTLVARLMNCIGGYLNHYGDYSTAQIAVGLDYTYGGGWALGNGLADIENTKLIVLFGNNPAETRMSGGGLTYCFEQAKAKSNAKVIIIDPRYTDTGVGKEDEWIPIRPGTDAALVSALAYVLITENMVDQAFLDKYCVGYDEKTLPADAPKNGHYKAYILGQGDDGIAKTPEWASKITGIPVERIIKLAREIDQTKPAYISQGWGPQRRSNGELISRAIAMLPILTGNVGISGGNTGARESAYGIPFVRMPTLTNPVQASIPMFLWTDAIPRGPEMTATTDGIQGVEKLSAPIKVIWNYASNCLINQHAEINRTHEILQDESKCELIITIDNHMTSTAKYSDILLPDCMTSEQMDFCLDAYVANMNYVIFADQVVKPSFECRNIYDMLSDLAEKLGVKEQFTEGRTQEQWLRHIYEQSRQKLPELPTFEEFRQQGIFKKVDPKGFFIAYKDFRENPEANPLKTPSGKIEIYSSRLAEIARTWKLEKDEVIHPLPIHTDSFEHYGDPLMQKYPLQLSGFHYKARTHSTYGNVDVIKEANPQEIWINPIDAQTRGIQNGELVRIFNDRGEVRINAKVTPRIIPGVVALSEGAWYAPDKNGVDYSGCINVLTTQRPSPLAKGNPQHSNLVQIEKL

SEQ ID NO: 4689 - protein, 370 aa, Candida albicans SC5314
MKAAVVPESVTETKLAEIKEIPKPTIDDDQILIKAEAGAINPTDWKHIIVARSSKPGDIIGCDVSGIVEEVGSKVTNFKKGDAVSAYITGNISSINGAFSEYVAAYPQATIKYTNGLIHSTAVAKASTIIKTFEGAACMTLGLATVAMSFSHHLNISKHQQKQGNDAILIWGGATATGILAIQVAKLVYNLTVITTASPKNHEYLKQLGADYVLDYNDSRIVENIRKIGNGNIRFGLDTVSNATTFQYLYDATESTTSSYAKKVYLDSLLALDGNTIKTDPKRDKSVHWGYTFVDHSIIKVKKFGDKEYYQTPELFNNYYKWWQEIMPTIINKIKHANLKILDNGLESVNEALQLSKDSKVSAEKIVFTI

SEQ ID NO: 4690 - protein, 249 aa, Exiguobacterium sp. 255-15
MNHINHTVIITGAANGIGATLAKTYTKEGATVILADIDQMTGDDLAAEIEADGGTAYFYHLDVQDEKDVNLLIDKAIEHTGRIDIVINNAGIMVRKSLLELELEEWDRVQHTNLRSIFLTTKAAAPYLKKNPAGGRIVNLASTRAFMSEPDTESYAATKGGIVALTHALAVSLGPDRILVNAIAPGWIETGNYHELSPEDHSQHPAGRVGKPEDVARAALFLTNTDNDFLTGETLVLDGGMTRKMIYEE

SEQ ID NO: 4691 - protein, 312 aa, Saccharomyces cerevisiae
MPATLHDSTKILSLNTGAQIPQIGLGTWQSKENDAYKAVLTALKDGYRHIDTAAIYRNEDQVGQAIKDSGVPREEIFVTTKLWCTQHHEPEVALDQSLKRLGLDYVDLYLMHWPARLDPAYIKNEDILSVPTKKDGSRAVDITNWNFIKTWELMQELPKTGKTKAVGVSNFSINNLKDLLASQGNKLTPAANQVEIHPLLPQDELINFCKSKGIVVEAYSPLGSTDAPLLKEPVILEIAKKNNVQPGHVVISWHVQRGYVVLPKSVNPDRIKTNRKIFTLSTEDFEAINNISKEKGEKRVVHPNWSPFEVFK

SEQ ID NO: 4692 - protein, 487 aa, Staphylococcus aureus subsp. aureus Mu50
MGEFKGFMKYDKQYLGELSLVDRLKHHKAYQQRFTKEDASIQGARCMDCGTPFCQTGQQYGRETIGCPIGNYIPEWNDLVYHQDFKTAYERLSETNNFPDFTGRVCPAPCESACVMKINRESIAIKGIERTIIDEAFENGWVAPKVPSRRRDEKVAIVGSGPAGLTAAEELNLLGYQVTIYERARESGGLLMYGIPNMKLDKDVVRRRIKLMEEAGITFINGVEVGVDIDKATLESEYDAIILCTGAQKGRDLPLEGRMGDGIHFAMDYLTEQTQLLNGEIDDITITAKDKNVIIIGAGDTGADCVATALRENCKSIVQFNKYTKLPEAITFTENASWPLAMPVFKMDYAHQEYEAKFGKEPRAYGVQTMRYDVDDKGHIRGLYTQILEQGENGMVMKEGPERFWPADLVLLSIGFEGTEPTVPNAFNIKTDRNRIVADDTNYQTNNEKVFAAGDARRGQSLVVWAIKEGRGVAKAVDQYLASKVCV

SEQ ID NO: 4693 - protein, 492 aa, Prochlorococcus marinus str. MIT 9313
MTTAPLPRSRRRTVRLQEASLLEGPMLLLRSIRGFSSNRSLTWLACVPLALFGLGLFNLSAHAAEMPELNAAFLANNLWLLVATILVIFMNAGFAMVEAGMCRQKNAVNILAKNLFVFALAVSSYWFIGYSLMYGDPVSAGWLYFNGLFFDPAVTPELISEAGLVPSVDFLFQAAFAGTAATIVSGLVAERVKFGEFVVFSLVLTGFIYPIAGSWEWNGGWLNTAFGEGVEFIDFAGSSIVHSVGAWAGLVGAMLLGPRIGKFVGGKAQAIPGHNMSIATLGALILWIGWYGFNPGSQLAMDQWVPYVAVTTTLAAAGGAIGATIISTLCSGKPDLTMIINGILAGLVSITAGCGNLTLVGAWVAGLIGGFIVVFSVSALDSLGIDDPVGAFSVHGICGIWGTLVIGLWGFDIQGDGSALGLFVGGGASQLWAQFVGCAAYAIWTVVTCWIAWSVIGALFGGIRVTEAEEIEGLDIGEHGMEAYPDFASAGN

SEQ ID NO: 4694 - protein, 394 aa, Aquifex aeolicus VF5
MRKGLASRVSHLKPSPTLTITAKAKELRAKGVDVIGFGAGEPDFDTPDFIKEACIRALREGKTKYAPSAGIPELREAIAEKLLKENKVEYKPSEIVVSAGAKMVLFLIFMAILDEGDEVLLPSPYWVTYPEQIRFFGGVPVEVPLKKEKGFQLSLEDVKEKVTERTKAIVINSPNNPTGAVYEEEELKKIAEFCVERGIFIISDECYEYFVYGDAKFVSPASFSDEVKNITFTVNAFSKSYSMTGWRIGYVACPEEYAKVIASLNSQSVSNVTTFAQYGALEALKNPKSKDFVNEMRNAFERRRDTAVEELSKIPGMDVVKPEGAFYIFPDFSAYAEKLGGDVKLSEFLLEKAKVAVVPGSAFGAPGFLRLSYALSEERLVEGIRRIKKALEEI

SEQ ID NO: 4695 - protein, 374 aa, Chlorobium tepidum TLS
MEKNEISEERRTQEKEKQHGHRLNIRRLGRKELTELLTRLGEPAYRANQLHRWLYSNQALRFEEMSTLSKQLRQKLASEWIIHPASLVGTERETTDASLVTGNPTAKFLIKLEDNELVESVLIPSEERITACISSQIGCPLRCTFCATGHMGFRRNLTASEITDQVFLLEKEAQKRHWRGLTNIVFMGMGEPLLNLDNVLESIGTLTEKDYQFSISERKITISTVGLPVEMDRIARSGLKTKLAISLHSADQLIRERMMPIAADITLDKLAKAINSYNSVTSQPVTLVYMLLEGINDSPEDARKLVRFAKRVLCKINLIDYNSIVTLKFKPGCSSSKTMFIQQLLDAGLLVTVRKSQGATINAACGQLATRPVR

SEQ ID NO: 4696 - protein, 293 aa, Exiguobacterium sp. 255-15
MSKVRKAIIPAAGLGTRFLPATKAMPKEMLPILTKPTIQYIVEEAVASGIEQIIIVSGRSKRAIEDHFDHAPELENILRQKGKLDLLKEVDASTTMAEIHYIRQKEPKGLGHAIWSARHFIGDEPFAVLLGDDIIVSEEPGLKQLMDQYEELDASVVGVRQVPIEDTHRYGIIDPLNQTGRRYQVRQFVEKPVQGTAPSNMAIIGRYILTPAIFEYLATQEAGTGGEIQLTDAIERLNGQEDVYGYEVEGKRFDVGEKMGYVETTLAFALEDAEIQADVRQLLKRYVESWEQE

SEQ ID NO: 4697 - protein, 93 aa, Methylobacterium extorquens
MTDFHRIKRLPPYVFEQVNRIKAAARARGADIIDLGMGNPDLDAPRHVIEKLVETAGKPRTDRYSASKGIAGLRRAQAGYYQRRFGVSLNPDT

SEQ ID NO: 4698 - protein, 273 aa, Oryza sativa
MAFAAEPMDLEVSPDSSPAAAAAAAVCSICLDAVACGDGVAARSTARLQCGHEFHLDCIGSAFNAKGVMQCPNCRNIEKGHWLYGNESQPCSHSDTGDWLNGETFDYPFSFEFGWCPFNTPLTSVFGESESEPNPFLEYIGSLHGFHHSMYAPSSSTASTESVPFHQSATGTDSQATTDLRNAGVFNESERVNHEREQLDLGSDEMLGTLNHYTGPFNIRMPTYDGGNQQTLRPHMHDNSLFHRPAAGRASNIAHLRTLTAAYETICHGHEKT

SEQ ID NO: 4699 - protein, 181 aa, Exiguobacterium sp. 255-15
MTLMNDMEKVLISEEEIQHKVGELAGELTADYGDRFPLLVCVLKGAMPFMSDLVKKMDMHLEMDFMDVSTYHGGTTSTGEVKIEKDLNTSVEGRDILIVEDIIDSGLTLGYLVDLFKYRKAKSVKIVTLLDKPSGRKNDLHADYSGFVIPHEFVVGYGLDYEEKYRNLPYVGVLKPAVYGG

SEQ ID NO: 4700 - protein, 641 aa, Oryza sativa (japonica cultivar-group)
MSAAVGGAEFHGFRGGGGGAAQLQRSRMLGRPLRVATPHAAAPAGGGGSSSASIRAVSAPLKKDASEVKRSKVEIIKEKSNFLRYPLNEELVSEAPNINDSAVQLIKFHGSYQQTDRDVRGQKNYSFMLRTKNPCGKVPNQLYLAMDTLADEFGIGTLRLTTRQTFQLHGVLKKNLKTVISTVIKNMGSSLGACGDLNRNVLAPAAPYVRKDILFAQETAENIAALLTPQSGAYYDLWVDGEKIMSAEEPPEVTKARNDNTYGTNFPDSPEPIYGTQYLPRKFKIAVTVAGDNSVDILTNDIGVVVVSDSAGEPVGFNIYVGGGMGRTHRVETTFPRLADPLGYVPKEDILYAIKAIVVTQRENGRRDDRRYSRMKYLIDNWGIEKFRAEVEKYYGKKFEDSRPLPEWQFNSYLGWQEQGDGKLFYGVHVDNGRVAGQAKKTLREIIEKYNLEVSITPNQNLILCGIDQAWKDPITAALAQSGLLEPKDVDPLNITSMACPALPLCPLAQTEAERGILPILKRIRAVFDKVGIKDHESVVVRITGCPNGCARPYMAEVGFVGDGPNSYQIWLGGTPNQSTLAETFMNKVKLQDIEKVLEPLFSYWNSTRQEGESFGSFTRRTGFDKLKEVVNKWAESASAA

SEQ ID NO: 4701 - protein, 584 aa, Oryza sativa (japonica cultivar-group)
MSAAVGGAEFHGFRGGGGGAAQLQRSRMLGRPLRVATPHAAAPAGGGGSSSASIRAVSAPLKKDASEVKRSKVEIIKEKSNFLRYPLNEELVSEAPNINDSAVQLIKFHGSYQQTDRDVRGQKNYSFMLRTKNPCGKVPNQLYLAMDTLADEFGIGTLRLTTRQTFQLHGVLKKNLKTVISTVIKNMGSSLGACGDLNRNVLAPAAPYVRKDILFAQETAENIAALLTPQSGAYYDLWVDGEKIMSAEEPPEVTKARNDNTYGTNFPDSPEPIYGTQYLPRKFKIAVTVAGDNSVDILTNDIGVVVVSDSAGEPVGFNIYVGGGMGRTHRVETTFPRLADPLGYVPKEDILYAIKAIVVTQRENGRRDDRRYSRMKYLIDNWGIEKFRAEVEKYYGKKFEDSRPLPEWQFNSYLGWQEQGDGKLFYGVHVDNGRVAGQAKKTLREIIEKYNLEVSITPNQNLILCGIDQAWKDPITAALAQSGLLEPKDVDPLNITSMACPALPLCPLAQTEAERGILPILKRIRAVFDKVGIKDHESVVVRITGCPNGCARPYMAEVGFVGDGPNSYQIWLGGTPNQKKKMCL

SEQ ID NO: 4702 - protein, 116 aa, Xanthomonas campestris pv. campestris str. ATCC 33913
MSARVLVVEDESLVAMLLEDCLAELGYEVAGTVGDVSTALEAVKKGNLDMAVLDVNLGGTMSFPIAEELDARGVPYIFVTGYASSGIPEKFRHRHGVQKPFRFRDLQDALALLQKA

SEQ ID NO: 4703 - protein, 194 aa, Glycine max
  unsure (1)..(194): unsure at all Xaa locations
DTSFILARDAIGDTYLFIAWRLNGSHXTPSYLNGDYDDCEHYESFPPGHLYSIKXRALLTIAQSLHGFCDAILLSHLMITLALRHAFEMAVVKRMMTDVPSAGSLSQGSYSTLSAVXLYLYLSGSRCSXQRASKLHSLCVCLEGAPDLMASLEVTYYIGTVHHEYXYSVQEGIYTIDDEIYHIYSSWVDTIRAS

SEQ ID NO: 4704 - protein, 493 aa, Chlamydomonas reinhardtii
MDPAKIRPSSAYNTPYWTTNSGAPVWNNNNSMTVGTRGPILLEDYHLVEKLAQFDRERIPERVVHARGAAAKGFFEVTHDISALTAADFLRAPGVQTPVIVRFSTVVHERGSPETLRDPRGFAVKFYTREGNFDMVGNNMPVFFIRDGMKFPDMVHAFKPNPKSHIQEAWRIMDFLSHHPESCHMLTFLLDDAGIPLNYRHMPGFGVHTMKLINKAGRETYVKFHWVPKCGEKYLLDDEAVMVGGANHSHATKDLFDAIAAGDYPEWALMVQTMDPADEDKFDFDPLDVTKTWPESLFPMQPVGRMVLNRNVDNFFNENEQVAFCPAIIVPGIGYSDDKLLQTRIFSYADTQRHRLGPNYLLLPVNAPRAPHHNNHHEGFMNFMHRDEEINYFPSRFDPVRNAERVAAVSSAPLSGRREKMVIAKENNFMQAGAAGRAFDAARQERFVVRVADMLADPRCTQEIRRIWVGYWSQADPQLGARIAAKLQGRGCL

SEQ ID NO: 4705 - protein, 299 aa, Aspergillus fumigatus
MLRRQARERRDYLYRRALLLRDASIAEKRAQLKASLATGKTLDPSIANDKKLREDFKYDESLETPNKESKDTDYADLDDEYALTSGIIDPRPIVTTSRSPSVRLGTFAKEIRLLLPTSIRLNRGNLVLPDLVASANAAALTDMVLLHEHRGTPTAMTISHLPHGPTASFSLHNVVLRADIPNAARGTVSESYPHLIFEGFKTKLGLRVVQILKHLFPPREAGKVGNRVVTFVNKEDNIEVRHHVFVKTGYRDVELAEVGPRMTMRLFEIRGGSLEKGSSGDVEWALTQYTRTSKKKDYL

SEQ ID NO: 4706 - protein, 492 aa, Triticum aestivum
MDPYKHRPTSGANSAYWTTNSGAPVWNNNNALTVGHRGPILLEDYHLIEKLAQFDRERIPERVVHARGASAKGFFEVTHDVSQLTCADFLRAPGVQTPVIVRFSTVVHERGSPETLRDPRGFAVKFYTREGNFDLVGNNMPVFFIRDGMKFPDMVHAFKPSSKTNMQENWRVVDFFSHHPESLHMFTFLFDDVGIPLNYRHMDGFGVNTYTLISRDGKAHLVKFHWKPTCGVKCLLDDEAVTVGGTCHTHATKDLTDSIAAGNYPEWKLFIQTIDADHEDRFDFDPLDVTKTWPEDIIPLQPVGRMVLNKNIDNFFAENEQLAFCPAVTVPGIHYSDDKLLQTRIFSYADTQRHRLGPNYLMLPVNAPKCAHHNNHHDGLMNFIHRDEEVNYFPSRVDPTRHAEKDPMPPRVLSGCREKCIIDKENNFKQAGERYRSFDPARQDRFLQRWVDALTDARVTHEIQSIWVSYWSQCDASLGQKLASRLKIKPNM

SEQ ID NO: 4707 - protein, 157 aa, Zea mays
  unsure (1)..(157): unsure at all Xaa locations
HDATHPVAHCSGYSEEHCLSWIQGDAEALSFEDGSMDGYTIAFGIRNVTHIEKALSEAYXLMVLKQGWRFLCLELSHVDVPIFKXIYDAYSFSMIPAIGELVDGDRQIEDRQXLTRPVNLKPWQEKFAQMIQEAGFQRVEYENLLSGVVAIHSGLKL

SEQ ID NO: 4708 - protein, 288 aa, Cytophaga hutchinsonii
MKGILLAGGTGSRLHPLTLAMSKQMMPIYDKPMIYYPLSCLMLAGIREILIISTPQDLPNFQKLLGDGSALGCRFEYAVQPSPDGLAQAFVIGEQFIGNDKVALILGDNIFYGSGLGRLLHSHNDPDGAVIFAYHVTDPERYGVVDFDDDMNALSIEEKPIKPKSNYAVPGVYFYDNSVIDIAKNLKPSSRGELEITDVNKIYLEKNKLKVAVLNRGTAWLDTGTFASLMQAGEFVRVIEERQGLKVGCIEEIAYTMKFITKEQLEALAKPLMKSGYGQYLLGLIKNK

SEQ ID NO: 4709 - protein, 438 aa, Cryphonectria parasitica
MPISKIHARYVYDSRGNPTVEVDLVTETGLHRAIVPSGASTGQHEACELRDGDKSKWLGKGVLKAVENVNTVLGPELIKAGLDVKDQTAVDEFLIKLDGTANKTKLGANAILGVSLAVAKAGAAEKGVPLYAHVSDLAGTKKPYVLPVPFQNVLNGGSHAGGRLAFQEFMIVPSAAPSFSEGLRWGAETYHQLKSLAKKKYGQSAGNVGDEGGVAPDIQTAEEALELISEAIEKAGYTGKMKIAMDVASSEFYKEDVKKYDLDFKNPDSDPSNWLTYEQLAALYADLTKKYPIVSIEDPFAEDDWEAWSYFYKTQDIQLVADDLTVTNPIRIKKAIELKAANALLLKVNQIGTLTESIQAAKDSYADGWGVMVSHRSGETEDVTIADIVVGIRAGQIKTGAPARSERLAKLNQILRIEEELGSNAIYAGEDFRKSVTL

SEQ ID NO: 4710 - protein, 426 aa, Bacteroides thetaiotaomicron VPI-5482
MKIEKIVAREILDSRGNPTVEVDVVLESGIMGRASVPSGASTGEHEALELRDGDKQRYGGKGVQKAVDNVNKIIAPKLIGMSSLNQRGIDYAMLALDGTKTKSNLGANAILGVSLAVAKAAASYLDLPLYRYIGGTNTYVMPVPMMNIINGGSHSDAPIAFQEFMIRPVGAPSFREGLRMGAEVFHALKKVLKDRGLSTAVGDEGGFAPNLEGTEDALNSIIAAIKAAGYEPGKDVMIGMDCASSEFYHDGIYDYTKFEGAKGKKRTAEEQIDYLEELINKFPIDSIEDGMSENDWEGWKKLTERIGDRCQLVGDDLFVTNVDFLAMGIEKGCANSILIKVNQIGSLTETLNAIEMAHRHGYTTVTSHRSGETEDATIADIAVATNSGQIKTGSLSRSDRMAKYNQLLRIEEELGDLAVYGYKRIK

SEQ ID NO: 4711 - protein, 190 aa, Platycerium angolense
DEHGEVLAEIRRSDLEPYLGLHYPATDIPQASRFLFMKNRVRMICDCRALPVRAIQDKELRQPLSLAGSTLRAAHGCHSQYMANNGIVASLVMAVVVNDNDEDMSNRPQHPKMRRLWGLAVCHHTTPRCSPFALRSACESLMQVFGLQLNMELELAAQMREKHILRTQTLLCVMLLRDAPIGIVSESPNI

SEQ ID NO: 4712 - protein, 225 aa, Populus tomentosa
MAREKIKIKKIDNVTARQVTFSKRRRGLFKKAEELSVLCDAEVAVIIFSATGKLFEYSSSSMKGVLARYNLHSNNLDKINQPSLELQLENSNHMRLSKEVSEKSHQLRRMRGEDLQGLNIEELQQLEKALEVGLSRVLETKGERIMNEISTLERKGVQLLEENKQLKQKIATITRGKRPALVDLDTAVQEEGMSSESTTNVCSCSSGPPVEDDSSDTSLKLGLAI

SEQ ID NO: 4713 - protein, 464 aa, Cytophaga hutchinsonii
MPNVTPELYDSVMLIKQQMLVDSLNHAQAALNDSLHATNDLMFKTRTELQLTQNSLANSSFKANNIWMMVATAFVFIMHLGFATLESGLTQAKNTTNVLFKNSIVPAIGIMTHALCGFNLMYPGFEFGVSMDFIGFKGWGVELPEGGETFVYNPGMTYWTDFLFQAMFAATAATIVSGAVAERIKLFSFMVFSFFFTAFIYPIIGSWKWGGGWLNTIGFSDFAGSTLVHSVGGWAALAGVILLGPRLGKFNKGVINPIQGHSMTSAVIGTFLLWLGWFGFNGGSVLSAEPGMVSRVLVMTCISGSSGAIAAAFSIFAINKHFDLSMVLNGILAGLVGITAGADQMGIIDATLIGLISGCLVVFAIITFEKIRLDDPVGALSVHLVCGIWGTLAVALFGAKAGAAQFVTQLIGIGSVAVAAFGSSFLILLAIKYTIGLRVGKEEEIYGLDASEHYMEAYPNFMSK

SEQ ID NO: 4714 - protein, 271 aa, Lycopersicon pennellii
FSGDIPPDFFSKMASLRKIWFSRNKFSGKIPESLASLKYLLELHLENNEFTGTIPSLSQPNLATINLSNNKLQGLIPQSLSKFGSNPFQGNPDLCGNQIGRECKAVTSGEKSESSGSTKWIIVGLVVVLLLVAILFKSKRKDDQFEKLEKENLDEAVKVHLNKRSMSTRTSMRSSRKGRSRSGSDMGDLVVVNDEKGIFGMPDLTKAAAEVLGNGGLGSAYKAVLGNGVLSVVVKRLRETNKFNKECFDAEIRRLARIRHKNILQPLAYHY

SEQ ID NO: 4715 - protein, 277 aa, Rhizobium etli
EFASFYRSMGVDVTVVEVMPTIMPVEDAEITAIARKQLEKRGLKIFTSAKVTKVEKGAGSITAHVETSDGKVQQITADRMISAVGVQGNIENLGLEALGVLTDRRWLVADGYGKTNVAGIYAIGDVAGPPIVAHKAEHEGVVCVEKIAGVPNVHPTDKGKVPGCTYCNPQVASVGLTEAKAKELGSDIRVGRFSFAANRKAIALGEDQGMVKVIFDKKTGELLGAHMVGAEVTELIQGFVVAMNLETTEEELMHTIFPHPTVSETMKEAVLDAYGRV

SEQ ID NO: 4716 - protein, 270 aa, Solanum tuberosum
FSGDIPGDFFSKMGSLRKIWFSRNKFSGKIPDSLAGLKYLLELHLENNEFTGPIPILSQANLATINFSNNKLQGLIPQSLSKFGSNPFQGNPDLCGNQIGRECKAVASGEKSEGSGSTKWIIIGLVVVLLLVAILFKSKRKDDQFEKLEKESLDEAVKVHLNKRSMSTRTSMRSSRKGRSRSGSDMGDLVVVNDEKGIFGMPDLMKAAAEVLGNGGLGSAYKAVLGNGVSVVVKRLRETNKFNKESFDAEIRRLARIRHRNILQPLAYHY

SEQ ID NO: 4717 - protein, 279 aa, Nicotiana tabacum
FSGDIPKDFFSKMGSLKKIWFSKNKFSGPIPESLANLKYLLELHLESNEFSGPIPSFSQASLTSIDLSNNKLQGEIPQSMSRFGADPFKGNNELCGKQLGKECNKGKENNTFQRAPMSKLKWIILGLVVSLLLITILFKAKRKEDHFDKLGKENLDEGLHVSSSNRKNTSIHSKGGDSVHGSSRRGAGSQRGKAMGDLVLVNEEKGTFGLPDLMKAAAEVLGNGVLGSAYKAKMVYGLSVVVKRLREMNKMNRDVFDTEIRKISKLRHKNILQLLAYHY

SEQ ID NO: 4718 - protein, 262 aa, Manihot esculenta
PISKMVTAHFVLIHTICHGAWIWHKLKPALERAGHKVTALDMAASGIDPRQIEQINSFDEYSEPLLTFLEKLPQGEKVIIVGESCAGLNIAIAADRYVDKIAAGVFHNSLLPDTVHSPSYTVEKLLESFPDWRDTEYFTFTNITGETITTMKLGFVLLRENLFTKCTDGEYELAKMVMRKGSLFQNVLAQRPKFTEKGYGSIKKVYIWTDQDKIFLPDFQRWQIANYKPDKVYQVQGGDHKLQLTKTEEVAHILQEVADAYA

SEQ ID NO: 4719 - protein, 262 aa, Manihot esculenta
  unsure (1)..(262): unsure at all Xaa locations
PISKMVTAHFVLIHTICHGAWIWHKLKPALERAGHKVTALDMAASGIDPRQIEQINSFDEYSEPLLTFLEKLPQGEKVIIVGESXAGLNIAIAADRYVDKIAAGVFHNSLLPDTVHSPSYTVEKLLESFPDWRDTEYFTFTNITGETITTMKLGFVLLRENLFTKCTDGEYELAKMVMRKGSLFQNVLAQRPKFTEKGYGSIKKVYIWTDQDKIFLPDFQRWQIANYKPDKVYQVQGGDHKLQLTKTEEVAHILQEVADAYA

SEQ ID NO: 4720 - protein, 336 aa, Xanthomonas campestris pv. campestris str. ATCC 33913
MIAEQQEDAAKSRIYKALLQATPDLLYVFDTQHRFIYANEALLAMWGMEWEQASGKTCLEIGYEPWHAAMHDEEIERVIATGQPLRGEVPFPHISKGVRVYDYIFTPVFGPDGRVEAIAGATRDVTERKQHEQHLQLLINELNHRVKNSLVMVQSLARQSLKNAESLDDANEKIDARLMALSSAHNTLTRENWVSADIAELTRDAVELCESHQGQRFELHGSSCRLDPRRALALAMALHELCTNAVKHGALSSAEGRVRIAWECTMREGENRLELLWQESGGPEVQPPQRKGFGSRLLERGLKHDLNGDVSWVFDTAGVSYRVSLALPAATAELAA

SEQ ID NO: 4721 - protein, 437 aa, Thermosynechococcus elongatus BP-1
MAVQMEFSMKRVLAIILGGGAGTRLYPLTKRRAKPAVPLAGKYRLIDIPVSNCINSEIHNIYVLTQFNSASLNRHIARTYTFPGLTGGFVEVLAAQQTPENPNWFQGTADAVRQYLWLLADWDVDEYLILSGDHLYRMDYRLFVQRHRDTGADVTLSVLPVEEKAASGFGLLKVDGTGRVTDFREKPTGDALRDMRVDTTRYGLTIEEAHRKPYIASMGIYVFKRQVLIDLLQQMADATDFGKEIIPAAARSHLVQTYLFNGYWEDIGTIGSFYEANLALTQQPQPPFSFYDENAPIYTRPRYLPPSKILSSTITESIISEGCILKECQVHRSVLGVRSRVESGCVIDHSLLMGADYYQDSAQRSQLRLQHKIPIGIGANSVIRRAIVDKNACIGRDVKIINKDNVEESNREDQGFYIRSGVVVIIKNAVIPDGTII

SEQ ID NO: 4722 - protein, 397 aa, Zea mays
MQSTAAIGLVRPCAARPLPTYPSPRRGAGACSGAAQPILAPRGLCLSARASLLPDSPLEEEYRRCRAGRHVAAAGKVAAADGAVEEAGGGLVKTLQLGSLFGLWYLFNIYFNIYNKQVLKVLPYPINITTVQFAVGSAIALFMWITGILKRPKISGAQLFAILPLAIVHTMGNLFTNMSLGKVAVSFTHTIKAMEPFFSVLLSAIFLGELPTPWVVLSLLPIVGGVALASLTEASFNWAGFWSAMASNVTFQSRNVLSKKLMVKKEESLDNINLFSIITVMSFFLLAPVTLLTEGVKVSPAVLQSAGLNLKQIYTRSLIAACCFHAYQQVSYMILARVSPVTHSVGNCVKRVVVIVTSVLFFRTPVSPINSLGTGIALAGVFLYSQLKRLKPKPKAA

SEQ ID NO: 4723 - protein, 276 aa, Oceanobacillus iheyensis HTE831
MSEFIAELVGTMILIIFGGGVVAGVVLKKSKAEGTGWVLITLGWGLAVALGVYAVGNFTGAHINPAVTIGFAAVGDFPWSKVPLYILAQVIGAIIGAIIVFLNYLPHWKVTESKEDKLGVFATGPAIRSPFSNLISEMIGTFALLLGLMFIGSNDFTEGLNPLIVGALIAAIGMSLGGTTGYAINPARDLGPRIAHAILPIPGKGSSDWGYAWIPVVGPIIGGVYGALFYDSVFLANYTFPFWVMTIFVIVLFIGAAVSELKTGSNPAEKMNQKLR

SEQ ID NO: 4724 - protein, 487 aa, Prochlorococcus marinus str. MIT 9313
MASAPLPLAAAPIHFGTDGWRGVIGVDITVERLLTVAAAAAQELAYRAPTELKSRSVIIGYDRRFLAPEMAEAIAAAVRGCELEPLLTETPVPTPACSWAVVQHQAIGALVVTASHNPPEWLGLKIKGAFGGSVEDTFTAAVEQRLAAGGISVPINGITKRFDGRGQHLKGLREKLDLTSLIKGLQKMGLKVIIDPMHGSAAGCIAELLDPHNQGLVQEIRAQRDPLFGGNPPEPLAPYLSQLIAAVQASSATGQPAVGLVFDGDGDRIAAIDEAGNFCSTQLLMPLLIDHLARAKQLPGKVVKTVSGSDLMRLVAEDLGREVLELPVGFKYIAAEMLSGDVLVGGEESGGVGFGMHLPERDALFAALLVLEALVEGGQPLGARMKALQERCRGSSFYERFDLRLADMDSRQRLETLLEQTPPATVADQPVQTVIRTDGVKFRLGPSHWLMLRFSGTEPLLRIYCEAPSETDVKAALNWAKQLAERT

SEQ ID NO: 4725 - protein, 440 aa, Achromobacter xylosoxidans subsp. denitrificans
MSAAKLPDLSHLWMPFTANRQFKANPRLLASAKGMYYTSFDGRQILDGTAGLWCVNAGHCREEIVSAIASQAGVMDYAPGFQLGHPLAFEAATAVAGLMPQGLDRVFFTNSGSESVDTALKIALAYHRARGEAQRTRLIGRERGYHGVGFGGISVGGISPNRKTFSGALLPAVDHLPHTHSLEHNAFTRGQPEWGAHLADELERIIALHDASTIAAVIVEPMAGSTGVLVPPKGYLEKLREITARHGILLIFDEVITAYGRLGEATAAAYFGVTPDLITMAKGVSNAAVPAGAVAVRREVHDAIVNGPQGGIEFFHGYTYSAHPLAAAAVLATLDIYRREDLFARARKLSAAFEEAAHSLKGAPHVIDVRNIGLVAGIELSPREGAPGARAAEAFQKCFDTGLMVRYTGDILAVSPPLIVDENQIGQIFEGIGKVLKEVA

SEQ ID NO: 4726 - protein, 203 aa, Prochlorococcus marinus str. MIT 9313
MSSNELTERVLVIASGNAGKIREFRQLLAHLPLSVQAQPKDLAVEETGQTFAENARIKALTVAQATGQWALADDSGLSVEALAGAPGVYSARYAASDALRIERLLQELKGIDDRRAHFSAALCIASETNEVLLEVEGRCEGLITHAARGEKGFGYDPIFEVDATGTTFAEMTIEQKRQWSHRGCAFALLDPALQELLHKQNKP

SEQ ID NO: 4727 - protein, 252 aa, Kandelia candel
MPIRQIAVGHPHEATRPDVLKAALAEFISTLIFVFAGEGSGMAFNKLTDNGSTTPAGLIAASIAHAFGLFVGVSVSANISGGHVNPAVTFGAFIGGNITLLRGILYWIGQLLGSTVACLLLKFSTGGLTTSAFSLSSGVSVWNAFVFEIVMTFGLVYTVYATAIDPKKGNLGTIAPSPSVSLWVPSVWTGGAFDGASMNPAVSFGPALVSWTWENHWVYWAGPLIGSAIAALIYDSFFIGYGTHEQLPTADY

SEQ ID NO: 4728 - protein, 410 aa, Bradyrhizobium japonicum USDA 110
MGHDACQEMTMSFLAAALDRVKPSATIAVTDKARALKAAGRNVIGLGAGEPDFDTPANIKLAAIHAIEAGKTKYTAVDGIPELKEAIIAKFQRENGVVYKPNQVIVGTGGKQVLYNALMATINPGDEVIIPAPYWVSYPEMVALAGGEPVPVVCTAATGFKLGAEALERAITPKTKWVILCSPSNPTGAAYTRAELKALTDVLVKHPHVWVMTDDMYEHLVYDDFQFTTVAQVEPSLYDRTLTVNGVSKAYCMTGWRIGYAGGPAQLIKAMATIQSQSTSNPCSIAQWASVEALNGPQDFIPANNKVFKERRDLVVSMLNQANGIECPRPEGAFYVYPSCAGTIGKKAPSGNVISNDEQFVTELLETEGVAVVQGSAFGLGPAFRISYATKTSDLEDACKRIQRFCGNLR

SEQ ID NO: 4729 - protein, 433 aa, Pneumocystis carinii f. sp. ratti
MGIFKIHARSFYDSRGNPTVEVEVTTETGVHRANVPSGASTGIHEALELRDNGSSWSGKGVTLAVSNVNDIIAPSLLSAGIDIKDQRSIDKFLIDLDGTSNKSRLGANAILGVSIAICKAAAAEKGVPLYRHFADIADIKEPFILPLPCFNVLNGGSHAGGRLAFQEFMILPTSAVTFHEAMQQGSEVYSALKKLSRKRYGHSAGNAGDEGGVAPDIQTADEALDLIVTAIEEAGYTGKIKIALDVAASEFYKNGKYDLDFKNPESDSSQHKTSKELADIYLDLSKKYPIVSIENPVDRDDWDAWIYVSRRATFQMVGDDLTVTNVSRINEAADKKACNCLLLKINQIGTISESIDAFKTAFDAGWGVMVSHRSGETEDTVIADLVVGLGTGQIKTGAPCRSERVAKYNQLLRIEEELNHSVYASMNYIKNIK

SEQ ID NO: 4730 - protein, 357 aa, Pinus radiata
MGSLETEKTVTGYAARDSSGHLSPYTYNLRKKGPEDVIVKVIYCGICHSDLVQMRNEMGMSHYPMVPGHEVVGIVTEIGSEVKKFKVGEHVGVGCIVGSCRSCGNCNQSMEQYCSKRIWTYNDVNHDGTPTQGGFASSMVVDQMFVVRIPENLPLEQAAPLLCAGVTVFSPMKHFAMTGPGKKCGILGLGGVGHMGVKIAKAFGLHVTVISSSDKKKEEAMEVLGADAYLVSKDTEKMMEAAESLDYIMDTIPVAHPLEPYLALLKTNGKLVMLGVVPEPLHFVTPLLILGRRSIAGSFIGSMEETQETLDFCAEKKVSSMIEVVGLDYINTAMERLEKNDVRYRFVVDVAGSKLDN

SEQ ID NO: 4731 - protein, 464 aa, Azotobacter vinelandii
MAVYNYDVVVIGTGPAGEGAAMNAVKAGRKVAVVDDRPQVGGNCTHLGTIPSKALRHSVRQIMQYNNNPLFRQIGEPRWFSFADVLKSAEQVIAKQVSSRTGYYARNRIDTFFGTASFCDEHTIEVVHLNGMVETLVAKQFVIATGSRPYRPADVDFTHPRIYDSDTILSLGHTPRRLIIYGAGVIGCEYASIFSGLGVLVDLIDNRDQLLSFLDDEISDSLSYHLRNNNVLIRHNEEYERVEGLDNGVILHLKSGKKIKADAFLWSNGRTGNTDKLGLENIGLKANGRGQIQVDEHYRTEVSNIYAAGDVIGWPSLASAAYDQGRSAAGSITENDSWRFVDDVPTGIYTIPEISSVGKTERELTQAKVPYEVGKAFFKGMARAQIAVEKAGMLKILFHRETLEILGVHCFGYQASEIVHIGQAIMNQKGEANTLKYFINTTFNYPTMAEAYRVAAYDGLNRLF

SEQ ID NO: 4732 - protein, 496 aa, Arabidopsis thaliana
MSGAITCSAADLSALLGPNATAAADYICGQLGSVNNKFTDAAYAIDNTYLLFSAYLVFAMQLGFAMLCAGSVRAKNTMNIMLTNVLDAAAGGLFYYLFGYAFAFGESSDGFIGRHNFGLQNFPTLTSDYSFFLYQWAFAIAAAGITSGSIAERTKFVAYLIYSSFLTGFVYPVVSHWFWSPDGWASPFRSEDRLFGTGAIDFAGSGVVHMVGGIAGLWGALIEGPRIGRFPDGGHAIALRGHSASLVVLGTFLLWFGWYGFNPGSFTKILIPYNSGSNYGQWSGIGRTAVTTTLSGCTAALTTLFGKRLLSGHWNVTDVCNGLLGGFAAITAGCSVVDPWAAIVCGFVASLVLIGCNKLAELLKYDDPLEAAQLHGGCGAWGLIFVGLFAKEKYINEVYGASPGRHYGLFMGGGGKLLGAQLVQIIVIVGWVSATMGTLFFILKKLNLLRISEQHEMRGMDLAGHGGFAYIYHDNDDDSIGVPGSPVPRAPNPPAV

SEQ ID NO: 4733 - protein, 498 aa, Arabidopsis thaliana
MSGAITCSAADLATLLGPNATAAADYICGQLGTVNNKFTDAAFAIDNTYLLFSAYLVFAMQLGFAMLCAGSVRAKNTMNIMLTNVLDAAAGGLFYYLFGYAFAFGGSSEGFIGRHNFALRDFPTPTADYSFFLYQWAFAIAAAGITSGSIAERTQFVAYLIYSSFLTGFVYPVVSHWFWSPDGWASPFRSADDRLFSTGAIDFAGSGVVHMVGGIAGLWGALIEGPRRGRFEKGGRAIALRGHSASLVVLGTFLLWFGWYGFNPGSFTKILVPYNSGSNYGQWSGIGRTAVNTTLSGCTAALTTLFGKRLLSGHWNVTDVCNGLLGGFAAITAGCSVVEPWAAIVCGFMASVVLIGCNKLAELVQYDDPLEAAQLHGGCGAWGLIFVGLFAKEKYLNEVYGATPGRPYGLFMGGGGKLLGAQLVQILVIVGWVSATMGTLFFILKRLNLLRISEQHEMQGMDMTRHGGFAYIYHDNDDESHRVDPGSPFPRSATPPRV

SEQ ID NO: 4734 - protein, 386 aa, Oryza sativa
KGGCLQRPLVSKLCLGFAALLTALIVIMSLEEAPLIKSSSYLIDCNYAKGKWVADKKRPLYSGNECKQWLSKMWACRMMQRADFSYENFRWQPHGCQMPEFTGPNILKRLRHKTLAFVGDSLGRQQFQSMMCIATGGKYSPEVEDVGWKYGLVKAPGALRPDGWAYWFPGTNSTILFYWSASLSELELLNTTDSVTSYALHLDRPVTFLKKYLHSFDVLVLNTGHHWNRGKFNGNHWELYADGKPVGKGRLADLNRAKNLTLYSIARWVDSELVRYPQVKAFLRTISPRHFVNGDWNTGGSCGNTVPLSNGSEVLQDHSSDLPVESAVNGTRVKILDITAVSQLRDEGHISNSTFKGRASTGINDCLHWCLPGIPDMWNELLFAQI

SEQ ID NO: 4735 - protein, 385 aa, Oryza sativa (japonica cultivar-group)
MMMSSSADHFSNNNNNQAMYLEQDEDFSQMIMELCDFDASSTTQARHGGEAAAAAAGNARAVLTYLTFLEQKIGHLRGIISSTPNPPPQIVAAELSCIVVQLVSISKNLAAARRGGDDADADAKHDGSSDADEGADGDGERAPPRGSYEVVQIEKEEILAPHVHFCGVCGKGFKRDANLRMHMRGHGEEYKSAAALAKPGGSPSRSPAAADAAARRRFYSCPYVGCKRNREHKSFQPLKTPTCVKNHYRRSHCDKSFTCRRCNVKRFSVVADLRTHEKHCGRDRWVCSCGTSFSRKDKLFAHVAIFDGHSPALPPEDYDDDAASGQLPHAAGEAVGRTVDTNRFFSDGLMIKGSMEDERGSLSPMGLDYCEFDGIDLFAAAAFDF

SEQ ID NO: 4736 - protein, 190 aa, Psilotum nudum
DEHGEVVAEIRRSDLDPYLGLHYPATDIPQASRFLFLKNRVRMICDCSAPVIRIIQDKELKQPLSLAGSTLRAPHGCHAYYMRNMGSIGSLVMAVIVNDNDAEPSGRGNQPKNRRLWGMVVCHHTTPRAVPFSLRSACEFLMQVFGLQLNMEIELAAQMREKHILRTQTLLCDMLLRDAPIGIVTQSPNI

SEQ ID NO: 4737 - protein, 379 aa, Hordeum vulgare subsp. vulgare
MATAGKVIKCKAAVAWEAGKPLTMEEVEVAPPQAMEVRVKILFTSLCHTDVYFWEAKGQTPMFPRIFGHEAGGIVESVGEGVTDVAPGDHVLPVFTGECKECPHCKSAESNMCDLLRINTDRGVMIGDGKSRFSIGGKPIYHFVGTSTFSEYTVMHVGCVAKINPEAPLDKVCVLSCGICTGLGASINVAKPPKGSTVAIFGLGAVGLAAAEGARIAGASRIIGVDLNASRFEEARKFGCTEFVNPKDHTKPVQQVLADMTNGGVDRSVECTGNVNAMIQAFECVHDGWGVAVLVGVPHKDAEFKTHPMNFLNERTLKGTFFGNFKPRTDLPNVVEMYMKKELEVEKFITHSVPFSEINKAFDLMAKGEGIRCIIRMDN

SEQ ID NO: 4738 - protein, 402 aa, Chlamydophila pneumoniae J138
MDKLTVQDLSPEEKKVLVRVDFNVPMQDGKILDDIRIRSAMPTINYLLKKHAAVILMSHLGRPKGQGFQEEYSLQPVVDVLEGYLGHHVPLAPDCVGEVARQAVAQLSPGRVLLLENLRFHIGEEHPEKDPTFAAELSSYGDFYVNDAFGTSHRKHASVYVVPQAFPGRAAAGLLMEKELEFLGRHLLTSPKRPFTAILGGAKISSKIGVIEALLNQVDYLLLAGGMGFTFLQALGKSLGNSLVEKSALDLARNVLKIAKSRNVTIVLPSDVKAAENLQSKEYSVISIDQGIPPHLQGFDIGPRTTEEFIRIINQSATVFWNGPVGVYEVPPFDSGSIAIANALGNHPSAVTVVGGGDAAAVVALAGCSTKVSHVSTGGGASLEFLEQGFLPGTEVLSPSKS

SEQ ID NO: 4739 - protein, 482 aa, Solanum tuberosum
MASATASHTFCGIPTTSSSSTTNRSTTHSSARFLLKTPLRRLGFAGAVADPLFTNHVATKLRSLKASSNPVRAVVSMAKKSVGDLSSSDLKGKKVFVRADLNVPLDDAQNITDDTRIRAAIPTIKHLIANGAKVILSSHLGRPKGVTPKYSLAPLVPRLSELLGIQVVKADDCIGPEVEKLVDSLPEGGVLLLENVRFYKEEEKNEPEFAKKLASLADLFVNDAFGTAHRAHASTEGVTKFLKPSVAGFLLQKELDYLVGAVSTPKRPFAAIVGGSKVSSKIGVIESLLEKCDILLLGGGMIFTFYKAQGLSVGSSLVEEDKLELATSLLEKAKAKGVSLLLPSDVVIADKFAPDANSKIVPASAIPDGWMGLDIGPDSIKTFNDALDTTKTVIWNGPMGVFEFDKFATGTEAIAKKLADLSGKGVTTIIGGGDSVAAVEKVGVASVMSHISTGGGASLELLEGKVLPGVIALDEADAPVAV

SEQ ID NO: 4740 - protein, 188 aa, Podocarpus neriifolius
DEHGEVVAEIRRADLEPYLGLHYPSTDIPQASRFLFMQNRVRMICDCSATPVKVIQSEELRQPLCLVGSTLRAPHGCHAQYMANMGSIASLVMAVVINGNDEEGEEQVPKSMKLWGLVVCHHTSSRAVSFPLRYACEFLMQAFGLQLNMELQLAAQLTEKHILRTQTLLCDMLLRDAPIGIVTQSPSI

SEQ ID NO: 4741 - protein, 178 aa, Glycine max
  unsure (1)..(178): unsure at all Xaa locations
MASSMISSPAVTTVNRAGAGMVAPFTGLKSMAGFPTRKTNNDITSIASNGGRVQCMQVWPPVGKKKFETLSYLPDLDDAQLAKEVEYLLKKGWIPCLEFELEHGFIYHKHNKSPXYYNRHYXTMWKLPMFGCTDASQVLKELQXANTAYPNSFIHIIRFDNIHQIHCISFITYKLPSF

SEQ ID NO: 4742 - protein, 168 aa, Glycine max
LCCFQGRPKGVTPKYSLKPLVPRLSQLLGIEVTMANDSIGEEVEKLVTQLPEGGVLLLENVRFYKEEEKNDPEFAKKLASLADLYVNDAFGTAHRAHASTEGVAKYLKPSVAGFLMQKELDYLVGAVSNPKRPFAAIVGGSKVSSKIGVIESLLEKVNVLLLGGGMIF

SEQ ID NO: 4743 - protein, 252 aa, Zea mays
MASPEGTTWVFDCPLMDDLAVAADFAAAPAGGFFWAAPPSLQPQAPVQSVVAASAPNPCMEISSSVDCGQEKEQPTNKRPRSESTTESSTKASREKIRRDKLNERFLELGAILEPGKTPKMDKTAILSDAIRVVGELRSEAKKLKDSNENLQEKIKELKAEKNELRDEKQRLKAEKESLEQQIKFLNARPSLVPHHPVIPASAFPAPQGPAAAARHKLMVPVIGYPGFPMWQFMPPSDVDTSDDPRSCPPVA

SEQ ID NO: 4744 - protein, 487 aa, Streptomyces coelicolor A3(2)
MSQRVLTTESGAPVADNQNSASAGIGGPLLIQDQHLIEKLARFNRERIPERVVHARGSGAYGHFEVTDDVSGFTHADFLNTVGKRTEVFLRFSTVADSLGGADAVRDPRGFALKFYTEEGNYDLVGNNTPVFFIKDPIKFPDFIHSQKRDPFTGRQEPDNVFDFWAHSPEATHQITWLMGDRGIPASYRHMDGFGSHTYQWTNARGESFFVKYHFKTDQGIRCLTADEAAKLAGEDPTSHQTDLVQAIERGVYPSWTLHVQLMPVAEAANYRFNPFDVTKVWPHADYPLKRVGRLVLDRNPDNVFAEVEQAAFSPNNFVPGIGPSPDKMLQGRLFAYADAHRYRLGVNHTQLAVNAPKAVPGGAANYGRDGLMAANPQGRYAKNYEPNSYDGPAETGTPLAAPLAVSGHTGTHEAPLHTKDDHFVQAGALYRLMSEDEKQRLVANLAGGLSQVSRNDVVEKNLAHFHAADPEYGKRVEEAVRALRED

SEQ ID NO: 4745 - protein, 426 aa, Thermosynechococcus elongatus BP-1
MIRELFMPALSSTMTEGKIVSWLKSPGDKVTKGETVLIVESDKADMDVESFYDGYLAVITVPAGEVAPVGSTIGLVAETEAEIAEAEAKAKSLGTATSSGPAPASTSTVATSNGSGTAPVAAAPAASAAVPAGRVMASPRARKLAKEHKIDLKTLKGTGPNGRITAADVEALIGAPATPVPPVATSPAPIPTAPPATAAVVAKEDLVPLTTLQNAVVRNMVASLGIPDFHVAYTITTDALDRLYQQIKSKGVTMTALLAKAIALTLQKHPIMNAYYTEQGIQYRRDINIAVAVAMPGGGLITPVLKNADQIDLYSLSRTWKDLVERARAKQLQPDEYSTGTFSLSNLGMFGVDFFDAILTPGQGAIMAVGASRPTVVATEDGLLGVKRQMKVNITCDHRVIYGADAAAFLQDLAKLIETNPQALTL

SEQ ID NO: 4746 - protein, 392 aa, Arabidopsis thaliana
MAFAGVLPIVFLLILSSADLAASQSQPGPTNQPYNYGRLSPAMAVIVVILIAALFFMGFFSIYFRHCSGVPDAGVSPAGGARSRATVNAAARGLDVSVVETFPTFLYSDVKTQKLGKGELECAICLNEFEDDETLRLLPKCDHVFHPHCIDAWLEAHVTCPVCRANLAEQVAEGESVEPGGTEPDLELQQVVVNPEPVVTAPVPEQLVTSEVDSRRLPGVPVDLKRVKFSRSHTTGHSVVQPGECTERFTLRLPEDVRKRIMKDWKLNRTNSLLVLPRGGSSRRGKPIDRSRARSDRWLFRKTPSFLWRSRDDGSIRLGATGSVRASAVPNSTGSDSVRAGDRWAFLRNASFLWRNSSVHVPRGGVNKDGEGTSVKSTGASGSTSGSVRLPV

SEQ ID NO: 4747 - protein, 226 aa, Arabidopsis thaliana
MEDIVDQELSNYWEPSSFLQNEDFEYDRSWPLEEAISGSYDSSSPDGAASSPASKNIVSERNRRQKLNQRLFALRSVVPNITKMDKASIIKDAISYIEGLQYEEKKLEAEIRELESTPKSSLSFSKDFDRDLLVPVTSKKMKQLDSGSSTSLIEVLELKVTFMGERTMVVSVTCNKRTDTMVKLCEVFESLNLKILTSNLTSFSGMIFHTVFIEVSIFLSLSLLSL

SEQ ID NO: 4748 - protein, 173 aa, Arabidopsis thaliana
MRCKVVYAARTTTRTKVTKTISKTISMGLQGQLSDVSSDSIPLMLLALLATFFRHVRSLLLFPSSAPVVVVTSNLSVLADQLNLNRLFSYRYSDNAASDCIVCLSKLKTGEEVRKLDCRHVFHKQCLEGWLQHLNFNCPLCRSPLLPHHHQGHGSDASISAFPLRSTSTASSH

SEQ ID NO: 4749 - protein, 269 aa, Gossypium arboreum
MAAIIESGWLYLITHFSDFQLASLGSFFLHESVFFLSGLPFIYLERAGLLSKYKIQTKNNSLAAQEKCITRLLLYHIGVNLPLMIASYPFFRFMGMKSSLPFPSWKVVLSQIIFYFILEDFVFYWGHRILHTKWLYKHVHSVHHEYATPFGLTSEYAHPAEILFLGFATIIGPAITGPHLITLWLWMTLRVLETVEAHCGYHFPWSLSNFLPLYGGADFHDYHHRLLYTKSGNYSSTFVYMDWIFGTDKGYRKLKALKRDGVEEEAKQT

SEQ ID NO: 4750 - protein, 487 aa, Bacillus subtilis subsp. subtilis str. 168
MKIKAQIGMVMNLDKCIGCHTCSVTCKNTWTNRSGAEYMYFNNVETKPGIGYPKQWEDQDKYKGGWTLKKGKLELKSGSKTNRLAGLFYNPNQPSIDDYYEPWNYDYETLTNSPQKKHQPVARPKSSLTGDFMNIEWGPNWEDDLAGGHITGLEDPNVQKMEESIKTEFDDVFMMYLPRICEHCINPACVSSCPSGAMYKREEDGIVLVDQNACRSWRYCVSSCPYKKVYFNWQTNKAEKCTLCFPRLEAGLPTICSETCVGRIRYLGVMLYDADKVEEAASVENEKDLYHSQLDVFLDPNDPEVAKLAKEQGIPAEWIEAAQQSPIYKMIIDWKIALPLHPEYRTLPMVWYIPPLSPIMNLFEGKGSRQTAEDIFPAIDQMRIPIDYLAQLLTAGDTDHIRSTLKKMSVMRQYMRAVQTNKSIDPELISSVGLTEQQIEDMYRLLAIAKYDDRFVIPSSHREEVSDLYAEQGSCGLSFSGGPGSCF

SEQ ID NO: 4751 - protein, 231 aa, Glycine max
  unsure (1)..(231): unsure at all Xaa locations
MASNDSDSQMKIVHGDAGYILEDVPHFADYIPNLPTYPNPLRSNPAYSVVKQYFVHMDDTVPQKVVVHKDSPRGVHFRRAGPRQKVYFKSDEVHACIVTCGGLCPGLNTVIREIVCGLSYMYGVNKVLGIDGGYRGFYSKNTITLTPKVVNDIHKRGGTILGTSRGGHDTGKIVDSIQDRGINQVYIIGGDGTQRGATVIYEEVRRRGLKVAIAGIPXNHDDTVIDKSFWF

SEQ ID NO: 4752 - protein, 588 aa, Arabidopsis thaliana
MERSDVFKRLRGLKSISFMRNHFEGKIPRGIDGLVSLAHLYLAHNQFTGEIDGDLFSGMKALLKVHLEGNRFSGEIPESLGKLPKLTELNLEDNMFTGKIPAFKQKNLVTVNVANNQLEGRIPLTLGLMNITFFSGNKGLCGAPLLPCRYTRPPFFTVFLLALTILAVVVLITVFLSVCILSRRQGKGQDQIQNHGVGHFHGQVYGQPEQQQHSEKSSQDSKVYRKLANETVQRDSTATSGAISVGGLSPDEDKRGDQRKLHFVRNDQERFTLQDMLRASAEVLGSGGFGSSYKAALSSGRAVVVKRFRFMSNIGREEFYDHMKKIGRLSHPNLLPLIAFYYRKEEKLLVTNYISNGSLANLLHANRTPGQVVLDWPIRLKIVRGVTRGLAYLYRVFPDLNLPHGHLKSSNVLLDPNFEPLLTDYALVPVVNRDQSQQFMVAYKAPEFTQQDRTSRRSDVWSLGILILEILTGKFPANYLRQGKGADDELAAWVESVARTEWTADVFDKEMKAGKEHEAQMLKLLKIGLRCCDWDIEKRIELHEAVDRIEEVDRDAGGGQESVRSSYVTASDGDHRSSRAMTEEFSLM

SEQ ID NO: 4753 - protein, 370 aa, Arabidopsis thaliana
MSKTLVQPVGQKRLTNVAVVRLKKQGNRFEIACYKNKVLSWRSGVEKDIDEVLQSHTVYSNVSKGVLAKSKDLMKSFGSDDHTKICIDILEKGELQVAGKERESQFSSQFRDIATIVMQKTINPETQRPYTISMVERLMHEIHFAVDPHSNSKKQALDVIRELQKHFPIKRSPMRLRLTVPVQNFPSLLEKLKEWDGSVVSKDESGTQMSTVCEMEPGLFRECDSHVRSIQGRLEILAVSVHAEGDTSMDHYDEHDDMALQTHKPLLPAETETKDLTDPVVELSKKLQKQEISTTDNIKQEGGEEKKGTKCSTCNTFVGEAKQYREHCKSDWHKHNLKRKTRKLPPISADECMSEIDMDDSRADLKDYSF

SEQ ID NO: 4754 - protein, 289 aa, Triticum aestivum
  unsure (1)..(289): unsure at all Xaa locations
MSRGRQTYWCFQCSQRVGARVGEMDGPYSRMGSFVEMDDADALMSQFVGMYSDFHRDXGFGIMEAMSTVMRHGMGSMNREADVRGRPSILSDLETEFGSGPWLLFRGQLPGHLSEANSGFDVFVNGRRGVGMRRADVADYFVGPGLEDLIEQLTHNDRRGPPPASQSSIDAMPSVRITARHLTGDSHCPVCKDKFELGSEAREMPCKHLYHSDCILPWLXQHNSCPVCRYELPTQSSSGASCSRSRSTNQNDSSSSSSSSGRTSGRQRRRNPFSFLWPFRSSSSSTGSR

SEQ ID NO: 4755 - protein, 194 aa, Cytophaga hutchinsonii
MVSICFATNNKNKLAEVRSKIGDQFTILSLEDIGCMEELPETQPTIEGNSEQKAQYVAQKYKVNCFADDTGLLVDALNGAPGVYSARYAGPECSPEDNMNKLLAALEGIKNREAYFKTCVTLVLNNQQFQFSGAVNGTILTERHGEKGFGYDPIFQPNGYTTSFAEMSMEEKNTMSHRALAVAKLFDYLKSAGK

SEQ ID NO: 4756 - protein, 425 aa, Microbulbifer degradans 2-40
MLDPNSRYVSRLTRDTVALVLAGGRGSRLHELTDWRAKPALHFGGKFRIIDFPLSNCVNSGIRRIGILTQYKAHSLIRHVIRGWSSFKKEFGEYVEILPASQRYSPNWYQGTADAIYQNLDILQAEAPKYILVLSGDHVYQMDYGAIIAHHVETGADLTVSCIEVPIEEAAGSFGVMTVDDDNRIIRFDEKPQRPTELANKPGYTLASMGNYVFNTEFLFDQLRKDAADPDSEHDFGKNIIPNIIAEKLVSAYRFRDHDTNETAYWRDVGTLDSFWEANMELVSPNPSLNLYNHDWPIWTYQTQLPPAKFVFDDDSRRGYAVDSMVSGGCIVSGGKVKSSLLFSDVHIHSYAEIEESVLLPEVEVHRSAKIKKAIIDSACVIPEGMIIGHDHEHDKARGFRVTKKGVTLVTREMLGQQPAGTSAK

SEQ ID NO: 4757 - protein, 561 aa, Klebsiella pneumoniae
MTHLKITGMTCDSCAAHVKEALEKVPGVQSAIVSYAKGAAQLALDPGTAPDALTAAVAGLGYKAMLADAPPTDNRTGLFDKVRGWMGAADKGSGGERPLQVAVIGSGGAAMAAALKAVEQGAQVTLIERGTIGGTCVNVGCVPSKIMIRAAHIAHLRRESPFDGGMPPTPPTILRERLLAQQQARVEELRHAKYEGILDGNSAITVLHGEARFKDDQSLIVSLNEGGERVVMFDRCLVATGASPAMPPIPGLKESPYWTSTEALVSDTIPERLAVIGSSVVALELAQAFARLGSQVTILARNTLFFRDDPSIGEAVTAAFRAEGIKVLEHTQASQVAHVNGEFVLTTGHGEVRADKLLVATGRTPNTRSLALDAAGVTVNAQGAIVIDKGMRTSTPHIYAAGDCTDQPQFVYVAAAAGTRAAINMTGGDAAINLTAMPAVVFTDPQVATVGYSEAEAHHDGIETDSRTLTLDNVPRALANFDTRGFIKLVIEEGSGRLIGVQVVAPEAGELIQTAVLAIRNRMTVQELADQLFPYLTMVEGLKLAAQTFTKDVKQLSCCAG

SEQ ID NO: 4758 - protein, 424 aa, Wolbachia endosymbiont of Drosophila melanogaster
MNKVINNVFAREILDSRGYPTIEVEIELCDGAIGRASVPSGASTGKLEVLELRDQDEKRYCGKGVLKAVQAVNGIIADEIIGMNAADQNAIDKALIELDGTKNKSKLGANATLGVSLAVAKAAANSFKMPLYRYLGGKQTSVMPVPLINIINGGVHADNKLDFQEFMILPVGAETFSEAIRISAEVFHNLRSILKKKGYSTNVGDEGGFAPNIESTEEALDLIIYVIESAGYSAQSDFALGLDVASSTFYEDGIYKFEHRDLTSEELTEYYCNLVERYPIISIEDAMSEDDYEGWKLLTAKLGSKIQLVGDDLFVTNCELICKGIEEKMANAVLIKPNQIGTLTETFAAIEMAKSNGYKAVVSHRSGETEDTTISHIAVASNCGQIKTGSLSRSDRLAKYNELIRIESALGKDAKYYRGLAWVL

SEQ ID NO: 4759 - protein, 190 aa, Salvinia natans
DEHGEVVAEIRRSDLEPYLGLHYPATDIPQASRFLFMKNRVRMICDCRALNVRIIQDRELKQPISLAGSTLRAPHGCHSQYMGNMGSIASLVMAVIVNDNDEEGSSHAHQPKLRKLWGLVVCHHTSPRAVPFPLRSACEFLMQVFGLQLNMEVELAAQMREKHILHTQSLLCDMLLRDAPIGIVSESPNI

SEQ ID NO: 4760 - protein, 368 aa, Zea mays
  unsure (1)..(368): unsure at all Xaa locations
MGKGAQGSDAAAAGGEVEENMAAWLVAKNTLKIMPFKRPPVRPYDVRVRMKAVGICGSDVHYLREMRIAHFVVKEPMVIGHECAGVVEEVGAGVTHLSVGDRVALEPGVSCWRCRHCKGGRYNLCEDMKFFATPPVHGSLANQVVHPADLCFKLPDGVSLEEGAMCEPLSVGVHACRRVGVXGPETGVLVVGAGPIGLVSLLAARAFGAPRVVVVDVDDXRLAVARSLGADAAVRVSPRXEDLADEVERIRAAMGSDIDVSLDCAGFSKTMSTALEATRPGGKVCLVGMGHNEMTLPLTAAAAREVXVVGVFRYKDTWPLCIDFLRSGKVDVKPLITHRFGFSQRDVEEAXFEVSARGRDAIKVMFNL

SEQ ID NO: 4761 - protein, 1111 aa, Arabidopsis thaliana
MSSNTSRSCSTRSRQNSRVSSQVLVDAKLHGNFEESERLFDYSASINLNMPSSSCEIPSSAVSTYLQKIQRGMLIQPFGCLIVVDEKNLKVIAFSENTQEMLGLIPHTVPSMEQREALTIGTDVKSLFLSPGCSALQKAVDFGEISILNPITLHCRSSSKPFYAILHRIEEGLVIDLEPVSPDEVPVTAAGALRSYKLAAKSISRLQALPSGNMLLLCDALVKEVSELTGYDRVMVYKFHEDGHGEVIAECCREDMEPYLGLHYSATDIPQASRFLFMRNKVRMICDCSAVPVKVVQDKSLSQPISLSGSTLRAPHGCHAQYMSNMGSVASLVMSVTINGSDSDEMNRDLQTGRHLWGLVVCHHASPRFVPFPLRYACEFLTQVFGVQINKEAESAVLLKEKRILQTQSVLCDMLFRNAPIGIVTQSPNIMDLVKCDGAALYYRDKLWSLGVTPTETQIRDLIDWVLKSHGGNTGFTTESLMESGYPDASVLGESICGMAAVYITEKDFLFWFRSSTAKQIKWGGARHDPNDRDGKRMHPRSSFKAFMEIVRWKSVPWDDMEMDAINSLQLIIKGSLQEEHSKTVVDVPLVDNRVQKVDELCVIVNEMVRLIDTAAVPIFAVDASGVINGWNSKAAEVTGLAVEQAIGKPVSDLVEDDSVETVKNMLALALEGSEERGAEIRIRAFGPKRKSSPVELVVNTCCSRDMTNNVLGVCFIGQDVTGQKKLTENYSRVQGDYARIMWSPSTLIPPIFMTNENGVCSEWNNAMQKLSGIKREEVVNKILLGEVFTTDDYGCCLKDHDTLTKLRIGFNAVISGQKNIKKLLFGFYHRDGSFIEALLSANKRTDIEGKVTGVLCFLQVPSPELQYALQVQQISEHAIACALNKLAYLRHEVKDPEKAISFLQDLLHSSGLSEDQKRLLRTSVLCREQLAKVISDSDIEGIEEGYVELGCSEFGLQESLEAVVKQVMELSIERKVQISCDYPQEVSSMRLYGDNLRLQQILSETLLSSIRFTPAWKGLCVSFKVIARIEAIGKRMKRVELEFRIIHPAPGLPEDLVREMFQPLRKGTSREGLGLHITQKLVKLMERGTLRYLRESEMSAFVILTEFPLI

SEQ ID NO: 4762 - protein, 191 aa, Salvinia natans
DEHGEVVAEIRRSDLEPYLGLHYPATDIPQASRFLFMKNRVRMICDCRAPSVRIIQDKELPQPLSLVGSTLRAPHGCHAQYMANMGTIASLVMAVVVNDNDEETRCKTPHYSKARRLWGLVVCHHTTPRVVPFALRSACEFLVQVFGLQLNMELELAAQMREKHILRTQTLLCDMLLRDAPIGIVSESPNI

SEQ ID NO: 4763 - protein, 644 aa, Streptomyces sp. 139
MCGIAGTYRWPDGKAVTDRLTETLAHRGPDGSGGYSHALGDGEVHLGHRRLAILDLSENGAQPMVSGGLALTYNGELYNAPELRAELEGAGVRFRGTSDTEVLLEAWRRWGTDCLPRLRGMFAFAVFDERTGDLVLVRDQLGIKPLFLLRRGKGLVFASELKALAAVTGGSLEVDPAALVASLLYYWVPDSRCAFRGAEKLPPGTWLRCRADGSVSAAGSGTCARSPPRAGAGTVRYLPDLAAVVEESTRRHLLSDVPVATFLSGGLDSSYLTALAARDRPGIPAYTIGFRAEDARFEAMPDDLRYARRVAERFGVDLREIEIAPDVLDLLPRMTYHLDEPVGDPAAINTFLICSAAREAGVKVMLSGMGADELFAGYRKHLANLIAVRYRHVPGPVRRGVASAVDRLPVATSRRGLRSVRFAKRFLSFAGLPEETAFRRSYTLYDRQELAGLLDPDLAPAVDDVLAEHADVYQDNELDDFVNRMCLADARMFLPGLNLAYTDRSSMAASTEVRVPYVDVEVVRAAFAVPGARKIAGRQGKAVLKEAATTVLPREIVYRPKGLFSAPLRAWMSRDLAPLVREVVNDGLLVRSGFLRREALARMVAEDAAGQRDFSKHLWHVLTLEYWYRDATSRAGRNSPTSTA

SEQ ID NO: 4764 - protein, 68 aa, Oryza sativa
MGGGMEVHKNKWIEEWNAGRENLEFNFRWTRRSLAVVGLFGLAVPILVYKGIVREFDEDAGRPYRKFL

SEQ ID NO: 4765 - protein, 484 aa, Corynebacterium glutamicum ATCC 13032
MTATFAGIDATKHLIGGQWVEGNSDRISTNINPYDDSVIAESKQASIADVDAAYEAAKKAQAEWAATPAAERSAIIYRAAELLEEHREEIVEWLIKESGSTRSKANLEITLAGNITKESASFPGRVHGRISPSNTPGKENRVYRVAKGVVGVISPWNFPLNLSIRSVAPALAVGNAVVIKPASDTPVTGGVIPARIFEEAGVPAGVISTVAGAGSEIGDHFVTHAVPKLISFTGSTPVGRRVGELAINGGPMKTVALELGGNAPFVVLADADIDAAAQAAAVGAFLHQGQICMSINRVIVDAAVHDEFLEKFVEAVKNIPTGDPSAEGTLVGPVINDSQLSGLKEKIELAKKEGATVQVEGPIEGRLVHPHVFSDVTSDMEIAREEIFGPLISVLKADDEAHAAELANASDFGLSAAVWSKDIDRAAQFALQIDSGMVHINDLTVNDEPHVMFGGSKNSGLGRFNGDWAIEEFTTDRWIGIKRS

SEQ ID NO: 4766 - protein, 479 aa, Zymomonas mobilis
MNNNSEIENDTQTNVRNTVSDFIGSQLYLLGTVLVTAIAGFLYGYDTGIISGALMNIAHDFKLDAHQQEIITSILLFGAVIGSLVCGRLSAFVGRRHMIMIVTAIFGFSVIAADAPTAFWLGAARLVLGFAVGGSSQIVPVYIAELAPADQRGRMVTFYNISIGLGILAAGIVGAFLQEEWTWRTMFSVAAIPAAVLFCSMMMLPESPRWLVRQERVEEARDMLDTVRETDHEVTKELRSIKKNQQPDEGSGSRWLESLAQPWVRPALIAGLGVAAFTQLSGIEMMIYYTPTFLRDSGFTEKMAYYSALGVALIYVIMTTIGKLLVDHVGRRKLALCMMPLAALSLFALGIAFNLPGGASEHRWLILACLFAFMVFNAGGIQVIGWLIGSEVYPLCIRARATSLHAATLWGSNLILTSTALTMTSLLGIGGSMWFYGGLNALGFVFVYFMVPETKGRSLEEIESSLKDGSFLPSKKASA

SEQ ID NO: 4767 - protein, 311 aa, Oryza sativa
MDPKLVEVTQLFSRFKAAFARNDFDTCVDLLSQLKVRLTKFPSLPPSFQQTPNAVEELKIARDIYEHAVVLSVKIEDQDAFERDFCQLKPYYMDTCGIIPPSPQEYPILGLNLLRLLVQNRIAEFHTELELLPVTALENPCIKHAVELEQSFMEGAYNRVLSARQAVPHETYVYFMDLLAKTVRDELAGCSEKGYDYMSIAEARQVLMFSSDKELHQYIAEEHPEWEVKDGSVFFQKAKETQPCKEIPSLQCTLMEAHSDTSEQCWDRKCDLMPQPVVLLPAQPTPIDLQTPLTMANLGGWDDHTCNNQMD

SEQ ID NO: 4768 - protein, 182 aa, Oryza sativa
  unsure (1)..(182): unsure at all Xaa locations
MAPSVMASSATTVAPFQGLKSTAGMPVARRSGNSSFGNVSNGGRIRCMQVWPIEGIKKXETLFYLPPLTVEDLLKQIXEYLLRSQVGCPCLEFSQVXGFVYREKPQGPPGYYXGRYWTMWXKLPMFGCTDXATQVLIGARGGHRRQYPDAFVRIIGFDNVRQVQLISFIAYKPPGCEESGGN

SEQ ID NO: 4769 - protein, 108 aa, Glycine max
  unsure (1)..(108): unsure at all Xaa locations
AASMISSPAVTTVNRAGAGMVAPFAGLKSMGGFPTIKTNSDVAFIASYGGRVQFKLVWPPVGNKMFYTLFFLPYLYDAQLAKEVXFLHRKGWITWLEFEWEHGFLCRE

SEQ ID NO: 4770 - protein, 122 aa, Gloeobacter violaceus PCC 7421
MTLFVGNLPFSATEQEIVEAFTEYGEVKSVKIPMDRETGRPRGFAFVDLESETAEQAAIDDLDGATWNNREIRVNKAEPRPDRRAGGGGGGGNRSGGGGGGYRGSGGGGGGAGGGGGRDRRY

SEQ ID NO: 4771 - protein, 235 aa, Zea mays
MPSQSTHTSSSLSSSTTPILPCSSAAALFRSVMAAVATETPFHVLAVDDSLPDRKLIERLLKTSSFQVTTVDSGSKALQFLGLHDQDSTVPPVHTHQLDVAANQDVAVNLIITDYCMPGMTGYDLLKKIKESSSLRDIPVVIMSSENIPSRINRCLEEGADEFFLKPVRLSDMNKLKPHILKSRCNQEQHQQSDSHSGERRNPTISSSDSINNRKRKGAGTEEILPQLANRSRHS

SEQ ID NO: 4772 - protein, 369 aa, Thermosynechococcus elongatus BP-1
MSSSRKRLGVFTSGGDCPGLNTAIRAIVAHATLSYGWEVLGILHATQGLIERKAIPLNAEGLGGMDVLLNMGGTILGAINKGDTLGHADEVIAGYYELGLDALIAICGDGSLRILHQLAQKGNWNFLAIPKTIDNDVALTDRAIGFDTAVNTVVEALNRITSTAASHDRVFVVEVMGRTAGHLALYSGIAGGADIILIPEIPYSIEGICQHLQKLRDRWGRQFALIVVAEGSKQLEEDANHPRHCSIGQYIADKIAQHSPIPIELRVSVLGHIQRGGAPMAMDRLLAAGMGNTAVDLAAQGTFGRMVAWQAGQVVTVPIADVVAKCPRHVDPNSFLIRTAQGLGIYVGDKPMLPYVDPTLCRDQVICAI

SEQ ID NO: 4773 - protein, 452 aa, Amylomyces rouxii
MSNIATLTSTARTKTESMKPPLPKTKMPPLFDQPVTSKNWTKFVNWPQAILLCVTPLIALYGIFTTELTKKTLIWSWIYYFITGLGITAGYHRMWSHRAYRGTDLLRWFMSFAGAGAVEGSIYWWSRGHRAHHRWTDTDKDPYSAHRGFFFSHFGWMLVQRPKNRIGYADVADLKADHVVAFQHKYYPYFALGMGFIFPTLVAGLGWGDFRGGYFYAGVLRLCFVHHATFCVNSLAHYLGESTFDDHNTPRDSWVTALVTMGEGYHNFHHQFPQDYRNAIKFGQYDPTKWKIIVLSWFGLAYELKQFPTNEVTKGRLFMEEKRIQAQKAKLSYGTPLKDLPIYTWEEYQSLVLNDNKKWVLIEGVLYDVEEFMKEHPGGMKYLSTAVGKDMTTAFNGGIYNHSNGTRNLLTSLRVGVLRNGMQVMTEADATASLYDDSLEFDSKAALFNKSK

SEQ ID NO: 4774 - protein, 492 aa, Chlamydomonas reinhardtii
MDPAKIRPSSAYNTPYWTTNSGAPVWNNNNSMTVGTRGPILLEDYHLVEKLAQFDRERIPERVVHARGAAAKGFFEVTHDISALTAADFLPAPGVQTPVIVRFSTVVHERGSPETLRDPRGFAVKFYTREGNFDMVGNNMPVFFIRDGMKFPDMVHAFKPNPKSHIQEAWRIMDFLSHHPESCHMLTFLLDDAGIPLNYRHMPGFGVHTMKLINKAGRETYVKFHWVPKCGEKYLLDDEAVMVGRSNHSHATKDLFDAIAAGDYPEWALMVQTMDPADEDKFDFDPLDVTKTWPESLFPMQPVGRMVLNRNVDNFFNENEQVAFCPAIIVPGIGYSDDKLLQTRIFSYADTQRHRLVPNYLLLPVNAPRAPHHNNHHEGFMNFMHRDEEINYFPSRFDPVRNAEGWLPCRVPLSGRREKMVIAKENNFMQAGARWRAFDAARQERFVVRVADMLADPRCTQEIRRIWVGYWSQADPQLGAGIAAKLQGRGCL

SEQ ID NO: 4775 - protein, 477 aa, Glycine max
  unsure (1)..(477): unsure at all Xaa locations
MDSACATLNGRHLAKVSEGIGRNRTSGFWGESTRGSVNTKRFLSVQSCKTSRTNRNLRNSKPGSGIARAVLTSDIDEDSMAFQGVPTFEKPEVDPKSVASIILGGGAGTRLFPLTGRRAKPAVPIGGCYRLIDIPMSNCINSGIRKIFILTQFNSFSLNRHLSRAYSFGNGMTFGDGFVEVLAATQTPGEAGKKWFQGTADAVRQFIWVFEDAKNKNVEHILILSGDHLYRMDYMDFVQRHVDTNADITVSCVPMDDSRASDYGLMKIDKTGRIIQFAEKPKGSDLKAMRVDTTLLGLLPQEAEKHPYIASMGVYVFRTETLLQLLRWKCSSCNDFGSEIIPSAVNEHNVQAYLFNDYWEDIGTIKSFFDANLALTEQPPKFEFYDPKTPFFTSPRFLPPTKVEKCKIVDAIISHGCFLRECSVQHSIVGVRSRLESGVELQDTMMMGADYYQTEYEIASLVAEGKXPIGVGQILNQ

SEQ ID NO: 4776 - protein, 475 aa, Oryza sativa
MSAAAAAAAAAAIPTSLGRLFHLRPTPNPSRNLSGSSAQPLLRLSYHPRLTLSRRMEAPAAIADSHGGGDLSASAVGAEALGAVAAPDFDVEMKEPSVATILTSFENSFDGFGSMSTPLYQTATFKQPSATDNGPYDYTRSGNPTRDVLQSLMAKLEKADQAFCFTSGMAALAAVTHLLKSGQEIVAGEDIYGGSDRLLSQVAPRHGIVVKRIDTTKISEVTSAIGPLTKLVWLESPTNPRLQITDIKKIAEIAHYHGALVLVDNSIMSPVLSRPLELGADIVMHSATKFIAGHSDLMAGILAVKGESLAKEIAFLQNAEGSGLAPFDCWLCLRGIKTMALRVEKQQANAQKIAEFLASHPRVKKVNYAGLPDHPGRSLHYSQAKGAGSVLSFLTGSLALSKHVVETTKYFNVTVSFGSVKSLISLPCFMSHASIPSAVREERGLTDDLVRISVGIEDADDLIADLDHALRSGPA

SEQ ID NO: 4777 - protein, 81 aa, Tomato big bud phytoplasma
GEAVGLPAQQMGNSEVGHLNLGAGRVVHQSLTYINRKIKDGSFFKNKCFLKVIQHVKTNKSKLHLLGLVSDGGVHSHLDHF

SEQ ID NO: 4778 - protein, 252 aa, Microbulbifer degradans 2-40
MPKEMLPVVNKPLVQYGVEEALDAGLHEIGFVTGRGKRAIADHFDVSYELEHQIAGTDKEKYLESIRAVISKGSFSYTRQSEMRGLGDAILSGRRLIGDEAFGVVLSDDLCVAADEGVLAQMVRLYKQFRCSIVAVQEVPEDQISKFGVIAGDPIKDGIYQVTNMVEKPEPKDAPSNLAIIGRYILTPDIFEIIENTPPGKNNEVQLTDALMTQAQNGCVLAYKFKGTRFDCGSVAGFVEATNFVYENIYNK

SEQ ID NO: 4779 - protein, 371 aa, Malus x domestica
MGKGGMSDGDHADRCYGEAINGDVQQENMAAWLLGVKNLKIQPYKLPNLGPHDVRVRLKAVGICGSDVHHFKNMRCVDFIVKEPMVIGHECAGIIEEVGSEVEDLVPGDRVALEPGISCKRCNLCKQGRYNLCRKMKFFGSPPNNGCLANQVVHPGDLCFKLPDNVSLEEGAMCEPLSVGIHACRRANVCQETNALVVGAGPIGLVTLLAARAFGAPRIVIADVNDERLLIAKSLGADEVVKVSTNIEDVAEEVAKIQKVLENGVDVTFDCAGFNKTITTALSATRPGGKVCLVGMGQREMTLPLATREIDVIGIFRYQNTWPLCLEFLRSGKIDVKPLITHRFGFSQKEVEEAFETSARGGNAIKVMFNL

SEQ ID NO: 4780 - protein, 844 aa, Candida albicans SC5314
MSNNNFQESSNNTSSPSKRSTPMLFLDAENKTQEALTTFELLNACTYQNKYVGSANVTTTATTSTKTSNSTSTKSHQQQHRRKLEYMTCDCEEEWDSELQMNLACGPDSNCINRITCVECVNRNCLCGDDCQNQRFQNRQYSKVKVIQTELKGYGLIAEQDIEENQFIYEYIGEVIDEISFRQRMIEYDLRHLKHFYFMMLSNDSFIDATEKGSLGRFINHSCNPNAFVDKWHVGDRLRMGIFAKRKISRGEEITFDYNVDRYGAQSQPCYCGEPNCIKFMGGKTQTDAALLLPQMIAEALGVTPRQEKAWLKENKSIRNQQQNDESNINEEFVNSIEIEPIENQDGVTKVMSALMKTQHPLIIKKLIERIFLSNDQDDINVMFVRFHGYKTISTILQDLLVAKNSGKESETTDNNDIDNSTGDDDQDKDELIIKILKILVSWPAVTKNKIASANLEEVVKDIQTNNENSNNNDEINQLCTSLLDRWSKLEMAYRIPKQESVPTNNAAAAATTTATATGTTTSASPFERISSHTPEVGGTNTPSSTSQQQQQQNSRDAGLPENWRSAFDKNTGGYYYYNLVTKETTWERPLGSLPLGPKPPSGPGLKGRINKYNEIDLAKREELRIQKEKEMKFIEMQNRDRKLKELIEMSKKSMNNIGGSSGTTITAATINGLSDNGGNNNGNITGIYGDDKHSKHHHHHHDKHLKNGPRNTSTSSSSGNNVEKIWKRIFAKYIPNIIKKYESEIGRDNVKGCAKELVNILTQSEIKHGNSLPSSSSSNGYSMELSDKKLKKIKEYSHGYMDKFLIKFNNSKKHKSTMGSKGSDNHKRKHNGDGDNGVKRSKV

SEQ ID NO: 4781 - protein, 157 aa, Methanopyrus kandleri AV19
MTPLARFRKVVVGGTFDRLHLGHQRLLSVALELGDRVVIGVTTDSFVREEGKKGVEPFEERVRAVRRFVEEKGASDRVEIVPLEDRYGTTLEDDEMDAIVVSPETEPVALEINELRRKRGFPPLSIVVIPFVLDGDGRKISSSRLRGEVDEGPCRDD

SEQ ID NO: 4782 - protein, 959 aa, Saccharomyces cerevisiae
MTVTTPFVNGTSYCTVTAYSVQSYKAAIDFYTKFLSLENRSSPDENSTLLSNDSISLKILLRPDEKINKNVEAHLKELNSITKTQDWRSHATQSLVFNTSDILAVKDTLNAMNAPLQGYPTELFPMQLYTLDPLGNGVGVTSTKNAVSTKPTPPPAPEASAESGLSSKVHSYTDLAYRMKTTDTYPSLPKPLNRPQKAIAVMTSGGDAPGMNSNVRAIVRSAIFKGCRAFVVMEGYEGLVRGGPEYIKEFHWEDVRGWSAEGGTNIGTARCMEFKKREGRLLGAQHLIEAGVDALIVCGGDGSLTGADLFRSEWPSLIEELLKTNRISNEQYERMKHLNICGTVGSIDNDMSTTDATIGAYSALDRICKAIDYVEATANSHSRAFVVEVMGRNCGWLALLAGIATSADYIFIPEKPATSSEWQDQMCDIVSKHRSRGKRTTIVVVAEGAIAADLTPISPSDVHKVLVDRLGLDTRITTLGHVQRGGTAVAYDRILATLQGLEAVNAVLESTPDTPSPLIAVNENKIVRKPLMESVKLTKAVAEAIQAKDFKRAMSLRDTEFIEHLNNFMAINSADHNEPKLPKDKRLKIAIVNVGAPAGGINSAVYSMATYCMSQGHRPYAIYNGWSGLARHESVRSLNWKDMLGWQSRGGSEIGTNRVTPEEADLGMIAYYFQKYEFDGLIIVGGFEAFESLHQLERARESYPAFRIPMVLIPATLSNNVPGTEYSLGSDTALNALMEYCDVVKQSASSTRGRAFVVDCQGGNSGYLATYASLAVGAQVSYVPEEGISLEQLSEDIEYLAQSFEKAEGRGRFGKLILKSTNASKALSATKLAEVITAEADGRFDAKPAYPGHVQQGGLPSPIDRTRATRMAIKAVGFIEDNQAAIAEARAAEENFNADDKTISDTAAVVGVKGSHVVYNSIRQLYDYETEVSMRMPKVIHWQATRLIADHLVGRKRVD

SEQ ID NO: 4783 - protein, 547 aa, Microbulbifer degradans 2-40
MQAKTLADLYSDWDKVQAHAQAWQKRTLKDAFDADRNRAARYSVGAAGLELDFSKNHIDDETLQLLMGVADQANLKAAIKKLLRGDHVNNTEDRPALHSALRFQGKPQTAEHQEVKATLDKMAKLIKSVHSGEWKGYKGEKITDVVNIGIGGSDLGPRMITKALTPFHTGDVKVHFVANIDGAEIHDLTRGLNPSTTLFLVASKSFSTLETLENSLTARKWMLDNGCAQDQLAKHFVAISSKVEKAVEFGIAAENVYPIWDWVGGRYSLWSAIGMPIAFAIGMDNFNKLRAGAAAMDDHFAEAPLERNIPALMGLLMFWYSSCLGTDTQAILPYAYHLQLLPAYLQQLEMESNGKSVTKSGERVDYQTGSIVWGTEGTNGQHSFHQLLHQGTTMVPIDFIATLQAHHPLDHQHKFLFANCVAQSQALMTGRDQATSEAEMRAQGMSDEQIAELAPHKVHPGNRPSNTILMDKLTPETLGALIAAYEHKVYTLGVLWNINSFDQWGVELGKLLGTHVATAIDTTDIPSDWDSSTQTLVKKFTEANKNL

SEQ ID NO: 4784 - protein, 193 aa, Taxus baccata
DEHGEVVAEIRRSDLEPYLGLHYPATDIPQASRFLFMQNRVRMICDCRATPVKVIQSGELKQPLCLVGSTLRAPHGCHAQYMANMGSIASLVMAVIVNGNGNGNDEDGGGGSGRSSMKLWGLVVCHHTSPRAVPFPLRSACEFLMQTFGLQINMELQLAAQLIENNILRTQTLLCDMLLRDAPIGILTQSPSI

SEQ ID NO: 4785 - protein, 123 aa, Oryza sativa (japonica cultivar-group)
METDINAPPPPAPAPAGAGEGSSSAAGPSSRKPNKRFEIKKWNAVALWAWDIVVDNCAICRNHIMDLCIECQANQASATSEECTVAWGVCNHAFHFHCISRWLKTRQVCPLDNSEWEFQKYGH

SEQ ID NO: 4786 - protein, 341 aa, Nostoc sp. PCC 7120
MLAALLYGQEDLRLEQVADPSPDVGEVVIKVGAATTCGTDLKVWRRGGHAKMLKLPTLFGHEAAGEIVAVGADVTGWQIGDRVVANNSAPCMKCFFCQRQEYSLCPNLTWNNGTFAEYLKIPAPIVQHNLLQVPDELPLSLAAMTEPLACVLHGVARSHIKPQDRVVVLGDGAIGLMFVAVLADKVEVLLWGGNDQRLEIGQKLGATKTFNYHQNPDIPHVVKELTQGWGADVVIEATGVPSVWETAIACARPGAIVNLFGGCPRDTTITVNTEQLHYSELTLKGVFHNTPEYVRAALALIASRKIPFELLISEQRPLKDLEQVFYDMKARKVIKVAMVCS

SEQ ID NO: 4787 - protein, 402 aa, Streptomyces coelicolor A3(2)
MEFRQSNKLSEVCYEIRGPVIEHANALEEAGHSVLRLNTGNPALFGFEAPEEIVQDMIRMLPRAHGYTDSRGILSARRAVAQRYQALGLEVDVDDVFLGNGVSELISMAVQALLEDGDEVLIPAPDFPLWTAVTTLAGGKAVHYLCDEQAEWYPDLADMEAKITDRTKAVVIINPNNPTGAVYPKEIVEGILDLARRHGLMVLADEIYDQILYDDAVHHSAASLAPDLVVLTFCGLSKTYRVAGFRSGWLVVTGPKQHARDYLEGLTMLASMRLCANAPAQYAIQAALGGRQSIRELTAPGGRLHEQRDVAWEKLNEIPGISCVKPKGALYAFPRIDPAVHKIHDDERFVLDLLLREKIQVVQGTGFNWPSPDHFRILTLPHAEDLEAAIGRIGRFLSGYRQ

SEQ ID NO: 4788 - protein, 208 aa, Saccharomyces cerevisiae
MSLSSKLSVQDLDLKDKRVFIRVDFNVPLDGKKITSNQRIVAALPTIKYVLEHHPRYVVLASHLGRPNGERHEKYSLAPVAKELQSLLGKDVTFLNDCVGPEVEAAVKASAPGSVILLENLCYHIEEEGSRKVDGQKVKASKEDVQQFRHELSSLADVYINDAFGTAHRAHSSMVGFDLPQRAAGFLLEKELKYFGKALENPTRPFLA

SEQ ID NO: 4789 - protein, 129 aa, Oryza sativa
  unsure (1)..(129): unsure at all Xaa locations
MDPCTLRATSSFDTNTTTTNARAPGRNDNEALTEASRGPILLEDYHXLIEKVSHFARERMLERVXHARVAYAKGFFESTHNVTDITCAHFLRPPSAHTPAIARFYTVIHERVLPETIRDPSGLVARFYI

SEQ ID NO: 4790 - protein, 135 aa, Saccharomyces cerevisiae
VDFIIADAFSADANTKTVTDKEGIPAGWQGLDNGPESRKLFAATVAKAKTIVWNGPPGVFEFEKFAAGTKALLDEVVKSSAAGNTVIIGGGDTATVAKKYGVTDKISHVSTGGGASLELLEGKELPGVAFLSEKK

SEQ ID NO: 4791 - protein, 349 aa, Ralstonia eutropha JMP134
MDLEGPRAGEVLVEIKATGICHTDYYTLSGADPEGIFPAILGHEGAGIVTDVGAGVTSLKPGDHVIPLYTPECRQCKFCLSRKTNLCQAIRATQGKGLMPDGTSRFSIDGQPIFHYMGTSTFANHIVVPEIALAKIRPDAPFDKVCYIGCGVTTGVGAVIFTAKVEAGANVVVFGLGGIGLNVIQGAKMVGADKIIGVDLNPEREAMARKFGMTHFINPKDVGNVVDHIIQLTDGGADYSFECIGNTQVMRQALECCHKGWGKSIIIGVAEAGAEISTRPFQLVTGREWKGSAFGGARGRTDVPKIVDWYMDGKLNIDDLITHTLPLDRINEGFDLMKRGESIRSVVLY

SEQ ID NO: 4792 - protein, 512 aa, Escherichia coli O157:H7
MTNNPPSAQIKPGEYGFPLKLKNRYDNFIGGEWVAPADGEYYQNLTPVTGQLLCEVASSGKRDIDLALDAAHKVKDKWAHTSVQDRAAILFKIADRMEQNLELLATAEAWDNGKPIRETSAADVPLAIDHFRYFASCIRAQEGGISEVDSETVAYHFHEPLGVVGQIIPWNFPLLMASWKMAPALAAGNCVVLKPARLTPLSVLLLMEIVGDLLPPGVVNVVNGAGGEIGEYLATSKRIAKVAFTGSTEVGQQIMQYATQNIIPVTLELGGKSPNIFFADVMDEEDAFFDKALEGFALFAFNQGEVCTCPSRALVQESIYERFMERAIRRVESIRSGNPLDSVTQMGAQVSHGQLETILNYIDIGKKEGADVLTGGRRKLLEGELKDGYYLEPTILFGQNNMRVFQEEIFGPVLAVTTFKTMEEALELANDTQYGLGAGVWSRNGNLAYKMGRGIQAGRVWTNCYHAYPAHAAFGGYKQSGIGRETHKMMLEHYQQTKCLLVSYSDKPLGLF

SEQ ID NO: 4793 - protein, 515 aa, Pseudomonas aeruginosa PAO1
MTATPKPLVLIILDGFGHSESPDYNAIYAAKKPVWDRLLATQPHGLISGSGMDVGLPDGQMGNSEVGHMNLGAGRVVYQDFTRVTKAIRDGEFFENPVIAGAVDKAVAADKAVHILGLLSPGGVHSHEDHLVAMAQMAARRGAGKIYLHAFLDGRDTPPKSAQPSLERLDATFAGLGKGRIASIIGRYFAMDRDNRWDRVQAAYELIVDGKAEFTADSSVAALEAAYARGESDEFVKATAVVPAGAEAVRVEDGDAVIFMNFRADRARELSRAFVEPAFNEFPRERAPQLAGFVMLTQYAASIPAPCAFPPEPLTNVLGEYLAKHGKTQLRIAETEKYAHVTFFFSGGREEPYEGEERILIPSPKVATYDLQPEMSAPEVTDRIVEAIEQQRYDVIVVNYANGDMVGHTGVFEAAVKAVECLDTCMGRIVEALDKVGGEALITADHGNVEQMEDESTGQAHTAHTCEPVPFVYVGKRKLSIREGGVLADVAPTMLTLMGLEQPAEMTGRSIVTLG

SEQ ID NO: 4794 - protein, 141 aa, Zea mays
  unsure (1)..(141): unsure at all Xaa locations
RSSARTMPITSTASRARTTGRHQCGACRKVFRSYQALGGHRASVKKGKGGCVPARRAENGPAVHECPFCFRVFESGQALGGHKRAHMLSGAPAPAAPVPLDGSSEMRRXSSMSIDLNVPAATDDDFELSPVYDTEFGGTRQ

SEQ ID NO: 4795 - protein, 509 aa, Halomonas sp. SK1
MSDDTKKCPVTHMTTDFGAPVVTNRDSLTAGPRGPLLAQDVWLNEKLAGFVREVIPERRMHAKGSGAFGTFTVTHDITKYTRAKIFSEVGKKTEMFARFTTVAGERGAADAERDIRGFALKFYTEEGNWDMVGNNTPVFFIRDPRQFPDLNKAVKRDPRTNLRTATNNWDYWTLLPEALHQVTVVMSDRGIPASYRHMHGYSSHTYSLWNQAGERFWVKMHFRTQQGIKNLTDAEAGELVAQDRESHQRDLYEAIERGEYPKWTMFIQVMPEADAEKYALHPFDLTKVWYKGDYPLIEVGEFELNKNSENFFADVEQVAFSPSNLVPGIGVSPDRMLQRRLFNYADAQRYRLGVNYHQIPVNQARCPVHSNHRDGQGRVDGNYGALPHYEPNSFGQWQGQPQFSEPPLKLTGNAAHWSYDKDDHNYFEQPGKLFRLMNDGQKEALFGNTGRAMGDAPEFIKFRHIRNCHAADPAYGAGVAKALGINLEKALASKKDDPMYGNPLVALPA

SEQ ID NO: 4796 - protein, 277 aa, Oryza sativa
MAADLAFEATELRLGLPGGGGDGDAAAAAARSSSGKRGFAETIDLKLKLEPAAAAVDDDDDKEEAAADDREKKVDIVGADNDDASPPAAAAAGGMKRSPSQSSVVTAAADPEKPRAPKAQVVGWPPVRSYRKNILAVQADKGKDAADGGGDKSGAGAGAAAFVKVSMDGAPYLRKVDLKMYKSYLELSKALEKMFSSFTIGNCGSHGVNGMNESKIADLLNGSEYVPTYEDKDGDWMLVGDVPWEMFVESCKRLRIMKGSEAIGLAPRAMEKCKNRS

SEQ ID NO: 4797 - protein, 190 aa, Tmesipteris tannensis
DQHGEVVAEIRRSDLDPYLGLHYPATDIPQASRFLFMKNRVRMICDCCAPAVRIIQDKELKQPLSLAGSTLRAPHGCHAYYMRNMGSIGSLVMAVIVNDNDAEASSSGHQPKNRKLWGMVVCHHTTPRAVPFSLRSACEFLMQVFGLQLNMEIELGAQMREKHILCTQTPLCDMLLRDAPIGIVSQSPNI

SEQ ID NO: 4798 - protein, 370 aa, Candida albicans SC5314
MKAAVVPESVTETKLAEIKEIPKPTIDDDQILIKAEAGAINPTDWKHIIVARSSKPGDIIGCDVSGIVEEVGSKVTNFKKGDAVSAYITGNISSINGAFSEYVAAYPQATIKYTNGLIHSTAVAKASTIIKTFEGAACMTLGLATVAMSFSHHLNISKHQQKQGNDAILIWGGATATGILAIQVAKLVYNLTVITTASPKNHEYLKQLGADYVLDYNDSRIVENIRKIGNGNIRFGLDTVSNATTFQYLYDATESTTSSYDKMVYLDSLLALDGNTIKTDPKRDKSVHWGYTFVDHSIIKVKKFGNKEYSQTPELFNDYYKWWQEIMPTIINKIKHANLKILDNGLESVNEALQLSKDSKVSAEKIVFTI

SEQ ID NO: 4799 - protein, 191 aa, Vittaria lineata
DEHGEVVAEIRKSDLEPYLGLHYPATDIPQASRFLFMKNRVRMICDCRADAVKVTQDREVRQPLSLAASTLRAPHGCHSQYMANMGSAASLVMAVAVNSNEEDTSSSKPHQLKPRKLWGLVVCHHTSPRAVAFPLRSACEFLVQVFGLQLNMEVELAVQMREKHILRTQTLLCDMLLRDAPIGVVSESPNI

SEQ ID NO: 4800 - protein, 271 aa, Zymomonas mobilis
MSHIHFIGSGQMSEAMIRAIIKHKTASASDITAYDIRPEREKELHDNYGITTFAKPKKNIETLQKADIVVIGVRPQDDLKAVTADIAQNAKEKALIVSIVAGVTLAQFEDLLGKERAIARIIPNTLTDTGLGYSGVVINNQADKALTEKFVSGFGKCLFLEESLIDIFTGFGVCGPNYVYYFIEALVDAGVLAGLPRDIAWETTMENLVGSVKMLEISGKHPRQLLDINNSPAGVGMNSLFALNQSDFTAGLQNSVLAAVKRTTELGQKKD

SEQ ID NO: 4801 - protein, 189 aa, Welwitschia mirabilis
DEHGEVVSEIRRSDLEPYLGLHYPATDIPQASRFLFMQNRVRMIYDCRANPVKVVQSKELKQPLCLVGSTLRAPHGCRAQYMANMGSVASLAMAVIVNVSEEEAGGSSGRNTMRLWGLIVCHHTSPWAVPFPLRYACEFLMRAFGHQLNMELQLAAQLTEKNILKTQTLLCDMLLRDAPVGIVTQSPSI

SEQ ID NO: 4802 - protein, 547 aa, Yersinia pestis CO92
MANHPRAGQPAQQSDLINVAQLTSQYYVLQPDAEDPAHAVKFGTSGHRGSSVRHSFNEAHILAIAQAIAEVRHQHGISGPCYVGKDTHALSEPAFISVLEVLTANGVDVVVQQDNGFTPTPAISHVILCHNAQGKALADGIVITPSHNPPEDGGIKYNPPNGGPADTNLTSVIEKRANQLLSQNLKGVKRQTLDKAWQSNHLREQDLLQPYVEGLVDVVDIPAIQQAGLKLGVDPLGGSGIAYWQRIAEYYKLDLTLVNNAIDQTFRFMHLDHDGVIRMDCSSESAMAGLLALRDKFDLAFANDPDYDRHGIVTPAGLMNPNHYLAVSINYLFQHRPQWGAGVAVGKTLVSSAMIDRVVADLGRKLVEVPVGFKWFVDGLHDGSFGFGGEESAGASFLRFNGTPWSTDKDGIIMCLLAAEITAVTGKDPQRHYDDLAQRFGAPSYNRIQAPATQAQKNALSRLSPEMVKANTLAGDPITARLTNAPGNGASIGGLKVMTENGWFAARPSGTEEAYKIYCESFLGAEHREKIEQEAVKIVSEVLAEAK

SEQ ID NO: 4803 - protein, 251 aa, Zymomonas mobilis
MRFQDKIVVITGGGNGMGKAAAERFSSEGAIVVLADWQIKDAEEVAASLPKDRAWPYKIDVSDPDAVKKMMDDIAAKYGKIDVLVNNAGILIPGKIMDASIEDWKKISSVNIDGVIYCAKFAMPYLVKSKGCIVNTASVSGLGGDWGMVYYCTTKGAVVNFTRALALDSGVNGVRVNSVCPCIVKTKMAANWPESAQAQFKNRVSLGRIPEAEEIASVMAFLASDDARFITGVNLPVDGGATASDGQPHLG

SEQ ID NO: 4804 - protein, 769 aa, Oryza sativa
MWPVRPCYSATARKLAVVVLSEGPIGLAGQTEVEWPVRPALARSDRHRLGLTDYGSVGFVSAIPSSTIPASTGPAERLNTLIYFALGSPRLDLVGWFYLGLMNDIVDERERGLDTDRLRCSWRKKRRTSSLSSQLDVDGGDGVLDGGGCRCSGGRGQSRRGRGAACDGDPPAIRLGAPDQGAVKVRCAVGPDGWEIYLTHINKENEDSRDRQTIDACTLSVKPTAACVLPSHARHEVRKSNPRADARPTRNTWTARIPRPRPVTDAKTPSRLVHSNPSKPKPPNSDRANRDSRHHQTRRHDTLRPKSYTARRDLVQQTQRKHSLDRHMPTPRPRHRHHALPLALALAAPLLLLAAADGQPNESRDKNNGGGGGGFMAPSGGGGGMGSQSPSFSAPMVVLLVALIAAFFFIGFFSIYIRRCGGEASTGPTIPAAALAALSRQEQRSRRQRGLDPAVVESFPTMKYAEARELRDGGKDAVLECAVCLSEFDDDEELRLLPKCSHAFHPDCIGEWLAGHVTCPVCRCNLAPDAAAAEANVVSGEVDGEQQEEEVVVAIDVDREGEEEDEERRREAMELERIGSQRRAVRSRSGRPLPLPRSHSTGHSLATTRLGDAGDLERFTLRLPEHVRREMVAAAGEESLRRTAVREGRVGGGARSARIGRSDRWPSFIARTFSSRIPFWSASRRVLDAAEAGADATATTTTTTPTSTARTKRDKTAAAADGSVSSAKGSVRFDCLGGGGGGGGPSNRVVAFANDDEEDDDEKPIARQV

SEQ ID NO: 4805 - protein, 126 aa, Pseudomonas stutzeri
SDRLTQPLLRMKDGKFDKQGEFQPVTWDQAFDIMEEKYKAALKQGGPEAIGMFGSGQWTIWEGYAANKLMKAGFRSNNIDPNARHCMASAAFGFMRTFGMDEPMGCYEDIEAADAFVLWGSNMAEM

SEQ ID NO: 4806 - protein, 495 aa, Oryza sativa
RLPVAAVSSSNLHPEYAKKIGGSDFSHDRQSGKELQNFKVSPQEASRASNFMRASKYGMPITANGLRVHIHCSLFIISGQGNIARWVKKEGDKVSPGEVLCEVETDKATVEMECMEEGYLAKIIHGDGAKEIKVGEIIAVTVEEEEDIGKFKDYKAPSSAESAAPAESKPQSEPTEPKKEKEQPKAPEPKATKTEESFLSEDRTFSSPIARKLAEDNNVPLSSIKGTGPDGRILKADIEDYLVMLNEASVAKGAKKETAAAPGLGYVDLPNTQIRKVTANRLLHSKQTIPHYYLTVDTRVDKLIKLRSELNPLQDTSGGKKISINDLVIKAAALALRNVPECNSSWMNDFIRQYHNVNINVAVQTEDGLFVPVIRDADKKGLATIADEVKQLAQRARDNSLKPEDYEGGTFTVSNLGGPFGIKQFCAIVNPPQSAILAIGSAEKRVIPGAEGQFEVGSFMSATLSCDHRVIDGAIGAEWMKAFKGYIENPTTMLL

SEQ ID NO: 4807 - protein, 291 aa, Arabidopsis thaliana
MSPATYLETSNWLFQENRGTKWTAEENKKFENALAFYDKDTPDRWSRVAAMLPGKTVGDVIKQYRELEEDVSDIEAGLIPIPGYASDSFTLDWGGYDGASGNNGFNMNGYYFSAAGGKRGSAARTAEHERKKGVPWTEEEHRQFLMGLKKYGKGDWRNIARNFVTTRTPTQVASHAQKYFIRQVNGGKDKRRSSIHDITTVNIPDSPDAAAADNATANAPCSPPSVGGNQRETSEWEGQTLYDETAAAFYNQNAFSETLLGMSSTPYMAKLQEQSFLNASQFESYNAYLQM

SEQ ID NO: 4808 - protein, 316 aa, Hordeum vulgare
MEGLQRSSSTFRRKKRPRRSRDGPNSVSETIKQWKEVKQQLEHDPQGAKRARKPPAKGSKKGCMQGKGGPENTQCGFRGVRQRTWGKWVAEIRESNRVSRLWLGTFPTAEVAAQAYDEAAKAMYGPLARTNFPVQDAQAAPTVVVQVATEGVVRGSSASCESTTTSNHSDVASSSHNKQLQIQAPEISSQSDLLESTQSVEYIQQQSVPDAVSSIAMSTSEEDVYEPLEPISNLPDGEAHCAISRCFGPRTWPETWTRRRRGCPAASSTPSSGVPAPALAPQRAEAVPSPRGGNGRRCRGSDRAMVDVMRAVFILE

SEQ ID NO: 4809 - protein, 426 aa, Prochlorococcus marinus str. MIT 9313
MDLLPEQTRCWQAVESVARDHFRRAGLQEIRTPLLEVTELFARGIGEATDVVGKEMYTFVDRGDRSCTLRPEGTASVVRAALQHGLLSQGPQRFWYGGPMFRYERPQAGRQRQFYQIGVEYLGVGSPRSDAEVIALAWALLVDLGVQGLVLEINSLGTLQDRQKYREELVAWLEARSEELDDDSRKRLYTNPLRILDSKHPAIKELLQDAPTLFEALSVESKARFEEVQVDLEALQIPFQLNPRLVRGLDYYGHTAFEITSDQLGAQATVCGGGRYDGLVEQLGGAPTPAFGWAFGMERLMLLLEAAASINPSGSAARLRASTRPDLYVVNRGEQAERVALVIAHQLRAAGLVVELDSSGAAFNKQFKRAGRSRATWALVIGDDEAERGEGRLKYLQEAKTQANPTPIDKLHRLDDVTGLVCLVRE

SEQ ID NO: 4810 - protein, 390 aa, Prochlorococcus marinus str. MIT 9313
MATLLEQLSTMTVVVADTGDLDAIRKFTPRDATTNPSLILAAAQIPAYQSLIDEALHSSRQLLGNSAAVEEVVHEALDEICVIFGKEILKIVPGRVSTEVDARLSFNTEATIAKAHKLIGLYNDAGITNDRVLIKIASTWEGIKAAEVLEKDGIHCNLTLLFGFSQAVACAEAGVTLISPFVGRILDWYKASTGRDSYAGPEDPGVISVTKIFNYFKTYDYKTEIMGASFRNLDEIIELAGCDLLTISPKLLDQLGSTEAPLKRKLDAVNPVAAESQIHVDKESFESMMRADRMAFEKLDEGIRGFSKAIETLEAQLAHRLAVLEGGAAFCHVVQEIFMLNDLDGDGCITREEWLGSDAVFDALDHDHDGRLLQEDVRSGLGAALALTTA

SEQ ID NO: 4811 - protein, 583 aa, Magnaporthe grisea 70-15
MCGIFACHAHPDVQKFKPTALRLAKAIRHRGPDWSGSVTCNQTILCHERLSIVGVESGAQPLTNEDESIILAVNGEIYNHRLVRKSLKTPYHFKTTSDCEVIIPLYMEHGLDAPKYLDGMFSFVLYDKKQNRTIAARDPIGVTTFYQGWSSSEPGAVYFGSELKCLYQVCDKIEAFPPGHIYDSLTGERTRYFQPTWWDPKRVPETPLDLTKLREALEKSVRKRLMAEVPYGVLLSGGLDSSLVASIAQRETKRLKKLAIEAGLEDLPAEPTGNHDQGEGLVGIDDENKLSTMTYLPQLNSFSIGLPGSPDNKAALEVAKFLGTKHHVMTFTIEDGLNALSDVIYHLESYDVTTIRASTPMYLLSRKIKAMGIKMVLSGEGSDEAFGGYLYFHNAPDKDAFHDETVRRVKNLHLSDCLRANKSTSAWGLEARVPFLDKEFLELAMNIDPKEKMITKERIEKYIVRKAFDTSDDPNAEPYLPDNILWRQKEQFSDGVGYGWIDALKDNAEIQVTDEMMKNPKPEWGDDIPDTKEAYWYRCMFDEHFPPHCASTVERWTPTWSKQTDPSGRAIAVHAAKYDHISE

SEQ ID NO: 4812 - protein, 177 aa, Oryza sativa
  unsure (1)..(177): unsure at all Xaa locations
MAPTVMASSGTSVAPFQGLKSTAGLPVSRRSTNSGFGNVSNGGRIKCMQVWPIEGIKKFETLSYLPPLTXVEDLLNQIEYLLRSKWVPCLEFTKVGFVYRENHXRSPGYYDARYWTTXELPMFGCTDATQVLKELEEAKKAYPDAFVRIIGFDNVRQVQLISFIAYKPPSSEDSGAN

SEQ ID NO: 4813 - protein, 292 aa, Bradyrhizobium japonicum USDA 110
MVMGPGLRRDDTEFVVTTVANSTLQNITGTILLAGAGKMGGAMLTGWLAGGLDPRRVAVVDPHIAPEISALAAKGVALNPDAKAAGQVETMVVAVKPQMFREAGAKLKPFVSEKTSVVSIMAGTTIASLQEVCGGAVVRAMPNTPAAIGRGITVAVAAKNVSTAQRAVADALLRATGSVEWVEDESLMDAVTAVSGSGPAYVFLLAEELARAGVEAGLPEALATKLARETVAGSGELLHQSELPSGTLRQNVTSPGGTTAAALGVLMGEPGLRDLMIRAIAAATQRSKELAK

SEQ ID NO: 4814 - protein, 167 aa, Tropheryma whipplei TW08/27
MKPLLSEAVIHRRLAQLALQIDEDYRGTSIVLLGVLKGSIMLMADLSRLLSSDLRIEWVTLSSYGNDTVSSGSIRIVHDLDADIRDRHVLIIEDIVDSGLTLGWLLAKMRERRPASIEACVLLRKPHARGTDVRYLGFDIPDEFVIGYGMDYAEKYRNLKSVYVLEQ

SEQ ID NO: 4815 - protein, 386 aa, Rubrobacter xylanophilus DSM 9941
MRKADATPLRLNPVLERQGEYPLLRLDERRERLKEQGVRLFDFGAGDPREPTDPRIRRALLEAVPEVSQYPSASGTRALREAFCGWMERRHGVELDPDAEVLPASGSKEAIFHAHLPFLHHTHERRGVAYGTPGYPVYERGALFAGGEALPVRLVREDGFLLPLEAVDPQRTRILWLNYPHNPTGARAPRSYLEEAAAFCREHDILLFSDECYNEIYSGDPPPSVLEVSRERTLAFCSLSKRSGMTGYRSAMMAGDAELISALGKLRPSVGVASPSFVQAAAAAAWSDDEHVEERRRTFARKRGLFVEFFRRAGLDFLPTDATFYLWVAVPGGDDEAYALRLLEEGIVVAPGRSFGPGGEGYVRVALVPSLEECEEAVRRWEALAA

SEQ ID NO: 4816 - protein, 506 aa, Bradyrhizobium japonicum USDA 110
MAEKPKKPQKLKARLPRGLEDRDPAAIRATREMVEKIRAVYELYGFEPVETPAMEYTDALGKFLPDQDRPNEGVFSFQDDDEQWISLRYDLTAPLARYVGERYGTDGLVLPYRSYRVGYVFRNEKPGPGRFRQFMQFDADTVGSATPAADAEICMMAADTMEALGVQRGQYVVKVNNRKVLDGVLEAIGLAGDENAARRLTVLRAIDKLDKFPADEVRKLLGPGRWDGGEEGKGDFTKGANLSAAEADVVLAITKPRDDWKEAIAAAEAYLAKSEVGQAGVSELEEIAKLVMASGYGADRIKIDPSVVRGLEYYTGPVYEVELLLDTKDEKGRPVRFGSVGGGGRYDGLVSRFRGEPVPATGFSIGVSRLQAALTLLGKLDTRPEFGPVVVTVFDRDRVADYQKMVASLRTAGIRAELYLGNPKNMGNQLKYADRRNSPCVIIQGSDEKARGELQIKDLIEGAKAAAAIASNQEWRESRPAQFSCAEADLVAKVREVLARHDVSWG

SEQ ID NO: 4817 - protein, 550 aa, Pichia stipitis
MSSQDLPSGAQTPIDGSSILEDKVEQSSSSNSQSDLASIPATGIKAYLLVCFFCMLVAFGGFVFGFDTGTISGFLNMSDFLSRFGQDGSEGKYLSDIRVGLIVSIFNIGCAIGGIFLSKIGDVYGRRIGIISAMVVYVVGIIIQISSQDKWYQLTIGRGVTGLAVGTVSVLSPMFISESAPKHLRGTLVYCYQLCITLGIFIGYCVTYGTKDLNDSRQWRVPLGLCFLWAIFLVVGMLAMPESPRFLIEKKRIEEAKKSLARSNKLSPEDPGVYTEVQLIQAGIDREAAAGSASWMELITGKPAIFRRVIMGIILQSLQQLTGVNYFFYYGTTIFQAVGLQDSFQTSIILGTVNFLSTFVGIWAIERFGRRQCLLVGSAGMFVCFIIYSVIGTTHLFIDGVVDNDNTRQLSGNAMIFITCLFIFFFACTWAGGVFTIISESYPLRIRSKAMSIATAANWMWGFLISFCTPFIVNAINFKFGFVFTGCLLFSFFYVYFFVSETKGLSLEEVDELYAEGIAPWKSGAWVPPSAQQQMQNSTYGAEAKEQEQV

SEQ ID NO: 4818 - protein, 484 aa, Nicotiana attenuata
MVFISGNVQKQQLLSKIATNDGHGENSAYFDGWKAYENDPFHLTNNPNGVIQMGLAENQLCFDLIQEWVVNNPKASICTTEGAEDFRDIAIFQDYHGLPEFRQAVARFMEKVRGDKVTFDPNRIVMSGGATGAHETLAFCLANPGDAFLVPTPYYPGFDRDLRWRTGVQLFPVVCDSSNDFKVTKKALESAYEKAQESNINIKGLLINNPSNPLGTILDSDTLKDIVTFINSKNIHLICDEIYAATVFDQPKFISVSEIVEEHVGCNKDLIHIVYSLSKDLGFPGFRVGIVYSYNDTVVNIARKMSSFGLVSTQTQHLIASMLSDETFIEKFIAESSERLGKRHEMFTKGLAQVGISTLKSNAGLFFWMDLRRLLKELTFESELELWRIIINEVKLNVSPGCSFHCSEPGWFRVCFANMDDETMRIALRRIRNFVLQTKGLNSKSAVKKQCSRSKLQISLSFRRMDDFMNSPVHSPMNSPLVRT

SEQ ID NO: 4819 - protein, 829 aa, Vibrio vulnificus YJ016
MKMTRRAFVKANAAASAAAVAGITLPASAANLIASSDQTKITWDKAPCRFCGTGCSVLVGTQNGKVVATQGDPEAPVNKGLNCIKGYFLSKIMYGQDRLTQPLLRMKDGKYDKEGDFTPVSWDVAFDTMAEKWKASLAKKGPTSIGMFGSGQWTVMEGYAAAKMMKAGFRSNNIDPNARHCMASAVVGFMRTFGIDEPMGCYDDFEHADSFVLWGSNMAEMHPVLWTRITDRRLSHPHVKVNVLSTYYHRSFELADSGYIFKPQSDLAIANFIANYIIQNDAVNWDFVNKHTNFKQATTDIGYGLRDDDPLQKQAKNPNSGNMTSISFEEYKKSVAPYTVEKASEMSGVAQDKLIELAKQYADPNTKVMSLWTMGMNQHTRGVWMNSLVYNIHLLTGKIATPGNSPFSLTGQPSACGTAREVGTFAHRLPADMVVANPKHRAIAEKIWKLPEGTIPPKPGFHAVLQDRMLHDGVLNCYWVQCNNNMQAGPNINGERLPGYRNPENFIVVSDPYPTATAQAADLILPTAMWIEKEGAYGNAERRTQAWYQQVGTVGEAKSDLWQVMEFSKRFKMEEVWPEELLAKAPQYRGKTMYDMLFANGQVDKFPLSEARQLNDDSHHFGFYVQKGLFEEYAEFGRGHGHDLAPYDVYHTVRGLRWPVVDGKETLWRYKEGSDPYAKKGSGWDFYGKPDGKALIISAPYEAPPESPDAEYDMWLCTGRVLEHWHTGTMTRRVPELYKAVPDAVCYIHPEDAKARGLRRGDEVLISNKRGEVRVRVETRGRNRPPQGLVFVPFFDARILINKLILDATDPLSKQTDFKKCPVKITKVA

SEQ ID NO: 4820 - protein, 156 aa, Triticum aestivum
MAATKLSSGHEMPAVGLGVWRMDSAAVRGLIHSALRAGYRHFDCAADYKNEAEVGDALAEAFQTGLVKREDLFITTKLWNSDHGHVVEACKDSLKKLELDNLDLYLIHFPVATKHTGVGTTGSALGDDGVLDIDTTISLETTWHAMEDLVSMGLVR

SEQ ID NO: 4821 - protein, 752 aa, Cytophaga hutchinsonii
MKIKDIVNRDLVNLQNCDQEPIHIPGSIQPHGFLIAITKETWEIRFCSENVIDFIGLSHKQLLGKKITEIFDDIFFGKVIQCKDYAVGESKLIQGKIEDKEFDFTAHQNEDVIILESEIHIDNTPKNDLFDMSKQFMDYMEDSHTLIRLCELVASGIKKVTDYDRVMIYRFDKDYNGEVIAEAKQDKLESFLGLHYPHTDIPVQARELYIKNLLRVIGDVNYKPVPIYTIDDSENQNLDLSCSVLRSVSPIHVQYLHNIGVGATLTISLIHKKKLWGLVACHHYSPKYLHYETKLAAKLQGHFITSQIEIREQNEQYATSQKLHQAVDDLISRKFSADRNSLKDIVIDSNVLQLCKAAGISILIDKKEVYKSGLTPADGDIQKLAEYVKHAIDKEQYATHFITAELPDFKNITASGIAGINYHALDKTSNSCIMWYKPETITEVKWAGDPNKAIEKDKNGLSPRKSFELWGEKVKNQSIPWSQPDLIASSNFANFLQKHLGYIFLAEEEEKQRQMTEILKEVNSELENINWISTHDLQEPLRKIQIITSYVLSVENTLSEASYEKLQKINKSANRMQALISDILRYTKLKASTEILESVDLKNIVTEVIQEVDDALEAKKANIYISDLPEMSGIPFLLAQLFLNLISNSLKFADATRVLSIHIVQEGIIVKEEQEYYKISYTDNGIGFNKDYNELIFKIFSRLHSVAEYPGSGIGLALCKKIMKTHKGFIEAQGIPEKGAIFYLYFPVSKNS

SEQ ID NO: 4822 - protein, 212 aa, Triticum aestivum
  unsure (1)..(212): unsure at all Xaa locations
TLRDPGHXGVLRMSEDKLIFTPNDPRSLMKLNVDFRSIKGHKFNKVDGSKPTPPLLNLSKDSXQGGGYIFECDNVGNRDLCRDFVARVLGKHQGTVPARTNVPPEKSAVSTGPEQLSSAEMERRMKLLREDSELQKLHKKFVLGNILQESEFWATRKNLLDDETNKASKQKPGFKSAMLADVRPSADGQTNXWVLFSLTYWRLSIQIFAEKP

SEQ ID NO: 4823 - protein, 340 aa, Corynebacterium efficiens
MKLAVIGGDGIGPEVTDEALKVLRALRADIETTDLDLGARRYLRNGELLTDEDLALLREHDAILLGAIGAPGSVPPGVLERGLLLKLRFALDHHVNLRPSKLYEGVESPLKNPGEIDFVVVREGTEGAYTGNGGAIRVGTPHETANETSVNTRYGAERVIRYAFELAQSRRRHLTLVHKTNVLVHGGGLWQRTVDEVAREYPEVTVDYNHIDAATIYLVTDPSRFDVIVTDNLFGDILTDEAGAISGGIGLAASGNIDATGTNPSMFEPVHGSAPDIMGKGIADPTAAILSAAMMLRHLGDEANAVRIEEAVARDVAGRDPEAPISTTEVGDRIAAAVVA

SEQ ID NO: 4824 - protein, 322 aa, Candida albicans SC5314
MLNPVIFIKDPIKYDYSQFIISLLPKFINCNRIDLVILCQITESNQLNEILCFYYQLIRNHKNNGDTDGDTDSLPMFDYRFEINILFNLSTKKLNQLCLNNWNHGYIAEGDNDNSTNLSSLPLSITQISNIEIPTIQSRANSSSAYNDEDDKITTSRQYQQFKTTAVGGTFDHLHDGHKILLSMAIFLTSNKLIIGITGSNLLINKKFKSQLQTFNQRQNLVIQFINLLLLSETSVIFFEIYEINDVCGPTGYINDIDNLIISQETKSGGEFVNKFRKDHGFKLLDITIIKVIGGNIEENSWKGKLSSTDIREQEYNRLLNQ

SEQ ID NO: 4825 - protein, 200 aa, Corynebacterium glutamicum ATCC 13032
MSNNVEMADHKDLNVPANPYGTDIESVLISEEKLKQRIAEMAKRVSEEFKDAEEDLILVCVLKGAFYFLADFSRMLDIPTQSEFMAVSSYGNSTSSSGVVRILKDLDKEIEGRDVLIVEDIIDSGLTLSWLMRNLKNRNPKSLNVITLLRKPERLTTNIDMFDIGFDIPNEFVVGYGLDFAERYRDLPYVGTLEPHVYSD

SEQ ID NO: 4826 - protein, 343 aa, Bifidobacterium longum NCC2705
MAKTYKIAVIPGDGIGKEVTPWAQKALEKAAEGVADFEYENFDLGAERYLRDGAILPEDEEERIKANDAILLGAVGDPRIKAGILERGLLLKLRFDLDQYVNLRPSKLYKGVTSPLANPGDIDFVVVREGTEGLYCGAGGAVRRNTPQEVATEVSINTAYGVERVVRYAFKLAMKRKKHVTLVHKKNVLVNAGDMWQRIVDKVGEEYPEVTHDYQHIDAATIFLVSDPSRFDVILTDNLFGDILTDEAGSVVGGVGYSASGCINASDEFPSMFEPIHGSAPDIAGQNKANPTAAILSAAMLLEHLGFDDAAKKIHTAVEADIEELGSTVRSTDQVGKDILARM

SEQ ID NO: 4827 - protein, 460 aa, Xanthomonas campestris pv. campestris str. ATCC 33913
MSERVVDPSVLRSLQQLDAAHHLHPFNDNAALASKGTRILTRGEGVYVWDADGNKLLDAFAGLWCVNLGYGRAELAQAAARQMEQLAYYNSFFQCTTEPTVHLAAKLAELAPGDLNHAFFANSGSEANDTILRLVRHFWAVQGQPQKHIFIGRHDGYHGTTMGGASLGGMRGMHRQGGLPIPGIEHIAPPNHFGEGGEMDPDDYGLLAARRLEEKILQLGPDTVAAFIGEPIMGAIGVYIPPRSYWPEIERICRRYDVLLVADEVICGFGRTGAWFGAEYFGFQPDVMTLAKGITSGYIPLAAAMFNDRVAGVLKRQGGELAHGGTYAGHPVCAAVALENLRLLQDEGIVDTARTQIAPYLAQRWAELGAHRLVGEARIAGLVGALELVPDKRRRGVYFPERGRVGALCRDFALRRGLILRATYDAMLLSPPLIITCEQVDELFDKTWAALDDTAQALGK

SEQ ID NO: 4828 - protein, 253 aa, Streptomyces exfoliatus
NDLSGKTVIITGGARGLGAEAARQAVAAGARVVLADVLDEEGAATARELGDAARYQHLDVTIEEDWQRVVAYAREEFGSVDGLVNNAGISTGMFLETESVERFRKVVEINLTGVFIGMKTVIPAMKDAGGGSIVNISSAAGLMGLALTSSYGASKWGVRGLSKLAAVELGTDRIRVNSVHPGMTYTPMTAETGIRQGEGNYPNTPMGRVGEPGEIAGAVVKLLSDTSSYVTGAELAVDGGWTTGPTVKYVMGQ

SEQ ID NO: 4829 - protein, 355 aa, Oryza sativa (japonica cultivar-group)
MGKKKKRVEKVFCYYCDREFDDEKILVQHQKAKHFKCHVCHKKLSTAGGMAIHVLQVHKESVTKVPNAKPERESTEIEIFGMQGIPPDVLAAHYGEEEDPSSKVAKVEVPSLRPPVMPNPAGMVYPPRPAYGVAPPMYNPALNPLMARPPIWPAPPPQPWFTQPVVSVPQMASGLAPQQPLFPIQNMPAPMTSAPANLLQTSFPMAHVGVPSPVTPQVSQPLFPVSTSAGNGAVSSPYVASVAPGSIPTSSPSVAPAGVGYAATNQGTGGPAAVPPPASNNKAPATQPGANEVYLVWDDEAMSMEERRLSLPKYQVHDETSQVSSDFYNFISVILMICEKNQVEVHGDALNWNIV

SEQ ID NO: 4830 - protein, 251 aa, Xanthomonas campestris pv. campestris str. ATCC 33913
MTMVPLVGLPTDRSLHGPHPFLAAGEKYVRAVVEAAGAQPVLLPSLQPPLDAGAWLQRLDGLLLTGAVSNVEPHHYSDEPSWEGNPHDPARDATSLALIPQALARGLPVLAICRGLQEVNVALGGRLHQRVHEVPGLADHREDRSAPLDIQYGPAHPVQLQPGGWLAGMSDTAQVQVNSLHGQGIATLAAGLLVEATAPDGLIEAFRGPGPGFLLAVQWHPEWRVTQHPFYRAIFQAFGEACRQYAAQRGK

SEQ ID NO: 4831 - protein, 404 aa, Chlorobium tepidum TLS
MFDEIEFDRIKRLPKYVFAAVNELKMAERRAGRDVIDFSMGNPDGPTPQHIVDKLVESVSKPKTHGYSVSKGIYKLRGAIGGWYRDKYNVDLDLDREVVVTMGSKEGYVHLVQAITNPGDLAIVPDPCYPIHSQAFILAGGNVHRMKLEMNEDYTLDEEAFFHNVETALRESSPKPKYLVVNFPNNPTTATVELPFYERLVELARRERFYIISDIAYAEITFDGYVTPSILQVSGAKDVAVESYTLSKTYNMAGWRMGFMVGNAKLVGALEKIKSWLDYGTFTPIQVAATIALTGDQSCVREIREVYRKRRDVLISSFANAGWDIVSPKASMFVWARIPEQMRAMGSLEFSKKLLIEGKVAVSPGIGFGTYGDEYVRVAMIENEERIRQAARNIKRFLKNNAGS

SEQ ID NO: 4832 - protein, 415 aa, Nitrosomonas europaea ATCC 19718
MYQHIKVPTTGSKIRVKDDSSLVVPDNPIIPFIEGDGIGVDITPVMISVVDGAVKKAYGDSRKISWMEIYAGEKSTRVYGQDIWLPDETLQAAKEFVVSIKGPLTTPVSGGIRSINVALRQLLDLYVCLRPVRYFQGVPSPVKQPEKVDMVIFRENSEDIYAGIEWEAGTEAVEKVINFLTAEMGITKIRFPRSSAIGIKPVSKEGSERLIRKAIQYAIDHKRRSVTLVHKGNIMKFTEGAFKKWGYELAAKEFGAELLDGGPWMILRHNGNEIIIKDVIADAFLQQILLRPDEYDVIATLNLNGDYISDALAAQVGGIGIAPGANMSDSIAIFEATHGTAPKYAGKDQVNPGSIILSAEMMLRHIGWHEAANIVISSMEKTIQDRIMTYDLARLTPNAKQATSSEFGNAMVARM

SEQ ID NO: 4833 - protein, 433 aa, Bradyrhizobium japonicum USDA 110
MRNETIAIHAGYEPEATTHAVAVPIYQTAAYAFDSADHGAALFNLEAEGFRYSRIANPTSAVLEKRISQLEGGVGALAVATGQAALHFAFVNVADHGGNIVSVPQLYGTTHTLLSHILPRQGITGRFAESDKPDAIEKLIDENTRAVFAETIGNPAGNVCDIEALAKIAHAHGVPLIVDNTVATPILLKPFDYGADIAVHSLTKFLGGHGTTLGGAIVDSGNFPWAKYADRFPAYNKPDASYHGLVYAERFGKTAYIERARSVYQRTMGSVLSPFNAFLLLQGIETVALRMERHVENARKVAEFLRTDPRVAWVNYTGFPDSPYYPLVQKYLDGNASSLFTFGIKGGMEAGKTFYDALKLITRLVNIGDAKSLACHPASTTHRQMSAEQQRLAGVLPETIRLSIGIEHAADIIEDIDQALEKACPSSRLQAAE

SEQ ID NO: 4834 - protein, 436 aa, Haemophilus influenzae R2846
MAKIVKVIGREIIDSRGNPTVEAEVHLEGGFVGLAAAPSGASTGSREALELRDGEKSRFLGKGVLKAVAAVNNEIAQAIVGKDATNQAEIDQIMIDLDGTENKSNFGANAILAVSLANAKAAAASKGLPLYAYIAELNGTAGIYSMPLPMMNIINGGEHADNNVDIQEFMIQPVGAKTLREALRIGAEVFHNLAKVLKSKGMSTAVGDEGGFAPNLASNADALACIKEAVEKAGYVLGKDVTLAMDCASSEFYNKENGMYEMKGEGKSFTSQEFTHYLEELTKQYPIVSIEDGQDESDWEGFAYQTKVLGDRVQLVGDDLFVTNTKILKEGIEKGIANSILIKFNQIGSLTETLAAIKMAKDAGYTAVISHRSGETEDATIADLAVGTAAGQIKTGSMSRSDRIAKYNQLIRIEEALERAGTPAAFPGLKAVKGQA

SEQ ID NO: 4835 - protein, 144 aa, Daucus carota
MGSKIFLLLGLSIAFAILISSEVAARELAETAAKTEGYNNGGGYHNGGGGYNNGGGYHNGGGGYNNGGGYHNGGGGYNNGGGYHNGGGGYNNGGGHHNGGGGYNNGGGHHGGGGSCYHYCHGRCCSAAEAKALEATTAQVKPQN

SEQ ID NO: 4836 - protein, 506 aa, Oceanobacillus iheyensis HTE831
MRYANPNKQDAIVNFEKRYDNFIGGKYQPPINGNYFENVSPVTGEVFCEIARSTKEDVDAAIDAAHAAKDAWGKTSVAERAVILNKIADRIEENLEKLAVAETWDNGKAVRETLAADIPLAVDHFRYFAGVIRAQEGTLSQIDEDTVAYHFHEPLGVVGQIIPWNFPILMATWKLAPALAAGNCVVLKPAEQTPASIHVLLDLIKDLLPDGVLNVVNGFGVEAGKPLASNSRIAKIAFTGETTTGRLIMQYASENIIPVTLELGGKSPNIFFEDVMDKDDAFVDKAIEGMVMFALNQGEVCTCPSRALVHESIYDRFMEKVIQRVNQIKIGHPLDTDTMMGAQASQEQMEKIKSYLDIGKQEGAEVLTGGNVNALEGELAAGYYVEPTIFKGNNKMRIFQEEIFGPVLSVTTFKDKDEAMEVANDTLYGLGAGIWTRDINTAYRFGRGIEAGRVWTNCYHQYPAHAAFGGYKKSGIGRENHLMMLGHYQQTKNLLISYGEGTAGLF

SEQ ID NO: 4837 - protein, 508 aa, Haemophilus influenzae R2846
MSSQCPFSHLAATNLTMGNGAPVADNQNSLTAGPRGPLLSQDLWLNEKLADFVREVIPERRMHAKGSGAFGTFTVTHDITKYTRAKIFSEVGKKTEMFARFTTVAGERGAADAERDIRGFALKFYTEEGNWDLVGNNTPVFFLRDPRKFPDLNKAVKRDPRTNMRSATNNWDFWTLLPEALHQVTVVMSDRGIPASYRHMHGFGSHTYSFWNEAGERFWVKFHFRTQQGIKNLTNAEAAEIIANDRESHQRDLYEAIERGDFPKWTLFVQIMPEADAEKVPYHPFDLTKVWPKKDYPLIEVGEFELNRNPENFFADVEQSAFAPSNLVPGIGASPDRMLQARLFNYADAQRYRLGVNYRQIPVNRPRCPVHSNQRDGQGRVDGNYGSLPHYEPNSFSQWQQQPDFAEPPLRINGDAAHWDYRNDDNDYFSQPRALFNLMNAEQKQSLFNNTAAAMGDAPDFIKYRHIRNCHWCDAAYGEGVAKALGLTVEDALKARDTDPALGQGGLL

SEQ ID NO: 4838 - protein, 164 aa, Cleisostoma racemiferum
IENKINRQVTFAKRRNGLLKKAYELSVLCDAEVALIIFSNRGKLYEFCSSTSMLKTLEKYQKCNFGSPESTIISRETQSSQQEYLKLKSRVEALQRSQRNLLGEDLGPLGSKELEQLERQLDSSLKQIRSTRTQFMLDQLADLQRREHMLCEANKALKRRFEES

SEQ ID NO: 4839 - protein, 212 aa, Medicago sativa
MGRGKIEIKRIENSSNRQVTYSKRKSGILKKANEINVLCDAQVSTIIFAPSGKMHEYISPSTTLIDMLERYQKASGKRLWDAKHENLRNEIEKLKKENEDMEIKLRHLKGKDINTLNYKKLMSLEDVLENGLLTIRDKQMEVYQMVTRNDKILEEENRELNFILQQQHMAVEGGREMDYNDEFDESSGSDFNSQMPFSFRLQPMQLHSLLQL

SEQ ID NO: 4840 - protein, 108 aa, Triticum aestivum
MEHGSVADSSASTFSVMEEDHTLANSVRFVLNQDPRVAFCGYSIPHPADNKVNIRVQTTGDQAKDVMKDALQDLMVMGQHVRGTFDKAVADFKSKMPAEQMDVDLNQQ

SEQ ID NO: 4841 - protein, 421 aa, Methanopyrus kandleri AV19
MGVTLMKVERPKGTRDFTPEEMRARRWLERYLLDVFRSYGYEEVLTPTFEHAKLFEEKSGEEILEEMYVFKDKKGRKLALRPEMTAPVVRFYNAELKTRPHPLKLAYIVNCFRYEQPQRGRWREFWQAGVEVFGSDRPEADVEVIELTYRIFDGILPSGAFEVRVGHLGILRGLLEEYGIGEDVQNKVAHLVDKGELDEVKTLLPAEPAEKALAVVTARSESEVEEAVSGKERAERALENLMEISDALREAGVDHELDFSVARGLDYYTGMVFEIHVPELGGGSQCAGGGRYDDLVKELGGPDVPAVGMAIGFDRLLLAAELYDRIPDGVEETRALLIPLVRSGKIWEIAAKLRKLGWVVNVEVSGKHIRKALSLADSLEYDYAVIVGERELKEGYVSVKNLKTGVQEEVPLDQLERAAEV

SEQ ID NO: 4842 - protein, 1000 aa, Euglena gracilis
KAKAKGVEIVLPVDFVTSSKFGEDGEIGTATLESGIPDGMLGLDCGPKTNALNAATIQASKTIIWNGPMGVFEMKKFEQGTKQMMDEIVKVTQQGATTVIGGGDTATACKVYGTEDKVTHVSTGGGASLELLEGKVLPGIAALTDASVAMMAVTGETSLNKLQLKDADVKGKRVFIRVDFNVPFDKKDPTKITNLARVQGALPTIQYCLENGAKSVVLASHLGRPDGKMPEKYSLAPVARALEGLISRPVTFLKDCVGPEVEAACDPAPGSVILLENVRFYAEEEGKGLDAEGNKVKASPEAVAAFPKSLAKVADVYVNDAFGTAHRAHSSMVGEGLPREASGFLVAKELDAFAKVLNNPVRPVLAILGGAKVSDKILLIENLLDKVDKMIIGGGMAFTFQKVLNNMAIGSSLYDEAGAKIVPEIMAKAKAKGVEIVLPVDFVTSSKFGEDGEIGTATLESGIPDGMLGLDCGPKTNALNAATIQASKTIIWNGPMGVFEMKKFEQGTKQMMDEIVKVTQQGATTVIGGGDTATACKVYGTEDKVTHVSTGGGASLELLEGKVLPGIAALTDASVAMMAVTGETSLNKLQLKDADVKGKRVFIRVDFNVPFDKKDPTKITNLARVQGALPTIQYCLENGAKSVVLASHLGRPDGKMPEKYSLAPVARALEGLISRPVTFLKDCVGPEVEAACDPAPGSVILLENVRFYAEEEGKGLDAEGNKVKASPEAVAAFPKSLAKVADVYVNDAFGTAHRAHSSMVGEGLPREASGFLVAKELDAFAKVLNNPVRPVLAILGGAKVSDKILLIENLLDKVDKMIIGGGMAFTFQKVLNNMAIGSSLYDEAGAKIVPEIMAKAKAKGVEIVLPVDFVTSSKFGEDGEIGTATLESGIPDGMLGLDCGPKTNALNAATIQASKTIIWNGPMGVFEMKKFEQGTKQMMDEIVKVTQQGATTVIGGGDTATACKVYGTEDKVTHVSTGGGASLELLEGKVLPGIAALTNA

SEQ ID NO: 4843 - protein, 450 aa, Xanthomonas campestris pv. campestris str. ATCC 33913
MHDHPSSDAAHAMQTPAAMEAFWMPFTANRQFKARPRLLASAAGMYYRDVEGRQILDGTAGLWCCNAGHARERIVAAIRAQAGTLDFAPTFQMGSPLPFALAERLAALAPPGLGHVFFTNSGSEAVDSAMKIVLAYHRLRGEGQRTRFIGREKAYHGVGFGGMSIGGLPNNRKWFGPLLAGTDHLRHTLDLQRNAYSRGLPAFGVELADDLERLITLHDASTIAAVFVEPVSGSAGVILPPEGYLQRLRAICDRHGIVLVFDEVITGFGRVGEAFAAQRFGVTPDLITAAKGLTSGTVPMGAVLVADAIHDAFMHGPQAAIELFHGYTYSGHPLACAAALATLDTYAEEQLFTRAITLGPQWEEALHSLRGLPHVIDIRNIGLIGAIELAPREGAPGARGYEVFERCFHEGGLLVRVTGDVIALSPPLIVTPDQIGQMVETLAAILRKVD

SEQ ID NO: 4844 - protein, 485 aa, Nicotiana plumbaginifolia
PSSAFNSPFCTTNSGAPVFNNNSSLTVGARGPVLLEDYHLVEKLANFDRERVPERVVHARGASAKGFFEVTHDITHLTCADFLRAPGVQTPVIVRFSTVIHERGSPETLRDPRGFAVKFYTREGNFDLVGNNFPVFFIRDGMKFPDMVHALKPNPKSHIQENWRVLDFFSHVPESLHMFTFLFDDIGIPQDYRHMDGSGVHTFTLINKAGKSTYVKFHWKPTCGVKSLLEDEAARVGGANHSHATQDLYDSIAAGNYPEWKLFIQTMDPDHEDRFDFDPLDVTKTWPEDILPLQPVGRLVLNKNIDNFSNENEQLAFCPSIVVPGVYYSDDKMLQTRIFSYSDTQRYRLGPNYLQLPANAPKCAHHNNHYDGSMNFMHRDEEIDYFPSRYDPVRHAEKYPIPSTMCTGKREKCVIQKENNFKQPGERYRSFTPDRQERFIRRWVETLSDPRITYEIRSIWISYWSQADKSLGQKLASRLNVRPSI

SEQ ID NO: 4845 - protein, 519 aa, Thermosynechococcus elongatus BP-1
MSNKIEAIKKEKDGLAVKQELEKFAAMGWENIPEADRDVRLKWLGIFFRPVTPGRFMMRLRVPNGILTSQQLRTLGAIVDRYGENGNGDITTRQNIQIRGLPIEDIPEIIEQLQACGITSVQSGMDNVRNLTGSPVAGIDAAELIDTRPLIMKLQAMITNNGQGNPEFSNLPRKFNIAIEGGRDNSVHAEINDVAFVPAYRQGRLGFNVLVGGFFSARRCAAAIPLDAWVPPDDAVVQLSRAILEIFRDHGPRGNRQKARLRWLIDEWGIEKFRAAVVAKLPFELLSAAAKDEIDWDKRDHLGVHRQKQRRLNYVGLHVPVGRLYATDFYELARLAQVYGQSEVRLTVEQNVIIPHVPDAVLPSLLREPLLSKFRPEPPPLERALVSCTGAEFCNFALIETKNRALALARWLDQQLVLPQPVRIHWTGCPNSCGQPQVADIGLMGTKTRRNGETVDAVDLYMGGKVGKDAKLGTCVKKAIPCDELPEVLRQVLIEQFGAQPRGSERPPVATPAVAMMVS

SEQ ID NO: 4846 - protein, 492 aa, Nicotiana plumbaginifolia
MDPSKFRPSSAYDSPFLTTNAGGPVYNNVSSLTVGPRGPVLLEDYHLIEKLATFDRERIPERVVHARGASAKGFFEVTHDISHLTCADFLRAPGVQTPVIVRFSTVVHERGSPESLRDIRGFAVKFYTREGNFDLVGNNVPVFFNRDAKSFPDTIRALKPNPKSHIQEYWRILDFFSFLPESLHTFAWFFDDVCLPINYRHMEGYGVHAYQLINKAGKAHYVKFHWKPTCGVKCMTEEEAIRVGGTNHSHATKDLYDSIAVGNYPEWKLSIHIMDPEDVERFDFDPLDVTKIWPEDILPLMPVGRLVLNRNIDNFFAENEQLAFNPGHIVPGLYYSEDKLLQTRIFAYADTQRHRIGPNYMQLPVNAPKCAHHNNHRDGAMNFMHRDEEVDYLPSRFDPCRHAEQYPIPSRVLNGRREMCVIEKENNFKQAGERYRSWEPDRQDRYVSKWVEHLSDPRVTYEIRSIWISYLSQADKSCGQKVASRLTLKPTM

SEQ ID NO: 4847 - protein, 492 aa, Nicotiana plumbaginifolia
MDPYKYRPSSANNSPFWTTNSGAPVWNNNSSMTVGTRGPILLEDYHLVEKLANFDRERIPERVVHARGASAKGFFEVTHDITHLTCADFLRAPGVQTPVIVRFSTVIHERGSPETLRDPRGFAVKFYTREGNFDLVGNNFPVFFVRDGMKFPDMVHALKPNPKSHIQENWRILDFFSHHPESLHMFSFLFDDLGVPQDYRHMEGSGVNTYMLINKAGKAHYVKFHWKPTCGVKCLLEEEAIKVGGANHSHATKDLYDSIAAGNYPEWKLFIQIIDPDHEDRFDFDPLDVTKTWPEDILPLQPVGRLVLNKNIDNFFAENEQLAFWPAIVVPGVYCSDDKLLQTRIFSYSDAQRHRLGPNYLQLPVNAPKCAHHNNHHEGFMNFMHRDEEVNYFPSRFDPCRHAEQYPIPPCVLTGKRDKCIIEKENNFKQPGERYRSWAPDRQERFICRWVDALSDPRVTHEIRSIWFSYWSQADKTLGQKIASRLNVRPTM

SEQ ID NO: 4848 - protein, 263 aa, Glycine max
QPHYSLRGNIPRVRPRVRALAANATPSLAFASSSLLNHNPQFGAAPKRFVSSSSSSLCLAAGLSSKARAFSFSASAAALDGEELAVEETWKLARPTEVYVCNLPRSCDTEQLLHMFNPHGTVLSAQVCRSAETGESRGSAYVTMASINSARKAIAALDASDFGGREVRVRFSAEMNPKRRNLETMNSSPKRVIYYEGPHKLYVGNLSRSAGPQDLKQLFGRFGIVASVRVLQDLRKGNRRVYAFVSYHSESERDAAMSLNGTV

SEQ ID NO: 4849 - protein, 293 aa, Pseudomonas aeruginosa PAO1
MKRKGIILAGGSGTRLHPATLAISKQLLPVYDKPMIYYPLSTLMLAGIREILIISTPQDTPRFQQLLGDGSNWGLDLQYAVQPSPDGLAQAFLIGESFIGNDLSALVLGDNLYYGHDFHELLGSASQRQTGASVFAYHVLDPERYGVVEFDQGGKAISLEEKPLEPKSNYAVTGLYFYDQQVVDIARDLKPSPRGELEITDVNRAYLERGQLSVEIMGRGYAWLDTGTHDSLLEAGQFIATLENRQGLKVACPEEIAYRQKWIDAAQLEKLAAPLAKNGYGQYLKRLLTETVY

SEQ ID NO: 4850 - protein, 736 aa, Thermosynechococcus elongatus BP-1
MGTPQISALAVQSGPYLHHNHNTSERMQPTETVSSLCPYCGVGCGLEAVPQGKGTYKIRGDRQHPSSQGMVCVKGATILEAIDRDRLAYPLWRERLDHPFTVISWDEALTRLVERIQWVRHEQGADAICMYGSGQFHTEDYYVAQKLMKGCLGTNNFDANSRLCMSSAVSAYMASFGADGPPCCYDDLEATDCAFLIGTNTAECHPIVFNRLRNHHKRDRRVKLIVVDPRRTPTAEVADLHLAIRPGTDIDLLHGIGYLLLQWGHIDVDFIEKCTEGFADYVKLLAAYTPEWVAQRCGIPESDLEQAARYWGHAQAVLSLWSMGINQSAEGTAKARCLINLHLLTGQIGRPGSGPFSLTGQPNAMGGREAGGLSHLLPGYRQVTNPQHRQEVEDFWGLPRGQISDRPGRTAWQIIEGLEQGEVGLLWIAATNPAVSFPHLERTKAAFLKSPFTVYQDAYFPTETAAYAHLILPAAQWSEKTGVMTNSERRVTLAPAFRVPPGLARSDWEIFAEVGRRLGYGHLFSFADAAAVYAEFVQLTAGRPCDQSGLSHERLARLGALQWPCPASMDDEEARKPKRLYTDWRFHTPNQRAYFCLAHSQGVAEPTDHIYNFTLTTGRLYGHWHTQTRTGRIAKIQKMHPNPFVEMHPEDAANLHLQDGDWVEVRSRRGQVCLPVTLTKAIRPGTLFVPMHWGFLFADSGEVNQLTHPIACPVSKQPELKACAVQVLPLKLQQTS

SEQ ID NO: 4851 - protein, 299 aa, Zea mays
MMRETYMDVLPPVDHIAARSNWFPAAARLWTAAENKQFERALAGLDLCRPDWEEVARAIPGRTVREVVSHFKHLEVDVQQIESGQVPLPAYGGGASSFTLQWDGYGPGPGDFRHGYRFAGGCGRRHHGRTPEQERKKGVPWTEEEHRLFLLGLKKYGKGDWRNISRNFVQTRTPTQVASHAQKYFIRLNSGGKDKRRSSIHDITTVNLTDDQPPSPSQSSLITSQSNAPAPSPAPAPAAGICQVPLAADVKRHGAGTLPFSSPNRTSAVPAYRMEFHDQQGLQCGPLHDQLLASQSVLF

SEQ ID NO: 4852 - protein, 452 aa, Zea mays
  unsure (1)..(452): unsure at all Xaa locations
MASALLAGQGGARHHGWGETRAPLAPIPPNPNPSQPHPRADGVQVQAAGGSLLAGGRIRDVPPGRPWARARGRGLRDRLAGELTQVRALLSRIDTWQQQGPPPAGLRGEVRKRCGQILTRLRKDKRSVWFNAPVEVERLGLHDYHAVIKRPMDLGTVKEGLAAGRYASHDDFAADVRLTFTNALRYNPVGHEVHTFAGALLAYFERMYKEALAXFEEDCKRPEPPRPVPPELTPPPAAEPVEAKVKPRAGNVRMRKPKAREPNKREMSLEEKNMLRVGLVSLPEEKMHNVLQIVRKRNNNPEMLGDEIELDIDEMDVETQWELDRFVTNFNKALKKSQRAAMMNGGVADVTSTAVAEDDTAPVGNVPTLVDNDDVEREKPVRSATMAEQVDEYVDIGDEMPTATYQSMEIEKDAEGATGSRGSGSGSSSSSGSESRSSGDSASGAGNAHSLA

SEQ ID NO: 4853 - protein, 405 aa, Actinobacillus pleuropneumoniae serovar 1 str. 4074
MERFPKSDKLANVRYDIRGAIHKEALRLEEEGNKILKLNIGNPAPFGFEAPDEIVVDVIRNLPKSQGYCDSKGLYSARKAIVQYYQSKGIRNVDVNDVYIGNGVSELITMSMQALLNDGDEMLIPMPDYPLWTAAATLAGGKAVHYLCDENNEWMPDIEDIKAKITPRTKGILVINPNNPTGAVYSRSMLLEIAEIARQHNLMIFADEIYEKIIYDGAVHHHIAALAPDLLCVTYNGLSKAYRVAGFRQGWMVLSGPKNQARGFIEGLDMLASMRLCATTPMQHAIQTALGGYQSINEFVLPGGRLLEQRNKMYELLVQIPGISCVKAKGALYMFPKIDTEMYGIKDDAKFIYDLLQAERVLLVQGSGFNWHKPDHFRVVTLPYAHQIEEALGRLANFLKTYKQS

SEQ ID NO: 4854 - protein, 490 aa, Nitrosomonas europaea ATCC 19718
MDNLFDVAVIGAGPGGYVAAIRCAQLGLNTVCIDDWKNEQGKPSLGGTCLNVGCIPSKALLESSENFERAGHKFAEHGIKVDGLSIDVPAMIARKNKIVKAFTGGIGMLFKKNKVTALHGRGTLQKHDQARDGGDDSWEIQVSADGKEQSVHARHVIIATGSTPRTLKVAPVDGNNVLDNAGALALQQTPGKLAIIGAGVIGLELGSVWRRLGAEVTLLEAQADFLPAADEQVAKEAYKALTRETGLTIHTGVEIKSTRASENGVEIDYVDRDKNAQNLKVDKLIVAVGRVPNTSGLGAEAAGLKLDERGYISVDEFCQTSLQNVYAIGDVVRGPMLAHKASEEGVAVAERIASGRQGATDSSGHVDLGMMPWVIYTAPEIAWVGKTEQTLKAEGVAYKAGQFPFMANGRARALGETTGFVKILADAESDRILGVHMVGPYVSEMIAEAVVAMEFSASSEDLARIVHAHPSLSESLHEAALGVDKRAIHI

SEQ ID NO: 4855 - protein, 216 aa, Triticum aestivum
  unsure (1)..(216): unsure at all Xaa locations
HEGDARRERPHQTRRARPRLRRGRRGDAMRRARPPPGPGLEGEEVRYRGVRRRPSGRYAAEIRDPAKKTPIWLGTFXDSAEAAARAYDAAARNLRGAAARTNFPASPAAAPPRAAPPAPVAAPAAMAAAATSSHSSTIESWSGGNVPPTSVLFRAAAAAIGAPAVEEDCRSYCGSSSSAVCEDGASGGAAAAADEAAAPPRPSSSSLPFDLNLPDP

SEQ ID NO: 4856 - protein, 403 aa, Brucella suis 1330
MTDATTVHPLYDTYNRAALRFERGEGIWLITEDGERYIDFAAGIAVNSLGHSHPHLVETLKTQAEKLWHLSNVYEIPAQEKLGRRLVESTFADKVFFTNSGAEALECAIKTARRYQYVSGHPERFRIITFEGAFHGRTLATIAAGGQAKYLEGFGPKVEGFDQVPFGDEAALRAAITPETAGILLEPIQGEGGLRAFPEEFLRLVRQICDENGLLLLLDEVQTGVGRTGKLFAHEWAGIRPDIMAIAKGIGGGFPIGACLATAEAAKGMTAGMHGTTYGGNPLGMAVGNAVLDVVLADGFMENVQATALVMKQGLASLVDRYPNVVSEIRGRGLLMGLKCVVPNTSLIQALRDEHILSVGAGDNVVRLLPPLITTPEEAREALKHIETAVERLSIANPISKTV

SEQ ID NO: 4857 - protein, 414 aa, Euglena gracilis
MPGSALGPKLSIDDLDIKDKNVLVRVDFNVPMKDGKILDDFRMRSALPTLEKVINSGGKLIIMSHMGRPAETGYEAKYSLKPIADHLGTLLGKPVTFAADCMDAAAEVAKLTPGDVLVLENLRFYPHEGSKDKDQRLEMAKKLASYADLYVSDAFGTAHRDAASMTGVPEVMGQGASGYLMKKEIDYFSKALKEPEKPVVAIVGGAKVSDKIQLLENMLKTVNQMVIGGAMAYTFLKAQGKSTGKSKCETEAETKKGKIDIVELAGKLLSKAKEQGVEIYLPVDHRCSAEFKDVEPVITSDENIPDDLMALDIGPKTEELYCSVDFAKAKTAIWNGPMGVFELEHFKPGTWAVARPLADHSDSCCSIVGGGDSERREKSGYAPKLSHISTGGGASLELLEGKVLPGLAILTDKP

SEQ ID NO: 4858 - protein, 395 aa, Chlamydophila pneumoniae J138
MSFFNHIPTFSPDAILGLQNVFFADKRPEKVNLVIGVYEHPQKRYGGLSCIRKAQTVILEEEQNKSYLPISGLQIFLDEMRELVFGAVDPSAIVGFQSLGGTGALHLGARLLSVAKGSGKVYVPEQTWSNHIRIFSQEGLEVIRYPYYSKEQKQLLFEPLIAFLKEVEKNSVILLHGCCHNPTGVDFTEDMWKELAILMKERELIPFFDTAYQGFAHGIELDRKPIEIFISEGNTVLVAASSSKNFALYGERVGYFAVHSTFTDELVKIHSFLEEKIRGEYSSPQRWGVEIVSTILSNPYLKEEWQSELNFIRESLGKMRTRFVQALRKVAGHTFDFLLSQHGFFAYPGFSDKQVLFLREQHAVYTTAGGRMNLNGITEKNIDHVVQSFIQAYEL

SEQ ID NO: 4859 - protein, 488 aa, Mycobacterium tuberculosis CDC1551
MADPGGFLKYTHRKLPKRRPVPLRLRDWREVYEEFDNESLRQQATRCMDCGIPFCHNGCPLGNLIPEWNDLVRRGRWRDAIERLHATNNFPDFTGRLCPAPCEPACVLGINQDPVTIKQIELEIIDKAFDEGWVQPRPPRKLTGQTVAVVGSGPAGLAAAQQLTRAGHTVTVFEREDRIGGLLRYGIPEFKMEKRHLDRRLDQMRSEGTEFRPGVNVGVDISAEKLRADFDAVVLAGGATAWRELPIPGRELEGVHQAMEFLPWANRVQEGDDVLDEDGQPPITAKGKKVVIIGGGDTGADCLGTVHRQGAIAVHQFEIMPRPPDARAESTPWPTYPLMYRVSAAHEEGGERVFSVNTEAFVGTDGRVSALRAHEVTMLDGKFVKVEGSDFELEADLVLLAMGFVGPERAGLLTDLGVKFTERGNVARGDDFDTSVPGVFVAGDMGRGQSLIVWAIAEGRAAAAAVDRYLMGSSALPAPVKPTAAPLQ

SEQ ID NO: 4860 - protein, 179 aa, Chrysanthemum x morifolium
MASISSSAVATVNRTTSAQASMVAPFTGLKSNVAFPVTKKSNDFSSLPSNGGRVQCMKVWPPLGLKKYETLSYLPPLTETQLAKEVEYLLRNKWVPCLEFELEHGFPYRENNRSPGYYDGRYWTMWKLPMFGCNDASQVLKELNECKKEYPQSWVRIIGFDNVRQVQCISFIAHKPDGY

SEQ ID NO: 4861 - protein, 327 aa, Chlamydophila pneumoniae J138
MSNQFDQLKKLSTIVCDSGDPELVKASGSQDATTNPSLILKVAQEPKFQELLNEAVVWGIRQNGDDLQTLSFILDKIQVNFALEIIKNIPGRISLEIDARLSFNVEAMVQRAVFLSQLFEAMGGDKKRLLVKIPGTWEGIRAVEFLEAKGIACNVTLIFNLVQAIAAAKAKATLISPFVGRIYDWWIAAYGDEGYSIDADPGVASVSNIYAYYKKFGIPTQIMAASFRTKEQVLALAGCDLLTISPKLLDELKKSQHPVKKELDPAEAKKLDVQPIELTESFFRFLMNEDAMATEKLAEGIRIFAGDTQILETAITEFIKQIAAEGA

SEQ ID NO: 4862 - protein, 438 aa, Rubrobacter xylanophilus DSM 9941
MLRAARIRTEIPGPRSRALTERRRRAISAGLGTALPIWVAEAHGALVTDVDGNTFIDFGGGIGVLNAGHTHPRVVEAVREQVGRLTHACYYVSQYEPYLELAEKLNELVPGNFEKRSIFVNSGAEAVENAIKISRSYTRRPAILAFENAFHGRTMLGMSLTGKADPYRRGFGPFVPEVYRVPAPYAYRMPKEESWFDAFRRSLVSVDVSSVAAVIVEPVLGEGGFIPFPPEDLRRLREWCTENGAVMVVDEVQTGFGRTGKMFAIEHSGVEPDIVTTAKSLGGGMPIAGVTGRAEIMDSVHAGGLGTTYGGNPAACAAALAVIRAFEEENLLERSVRVGERVMEELRAIQRRHPDFVGDVRGLGAMAAMELVTDARSKTPDPARTKGVVEHALQEGLMLLTAGAYGNVIRTLMPLVITDSELEEGLSILSRAVDAAAA

SEQ ID NO: 4863 - protein, 154 aa, Triticum aestivum
  unsure (1)..(154): unsure at all Xaa locations
VSDKIKLIDNLLGKVDSLIICGGMAFTFKKTLENVNIGDSLFDKAGSETVGALVEKAKKNKVKIVLPVDYITADKFAKDAKTATATDEEGIPXGWMGLDCGKKSIELYKAAIGEASTILWNGPPGXVFEFDAFANGTKETPICSGRPAQQRKCD

SEQ ID NO: 4864 - protein, 494 aa, Rubrobacter xylanophilus DSM 9941
MNVEREGRVETRMIERLFVGGEWVGEASTGRTFEVENPASGRVIAVLPDGGGGEMRRAVEAAVAAQPGWEEATAYERASVLWRAAGLMRERAEHLARVMTLEQGKPLAESRGEISYAASFVEWFAEEGKRVYGESVPSSFRDKRILVLKRPVGVAAAITPWNFPAAMITRKLAPALAAGCAMVVKPSELTPLSALELAKIFEEAGLPRGLLSVVVGTDPGDITAPLMEDGRVRKLSFTGSTEVGKHLMRQAAKTMKRLSLELGGHAPFIVFEDADLEAAVEGALVSKMRNMGQTCVCANRIFVQKSVLEPFAERLVERMGRMKVGDGLQEGVSVGPLIEERALRKVERHVEDARQKGARVLLGGSRLSSGGGYFFAPTVLCGADESMLVFREETFGPVAALASFESEQEVVERANATPYGLAGYYYTRDVGRVMRLAEKLRYGILGANDGLPSTAQAPFGGLKESGFGREGGHWGIEEYLDVKYLSLGGLGSSS

SEQ ID NO: 4865 - protein, 505 aa, Glycine max
MASLSCSANDLAPLFNDTAAANYLCAQFDSISRKLNVTTYAVDNTYLLFSAYLVFAMQLGFAMLCAGSVRAKNTMNIMLTNVLDAAAGGLSYYLFGFAFAFGGPSNGFIGRHFFGLRKFPKDSPPSGDYSFFLYHWAFAIAAAGITSGSIAERTQFVAYLIYSSFLTGFVYPIVSHWFWSSDGWASATRSHGNVLFGSGVIDFAGSGVVHMVGGIAGLWGALIEGPRIGRFDRSGRSVALRGHSASLVVLGTFLLWFGWYGFNPGSFLTIAKGYESGGYYGQWSAIGRTAVTTTLAGSTAALTTLFSKRLLAGHWNVIDVCNGLLGGFAAITSGCAVVEPWAAIVCGFVAAWVLIGLNKLAAKVEYDDPLEAAQLHGGCGAWGVFFTGLFAKKVYVEEIYGVGRPFGALMGGGGRLLAAQVIQILVVCGWVTATMAPLFYGLHKMKLLRISRDDETAGMDLTRHGGFAYAYHDDEDGSSRGVGFMLRRIEPAASTTPSPPAAPQV

SEQ ID NO: 4866 - protein, 161 aa, Antirrhinum majus
LKTKKITLRSSDGEVFEVEESLALESQTIKHMIEDDCADNVIPLPNVTGKILSKVIEYCKRHVDAAAAKADDKLASTGTSDDELKAFDADFVKVDQATLFDLILAANYLNIKTLLDLTCQTVADMIKGKTPEEIRKTFNIKNDFTPEEEEEVRRENQWAFE

SEQ ID NO: 4867 - protein, 326 aa, Lycopersicon esculentum
LGANAILAVSLAVCKAGAAVKKIPLYKHIANLAGNKKLVLPVPAFNVINGGSHAGNKLAMQEFMILPVGASSFKEAMKMGCEVYHHLKAVIKKKYGQDATNVGDEGGFAPNIQENKEGLELLKTAIEKAGYTGKVVIGMDVAASEFYGKDKTYDLNFKEENNNGSQKISGDQLKDLYKSFVSEYPIVSIEDPFDQDDWETYAKLTAEIGQKVQIVGDDLLVTNPKRVAKAISEKTCNALLLKVNQIGSVTESIEAVKMSKQAGWGVMTSHRSGETEDTFIADLAVGLSTGQIKTGAPCRSERLAKYNQLLRIEEELGSDAVYAGAS

SEQ ID NO: 4868 - protein, 308 aa, Neisseria meningitidis Z2491
MSFAFFFPGQGSQSLGMMNGFAEHAIVKNTFAEASAILGQDLWAMINGSDAEIIGQTVNTQPIMLAAGVAVYRAYSEAGGKTPAAVAGHSLGEYTALVAAGALDFADAVKLVRLRAELMQSAVPQGVGAMAAILGLEDEQVKQICAESAQDEVVEAVNFNSPGQVVIAGNAAAVERAMLAAKEAGAKRALPLPVSVPSHCSLMKPAADKLAEALKTVEIKQPQIRVIHNADVAAYDDADKIKDALVRQLYSPVRWTETVNALVSDGIAESAECGPGKVLAGLAKRINKAAACSALTDAGQVAAFIEAH

SEQ ID NO: 4869 - protein, 312 aa, Bradyrhizobium japonicum USDA 110
MTLAILCSGQGGQHRDMFALTGGAPEAADLFAHAATLLGGSDPRDFVRGEPDEALHRNRTGQILCTLQPLAAARALADVIPRGVIIAGYSVGEVAAWGVGGVLDATATLDLVARRAEAMDAATRAGDGLIFVRGLSREEVGRLCERHGAAIAIVNPGDAFVIGGGREALGGIADDARAMHGARIVALPVEVASHTKRLAAASAAFRETLRLAPAVFPPRTGARILSGIDAAPVVSLESGRDKLAAQISQTVQWADCLQACVEAGATGFLELGPRHALSSMVAEIGAGLPARSLDDFRSLQGVRAWAARHLND

SEQ ID NO: 4870 - protein, 433 aa, Glycine max
  unsure (1)..(433): unsure at all Xaa locations
FFFRFSIFYSMGIGGSALDHICCRSMAPDNPPLKIRFVDNTDPAGVDHQIAQLGXELASTLVIVISKSGGTPETRNGLWEVQKAFREAGLDLPKQGVAITQENSLLDNTARIEGWLARLPMFDWVGGRTSEMSAVGLLPAALQGIDIREMLAGASLMDEANRSTVLRNNPAALLALCWYWATDGVGSKDMVILPYKDSLLLFSRYLQQLVMESLGKEFDLDGNRVNQGISVYGNKGSTDQHAYIQQLREGVHNFFVTFIEVLRDRPPGHDWELEPGVTCGDYLFGMLQGTRSALYANNRESITVTVQEVTPRTVGALIGLYERAVGIYASLVNINAYHQPGVEAGKKAAGEVLALQKRVLAVLNEASCKEPVEPLTLEEIADRCHAPEDIEMIYKITAHMAANDRALIAEGSCGSPRSIKVFLGECNIDELYA

SEQ ID NO: 4871 - protein, 236 aa, Zea mays
MTVPDAESRFHVLAVDDSLVDRKLIEMLLKTSSYQVTTVDSGSKALELLGLRDASSPSPSSPDHQEIDVNLIITDYCMPGMTGYDLLKRVKGSSSLKDIPVVIMSSENVPARISRCLQDGAEEFFLKPVKLADMKKLKSHLLKRKQPKEAQAQQGQAVELEPEQQLDPRAQPAHDAEETAAEPPPAASNGTADGGNKRKAAAMEEEGMLAVMTVAAPESSTKPRLSTTSNSLAVET

SEQ ID NO: 4872 - protein, 203 aa, Triticum aestivum
  unsure (1)..(203): unsure at all Xaa locations
HNKITSKFRALKFLLVVGDCMLVGLQPILVFMSKVDGKFQFSPISVNFLTEVAKVIFAIVMLIIQSRKQKVGEKPLLARSTLIQAARNNVLLAVPALLYAINNYLKFIMQLYFNPSTVKMLSNLKVLVIAVLLKFIMRRRFSVIQWEALALLLIGISINQLRTAPAGDTAFGLPITAIAYIYTLIXVTVPSLASVYNEYAMKS

SEQ ID NO: 4873 - protein, 165 aa, Antirrhinum majus
SSSDNASKKITLRSSDGEVFEVDEAIALLSQTIKHMIEDDCADNVIPLPNVTGKILSKVIEYCKRHVDADAAKSEEKVAAAAAGDDDLKAFDADFVKVDQATLFDLILAANYLNIKTLLDLTCQTVADMIKGKTPEEIRKTFNIKNDFTPEEEEEVRRENQWAFE

SEQ ID NO: 4874 - protein, 491 aa, Mycobacterium bovis AF2122/97
MSNVMVVPGMLSAAAADVASIGAALSAANGAAAPTTAGVLAAGADEVSAAIASLFSGYARDYQALSAQMARFHQQFVQALTASVGSYAAAEAANASPLQALEQQVLAAINAPTQTLLGRPLIGNGADGLPGQNGGAGGLLWGNGGNGGAGDAAHPNGGNGGDAGMFGNGGAGGAGYSPAAGTGAAGGAGGAGGAGGWLSGNGGAGGNGGTGASGADGGGGLPPVPASPGGNGGGGGAGGAAGMFGTGGAGGTGGDGGAGGAGDSPNSGANGARGGDGGNGAAGGAGGRLFGNGGAGGNGGTAGQGGDGGTALGAGGIGGDGGTGGAGGTGGTAGIGGSSAGAGGAGGDGGAGGNGGGSSMIGGKGGTGGNGGVGGTGGASALTIGNGSSAGAGGAGGAGGTGGTGGYIESLDGKGQAGNGGNGGNGAAGGAGGGGTGAGGNGGAGGNGGDGGPSQGGGNPGFGGDGGTGGPGGVGVPDGIGGANGAQGKHG

SEQ ID NO: 4875 - protein, 119 aa, Antirrhinum majus
TIIPVPNVTSKILAKVIEYCKRHVEAAAKTDADDGQGDRDALKVFDAEFVKVDQGTLFDLILAANYLNIKSLLDLTCQTVADMIKGKTPEEIRKTFNIKNDFTPDEEEEVRRENAWAFE

SEQ ID NO: 4876 - protein, 295 aa, Arabidopsis thaliana
MYSAIRSLPLDGGHVGGDYHGPLDGTNLPGDACLVLTTDPKPRLRWTTELHERFVDAVTQLGGPDKATPKTIMRTMGVKGLTLYHLKSHLQKFRLGRQAGKESTENSKDASCVGESQDTGSSSTSSMRMAQQEQNEGYQVTEALRAQMEVQRRLHDQLEVQRRLQLRIEAQGKYLQSILEKACKAFDEQAATFAGLEAAREELSELAIKVSNSSQGTSVPYFDATKMMMMPSLSELAVAIDNKNNITTNCSVESSLTSITHGSSISAASMKKRQRGDNLGVGYESGWIMPSSTIG

SEQ ID NO: 4877 - protein, 448 aa, Streptomyces coelicolor A3(2)
MAPAITLAAETELSAANTGFMLICSALVMLMTPALAFFYGGMVRVKSTLNMLMMSFISLGIVTVLWVLYGFSMAFGTDSGSVVGWNSDWVGLSDIGLTELWDGYTIPVFVFLVFQLMFAVLTPALISGALADRVKFTAWALFIALWATIVYFPVAHWVWGAGGWAFELGVIDFAGGTAVHINAGAAALGVILVIGKRVGFKKDPMRPHSLPLVMLGAGLLWFGWFGFNAGSWLGNDDGVGALMFVNTQVATGAAVLGWLAYEKIRHGAFTTLGAASGAVSGLVAITPAGGAVSPLGAIAVGLVAGVVCAMAVGLKYRFGYDDSLDVVGVHLVGGILGSLLIGFFASGKGQSDVEGLFYGGGLDQFWKQCAGVFGVLAYSLVVSAVLAFLLDKTIGMRVSEDVEVAGIDQAEHAETAYDFSGAGGGAARTTATPAASTAGSAPSKKVDA

SEQ ID NO: 4878 - protein, 338 aa, Chlorobium tepidum TLS
MVLERVVDLLHETQPLVLRELPVPEPGPGEILLRVATCGVCHTELDEIEGRTPPPRFPVIPGHQVIGRVVACGDGVAGIETGSRRGVAWIYSSCGHCDLCRSGNENLCAEFSATGRDADGGYAEYMVAPAAFTYSIPDVFSDAEAAPLLCGGAIGYRSLMLANLKDGQILGLTGFGASGHQVLKLARYLYPKSPVFVFARSEKDCDFARSLGADWAGGTTDNSPSPCDSIIDTTPAWLPVLSALERLRPGGRLVINAIRKESHDSELLAGISYERHLWMEKEIKSVANITRADVSAFLDIAARMGLKPEVRSYPLEEANRVLLDLRHGKARGAAVLIP

SEQ ID NO: 4879 - protein, 375 aa, Arabidopsis lyrata
MALSLQSPPCATLSASIQKGRWKTLAAGFSATPLPAVNFSIRRSIPRILASASSSSSPSSSSLEAGENNELNAVSAFSEIVPDTVVFDDFERFPPTAATVSSSLLLGICGLPDTIFRNAVDMALADSSCAGLETTESRLSCFFNKAIVNVGGDLVKLVPGRVSTEVDARLAYDTNGIIRKVHDLLRLYNEIDVPHDRLLFKIPATWQGIEAARLLESEGIQTHMTFVYSFAQAAAAAQAGASVIQIFVGRLRDWARNHSGDTEIESAIKSGEDPGLALVKRSYNYIHKYGYKSKLMAAAVRNKQDLFSLLGVDYVIAPLKVLQSLKDSPAIPGDEKYSFVRKLTPETATHYHFTNKELIKWDQLSLASAMGPASV

SEQ ID NO: 4880 - protein, 393 aa, Eremothecium gossypii
MGVLPTDKFATKAIHAGAHTDLHGSVIEPISLSTTFKQSSPGNPVGAYEYSRGQNPNRQNLEEAIAALESAKYGLAFSSGSATTAVIVQSLPQGSHAISIGDVYGGTHRYFTKVANAHGVETSFTNSLLEDLPKLVRDNTRLVWIESPTNPTLQVTDIQQVADTVKALNEDIILVVDNTFLSPYLSNPLNFGADIVIHSATKYINGHSDVVLGALATNSTSLYERLAFLQNAIGAIPSPFDAWLTHRGLKTLHLRVRQAAQSAQKIAEYLEQSEHVVSVNYPGLPSHRGYQIAQKQHRDGLGGGMISFRVKGGAQGAALLSQSTRLFTLAESLGGIESLLEVPAVMTHAGIPKEAREASGVYDDLVRVSVGIEDTDDLLEDIKQALSVVAESI

SEQ ID NO: 4881 - protein, 409 aa, Actinobacillus pleuropneumoniae serovar 1 str. 4074
MTIEILTPVLPESVADATVATWHKKVGDTVKRDEVLVEIETDKVVLEVPAPNDGVLAEISQEQGATVTSKQLLGKISTVQAGDFTQETIKQTNEATPADRKSAAIEYDHSDADSQGPAIRRLLAEHNIEAHLVKGTGVGGRITREDIEHYLAQRQVQETKQAMASEHNTVSTVAYSARSEKRVPMTRLRKRIAERLLEAKNTTAMLTTFNEVDMQPIMSLRKTYGEKFEKQHGVRLGFMSFYIKAVVEALKRYPEINASIDGDDVVYHNYFDISIAVSTPRGLVTPVIRNCDKLSMADIEKTIKALAEKGRDGKLTVEDLTGGNFTITNGGVFGSLMSTPIINPPQSAILGMHAIKDRPVAVNGQVVIRPMMYLALSYDHRLIDGRESVGFLVAVKDLLEDPTRLLLEI

SEQ ID NO: 4882 - protein, 291 aa, Wigglesworthia glossinidia endosymbiont of Glossina brevipalpis
MKIKNNFSKKENIMKIFKKITFIGSGKIAESMIIGLINSKYPSDCIFVCSPDEKSRSAISERYLVKNFKENLIGSNIGEIIVLAVKPNIIPIVCEEIKNLTNIENKLIISVAAGININSIKKYLNNKKALIARAMPNTPVLVREGVIGLYAKKDIRTIHEKTIEQIFNRIGKIFWLSQEKEINYIISASSSATAYFFLMMDAMKNTAENIGINKSYSREVILQTAKGAIVLAEHFSEISFNTLKKHITSKKGTTEAALNSFKKNNFRKIVEISMKAAVSRAKEISIDVDKV

SEQ ID NO: 4883 - protein, 827 aa, Actinobacillus pleuropneumoniae serovar 1 str. 4074
MELNRRDFMKANAAMAAAAAAGMTIPVKNVYAADDGIRWDKAPCRFCGTGCSVLVGTKDGRVVATQGDPDAEVNRGLNCIKGYFLSKIMYGADRVQTPLLRMKDGKFHKEGDFTPVSWDQAFTIMAEKVKDILKKKEPNSVGMFSSGQTTIFEGYAKVKLWKGGLRSNTIDPNARHCMASAAVAFMRTFGMDEPMGCYNDIEKTDAFVLWGSNMAEMHPILWSRISDRRLSDDKVKVVVMSTFEHRSFELADTPIIFKPHSDLAILNYIANYIIQNDKVNWDFVNKHTKFKRGETDIGYGLRPDHPRQKAAKNAKTAGKMYDSDFEEFKKIVEPYTLEKAHEISGVPKDQLETLAKMYADPKQTLVSFWTMGFNQHVRGVWVNHMVYNVHLLTGKISTPGCGPFSLTGQPSACGTAREVGTFVHRLPADMVVTNPKHVEIVEKAWKLPKGTIPTVPGYPAVMQSRMLKDGKLNFLWQLCTNNMQGGPNINEEIFPGWRNPENFIVVSDPYPSVSAVAADLILPTCMWVEKEGAYGNAERRTQFWRQQVKGPGESKSDLWQIVEFSKYFKTDEVWDEALLAQMPEYRGKTLYEVLYKNGQVDKFDTPTNIPGYINDEAEHFGYYLQKGLFEEYAAFGRGHGHDLADFDTYHQVRGLRWPVVDGKETLWRYREGFDPYVKAGEGVSFYGYPDKKAIILGVPYEEPAESPDEEYDLWLCTGRVLEHWHTGTMTRRVPELHRSFPNNLCWMHPDDAKARGLRHGDKVKLITRRGEIITHLDTRGRNKCPKGLIYTTFFDAGQLANKLTLDATDPISGETDYKKCAVKVVKA

SEQ ID NO: 4884 - protein, 312 aa, Haemophilus influenzae Rd KW20
MKKFAMVFPGQGSQTVGMLADLATEYPIVIETFKQASDALGYDLWYLVQQGPAEELNKTWQTQPALLAASVAIYRVWKEKFPQLKPEVMAGHSLGEYSALVCAGVLDFQDAIKLVELRGKLMQQAVPEGTGAMYAIIGLDNEAIINACKQAEEGEVVSAVNFNSPGQVVIAGAKAAVERAAALCKEAGAKRALPLAVSVPSHCALMKPAAEQLAVTLENIQINTPTISVLNNVDVKAETEGTEIRTALVRQLYSPVRWTETVEKMAQDGVLVLAEVGPGKVLNGLTKRIVGDLQAISVNDVASFNAVEEFLV

SEQ ID NO: 4885 - protein, 642 aa, Oryza sativa
  unsure (1)..(642): unsure at all Xaa locations
MSAAVGGAEFHGFRGGGGGAAQLQRSRMLGRPLRVATPHAAAPAGGGGSSSASIRAVSAPLKKDASEVKRSKVEIIKEKSNFLRYPLNEELVSEAPNINDSAVQLIKFHGSYQQTDRDVRGQKNYSFMLRTKNPCGKVPNQLYLAMDTLADEFGIGTLRLTTRQTFQLHGVLKKNLKTVISTVIKNMGSSLGACGDLNRNVLAPAAPYVRKDILFAQETAENIAALLTPQSGAYYDLWVDGEKIMSAEEPPEVTKARNDNTYGTNFPDSPEPIYGTQYLPRKFKIAVTVAGDNSVDILTNDIGVVVVSDSAGEPVGFNIYVGGGMGRTHRVETTFPRLADPLGYVPKEDILYAIKAIVVTQRENGRRDDRRYSRMKYLIDNWGIEKFRAEVEKYYGKKFEDSRPLPEWQFNSYLGWQEQGDGKLFYGVHVDNGRVAGQAKKTLREIIEKXYDLEGSLTPDQYLILFSXGRPVNLLIYTGLLLTFLTICNYAKXLQVNINCDVLYNLKMLXEKFKHRGVLPIIKRIREVFDKVGIKDHESVVVRITGCPNGCARPYMAEVGFVGDGPNSYQIWLGGTPNQSTLAETFMNKVKLQDIEKVLEPLFSYWNSTRQEGESFGSFTRRTGFDKLKEVVNKWAESASAA

SEQ ID NO: 4886 - protein, 472 aa, Escherichia coli
  unsure (1)..(472): unsure at all Xaa locations
MVTINTESALTPRSLRDTRRMNMFVSVAAAVAGLLFGLDIGVIAGALPFITDHFVLTSRLQEWVVSSMMLGAAIGALFNGWLSFRLGRKYSLMAGAILFVLGSIGSAFATSVEMLIAARVVLGIAVGIASYTAPLYLSEMASENVRGKMISMYQLMVTLGIVLAFLSDTAFSYSGNWRAMLGVLALPAVLLIILVVFLPNSPRWLAEKGRHIEAEEVLRMLRDTSEKAREELNEIRESLKLKQGGWALFKINRNVRRAVFLGMLLQAMQQFTGMNIIMYYAPRIFKMAGFTTTEQQMIATLVVGLTFMFATFIAVFTVDKAGRKPALKIGFSVMALGTLVLGYCLMQFDNGTASSGLSWLSVGMTMMCIAGYAMSAAPVVWILCSEIQPLKCRDFGITCSTTTNWVSNMIIGATFLTLLDSIGAAGTFWLYTALNIAFVGITFWLIPETXNVTLEHIERKLMAGEKLRNIGV

SEQ ID NO: 4887 - protein, 461 aa, Zea mays
MAPANVRAAQAQAQAPSADRRLSTLVGHLLPSSPRRAAADTSATSTLESFPTMASQGSSVFAALEQAPEDPILGVTVGYNKDPSPVKVNLGVGAYRTEEGKPLVLNVVRRAEQMLINNPSRVKEYLPITGLAEFNKLSAKLIFGADSPAIQENRVATVQCLSGTGSLRVGGEFLARHYHERTIYIPQPTWGNHPKVFTLSGLNVRSYRYYDPATCSLHFEGLLEDLGSAPSGSIVLLHACAHNPTGVDPTIEQWEQIRQLMRSKSLLPFFDSAYQGFASGSLDKDAQSVRMFVADGGELLMAQSYAKNMGLYGERVGALSIVCKSADVAVRVESQLKLVIRPMYSNPPLHGASIVATILRDSEMFNEWTLELKAMADRIINMRQQLFNALKSRGTPGDWSHIIKQIGMFTFTGLNSEQVAFMRQEYHIYMTSDGRISMAGLSMRTVPHLADAIHAAVTQLK

SEQ ID NO: 4888 - protein, 259 aa, Triticum aestivum
  unsure (1)..(259): unsure at all Xaa locations
MSLSNKLSIADVDVKGKKVLIRVDFNVPLDADKNITNNQRIVGALPTIKYALENGAKSVILMSHLGRPNGSPNEKYSLKPVVAELEKLLSKKVTFAPDCVGPEVEEIVNKAEDGSVILLENLRFHIEEEGSSKDKEGNKTKADKAQVEAFRKGLTALGDVYINDAFGTAHRAHSSMVGVDLPQKASGFLVKKELEYFAKALENPQRPFLAILGGAKVSDKIQLIDNLLDKVNTLIIXGGMAFTFKKTLENVSIGTPSST

SEQ ID NO: 4889 - protein, 382 aa, Xylella fastidiosa Temecula1
MQVTSKLPQVGTTIFSVMSQLADVYGAVNLGQGFPDFPVPLRLQEALAGAVREGHNQYPPMIGVAGLRQGIAAKVLRCYGAQVDADVEITVTSGATEAIFNAIHAVVGAGDEVIVLDPAYDCYEPGIVLAGARAVHVPLDAVSFKVDWERVGAAITSRTRLLIVNSPHNPSGALFSADDMRALAALLDGTDILLISDEVYEHIVFDGCGHESVLRWPQLRARAFVISSFGKTYHCTGWKIGYAIAPSALSAEFRKVHQYNTFTSFGPAQYAFAAMLHEEPGYVEQVGLFYQARRDCFREQLLTTKLVPLPVSGGYFQLVDYGAVSDLSDVEFSRWLAVEKGVASIPLSPFYETAPAGQRLVRLCFAKNDMTLGAAIERLQRL

SEQ ID NO: 4890 - protein, 469 aa, Xylella fastidiosa Temecula1
MFLPRPDFRIALSICFMAVSFVISRFGSEVRPTLLLALPLVLGHVSTGLIGFVLNVIAGHHSTVTLAASTIGTALLWLPMLVPMGTLISLTVLVSQLHGAERERDIGPLFRQALWLAMLLGLVMFTFLSVVPALLPLFGIVPDIVPGAAKFLHVVRWGSLAFPLYFCMRYFCEGMHCTFPTMLLGFGGLLVLVPLSYALTYGRFGFAEYGVEGLGIATVTVMWLQAVVFALYLWRSRRFAHLQLFAHLELPCWARIRDLLNIGLPIGISILMEGGLFIVTTLLIGRFGTDEIAAHQIALSVAQLCFMIPMGVAEATTVRIGHAVGRCDLLVMRRVAWAGYAIVIGTQTLSASVLLLGYDVIVAAYTDDLVVASLASKLLLFAAIFQFPDGLQMLSSGVLRGMKDTRVPMLLAMISYWGLGMPLGLGLGFALEWNSRGMWIGLIIGLTAAALLLGWRFRVVSERMFAGIP

SEQ ID NO: 4891 - protein, 218 aa, Agrobacterium tumefaciens str. C58
MTDMKIITGMDDISEGLDHLARLDPALSPVIEKAGPLELRIHEPGFAGLAHIVVSQMVSRASANAIWARILAGTGGKVTAENYLAVSEELRATFGLSRAKATTLEGLARAVTEGQVDLDGVVRKEAGAAFSELVALRGIGPWTAEVYLMFCGGHPDIFPVGDVALRSAVAHALDLEVRPDAKWLAERATLWSPWRSVAARLFWGYYANIMRRAMVPLP

SEQ ID NO: 4892 - protein, 456 aa, Haemophilus influenzae Rd
MTKHYDYIAIGGGSGGIASLNRAASYGKKCAIIEAKHLGGTCVNVGCVPKKVMFYGAHIAEAINNYAPDYGFDVEVKKFDFSKLIESRQAYISRIHTSYNNVLAKNNIDVINGFGKFVDAHTIEVTLADGTKEQVTADHILIATGGRPYRPNIKGQEYGIDSDGFFALTELPKRAAVIGAGYIAVELSGVLNSLGVETHLLVRRHAPMRNQDPLIVETLVEVLAQDGIQLHTNSTPSEIVKNADGSLTVRCDGQSDVTVDCVIWAAGRVPTTDKIGLENAGVETNEHGYVKVDKYQNTNVKGIYAVGDIIENGIELTPVAVAAGRRLSERLFNNKPTEYLDYSLVPTVVFSHPPIGTVGLTEPQAIEQYGAENVKVYKSSFTAMYTAVTQHRQPCKMKLVCVGKDEKVVGLHGIGFGVDEMIQGFAVAIKMGATKADFDNTVAIHPTGSEEFVTMR

SEQ ID NO: 4893 - protein, 1408 aa, Mycobacterium bovis AF2122/97
MSLVIVAPETVAAAALDVARIGSSIGVANSAAAGSTTSVLAAGADEVSAAIATLFGSHAREYQAISTQVAAFHDRFAQTLSAAVGSYVSAEATNAAPLATLEHNVLNALNAPTQALLGRPLIGDGAAGAPGTGQAGGAGGILWGNGGAGGSGAPGQVGGAGGAAGLFGTGGAGGAGGAGAAGGAGGSGGWLLGNGGVGGAGGQSLLGGATGGAGGNAGLFGVGGTGGPGGPGGPGGPGGPGGPGGVGGTGGAGGLGGTLYGAGGHGGAGGPGPIGGVGGHGGVGGAAGLLGVGGHGGAGGHGAAGIAGAAGKGGIFPDGSNGGAGGDAGDGGTGGRGGWLAGAGGAGGDGGIGGTGGAGGAGFSRALIVAGDNGGDGGNGGMGGAGGAGGPGGAGGLISLLGGQGAGGDGGDGGAGGVGGDRGAGANGNQAVNAGAGGAGGHGGDPGAGGAGGTGGAGSTIGAHGAAGASPTSGGNGGAGGNGAHFSSGGKAGGNGGAGGAGGLVGNGGAGGAGGNGAPGAPPSGGDPNGGGGGAGGAGGKGGDGGAQAGDGGAGGAGGKGGNGGNGATGATGLNGLGAGADGTDGGKGGNGGAGGGGGAGGQGGKALAATHQDGSMGAGGAGGNGGAGGMGGDGGNGAKGTFDNGGDGVGGNGGNGGSRGIGGAGGIGGAGSTAGADGARGATPTSGGNGGTGGNGANATVAGGAGGAGGKGGNGGLVGNGGAGGKGGDGMAGVAGSSPTTAGESGTSGQNGGAGGAGGAGGRGGDFGGDGGTGGAGGNGADGGAGGNGANGANATTPGAKGGDGGHGGPGAQGGNGGQGGPGGLAGNLFGQNGIQGVGGSGGKGGAGGLAGDGGNGANGNFAFGDGNGGHGGNGGNPGAGGQGGSGGAGSTPGAKGAHGFTPTSGGDGGDGGNGGHSQVVGGNGGDGGNGGNGGSAGTGGNGGRGGDGAFGGMSANATNPGENGPNGNPGGNGGAGGAGGAGLNGGNGGAGGNGGLGGFGGNGAAGANGVAVGAPGQPGGAGGHGGAGGNGGAGGNGGQGVVSDGAGGAGGAGGDGGAPGDGANGGNGQGAGAFAGGGGGRGGDGGNAGNAGAGGPGGTGSTAGKAGPAGSILHDGGNGGHGGHGAASGGNGGPGGHGGNGGNGGTGANGGNGGIGGTGGAGSTGAKGVLGTNEGDGGDGGRGGNGGRGGNGGQGLTGAGGNGGTGGTPGNGGNGGNGASGDLVTSPGDGGGGGRGGDAGRGGDAGLGGSSGPGGTPGDWGTGGTGGTGGTGGQGANGGLTGGRGGTGGNGGAGGTGGTGHNGSQPGMGGNGGAGGFGGNGFAGVGGRGGMGGSGGTGGTGDAGPFGTGTGGTGGHGGQGGGGGFSILLGLGGLGGLGSPGSIATGTAGGAGGGGGFGGLGGGEFV

SEQ ID NO: 4894 - protein, 376 aa, Andropogon ternarius
ALSIAGAVQSQKLAVRAISRLQALPGGDVKLLCDTVVEHVRVLTGYDRVMVYRFHEDEHGEVVAESRRDNLEPYLGLHYPATDIPQASRFLFRQNRVRMIADCHATPVRVIQDPGLSQPLCLVGSTLRAPHGCHAQYMANMGSIASLVLAVIISSGGDDEQTGRGGISSAMKLWGLVVCHHTSPRCIPFPLRYACEFLMQAFGLQLNMELQLAHQLSEKHILRTQTLLCDMLLRDSPTGIVTQSPSIMDLVKCDGAALYYHGKYYPLGVTPTESQIKDIIEWLTVCHGDSTGLSTDNLADAGYLGAAALGDAVCGMAVAYITPSDYLFWFRSHTAKEIKWGGAKHHPEDKDDGQRMHPRSSFKAFLEVAKSRSLPW

SEQ ID NO: 4895 - protein, 359 aa, Mycobacterium tuberculosis CDC1551
MATHQVDAVVLVGGKGTRLRPLTLSAPKPMLPTAGLPFLTHLLSRIAAAGIEHVILGTSYKPAVFEAEFGDGSALGLQIEYVTEEHPLGTGGGIANVAGKLRNDTAMVFNGDVLSGADLAQLLDFHRSNRADVTLQLVRVGDPRAFGCVPTDEEDRVVAFLEKTEDPPTDQINAGCYVFERNVIDRIPQGREVSVEREVFPALLADGDCKIYGYVDASYWRDMGTPEDFVRGSADLVRGIAPSPALRGHRGEQLVHDGAAVSPGALLIGGTVVGRGAEIGPGTRLDGAVIFDGVRVEAGCVIERSIIGFGARIGPRALIRDGVIGDGADIGARCELLSGARVWPGVFLPDGGIRYSSDV

SEQ ID NO: 4896 - protein, 795 aa, Mycobacterium bovis AF2122/97
MSLVIVAPETVAAAALDVARIGSSIGVANSAAAGSTTSVLAAGADEVSAAIATLFGSHAREYQAISTQVAAFHDRFAQTLSAAVGSYVSAEATNAAPLATLEHNVLNALNAPTQALLGRPLIGDGAAGAPGTGQAGGAGGILWGNGGAGGSGAPGQVGGAGGAAGLFGTGGAGGAGGAGAAGGAGGSGGWLLGNGGVGGAGGQSLLGGATGGAGGNAGLFGVGGTGGPGGPGGPGGVGGTGGAGGLGGTLYGAGGHGGAGGPGPIGGVGGHGGVGGAAGLLGVGGHGGAGGHGAAGIAGAAGKGGIFPDGSNGGAGGDAGDGGTGGRGGWLAGAGGAGGDGGIGGTGGAGGAGFSRALIVAGDNGGDGGNGGMGGAGGAGGPGGAGGLISLLGGQGAGGDGGDGGAGGVGGDRGAGANGNQAVNAGAGGAGGHGGDPGAGGAGGTGGAGSTIGAHGAAGASPTSGGNGGAGGNGAHFSSGGKAGGNGGAGGAGGHGGLVGNGGAGGAGGNGANGAAGTNASDSGAVGGKGNSGGNGGQGGAGGDGGTLAGNGGAGGTGGRGADGGLGGSGAEGANATTAGERGQDGGKGGNGGVGGTGGNAVAPGANGGHGGNGGNPGFSGAGGLGGLSGDGVTRAAQGATPDFADTGGKGGNGGNGANAVAPGGTGASGGAGGNAGAGGKGGENIIGDGGGGGNGGAGGQGGDGTAGAGGDGGAGGKGGDGGDGGSDPTEGRGFGGLGGAGGAGGKGGAGTLLGLTVFGDNGGAGVLGDSTDPDGSGGAGGAGGAGGAGGDPTI

SEQ ID NO: 4897 - protein, 376 aa, Apluda mutica
ALSIAGAVQSQKLAVRAISRLQALPGGDVKLLCDTVVEHVRELTGYDRVMVYRFHEDEHGEVVAESRRDNLEPYLGLHYPATDIPQASRFLFRQNRVRMIADCHATPVRVIQDPGLSQPLCLVGSTLRAPHGCHAQYMANMGSIASLVMAVIISSGGDDEQTGRGGISSAMKLWGLVVCHHTSPRCIPFPLRYACEFLMQAFGLQLNMELQLAHQLSEKHILRTQTLLCDMLLRDSPTGIVTQSPSIMDLVKCDGAALYYHGKYYPLGVTPTESQIKDIIEWLTVCLGDSTGLSTDSLADAGYLGAAALGDAVCGMAVAYITPSDYLFWFRSHTAKEIKWGGAKHHPEDKDDGQRMHPRSSFQAFFEVVKSRSLPW

SEQ ID NO: 4898 - protein, 376 aa, Bothriochloa odorata
ALSIAGAVQSQKLAVRAISRLQALPGGDVKLLCDTVVEHVRELTGYDRVMVYRFHEDEHGEVVAESRRDNLEPYLGLHYPATDIPQASRFLFRQNRVRMIADCRATPVRVIQDPGLSQPLCLVGSTLRAPHGCHAQYMANMGSIASLVMAVIISSGGDHEQTGRGGISSAMKLWGLVVCHHTSPRCIPFPLRYACEFLMQAFGLQLNMELQLAHQLSEKHILRTQTLLCDMLPRDSPTGIVTQSPSIMDLVKCDGAALYYHGRYYPLGVTPTESQIKDIIEWLTVCHGDSTGLSTDSLADAGYLGAAALGDAVCGMAVAYITPSDYLFWFRSHTAKEIKWGGAKHHPEDKDDGQRMHPRSSFKAFLEVVKSRSLPW

SEQ ID NO: 4899 - protein, 182 aa, Oryza sativa (japonica cultivar-group)
MATGNGEAAVVEKEGEGTMVPEALEKKVVLDAAEKEEEEKDSEAEAEAEARISKLVGDMIDNVCADHGIPLPKVDIKTVRKMAEYMNKHFAITNKEELKIWDEGFINELDGDEDKYSLFKIIRASERVGFYGLLDLASDMVARKIKAGKAIDEIRKFLGVEKDFTKEEEEKIRRENAWAFEE

SEQ ID NO: 4900 - protein, 181 aa, Glycine max
MSNATDSAGEIPPETRSAESDGGGPRPTIKINVTHGSSHHDLHLPAQSTFGDVKKLLVNKTGLEPAEQRLFFRGIEKGDNQRLQAEGVKDKSKLFLLEGIGSKERKLEETRKENEMSKAFEAIASVRAEVDKLSNRVTSIEVSINGGNKASEKEFLVLTELLMSQLLKLDGIEAECAALLQ

SEQ ID NO: 4901 - protein, 174 aa, Oryza sativa (japonica cultivar-group)
MATGSGAAAAAAADAEEKESGSRMITLTSNEGKAFVVTEASARQSATIRSMVDDGGCVDKGFPLPNVDSKTLARVIQYCDEHGNKEPHTVDERAALAKFDRDFIAELDADKAFLYDVTMAANYLHIQGLLALTTQCVADTIKGKTPEEIRTAFGIEYDLTAQDEKEIKEEDTHA

SEQ ID NO: 4902 - protein, 489 aa, Rhodospirillum rubrum
MNDPVVLSELRRRLAEAEETLNAIREGEVDALVIGEGGVDEVFAIGGDTESYRTFMEAMDTGAAAVDEDGRVLYANSALCRLIDHPLPTLQGKPLVSFFDARAAAEIGQMVGKTANQREKVEISLKDAATKMAQVFLVSAKPVRLGLVQGHAVTFTDLTERVRSETAERAERIAAAIIASANEIVVVCDRVGMITHANSAASAIYDGDLIGKMFEDAIPLTFTDAPDLMSGGALIDLALNGQARQGIEAIATRAPKVKDYLISAAPLQVTEDQISGCVLTMVDLSQRKAAEHQQLLLMRELDHRVRNTLALVLSISNRTLSNEDTLQGFHQAFTQRIHGLAATHSLLAKQGWTKLSLHDIVRAELAPYVETDGTRLRLEGGEVALIPRAAIALGLIFHELATNAVKYGALSREGGHVLVAVRGPTADGAAMRVDWVESGGPMVSPPQRKGFGHTVISHSLAYSSKGGTDLSFPPEGVICALRIPMEDIP

SEQ ID NO: 4903 - protein, 519 aa, Zea mays
MEGRMTSLEATMKVSSSMASSISRNADPDQQTLRPNSVEQFYFPRPGQSLPGIPPFFGPPSSSLYLPNDNEAKFGNQFESNPSQNTDWDPQAIVSNLTFLEQKIKQVKDIVQSMSNRENQLAGGSSELAAKQHLVTADLTSIIIQLISTAGSLLPSMKNPLLSSNPAVRQLGNTLGSPMGLGMNANQRPSVDSKTDIPDTGKTSDYDELMNSLNPAQDERDEMIKCPNPCGGEGSEPTPMEDHDVKESDDGGEGENLPPGSYVVLQLEKEEILAPHTHFCLICGKGFKRDANLRMHMRGHGDEYKTPAALAKPTKDSGADHAPVTRYSCPFVGCKRNKEHKKFQPLKTILCVKNHYKRSHCDKSYTCSRCNTKKFSVIADLKTHEKHCGRDKWLCSCGTTFSRKDKLFGHVALFQGHTPALPMEDVKVSEASEQPQDSEPMNEMARSNMYSFPCSSSDGISNLDMKMADDVRGYFSPLNFDPCFGALDDFTRPGFDISENPFSFLPSGSCSYGQQNGDS

SEQ ID NO: 4904 - protein, 314 aa, Wigglesworthia glossinidia endosymbiont of Glossina brevipalpis
MKLFSMVFPGQGSQFVGMLKSLSDSFIIVKEVFEESSEILKYDLWKLAQEGPLNILNKTEITQPAILTASFAIWKVWNSLSNINPIFMAGHSLGEYSALVCAKSLNFSDAIKITSLRGKFMQESLKKECAMAAIIGLPCTIIDKICKRISIYEFVEIANFNSPMQIIISGYKNSVIKVIKKSKKLGAKYAKLLSVNVPAHSVLMKPASKKLSYALNKIKIFTPKIKVISSLNVKVQKNPKEIKKNLIKQIYKPVLWNNTIKYLIEKKIKIFLEVGPGNILSKLLKSFSQNTNIYGISIQHPEIIIKESGRYNKL

SEQ ID NO: 4905 - protein, 302 aa, Streptomyces nanchangensis
MKGIILAGGNGTRLQPLTLAGSKQLVPVYDKPMIYYPLSVLMFAGIRDILIISRPTELPQFRQLFGDGRRLGLNLSYASQEKPRGIADAFRIGADHIRGEECALILGDNLFHGANLPALLRRSVQRLRGCVLFGHEVADPRHFGVAEIDERGRLLSIEEKPERPRSNLAIPGLYLFDGGVVDVAKRLVPSARGELEITDVLRAYLEEGTADLVWLGRGVTWLDTGTHETLLDAGRMVRDVQHYQGTRLGCVEEIAMYMGFIGADECYTLGTEMSNSPYGQYVMDRARSYRRGLPPARFLEEI

SEQ ID NO: 4906 - protein, 410 aa, Buchnera aphidicola (Baizongia pistaciae)
MPDIGTDLVEVIEILVKIGDQVKKDDSLITVEGQKASIEIPASHTGTIKNIIVHIGEKITTGSLIAILNGIDDNVKSKNDSSSYSFKNSKNTSTNSNLGNVNNNINNRTILVHATPTVRRLARKFDIKLENITGTGRKGRILKEDVISYKNISLFNDIKKSLKKTNVNYYKDNVTCDDFKSIELTRTQIRSSKNLLKSWLTIPHVTQFDESDITELENFRQKYNSDLKDKSKKLTILIFVIKAVSKALEMFPKFNGRLINKDNRIAIVLNEHINIGIVVDTDDGLLVPVINRVNKKNISSISNDLRIISERARSRKLNFSDIKEYGSFTISNLGGIGGTNFTPIIKYPELAILGISRALIKPYWNSHAFIPKLMLPLSLSYDHRAIDGVAAVRFITFVKKMLTDIRFLMI

SEQ ID NO: 4907 - protein, 288 aa, Zea mays
  unsure (1)..(288): unsure at all Xaa locations
MAAPPVQPVPTAAAAAAAVNGDAFRLGFVGAGNLAESIARGVAASGVLPASAIRTAPHRRPERXAEAFASFGACLLQTNAHVVDDSDVIVISVKPQIVKQVLLQLRPRLSEKKLLVSIAAGIKMQDLQDWSGQRRIIRVMPNTPSAVGQAASVMCLGEMATQDDENRVRKLFSAIGKVWTAEEKYFDAVTGLSGSGPAYIFLAIEAMADGGVAAGLPRDLALGLASQTVLGAATMVSQTGKHPGQLKDQVTSPAGTTIAGIQELEKGAFRGTLISAVVAAAKRCRELS

SEQ ID NO: 4908 - protein, 376 aa, Chionachne koenigii
ALSIAGAVQSQKLAVRAISRLQALPGGDVKLLCDTVVEHVRELTGYDRVMVYRFHEDEHGEVVAESRRDNLEPYLGLHYPATDIPQASRFLFRQNRVRMIADCHATPVRVVQDPGLSQPLCLVGSTLRSPHGCHAHYMANMGSIASLVMAVIISSGGDDEHTGRGGISSAMKLWGLVVCHHTSPRCIPFPLRYACEFLMQAFGLQLNMELQLAHQLSEKHILRTQTLLCDMLLRDSPTGIVTQSPSIMDLVKCDGAALYYHGKYYPLGVTPTESQIKDIIEWLTVCHGDSTGLSTDSLADAGYLGAATLGDAVCGMAVAYITPSDYLFWFRSHTAKEIKWGGAKHHPEDKDDVQRMHPRSSFKAFLEVVKSRSLPW

SEQ ID NO: 4909 - protein, 378 aa, Pisum sativum
ATQGQVITCKAAVAWEPNKPLTIEDVEVAPPQANEVRIQILFTALCHTDAYTLGGKDPEGLFPCILGHEAAGIVESVGEGVTDVKPGDHVIPSYQAECGECKFCKSPKTNLCGKVRAATGVGVMMADRKSRFSVKGKPIYHFMGTSTFSQYTVVHDVSVAKIHPDAPLDKVCLLGCGVPTGLGAVWNTAKVEPGSIVAIFGLGTVGLAVAEGAKSAGASRIIGIDIDSNKYDTAKNFGVTEFINPKDHEKPIQQVIIDLTDGGVDYSFECLGNVSVMRSALECCHKGWGTSVIVGVAASGQEISTRPFQLVTGRVWKGTAFGGFKSRSQVPWLVEKYLKKEIKVDEYITHNLTLLEINKAFDLLHEGQCLRCVLAVHD

SEQ ID NO: 4910 - protein, 533 aa, Anabaena variabilis ATCC 29413
MTKAPVAPVVLVILDGWGYCEETRGNAIAAAKTPVMESLWTAYPHTLIHTSGKAVGLPEGQMGNSEVGHLNIGAGRVVPQELVRISDAVEDGSILSNSALVKICQEVRNRNGKLHLVGLCSEGGVHSHITHLFGLLDLAKEQRISEVCIHAITDGRDTAPTDGINAISALEDYINHVGIGRIVTVSGRYYAMDRDRRWDRIQRAYDVMTQDGAGDGRKAVDVLQASYAEGVNDEFIVPVRIAPGTVESGDGVIFFNFRPDRSRQLTQAFVSPEFTGFARQQIKPLSFVTFTQYDSDLSVSVAFEPQNLTNILGEVIANQGLNQFRTAETEKYAHVTYFFNGGLEEPFAGEDRELVSSPMVATYDKAPAMSATAVTDTAIAAIQKGIYSLIVINYANPDMVGHTGQIEPTIQAIETVDRCLGRLLEGVSKAGGTTIITADHGNAEYMLDEAGNSWTAHTTNPVPLILVEGEKVKIPGYGTNVELRSDGKLADIAPTILDILQLPQPPEMTGRSLLQPAEYDVQSPRTRIPVGLN

SEQ ID NO: 4911 - protein, 376 aa, Chrysopogon fulvus
ALSMAGAVQSQKLAVRAISRLQALPGGDVKLLCDTVVEHVRELTGYDRVMVYRFHEDEHGEVVAESRRDNLEPYLGLHYPSTDIPQASRFLFRQNRVRMIADCHATPVRVIQDPGLSQPLCLVGSTLRAPHGCHAQYMANMGSIASLVMAVIISSGGDDEQTGRGGISSAMKLWGLVVCHHTSPRCIPFPLRYACEFLMQAFGLQLNMELQLAHQLSEKHILRTQTLLCDMLLRDSPTGIVTQSPSIMDLVKCDGAALYYHGKYYPLGVTPTESQIKDIIEWLTVCHGDSTGLSTDSLADAGYLGAAALGDAVCGMAVAYITPSDYLFWFRSHTAKEIKWGGAKHHPEDKDDGQRMHPRSSFKAFLEVVKSRSLPW

SEQ ID NO: 4912 - protein, 574 aa, Saccharomyces cerevisiae
MAVEENNVPVVSQQPQAGEDVISSLSKDSHLSAQSQKYSNDELKAGESGPEGSQSVPIEIPKKPMSEYVTVSLLCLCVRFGGFMFGWDTSTISGFVVQTDFLRRFGMKHKDGTHYLSNVRTGLIVAIFNIGCAFGGIILSKGGDMYGRKKGLSIVVSVYIVGIIIQIASINKWYQYFIGRIISGLGVGGIAVLCPMLISEIAPKHLRGTLVSCYQLMITAGIFLGYCTNYGTKSYSNSVQWRVPLGLCFAWSLFMIGALTLVPESPRYLCEVNKVEDAKRSIAKSNKVSPEDPAVQAELDLIMAGIEAEKLAGNASWGELFSTKTKVFQRLLMGVFVQMFQQLTGNNYFFYYGTVIFKSVGLDDSFETSIVIGVVNFASTFFSLWTVENLGRRKCLLLGAATMMACMVIYASVGVTRLYPHGKSQPSSKGAGNCMIVFTCFYIFCYATTWAPVAWVITAESFPLRVKSKCMALASASNWVWGFLIAFFTPFITSAINFYYGYVFMGCLVAMFFYVFFFVPETKGLSLEEIQELWEEGVLPWKSEGWIPSSRRGNNYDLEDLQHDDKPWYKAMLE

SEQ ID NO: 4913 - protein, 308 aa, Acinetobacter sp. ADP1
MSSIWVYPGQGAQKINMLHDLPKHPLVDRYLEQASDVLNENIMLLDQADSLKSTYSVQLCLYVAGVISSELLRLHGVKPKFVAGLSIGAWAAATVAHVIRFEDGLKLVAKRAQLMQQAYPKGYGMTAILGADCSQIEQWIEQTQQNQQVFIANLNTENQVVISGSEQAMQYVIHHAQQNGAIAKKVEISVPSHCVLLEKQAHQLAGFMEEIPTQQPTIQYLSGTSARLLRTNTQIMNDLAFNMSRMIDWHNTVQAAWERGARLQIEALPGTVLTSLARKIFKEGTLLSFQNTSIETLIIAMQKQQDFV

SEQ ID NO: 4914 - protein, 376 aa, Chrysopogon gryllus
  unsure (1)..(376): unsure at all Xaa locations
ALSIAGAVQSQKLAVRSISRLQALPGGDVKLLCDTVVEHVRELTGYDRVMVYRFHEDEHGEVVAESRRDNLEPYLGLHYPATDIPQASRFLFRQNRVRMIADCHATPVRVIQDPGLSQPLCLVGSTLRAPHGCHAQYMANMGSIASLVMAVVISSGGDDEQTGRGGISSAMKLWGLVVCHHTSPRCIPFPLRYACEFLTQAFGLHLNMELQLAHQLSEKHILRTQTLVCDMLLRDSPSGXVTQSPSIMDLVKCDGAALYYHGKYYPLGVTPTESQIKDIIEWLTVCHGDSTGLSTDSLADAGYLGAAALGDAVCGMAVAYITPSDYLFWFRSHTAKEIKWGGAKHHPEDKDDGQRMHPRSSFKAFLEVVKSRSLPW

SEQ ID NO: 4915 - protein, 574 aa, Saccharomyces cerevisiae
MAVEENNVPVVSQQPQAGEDVISSLSKDSHLSAQSQKYSNDELKAGESGPEGSQSVPIEIPKKPMSEYVTVSLLCLCVAFGGFMFGWDTSTISGFVVQTDFLRRFGMKHKDGTHYLSNVRTGLIVAIFNIGCAFGGIILSKGGDMYGRKKGLSIVVSVYIVGIIIQIASINKWYQYFIGRIISGLGVGGIAVLCPMLISEIAPKHLRGTLVSCYQLMITAGIFLGYCTNYGTKSYSNSVQWRVPLGLCFAWSLFMIGALTLVPESPRYLCEVNKVEDAKRSIAKSNKVSPEDPAVQAELDLIMAGIEAEKLAGNASWGELFSTKTKVFQRLLMGVFVQMFQQLTGNNYFFYYGTVIFKSVGLDDSFETSIVIGVVNFASTFFSLWTVENLGRRKCLLLGAATMMACMVIYASVGVTRLYPHGKSQPSSKGAGNCMIVFTCFYIFCYATTWAPVAWVITAESFPLRVKSKCMALASASNWVWGFLIAFFTPFITSAINFYYGYVFMGCLVAMFFYVFFFVPETKGLSLEEIQELWEEGVLPWKSEGWIPSSRRGNNYDLEDLQHDDKPWYKAMLE

SEQ ID NO: 4916 - protein, 352 aa, Chlorobium tepidum TLS
MMYKIVSIPGDGIGPEVVAGALDVLNAVAKKHGFEVSVEEHLFGGASYDVHGSMLTDETLEACKNCDAVLLGAVGGYKWENLPHDKKPEAALLKIRKELGLFANLRPARVYDALVASSTLKTEVVQGTDFMVFRELTGGIYFGQPRGYDETRGWNTMVYERYEVERIARLAFEYAQKRGNAKVTSIDKANVLEVSQFWRNIVHEVHQDFPEIELVDMYVDNAAMQVVRNPKQFEVIVTSNLFGDILSDISGMITGSLGMLPSASIGSEHALYEPIHGSAPDIAGQNKANPIATIASVAMMFENSFNRPEVAADIYAAIEGALAAGFRTGDIAAAGEAISSTTEMTAAIVARI

SEQ ID NO: 4917 - protein, 376 aa, Cleistachne sorghoides
ALSIAGAVQSQKLAVRAISRLQALPGGDVKLLCDTVVEHVRELTGYDRVMVYRFHEDEHGEVVAESRRDNLEPYLGLHYPATDIPQASRFLFRQNRVRMIADCHATPVRVIQDPGLSQPLCLVGSTLRAPHGCHAQYMANMGSIASLVMAVIISGGGDDEQTGRGGISSAMKLWGLVVCHHTSPRCIPFPLRYACEFLMQAFGLQLNMELQLAHQLSEKHILRTQTLLCDMLLRDSPTGIVTQSPSIMDLVKCDGAALYYHGKYYPLGVTPTESQIKDIIEWLTVCHGDSTGLSTDSLADAGYLGAAALGDAVCGMAVAYITPSDYLFWFRSHTAKEIKWGGAKHHPEDKDDGQRMHPRSSFKAFLEVVKSRSLPW

SEQ ID NO: 4918 - protein, 233 aa, Oryza sativa (japonica cultivar-group)
MDHNLLAQHSLQTQKVLVQLASQLGLERRKPERRRRPRRRRRGRGEEPVAAAVVEMEGEDAVVPEAVAADAEKAEEKESGSRMITLKSNEGKAFVVTEVSARQSTTIGHMIDDDCTREAVPLPNVDSKTLEKVIEYFDEHANNKADTDDEKAALDKFDKDFIGELDGDKAFLFHVTMAANYLHAQGLLDLTTQCIADTIKGKTPEEIRTAFNIAYDLTEEDQEEIKEEDAWAF

SEQ ID NO: 4919 - protein, 376 aa, Coelorachis selloana
ALSIAGAVQSQKLAVRAISRLQALPGGDVKLLCDTVVEHVRELTGYDRVMVYRFHEDEHGEVVAESRRDNLEPYLGLHYPATDIPQASRFLFRQNRVRMIADCHATPVRVIQDPGLSQPLCLVGSTLRAPHGCHAQYMANMGSIASLVMAVIISSGGDDEQTGRGGISSSMKLWGLVVCHHTSPRCIPFPLRYACEFLMQAFGLQLNMELQLAHQLSEKHILRTQTLLCDMLLRDSPTGIVTQSPSIMDLVKCDGAALYYHGKYYPLGVTPTESQIKDIIEWLTVCHGDSTGLSTDSLADAGYLGAAALGDAVCGMAVAYITPSDYLFWFRSHTAKEIKWGGAKHHPEDKDDGQRMHPRSSFKAFLEVVKSRSLPW

SEQ ID NO: 4920 - protein, 509 aa, Nostoc sp. PCC 7120
MSNSELDRVIVRPVDEYNQKLVAYVHPPDWVNPQPADNYDLVVIGAGTAGLVVAAGAAGLGLGLKVALIEKHLMGGDCLNVGCVPSKTIIRSSRVVGEIWNGKNLGVNIPSQIDIDFPAVMARMRRVRAGISHNDSAERFASLGVDVFLGSGRFASSNTVEVAGKTLKFKKAVIATGARATKPAIIGIEQAGYLTNETVFSLIQRPEKLAVIGGGPIGCELAQAFRRLGSEVVLIHSGSHVLNKEDNDAAQIVQQTLIKEGIRLVLNAKVEEVVTVTEGKRLYFSTNGHRDSVTVDEILVGAGRSPNVEGLNLEAVGVKYDKRRGVEVNDYLQTTNPKIYAAGDICMDWKFTHAADAAARIVIKNTLFSPFGLGRSRLSSLVMPWVTYTDPEVAHVGLYESQDVETIKIPFSSVDRAIADGQEDGFLKIHHKKGSDEIVGATIVASHAGEMISEVTTAIVNKIGLNKLSNVIHPYPTQAEAIKKAADTYRRTLLTPRTKKLLGFLTKFS

SEQ ID NO: 4921 - protein, 202 aa, Triticum aestivum
MSAAPPSSTAAETTATAPAPLPRLPIPNPLPLFAERGGGARLRHHAYSRKPKSLGLRCSNFVALYDWDGVESIGLDDASRRLGVERRRIYDIVNVLESVGILARKAKNRYSWIGFGGVPMALRELKERALREKSGLAPLPAEELSAANMSDDEDDDKLGDPEAEREGEKLNQTVDNPSDMPDAPPCRLRSDHRKEMSLGLLT

SEQ ID NO: 4922 - protein, 109 aa, Zea mays
  unsure (1)..(109): unsure at all Xaa locations
PVDAFIGVGYTLVSPLAEGAAWLLVRCQAFRVVALAIEAVDLHAHAGAHPRLGVVDHIAFHPVTSARLEDVTALARAVAXDIVDSLQVPTSLFGAAHKDGRSLASIRRQ

SEQ ID NO: 4923 - protein, 753 aa, Escherichia coli
MSQHNEKNPHQHQSPLHDSSEAKPGMDSLAPEDGSHRPAAEPTPPGAQPTAPGSLKAPDTRNEKLNSLEDVRKGSENYALTTNQGVRIADDQNSLRAGSRGPTLLEDFILREKITHFDHERIPERIVHARGSAAHGYFQPYKSLSDITKADFLSDPNKITPVFVRFSTVQGGAGSADTVRAIRGFATKFYTEEGIFDLVGNNTPIFFIQDAHKFPDFVHAVKPEPHWAIPQGQSAHDTFWDYVSLQPETLHNVMWAMSDRGIPRSYRTMEGFGIHTFRLINAEGKATFVRFHWKPLAGKASLVWDEAQKLTGRDPDFHRRELWEAIEAGDFPEYELGFQLIPEEDEFKFDFDLLDPTKLIPEELVPVQRVGKMVLNRNPDNFFAENEQAAFHPGHIVPGLDFTNDPLLQGRLFSYTDTQISRLGGPNFHEIPINRPTCPYHNFQRDGMHRMGIDTNPANYEPNSINDNWPRETPPGPKRGGFESYQERVEGNKVRERSPSFGEYYSHPRLFWLSQTPFEQRHIVDGFSFELSKVVRPYIRERVVDQLAHIDLTLAQAVAKNLGIELTDDQLNITPPPDVNGLKKDPSLSLYAIPDGDVKGRVVAILLNDEVRSADLLAILKALKAKGVHAKLLYSRMGEVTADDGTVLPIAATFAGAPSLTVDAVIVPCGNIADIADNGDANYYLMEAYKHLKPIALAGDARKFKATIKIADQGEEGIVEADSADGSFMDELLTLMAAHRVWSRIPKIDKIPA

SEQ ID NO: 4924 - protein, 175 aa, Oryza sativa
MAPTVMASSATSVAPFQGLKSTAGLPVSRRSTNSGFGNVSNGGRIKCMQVWPIEGIKKFETLSYLPPLTVEDLLKQIEYLLRSKWVPCLEFSKVGFVYRENHRSPGYYDGRYWTMWKLPMFGCTDATQVLKELEEAKKAYPDAFVRIIGFDNVRQVQLISFIAYKPPGCEESGGN

SEQ ID NO: 4925 - protein, 753 aa, Escherichia coli
MSQHNEKNPHQHQSPLHDSSEAKPGMDSLAPEDGSHRPAAEPTPPGAQPTAPGSLKAPDTRNEKLNSLEDVRKGSENYALTTNQGVRIADDQNSLRAGSRGPTLLEDFILREKITHFDHERIPERIVHARGSAAHGYFQPYKSLSDITKADFLSDPNKITPVFVRFSTVQGGAGSADTVRSIRGFATKFYTEEGIFDLVGNNTPIFFIQDAHKFPDFVHAVKPEPHWAIPQGQSAHDTFWDYVSLQPETLHNVMWAMSDRGIPRSYRTMEGFGIHTFRLINAEGKATFVRFHWKPLAGKASLVWDEAQKLTGRDPDFHRRELWEAIEAGDFPEYELGFQLIPEEDEFKFDFDLLDPTKLIPEELVPVQRVGKMVLNRNPDNFFAENEQAAFHPGHIVPGLDFTNDPLLQGRLFSYTDTQISRLGGPNFHEIPINRPTCPYHNFQRDGMHRMGIDTNPANYEPNSINDNWPRETPPGPKRGGFESYQERVEGNKVRERSPSFGEYYSHPRLFWLSQTPFEQRHIVDGFSFELSKVVRPYIRERVVDQLAHIDLTLAQAVAKNLGIELTDDQLNITPPPDVNGLKKDPSLSLYAIPDGDVKGRVVAILLNDEVRSADLLAILKALKAKGVHAKLLYSRMGEVTADDGTVLPIAATFAGAPSLTVDAVIVPCGNIADIADNGDANYYLMEAYKHLKPIALAGDARKFKATIKIADQGEEGIVEADSADGSFMDELLTLMAAHRVWSRIPKIDKIPA

SEQ ID NO: 4926 - protein, 2187 aa, Streptomyces nanchangensis
MANQEQLVDYLKRVATDLHDTQQRLREVEARDRQPIAIVGMACRFPGGTDTPEALWDLVSEGRDVISPMPDDRGWDPGMFNDSGETGTSYVREGGFVHDIADFDADFFDINPREALAMDPQQRLLLETSWEAIERARIDLTSLRGSKTGVFVGGSTVYYAGNAAGVPQDVAGYLATGLAASSMSGRISYTFGFEGPSFTVDTACSSSGVALHLAVQALRKGECSLALAGGVCVMATPGTYLEFSKLNGLAADGRCKAFAAAADGFGPAEGVGVLLVERLADAERLGHPVLAVIRGSAINQDGASNGLTAPHGPAQERVIRAALADAQLSARDIDVVEAHGTGTSLGDPIEAQALIAAYGRRRADGGPLWLGSVKSNIGHTQAAAGMAGVIKMVHALRHGLLPRTLHVDEPTHQVDWSEGTVRLLTEARPWPEAGGPRRAGVSSFGMSGTNTHVILEQAPPAEEPAPAAESPVVPWLVSGRGEAALRAQAARLRDFLAERPEASPTRVGFALAGSRAAQSHRAAVVAADRDTLLAGLGSLAEGTPAGHVVTGSVSPGATAFVFPGQGSQWVGMALALADASPVFAEHFRRCAEAVERHTDYTVESVLRADPGAPSLDRVDVVQPVLWAVMVALAELWRSHGVEPAAVVGHSQGEIAAACVAGVLSVDDAARVVVLRSQVLPELSGRGGMASVAQPVGLVEKHLERWDGRLSVAAVNGPSSTVVSGDADALEELLEGYEADGVRARRVPVDYASHCAHVDALRGPLLDALSGIEPKAGTVPLYSTVTGRRIDGTTMDAGYWYTNLRQQVRFQEATEALLADGHGVFIECSPHPVLTIGVQETMDQSGANATALGTLRRDEGGWDRFLLALGQAHTHGVAVDWSRVFPDGTSPADLPTYAFQRRRYWLDATAGAAGDPASLGLTPADHPLLGAVTLLAEGDEVVMTGRLGLDTHPWLADHAVAGAVLVPGAVFVELAVRAGDEVGCDHLEEMVLASPLVLPEQGGFDLQLVVGGAAEDGRRTLGGYARPSGSDRPWVQHVTGTLAPGGAARPFDLAQWPPEGARPVPVEGCYDQLAEGGFRYGPAFRSLRAVYRRETEVFAEVVLPEEQRGKAAAFGIHPALLDGALHASGLSAVRGDSGGRMALPFAWNGVSLAATGAELLRVRLAPVGDDGMSVHATDASGHPVISIESLVTRPFTAGQLPSDGDETRDGLFRVAYTPLTDPEPGTATDDWTAVATGSEPTYYGVRRYGDLDALAAAVDGGLPAPPVTLLPCEPAPDDGDLPGALRRRLGEVLHTVQRWLADERFAASRLVVVTRGAVAAFEGDDVTDLVHAPVWGLIRSAQSEHPDRLALVDLDGPELPKAVAAAVAVAVAAGEKQIVVRDGTVRVSRLVPAVSGGALALPETPHWRLDIAAPATLDNLGLVAAEEPGPPAPGHVRVQVRAAGVNFRDVLIALGMYPGDGAFRGSEGAGVVLEVAEDVTSVAVGDRVMGMFQGAFGSTAVADARSVVPIPPGWTDEQAAAVPIAYVTAWYGLVDLAGLKAGESVLIHAATGGVGTAAVQIARHLGAEVYATAGPGKHHVLEAMGIDEAHRASSRDLDFEDAFRAATGGRGVDVVLNSLTGDHTDASLRLLAEKGRFVELGMTDVRDPEQLAEPYPGLRYRVLDLREPGEDGIGRMLTEILGRFAGGELTHPAVRAFDIRRARDAFRLMSRAAHIGKIVLTLPRPLDPDGTVLVTGGTGTLGGLIARHLVTRHGVRHLLLTSRRGPEAPGAPALREDLAALGATVTVTACDAGDRERLAEVLAGVPDAHPLTGVVHCAGVLDDGMVDALTPEQLARVLRPKAEAALHLHELTQDADLALFVLFSSIVGVYGNPSQANYAAASTFLDALAQHRQAGGLPAQSLAWGMWEETSALTGELDDGVRQRISQAGMDPLPTEQALALFDRSYAVGDALLVPIRQSTAASRGGPAAGRTRARRVADSGVAGTGGPSLTDRVTALPEAERDSCVLEAVRAHMAAVLGHDSADEIAPDRTFKELGFDSLTAVELRNRLSAATGLRLPATFVFDFANPVALAEHLREQIAPPTELGPPTDPSTPADPSPPPGLPEGPSTDPRESRVRQVLAAIPLRRLEESGLLETLLRLGEGPGEADTTGARPVEGTRDETHTPDSADIASMDLEELVNAALRNDES

SEQ ID NO: 4927 - protein, 348 aa, Pichia stipitis
MSIPTTQKAVIFETNGGPLLYKDIPVPKPKPNELLINVKYSGVCHTDLHAWKGDWPLDTKLPLVGGHEGAGVVVALGENVTGWEIGDYAGIKWINGSCLQCEYCVTAHESNCPDADLSGYTHDGSFQQYATADAIQAARIPKGTDLALIAPILCAGITVYKALKTAQLQAGQWVAVSGAAGGLGSLAIQYAKAMGYRVVGIDGGADKGEFAKSLGAEVFVDFLSSKDVVADVLKATNGGAHGVINVSVSERAMQQSVDYVRPTGTVVLVGLPAGAKVSASVFSSVVRTIQIKGSYVGNRADSAEAIDFFTRGLIKCPIKIVGLSELASVYELMEQGKILGRYVVDTSK

SEQ ID NO: 4928 - protein, 475 aa, Zea mays
MPAKKRRFPSLSSKPHGDVAAPTSDATSGGGVEGRGGRPPLPSRGACRPRLTDPEPQGGLEDDSDTEGDGGADGDSESSQSDGGGTDEFMLVKLAEIRKEVQCPICLGIIRKTRTVMECLHRFCRDCIDKSMRLGNNECPACRTHCASRRSLRDDPNYDALIAALYPDIDKYEEEEFAFSEQERIRNKKIQETIEETFRRQSDAIGKKRSMAKATATAFARKYRRTRGRVRTIPPDIAPTGSSEEESGEGNSKETIREQSSADDHSPDLRQKRCRKRSGPQGSPAGTIGSIDYSFEENDELVGGKEILATSPLQGEMLAWGKNGARSQNRHGSVGSNGRTGRSGRIAKLVDYLHTADEMDKEFQLFLLLLPVDGQTIPNLEKPYLSCRPTLSIKHLAQFVALQLSCEVEELEMYIRMDRHRVSVGSRPSSTGEAKSRPFDDLERLNEEKLVSELHPSFVSSNGDMELRYALRTRE

SEQ ID NO: 4929 - protein, 471 aa, Brucella suis 1330
MDGTFDAGFREPTISKANRWGREMVVALKLGWPLIFTNLSQAALTATDVIFIGRLGADTLASALLATSFYHTLMIFSMGLVSAVMPMIAIALGKNRHSVRDVRRTVRQGFWSAIMIVIPLWVVLWHCEEIFLFLGQRPDIAARSTDFMHTLQWALLPYLFYIVLRSFFAAMEKPMWTLLVAALAIGFNALAGWTLIFGHFGFAPMGLHGAGMATTASSTMMFLGLAFITLRHPRFRRYHLFGRFWRPDWPRLIELWRIGLPMALTFVFETSIFYAAVVMMGRIGPTAMAAHAVAIQIASLSFMVPLGFGQVATVRVGRAYGRGDPKAIAYAGWSAYALGVGFMALMGILMVLMPRVFIGIFLNLNDPQNLPVMELAVTFLALAALFQIVDGAQAVAAGMLRGLRDTRIPMLLALFGYWGVGLPLGAVLAFQFGMGGVGIWLGLAAGLGMVAVLMTIRWRRHLAHVSAVAAA

SEQ ID NO: 4930 - protein, 376 aa, Coix aquatica
ALSIAGAVQSQKLAVRAISRLQALPGGDVKLLCDTVVEHVRELTGYDRVMVYRFHEDEHGEVVAESRRDNLEPYLGLHYPATDIPQASRFLFRQNRVRMIADCHATPVRVIQDPGLSQPLCLVGSTLRSPHGCHAQYMANMGSIASLVMAVIISSGGDDEQTSRGGISSAMKLWGLVVCHHTSPRCIPFPLRYACEFLMQAFGLQLNMELQLAHQLSEKHILRTQTLLCDMLLRDSPTGIVTQSPSIMDLVKCDGAALYYHGKYYPLGVTPTESQIKDIIEWLTVCHGDSTGLSTDSLADAGYLGAAALGDAVCGMAVAYITPNDYLFWFRSHTAKEIKWGGAKHHPEDKDDGQRMHPRSSFKAFLEVVKSRSLPW

SEQ ID NO: 4931 - protein, 540 aa, Arabidopsis thaliana
MRRFLINQAKGLVDHSRRQHHHKSPSFLSPQPRPLASSPPALSRFFSSTSEMSASDSTSSLPVTLDSINPKVLKCEYAVRGEIVNIAQKLQEDLKTNKDAYPFDEIIYCNIGNPQSLGQLPIKFFREVLALCDHASLLDESETHGLFSTDSIDRAWRILDHIPGRATGAYSHSQGIKGLRDVIAAGIEARDGFPADPNDIFLTDGASPAVHMMMQLLLSSEKDGILSPIPQYPLYSASIALHGGSLVPYYLDEATGWGLEISDLKKQLEEARSKGISVRALVVINPGNPTGQVLAEENQRDIVNFCKQEGLVLLADEVYQENVYVPDKKFHSFKKVARSLGYGEKDISLVSFQSVSKGYYGECGKRGGYMEVTGFTSDVREQIYKMASVNLCSNISGQILASLVMSPPKPGDDSYDSYMAERDGILSSMAKRAKTLEDALNSLEGVTCNRAEGAMYLFPRINLPQKAIEAAEAEKTAPDAFYCKRLLNATGVVVVPGSGFGQVPGTWHFRCTILPQEDKIPAIVNRLTEFHKSFMDEFRN

SEQ ID NO: 4932 - protein, 591 aa, Zea mays
  unsure (1)..(591): unsure at all Xaa locations
MCGILAVLGVAEVSLAKRSRIIELSRRLRHRGPDWSGLHCHEDCYLAHQRLAIIDPTSGDQPLYNEDKTVVVTVNGEIYNHEELKAKLKTHEFQTGSDCEVIAHLYEEYGEEFVDMLDGMFSFVLLDTRDKSFIAARDAIGICPLYMGWGLDGSVWFSSEMKALSDDCERFITFPPGHLYSSKTGGLRRWYNPPWFSETVPSTPYNALFLREMFEKAVIKRLMTDVPFGVLLSGGLDSSLVASVASRHLNETKVDRQWGNKLHTFCIGLKGSPDLKAAREVADYLSTVHHEFHFTVQEGIDALEEVIYHIETYDVTTIRASTPMFLMSRKIKSLGVKMVISGEGSDEIFGGYLYFHKAPNKKEFHEETCRKIKALHLYDCLRANKATSAWGVEARVPFLDKSFISVAMDIDPEWKMIKRDLGRIEKWVXRNAFDDEERPYLPKHILYRQKEQFSDGVGYSWIDGLKDHASQHVSDSMMMNAGFVYPENTPTTKEGYYYRMIFEKFFPKPAARSTVPGGPSVACSTAKAVEWDAXWSKNLDPSGRAALGVHDAAYEDTAGKTPASADPVSDKGLRPAIGESLGTPVASATAV

SEQ ID NO: 4933 - protein, 367 aa, Arabidopsis thaliana
MATTASSSLLLPSISLNNLSSSKNASFGFAAKNLSRSRISMSVSAGSQSTTVHDSLFADYKPTSAFLFPGQGAQAVGMGKESQSVGAAGELYKKANDILGYDLLDICVNGPKEKLDSTVISQPAIYVTSLAAVELLRVREGGEQIINSVDVTCGLSLGEYTALAFAGAFSFEDGLKLVKLRGEAMQAAADAAKSAMVSIIGLDSEKVQQLCDAANQEVDEADKVQIANYLCPGNYAVSGGLKGIEVVEAKAKSFKARMTVRLAVAGAFHTSFMEPAVSRLEAALAATEIRSPRIPVISNVDAQPHADPDTIKKILARQVTSPVQWETTVKTLLSKGLKSSYELGPGKVIAGIFKRVDKSASFENISA

SEQ ID NO: 4934 - protein, 376 aa, Cymbopogon flexuosus
ALSIAGAVQSQKLAVRAISRLQALPGGDVKLLCDTVVEHVRELTGYDRVMVYRFHEDEHGEVVAESRRDNLEPYLGSHYPATDIPQASRFLFRQNRVRMIADCHATPVRVIQDPGLSQPLCLVGSTLRAPHGCHAQYMANMGSIASLVMAVIISSGGDDEQTGRGGISSAMKLWGLVVCHHTSPRCIPFPLRYACEFLMQAFGLQLNMELQLAHQLSEKHILRTQTLLCDMLLRDSPTGIVTQSPSIMDLVKCDGAALYYHGKYYPLGVTPTESQIKDIIEWLTVCHGDSTGLSTDSLADAGYLGAAALGDAVCGMAVAYITPSDYLFWFRSHTAKEIKWGGAKHHPEDKDDGRRMHPRSSFKAFLEVVKSRSLPW

SEQ ID NO: 4935 - protein, 523 aa, Hordeum vulgare subsp. vulgare
MSSMQFSSVLPLEGKACVSPVRREGSACERLKIGDSSSIRHERASRRMCNGGARGPAATGAQCVLTSDASPADTLVLRTSFRRNYADPNEVAAVILGGGTGTQLFPLTSTRATPAVPIGGCYRLIDIPMSNCFNSGINKIFVMTQFNSASLNRHIHRTYLGGGINFTDGSVEVLAATQMPGEAAGWFRGTADAVRKFIWVLEDYYKHKSIEHILILSGDQLYRMDYMELVQKHVDDNADITLSCAPVGESRASEYGLVKFDSSGRVIQFSEKPKGDDLEAMKVDTSFLNFAIDDPAKYPYIASMGVYVFKRDVLLNLLKSRYAELHDFGSEILPRALHDHNVQAYVFTDYWEDIGTIRSFFDANMALCEQPPKFEFYDPKTPFFTSPRYLPPTKSDKCRIKEAIISHGCFLRECKIEHSIIGVRSRLNSGSELKNAMMMGADSYETEDEISRLMSEGKVPIGVGENTKISNCIIDMNARIGRDVVISNKEGVQEADRPEEGYYIRSGIVVIQKNATIKDGTVV

SEQ ID NO: 4936 - protein, 333 aa, Dichanthium aristatum
TGYDRVMVYRFHEDEHGEVVAESRRDNLEPYLGLHYPATDIPQASRFLFRQNRVRMIADCHATPVRVIQDPGLSQPLCSVGSTLRAPHGCHAQYMANMGSIASLVMAVIISSGGDDEQTGRGGISSSMKLWGLVVCHHTSPRCIPFPLRYACEFLMQAFGLQLNMELQLAHQLSEKHILRTQTLLCDMLLRDSPTGIVTQSPSIMDLVKCDGAALYYHGKYYPLGVTPTESQIKDIIEWLTVCHGDSTGLSTDSLADAGYLGAAALGDAVCGMAVAYITPSDYLFWFRSHTAKEIKWGGAKHHPEDKDDGQRMHPRSSFKAFLEVVKSRSLPW

SEQ ID NO: 4937 - protein, 376 aa, Elionurus muticus
ALSIAGAVQSQKLAVRAISRLQALPGGDVKLLCDTVVEHVRELTGYDRVMVYRFHEDEHGEVVAESRRDNLEPYLGLHYPATDIPQAPRFLFRQNRVRMIADCHATSVRVIQDPGLSQPLCLVGSTLRAPHGCHAQYMANMGSIASLVMAVIISSGGDDEQTGRGGISSSMKLWGLVVCHHTSPRCIPFPLRYACEFLMQAFGLQLNMELQLAHQLSEKHILRTQTLLCDMLLRDSPTGIVTQSPSIMDLVKCDGAALYYHGKYYPLGITPTESQIKDIIEWLTVCHGDSTGLSTDSLADAGYLGAAALGDAVCGMAVAYITPSDYLFWFRSHTAKEIKWGGAKHHPEDKDDGQRMHPRSSFKAFLEVVKSRTLPW

SEQ ID NO: 4938 - protein, 176 aa, Anabaena variabilis ATCC 29413
MAILDSKGRLFGKVNILDLGALLVIVMVIFGIFVFPGTSGSVAQVGAKTVPIEVDLVVRGLNVRDPQQLAGNGLKKGGKTKVIIRNQPYGEIEIKSVEQLPRTVVATQPDGSVKELPDPKANNFSTDMLLTLNGKAQVTKDGPVLGNSKVKIGMPFELEGFNYNFNATVIDVRLQS

SEQ ID NO: 4939 - protein, 376 aa, Heteropogon contortus
ALSIAGAVQSQKLAVRAISRLQALPGGDVKLLCDTVVEHVRELTGYDRVMVYRFHEDEHGEVVAESRRDNLEPYLGLHYPATDIPQASRFLFRQNRVRMIADCHATPVRVIQDPGLSQPLCLVGSTLRAPHGCHAQYMANMGSIASLVMAVIISSGGEGEQTARGGISSAMKLWGLVVCHHTSPRCIPFPLRYACEFLMQAFGLQLNMELQLAHQLSEKHILRTQTLLCDMLLRDSPTGIVTQSPSIMDLVKCDGAALYYHGKYYPLGVTPTEAQIKDIIEWLTVCHGDSTGLSTDSLADAGYLGAVALGDAVCGMAVAYITPSDYLFWFRSHTAKEIKWGGAKHHPEDKDDGQRMHPRSSFKAFLEVVKSRSLPW

SEQ ID NO: 4940 - protein, 80 aa, Clarkia unguiculata
KGEVVNNHDELMSNFFAQPDALAYGKTPEQLKKENVSEHLIPHKTFTGNRPSLSILLPTLDAYRIGQLLAIYEHRVAVQG

SEQ ID NO: 4941 - protein, 753 aa, Escherichia coli
MSQHNEKNPHQHQSPLHDSSEAKPGMDSLAPEDGSHRPAAEPTPPGAQPTAPGSLKAPDTRNEKLNSLEDVRKGSENYALTTNQGVRIADDQNSLRAGSRGPTLLEDFILREKITHFDHERIPERIVHARGSAAHGYFQPYKSLSDITKADFLSDPNKITPVFVRFSTVQGGAGSADTVRQIRGFATKFYTEEGIFDLVGNNTPIFFIQDAHKFPDFVHAVKPEPHWAIPQGQSAHDTFWDYVSLQPETLHNVMWAMSDRGIPRSYRTMEGFGIHTFRLINAEGKATFVRFHWKPLAGKASLVWDEAQKLTGRDPDFHRRELWEAIEAGDFPEYELGFQLIPEEDEFKFDFDLLDPTKLIPEELVPVQRVGKMVLNRNPDNFFAENEQAAFHPGHIVPGLDFTNDPLLQGRLFSYTDTQISRLGGPNFHEIPINRPTCPYHNFQRDGMHRMGIDTNPANYEPNSINDNWPRETPPGPKRGGFESYQERVEGNKVRERSPSFGEYYSHPRLFWLSQTPFEQRHIVDGFSFELSKVVRPYIRERVVDQLAHIDLTLAQAVAKNLGIELTDDQLNITPPPDVNGLKKDPSLSLYAIPDGDVKGRVVAILLNDEVRSADLLAILKALKAKGVHAKLLYSRMGEVTADDGTVLPIAATFAGAPSLTVDAVIVPCGNIADIADNGDANYYLMEAYKHLKPIALAGDARKFKATIKIADQGEEGIVEADSADGSFMDELLTLMAAHRVWSRIPKIDKIPA

SEQ ID NO: 4942 - protein, 474 aa, Zea mays
MDMALASKASPPPWNATAAEQPIPKRDKAAANDSTYLNPQAHDSVLGIILGGGAGTRLYPLTKKRAKPAVPLGANYRLIDIPVSNCLNSNISKIYVLTQFNSASLNRHLSRAYGSNIGGYKNEGFVEVLAAQQSPDNPNWFQGTADAVRQYLWLFEEHNVMEFLILAGDHLYRMDYEKFIQAHRETNADITVAALPMDEKRATAFGLMKIDEEGRIIEFAEKPKGEQLKAMMVDTTILGLDDVRAKEMPYIASMGIYVFSKDVMLQLLREQFPEANDFGSEVIPGATSIGKRVQAYLYDGYWEDIGTIAAFYNANLGITKKPMPDFSFYDRFAPIYTQPRHLPPSKVLDADVTDSVIGEGCVIKNCKINHSVVGLRSCISEGAIIEDSLLMGADYYETEADKKLLAEKGGIPIGIGKNSCIRRAIIDKNARIGDNVKVFQTDVPTVKNINLDFSLGYYIILDMPFCPLIFNIYF

SEQ ID NO: 4943 - protein, 753 aa, Escherichia coli
MSQHNEKNPHQHQSPLHDSSEAKPGMDSLAPEDGSHRPAAEPTPPGAQPTAPGSLKAPDTRNEKLNSLEDVRKGSENYALTTNQGVRIADDQNSLRAGSRGPTLLEDFILREKITHFDHERIPERIVHARGSAAHGYFQPYKSLSDITKADFLSDPNKITPVFVRFSTVQGGAGSADTVREIRGFATKFYTEEGIFDLVGNNTPIFFIQDAHKFPDFVHAVKPEPHWAIPQGQSAHDTFWDYVSLQPETLHNVMWAMSDRGIPRSYRTMEGFGIHTFRLINAEGKATFVRFHWKPLAGKASLVWDEAQKLTGRDPDFHRRELWEAIEAGDFPEYELGFQLIPEEDEFKFDFDLLDPTKLIPEELVPVQRVGKMVLNRNPDNFFAENEQAAFHPGHIVPGLDFTNDPLLQGRLFSYTDTQISRLGGPNFHEIPINRPTCPYHNFQRDGMHRMGIDTNPANYEPNSINDNWPRETPPGPKRGGFESYQERVEGNKVRERSPSFGEYYSHPRLFWLSQTPFEQRHIVDGFSFELSKVVRPYIRERVVDQLAHIDLTLAQAVAKNLGIELTDDQLNITPPPDVNGLKKDPSLSLYAIPDGDVKGRVVAILLNDEVRSADLLAILKALKAKGVHAKLLYSRMGEVTADDGTVLPIAATFAGAPSLTVDAVIVPCGNIADIADNGDANYYLMEAYKHLKPIALAGDARKFKATIKIADQGEEGIVEADSADGSFMDELLTLMAAHRVWSRIPKIDKIPA

SEQ ID NO: 4944 - protein, 371 aa, Acinetobacter calcoaceticus
MSELKDIIAAVTPCKGADFELQALKIRQPQGDEVLVKVVATGMCHTDLIVRDQKYPVPLPAVLGHEGSGIIEAIGPNVTELQVGDHVVLSYGYCGKCTQCNTGNPAYCSEFFGRNFSGADSEGNHALCTHDQGVVNDHFFAQSSFATYALSRENNTVKVTKDVPIELLGPLGCGIQTGAGACINALKVTPASSFVTWGAGAVGLSALLAAKVCGASIIIAVDIVESRLELAKQLGATHVINSKTQDPVAAIKEITDGGVNFALESTGSPEILKQGVDALGILGKIAVVGAPQLGTTAQFDVNDLLLGGKTILGVVEGSGSPKKFIPELVRLYQQGKFPFDQLVKFYAFDEINQAAIDSRKGITLKPIIKIA

SEQ ID NO: 4945 - protein, 219 aa, Chloroflexus aurantiacus
MLQAGGAPILIPPLLDSATLRTIYDRLDGLLLAGGGDISPNHYGDQPHERLGAIDPPRDLMELRLARWAAADGKPLLGICRGVQLINVALGGSLYQDIPSQLDTAIDHNLSYAREDWTYMAHSITIAADSRLAQALGTTNLMINSLHHQAVRRVAPGLRAVAWAPDGVIEALEGDSQHFIVGVQCHPEALQATVDPRWQGLFAAFVQSCSDTHRQSRAA

SEQ ID NO: 4946 - protein, 255 aa, Chloroflexus aurantiacus
MNNQYRPLIGITTMHSGTSADGRELQAVRPTYLRAIEAAGGIPLIIYLTDDMSAVRRLYDLCDGILLPGGDDVDPAYYDEPPHPKLGAVDRQRDAVEIALARWAHAERKPLLGICRGLQVINVALGGSLYQDIPSQLATTIDHRANTRTRAWTELTHSLHILADSRLATVLHTTDIGCNTMHHQAIKQLAPGLRAVASAPDGIIEAFEALDDHYLLAVQCHPEHLWDSSEPRWQALFADFVNTCRERATNAHQAS

SEQ ID NO: 4947 - protein, 378 aa, Haemophilus influenzae Rd
MEIKQINSTIKSRAAVAFAPNQPLQIVEIDVEMPRKGEVLIRNTHTGVCHTDAFTLSGSDPEGVFPVVLGHEGAGVVVAVGEGVLSVKPGDHVIPLYTAECGECEFCRSGKTNLCVSVRDTQGKGLMPDCTTRFSYQGQPIYHYMGCSTFSEYSVVAEVSLAKINPEANHEQVCLLGCGVTTGIGAVHNTAKVQEGDSVAVFGLGAIGLAVVQGARQAKAGRIIAIDTNPAKFELAKQFGATDCLNPNDYDKPIKDVLLDINKWGIDHTFECIGNVNVMRQALESAHRGWGQSIIIGVAGAGQEISTRPFQLVTGRVWKGSAFGGVKGRSELPQMVEDSMKGDIQLEPFVTHTMPLDKINEAFELMHEGKSIRTVIHY

SEQ ID NO: 4948 - protein, 408 aa, Nitrosomonas europaea ATCC 19718
MQPIKKSSKLDNVCYDIRGPVLDRARQMEDEGQRVIKLNIGNPASFGFEAPDEILQDVIRNLSAASGYCDSKGLFAARKAIMHYTQEKNIANVQMDDIYIGNGVSELIMLATQALLENGDEILVPSPDYPLWTAAISLAGGVARHYTCDEQSSWLPDPENIKAQVSSRTRAIVIINPNNPTGALYPDDLLREIIEIARRNNLIIFADEIYDKILYDSASHTSVASLADDVLFVTFNGLSKNYRAAGFRSGWVVVSGNKTHARDYITGLNMLASMRLCANVPAQFGIQTALGGYQSIHDLTMPTGRLKRQRDLAWKLLTDIPGVTCFKPQSALYLFPRLDPDYYPVKDDEQFALDLLLEEKVLVVQGTGFNWSQPDHFRIVFLPNSDDLTEAIGRIAKFLDRYRTRHGS

SEQ ID NO: 4949 - protein, 391 aa, Xylella fastidiosa
MSIVRMTDLALSGKRVLIRQDLNVPIDQGRITSEQRIIASLPTIRVALERGAAVMVTSHLGRPKEGVWSEEDSLAPVAKRLSQLLGIEVPLRRDWVDGVQVAPGQLVLLENCRMNVGEAENDEALARKYAALCDVFVMDAFGTAHRAQASTHGVICCAAIAAGGPLLMAELDALSRGLEHPVKPLLAIVGGSKVSTKLELLSNLVNNVEQLITGGGIANTFLAAAGYSIGKSLYEGDLIETAREIITAAKARGAEIPLPTDVVVAKQFLPGVTATVKTVDAIVADDLILDIGPQTARHYAALIETAATVVWNGPVGVFEFDAFSKGTEVLARAVAASSAFSIAGGGDTLAAIDKYGVADQISYISTGGGAFLEFLEGKTLPAVAALQARSG

SEQ ID NO: 4950 - protein, 728 aa, Aspergillus fumigatus
MRLTFIPSLIGVANAVCPYMTGELNRRDEISDGDRAAATEEFLSQYYLNDNDAFMTSDVGGPIEDQNSLSAGERGPTLLEDFIFRQKIQRFDHERVPERAVHARGAGAHGVFTSYGDFSNITAASFLAKEGKQTPVFVRFSTVAGSRGSSDLARDVHGFATRFYTDEGNFDIVGNNIPVFFIQDAILFPDLIHAVKPRGDNEIPQAATAHDSAWDFFSQQPSTMHTLLWAMSGHGIPRSFRHVDGFGVHTFRFVTDDGASKLVKFHWKSLQGKASMVWEEAQQTSGKNPDFMRQDLHDAIEAGRYPERELGVQIMDEEDQLRFGFDLLDPTKIVPEEFVPITKLGKMQLNRNPRNYFAETEQVMFQPGHIVRGVDFTEDPLLQGRLFSYLDTQLNRHGGPNFEQLPINQPRVPVHNNNRDGAGQMFIPLNPHAYSPKTSVNGSPKQANQTVGDGFFTAPGRTTSGKLVRAVSSSFEDVWSQPRLFYNSLVPAEKQFVIDAIRFENANVKSPVVKNNVIIQLNRIDNDLARRVARAIGVAEPEPDPTFYHNNKTADVGTFGTKLKKLDGLKVGVLGSVQHPGSVEGASTLRDRLKEHGVDVVLVAEALADGVDQTYSTSDAIQFDAVVVAAGAESLFAASSFTGGSANSASGASSLYPTGRPLQILIDGFRFGKTVGALGSGTAALRNAGIATSRDGVYVAQSVTDDFANDLKEGLRTFKFLDRFPVDH

SEQ ID NO: 4951 - protein, 317 aa, Xylella fastidiosa Temecula1
MMPVTESIFAFVFPGQGSQSLGMLSEFAVLYPEILDTFAEASEGAGVDLWTLSQRGPEEMLNRTEYTQPALLAASVALWRLWQARGGRAPDLFAGHSLGEYSALVAAGALSLKDGAYLVRLRGQLMQDAVAVGVGAMAAVLGAEDALVAEVCAQVAGSEIVVPANFNSPVQVVIGGHATAVDRALVLLAERGVSKTVKLAVSVPSHTPLMRDAAHRLAEAMLGLVWKVPQIPVVQNVDGRVHDGVEAIREALVKQLYLPVQWTDCVRELATCGVVHIAECGPGKVLMGLIRRIDKTLDVRSLATPTGFSDVLDEWVF

SEQ ID NO: 4952 - protein, 250 aa, Solanum commersonii
  unsure (1)..(250): unsure at all Xaa locations
MGRGRVQLKRIENKINRQVTFSKRRSGLLKKAHEISVLCDAEVGLIVFSTKGKLFEYATDSCMERLLERYERYSFAEKQLVPTDHTSPGSWTLENAKLKARLEVLQRNEKLYVGEDLESLNMKELQNLEHQLASALKHIRSRKNQLMHESISVLQKQDRALQEQNNQLSKKVKEREKEVEQQNQWDQQNHEINSSTFVLPQQLDSPHLGEASQNTNVVDNGEVEGGNSSQXQGAANNTVMPQWMVRHLNG

SEQ ID NO: 4953 - protein, 376 aa, Hyparrhenia hirta
ALSIAGAVQSQKLAVRAISRLQALPGGDVKLLCGTVVEHVRELTGYDRVMVYKFHEDEHGEVVAESKRDNLEPYLGLHYPATDIPQASRFLFRQNRVRMIADCHATPVRVIQDPGLSQPLCLVGSTLRAPHGCHAQYMANMGSIASLVMAVIISSGGDDEQTGRGGISSAMKLWGLVVCHHSSPRCIPFPLRYACEFLMQAFGLQLNMELQLAHQLSEKHILRTQTLLCDMLLRDSPTGIVTQSPSIMDLVKCDGAALYYHGKYYPLGVTPTESQIKDIIEWLTVCHGDSTGLSTDNLADAGYLGAAVLGDAVCGMAVAYITPSDYLFWFRSHTAKEIKWGGAKHHPEDKDDGQRMHPRSSFKAFLEVVKSRSLPW

SEQ ID NO: 4954 - protein, 442 aa, Pseudomonas fluorescens
RERIHERVVHARGTGAHGTFTVTDNLSDLTKAKVFAAGETTPVFVRFSAVVHGNHSPETLRDPRGFATKFYTAEGNWDLVGNNFPTFFIRDAIKFPDMVHAFKPDPRTNLDDDSRRFDFFSHVPESTRTLTELYSDSGTPASYREMDGNGVHAYKLINAKGEVHYVKFHWKSLQGIKNLDPKQVTEVQGRDYSHMTNDLVAHINKGDFPKWDLYVQVLKPEDLAKFDFEPLDATKIWPDFTERKVGQMVLNRNLDNVFQETEQVPWPPANLVPGIEPSEIRLLQARLCSYAETQIYRLGAKRLQLRIQRPTVTVNNGNQDGAMNFGKDTTGVNYQPKSSDAREEPATARYSESALAGNTQQAKIQREQNFKQAGDLYRSYSKKERQDLIDNFGGSLATTDDESKHIILSFLYKADPEYGTGVAKVAKGDLARVKALAEKLTD

SEQ ID NO: 4955 - protein, 376 aa, Ischaemum afrum
  unsure (1)..(376): unsure at all Xaa locations
ALSIAGAVQSQKLAVRAISRLQALPGGDVKLLCDTVVEHVRELTGYDRVMVYRFHEDEHGEVVAESRRDSLEPYLGLHYPATDIPQASRFLFRQNRVRMIADCHATPVRVVQDPGLSQPLCLVGSTLRAPHGCHAQYMANMGSIASLVMAVIISSGGDDEQTGRGGISSAMKLWGLVVCHHTSPRCIPFPLRYACEFLMQAFGLQLNMELQLAHQLSEKHILRTQTLLCDMLLRDSPTGIVTQSPSIMDLVKCDGAALYYXGKYYPLGVTPTESQIKDIIEWLTVCHGDSTGLSTDSLADAGYLGAAALGDAVCGMAVAYITPSDYLFWFRSHTAKEIKWGGAKHHPEDKDDGQRMHPRSSFKAFLEVVKSRSLPW

SEQ ID NO: 4956 - protein, 555 aa, Buchnera aphidicola str. Sg (Schizaphis graminum)
MKNINLIETKSWKDLKNHFKEVKNIHLKDLFLSDFNRFKKFSIFFENEILIDFSKNRITEKTLILLLNLAKEMNVKSAIKLMFSGSKINQTENRSVLHIALRNRSNFPILLNNSDIMSEVNDVLKKMKNFSELVIDGTWKGYSGKSISDVVNIGIGGSDLGPYMVTEALRPYKNHLNIHYVSNIDGTHLSEILKKINPETTIFLIASKTFTTDETITNANSAKFWFLKHSKTKETLDKHFFALSANINNAVNFGINIKNIFQFWDWVGGRFSLWSSAGLSIVLSIGFNNFEKFLQGAHVMDNHFYHTEYDKNIPILLALISIWYTNFFNSETEAIFPYDQYMHRFSAYFQQSNMESNGKSIDKNGNKVCYQTGPIIWGEPGTNGQHAFFQLIHQGTKLIPSDFIVPTVSHNNLNDHHLKLISNFLAQTQVLAFGKSKNSFLKESTSFKKEEDEFNRILPFKICEGNKPTNSILLRKITPYTLGMLIALYEHKIFVQGHILNIFSFDQWGVEIGKEVAQSIYKNINEKTKNSKSYDSSTQGLIDFYNFFKNKQNYL

SEQ ID NO: 4957 - protein, 323 aa, Microstegium nudum
ALSIAGAVQSQKLAVRAISRLQALPGGDVKLLCDTVVEHVRELTGYDRVMVYRFHEDEHGEVVAESRRDNLEPYLGLHYPATDIPQASRFLFRQNRVRMIADCHATPVRVIQDPGLSQPLCLVGSTLRAPHGCHAQYMANMGSIASLVMAVIISSGGDDEQTGRGGISSAMKLWGLVVCHHTSPRCIPFPLRYACEFLMQAFGLQLNMELQLAHQLSEKHILRTQTLLCDMLLRDSPTGIVTQSPSIMDLVKCDGAALYYHGKYYPLGVTPTESQIKDIIEWLTVCHGDSTGLSTDSLADAGYLGAAALGDAVCGMAVAYITP

SEQ ID NO: 4958 - protein, 124 aa, Agrobacterium tumefaciens str. C58
MSYNFQGKQILVLEDDALLAMDMEDFLSDLGVNVVGPVSHIGAALEKINATDLDGAVIDLNLRGELSLPVIEELKAANIPFVICSGYAEIPGVRAKLDGLTVVSKPCDFDNLSRVLANEFSLTN

SEQ ID NO: 4959 - protein, 373 aa, Paspalum simplex
ALFVAGGLQAHKLAVRAISRLQALPGGDVKLLCDTVVELVRDLTGYDRVMVYRFHEDEHGEVVAESRRENLEPYLGLHYPATDIPQASRFLFRQNRVRMIDDCHATPVRVIQDPGLSQPLCLVGSTLRAPHGCHAQYMATWVQLHRLLWQSSFGGDDEQTRGGISSAMKLWGLVVCHHTSPRFIPFSLRYACEFLMQAFGLQLNMELQLARQLSEKHILRTQTLLCDMLLRDSPTGIVTQSPSIMDLVKCDGAALYYHGKYYPWGVTPTESQIKDIIEWLTVCHGDSTGLSTDSLADAGYLGAAALGDAVCGMAVAYITPSDYLFWFRSHTAKEIKWGGAKHHPEDKDDGQRMHPRSSFKAFLEVVKSRSLPW

SEQ ID NO: 4960 - protein, 333 aa, Phacelurus digitatus
TGYDRVMVYRFHEDEHGEVVAESRRDNLEPYLGLHYPATDIPQASRFLFRQNRVRMIADCHATPVRVIQDPGLSQPLCLVGSTLRAPHGCHAQYMANMGSIASLVMAVIISSGGDDEQTGRGGISSAMKLWGLVVCHHTSPRCIPFPLRYACEFLMQAFGLQLNMELQLAHQLSEKHILRTQTLLCDMLLRDSPTGIVTQSPSIMDLVKCDGAALYYHGKYYPLGVTPTESQIKDIIEWLTVCHGDSTGLSTDSLADAGYLGAAALGDAVCGMAVAYITPSGYLFWFRSHTAKEIKWGGAKHHPEDKDDGQRMHPRSSFKAFLEVVKSRSLPW

SEQ ID NO: 4961 - protein, 563 aa, Oryza sativa
MNSAAAAAACASAPAWVVGGGAGGGARSARGPCGIRVCGLGGEAVALRSLRISQGAAVRRAAVAARAAAENGVAGSGGFDYDLVIIGAGVGGHGAALHAVEEGLKTAIIEGDVVGGTCVNRGCVPSKALLAVSGRMRELHDEHHMKSLGLQVSSPGYDRQAVADHANNLASKIRSNLTNSMKALGVDILSGFGAIVGKQKVRYGKVGFPDKEITARNIIIATGSVPFVPKGIEVDGKTVFTSDHALKLESVPDWIAIVGSGYIGLEFSDVYTALGSEVTFVEALDQLMPGFDPEIAKLAQRVLINPRNIDYHTGVFASKITPAKDGKPVQIELIDAKTKEHKETLEVDAALIATGRAPFTKGLGLENINVVTQRGFIPVDERMRVMDADGNVVPNLYCIGDANGKLMLAHAASAQGISVVEQISGRDHILNHLSIPAACFTHPEISMVGLTEPQAREKADKEGFEISVVKTSFKANTKALAENEGDGLAKLIYRPDTGEILGVHILGLHAADLIHEASNAIALGTRLQDIKFAVHAHPTLSEVLDELFKAAKVHFSAPFFSCV

SEQ ID NO: 4962 - protein, 474 aa, Zea mays
MDMALASKASPPPWNATAAEQPIPKRDKAAANDSTYLNPQAHDSVLGIILGGGAGTRLYPLTKKRAKPAVPLGANYRLIDIPVSNCLNSNISKIYVLTQFNSASLNRHLSRAYGSNIGGYKNEGFVEVLAAQQSPDNPNWFQGTADAVRQYLWLFEEHNVMEFLILAGDHLYRMDYEKFIQAHRETNADITVAALPMDEKRATAFGLMKIDEEGRIIEFAEKPKGEQLKAMMVDTTILGLDDVRAKEMPYIASMGIYVFSKDVMLQLLREQFPEANDFGSEVIPGATSIGKRVQAYLYDGYWEDIGTIAAFYNANLGITKKPIPDFSFYDRFAPIYTQPRHLPPSKVLDADVTDSVIGEGCVIKNCKINHSVVGLRSCISEGAIIEDSLLMGADYYETEADKKLLAEKGGIPIGIGKNSCIRRAIIDKNARIGDNVKVFQTDVPTVKNINLDFSLGYYIILDMPFCPLIFNIYF

SEQ ID NO: 4963 - protein, 503 aa, Pisum sativum
MDIPIPTRQLFINGDWKAPVLNKRIPVINPATQNIIGDIPAATKEDVDVAVAAAKTALTRNKGADWATASGAVRARYLRAIAAKVTEKKPELAKLESIDCGKPLDEAAWDIDDVAGCFEYYADLAEKLDARQKAPVSLPMDTFKSHVLREPIGVVGLITPWNYPMLMATWKVAPALAAGCAAILKPSELASLTCLELGEICKEVGLPRSVLNIVTGLGHEAGAPLASHPDVDKISFTGSSATGSKIMTTAAQLVKPVSLELGGKSPLVVFEDVDLDKAAEWAIFGCFWTNGQICSATSRLILHESIATEFLNRIVKWIKNIKISDPLEEGCRLGPVVSEGQYEKILKFVSNAKSEGATILTGGSRPEHLKKGFFIEPTIITDVTTNMQIWREEVFGPVLCVKTFSTEEEAIDLANDTVYGLGAAVISNDLERCERVTKAFKAGIVWVNCSQPCFTQAPWGGVKRSGFGRELGEWGLDNYLSVKQVTQYISEEPWGWYQPPAKL

SEQ ID NO: 4964 - protein, 494 aa, Triticum aestivum
MDPCKFRPSSSFDTKTTTTNAGQPVWNDNEALTVGPRGPILLEDYHLLEKIAHFARERIPERVVHARGASAKGFFECTHDVTGLTCADFLRAPGARTPVIVRFSTVIHERGSPETIRDPRGFAVKFYTREGNWDLLGNNFPVFFIRDGIKFPDVIHAFKPNPKSHVQEYWRVFDFLSHHPESLHTFFFLFDDVGIPTDYRHMDGFGVNTYTFVTRAGKSHYVKFHWRPTCGVSCLMDDEATLVGGKNHSHATQDLYDSIDAGNFPEWKLFVQVIDPDDEDRFDFDPLDDTKTWPEDLVPLQPVGRLVLDRNVDNFFNENEQLAFGPGLVVPGIYYSDDKMLQCRVFAYADTQRYRLGPNYLMLPVNAPKCGFKNNHYDGAMNFMHRDEEVDYYPSRHAPLRQAEPASFPVPTRPVVGRREKTRIKKENDFVQPGERYRSWAPDRQDRFVRRFADALAHPKVSHELRVIWIDFLSKCDKSCGMKVANRLNVKPSM

SEQ ID NO: 4965 - protein, 175 aa, Triticum aestivum
MAPAVMASSATTVAPFQGLKSTTGLPISRPSGSAGLSNVSNGGRIRCMQVWPIEGIKKFETLSYLPPLSTEALLKQVDYLIRSKWVPCLEFSKVGFVFREHNSSPGYYDGRYWTMWKLPMFGCTDATQVLNEVEEVKKEYPDAYVRVIGFDNMRQVQCVSFIAFRPPGCEESGKA

SEQ ID NO: 4966 - protein, 342 aa, Solanum tuberosum
MTRRCSHCSTNGHNSRTCPNRGVKLFGVRLTDGLIRKSASMGNLTHFASGSGGGSTPLNGVVHDSPGDTPDHPAVGGGSADGYASEDFVAGSSSSRERKKGVPWTEEEHRMFLLGLQKLGKGDWRGIARNYVISRTPTQVASHAQKYFIRQSNMSRRKRRSSLFDIVADESGDTPMVSRDFLADDPAQAEMQSNNLLPPTPAVDEECESMGSAASANSIDGEHALPIPESSQYQHPLVYPAYVAPFYPMPYPCWPGYTAEPAIAETHEVLKPIAVHSKSPINVDELVGMSKLSLGESIGDAAKPPSLSLKLVEGSSRQSAFHANPSSGSSGMNSSHNPIHAV

SEQ ID NO: 4967 - protein, 338 aa, Streptococcus pyogenes MGAS8232
MKAVVVNQASTGVEVVEHDLPNVGHGEALVKVEYCGVCHTDLHVAHGDFGQVPGRILGHEGIGIVEEIGEGVTSLKVGDRVSIAWFFEGCGHCEYCTTGRETLCRSVKNAGYSVDGGMSEYAVVTADYAVKVPEGLDPAQASSITCAGVTTYKAIKEAGVAPGQWIVIFGAGGLGNLAVQYAKKVFNAHVVAVDINNDKLELAKEVGADILVNGKEIEDVPGYIQEKIGGAHGVVVTAVSKVAFNQAIDSVRAGGTVVAVGLPSEYMELSIVKTVLDGIKVVGSLVGTRKDLEEAFAFGAEGLVAPVVEKVPVDTAPEVFDEMERGLIQGRKVLDFIS

SEQ ID NO: 4968 - protein, 474 aa, Zea mays
  unsure (1)..(474): unsure at all Xaa locations
MDMALASKASPPPSNATAAEQXIPKXXXXXXXXXXXXXXXXXXSVLGIILGGGAGTRLYPLTKKRAKPAVPLGANYRLIDIPVSNCLNSNISKIYVLTQFNSASLNRHLSRAYGSNIGGYKNEGFVEVLAAQQSPDNPNWFQGTADAVRQYLWLFEEHNVMEFLILAGDHLYRMDYEKFIQAHRETNADITVAALPMDEKRATAFGLMKIDEEGRIIEFAEKPKGEQLKAMMVDTTILGLDDVRAKEMPYIASMGIYVFSKDVMLQLLREQFPEANDFGSEVIPGATSIGKRVQAYLYDGYWEDIGTIAAFYNANLGITKKPMPDFSFYDRFAPIYTQPRHLPPSKVLDADVTDSVIGEGCVIKNCKINHSVVGLRSCISEGAIIEDSLLMGADYYETEADKKLLAEKGGIPIGIGKNSCIRRAIIDKNARIGDNVKVFQTDVPTVKNINLDFSLGYYIILDMPFCPLIFNIYF

SEQ ID NO: 4969 - protein, 474 aa, Zea mays
MDMALASKASPPPWNATTAEQLIPKRDKAAANDSTYLNPQAHDSVLGIILGGGAGTRLYPLTKKRAKPAVPLGANYRLIDIPVSNCLNSNISKIYVLTQFNSASLNRHLSRAYGSNIGGYKNEGFVEVLAAQQSPDNPNWFQGTADAVRQYLWLFEEHNVMEFLILAGDHLYRMDYEKFIQAHRETNADITVAALPMDEKRATAFGLMKIDEEGRIIEFAEKPKGEQLKAMMVDTTILGLDDVRAKEMPYIASMGIYVFSKDVMLQLLREQFPEANDFGSEVIPGATSIGKRVQAYLYDGYWEDIGTIAAFYNANLGITKKPMPDFSFYDRFAPIYTQPRHLPPSKVLDADVTDSVIGEGCVIKNCKINHSVVGLRSCISEGAIIEDSLLMGADYYETEADKKLLAEKGGIPIGIGKNSCIRRAIIDKNARIGDNVKVFQTDVPTVKNINLDFSLGYYIILDMPFCPLIFNIYF

SEQ ID NO: 4970 - protein, 316 aa, Erwinia carotovora subsp. atroseptica SCRI1043
MNQLEALKQFTVVVADSGDIDSIRQFSPQDATTNPSLILKAATLPQYQPLFDDAIAYANLQGGSPETRLINASDRLAVNIGAEVLKSIPGRISTEVDARLSFDRGMCVAKARKLIGMYQEKDIPRSRILIKLAATWEGIRAAEELEKEGINCNLTLLFSFAQARACAEAGVFLISPFVGRIYDWYQEKQPTSDYQAESDPGVISVRDIYDYYKRHRYQTVIMGASFRKVEQILALAGCDRLTISPALLEQLKNSSDPVERQLTPSTEAFHPPSPLSEAEFRWEHHQDAMAVDKLAEGIRLFAADQQKLEALLAAKL

SEQ ID NO: 4971 - protein, 208 aa, Schizosaccharomyces pombe
MSFAKHCFGSKKKPIYRKIVILGDGAAGKTSLLNVFTKGYFPQVYEPTIFENYIHDIFVDGNSIELSLWDTAGQEEYDQLRSLSYSDTHVIMICFAVDSRDSLENVITKWLPEVSSNCPGVKLVLVALKCDLRGADEEQVDHSKIIDYEEGLAAAKKINAVRYLECSAKLNRGVNEAFTEAARVALAAQPRGTKDGADESHGTGCIIA

SEQ ID NO: 4972 - protein, 151 aa, Wigglesworthia glossinidia endosymbiont of Glossina brevipalpis
MKIKEKMTDFGFSYVKKSKKNSMIEDIFNNVSYKYDLMNDIMSFGVHRIWKNILVYCNSTNPDQKILDLASGTGDITKRLSKLINKKGFIVSLDINRKMLKICRKKIRNSGTIRNIFYIQANSEYLPFKKNIFDSVIVSFGFRNFTEKKKQ

SEQ ID NO: 4973 - protein, 312 aa, Pseudomonas syringae
MSASLAFVFPGQGSQSLGMLAEQGAQHPLILDTFEQASEALGYDLWALTQNGPAELLNQTDKTQPAILTASVALWHVWLAEGGAVPAFVAGHSLGEYSALVAAQSLSLADAVKLVERRGQLMQEAVPAGQGGMAAILGLDDADVIAACAEAAQGEVVSAVNFNSPGQVVIAGSAEAVKRTMELCKARGAKRALPLPVSVPSHCELMRPAAERFAEAVEAIEWQAPKIALVQNVSASAVSDLATLKRDLLEQLYKPVRWVESIQCLASRGATQLVECGPGKVLAGLNKRCADGVMTYNLDTPDAFAAARAALA

SEQ ID NO: 4974 - protein, 342 aa, Agrobacterium tumefaciens str. C58
MHIAMADETVLRMEASRLLLLEDSSVDAELIEDQLSRLSPPPAVTRAVGKASFIEALEKQQFDIILADFSLPDFDGMSALDLVMRTRPDTPFIFVSGILGEDAAIDAFRRGATDYVLKQRLVRLPSAVERALAEAREKQERKRAELHKELLVRELSHRVKNTMAMVVSIIRRTAKGSTSIKDYQERLVARVSALAESHALLFQSNWGETNLRDVVKRAIEPHNTFASRVELEGPDGVHVSPKSALALGMILHELATNAQKYGSLSGANGKVEVFWKKILNGDGNDCIDLRWQESGGPPVSVPQDTGFGTTLITRGVQYELQAESEIRYDPDGLQYRVIFPLD

SEQ ID NO: 4975 - protein, 347 aa, Sulfolobus solfataricus
MRAVRLVEIGKPLSLQEIGVPKPKGPQVLIKVEAAGVCHSDVHMRQGRFGNLRIVEDLGVKLPVTLGHEIAGKIEEVGDEVVGYSKGDLVAVNPWQGEGNCYYCRIGEEHLCDSPRWLGINFDGAYAEYVIVPHYKYMYKLRRLNAVEAAPLTCSGITTYRAVRKASLDPTKTLLVVGAGGGLGTMAVQIAKAVSGATIIGVDVREEAVEAAKRAGADYVINASMQDPLAEIRRITESKGVDAVIDLNYSEKTLSVYPKALAKQGKYVMVGLFGADLHYHAPLITLSEIQFVGSLVGNQSDFLGIMRLAEAGKVKPMITKTMKLEEANEAIDNLENFKAIGRQVLIP

SEQ ID NO: 4976 - protein, 745 aa, Agrobacterium tumefaciens str. C58 (Cereon)
MQRERLEKVMSSHTPKLDSCGAEPIHIPGAIQEHGALLVLSAREFSVVQASDNLANYIGVDLPIGAVATEANLPFISVLSAWYSGEESNFRYAWAEKKLDVSAHRSGTLVILEVEKAGVGESAEKLMGELTSLAKYLNSAPSLEDALFRTAQLVSSISGHDRTLIYDFGLDWSGHVVAEAGSGALPSYLGLRFPAGDIPPQARQLYTINRLRMIPDVDYKPVPIRPEVNAETGAVLDMSFSQLRSVSPVHLEYMRNMGTAASMSVSIVVNGALWGLIACHHATPHSVSLAVREACDFAAQLLSMRIAMEQSSQDASRRVELGHIQARLLKGMAAAEKWVDGLLGGEGEREDLLKQVGADGAALVLGDDYELVGNTPSREQVEELILWLGEREIADVFATDNLAGNYPTAAAYASVASGIIAMRVSELHGSWLIWFRPEVIKTVRWGGDPHKTVQESGRIHPRKSFEIWKEQLRNTSFPWSEPELAAARELRGAIIGIVLRKTEEMADLTRELQRTNKELEAFSYSVSHDLRAPFRHIVGFAQLLRERSDALDEKSLHYLQMISEAALGAGRLVDDLLNFSQLGRTQLTLKPVDMQKVVSEVRRSLSHAVSDRQIEWRIGALPVIFGDPTLLRQVWYNLIENAIKYSSREPVSIITISAVETEDDVTYSVEDNGVGFDMAYYNKLFGVFQRLQRVEDFEGTGIGLALVRRIVERHHGLVGAEGTVGEGATFSFTLPVTKVEEEKIA

SEQ ID NO: 4977 - protein, 376 aa, Saccharum officinarum
  unsure (1)..(376): unsure at all Xaa locations
ALSIAGAVQSQKLAVRAISRLQALPGGDVKLLCDTVVEHVRELTGYDRVMVYRFHEDEHGEVVAESRRDNLEPYLGLHYPATDIPQASRFLFRQNRVRMIANCHATPVRVIQDPGLLQPLCLVGSTLRAPXXXXXXXXXXXXXXXXXVMAVIISSGGDDEQTGRGGISSAMKLWGLVVCHHTSPRCIPLPLRYACEFLMQAFGLQLNMELQLAHQLSEKHILRTQTLLCDMLLRDSPTGIVTQSPSIMDLVKCDGAALYYHGKYYPLGVTPTESQIKDIIEWLTVCHGDSTGLSTDSLADASYLGAAALGDAVCGMAVAYITPSDYLFWFRSHTAKEIKWGGAKHHPEDKDDGQRMHPRSSFKAFLEVVKSRSLPW

SEQ ID NO: 4978 - protein, 332 aa, Schizachyrium scoparium
GYDRVMVYRFHEDEHGEVVAESKRDNLDPYLGLHYPATDIPQASRFLFRQNRVRMIADCHATPVRVIQDPGLSQPLCLVGSTLRAPHGCHAQYMANMGSIASLVMAVIISSGGDDEQTGRGGISSAMKLWGLVVCHHTSPRCIPFPLRYACEFLMQAFGLQLNMELQLAHQLSEKHILRTQTLLCDMLLRDSPTGIVTQSPSIMDLVKCDGAALYYHGKYYPLGITPTESQIKDIIEWLTVCHGDSTGLSTDSLADAGYLGAAALGDAVCGMAVAYITPSDYLFWFRSHTAKEIKWGGAKHHPEDKDDGQRMHPRSSFKAFLEVVKSRSLPW

SEQ ID NO: 4979 - protein, 465 aa, Oryza sativa
  unsure (1)..(465): unsure at all Xaa locations
MEQPNDVGILAMDIYFPPACVHQEALEAHDGASKGKYTIGLGQDCMAYCSEVEDVISMSLTVVASLLKKYNIDPKQIGRLEVGSETVIDKSKSIKTWLMHIFEESGNTDIEGVDSSNACYGGTAALLNCVNWVETLLIQWPILCNYYDQVYAEGPARPTGGAAAIAMLIGPNAPISFESKYRASHMLHVYXIYKRELAREYPVADGKLSQTCYLMALDSCYRQYCTKYEKIVGEQFSISDAEYCVFHSPYNKLVQKSFARLYFNDFMRNCSTVDNDAKEKLQPFANLTSEESYQSRDLEKASQQVAKHLYDIKVQPSTLLPKQIGNMYTASLYAALASVIYNKHDSLDGQRILMFSYGSGLTSTMFSLRLHDGQHPFSLMNIASVLDVTTKLESRHVTSPEKFIETLKLMEHRYGAKDFETSKDTSLLPPGTFYLTKVDSMYRRFYDKKAAEGKIKGCNGIANGH

SEQ ID NO: 4980 - protein, 376 aa, Tripsacum dactyloides
ALSIAGAVQSQKLAVRAISRLQALPGGDVKLLCDTVVEHVRELTGYDRVMVYRFHEDEHGEVVAESRRDNLEPYLGLHYPATDIPQASRFLFRQNRVRMIADCHATPVRVIQDPGLSQPLCLVGSTLRAPHGCHAQYMANMGSIASLVMAVIISSGGDDEQTGRGGISSAMKLWGLVVCHHTSPRCIPFPLRYACEFLMQAFGLQLNMELQLAHQLSEKHILRTQTLLCDMLLRDSPTGIVTQSPSIMDLVKCDGAALYYHGKYYPLGVTPTESQIKDIIEWLTVCHGDSTGLSTDSLADAGYLGAAALGDAVCGMAVAYITPSDYLFWFRSHTAKEIKWGGAKHHPEDKDDGQRMHPRSSFKAFLEVVKSRSLPW

SEQ ID NO: 4981 - protein, 471 aa, Mycobacterium tuberculosis CDC1551
MVTRIVILGGGPAGYEAALVAATSHPETTQVTVIDCDGIGGAAVLDDCVPSKTFIASTGLRTELRRAPHLGFHIDFDDAKISLPQIHARVKTLAAAQSADITAQLLSMGVQVIAGRGELIDSTPGLARHRIKATAADGSTSEHEADVVLVATGASPRILPSAQPDGERILTWRQLYDLDALPDHLIVVGSGVTGAEFVDAYTELGVPVTVVASQDHVLPYEDADAALVLEESFAERGVRLFKNARAASVTRTGAGVLVTMTDGRTVEGSHALMTIGSVPNTSGLGLERVGIQLGRGNYLTVDRVSRTLATGIYAAGDCTGLLPLASVAAMQGRIAMYHALGEGVSPIRLRTVAATVFTRPEIAAVGVPQSVIDAGSVAARTIMLPLRTNARAKMSEMRHGFVKIFCRRSTGVVIGGVVVAPIASELILPIAVAVQNRITVNELAQTLAVYPSLSGSITEAARRLMAHDDLD

SEQ ID NO: 4982 - protein, 376 aa, Tristachya superba
ALSIAGAVQSQKLAVRAISRLQALPGGDVKLLCDTVVEHVRELTGYDRVMVYRFHEDEHGEVVAECRRDNLEPYLGLHYPATDIPQASRFLSRQNRVRMIADCHATPVRVIQDPGLSQPLCLVGSTLRAPHGCHAQYMANMGSIASLVMAVIISSGGDDEQTARGGISSSMKLWGLVVCHHTSPRFIPFPLRYACEFLMQAFGLQLNMELQLAHQLSEKHILRTQTLLCDMLLRDSPTGIVTQSPSIMDLVKCDGAALYYHGKYYPLGVTPTESQIKDIIEWLTVCHGDSTGLSTDSLADAGYHGATALGDAVCGMAVTYITPSDYLFWFRSHTAKEIKWGGAKHHPEDKDDGQRMHPRSSFKAFLEVVKSRSLPW

SEQ ID NO: 4983 - protein, 376 aa, Urochloa mutica
ALSIAGAVQSQKLAVRAISRLQALPGGDVKLLCDTVVEHVRELTGYDRVMVYRFHEDEHGEVVAECRRDNLEPYLGLHYPATDIPQASRFLFRQNRVRMIADCHATPVRVIQDPGLSQPLCLVGSTLRAPHGCHAQYMANMGSIASLVMAVIISSGGDDEQTARGGISSSMKLWGLVVCHHTSPRFIPFPLRYACEFLMQAFGLQLNMELQLAHQLSEKHILRTQTLLCDMLLRDSPTGIVTQSPSIMDLVKCDGAALYYHGKYYPLGVTPTESQIKDIIEWLTVCHGDSTGLSTDSLADAGYHGATALGDAVCGMAVAYITPSDYLFWFRSHTAKEIKWGGAKHHPEDKDDGQRMHPRSSFKAFLEVVKSRSLPW

SEQ ID NO: 4984 - protein, 534 aa, Mycobacterium tuberculosis CDC1551
MTPENWIAHDPDPQTAAELAACGPDELKARFSRPLAFGTAGLRGHLRGGPDAMNLAVVLRATWAVARVLTDRGLAGSPVIVGRDARHGSPAFAAAAAEVLAAAGFSVLLLPDPAPTPVVAFAVRHTGAAAGIQITASHNPATDNGYKVYVDGGLQLLAPTDRQIEAAMATAPPADQIARKTVNPSENRASDLIDRYIQRAAGVRRCAGSVRVALTPLHGVGGAMAVETLRRAGFTEVHTVATQFAPNPDFPTVTLPNPEEPGATDALLTLATDVDADVAIALDPDADRCAVGIPTVSGWRMLSGDETGWLLGDYILSQTDDRASPPETRVVASTVVSSRMLAAIAAHHAAVHVETLTGFKWLARADANLPGTLVYAYEEAIGHCVDPTAVRDKDGISAAVLVCDLVAALKGQGRSVTDALDELARCYGVHEVAALSRPVSGAVETTDLMRRLREDPPRRLAGFPATVTDIGDTLILTGGDDNMLVRVAVRPSGTEPKLKCYLEIRCAVTGDLPAARQLVRARIDELSASVRRWW

SEQ ID NO: 4985 - protein, 474 aa, Zea mays
MDMALASKASPPPSNATTAEQLIPKRDKAAANDSTYLNPQAHDSVLGIILGGGAGTRLYPLTKKRAKPAVPLGANYRLIDIPVSNCLNSNISKIYVLTQFNSASLNRHLSRAYGSNIGGYKNEGFVEVLAAQQSPDNPNWFQGTADAVRQYLWLFEEHNVMEFLILAGDHLYRMDYEKFIQAHRETNADITVAALPMDEKRATAFGLMKIDEEGRIIEFAEKPKGEQLKAMMVDTTILGLDDVRAKEMPYIASMGIYVFSKDVMLQLLREQFPEANDFGSEVIPGATSIGKRVQAYLYDGYWEDIGTIAAFYNANLGITKKPMPDFSFYDRFAPIYTQPRHLPPSKVLDADVTDSVIGEGCVIKNCKINHSVVGLRSCISEGAIIEDSLLMGADYYETEADKKLLAEKGGIPIGIGKNSCIRRAIIDKNARIGDNVKVFQTDVPTVKNINLDFSLGYYIILDMPFCPLIFNIYF

SEQ ID NO: 4986 - protein, 389 aa, Lycopersicon esculentum
MASTKQYFSAAGKPIRCKAAVARKAGEPLVIEEVIVAPPKAHEVRVKIICTSLCHTDITLWKLKEFPGCFPRILGHEAFGVVESVGEDVDELKEGDSVVPIFLPDCMDCVDCKSKKSNLCSKFPIQVSPLLHRNDTSRFSNAAGETLHHFLYISSFSEYTVVDVVNVTKIDPEIPPNRACLLSCGVSTGVGAAWKTANVEPGSTVVIFGLGSIGLAVAEGARLCGATRIIGVDINSNKFEIGKQFGITEFVNSKSCVDKPISQVIIEMTDGGADYCFECVGLATLVQEAFTCCRKGWGKTVVLGVDKPDAHLNLNSFEVLQSQKTLTGALFGGLKPKSDVPILVKRYLDKELQLNKFVTHEVNFEDINKAFDLLIQGKSLRCVIWMDKL

SEQ ID NO: 4987 - protein, 390 aa, Lycopersicon esculentum
MASTVQSGISKTAGKPIRCRAAVARKAGEPLVIEEVIVAPPKAHEVRLKIICTSLCHTDITLWKLKEFPGCFPRILGHEAFGVVESVGEDVDHLKEGDSVVPIFLPDCMDCVDCKSKKSNLCSKFPIQSSLLLHRDDTSRFTNADGETLHHYLYISSFSEYTVVDVVNVTKIDPEIPPNRACLLSCGVSTGVGAAWKTANVEPGSTVVIFGLGSVGLAVAEGARLCGATRIIGVGRNSDKFEIGKQFGVTEFVNSKSCGDKPVSQVIIEMTNGGADYCNECVGLGRVVQEAFACCRKGWGKTIVLGVDKPDARLNLNSFEVLQSNKTLMGSFFGGLKPKSDVHTSLKRYLDKELELDKFVTHEVNLEDINKAFDLLIQLKTLRCVIWMEK

SEQ ID NO: 4988 - protein, 598 aa, Glycine max
  unsure (1)..(598): unsure at all Xaa locations
MMTMEKESMENNEKHVTENDPKINYRGWKAMPFIIGNETFEKLGAIGTLANLLVYLTTVFNLKNITATNIINIFNGSTNFATFIGAFLSDTYFGRYKTIGFCTFTSFLGLLLIQLTAVFKNLHPPHCGKEMKTCIGPTAGQMAFLVSGFGLLLIGAAGVRPCNLAFGADQFNPNTDSGKKGINSFFNWYFFTFTFAQMVSLTLIVYVQSNVSWAIGLGIPAALMLISCLVYFMGSKIYVKVKPSGSPITGIVQVLVVAVKKRSLKLPAEHPMLSLFNYVPPMSVNSKLPYTFQFRLLDKAAIVTPXKDKIKPDGSAADPWNLCSIQQVEEAKCVVRVLPIWFAAIVYHLVIVQMHTLLVFQALQSDRRLRRSSNFKIPGASFNVFLMLSMTLWLPIYDRIVVPFLHRITGKEGGITLLQRMGIGIFLSALCMLVAGVVEEHRRSLALTNPIGVQPRKGAISSMSGLWLIPQLALAGLSESFTAVGQVEFYYKQFPENMRSISGSLFYCGMAGSSYLSTLLISIVHNTSEKSATGNRLPEDLNKGRLDFFYYMIAALEIMNLGYFLLCSKWYKYKETGSSSNLELNQVPKQSETSTIGV

SEQ ID NO: 4989 - protein, 321 aa, Rhodococcus sp. X309
AAAGGKIDATADANKLALDVIGLAGFGYDFASFDGDEHPFVGAMSRVLEHVNRTSNDIPFLRKLRGNGADLQYEKDIAFVRTVVDDVITERQAKPGEHQDDLLDLMLNNIDDETGEKLDPVNIRNQVLTFLVAGNETTAGAIAFALYFLSRHPEIADAARAEVADITGGETPAFEDVARMRYLRRVVDETLRLWPSAPGYFRKVRTDTTLGGRYAMPKGSWVFVLLPQLHRDPVWGENPDSFDPDRFKPENVKKRPAHAYRPFGTGPRSCIGRQFALHEAVLSLATILQRYSFQSDPEYKLDVREALTLKPVGLELSLQRL

SEQ ID NO: 4990 - protein, 845 aa, arsenite-oxidising bacterium NT-26
MAFKRHIDRLPIIPADAKKHNVTCHFCIVGCGYHAYTWPINKQGGTDPQNNIFGVDLSEQQQAESDAWYSPSMYNVVKQDGRDVHVVIKPDHECVVNSGLGSVRGARMAETSFSEARNTQQQRLTDPLVWRYGQMQPTSWDDALDLVARVTAKIVKEKGEDALIVSAFDHGGAGGGYENTWGTGKLYFEAMKVKNIRIHNRPAYNSEVHGTRDMGVGELNNCYEDAELADTIVAVGTNALETQTNYFLNHWIPNLRGESLGKKKELMPEEPHEAGRIIIVDPRRTVTVNACEQTAGADNVLHLAINSGTDLALFNALFTYIADKGWVDRDFIDKSTLREGTARPPLYPARGVSEANPGHLSSFEDAVEGCRMSIEEAAEITGLDAAQIIKAAEWIGMPKEGGKRRRVMFGYEKGLIWGNDNYRTNGALVNLALATGNIGRPGGGVVRLGGHQEGYVRPSDAHVGRPAAYVDQLLIGGQGGVHHIWGCDHYKTTLNAHEFKRVYKKRTDMVKDAMSAAPYGDREAMVNAIVDAINQGGLFAVNVDIIPTKIGEACHVILPAATSGEMNLTSMNGERRMRLTERYMDPPGQSMPDCLIAARLANTMERVLTEMGDVGYAAQFKGFDWQTEEDAFMDGYNKNAHGGEFVTYERLSAMGTNGFQEPATGFTDGKIEGTQRLYTDGVFSTDDGKARFMDAPWRGLQAPGKQQQKDSHKYLINNGRANVVWQSAYLDQENDFVMDRFPYPFIEMNPEDMAEAGLKEGDLVEIYNDAGATQAMAYPTPTARRGETFMLFGFPTGVQGNVTSAGTNELIIPNYKQTWGNIRKISDAPRNVAHLSFKSKEYQSA

SEQ ID NO: 4991 - protein, 419 aa, Streptomyces avermitilis MA-4680
MSALSPHLRQATPVVAVRGEGVHLYGEDGRRYLDFTAGIGVTSTGHCHPRVVAAAQEQAGTLVHGQYTTVLHPPLRRLVDRLGEVLPAGLDSLFFTNSGSEAVEAALRLARQATGRPNVLVCHGGFHGRTVAAAAMTTSGTRFRSGFSPLMSGVVVTPFPTAFRYGWDEETATRFALQELDYTLRTISSPDDTAAIIVEPVLGEGGYVPATRAFLEGLRERADRHGFVLILDEVQTGVGRTGRFWGHDHFGVTPDILITAKGLASGFPLSGIAASAELMGKAWPGSQGGTYGANAVACAAACATLDVVRDEKLVDNAEAMGARLRAGLAAVAATTPAIGDVRGLGLMLASEFVTEDGGPDPETAARVQRAAVDEGLLLLLCGAWNQVVRMIPALVIDEAEVDEGLRAWSAAVEVGVPAR

SEQ ID NO: 4992 - protein, 398 aa, Wigglesworthia glossinidia endosymbiont of Glossina brevipalpis
MFELTELSPLDPVLGMIDIIKNDKRDGLINLGIGVYKDIKGNTPILDSVKKAENILIESEKTKNYLNIEGLESFIQHSKSLIFGKENLSELNDFIASVQCPGGTSALKIAAEFLIRHTKIRKIWISDPSWPNHEKLFSFAGFKVHKYPYFNKEKNQLDFYNMKKCLENIKDDSAVIFHSSCHNPTGIDPSFEQWLELAKISRNKKWIPIFDSAYQGFSNGLKDDVFGIKIFLKYINEFVVCNSFSKNFSLYNERVGTCNFITKNKKHASNVFSQLRSIIRVNYSNPPAHGANIINVIFSKKDLFNLWKSELNEMRNRIKQIRSLFADTLFKINNKKNFNFIKNQHGMFSFIGLNRKNVMDLRNNFRIYVIDSGRLNFAAITNKNIYEVCRSINCVLNN

SEQ ID NO: 4993 - protein, 437 aa, Kluyveromyces lactis
MPISKVYARSVYDSRGNPTVEVELTTEKGTFRSIVPSGASTGVHEALELRDGDKSKWLGKGVLTAVSNVNNIIAPALVKANVDVTNQQQVDDLLLSLDGTANKSKLGANAILGVSLAASKAGAAAKNVPLYQHLADLAGAKTQPFVLPVPFLNVLNGGSHAGGALALQEFMIAPTGAETFAEALRMGSEVYHNLKSLTKKRYGASAGNVGDEGGVAPNIQTAEEALDLIVDAIKAAGYEGKIDIGLDCASSEFYKDGKYDLDFKNPESDPSKWLSGPQLADLYHELVKKYPIVSIEDPFAEDDWEAWSHFYKTAGVQIVADDLTVTNPVRIATAIEKKAADALLLKVNQIGSLSESIKAANDSFAANWGVMVSHRSGETEDTFIADLVVGLRTGQIKTGAPARSERLAKLNQLLRIEEELGSNAIFAGKKFHNGNQL

SEQ ID NO: 4994 - protein, 503 aa, Glycine max
MAISIPSRQLFIDGEWKVPLLNNRFPIINPATEDIIGHIPAATKEDVDLAVDAAKRAFSHNKGKDWSSAPGSVRARYLRAIASKITEKKDELGKLEAIDCGKPLDEALADLDDVIGCFNYYAELAEGLDAKQNAPVSLPMETFKSYVLKEPIGVVALITPWNYPLLMATWKVAPALAAGCTAILKPSELASVTCLELAEICREVGLPPGVLNIVTGLGNEAGAPLSSHPDVDKISFTGSSATGSRIMTAAAQLTKPVSLELGGKSPIIVFEDVDLDKTAEWTIFGCFFTNGQICSATSRLIVHESIATEFVNRLVQWAKNIKISDPFEEGCRLGPIVSEGQYKKVLNCISTAKSEGATILIGGSRPEHLKKGYFVEPTIITDVTTSMQIWREEVFGPVLCVKTFSTEEEAIELANDTHYGLGSAVMSKDLERCERISKAIQAGIVWINCAQPSFIQAPWGGVKRSGFGRELGEWGLENYLSVKQVTKYISDEPWGWYQSPSKL

SEQ ID NO: 4995 - protein, 348 aa, Burkholderia fungorum LB400
MLVTRQNVLRRFWYAIMPMARLDAGPQPFTLLGEPIVLWKGAGGKPHALRDRCCHRTAKLSKGFVDSDGNIACGYHGWTYDCSGQCVRIPQNSGGAIPSRAVVPSYRCEERYGYAWVALEDPLQPIPGFPEDGAPGYRRILQFYERWETSPLRMMENSFDNSHFSFVHKGNFGLFDNPKPSKYEFRPHEWGFEAETHVPVRNPPASYRITGTTEEVTERHLINRWFMPFARRFGCVYPASGIHHIIYNCATPIDDRTLMLSQWLYRNDTEDACSTQELIDWDRPITDEDRDILEATDYDACIDVRRQQECHMESDQPGLLMRRMLLKLLNDHGESEVFREVLPTHMEE

SEQ ID NO: 4996 - protein, 370 aa, Brucella suis 1330
MASRKLLLLPGDGIGPEAMAEVRKVIAFLNSDLNLGFETEEGLVGGCAYDAHGQAISDADMEKALAADAVLFGAVGGPKWDSVPYEVRPEAGLLRLRKDMQLYANLRPAICYPALAHSSSLKPEVIEGLDILILRELTGGVYFGEPKEIIDLGNGQKRGIDTQVYDTYEIERIADVAFELARTRRNKVTSMEKRNVMKSGVLWNQVVTARHKEKHADVQLEHMLADAGGMQLVRWPKQFDVILTDNLFGDLLSDVAAMLTGSLGMLPSASLGAADSKTGKRKALYEPVHGSAPDIAGKGIANPIAMIASLAMCLRYSFGLVAEADRLEAAIAGVLDDGIRTADIWSEGNTKVGTTEMGDAILAKFKALSA

SEQ ID NO: 4997 - protein, 547 aa, Neisseria meningitidis MC58
MNAFTRAWYALERHYQDTRHVLLRDRFACEPDRFERMHERLDGMLFDYSKNRLGEDTLQLLCNLADAADLEGKMRALRTGAKVNGSEGRAALHTALRLPDGADAVYVDGRDVLPEIRRELNRALKFAHSLDDGSYQGITGKRITDFVHIGIGGSDLGPAMCVQALEPFRRHITVHFAANADPACLDAVLCRLNPETTVFCVASKSFKTPETLLNAQAVKAWYRGAGFSESETACHFCAVSADTAAAAAFGIAAERVFAMYDWVGGRYSVWSPVGLPVMVAVGGARFRELLAGAHAMDRHFFSTPTRHNIPVLMALIAVWYNNFQHADGQTAVPYSHNLRLLPAWLNQLDMESLGKSRASDGSPAVCKTGGIVFGGEGVNCQHAYFQLLHQGTRLIPCDFIVPMTAQGREDGRSRFTVANAFAQAEALMKGKTLDEARAELADLPEAERERLAPHKEFPGNRPSNSILIDRLTPYNLGMLMAAYEHKTFVQGAIWNVNPFDQWGVEYGKQLAKTIIGELEGGTSVHDASTEGLMAFYRECRLKGGGAA

SEQ ID NO: 4998 - protein, 75 aa, Glycine max
  unsure (1)..(75): unsure at all Xaa locations
MAFSMISSPAVTTVNRAGAGMVAPFTGLKFMAGFATRKTNFDFTCIASNGGRVQCTHVRPPVAKKXFATLSYLSD

SEQ ID NO: 4999 - protein, 319 aa, Geobacillus stearothermophilus
MKRIGVLTSGGDSPGMNAAIRSVVRKAIYHGVEVYGVYHGYAGLIAGNIKKLEVGDVGDIIHRGGTILYTARCPEFKTEEGQKKGIEQLKKHGIEGLVVIGGDGSYQGAKKLTEHGFPCVGVPGTIDNDIPGTDFTIGFDTALNTVIDAIDKIRDTATSHERTYVIEVMGRHAGDIALWSGLAGGAETILIPEADYDMNDVIARLKRGHERGKKHSIIIVAEGVGSGVDFGRQIQEATGFETRVTVLGHVQRGGSPTAFDRVLASRLGARAVELLLEGKGGRCVGIQNNQLVDHDIAEALANKHTIDQRMYALSKELSI

SEQ ID NO: 5000 - protein, 459 aa, Oryza sativa
MQAGKLAYLALPMVAVSLTNYAVQVSSNMMVGHLPGVLPLSSAAIATSLASVTGFSLLIGMASALETLCGQAYGAKQYHTLGVHTYRAILTRPGGSSPRALLWVFMGKILVLIGQDPLISHGAGRYIVWLIPGLFANALIQPITKFLQSQSLIMPMLVASVATLVFHIPLCWLMVFKTGLGYTGAALSISISYWLNVAMLVAYILLSSSCKETRTPPTIEAFKGLDGFLRLALPSALMICLEWWSFELLILMSGLLPNPELQTSVLSICLTSITLLFTIPYGLGAGGSTRVANELGAGNPEGARSAVYVVLSVAVTEALIVCGTLLASRRLLGRAYSSEEEVISFVAMMVPLVCITVGTDGLQGVMSGIARGCGWQHLGAYVNLGSFYLLGIPMAILLGFVLHMGAKGLWMGIVCGSISQITLLSAITFFTNWQKMAENARERVFSEKPTEPSRYHLVE

SEQ ID NO: 5001 - protein, 578 aa, Exiguobacterium sp. 255-15
MSWKETYQKWNQFAGLETELKEELTALANDDKAAEEAFYKELEFGTGGMRGEIGVGTNRMNVYTVRKASQGFADFIKAEGDEAVAQGIVIAHDSRHYSPEFALEAAKTLASNGIKAYLFDGLRPTPELSFAVRELRAAGGIVITASHNPPEYNGYKVYGNDGGQLPPKEADDLVSYVDQVADELSIELEAEEVLRANGLIVRVGEQLDDAYQEQLKTIRVLPTIQDELADPLKIVFTPLHGTGLVPVTVGLKSYGFEHVTVVEEQAKPDGAFPTVSSPNPEEHAAFKLAIEYGDRVDADVLLATDPDADRVGVATRDADGEWVVLTGNQTGALLLDYILSQKAAQGTLPKNGFVAKTIVTSELGALIARHYDLHVENTLTGFKFIGEKIKQYNESGEYEYLFGYEESYGYLIGDFCRDKDAVQACLLAAEMTAYHKKEGRTLYEALQAIYEQFGYFEESLRSLTLKGKDGVAQIGRIMDTFREHPPKQVAGEKVILFEDYDASISHDLVKHQPSPINLPKSNVLKFTLEDGSWFCLRPSGTEPKIKFYFSVTSPDAAETTRKRQMIEDEVMQEVEQIQ

SEQ ID NO: 5002 - protein, 217 aa, Mangifera indica
MAGFRAEDDYDYLFKVGLIGDSGVGKSNLALRFTRNEFSLESKSTIGVEFATRSLNVDGKVIKAQIWDTAGQERYRAITSAYYRGAVGALLVYDVTRHSTFENVERWLRELRDHTDPNIVVMLIGNKSDLRHLVAVSTEDGNLLAERESLSFMETSALEATNVDNAFAEVLSKSTALLARRLWKLVIIDQDAVPSKSEKIDVSKDVSAVKKVGCCSG

SEQ ID NO: 5003 - protein, 299 aa, Zea mays
MHCLYIPGSTHASAQGQKKKKQSAALEARKSCRPEMDKYWEETQRYLEYEELSIYLEAQEDAMSCYDSSSPDGSISHSSSSAAACGNKNILMERDRRRKLNDKLYALRSVVPNITKMDKASIIKDAIEYIQQLQAEERRVLQELRVLDDDTAAAATAQVECCDVDGGLLRREAERAKKMKRAQSVASGAQSAPPPPPPAPPHVEVLELRVSEVGDHVLVVSVTCRKRRDAMARVCRAIEDLRLRVITANVTSVAGCHVHTVFVEVDKIDHIQVKNMIEAALTLLDAPGSPHSSMSYYET

SEQ ID NO: 5004 - protein, 487 aa, Zea mays
RPPAQGRRLPVVNPTTEAHIGEIPAGTAEDVDAAVAAARAALKRNRGRDWARAPGAVRAKYLRAIAAKVIERKQELAKLEALDCGKPYDEAAWDMDDVAGCFEYFADQAEALDKRQNSPVSLPMETFKCHLRREPIGVVGLITPWNYPLLMATWKVAPALAAGCAAVLKPSELASVTCLELADICKEVGLPPGVLNIVTGLGPDAGAPLSAHPDVDKVAFTGSFETGKKIMAAAAPMVKPVTLELGGKSPIVVFDDVDIDKAVEWTLFGCFWTNGQICSATSRLLVHTKIAKKFNERMVAWAKNIKVSDPLEEGCRLGPVVSEGQYEKIKKFILNAKSEGATILTGGVRPAHLEKGFFIEPTIITDITTSMEIWREEVFGPVLCVKEFSTEDEAIELANDTQYGLAGAVISGDRERCQRLSEEIDAGIIWVNCSQPCFCQAPWGGNKRSGFGRELGEGGIDNYLSVKQVTEYISDEPWGWYRSPSKL

SEQ ID NO: 5005 - protein, 648 aa, Capsicum annuum
MFRSWGDDSQHIFGAASGVTDTADDENVTVSYPEGMPSYIAPLDVYKTARSMGPTAQVNLQYNLSWVFSVDPGFSYLVRLHFCEITRNISKVNQRVFVIFMNNQTAEPAADVIAWAGSNGVPFHKDYVVSVPSGASQQDLWLALHPNVASKSNWYDAILNGIEIFKVSDTNGNLAGPNPVPVAEPDHIDPLPSKKGQSKNNTSAIGGGIGGGIAAAILIGLIVCLVTRLRKRGKVQSPSDGPSGWLPLSLYGNSHTSGSAKTNTTGSYASSLPSNLCRHFSFAEIKAATNNFDEALLLGVGGFGKVYQGEIDGGTKVAIKRGNPLSEQGVHEFQTEIEMLSKLRHRHLVSLIGYCEENCEMILVYDYMAHGTLREHLYKTQKPPLPWKQRLEICIGAARGLHYLHTGAKHTIIHRDVKTTNILLDEKWVAKVSDFGLSKTGPTLDHTHVSTVVKGSFGYLDPEYFRRQQLTDKSDVYSFGVVLFEILCARPALNPTLPKEQVSLAEWAFHCYKKGTFDQIIDPYLNGKLAPECLKKFTETAVKCVSDVGADRPSMGDVLWNLEFALQLQESVEECCKGFGKMDIEEGFDVTCKGKKDLNAFPGYDESMTDSRSSGISMSIGGHSLASENSDGLTPSAVFSQIMNPKGR

SEQ ID NO: 5006 - protein, 129 aa, Pisum sativum
MDSRKAMLILGLLAMVLLISSEVSARELTEEVVEKSDEVNDAKYGGYGRGGGYHNGGGYHNGGGGYNGGGGYHNGGGGYNGGGGYHNGGGGYHNGGGGYNGGGGYHNGGGGYHGGGGHGGHGGASNNGN

SEQ ID NO: 5007 - protein, 318 aa, Anabaena variabilis ATCC 29413
MKGLWLENNQLQLLTDIPIPEPAPEEALVRVLRAGICNTDLELLRGYYPYTGILGHEFVGVVEQGPENLLNQRVVGEINAVCGYCRFCRRGQPTHCENRTVLGIVNRHGAFAEYLCLPVKNLHPVPENVATEVATFTEPLAAALEIQQQVILSKDDRVLVVGDGKLGQLVAQTLALTGCELLVVGRHQEKLANLKVRGIQTGLVDAVQDRAFDIVVECTGNPEGFAIARRALRPRGTLVLKSTYAGNLSLDASSLVVDEITLIGSRCGSFPPALELLATGKVDVEPLIHAHYPLSQGLLAFEEAQRRGVLKVLLEIGN

SEQ ID NO: 5008 - protein, 368 aa, Streptomyces coelicolor A3(2)
MPKPGELTFVAPRGVKKPPRHLADLTPAERKEAVAAIGEKPFRAKQLSQHYFARYAHAPEQWTDIPAGSREGLREALLPELMTVVRHLSTDQGTTRKTLWKLFDGTLVESVLMRYPDRVTMCISSQAGCGMNCPFCATGQAGLDRNLSTAEIVHQIVDGMRALRDGEVPGGPARLSNIVFMGMGEPLANYNRVVGAIRRLTDPEPDGLGLSQRGITVSTVGLVPAIHRFTGEGFKCRLAISLHAPDDELRDTLVPVNTRWKVREVLDAGFEYAAKSGRRLSIEYALIRDINDQAWRGDRLGRLLRGRPVHVNLIPLNPTPGSKWTASRPEDEKAFVEAIAAHGVPVTIRDTRGQEIDGACGQLAASER

SEQ ID NO: 5009 - protein, 206 aa, Pirellula sp.
MFREFRGRGKKMGLTGVSGWFTLRSQLSTTFGLVGLFWKRFPVKRARMREASCLVGDGLQGIRLVTNIYVGNLSFKATEEELRGAFEQYGEVSAVNIIMDRETGRSRGFAFVEMADAEGAKDAIENLNGHEIDGRSVTVNEARPREPRSGGGGGGGGYGGGGGGRGRGGGGGGYGGGGGNRGGGYGGGGGGYGGGGGGGYGGRGDR

SEQ ID NO: 5010 - protein, 273 aa, Lactobacillus gasseri
MKQLTLNNDVKIPIFGFGTYEISPDQTKQAVLSAFEEGYRLIDTAQYYQNEQQVGEAVKASGLNRDEVFITTKTMTDGYEDTKIGLDESLRRIGLDYFDLVLIHWPMGHDIDTWHALEAAYKAGKTRAIGISNFNSRQTLDLIHQSSVRPMVDQIETHLFLQQWKMHEFLEKENIVHESYSPLGNGQQNLISNPVLKEISEKYGKSPIQVILRYLVQNDVVTIPRSTNPAHIKSNIDIFDFELDNDDLKRLRVLDERKPIDGWPAEMREDEDY

SEQ ID NO: 5011 - protein, 147 aa, Neurospora crassa
MSLNLEKQLTFVPYLEPNLGTFAALTWGGLYVLLEPVAGTALALICLGACAFTNYLRIADPVLTTKVAIVVHIVSWLAQFLGHGKFEGRAPALLDNLFQAIFLAPLFVWLELLFMLGYRPELKTRVDKAVAVEIAKFRESRNAKKAQ

SEQ ID NO: 5012 - protein, 110 aa, Populus tomentosa
MDTDVTMVPAGEASSSSSRKPKRFEIKKWNAVALWAWDIVVDNCAICRNHIMDLCIECQANQASATSEECTVAWGVCNHAFHFHCISRWLKTRQVCPLDNSEWEFQKYGH

SEQ ID NO: 5013 - protein, 311 aa, Pseudomonas syringae pv. syringae B728a
MSSLWVFPGQGSQQTGMLHQLPDEAVVRDCLQEAADALGEDVLALDTAGALQATRAVQLCLLIAGVACARVLQARDCVPDYLAGLSIGAYPAAVVSGALAFDDAVRLVALRGELMQSAWPQGYGMTALIGLDQTQVEALIGQVHSAKTPVFLANINADNQMVISGSAEAMHQVGQLAKAAGAAAVKRLAVSVPSHCALLDAPAQQLAEAFSRVALQAPTLRYLSGSTARPVLSAEKLRDDLAFNMCRVIDWRSTVETAWERGVRLHIELPPGSVLTGLARKVFQQGSALAFQAARLDSLVALSREEGRRTP

SEQ ID NO: 5014 - protein, 429 aa, Pirellula sp. 1
MIMDLNNTIALILGGGRGTRLFPLTKIRAKPAVPLAAKYRLIDIPISNCINSGLNRAYVLTQFLSESLHRHLRQTYTFDHFSGGFVELLAAQQTVNSGTDWYQGTADAVRKNLVHLRESWIKHVLILSGDQLYRMDFRDMMKTHIESGAAATIAGIPVTRKDASALGIMQVDDTGRVTGFVEKPQTEEEIAKVRMEPSWIDARGIESQGRDLLASMGLYIFDKDLMVDMLENSLHSDFGKEVFPEAINTHKVQLHLFDGYWEDIGTIRSFYEANLSLASKNPPFDIRNRHSPIYSRPRFLPPTIMGDAKITGSLIADGCRIGDNVTIENSVIGLRTVIGDNVTIKDSVVMGADFIEMRGAERDGKLPVGVGAGSVIQGAILDKNCRVGENVRILNEAKVDHQGEDDDLQIRDGISIVIKDGQIPDGFSC

SEQ ID NO: 5015 - protein, 151 aa, Zea mays
ALRTNGGDEGGFAPNIPENQEGLELLKASIEKGGYPGKGGIGMDGGASEFFREKDPTHDPNLKGENNDGSNKNSCDSLKDLFQSFGSEYPIESNEDPFDQEDWSTHAKLTDEIGQKVPNGGDELLVTHPTKGGKGINEKTCHALLLKGNPI

SEQ ID NO: 5016 - protein, 667 aa, Mycobacterium tuberculosis H37Rv
MSFVLVSPSQLMAAAADVAGIGSAISAANAAALAPTSVLAAAGADEVSAAVAALFSAHAGQYQQLGARAALFHEQFVQALTGAASAYASAEATNVEQQVLGLINAPTQALLGRPLIGNGADGTAANPNGGAGGLLYGNGGNGFSQTTAGLTGGTGGSAGLIGNGGNGGAGGAGANGGAGGNGGWLYGSGGNGGAGGAGPAGAIGAPGVAGGAGGAGGTAGLFGNGGVGGVGGDGGQGGNGAGAGASGTKGGDAGAGGAGGAGGWIHGHGGAGGDGGAGGAGGQASPGAPGPPSQPGGAGGAGGAGGRGGDGGSAGWLSGNGGDAGNGGGGGTAGGAGNGGQFGGDGGTGGTGGTAGAGGNGGRGAVLFGHGGNAGHGGAGGNGAAAGAGGEHVVATAGKGGTGGVGGDGGGGGAGGGGGLLYGNGGAGGAGNSGGDGGTGLNAALGGNGGGGGVGGNAGAGGTGGSAGWLSGNGGAGGSGGSAGAGGAGGKGGDTPNGLAINPGIGGNGGDTGNAGNGGNGGSAARLFGGGGAGGAGGTGSTAGSGGSGGTNPPTGLQAAGGNGGSGHAGGHGGNGGGAGLLGGGGTGGNGGGGGQGGLGAAAGGVDGNGGNGGNGGKGGDAQLVGDGGNGGNGGKGGAGLIAGLDGAGGAGGTRGLIFGNAGTPGQ

SEQ ID NO: 5017 - protein, 463 aa, Mycobacterium tuberculosis H37Rv
MSYMIAVPDMLSSAAGDLASIGSSINASTRAAAAATTRLLPAAADEVSAHIAALFSGHGEGYQAIARQMAAFHDQFTLALTSSAGAYASAEATNVEQQVLGLINAPTQALLGRPLIGNGADGTAANPNGGAGGLLYGNGGNGFSQTTAGLTGGTGGSAGLIGNGGNGGAGGAGANGGAGGNGGWLYGSGGNGGAGGAGPAGAIGAPGVAGGAGGAGGTAGLFGNGGAGGAGGAGGAGGRGGDGGSAGWLSGNGGDAGTGGGGGNAGNGGNGGSAGWLSGNGGTGGGGGTAGAGGQGGNGNSGIDPGNGGQGADTGNAGNGGHGGSAAKLFGDGGAGGAGGMGSTGGTGGGGGFGGGTGGNGGNGHAGGAGGSGGTAGLLGSGGSGGTGGDGGNGGLGAGSGAKGNGGNGGDGGKGGDAQLIGNGGNGGNGGKGGTGLMPGINGTGGAGGSRGQISGNPGTPGQ

SEQ ID NO: 5018 - protein, 373 aa, Neurospora crassa
MPRLEDNQVYDEEDDLLNRNRRRVVRLWEDFVGFAFQGNVLEIAFGLILATMFTALVTSFVSDIVLPPISVLLPLNKNLEEKFAVLRSGANHPEEGYNTLKQAQADGAVVMAYGFFMNRLLNFMGVGFSLYSIASIYQWMSKDPIIKKTVPCPYCCKFININSIRCVNCTSWLDGREDMLRPMHNAAPSITTTGPAAGGAGPSAYQGDGYSGAGAGPMGDGGGGAAGAVGGANGGGGDGGDGDGGGAANGADAGGGAGGGGGGGPVGVTGFGFGAASVSYGASVSTNRFGSFGAGGAGVGAGVGAGSRFGSLGAGGSYGAGSRFGSYGGGGAGGAGGAGSRFGSFGGAGGSFGGGSFGGGGGGGGGGRGDRGG

SEQ ID NO: 5019 - protein, 823 aa, Rhodobacter capsulatus
MTKFSGNELRAELYRRAFLSYSVAPGALGMFGRSLLAKGARAEALANGTVMSGSHWGVFTATVENGRATAFTPWEKDPHPSPMLAGVLDSIYSPTRIKYPMVRREFLEKGVNADRSTRGNGDFVRVSWDQALDLVAAEVKRVEETYGPSGVFGGSYGWKSPGRLHNCTTLLRRMLTLAGGYVNGAGDYSTGAAQVIMPHVVGTLEVYEQQTAWPVLAENTEVMVFWAADPIKTSQIGWVIPEHGAYPGLEALKAKGTKVIVIDPVRTKTVEFFGAEHITPKPQTDVAIMLGMAHTLVAEDLYDKDFIANYTSGFDKFLPYLDGETDSTPKTAEWAEGISGVPAETIKELARLFESKRTMLAAGWSMQRMHHGEQAHWMLVTLASMLGQIGLPGGGFGLSYHYSGGGTPSTSGPALAGITDGGAATKGPEWLAASGASVIPVARVVDMLENPGAEFDFNGTRSKFPDVKMAYWVGGNPFVHHQDRNRMVKAWEKLETFVVHDFQWTPTARHADIVLPATTSYERNDIETIGDYSNTGILAMKKIVEPLYEARSDYDIFAAVAERLGKGAEFTEGKDEMGWIKSFYDDAAKQGKAAGVQMPAFDAFWAEGIVEFPVTDGADFVRYASFREDPLLNPLGTPTGLIEIYSKNIEKMGYDDCPAHPTWMEPLERLDGPGAKYPLHIAASHPFNRLHSQLNGTVLREGYAVQGHEPCLMHPDDAAARGIADGDVVRVHNDRGQILTGVKVTDAVMKGVIQIYEGGWYDPSDVTEPGTLDKYGDVNVLSADIGTSKLAQGNCGQTVLAEVEKYTGPAVTLTGFVAPKAAE

SEQ ID NO: 5020 - protein, 544 aa, Chlamydophila pneumoniae J138
MELLSLNKSYFEIQRLRYRPEILTLLETIRSKHIQETSSPPSPPPELQKHIPNLCRIPEVSIYTEQETSSKPLKIGVLLSGGQAPGGHNVVIGLFDALRVFNPKTRLFGFIKGPLGLTRGLYKDLDISVIYDYYNMGGFDMLSSSREKIKTEEQKKNILNTVKQLKLDGLLIIGGNNSNTDTAMLAEYFLAHNCKTSVIGVPKTIDGDLKNCWIETSLGFHTSCRTYSEMIGNLAKDALSAKKYHHFIRLMGQQASYTTLECGLQTLPNIALISELIATRKISLKQLSEQLALGLVRRYKSGKNYSTVLIPEGLIEHIFDTRKLIDELNVLLANGDSSIEKILSKLSPETLKTFHLFPKDIANQLLLARDSHGNVRVSKIATEELLAVMVKKEIEKIKPHMEFHSVSHFFGYEARAGFPSNFDCNYGIALGIISALFLVRQKTGYMITINNLAQSYTEWQGGATPLYKMMHLENRCGTETPVIKTDSVDPKSPAVQHLLQQSDSCLVEDLYRFPGPLQYFGKEELIDQRPLTLLWENQTHSPLL

SEQ ID NO: 5021 - protein, 259 aa, Glycine max
RAGFMWGLNLYKRPKLSGAMLGAILPLAAVHTLGNLFTNMSLGKVAVSFTHTIKAMEPFFSVILSAMFLGEFPTPWVVGSLVPIVGGVALASVTEASFNWAGFWSAMASNVTNQSRNVLSKKAMVKKEDSMDNITLFSIITVMSFFLLAPVAIFMEGVKFTPAYLQSAGVNVRQLYIRSLLAALCFHAYQQVSYMILQRVSPVTHSVGNCVKRVVVIVSSVIFFQTPVSPVNAFGTAIALAGVFLYSRVKRIKAKPKTA

SEQ ID NO: 5022 - protein, 344 aa, Zea mays
MGILCLGASSTLLCGEDRNNVLGLGCGNELVEVGSGHDGLDSVVGAVFPVDTDEAVRALLEKETDHKPQDGYAERLERGGLEYSWRRDAMDWICKVHSYYRFGPLSLYLAVNYLDRFLSSYDLPHDKPWMRQLLSVACLALAVKMEETVLPLPVDLQVCDVKFEFEARTIGRMELLVLATLKWRMQAVTPFTFISYFLDKFNGGKPPSMALASRCTEIIIGTLKGSTFLSFRPSEIAAASALAAVSENQVVGSSSALSASEVPINKEMIARCYELLQEQALVRKTGHINGSPSVPQSPIGVLDATCFSFRSEDVRLGSSQSNNISSSSNDNQVSKRRRLSISPI

SEQ ID NO: 5023 - protein, 463 aa, Glycine max
MGAVYFSQSCYKPRQIFNLERESTLVGRCPVVQIRCRRVVSACLNVDVDAPNTGNTTSEKKKTKDVIEMEGMYLVGTYARTPVVLERGEGCKLYDVEGNEYLDLSAGIAVNALGHGDADWLKAVVEQAGTLTHTSNIFHTIPQVELAKRLVASSFADRVFFANSGTEANEAAIKFARKYQRHTTSNGKVPATEFIAFSNCFHGRTLGALALTSKVQYRMPFEPVMPGVTFLEYGNAQAAVELIKQGKIAAVFVEPIQGEGGIYSATKEFLQSLHSACDEAGALLVFDEVQCGLGRSGFLWAHEAFGVFPDMMTLAKPLAGGLPIGAVLVTERVASSINYGDHGSTFAGNPLVCSAALAVFDKISKPDFLSSVSKKGLYFKELLKQKLGGNQHVKEIRGVGLIIGIDLDVPASPFVDACRNSGLLVLTAGKGNVVRLVPPLIITEKELELAADILCKTLPVLDN

SEQ ID NO: 5024 - protein, 351 aa, Glycine max
MGEQTLGQAQPLPAPDAATAHSELNNVPQPTTSPATKIPLRPRKIRKVSPDPSTSEAPIKPAKPVGRNTTSKAAPPRALTVVPRIVARSLSCDGEVEISLRYLRNADPLLSPLIDIHQPPTFDNFHTPFLALTRSILYQQLAFKAGTSIYTRFIGLCGGENGVVPETVLALTPQQLRQIGVSGRKASYLHDLARKYQNGILSDSAIVNMDDKSLFTMLTMVNGIGSWSVHMFMIFSLHRPDVLPINDLGVRKGVQLLYNLEDLPRPSQMDQLCDKWRPYRSVASWYMWRFVEAKGTPSSAVTVATGAGLQQQRHHQHQQQEQQQQQHAPQPQLLDPINSMFNLGAACAWGQ

SEQ ID NO: 5025 - protein, 823 aa, Rhodobacter capsulatus
MTKFSGNELRAELYRRAFLSYSVAPGALGMFGRSLLAKGARAEALANGTVMSGSHWGVFTATVENGRATAFTPWEKDPHPSPMLAGVLDSIYSPTRIKYPMVRREFLEKGVNADRSTRGNGDFVRVSWDQALDLVAAEVKRVEETYGPEGVFGGSYGWKSPGRLHNCTTLLRRMLTLAGGYVNGAGDYSTGAAQVIMPHVVGTLEVYEQQTAWPVLAENTEVMVFWAADPIKTSQIGWVIPEHGAYPGLEALKAKGTKVIVIDPVRTKTVEFFGAEHITPKPQTDVAIMLGMAHTLVAEDLYDKDFIANYTSGFDKFLPYLDGETDSTPKTAEWAEGISGVPAETIKELARLFESKRTMLAAGWSMQRMHHGEQAHWMLVTLASMLGQIGLPGGGFGLSYHYSGGGTPSTSGPALAGITDGGAATKGPEWLAASGASVIPVARVVDMLENPGAEFDFNGTRSKFPDVKMAYWVGGNPFVHHQDRNRMVKAWEKLETFVVHDFQWTPTARHADIVLPATTSYERNDIETIGDYSNTGILAMKKIVEPLYEARSDYDIFAAVAERLGKGAEFTEGKDEMGWIKSFYDDAAKQGKAAGVEMPAFDAFWAEGIVEFPVTDGADFVRYASFREDPLLNPLGTPTGLIEIYSKNIEKMGYDDCPAHPTWMEPLERLDGPGAKYPLHIAASHPFNRLHSQLNGTVLREGYAVQGHEPCLMHPDDAAARGIADGDVVRVHNDRGQILTGVKVTDAVMKGVIQIYEGGWYDPSDVTEPGTLDKYGDVNVLSADIGTSKLAQGNCGQTVLAEVEKYTGPAVTLTGFVAPKAAE

SEQ ID NO: 5026 - protein, 418 aa, Neurospora crassa
MSLSNKLSIEDVDLKGKRVLIRVDFNVPLDAEKKVTNPQRIAGAIPTIKYALDHGAKAVVLMSHLGRPDGKPNPKYSLKPVVPELEKLLGKKVTFAPDCVGPEVEEIVNKADNGEVILLENLRFHIEEEGKGTDAEGNKVKADKAKVEEFRKNLTKLGDVYINDAFGTAHRAHSSMVGIDLPVKAAGFLMKKELQYFAKVLESPQRPFLSILGGAKVSDKIQLIDNLLDKVNTLIVCGGMAFTFKKTLQNMPIGNSLFDEAGAKIVPDLVKKAEKNNVKLVLPVDFTIADKFDKDANTGYATDKDGIPDGWMGLDCGEESVKLFTQAINESQTILWNGPAGVFEFDKFAKGTKATLDACVKAAEEGRTVIIGGGDTATVAAKYGVEDKLSHVSTGGGASLELLEGKALPGVVALSERQ

SEQ ID NO: 5027 - protein, 553 aa, Wautersia eutropha
MSQAIEIKVPDIGDYDAVPVIEVHVKPGDSINAEDALVTLESDKATMDVPSPQAGVVKDVRIKVGDNVSEGSVLVMLEAANEPAAAPAPAAAAPAPAAAAPAPAPAPAAAPAAAPAAGGGGTIEVKVPDIGDYDAVPVIEVHVKAGDTINAEDAVVTLESDKATMDVPSPQGGVVKEVKVKVGDNVAEGTLLLILEGAAAAAAPAAAAAAPAPAASAPAPAPAPAAAASGTGRSTCCRAGRRWRNRQGRPRQPLGAQVRTRAGRGRVARAGHRPKGRITQEDVQGYVKGVMSGQAAAPAQAAAAGAGGGELGLLPWPKVDFTRFGEVESKALSRIKKISGANLHRNWVMIPHVTNHDEADITELEAFRLQLNKENEKSGIKVTMLAFMIKATVAALKKFPNFNASLDGDNLVLKKYFNIGFAADTPNGLVVPVIKDADKKGVLEISQEMSELAKLARDGKLKPDQMQGGCFSISSLGGLGGTYFTPIINAPEVAIMGVCKSYQKPVWDGKQFAPRLTLPLSLSWDHRVIDGAEAARFNTYFGQLLADFRRILL

SEQ ID NO: 5028 - protein, 313 aa, Streptococcus gordonii
MVITKSASRRDLLMSKVKKAVIPAAGLGTRFLPATKALAKEMLPIVDKPTIQFIVEEALKSGIEDILVVTGKSKRSIEDHFDSNFELEYNLKEKGKDDLLKLVDETTGIGLHFIRQSHPRGLGDAVLQAKAFVGNEPFVVMLGDDLMDITNDKAMPLTKQLMNDYEATHASTIAVMQVPHEEVSSYGVIAPQGEGLNGLYSVEKFVEKPSPEEAPSDLAIIGRYLLTPEIFKILENQAPGAGNEIQLTDAIDTLNKTQRVFAREFKGDRYDVGDKFGFMKTSIDYALKHPQVKDDLEQYIIELGKKLEEKTKK

SEQ ID NO: 5029 - protein, 400 aa, Chloroflexus aurantiacus
MNKKTIRDVDWAGKRALVRVDFNVPLDDQGQITDDTRIRAALPTIRYLLEHGASVVLMSHLGRPKGKPNPKYSLRPVVERLFELLPEAKEVKKTEAITGPAAEAAVAMLKPGQVLVLENTRFDPREEPNDPAMAAELAKLGDVFVNDAFGTAHRANASTEGVAHYLPAVAGFLMEKELTYIGGALNNPQRPFVTVIGGAKISDKIGVIENLLGKVDALLIGGGMANTFLLAKGLNVGDSLVEPDSVPVAQQLMARAEERGARLLLPVDVVIADAFSADAQRQVVDVSDIPAGWRVLDIGPKTIERYSAEIRAARTVIWNGPMGVFELEPFAVGTRAIAQAMAEAAANGAITIVGGGDSVAAVEQAGLADKMSHVSTGGGASLELLEGRVLPGVAALQDAE

SEQ ID NO: 5030 - protein, 353 aa, Escherichia coli CFT073
MLYTSQTTPEKDQKMSMIKSYAAKEAGGELEVYEYDPGELKPQDVEVQVDYCGICHSDLSMIDNEWGFSQYPLVAGHEVIGRVVALGSAAQNKGLQVGQRVGIGWTARSCGHCDACISGNQINCEQGAVPTIMNRGGFAEKLRADWQWVIPLPENIDIESAGPLLCGGITVFKPLLMHHITATSRVGVIGIGGLGHIAIKLLHAMGCEVTAFSSNPAKEQEVLAMGADKVVNSRDPQALKALAGQFDLIINTVNVSLDWQPYFEALTYGGNFHTVGAVLTPLPVPAFTLIAGDRSVSGSATGTPYELRKLMRFAARSKVAPTTELFPMSKTNDAIQHVRDGKARYRVVLKADF

SEQ ID NO: 5031 - protein, 289 aa, Streptococcus gordonii
MKGIILAGGSGTRLYPLTRAASKQLMPIYDKPMIYYPLSTLMLAGIKDILIISTPTDLPRFEDLLGDGSEFGIKLSYAEQPSPDGLAQAFIIGADFIGDDRVALILGDNIYHGPGLSKMLQKAAAKEKGATVFGYHVKDPERFGVVEFDENMNAISIEEKPEQPRSNYAVTGLYFYDNDVVEIAKNIKPSPRGELEITDVNKAYLDRGDLSVELMGRGFAWLDTGTHESLLEAAQYIETVQRMQNVQVANLEEIAYRMGYITKEQVHELAQSLKKNEYGHYLLRLIGEE

SEQ ID NO: 5032 - protein, 123 aa, Coxiella burnetii
ELTGVSIVTYQHIKVPSQGEKITVNKAVLEVPDRPIIPFIEGDGIGIDITPVMKNVVDAAVEKSYAGKRKIEWMEIYAGEKATKVYGKDNWLPDETLEAIKEYQVAIKGPLTTPVGGGIRSLN

SEQ ID NO: 5033 - protein, 240 aa, Triticum aestivum
SQGSSCSQHCQKDESEEIVDSINPVTVAGYREEKGTAGSTSAITAVRAPGSRSSCFHGVTRHRWSGKYEAHLWDSTCRVEGRRRKGKQVYLGSYDTEQKAARAYDVAALKFFGLNTKLNFSISEYEKELADIQDMSPEECVTYLRRRSSCFSRGASIYRGVTRRQKDGRWQARIGLIAGTRDIYLGTFKTEEEAAEAYDIAAIEIRGKNAVTNFDRSNYMDRGMHCIEGAGLKLLATKPE

SEQ ID NO: 5034 - protein, 222 aa, Chlorobium tepidum TLS
MKFFIDTASLDEIKAANELGVLDGVTTNPSLIAKIVKDSTNFTYADFKAHIAKICEIVDGPVSAEVTTLKAGEMIAQGEELAAIHKNIVVKCPLTVDGLKAIKHFSSNGIKTNATLVFSPTQALLAAKAGADFVSPFVGRLDDISTSGMELVRQIVTIYDNYGYLTEVIVASVRNPLHVVESAMVGADIATIPYSVIKQLANHPLTDKGLEKFMEDAAVMKP

SEQ ID NO: 5035 - protein, 145 aa, Triticum aestivum
  unsure (1)..(145): unsure at all Xaa locations
MXPNVMGSSGTSVAPFXGLKSXAGLPVXRRSNXANLXSVXSNGXRIRCMQVWAIXGIXKFETLSYLPTLNTEALLKQVDYLIRSKWVPCLXEFNKXGFIFREHXNASPGYYDGXRYWTMXETAYVPGCTDPHKVXKPSGRSKKEP

SEQ ID NO: 5036 - protein, 166 aa, Oryza sativa
  unsure (1)..(166): unsure at all Xaa locations
MECLHRFCRDCIDKSMRLGNNECPACRTHCASRRSLRDDPNYDALILALYPDIDKYEEEELAFSEEERTRNKKIQASIAETFRRQSEALVKKRSVAKATGSTITRRTRGNMRAKRRGRTSSPDIVATDNEDEDRDENGNEGSKESSSVDDRSPDVRQXRVRRWPVP

SEQ ID NO: 5037 - protein, 392 aa, Prochlorococcus marinus str. MIT 9313
MALQPAAGARDLNPQQVELNQKLSQRLAEVYRLWGYDEVSPPRVERLETLKAGGAIASQDIVRLVADEPLGLRPEMTASIARAACTRLKQRPRPLRLWAAGTIFESRTADEGSLCIEENLQSGVELFGVEPINAEMELLSLLFSAVETLELSKRHQPRLLVGHTALMDLIMLPFQNDLREKIRTALIHYDRLALESLQLPNDQFERLLHHLECRGEPLDVLERLSGLFGTQQALNNLQRLFEQMSPLAADQGIDLQLDPTFQPHFELYTGLVFQLVCQSDAAPVVIARGGRYDNLVARCGAKGLQAAGVGFSFAIDDIRELLTKEIKASDAVETTLVAYGEQATLEHALKRQRHWHKQGQRAVVELEACRDREDAFSRLSDRGCSTLDWLDH

SEQ ID NO: 5038 - protein, 564 aa, Streptomyces sp. AM-7161
MAATPENPTPAAARRKVGRHRGEGQWAVGHFTPLNGNEQFKKDDDGLNVRTRIETVYSKRGFDSIDPNDLRGRMRWWGLYTQRKQGLDGTKTGVLEPEELDDEYFMLRVRIDGGRLTTEQLRVIGEISEEFARGTADITDRQNVQYHWIRIEDVPEIWNRLEAVGLSTTEACGDTPRVILGSPVAGIAADEIIDGTPAIEEIYRRIVGNKDFSNLPRKFKSAVSGSPLLDVAHEINDIAFVGVEHPEHGPGFDVWVGGGLSTNPKLGVRLGTWVSLDEVPDVYEGVISIFRDYGYRRLRNRARLKFLVADWGPEKFRQVLEDEYLNRKLTDGPAPEQPAGRWRDHVGVHRQKDGRFYVGFAPRVGRVDGATLTKIAGIAEEHGSGRVRTTAEQKMLVLDIEEAQVESIVAALEALDCGSPPAFRRGTMACTGIEFCKLAIVETKGRGSSLIDELERRIPEFDEPLTININGCPNACARIQVADIGLKGQLVLDDDGNRVEGYQVHLGGALGLEAGFGRKVRGLKVTAAELPDYVERVLKRFQAERETGERFATWTARASEESLS

SEQ ID NO: 5039 - protein, 344 aa, ASPERGILLUS NIDULANS FGSC A4
MPATTADTLSLVTRTVTVAPLVLLSVADHYGRSAKGTRKRVVGVLLGEHIGGNVRVSNSFAVPFEEDEKDPSVWFLDHNFVESMRDMFKKINAREKLIGWYHSGPKLRASDLEINELFKRYTPNPLLVIVDVQPKEVGVPTDAYFAVDEIKDVGTTAPQPRHTLTLEAEEIGVEHLLRDIRDVAVGTLSTRITSQLQSLQGLHLRLRDIGQYLQKVLDHELPVNHAILGNLQDVFNLLPNLSTPSTTARVGGEPEQSTDNAELARAMSIKTNDQLMAIYLSSLVRAVTAYHDLIENKIQNRQQQEEVEQKREQEANSAKNEKEGAKKVTNTSEPKEESKEKTKR

SEQ ID NO: 5040 - protein, 246 aa, Oryza sativa (japonica cultivar-group)
MGTFAPIALYWVYAGGYQLVLHRRPLERYRLHTRAEEEEKNLVALPAVVRGVLLQQLVQAIVAMILFMVTSDSSAVVVQPPIIIQAFQFLVAMLVMDSWQYFVHRYMHQNKFLYRHIHSQHHRLIVPYAIGALYNHPLEGLLLDTVGGAISFLVSGMTPRTSVFFFCFAVLKTVDDHCGLWLPYNIFQSLFQNNTAYHDVHHQLQGSKYNYSQPFFSIWDRILGTHMPYNLVRRKEGGFEARPLRD

SEQ ID NO: 5041 - protein, 397 aa, Pirellula sp. 1
MAKKTIDQIDVQDKTVLMRVDFNVPLDESLAITDDRRIRMALPSIKSVIDRGGKVILMSHLGRPTGGEGDEKYSLAPAAKRLGELLGSTVHFATDTVGDDASSKASSLAAGEVLVLENLRFNPGEKKGDSEFAGKLAAMADAYCNDAFGTCHRKDASMVAVPEAMAGKPRVVGHLVAKEIQYLTDAISKPERPFVAILGGAKVSDKINVINNLLGICDAVLIGGAMAYTFSLASGGKVGKSLVEKDKVELAKELMAKGGDKLQLPVDTHCGDDFGNIAGCNKKVVAAGEIPDDMEGLDIGPETAKKYAEVIKSAKTIVWNGPMGVFEKPPMDEGTKAVAQAIADGDAVSIIGGGDSAAAVDQLGFADDVSHVSTGGGASLAMLEGQAFAAVDLLDEA

SEQ ID NO: 5042 - protein, 447 aa, Oceanobacillus iheyensis HTE831
MYQTTTLKDKIKLFIIILLPILITQVSINLMSFFDTMMSGQFSARDLAGVAIGSSLWVPILTGINGIVLSITPIIAHLIGAKNKKDIPQVIQQGIYLSFVLSIIIIVIGGIALDPILQAMSLEKEVQRIAKYYLITLGTGIVPLFLFHTIRSFMDGLGQTRSSMIIILISLPINAVLNYILIFGKFGIPAFGGIGAGIATSLTYWIISGISIFMIHRVYPFHSYKVFQKILPPTLSYWADQLKIGLPIGLAIFFETSIFSAVTLLMSEYNTNTIAAHQAAMNFASLLYMLPLSVGMALTIAVGFEVGAKRLHDAKRYTYLGIMGGLFIAIFAGIILYTFDDVVARLYNSNPEVIELTKQFIIFAIFYQLADAIGAPIQGALRGYKDVNMTLVIALISYWIIGLPTGYLLANYTALEPFGYWVGIIVGLSTGAIALLARLLFIQKKSV

SEQ ID NO: 5043 - protein, 450 aa, Yersinia pestis CO92
MTKHYDYLAIGGGSGGIASINRAAMYGKKCALIEAKQLGGTCVNVGCVPKKVMWHAAQIAEAIHLYGPDYGFDTTVNHFDWKKLIANRTAYIDRIHQSYERGLGNNKVDVIQGFARFVDAHTVEVNGETITADHILIATGGRPSHPDIPGAEYGIDSDGFFELDEMPKRVAVVGAGYIAVEIAGVLNGLGTETHLFVRKHAPLRTFDPLIVETLLEVMNTEGPKLHTESVPKAVIKNADGSLTLQLENGTEVTVDHLIWAIGREPATDNLNLSVTGVKTNDKGYIEVDKFQNTNVKGIYAVGDNTGVVELTPVAVAAGRRLSERLFNNKPDEHLDYSNIPTVVFSHPPIGTIGLTEPQAREKFGDDQVKVYTSSFTAMYSAVTQHRQPCRMKLVCVGAEEKIVGIHGIGFGMDEILQGFAVAMKMGATKKDFDNTVAIHPTAAEEFVTMR

SEQ ID NO: 5044 - protein, 124 aa, Zea mays
  unsure (1)..(124): unsure at all Xaa locations
MAYSMLSSAAXCYLPGSXHMVAPFTGLKSSSAFPVTGRAXXDLTLLVSNGEKVNWMEGGPQLGKKNFETLFLTFRDLYPKFKLGGGEGEKLFSPKKGGVPLGGEEIPRGGEHPFFFFGPRGETQ

SEQ ID NO: 5045 - protein, 427 aa, Arabidopsis thaliana
MPSLKSFSAAEEEDDQLGRNSEAERFNPEAVEKEEDPDKMDEKDESGDEEDDVKRDQVEAEDEEALGEEEDSKERSQSSSAGELSESEYMVVDLADICKDVQCSICLGIIRKTRTVMECLHRFCRECIDKSMRLGNNECPTCRKHCASRRSLRDDPNFDALIAALFKNIDKFEEEELNFRQDDEARNKQIQASIAQVSQRQSKALVKRKSVGKGTAILSRSRRSGGGSRRRRNCRNIEQDTSEANDDDDQNKRGKDSSSDEPCERQRKKRSATQPSSSNANNNDNCAGNGTEQTHQRDSRVISPVLVWNSELIAWGRGGTRSNTRQGNNNQGAISKRNARLKRLVEYLGSLEGNSVEYVARHLKLKAEEVELLVSKDGDTVIGNKTSTEKMQSLQDDETVAKLKVDCISSNGYMVLSLILVSIIRLF

SEQ ID NO: 5046 - protein, 557 aa, Pseudomonas syringae pv. syringae B728a
MSELIRVPDIGNGEGEVIELMVKVGDRIEADQSVLTLESDKASMEIPAPKAGVIKTMKVKLGDRLKEGDELFELEVEGEAAAAAAPAAEPAPAPAPAPAPAAAEKPAEAAPAPAAAAEPAPAASASVQDIHVPDIGSSGKAKIIELMVKVGDSIQADQSLITLESDKASMEIPSPAAGVVESIEVKLDQEVGTGDLILKLKVEGAAPAAAPAPAASAPAAAPAKAEAAAPAAPAPKAEAAPAPAAPAAPAKDGAKVHAGPAVRQLAREFGVELNAVSATGPHGRVLKEDVQAYVKTMMQKAKEAPAGGASGGSGIPPIPEVDFSRFGEIEEVPMTRLMQLGASGLHRSWLNIPHVTQFDQADITDLEAFRVAQKGAAEKAGVKLTVLPLLLKSCAHLLKELPDFNASLAPSGKAVIRKKYVHIGFAVDTPDGLLVPVIRDVDQKSLLQLAAEAAALAEKARNKKLTANDMQGACFTISSLGHIGGTGFTPIVNAPEVAILGVSKATIQPVWDGKAFQPKLMLPLSLSYDHRVINGAAAARFTKRLSELLADIRTILL

SEQ ID NO: 5047 - protein, 293 aa, Escherichia coli CFT073
MKGIILAGGSGTRLHPITRGVSKQLLPIYDKPMIYYPLSVLMLAGIREILIITTPEDKGYFQRLLGDGSEFGIQLEYAEQPSPDGLAQAFIIGETFLNGEPSCLVLGDNIFFGQGFSPKLRHVAARTQGATVFGYQVMDPERFGVVEFDDNFRAISLEEKPKQSKSNWAVTGLYFYDSKVVEYAKQVKPSERGELEITSINQMYLEAGNLTVELLGRGFAWLDTGTHDSLIEASTFVQTVEKRQGFKIACLEEIAWRNGWLDDEGVKRAASSLAKTGYGQYLLELLRARPRQY

SEQ ID NO: 5048 - protein, 273 aa, Pseudomonas aeruginosa UCBPP-PA14
MSTPRIAFIGAGNMAASLIGGLRAQGVPAAQIRASDPGAEQRAKIAGEFAIDVVESNAEAVADADVVVLSVKPQAMKAVCQALAPALKPEQLIVSIAAGIPCASLEAWLGQPRPVVRCMPNTPALLRQGASGLYANAQVSAAQREQAGQLLSAVGIALWLDDEAQIDAVTAVSGSGPAYFFLLMQAMTDAGEKLGLSRETASRLTLQTALGAAQMALSSEVEPAELRRRVTSPNGTTEAAIKSFQANGFEALVEQALNAASQRSAELAEQLGQ

SEQ ID NO: 5049 - protein, 641 aa, Bordetella pertussis Tohama I
MCGIVGIWGPLRDKANVLAESCRRIRHRGPDSNGYWEDAEADLALAHVRLAILDLTEAGHQPMVSACGRYVIVLNGEIYNHMELRERLQQDGLAPAWRGHSDTETVLACFAGWGIEQTLQAAVGMFAIVLWDRAERKLALMRDRMGEKPLYYGYSQANLLFGSELKAFMPVPGFGRELDRNALASFMRHNYIPAPQSIYAGIRKLPPGAWVEIDAAQMRRGELPEPQVYWSARRAADQGLGDRRRFESDAQAIDALEQVVSQAVRGQMLSDVSLGAFLSGGIDSSTVVALMQAQSAQPVRTFAIGFHEKGYNEAEHAKAVAAHLGTEHTELYVTAEDGLAVVPSLADMYDEPFADSSQIPTSLVTRMARQHVTVALSGDGGDELFGGYSRYFRVDNWWRKCAAMPGPLRHLAGAALRGSAALPGAGAWRGKVGKLGELLGADTRGEFYRLFVSYWADPGRVVIGGTEPLSPFEQPMEGSTFDAMMKLDTVTYLPDDILVKVDRAAMAVSLETRVPLIDHRVYEFAWQLPFEYKVRGGTGKWLLRQLLYRHVPQAMVDRPKRGFAVPLAAWLRGPLRDWAEALLDPARLRQEGWFEPEPILRKWREHLSGHRNWDSHLWGVLMMQAWLDRYRAGAGDEAGRR

SEQ ID NO: 5050 - protein, 581 aa, Glycine max
MCGILAVLGCSDDSRAKRVRVLELSRRLKHRGPDWSGLHQHGDCFLAHQRLAIVDPASGDQPLFNEDKSVIVTVNGEIYNHEELRKQLPNHNFRTGSDCDVIAHLYEEHGEDFVDMLDGIFSFVLLDTRDNSFIVARDAIGVTSLYIGWGLDGSVWISSEMKGLNDDCEHFECFPPGHLYSSKERGFRRWYNPPWFSEAIPSAPYDPLVLRHAFEQAVIKRLMTDVPFGVLLSGGLDSSLVASITSRYLANTKAAEQWGSKLHSFCVGLEGSPDLKAAKEVADYLGTVHHEFTFTVQDGIDSIEDVIYHIETYDVTTIRASTPMFLMSRKIKSLGVKWVISGEGSDEIFGGYLYFHKAPNKEEFHRETCRKIKALHQYDCLRANKSTFAWGLEARVPFLDKAFINAAMSIDPEWKMIKRDEGRIEKWILRRAFDDEEHPYLPKHILYRQKEQFSDGVGYSWIDALKAHPPKHVTEKMMLNAGNIYPHNTPKTKEAYYYRMIFERFFPQNSARLTVPGGASAACSTAKAVEWDAAWSNNLDPSGRAALGVHISAYENQNNKGVEIEKIIPMDAAPLGVAIQG

SEQ ID NO: 5051 - protein, 220 aa, Erwinia carotovora subsp. atroseptica SCRI1043
MPSHPSSDLTQHAKAHLSAINPRWASVIEQVGDCRHQTAPHREPYEALMRAVAYQQLTTRAGDAMVAKLLRVHDDVFPSPEQMLACSTDTLRQCGFSARKADTLHGIAQGALSGLVPSLERAANMDDDTLIQQLTSLKGIGRWTVEMFLIYSLERTDIMPLDDLGIRQGLRYVYDLPDMPKPRDLQALSLQCQPYRTVASWYLWRSLELPAYQSFKLTHR

SEQ ID NO: 5052 - protein, 767 aa, Mycobacterium tuberculosis H37Rv
MSFVVVAPEVLAAAASDLAGIGSTLAQANAAALAPTTAVLAAGADEVSAAIASLFGAHGQAYQAVSAQMSAFHAQFMQALTGAGGAYAAAEAVNVSAAQSVEQDLLAAINARFERIFGRPLIGDGANGGPGQDGGPGGLLYGNGGNGGTSTTVGMAGGNGGAAGLIGNGGFGGGGGPGAAGGNGGAGGWLFGNGGAGGAGGLGVAPGVPGGAGGAGGAGGVGGPAGLWGHGGAGGAGGAGVAGAGGFEGTIGAGGAGGVGGAGGVGGAGGAGGWLYGDAGAGGDGGVGGAGGTGGLGNRGGAGGAGGAGGVGGAGGAAGLWGGGGAGGVGGTGGGAGLGAQSVTFSSSLSGLSGGDGGAGGAGGAGGAGGTGGWLYGGGGAAGSGGDGGTGGQGGAGGAGVFSLFGSGGGPGGNGGVGGVGGVGGAGGRAGLFGVGGLGGAGGDAGDSGEGGFGGPGLAGGLFGNPGNGGVGGIGGDAAAGGAGGAGGNGGAGGNGGWLFGNGGAGGSGGDGGAAGRGGAGNLGSAGGINAPAGNPGSGSVGIGGAGGAGGTAGLFGDGGAGGAGGAGAAGGFGGISAATPSAGSEGAMGGAGGVGGNARLLGTGGAGGVGGGGGAGGDGGRGGVATPGGQGGDAGDGGAGGAGGNGGGASGAGGWLLGTGGAGGAGGNGGNGGKAGFSPGPTNFGLNGAGGGGGVGGNGATGPWLFGDGGPTPGSTGAGAAGGHGGDAQLIGNGGHGGAGGTGVPNGSGGAGGLSGLLFGEPGANG

SEQ ID NO: 5053 - protein, 612 aa, Streptomyces seoulensis
MAVSVTLPALGESVTEGTVTRWLKAEGERVEADEPLLEVSTDKVDTEIPSPVAGVLASIKVAEDETVEVGAELALIDDGSGAPAAEAPAAEAPAAEAPAPAAEEAPQSAPSTEQEAPAEAPTAEAASGGGSAEGTDVVLPALGESVTEGTVTRWLKSVGDSVEADEPLLEVSTDKVDTEIPAPTSGTLLEIVVGEDETAEVGAKLAVIGAAGAAPAAAPEAPKAPAAEAPAAPAPAAPAPAAPAAPAPQAPAPQAPSAPAPQQQTAPAPDPAPAAPAPAPAPAPAQAPAAAPSAPTATQATDEGAYVTPLVRKLAAESSVDLASVKGTGVGGRIRKQDVIAAAEAAKAAAAPAPAAAQAPAAAKKAPALEASPLRGQTVKMTRIRKVIGDNMVKALTEQAQLSSVVEVDVTRLMKLRGKAKDSFAAREGVKLSPMPFFVKAAAQALKAHPVINARINEAEGTITYFDTENVGIAVDSEKGLMTPVIKHAGDLNLAGIAKATAELAGKVRANKITPDELSGATFTISNTGSRGALFDTIIVPPNQVAILGIGATVKRPAVLETEEGTVIAVRDMTYLTLSYDHRLVDGADAARYLTTVKQILEAGEFEVELGL

SEQ ID NO: 5054 - protein, 770 aa, Brucella suis 1330
MSKGKKTGFIGKRSSAAGGWGALKSCGQQLLASGAPLAGARALLKANQPDGFDCPGCAWGDPEHGSSFEFCENGVKAVAWEATDRRTTPAFFREHTVSKLREWTDYDLENTGRLTHPMRYNTATDKYEAVEWDEAFQAIGGILKSFDTPDRVEFYTSGRASNEAAFLYQLFVRAYGTNNFPDCSNMCHEASGVALTQSVGVGKGTVLLEDFEQADAIFVVGQNPGTNHPRMLGDLRRAAERGARIVAFNPVRERGLERFADPQDKLEMLHGGSEPITSDYFQPRLGGDLAAFRGMAKAVFAADDAALAAGRPSVLDRAFLAAHTAELEAYRAAVDATSWDEIEDQSGLLRQSLERAAEIYMQAGRVICTWAMGITQHRHSVITIREITNFMLLRGNIGKPGAGLCPVRGHSNVQGDRTVGINEHPPVAFLDALEREFGFKPPREPGHNVLGAIGAMLDGTAQAFVALGGNFARATPDSPIISRALSSQRLTVHIATKLNHSHLVPGRDSFILPCLGRTEIDLNSKGVAQIVTVEDSMSMVHGSGGINQPASPLLRSEVAIIAGMANATLGPKPVDWLALADDYDLIREHIARVLPDFHDYNRRVRVPRGFHLRNAARDLEWNTPTGKATFWTGALPQAIEHQQVRDKPGRYVLQTFRSHDQYNTTIYGMNDRYRGVYGERHVVFMNPLDMADLGVEAGDRADIVGEFDDGVERVAANFRFVPYDIPRGCIAGYYPEMNVLVPLGSAGDESDTPTSKSIIVSFRLNRTKAA

SEQ ID NO: 5055 - protein, 404 aa, Streptococcus pyogenes M1 GAS
MKIIEKSSKLEHVAYDIRGPVLDEANRMIASGEKILRLNTGNPAAFGFEAPDEVIRDLIVNARLSEGYSDSKGIFSARKAIMQYCQLKGFPDVDIEDIYLGNGVSELISISLQALLDNGDEVLVPMPDYPLWTACVSLGGGKAVHYLCDEEAGWYPDIADIKSKITSRTKAIVVINPNNPTGALYPKEILEDIVALAREHQLIIFADEIYDRLVMDGKEHIAIASLAPDVFCVSMNGLSKSHRIAGFRVGWMVLSGPKDHVKGYIEGLNMLANMRLCSNVLAQQVVQTSLGGHQSVDALLLPGGRIFEQRNFIYEAINAIPGLSAVKPEAGLYLFPKIDRQMYRIDDDEEFVLQLLKQEKVMLVHGRGFNWKDPDHFRIVYLPSVEELEDVQEKITRVLYQYRR

SEQ ID NO: 5056 - protein, 329 aa, Nostoc punctiforme PCC 73102
MQTQSKITLFKNKLNSPLAKKGISVLQINLGKRCNLACTHCHVEAGPKRTEELSPEVCEQLISLIHKFPEIQIVDLTGGAPEMNYGFKPLVEAARATGKQVIVRSNLTIYFEEGFADLPEYFARHQIRVVASLPCYLADNVEKMRGFGVFDSSVKALQWLNQLGYGKEENLILDLVFNPQLPITEKFSLAPEQTNLEQDYKMFLQEHFNILFNNLFTITNLPVGRTKIHLERRKLYSSYLQFLESNFNPGTVEHLMCLDQLSIDYLGNVYDCDFNQMMNLPAKTDNSATLTVSKLLEAGSLDLISEIQTAAYCYGCTAGCGSSCGGALL

SEQ ID NO: 5057 - protein, 498 aa, Glycine max
  unsure (1)..(498): unsure at all Xaa locations
MASLSCSANDLAPLFNDTAAANYLCAQFDSISRKLNVTTYAVDNTYLLFSXYLVFAMQLGFAMLCAGSVRAKNTMNIMLTNVLDAAAGGLSYYLFGFAFAFGGPSNGFIGRHFFGLRKFPKDSPPSGDYSFFLYHWAFAIAAAGITSGSIAERTQFVAYLIYSSFLTGFVYPIVSHWFWSSDGWASATRSHGNVLFGSGVIDFAGSGVVHMVGGIAGLWGALIEGPRIGRFDRSGRSVALRGHSASLVVLGTFLLWFGCXGFNPGSFLTIAKGYESGGYYGQWSAIGRTAATTTLAGSTAALTTLFSKRLLAGHWNVIDVCNGLLGGFAAITSGCAVVEPRAATVCGFVAAWVLIGLNKLAAKVDDDDPLEAAQLHGGCGAWGVIFTALFAKKEYVSQVYGEGRAHGLFMRGGGKLLAAHVIQILVIVGWVSATMGPLFWGLNKLKLLRISSEDELAGMDLTRHGGFAYAYEDDESHKHGIQLRKVGPNASSTPTTDE

SEQ ID NO: 5058 - protein, 269 aa, Rhodococcus opacus
MASGWNLDGRTALVTGGSRGLGFSIAQALLERGAKVAIIARDDAAVKAAAGRLDSGAGAQNVLPIVADVADSDSIHEALAQVHEWQGRLDIVVNNAGPQLAPSPVTDADENVLTSAFDTKLLGFLRVSKAALPFLSQDGTGSIVNVAGATAHVPIPNTGVTGIVNASVVALTSFLATEAAAKNIRVNAISPGMTKTEGWLAKNDAAAQQQDKTADEIRAGVVQGLGIRLGRWAEPAEIGAAAAFLASDDASYITGQVLRVDGGLSKPVA

SEQ ID NO: 5059 - protein, 506 aa, Pseudomonas aeruginosa
MIYAAPGTPGAVVTFKPRYGNYIGGEFVPPVKGQYFTNTSPVNGQPIAEFPRSTAEDIDKALDAAHAAADAWGRTSVQERSNILLKIADRIEQNLELLAVTETWDNGKAVRETLNADIPLAADHFRYFAGCIRAQEGSAAEINDSTVAYHIHEPLGVVGQIIPWNFPLLMAAWKLAPALAAGNCVVLKPAEQTPLGICVLLELIGDLLPPGVLNVVQGFGREAGEALATSKRIAKIAFTGSTPVGSHILKCAAESIIPSTVELGGKSPNIYFEDIMQAEPAFIEKAAEGLVLAFFNQGEVCTCPSRALVQESIYPAFMEEVLKKVRAIKRGDPLDTETMVGAQASQQQYEKILSYLDIAQQEGAELLAGGSVEKLEGNLASGYYIQPTLLKGHNGMRVFQEEIFGPVVGVTTFKDEAEALAIANDTEYGLGAGLWTRDINRAYRMGRGIKAGRVWTNCYHLYPAHAAFGGYKKSGVGRETHKMMLDHYQQTKNLLVSYDIDPLGFF

SEQ ID NO: 5060 - protein, 229 aa, Arabidopsis thaliana
MMGSVELNLRETELCLGLPGGDTVAPVTGNKRGFSETVDLKLNLNNEPANKEGSTTHDVVTFDSKEKSACPKDPAKPPAKAQVVGWPLVRSYRKNVMVSCQKSSGGPEAAAFVKVSMDGAPYLRKIDLRMYKSYDELSNALSNMFSSFTMGKHGGEEGMIDFMNERKLMDLVNSWDYVPSYEDKDGDWMLVGDVPWPMFVDTCKRLRLMKGSDAIGLAPRAMEKCKSRA

SEQ ID NO: 5061 - protein, 499 aa, Anabaena variabilis ATCC 29413
MTTETRLQGNSQNENLLDNATNEQSSKEENTFQWTKQWYPLAVVEFLDPSRPHAMQLLGKDIVLWRDGSSQWRCFEDFCPHRLAPLSEGRVEADGTLLCAYHAWRFDAQGNCVSIPQSKDEKTAAKNCESQKSCAVVYPTQERQGLLWVWAEAGEQAKVESQLQTPRIVPELEDNSGKVIKSPWNFRDLPYGWDYFMENVSDPAHVPVSHHGIIGDRYKDAKFYDMIPVRPISTQDGFAFEIQPTQGKTVQGIHDFQPPCHMRIVSTSEDGGQLILALYATPTRPGWCRHIGCQVFVKNPQGKKPQGLSFFGLPLPVWLVHVLASLFLHQDMVFLHYQEKIIAQKKNGKWLNAVYTPNPQDKMVITLRQWLKNRAGGGIPWAEGYSSDIPPAEKDKQKLFDVWTTHTQHCTVCQDALKNINRLTVLAYISAAICLFLAVILDARTVAMQAALGASIFTLPPVGFWLALGGAILLAVVGYQLKRFSRLFYVYEFEHARND

SEQ ID NO: 5062 - protein, 305 aa, Triticum aestivum
MAAAGKFNRSNPAVKRILQEVKEMQSNPSPDFMALPLEEDIFEWQFAILGPRDSEFEGGIYHGRIQLPSDYPFKPPSFMLLTPSGRFEIQKKICLSISNYHPEHWQPSWSVRTALVALIAFMPTNPGGALGSLDYKKEDRRALAIKSRETPPKFGSPERQSVIDEIHEQMLSKAPPVPQLLTIGSEEETNKTAPDTSGEHAVKAAEGVNTSGSSSGSANDTDLPKPDSESEVAENIARAQSDVIPRDSGPRVVTAPQNPVVTIQKPKHDRLLTLAAFGLTLAIMALVIKKFFKINGLAGYIEGKF

SEQ ID NO: 5063 - protein, 403 aa, Oryza sativa
  unsure (1)..(403): unsure at all Xaa locations
MATKRSVGTLGEADLRGKKVFVRADLNVPLDDAQKITDDTRIRASVPTVKFLLEKGAKVILASHLGRPKGVTPKYSLKPLVPRLSELLGVDVVMANDCIGEEVEKLAAALPEGGVLLLENVRFYKEEEKNDPEFAKKLAAVADLYVNDAFGTAHRAHASTEGVTKFLKPAVAGFLMQKELDYLVGAVANPKKPFAAIVGGSKVSTKIGVIESLLAKVDVLILGGGMIFTFYKAQGYAVGKSLVEEDKLELATSLIEKAKAKGVSLLLPTDVVVADKFAADAESKTVAAXSAIPDGWMGLDVGPDAIKTSSEALDTCNTIIWNGPMGVFEFEKFAAGTDAIAKKLADLTTTKGATTIIGGGDSVAAVEKAGLADKMSHISTGGGASLELLEGKTLPGVLALDEA

SEQ ID NO: 5064 - protein, 555 aa, Prochlorococcus marinus str. MIT 9313
MSEKMSRHFDRGSFRAVSDVHQLMSFPDFSASDAHVQWQRFNNLLWHHNDLGIWLDISRMHINAEDFERLGPRFDQAFKAMQALEQGAIANTDEQRMVGHYWLRQPQLAPDQEVCDHIAKEIDLIETFGSNVINGLIKAPNGKKFTDVLWIGIGGSGLGPLLMIRALQNAEQGLRFHFFDNVDPDGMSRVLGNLGDALSTTLVVTVSKSGATPEPHLGMEQARQRLEAMGGHWAGQAVAVTMLNSQLDQLAQKESWLKRFDMFDWVGGRTSITSAVGLLPAALIGCDIRAFLAGAAQMDEATRVSDLHSNPASLMAAAWFVAGDGLGRRDMVVLPYRDRLEVFSRYLQQLVMESLGKRLDRDGNVVHQGLAVYGNKGSTDQHAYVQQLRDGVDNFFATFIEVLEDVENIPAINNEHPGDFLDGFLQGTRAALSQGGRQSLTISMRRFDPRRLGALVALFERAVGLYGELVNINAYHQPGVESGKKAAAAILNLQSRVEDLLADGVERSAGEIHQVIGDGSEEAIFWIMRHLTANKRGYVAEGDWGIPTSLRFSKG

SEQ ID NO: 5065 - protein, 354 aa, Streptomyces sp. AM-7161
MKALVLSGGAGTRLPPFSYSMPKQLIPIANKPVLEHVLENIRAVGITEVGVIVGDWADEIAQVIGDGSRLGLRITLIPQEKPLGLAHCVALARPFLGDDDFVMYLGDNMLPGGIDTIAADFTARRPDALVVVHKVRDPPAFGVAELAPDGSVLRLVEKPERPRSDLALIGVYFFTAAIHEAVAAIEPGARGELEITDAVQWLVAHGSHVAASEYDGYWKDTGRVEEVLACNRELLGDQTARVDGEVDAASRVTGRVVLEAGARLVRSTVTGPAVIGAGTVIEDSAVGPHTSIGRGCLLRDTTLTDSIVMDGASITAVTGLQGSLIGRNAVVGAGAEGDGHRLVIGDHTRIEVAA

SEQ ID NO: 5066 - protein, 812 aa, Oryza sativa
MPTEQGPTRPTGGWARLFLSKPSPLNNILWSGGRVALGPSLPGGTTRPALRGPDRHKSQPYLATCSSQGILGKGGGEFARGFWLMANIRALLIGIVFMLGDPLLDDLRVLTSRRLNYSIVAGLRVNTKFDARVPMEIRWLSSTAIGPARLLWQQLIGLQQQAMGTVSACSSWIRPTARFPPHLVVGMPALSPTMIEVGDVICEIETDKATLEFESLEEGGWEMMVLMDLHPCLIGGMGYAEALGNGYGDLMYLAKILAPEGSKDVQVGQPIAVTVEDLEDIKNIPADASFGGEQKEQSIASEAQKVETDAAKESSIITRISPAAKLLIKEHRLDQSVLNASGPRGTLLKGDVLAALKLGASSSSTKQKNAPAAPSSQPTHDFQAQSVTIPQQNDAYEDIPNSQIRKVIAKRLLESKQTTPHLYLSQEQHGVKVSVNDIVIKAVALALRNVPEANAYWNNDKEQAQKCVSVDISIAVATEKGLMTPIIRNADQKTISAISSESGILAVGRGNKIIEPVVDSDGTEKATVVTKMSLTLSADHRVFDGQVGGRTTTSSHSSFIDYRAMVGFVQSLFGSFTRAKCITVFHGVSGSGTVGTVARSGDAGSSRSRTAVVRKRCSPRNGYVGAAGMREHLGSGTVPLNGLLFGIVQTAVLRIQCAEPAPEQCRNSAEQYRNSVKPLAAGSRVAGLRDRAVPRGRSAGPTRYHASVLRNHRSRGTVVRDRLRISYSEETRRADRNTWLQLAKTKSSAHLDRHPKSGHGDLVRGTFPDPKSYQVKREFDHRSRKSHVIWCMMVIRLKSRQNESEPYDHADQ

SEQ ID NO: 5067 - protein, 414 aa, Campylobacter jejuni subsp. jejuni NCTC 11168 [sequence omitted]

SEQ ID NO: 5068 - protein, 853 aa, Mycobacterium tuberculosis H37Rv
MSFVIAAPEALVAVASDLAGIGSALAEANAAALAPTTALLAAGADEVSAAIAALFGAHGQAYQTVSAQASAFHAQFVQALTGGGGAYAAAEAANVSAAQSTDQRLLDLINGPTQALLGRPLIGDGANGGPGQDGGPGGLLYGNGGNGGTSTTAGVAGGNGGAAGLIGNGGAGGGGGAGAAGGNGGAGGWLYGNGGAGGAGGTSVIPGVAGGNGGAGGSAGLWGTGGAGGDGGNGRSGPVNVAGSAGGNGGAGGAAGLFGDAGAGGNGGKGGAGGAAFSINFTAGDGGAGGAGGSGGHALLWGAGGAGGNGGSGGTGGAGGSTAGAGGNGGAGGGGGTGGLLFGNGGAGGHGAAAGNGLAAGNGVSSSGGGGAGGTGGAGGDGGAGGAGGNARLWGVGGAGGAGGDGGAGGAGGKGGSGLSGNANGGAGGDSGRGGTGGAGGEGGAAGLLVGTGGHGGDGGAGGAAVKGGDGGAAAGTGIAGAGGRGGAGGSGGSGGDGGGGAAGPAGWLFGDGGAGGNGGAAAAGGAGGQAGGGGGNGGNGGNGGNGGNGGNGATGGWLYGNGGAGGQGATAGAGGAGANGVSSTNGGGTGGNGGIGGTGGSGGAGGNAGLLGVGGAGGHGASGGAGDRGGAGGTGFISSDGGAGGDGGDGGNGGAGGTGGLLFGAGGNGGPGGSGGAADIGGNGGAGNGGGTDGNGGNGGSGGGAGSGGDGGGAGGNGAWLFGNGGAGGGGGKGGNGAGGGLGGGSFGLPGLNGSGGDGGDGGNGAPGGVLYGNGGAGGQGSSGGIGGPGATGGAGGKGGDGGDAQLIGDGGNGGNGGAGGTGGTPGPGGPGGSGGLGGLLFGQTGTAGVSP

SEQ ID NO: 5069 - protein, 427 aa, Methanocaldococcus jannaschii
MLYNMDERFEIKDIVAREVIDSRGNPTVEVEVITKGNGYGSAIVPSGASTGTHEALELRDKEKRFGGKGVLMAVENVNSIIRPEILGYDARMQREIDTIMIELDGTPNKSRLGANAILAVSLAVAKAAAATAKIPLYKYLGGFNSYVMPVPMMNVINGGKHAGNDLDLQEFMIMPVGATSISEAVRMGSEVYHVLKNVILEKYGKNAVNVGDEGGFAPPLKTSREALDLLTESVKKAGYEDEVVFALDAAASEFYKDGYYYVEGKKLTREELLDYYKALVDEYPIVSIEDPFHEEDFEGFAMITKELDIQIVGDDLFVTNVERLRKGIEMKAANALLLKVNQIGTLSEAVDAAQLAFRNGYGVVVSHRSGETEDTTIADLSVALNSGQIKTGAPARGERTAKYNQLIRIEQELGLSKYAGRNFRCPF

SEQ ID NO: 5070 - protein, 298 aa, Prochlorococcus marinus subsp. marinus str. CCMP1375
MTIAWAFPGQGSQKLGMADEVISLKGAIERFKSASEILGRDLLAICRGQSNCKDELGDLNDTRNTQPAMFVIESLLIDDLKRQGRKADLLAGHSLGEFVALYAAEVFDVQTGLVLLKTRSELMSAAGGGAMTAVLGFDRKQLEDLVGNTSGVVIANDNSSEQVVLSGTPDAVNSVAGQLTCKRIVPLKVSGAFHSPFMKAAANDFALQLDDVLFSDGVVPVLSNVDPSPVQDGDLLKERLKRQMITGVRWRETMKTMETKGVKTFVEIGPGKVLSGLAKRSMQGITLSQVSSANDLGH

SEQ ID NO: 5071 - protein, 442 aa, Brucella suis 1330
MLTKTNAPSLDNFWMPFTANRQFKAAPRLLASASGMYYTDVDGNQVLDGTAGLWCCNAGHGRKRITEAVERQISTMDFAPIFQMGHNVAFDFAEKLAAIAPGGAEAKLDRVFFTNSGSESVDTALKIAIAYQRAIGQGTRTMVLGREKGYHGVGFGGISVGGLVNNRRVFPQIPADHLRHTLDIEKNAFSKGLPANGIELANDLERLVQLHGAEKIAAVIVEPMSGSAGVILPPKGYLERIRATADKYGILLIFDEVITGFGRLGTPFAVDYFGVVPDLVTTAKGLTNGAIPMGAVFAARKVYDGLMTGPENAIELFHGYTYSGHPVASAAGLATLEIYAEEGLLTRGAGLADYWQEALHSLKGAPNVIDIRNLGLVGAVELASRKDAPGARAYDIFVECFKKGLLIRVTGDVIALSPPLIIEKEQIDTIISVLGDAIKRAA

SEQ ID NO: 5072 - protein, 142 aa, Triticum aestivum
  unsure (1)..(142): unsure at all Xaa locations
MAPTVMASSATSVAPFQGLKSTAGLPVSRRSNGASLGSVSNGGRIRCMQVWPIEGIKXFETLSYLPPLNTEASSSKFDYLIXRFKWVPCLEFNKSGHLPXEHNAXPGYNNGRYWXTMWKLPKFRXAPTQQVINKVEEXXKDT

SEQ ID NO: 5073 - protein, 291 aa, Acinetobacter lwoffii
MIKKAILPVAGLGTRFLPASKSIPKEMVTVVDRPAIEYVVREAVEAGIEQIILVTHSSKASIENYFDRNFELETILEQKKKFDLLKEITDILPKHVSVISVRQPQPLGLGHAVLCAKDVIGNEAFAVLLPDVLVKDAEADNDLSRMIRRFEQSNAAQIMVEAVPDHLVDQYGIVDVENSPNEGESIVMQGIVEKPSVGTAPSNLSVVGRYILPAQIMALLENTPRGAGNEIQLTDAIAALQQSETVEAYRMKGQTFDCGSKIGYLKAVLHYGIEHPKLGEEFKGLIRELAL

SEQ ID NO: 5074 - protein, 557 aa, Acinetobacter lwoffii
MNYKQPLIVKSQQQALSALRNLKMQTQDTHLNQFFSDDSGRFERFSVEQEQLVLDFSKHRIDQNVLNGLVDLAHAQDLTQWIQRLFSLEEINYTEQRAAMHWALRVPEQNQQVLPEITAQVHTQLERMYSLVEKIHAGQYRGATGEVIQDVVNIGVGGSDLGPLMVTHALSDFKVVTAKPLDVHFVSTMDGSQLSDLLHQLRPETTLFIISSKSFGTIDTLSNAQTVRQWLEKALGKNSHVLKHHFIGVSTKPDKMSEWGIAPENQLLLWDWVGGRYSLWSCIGLPIALTVGVDGFKQLLSGAYAIDQHFQTAPFAQNIPVLIGLLGVWNNNFLDIQTHAVLPYDGRLKYFAAYLQQLEMESNGKSTQRSGEKVDSATCPIVWGEVGPNAQHAFYQLLHQGTHKVSCDFIAPVKRYNANHFTYAENAEALIEQHHLALSNCLAQSRLLAFGNQALTADEIEDLPTYKQYEGNQPSSTILLKELNPYSLGMLIATYEHKVFVQSVLWNINPFDQWGVEKGKEIANQLLPILNREQDDLSTFDASTQGLLKILLGKNNG

SEQ ID NO: 5075 - protein, 183 aa, Eucalyptus grandis
MGRGRVELKRIENKINRQVTFAKRRNGLLKKAYELSVLCDAEVGLIIFSNRGKLYEFCSSSSMLKTLERYQKCNYGALEPNVSARESLELSCQQEYLRLKARYEGLQRTQRNLLGEELGQLCSKELESLERQLDGSLKQIRSRRTQYMLDQVTDLQHREQVVHEANRTLNQRLMEGYQVMRSS

SEQ ID NO: 5076 - protein, 245 aa, Eucalyptus grandis
  unsure (1)..(245): unsure at all Xaa locations
MGRGKVELKRIENKINRQVTFAKRRNGLLKKAYELSVLCDAEVALIIFSNRGKLYEFCSSSSMMKTIEKYQKCSYGSLETNCSINEMQNSYQDYLKLKARVEVLQRSQRNPPWEELGPLNSKELEQLEHQLENSLKQIRSAKTQFMFDQLXHLQHKEQMLVEANRELWKKLEESNTRIPLRLGWEAEDHNNISYSRLPTQSQGLIFQPLGGNPTLQIGYNPAGSNELNVSAADQHPNGFIPGWML

SEQ ID NO: 5077 - protein, 309 aa, Arabidopsis thaliana
MEITLNSGFKMPIVGLGVWRMEKEGIRDLILNAIKIGYRHLDCAADYRNETEVGDALTEAFKTGLVKREDLFITTKLWNSDHGHVIEACKDSLKKLQLDYLDLFLVHFPVATKHTGVGTTDSALGDDGVLDIDTTISLETTWHDMEKLVSMGLVRSIGISNYDVFLTRDCLAYSKIKPAVNQIETHPYFQRDSLVKFCQKHGICVTAHTPLGGATANAEWFGTVSCLDDPVLKDVAEKYKETVAQVVLRWGIQRKTVVIPKTSKPARLEENFQVFDFELSKEDMEVIKSMERKYHANQPAKFWNIDLYA

SEQ ID NO: 5078 - protein, 171 aa, Prochlorococcus marinus str. MIT 9313
MSRQTLLKQFTPIDGIAAIVALIALGGVLWSPKLSHSLARATGVMRPVKVSVDVRNVPTAEPNALIEAALAQGSTSIVIRNQPAGSLKLKGIEDLRSKLVAVQPDGSVVIAMDPNLAANSVLDARFILEGDGTVSKTGVVLAGTKLKIGTPVELEGSSYRINGTVSGVSVQ

SEQ ID NO: 5079 - protein, 256 aa, Streptococcus pyogenes MGAS8232
MKIGIIGVGKMASAIIKGLKQTPHELIISGSSLERSKEIAEQLTLPYAMSHQDLIDQVDLVILGIKPQLFETVLKPLHFKQPIISMAAGISLQRLATFVGQDLPLLRIMPNMNAQILQSSTALTGNALVSQELQARVRDLTDSFGSTFDISEKDFDTFTALAGSSPAYIYLFIEALAKAGVKNGMPKAKALEIVTQTVLASASNLKTSSQSPHDFIDAICSPGGTTIAGLMELERLGLTTTVSSAIDKTIDKAKSL

SEQ ID NO: 5080 - protein, 279 aa, Bacillus cereus ATCC 14579
MSIQNISFLGAGSIAEAIIGGLLHANVVKGEQITVSNRSNETRLQELHKKYGVKGTHNKKELLTDANILFLAMKPKDVAEALTPFKEYINNNVLIISLLAGVSTDSIRKLLQKDVPIIRAMPNTSAAILKSATAISPSKHATAEHIRTATSLFETIGLVSVVEEEDMHAVTALSGSGPAYIYYVVEAMEEAAKKIGLKEDVAKSLILQTMIGAAEMLKASDKHPSILRKEITSPGGTTEAGIEVLQEHKFQQALISCITQATKRSHNLGKTLEQLTKEK

SEQ ID NO: 5081 - protein, 311 aa, Bordetella pertussis Tohama I
MKLAFVFPGQGSQSVGMLDAWAGNAAVADVVARASAALGQDLGALMAQGPAQQLNLTTNTQPAMLTAGAACFAAWRAAGGPMPEVMAGHSLGEYAALTAAGALALEDAVRLVRVRADAMQAAVPVGAGAMAAVLGLDDDAVRAACQQAAQGEVVEAVNFNAPAQVVIAGHKAAVERACEAAKAAGAKRALLLPVSAPFHSSLLKPAAEVLQGALAGVEVSAPQVPVLNNVDVATPAEPAAIRDALVRQAWHPVRWVETLRAMKELGVTHVIECGPGKVLTGLTKRIDADLTGIAITDPASLEAALAAVNGN

SEQ ID NO: 5082 - protein, 559 aa, Escherichia coli O157:H7 EDL933
  unsure (1)..(559): unsure at all Xaa locations
MKQKITDYLDEIYGGTFTATHLQKLVTRLESAKRLITQRRKKHWDESDVVLITYADQFHSNDLKPLPTFNQFYHQWLQSIFSHVHLLPFYPWSSDDGFSVIDYHQVASESGXWQDIQQLGECSHLMFDFVCNHMSAKSEWFKNYLQQQPGFEDFFIAVDPQTDLSAVTRPRALPLLTPFQMDDNSTRHLWTTFSDDQIDLNYRSPDVLLAMVDVLLCYLEKGAEYVRLDAVGFMWKEPGTSCIHLEKTHLIIKLLRSIIDDIAPGTVIITETNVPHKDNIAYFGEGDDEAHMVYQFSLPPLVLHAVQKQNVEALCQWAQSLSLPSGKTTWFNFLASHDGIGLNPLRGLLPESEILALVEALQQEGALVNWKNNPDGTRSPYEINVTYMDALSRRESSDEERCARFILAHAILLSFPGVPAIYIQSILGSRNDYAGVEKLGYNRAINRKKYHSEEITRELNDEATLRHAVYHELSRLITLRRSHNEFHPDNNFTIDTVNSSVMRIQRSNAEGNCLTGLFNVSKNIQHVNITGLHGRDLISEVDILGNKITLRPWQVMWIK

SEQ ID NO: 5083 - protein, 199 aa, Zea mays
  unsure (1)..(199): unsure at all Xaa locations
MASSMLSSAAVVTSPAQATMVAPFTGLKSSAAFPVTRKANNDITSIASNGGRVSCMKVWPPVGKKKFETLSXYXXDXXEVEWVKEXXYLLPHKWIPLCEFXXEHGFVYREHGNTPEYYNARTGHGGTSLGPMTDFAQGLKEAKRAKGKPNPFLGTSIPKNRKAGDNFYPKNPKFPGGKFERNPKKTPPIYSQGGFFPRG

SEQ ID NO: 5084 - protein, 544 aa, Trichodesmium erythraeum IMS101
MNVQTVVTKPFRDQKPGTSGLRKKVPIFKEPHYLENFIQSIFDSLEGFSGQTFVLGGDGRYYNRQAIQIILKMAAANGVGRMLVGQGGILSTPAASCIIRKNQAFGGIILSASHNPGGPEEDFGVKYNISNGGPAPEKVTSAIYERSKVIDSYKILEAKSINLDQLGSEKLGEMTVEVIDSVADYADLMESLFDFGKLSQLLSSGKFRMCMDSLHAVTGPYAKNIFEQRLGAPLGTVKNGMPLEDFGGGHPDPNLVYAHDLVEIMFGDNAPDFGAASDGDGDRNMILGKNFFVTPSDSLAILAANAKLVPGYSSGLTGIARSMPTSAAADRVAEKMGLDCYETPTGWKFFGNLLDADKATLCGEESFGTGSNHVREKDGLWAVLFWLNILAARQESVEDIVKEHWKTYGRNYYSRHDYEGIESDKASTLMENLRSLLPSLPGKQYGQYEVKYADDFRYTDPIDGSVSQKQGIRIGFSDGSRMVFRLSGTGTQGATLRLYVESYEPDTTKQDQDTQIALSPLISLADEIAQIKNITGQEKPTVIT

SEQ ID NO: 5085 - protein, 436 aa, Saccharomyces cerevisiae
AVSKVYARSVYDSRGNPTVEVELTTEKGVFRSIVPSGASTGVHEALEMRDGDKSKWMGKGVLHAVKNVNDVIAPAFVKANIDVKDQKAVDDFLISLDGTANKSKLGANAILGVSLAASRAAAAEKNVPLYKHLADLSKSKTSPYVLPVPFLNVLNGGSHAGGALALQEFMIAPTGAKTFAEALRIGSEVYHNLKSLTKKRYGASAGNVGDEGGVAPNIQTAEEALDLIVDAIKAAGHDGKVKIGLDCASSEFFKDGKYDLDFKNPNSDKSKWLTGPQLADLYHSLMKRYPIVSIEDPFAEDDWEAWSHFFKTAGIQIVADDLTVTNPKRIATAIEKKAADALLLKVNQIGTLSESIKAAQDSFAAGWGVMVSHRSGETEDTFIADLVVGLRTGQIKTGAPARSERLAKLNQLLRIEEELGDNAVFAGENFHHGDKL

SEQ ID NO: 5086 - protein, 442 aa, Neurospora crassa
MSSPTGNPVLDGPKKLAAAFPNKELSMASLSVHADDYINNHQAVAPPMHVSTTFRYAENPDDLKPWENLNPNAPYDSHIYSRDSAPNSTRLEAILTSLLGAPALTYASGLSAFHAMIVFLNPKRVAIGGGYHGCHGILKLMKKLNGLEKLELESDADLAKLQPGDVIHVETPLNPTGEARDLAYYRRKADELGCYLTVDATFAPPPLQDPFQLGVDIVMHSGTKYFGGHSDMLCGVLAFRPDKAQEWLPALLEERLYLGAVLGSLEGWLGVRSLRTFELRIKRQAESAQKLVDWLVEEKAKEGSLVSEFVTRIQHASQQPEAKEEGSWLRKQMPGGFGPVFSIYLKSEQQAKRLPSKLHLFHHATSLGGVESLIEWRAMSDLDIDKRLLRISVGVESWDDLRDDLIQGLEALKKDPKAHNILITQKRPKARIPYPASSSMME

SEQ ID NO: 5087 - protein, 233 aa, Shigella flexneri 2a str. 301
MDMFRKLAAECFGTFWLVFGGCGSAVLAAGFPELGIGFAGVALAFGLTVLTMAFAVGHISGGHFNPAVTIGLWAGGRFPAKEVVGYVIAQVVGGIVAAALLYLIASGKTGFDAAASGFASNGYGEHSPGGYSMLSALVVELVLSAGFLLVIHGATDKFAPAGFAPIAIGLALTLIHLISIPVTNTSVNPARSTAVAIFQGGWALEQLWFFWVVPIVGGIIGGLIYRTLLEKRD

SEQ ID NO: 5088 - protein, 381 aa, ASPERGILLUS NIDULANS FGSC A4
MCLCTTLSAIVPVLGFTASASLEEPRSVVRPRGESAGRRSQQYDSAADRSVVPGSPFTPRSSRVAVEELRSALKRHSVSSPPSRPSGDPACGRMSAGQTSLGGGISTSASAAASFAAGPSSNAALPETSNQSTANTSSVPGPAPTVPPAFAAPQNTQPPPMPAPTTTAGSNKRNSQSDSTRGVEPAGPGSLSLEGSQSKRLRPANPAVKYLPVRYEFADPRDLVVLISSMLMELIRYNDKIPLNQGRLTRFHSRTPPRISVHDYLQRLTTHATLSPPILLSMVYYIDRLCALYPAFTVSSLTIHRFLITSATVASKGLSDSFWTNKTYARVGGISMAELALLELEFLFRVEWRIVPQPEVLNDYYQSLVERCDGYEIQSGL

SEQ ID NO: 5089 - protein, 250 aa, Leuconostoc mesenteroides subsp. mesenteroides ATCC 8293
MRKYIAEFLGTFMLVFFGTGSVVYSAATTQSAITVGLAFGLSLAVAIYAFGHISGGHFNPAVSLAMAIQKRLPWVTFIGYVIAQLLGAIVASAAVYGGVTAYLKSSTVTTALSGQSMTVKQFVSLAGLGQTNFSDGSGWYAFAFELVLTFLFVLVIAIVTKLNNVPAPFIIGIWLAVLIVVVLPITGGAFNPARALAPAIFVQGKALTHVWVYLVADLLGGALAAFAANFLDKKEEVASTPKEVKETKKA

SEQ ID NO: 5090 - protein, 311 aa, Haemophilus somnus 129PT
MKIAVLGAAGGIGQALALLLKLQLPAGSELSLYDIAPVTPGVAADVSHIPTAVKIQGFAGEDPTPALENADVVLISAGVARKPGMDRSDLFNINAGIVKNLIEKVAKTCPKACVGIITNPVNTTVAIAAEVLKKAGVYDKRKLFGVTTLDVLRSETFVAELKGLNVSRIAVPVIGGHSGVTILPLLSQVQYAEWEEDEIAPLTKRIQNAGTEVVEAKAGGGSATLSMAQAAARFALSLVQGLSGETVVECTYVEGDGKYARFFAQPVRLGKEGVEEILPVGTLSAFEQKALEDMLPTLRADIELGEKFVNN

SEQ ID NO: 5091 - protein, 506 aa, Brassica napus
MTSINVKLLYHYVITNLFNLCFFPLTAIVAGKAYRLTIDDLHHLYYSYLQHNLITIAPLFAFTVFGSVLYIATRPKPVYLVEYSCYLPPTHCRSSISKVMDIFYQVRKADPSRNGTCNDSSWLDFLRKIQERSGLGDETHGPEGLLQVPPRKTFAAAREETEQVIIGALENLFKNTNVNPKDIGILVVNSSMFNPTPSLSAMVVNTFKLRSNVRSFNLGGMGCSAGVIAIDLAKDLLHVHKNTYALVVSTENITYNIYAGDNRSMMVSNCLFRVGGAAILLSNKPRDRRRSKYELVHTVRTHTGADDKSFRCVQQGDDENGKTGVSLSKDITDVAGRTVKKNIATLGPLILPLSEKLLFFVTFMGKKLFKDKIKHYYVPDFKLAIDHFCIHAGGKAVIDVLEKNLGLAPIDVEASRSTLHRFGNTSSSSIWYELAYIEAKGRMKKGNKVWQIALGSGFKCNSAVWVALNNVKASTNSPWEHCIERYPVKIDSDSGKSETRAQNGRS

SEQ ID NO: 5092 - protein, 506 aa, Brassica rapa
MTSINVKLLYHYVITNLFNLCFFPLTAIVAGKAYRLTIDDLHHLYYSYLQHNLITIAPLFAFTVFGSVLYIATRPKPVYLVEYSCYLPPTHCRSSISKVMDIFYQVRKADPSRNGTCDDSSWLDFLRKIQERSGLGDETHGPEGLLQVPPRKTFAAAREETEQVIIGALENLFKNTNVSPKDIGILVVNSSMFNPTPSLSAMVVNTFKLRSNVRSFNLGGMGCSAGVIAIDLAKDLLHVHKNTYALVVSTENITYNIYAGDNRSMMVSNCLFRVGGAAILLSNKPGDRRRSKYELVHTVRTHTGADDKSFRCVQQGDDENGKTGVSLSKDITDVAGRTVKKNIATLGPLILPLSEKLLFFVTFMGKKLFKDKIKHYYVPDFKLAIDHFCIHAGGRAVIDVLEKNLALAPIDVEASRSTLHRFGNTSSSSIWYELAYIEAKGRMKKGNKVWQIALGSGFKCNSAVWVALNNVKASTNSPWEHCIDRYPVKIDSDSGKSETRVQNGRS

SEQ ID NO: 5093 - protein, 1023 aa, Brucella suis 1330
MTDLSHPAPEFTTKDAERLAECHFGVSASASPLDSERDCNFRLKVANGSVNGSAGSADWILKIVNASEPRVESEFQTALLQHLVDTNPAAAVPHLKPSLSGDVLASAQGPDGKPHALRMASWLPGTPLAEGKRTKTLLKNLGRALGELDRALQGFIHPGALRDFDWDLRHAGRARERLHFIDKPEDRAVIEHFLARFERNVAPQLPFLRAQVIHNDANDWNVLVDDDDGERIAGLIDFGDAVHTVLIAEVAIACAYSILDMDDPIGAAGALAAGFHEKFPLQAQEIDILFDLIAMRLVTSVTLSASRREKTGDNPYLAISEAPAWRLLHRLDALNPRFATAILRKACGFDAVEGAGAVRTWLDANRGAFAPIVKPHLATLTKALVPYGDAAHVMTVDSAGRRPETATAWWDDFCARNHIQLGLGPWGEKRTVYTDEAFRSRFVEGERRVHHLGLDLFMPAGTPVYTPLAATVRSVEIEAVPLGYGGLIALEHEPEGCPPFITLWGHMAHEAVSRLKPGDRLAAGELVGHMGDMHENGGWTPHLHFQISTDTSLSATEILGVGESAYLDVWADIFPDAAPLAGIPAEAFQQSGRTRAEIISVRKEMLLPNLSISYSDPIKFVRGDGVWLIDNRGRAYLDCFNNVCHLGHAHPEVVEAIARQAAILNTNTRYLHDTIVSYAERLAATLPEGLTVASFACSGSEANSLALRMARTHSGQRDALVLDWAYHGTTQELIDLSPYKYKRKGGKGRPDHVFEATIPDSYRAPESWPLAEHGRRFAESIAEQIEKMKAQGRAPAFFIAESIPSVAGQVFLPEGYLREVYAMVRAAGGVCIADEVQVGFGRVGSHWWAFEMQGVVPDIVTMGKPIGNGYPMSAVVTTREVADSFNNGMEYFNTFGGNPVSCAAGLAVLDVIEHNDLRRNALEIGNYLIAGFRSMQDRFDIIGDVRGQGLFLGIELVMDRKTKEPATAIARKINDGARERGILMGTEGPFDNVLKMRPPMIFTRANADHLLSVLEDSFAAALK

SEQ ID NO: 5094 - protein, 506 aa, Brassica napus
MTSINVKLLYHYVITNLFNLCFFPLTAIVAGKAYRLTIDDLHHLYYSYLQHNLITIAPLFAFTVFGSVLYIATRPKPVYLVEYSCYLPPTHCRSSISKVMDIFYQVRKADPSRNGTCDDSSWLDFLRKIQERSGLGDETHGPEGLLQVPPRKTFAAAREETEQVIIGALENLFKNTNVNPKDIGILVVNSSMFNPTPSLSAMVVNTFKLRSNVRSFNLGGMGCSAGVIAIDLAKDLLHVHKNTYALVVSTENITYNIYAGDNRSMMVSNCLFRVGGAAILLFNKPGDRRRSKYELVHTVRTHAGADDKSFRCVQQGDDENGKIGVSLSKDITDVAGRTVKKNIATLGPLILPLSEKLLFFVTFMGKKLFKDKIKHYYVPDFKLAIDHFCIHAGGRAVIDVLEKNLALAPIDVEASRSTLHRFGNTSSSSIWYELAYIEAKGRMKKGNKVWQIALGSGFKCNSAVWVALNNVKASTNSPWEHCIDRYPVKIDSDSGKSETRAQNGRS

SEQ ID NO: 5095 - protein, 165 aa, Zea mays
  unsure (1)..(165): unsure at all Xaa locations
MGKIGLFDLXXHFAFYGAYHSNPVNIAIHMLFVWPIFFSALMILYFIPPFFNLPNLEFTLWGNHVVLVWNVGFLVALIYSVYYAGLDLKAGSLAALLXAVCWVGGSFVASQLGLPLPWKXVLVIQLXXWTGQXIXHXGVFXXRXXALLDXXIXALVWPPFFVWLX

SEQ ID NO: 5096 - protein, 319 aa, Bacillus sphaericus
MKKIAVLTSGGDVPGMNAAIRAVVRKAAFHGINVVGIKHGYEGLVKGYLEELDLGSVGGIIQRGGTHLNSARCPEFKEDAVQQQGIENLRAAGIEGLVVIGGDGSYRGAMDLVKKGFPAVGVPGTIDNDVPGTEYTIGFDTALNTVVESIDKIRDTATSHENSFIVEVMGRDAGDIALWAGLAAGAETVLIPEEDYDLDDIVARLDRGAARGKKHSIIIVAEGVMSGNELAKLIKEKTGKETRVSVLGHIQRGGSPTARDRVLASQFGAHAVELLMEGKYGRAVGIRNHQVIDYDMPEAFEKNHEADVSLYTLMKELSI

SEQ ID NO: 5097 - protein, 384 aa, Mesorhizobium loti MAFF303099
MPMSEIVAATADIATNNEKQSATADARLAAIVDSSFDAIISKDLTSIITSWNLAAERMFGYTAEEAIGQSILMLIPDHLKSEETEIISRVRSGHRVASYETTRRRKDGTLISVSLTVSPIKNALGEIVGASKIARDISAAKESERRIRLLMREVNHRVKNQFAVILSMVRETSKRSSDPQEFEELIRARIMALSRSHDLLVTSEWAGASLFDLIQEHLKPFGREEQILLSGPVLTLQSNAVQNLGMAFHELGTNSSKYGALGSEDGQVEITWTIGSSAQDLGTKDLGAKDLGTKSVGASGGRDFQLLWTETSTPRSDDSREENARKGFGTVVLQRVAPQSLGGSAQLERSPGRLSWRLSAPLASIIVPQAGVEADDSAALGFGI

SEQ ID NO: 5098 - protein, 335 aa, Medicago sativa
TPYTYTLRNTGPDDVYIKIHYCGVCHSDLHQIKNDLGMSNYPMVPGHEVVGEVLEVGSNVTRFKVGEIVGVGLLVGCCKSCRACDSEIEQYCNKKIWSYNDVYTDGKITQGGFAESTVVEQKFVVKIPEGLAPEQVAPLLCAGVTVYSPLSHFGLKTPGLRGGILGLGGVGHMGVKVAKALGHHVTVISSSDKKKKEALEDLGADNYLVSSDTVGMQEAADSLDYIIDTVPVGHPLEPYLSLLKIDGKLILMGVINTPLQFVTPMVMLGRKSITGSFVGSVKETEEMLEFWKEKGLTSMIEIVTMDYINKAFERLEKNDVRYRFVVDVKGSKFEE

SEQ ID NO: 5099 - protein, 73 aa, Glycine max
AFSMIFSPAVITVNLAGADMVAPFTVLMSMAGFPTRKTNNDITSIASNGGRVQCMQVRPPICKNKSETLSYLA

SEQ ID NO: 5100 - protein, 292 aa, Anabaena variabilis ATCC 29413
MTKTAWVFPGQGSQALGMGTDLLDIPTAKEKFAQAEAILGWSVSEICQNEEKLSQTLYTQPSLYVVESILADLTKERGHQPDLVAGHSLGEYIALYVAGVFEWSAGLKLVKRRAELMDSAAGGMMAAMMNFDREQLETVIAQTPDVVLANDNSPAQVVISGTPEAVQTVMSQVKAKRAVPLKVSGAFHSHLMNTAAVEFQEILETVEFQQANVPVLSNVEPVPAVDATILKQRLSQQMTGSVRWREISLTLPVNGIEKVVEIGPGNVLTGLIKRTTANLILKNIRNAAELLN

SEQ ID NO: 5101 - protein, 391 aa, Streptomyces avermitilis MA-4680
MKAAVYEGPRTVAVKDVPDAKIEHPCDIIVKITTTNICGSDLHMYEGRTSFESGRTLGHENMGQVVEVGSAVRKVQVGEYVVLPFNIACGFCKQCERGLTNYCLTMQPEPALAGAAYGFADMGPYQGGQAELLRVPYGDFNALRLGEDAAEWQTDYVMLADIFPTGYHATEMAHVKPGDQTIVFGAGPVGLMAAYSALLKGAGRVWVADHQPDRLRKAEEIGAIPINTAEQKPGEVVKEATLGLGADNGCECVGYQAHDPEGHEDASLTLNGLIDSVRFTGDIGVVGVFLPQDPGGAEAQGELEAQGKVPLDFGLMWFKGQHMGTGQAPVKRYNRALRDLIAGGKAKPSFVVSHELSLDEAPTAYEHFDARDEGWTKVVLHPNGHGNGHKR

SEQ ID NO: 5102 - protein, 587 aa, Streptococcus pyogenes SSI-1
MAVEIIMPKLGVDMQEGEIIEWKKQEGDTVNEGDILLEIMSDKTNMELEAEDSGVLLKITRQAGETVPVTEVIGYIGAEGESVEVSSPAASDVNVARTTEDLEAAGLEVPKAPAQAASAAPKAALADDEYDIIVVGGGPAGYYAAIRGAQLGGKIAIVEKSEFGGTCLNVGCIPTKTYLKNAEILDGIKIAAGRGINLASTNYTIDMDKTVDFKNTVVKTLTGGVQGLLKANKVTIFNGLGQVNPDKTVTIGSQTIKGRNVILATGSKVSRINIPGIDSKLVLTSDDILDLREMPKSLAVMGGGVVGIELGLVWASYGVDVTVIEMADRIIPAMDKEVSLELQKILSKKGMKIKTSVGVSEIVEANNQLTLKLNNGEEVVAEKALLSIGRVPQMNGLENLNLEMDRNRIKVNDYQETSIPGIYAPGDVNGTKMLAHAAYRMGEVAAENAIHGNTTRKANLKYTPAAVYTHPEVAMVGLTEEQAREQYGDVLIGKNSFTGNGRAIASNEAHGFVKVIADAKYHEILGVHIIGPAAAEMINEAATIMESELTVDELLLSIHGHPTFSEVMYEAFADVLGEAIHNPPKRK

SEQ ID NO: 5103 - protein, 469 aa, Streptococcus pyogenes SSI-1
MAFEIIMPKLGVDMQEGEIIEWKKQEGDTVNEGDILLEIMSDKTNMELEAEDSGVLLKIVRPAGDTVPVTEVIGYIGAEGESVDTIASSEKTTEIPVPASADAGPAVAPKENVASPAPQVAATAIPQGNGGKVRATPAARKAAAEMGIDLGQVPGTGPKGRVHKEDVENFKGAQPKASPLARKIAADKGIDLATVSGTGFNGKVMKEDIMAILEAAKPAEAKAPAAKEEKVVDLPEGVEHKPMSAMRKAISKGMTNSYLTAPTFTLNYDIDMTEMIALRKKLIDPIMAKTGLKVSFTDLIGMAVVKTLMKPEHEYMNASLINDANDIELHRFVNLGIAVGLDDGLIVPVIHGADKMSLSDFVLASKDVIKKAQTGKLKAAEMSGSTFSITNLGMFGTKTFNPIINQPNSAILGVGATIPTPTVVDGEIVARPIMAMCLTIDHRLVDGMNGAKFMVDLKKLMENPFELLI

SEQ ID NO: 5104 - protein, 339 aa, Lactococcus lactis
MKRIAVLTSGGDAPGMNAAIRAVVRKAISEGIEVYGINHGYAGMVAGDIFPLTSASVGDKIGRGGTFLYSARYPEFAQVEGQLAGIEQLKKFGIEGVVVIGGDGSYHGAMRLTEHGFPAVGLPGTIDNDIVGTDFTIGFDTAVSTVVDALDKIRDTSSSHNRTFVVEVMGRNAGDIALNAGIAAGADDISIPELEFKFENVVNNINKGYEKGKNHHIIIVAEGVMTGEEFATKLKEAGYKGDLRVSVLGHIQRGGSPTARDRVLASRMGARAVELLRDGIGGVAVGIRNEELVESPILGTAEEGALFSLTTEGGIKVNNPHKAGLELYRLNSALNNLNL

SEQ ID NO: 5105 - protein, 693 aa, Oryza sativa (japonica cultivar-group)
MAQPLLLLLLAAAAAAAVAVVAVAQTNMADAEALMQLKKSFTNSSSLSSWLITNTDGDKSPCAPGSHEWHGVVCSRGKVTGLRLNGLRLGGTVDVGALVGFHNLRSVSFAGNNFSGPLPAVDRLTSIKSMFFSDNQFTGVLPDDFFSKLSHLKKLWLDHNELSGAIPASIAQATSLLELHLAHNAFSGELPPLPPPALKVFDISWNDLEGVVPEAFRKFDAGRFGGNQYLCYVPTSDRPCKRVQAAAASSSKRSPMAFVTLLVSVVVVALVLCLCCNRSSRVHDFDPAHRGGDGLDERPPVYMVKQFSTTGKRSASWLGKRTGSSLRGHRRAASAAKADELGGGAGDLVIVNNCKGVFGLTDLMKAAAEVIGSGGHGSAYKAVMANGVAVVVKRARDMNRATKDAFEAEMKRLGAMSHANLLPPLAYHYRRDEKLLVYEYIPKGSLLYVLHGDRGMDYAGLDWPTRLKVAVGVARGTAFLHGELAGHEVPHGNLKSANILLAPDFEPLLVDFGYSGLINHMQSPNSMIARRAPECAAGHPVGAKADVYCLGIVLLELLTGKFPSLYLQNAKGGTDLVMWATSAIADGYERDLFDKAITSAWKFALPDMARLMRVAVDCVETDADKRPDMKVAAARVEEVVAAAMATVRERHQAAGGESSRSSSHAQYVRDGSMQRITSVGERSSRRGSNDYSS

SEQ ID NO: 5106 - protein, 380 aa, Oryza sativa
MSYNHSPSITAETINQKVRIFTYEPCGEIVRHARRLEKEIYENPGSLPFQEIIYCNLGNPQALGQRPINFFREVLSLCDNPSLIDRDEARALFSPCALKRARKIIESLPGRDSVSYTSSQGVRGLREAVADGIAARDGFPSKPDNIFLTDGASSAINMMMQILIRSHEDGTLCPLPEYPLYSASIILHGGTMVPYNLTEDSIWGLEIFEVKRCLEDARASGLTIRAMVVINPGNPTGQVLSITNQEEIVEFCRKEGLVILADEVYQENVYTENKRFNSFKKVARSLGYDHHDLSIVSFHSVSMGYYGECGRRGGYMEICGFGDDVIDEMYKLASLTICPNIAGQILISLVMDPPKLGDEAFEIFMVEKEETYSSLLKRAK

SEQ ID NO: 5107 - protein, 219 aa, Zea mays
  unsure (1)..(219): unsure at all Xaa locations
PGRAWRPAGAHPRLGVVDHIAFHPLASARLEDVTALARAVAADIGDRLQVPTYLYGAAHRDGRTLASIRRQLGYFTPTSPGGEQWHGAPDSLLPVAPDAGPRTSSASNGVVVVGATPWVDNYNVPLATADVSVARRIARAVSERGGGLACVQAMGLAHGDGATEVACNLLHPXRWGADQVQERVSRLAAGLGVGVGQGYFTDFSREKVVELYLQAAQAA

SEQ ID NO: 5108 - protein, 200 aa, Cichorium intybus x Cichorium endivia
MATIGHNNLNAKLVLLGDMGAGKSSLVLRFVKGQFLEFQESTIGAAFFSQTLVVNDATVKFEIWDTAGQERYHSLAPMYYRGAAAAIIVYDITSADSFTRAKKWVQELQKQGNPNMVMALAGNKADLEDKRKVTVEEARVYAEENGLFFMETSAKTAANVNDVFHEIAKRLPRAQPTQNPAGMVLVDRPAEGARAASCCS

SEQ ID NO: 5109 - protein, 498 aa, Anabaena variabilis ATCC 29413
MKTPLNCQNYINGQWLNAATETTLNSHNPANKSEIVATFPRSQADDTDRAVTAARQAYGSWRKVPAPARAEYIFRVGELLLQHKEELAQLISREMGKPITEARGDVQEGVDCAFYSAGEGRRLFGQTTPSEMPNKFAMTVRMPIGVCALITPWNFPVAIPCWKAMPALVCGNTVILKPAEDTPACATKLIEIFAAAGLPPGVINLVHGVGEEAGKALVEHPNIDLVSFTGSSATGAYVGETCGRTHKRVCLEMGGKNAQVVMEDADLELALDGALWGAFGTTGQRCTATSRLILHRDIKEKFTTMLRERTSQLRLGAGTEPETDIGPIINNRQLQRVHEYMNIAREEGAKILIGGEIVTEGQLKQGYFFQPTILDNVTPQMRVAREEIFGPVVALIEVSTFEEAIAILNDTKYGLSSSVYTRDINRAFVAMRDIEVGITYINGPTIGAEVHLPFGGVKQTGNGHREAGTTALDVFTEWKSVYVDFSGSLQRAQIDNRS

SEQ ID NO: 5110 - protein, 200 aa, Cichorium intybus x Cichorium endivia
MATIGHNNLNAKLVLLGDMGAGKSSLVLLFVKGQFLEFQESTIGAAFFSQTLAVNDATVKFEIWDTAGQERYHSLAPMYYRGAAAAIIVYDITSADSFTRAKKWVQELQKQGNPNMVMALAGNKADLEDKRKVTAEEARVYAEENGLFFMETSAKTAANVNDVFHEIAKRLPRAQPTQNPAGMVLVDRPAEGARAASCCS

SEQ ID NO: 5111 - protein, 497 aa, Escherichia coli
LEPRHAMLLRCRLPGGVITTKQWQAIDKFAGENTIYGSIRLTNRQTFQFHGILKKNVKPVHQMLHSVGLDALATANDMNRNVLCTSNPYESQLHAEAYEWAKKISEHLLPRTRAYAEIWLDQEKVATTDEEPILGQTYLPRKFKTTVVIPPQNDIDLHANDMNFVAIAENGKLVGFNLLVGGGLSIEHGNKKTYARTASEFGYLPLEHTLAVAEAVVTTQRDWGNRTDRKNAKTKYTLERVGVETFKAEVERRAGIKFEPIRPYEFTGRGDRIGWVKGIDDNWHLTLFIENGRILDYPARPLKTGLLEIAKIHKGDFRITANQNLIIAGVPESEKAKIEKIAKESGLMNAVTPQRENSMACVSFPTCPLAMAEAERFLPSFIDNIDNLMAKHGVSDEHIVMRVTGCPNGCGRAMLAEVGLVGKAPGRYNLHLGGNRIGTRIPRMYKENITEPEILASLDELIGRWAKEREAGEGFGDFTVRAGIIRPVLDPARDLWD

SEQ ID NO: 5112 - protein, 399 aa, Oryza sativa
AKEVDLLTELDVNITWEDILQDEHNKGIFDMELEDLGEDEDSLGQEGTKALFGGNACAEKLDGLMVVFCEHLKSCKEHGRLPQEFDILKTIFRASVLRVHKSKFAQFIMFYACSLDPEICGLEFALFLSDIFIKKEEDSISRMSAVSYVGSYLSRARFISADTVVGILKRLVDWCVDYCDLQNNIRITTKPINHQIFYASCQAVMYILCFRLRSIMDYPNLKAQLFNMPFGYILTHPLEPLKVCLPSIVDEFLRQAKAARLFNASVHSEFEDALESDLSKTFGGMNRLDMFFPFDPYLLKESDRYMRPNFEYWSMVKTTYNNYNSDVDDELVDLDAPEMNVGSLDDHVEIDLNSDDDLEYSMNKMSITPNRSFFHQIMANSDTGLTMPARIRPSISPPS

SEQ ID NO: 5113 - protein, 402 aa, Vibrio vulnificus CMCP6
MTIEILVPDLPESVADATVATWHKKPGDRVERDEVLVDIETDKVVLEVPASEAGILEAIVEEEGATVLSKQLIGRIKLAAVAGEPTADTTEESEPSPDKRHTASLSEESNDALSPAVRRLLAEHSLEASQVKGTGVGGRITREDIEAHLAAAKQAPAVAEAPAAVAPVAARSEKRVPMTRLRKTVANRLLEAKNSTAMLTTFNEVNMKPIMDLRKQYGDQFEARHGIRLGFMSFYVKAVTEALKRYPEINASIDGDDIVYHNYFDISMAVSTPRGLVTPVLKDCDTLGFADVEKGIKELAIKGRDGKLTVDELIGGNFTITNGGVFGSLMSTPIINPPQSAILGMHKIQDRPMAVDGKVEILPMMYLALSYDHRLIDGRESVGFLVTVKELLEDPARLLLDV

SEQ ID NO: 5114 - protein, 273 aa, Exiguobacterium sp. 255-15
MKRLENKVAVITGSATGIGQATALVFAEQGATVVCADVELEKAQVTVEKIKEAGGKAEAVHVDVSQVDSVKQLADHLQSTYGTVDVLFNNAGIDQQGGKVHEYPIELFDQIIAVDLRGTFLTSKFVIPLMLKNGGSIINTSSMSGRAADLNRSGYNAAKGGIANFTRAMAIDYARDGIRVNSLSPGTIETPLIDTLVGGKEEEQGKQFRDANAWITPLGRLGKPREMATVALFLASDDSSYVTGEDITADGGIMAYTWPGEMLIDDKWKTEAE

SEQ ID NO: 5115 - protein, 561 aa, Acinetobacter junii
MTTLKITGMTCDSCAAHVKEALEKVPGVQSALVSYPKGTAQLAIEAGTSSDALTTAVAGLGYEATLADAPPTDNRAGLLDKMRGWIGAADKPSGNERPLQVVVIGSGGAAMAAALKAVEQGAHVSLIERGTIGGTCVNVGCVPSKIMIRAAHIAHLRRESPFDGGIAATVPAIDRSKLLAQQQARVEELRHAKYEGILDGNPAITVVHGEARFKDEQSLVVRLNDGGERVVAFDRCLVATGASPAVPPIPGLKDSPYWTSTEALVSDTLPERLAVIGSSVVALELAQAFARLGSQVTILARNTLFFRDDPAIGEAVTAAFRAEGIKVLEHTQASQVAHVDGEFVLTTGYGEIRADQLLVATGRAPNTRSLALEAAGVAANAQGAIVIDKGMRTSTPHIYAAGDCTDQPQFVYVAAAAGTRAAINMTGGDAALDLTAMPAVVFTDPQVATVGYSEAEAHHDGIETDSRTLTLDNVPRALANFDTRGFIKLVIEEGSGRLIGVQAVAPEAGELIQTAVLAIRNRMTVQELADQLFPYLTMVEGLKLAAQTFSKDVKQLSCCAG

SEQ ID NO: 5116 - protein, 439 aa, Bacillus cereus ATCC 14579
MAVENITMPQLGESVTEGTISKWLVNVGDHVNKYDPLAEVMTDKVNAEVPSSFTGIVKELIAGEGDTLAVGEVVCVIQVEGADEVAATAVEEKTKEEPKAEVATSEKAPKVKQPTDGKPRFSPAVLKLAGEHNVDLDLVEGTGANGRITRKDILKLVESGNIPQAGAAKKEEAVAAVVEARPEAPKAAPVAQKVEAAKPVSVPTMPGDIEIPVTGVRKAIAANMLRSKHEAPHAWMMIEVDVTNLVSYRNSIKGDFKKREGFNLTFFAFFVKAVAQALKEYPQINSMWAGDKIVQKKDINLSIAVATEEELFVPVIKQADEKTIKGIAREITELAGKVRTKSLKADEMQGGTFTINNTGSFGSVQSMGIINYPQAAILQVESIVKRPVIMDNGMFGARDMVNLCLSLDHRVLDGLICGKFLGRVKEILENMSENNTSVY

SEQ ID NO: 5117 - protein, 705 aa, Shigella flexneri 2a str. 301
MRHRVYNPDRLKYPMKRVGARGEGKFERISWEEAYDIIATNMQRLIKEYGNESIYLNYGTGTLGGTMTRSWPPGNTLVARLMNCCGGYLNHYGDYSSAQIAEGLNHTYGGWADGNSPSDIENSKLVVLFGNNPGETRMSGGGVTYYLEQARQKSNARMIIIDPRYTDTGAGREDEWIPIRPGTDAALVNGLAYVMITKNLVDQAFLDKYCVGYDEKTLPASAPKNGHYKAYILGEGPDGVAKTPEWASQITGVPADKIIKLAREIGSTKPAFISQGWGPQRHANGEIATRAISMLAILTGNVGINGGNSGAREGSYSLPFVRMPTLENPIQTSISMFMWTDAIERGPEMTALRDGVRGKDKLDVPIKMIWNYAGNCLINQHSEINRTHEILQDDKKCELIVVIDCHMTSSAKYADILLPDCTASEQMDFALDASCGNMSYVIFNDQVIKPRFECKTIYEMTSELAKRLGVEQQFTEGRTQEEWMRHLYAQSREAIPELPTFEEFRKQGIFKKRDPQGHHVAYKAFREDPQANPLTTPSGKIEIYSQALADIAATWELPEGDVIDPLPIYTPGFESYQDPLNKQYPLQLTGFHYKSRVHSTYGNVDVLKAACRQEMWINPLDAQKRGIHNGDKVRIFNDRGEVHIEAKVTPRMMPGVVALGEGAWYDPDAKRVDKGGCINVLTTQRPSPLAKGNPSHTNLVQVEKV

SEQ ID NO: 5118 - protein, 473 aa, Bacillus cereus ATCC 14579
MAKEYDLVIVGGGTGGYVAAIRASQLGLKTALVEKENLGGTCLHKGCIPSKALLRSAEVYATAKKSEEFGVIASNVELNFAKVQERKEKIVTQLHKGVQHLMKQGKIDVFEGIGRILGPSIFSPMPGTISVELASGEENEMLIPKNVLIATGSRPNSLPGLELDGEYVMSSDHALKMETLPSSIIIVGGGVIGIEWASMLADFGVEVTVLEYAKTILPLEDQDVSKEMQRLFKKKGIKVVTGAKVLPETLVKDNGVTIQAEHNGENKEFKAEKMLVSVGRQANTQNIGLENTDIVVEKGYIQTNEFYQTKESHIYAIGDVIGGLQLAHVASHEGIAAVEHIAGKEVTPIDYSMVSKCVYSSPEVASVGLTEQEAKEKGYKLKVGKFSFRAIGKALVYGESDGFVKLVVDEETNDILGVHMIGPHVTDMISEAGLARVLDATPWEVAHTIHPHPSLSEAIGEAALAVDGRALHA

SEQ ID NO: 5119 - protein, 458 aa, ASPERGILLUS NIDULANS FGSC A4
MSASSTLKKAFPQVDAEGHNLPPSPAPSSPHGSRRYNIATELVYTESNDQYNASSVPIYQSATFKQSSHEGGGEYDYTRSGNPTRTHLERHLAKIMSAQRALVVSSGMAALDVITRLLRPGDEVVTGDDLYGGTNRLLKYLSTNGGIIVHHVDTTNPDKVKEVLTDKTAMVLLETPTNPLIKIVDIPTIAAASHEANPNCLVIVDNTMMSPLLLSPLELGADVVYESGTKYLSGHHDVMAGVIAVNDPALGERLYFPINASGCGLSPFDSWLLMRGVKTLKVRMDQQQANAQRIAEFLESHGFKVRYPGLRSHPQYDLHHSMARGAGAVLSFETGDVSVSERIVANAKLWAISVSFGCVNSLISLPCRMSHASIDAKTRKERAMPEDLIRLCVGIEDVDDLIDDLRRAVSVSTRNRVFWVMLIFSSWYKLALSTSLWTALKRTRRSLRSQVMKEYGYG

SEQ ID NO: 5120 - protein, 249 aa, Hordeum vulgare
MVKLAFGSFGDSFSATSIRSYVAEFIATLLFVFAGVGSAISYGQLTQGGALDPAGLVAIAIAHAFALFVGVAMAANISGGHLNPAVTFGLAVGGHVTILTGLFYWVAQLLGASVACLLLQFVTHAQAMPTHAVSGISEVEGVVMEIVITFALVYTVYATAADPKKGSLGTIAPMAIGFIVGANILAAGPFSGGSMNPARSFGPAVAAGNFSGHWVYWVGPLIGGGLAGLVYGDVFIASYQPVGHQQEYP

SEQ ID NO: 5121 - protein, 292 aa, Escherichia coli
MKGIILAGGSGTRLYPITMGVSKQLLPIYDKPMIYYPLSVLMLAGIQDILIITTPEDQQGFIRLLGDGCQFGINITYAIQPSPDGLAQAFIIGENFIGNDTVCLVLGDNIFFGQGFTPKIRDAAKRTSGATVFGYQVMDPERFGVVEFDRNFKALSIEEKPANPKSNWAVTGLYFYDNNVIDIAKSIKPSKRGELEITAVNEVYLKKNILTVELLGRGFAWLDTGTHDSLIEAGSFVETVQKRQGMMVACPEEIAWRNGWLSNEKLYELSQNLIKNQYGIYLLKLLENKYID

SEQ ID NO: 5122 - protein, 532 aa, Glycine max
  unsure (1)..(532): unsure at all Xaa locations
MNAIATASALSLPIFLRAGKLDTKRDLKGRFRVFAVFGEEEKKNAWGALFDVEDPRSKFPQNKGKVLDISQALEVARHDIQYLDWRARQDVLTIMXHEKVVEVLNPLAREYKSIGTLKKELAELQDELAQAHTQVHISEARVTTALDKLAYMEELVNDRLLQDRSTTDVAQTSSSPSTSANSLVTEKRRQPRKSLNVSGPVQSYHTHLKNFWYPVAFSTDLKDDTMIPIECFXSEPWVIFRGKDGKPGCVQNTCAHRACPLHLGSVNEGRIQCPYHGWEYTTDGKCEKMPSTQQLNVKIKSVPCFEKEGMIWIWPGNDPPAATLPSLLPPSGFEIHAEIVMELPIEHGLLLDNLLDLAHAPFTHTSTFAKGWSVPSLVNFLTPASGLQGYWDPYPIDMEFRPPCMVLSTIGISKPGKLEGQSTRECSTHLHQLHVCLPSSKQKTRLLYRMSLDFAPLLKHIPLMKYLWRHFAEQVLNEDLRLVVGQQERMNNGANVWNFPVAYDKLGVRYRMWRDALERGAKQLPFSPQHID

SEQ ID NO: 5123 - protein, 178 aa, Triticum aestivum
VTAASGGVGTFAVQLASLAGHHHVTATCGARNLDLIRSLGADEALDYDTPEGAALRGPSGPKHDAVVHCGEGFPWSAFKPALADAGGVVVDLTPRLASVAVAVLHWVLFSRKKLVPLIASAKEEDMEALLGMVSQGKLRVVIDSRYPLSRAHEGWAKSMSGHATGKVVVDMGVADDTE

SEQ ID NO: 5124 - protein, 450 aa, Escherichia coli K12
MTKHYDYIAIGGGSGGIASINRAAMYGQKCALIEAKELGGTCVNVGCVPKKVMWHAAQIREAIHMYGPDYGFDTTINKFNWETLIASRTAYIDRIHTSYENVLGKNNVDVIKGFARFVDAKTLEVNGETITADHILIATGGRPSHPDIPGVEYGIDSDGFFALPALPERVAVVGAGYIAVELAGVINGLGAKTHLFVRKHAPLRSFDPMISETLVEVMNAEGPQLHTNAIPKAVVKNTDGSLTLELEDGRSETVDCLIWAIGREPANDNINLEAAGVKTNEKGYIVVDKYQNTNIEGIYAVGDNTGAVELTPVAVAAGRRLSERLFNNKPDEHLDYSNIPTVVFSHPPIGTVGLTEPQAREQYGDDQVKVYKSSFTAMYTAVTTHRQPCRMKLVCVGSEEKIVGIHGIGFGMDEMLQGFAVALKMGATKKDFDNTVAIHPTAAEEFVTMR

SEQ ID NO: 5125 - protein, 478 aa, Oryza sativa
MAMMAMGAASWAPIPAPARAAAAFYPGRDLAAARRRRGAAARRPFVFTPRAVSDSRSSQTCLDPDASTSVLGIILGGGAGTRLYPLTKKRAKPAVPLGANYRLIDIPVSNCLNSNVSKIYVLTQFNSASLNRHLSRAYGNNIGGYKNEGFVEVLAAQQSPENPNWFQGTADAVRQYLWLFEEHNVMEFLILAGDHLYRMDYQKFIQAHRETNADITVAALPMDEERATAFGLMKIDDEGRIIEFAEKPKGEKLKSMMVDTTILGLDTERAKELPYIASMGIYVFSKDVMLKLLRQNFPAANDFGSEVIPGATEIGMRVQAYLYDGYWEDIGTIEAFYNANLGITKKPVPDFSFYDRSAAIYTQPRYLPPSKVLDADVTDSVIGEGAVIEDSLLMGADYYETETDKKALSETGGIPIGIGKNAHIRKAIIDKNARIGENVKIINVDNIQEASRETDGYFIKSGIVTVIKDALIPSGTVI

SEQ ID NO: 5126 - protein, 220 aa, Gloeobacter violaceus PCC 7421
MGFDDATYRPCACCQAVWYQRIHALWRARGKTKCDALIAQRKRIYFESLQGNVLEIGPGTGPNLSYYPSDIQWIGIEPNQYMHPYLKQAAAQHKIQAQIHCATAEQLPNADASVDAVVSTMALCTVTRLADTFNEILRVLKPGGRFIFIEHVAAPNGTALRRIQNMAQPLWHVVYAGCYPNRELWTAIERAGFADVHLEHFRLPILVESPHIAGVAIKHG

SEQ ID NO: 5127 - protein, 449 aa, Burkholderia fungorum LB400
MAIKQTGDIAAQRLSPEQLSCEFSDIAPLLDASAAAAAASRCHYCYDAPCVNACPTQIDIPSFIRKISNGNLKGAAVDILSANPMGGMCARVCPTEILCEGACVRNHQDAKPVAIGALQRHATDWAMARGEVLFKRAAETGRHVAVVGAGPAGLACAHRLALAGHTVTIYDAHEKAGGLNEYGIAAYKTVDDFAQREVAWLCSVGGIEIKHGVALGRDIELDTLRKQHDAVFLAIGLGGVRALAMEGEDLGGVMNAVDFIEQVRSASDLGTVPVGRRVVVIGGGNTAVDAAVQSRKLGAASVTMVYRRGVEAMSATWAERDFAQTSGVTLITHATPMRLIGDNGVVTGVEFARASNDGGEERFVVEADMVLKAIGQTLVPVGIGRELLTLDGSRIAVDANGQTSLANVWAGGDCAATGGIDLTVQAVQDGKVAAAAIDAQFARTAAKAA

SEQ ID NO: 5128 - protein, 417 aa, Magnetococcus sp. MC-1
MTLYASPVFLMNASPKSDEVLMNKRTIRDIDIKGKRVFMRVDFNVPLNEDGTVRSDKRIQGALPTIRYAIEQGAKVILASHLGRPSGDKFEPEFSLKPAGEALAALLGQPVKLAPDCVGAEVEAMVAAMQDGDVVLLENVRFHKGETKADVELSKGFAKLADVVVNDAFGTAHRAHSSNVGITEFVRPAVAGFLMADEMDYFDKVLGAPERPVMAILGGAKISGKIDVIEALLDKMDKIIIGGGMSFTFFKAMGYEIGNSLCEDEMLPVAEKTLAKAKEKGVSLILPVDCVAADAFREDANTQICSVEALPAGWMGLDIGPESVKLFAKALEGVKTVIWNGPMGVFEMAPFASGTNHLAHLLAESDCLSVIGGGDTAAAVKQAGVAKQLSYISTGGGASLELMEGKQLPGITSLDDK

SEQ ID NO: 5129 - protein, 289 aa, Streptococcus pyogenes SSI-1
MKGIILAGGSGTRLYPLTRAASKQLMPIYDKPMIYYPLSTLMLAGIKDVLIISTPQDLPRFEELLGDGSEFGISLSYKEQPSPDGLAQAFIIGEEFIGDDRVALILGDNIYHGNGLTKMLQKAAAKEKGATVFGYQVKDPERFGVVEFDENMNAISIEEKPEVPKSHFAVTGLYFYDNDVVEIAKNIKPSARGELEITDVNKAYLERGDLSVELMGRGFAWLDTGTHESLLEAAQYIETVQRLQNAQVANLEEIAYRMGYISKEDVHKLAQSLKKNEYGQYLLRLIGEA

SEQ ID NO: 5130 - protein, 357 aa, Exiguobacterium sp. 255-15
MNKPSIYGLTLEQMTEWLSHQGHKPFRAKQVWDWLYRKRVTTFAEMTNVNKDCLELLDQSFAIDSMTQAVKQESADGTIKFLFKLYDGSLIETVLMRHKYGLSVCVTTQVGCNIGCSFCASGLIKKSRDLSAGEIVEQIMNVQHHLDAVGKEERVSHVVVMGIGEPFDNFDNMVDFLNVIKDHNGLAIGARHITVSTSGLADKIYKFADLKLQVNLAISLHAPNNELRTQIMKINRAIPLEKLMPAIDYYVKTTNRKITIEYILLRGVNDQKAQAIELAKLFEDKRHLTYVNLIPYNPVDEHGQYQRSTSEDISTFYDTLKKNGLNCGVRLEHGTDIDAACGQLRSKQIKKDTVAAK

SEQ ID NO: 5131 - protein, 557 aa, Oryza sativa
MSAAHLLRHSRKLRTLRDALDYDRSALVRYFSAASASFPTKGGAAAGVEKRIGGARFPQCKQPGKELETFKVSLGGLNGRYACRRAPNNCIPTTITGLNDLPPHQEIGMPSLSPTMTEGNIARWLKKEGDKVSPGEVLCEVETDKATVEMECMEEGYLAKIIHGDGAKEIKVGEIIAVTVEEEGDLEKFKDYKPSTSAAPAAPSEPKAQPEPAEPKVKETEPSRTPEPKAPKTEEASQPGGRIFSSPLARKLAEDNNVPLSSVMGTGPDGRILKADIEDYLAKGGKREALAAPGLSYTDVPNTQIRKVTANRLLSSKQTIPHYYLTVDARVDNLIKLRGELNPLQESSGGKKISINDLVIKAAALALRKVPQCNSSWMSDFIRQYHNVNINVAVQTEHGLFVPDADKKGLGTIAEEVKQVAQRARDNSLKPEDYEGGTFTISNLGGPFGIKQFCAIINPPQSAILAIGTAEKRVIPGSVDGQYEFGSFMSATMSCDHRVIDGAIGAEFLKAFKGYIENPNSMTEKHSIIILQETPEARAKPANGHRFQDRVASGKDA

SEQ ID NO: 5132 - protein, 549 aa, Vibrio vulnificus CMCP6
MAMHPRAGQKALQEDLHNIPALVANYFLLQPDPTNPAHKVEFGTSGHRGCADKSTFNEHHILAIAQAVAEVRAEQGTTGPLFVGKDTHALSEPAFSTVVEVLIANGVTVIVQEQNGYTPTPGISHAILTYNLQHEEKADGIVITPSHNPPQDGGIKYNPTHGGPAEGELTQRIENRANVLIAEGLQGVKRMPLAQAKASSLFVEQDLVKPYVDDLVNVIDMAAIQKAGLKLGVDPLGGSGIDYWRQIGKAYNLDLTLVSEAIDPSFQFMSLDKDGVVRMDCSSPYAMAGLLALKDQYDLAFGNDPDYDRHGIVTPTKGLMNPNHFLAVCIDYLYRHRQGWAADVAVGKTLVSSAMIDRVVADLGRELCEVPVGFKWFVDGLYNGKFGFGGEESAGASFLRQDGTPWSTDKDGIILCLLAAEITAVTGKNPQQYYDELAAKHGESQYSRIQAVANGPQKEVLKKLSAEMVKAETLAGDEITARLTHAPGNGAAIGGLKVTTANGWFAARPSGTEDIYKIYCESFKGAEHLKQIELEAQEIVNQVFAEAGL

SEQ ID NO: 5133 - protein, 167 aa, Bacillus cereus
LRKRASIPLVGLTSYQALHDIMQLQKGQKILIHAGSGGVGTFAIQLAKIMGATVTTTASEAGANLVTSLGADEIINYKTEKFEDILKNYDAVFDTIGGATLEKSFNIIKSEGNIVSVSGMPNARFGKEFGSGFFKTLLFSLASKKLTALEKKHNAQYSFLFMKPSGD

SEQ ID NO: 5134 - protein, 491 aa, Helicobacter pylori 26695
MAQKTLLIITDGIGYRKDSDHNAFFHAKKPTYDLMFKTLPYSLIDTHGLSVGLPKGQMGNSEVGHMCIGAGRVLYQDLVKISLSLQNDELKNNPAFLNTIQKSPVVHLMGLMSDGGVHSHIEHFIALALECEKSHKKVCLHLITDGRDVAPKSALTYLKQMQNICNESIQIATISGRFYAMDRDKRFERIELAYHSLMGLNHTPLSPSEYIQSQYDKNITDEFIMPACFKNYCGMQDDESFIFINFRNDRAREIVSALGQKQFSGFKRQVFKKLHIATMTPYDNTFPYPVLFPKESVQNTLAEVVSQHNLTQSHIAETEKYAHVTFFINGGVETPFKNENRVLIQSPKVTTYDLKPEMSAKEVTLAVLEQMKLGTDLIIVNFANGDMVGHTGNFEASVKAVEAVDACLGEILSLAKKLDYAMLLTSDHGNCERMKDENQNPLTNHTAGSVYCFVLGDGVKSIKNGALNNIASSVLKLMGLKAPATMDEPLF

SEQ ID NO: 5135 - protein, 275 aa, Zea mays
WRRRGRRCAFPPTAPCFWLHDTHSVFWRGGDAWTAAENKLFEKALAQIDRNAPDRWEKVAEVVRTKTVDDVRNHYHDLENDVGFIEAGLVPFPHYSGSVPSFGFTHHEDWDGGFRRGYCLKRARGSDPERKKGVPWTEEEHKLFLMGLKKYGRGDWRNISRKYVTTRTPTQVASHAQKYFIRLNSGGKDKRRSSIHDITTVNLPDEDRGNAPPSAVTTTTNPSVALVDMKPFVAPLQDALGVPHPYGDVKLEPKSSLVAGLGFNDSVLLMHCGQL

SEQ ID NO: 5136 - protein, 297 aa, Aeromicrobium erythreum
MRGIILAGGTGSRLHPITRGISKQLVPVYDKPMVYYPLSTLMLAGIRDILIITSPHEAELFVRLLGDGSAFGVNLSYAVQPTPDGLAQAFLIGESHLGQEPAALVLGDNIFHGTGMGYQLRRHTQTEVAAIFGYRTSNPQAYGVVEIGEDGRAISLEEKPQRPRSPYAVPGLYFYPDDVVEHAKTLVPSARGELEITDLNRLYLQEGRLHVEVLPRGTAWFDTGTFDSLNDASNFVRTIEARQGTLVGSPEEVAWRVGFLSDAELLERAERHSSSTYGPYLRALLDEGDDAHDPYRV

SEQ ID NO: 5137 - protein, 334 aa, ASPERGILLUS NIDULANS FGSC A4
MSRSVRRLMKEAAELSSSPSPHFHAAPVSDSNLYDWHFTLAGPPPPSPYAGGIYHGRIVLPPTYPLRPPSFRFLTPSGRFEVNREICLSISGHHEETWQPAWGIRTALLAIRSFMEGDANGQVGGLQGVSDEVRRQWAGTSRGWRCDLCAKSNEELLREWRGYCVEKGVDVEKEEDAEGVPQGLRIGIGTKGKNDGDNSKVADSAGATKLESGTEKLKSDSTSMEESTMGTCEKSMSTSTSTSPPVLDNSCSSSSAIPSSPTTFSASVIRDAPAQSPSPASQAVTQRPRPTPTRPASQAVQVASQDSPWLDRAIFGVLVALIIMIFRRFVNIEE

SEQ ID NO: 5138 - protein, 381 aa, Enterococcus faecium
MHIQTKLIHGGISEDPTTGAVSVPIYQTSTYRQDGVGQPKQYEYSRSGNPTRFALEELIADLEGGVRGFAFSSGLSGIHAVFSLFQAGDHILLGDDVYGGTFRLFDKVLTKNGLEYTIIDTSNLDKIEQSIKPNTKALYLETPSNPLLKITDLEKSATLAHQHGLIVIADNTFATPYFQRPLDLGSDIVVHSGTKYLGGHSDVVAGLVTSNHKDLADQIGFYQNAIGAVLGPQDSWLLQRGIKTLSVRMEEHQKNAFVVADFLFSHPAVEKVYYPGLPDHELHGVAKQQMSGFSGMISFTLKNEESAIPFVESLQLFTLAESLGGVESLVEIPSVMTHASIPKEKREEAGIKDGLIRLSVGIEYGQDLINDLAQAFDRIKN

SEQ ID NO: 5139 - protein, 672 aa, Oryza sativa (japonica cultivar-group)
MPRTAAGVDVEDLLVRVKNGADAELAEVAREVAALAEQGRLGEDDDEDGVLVPALLARLAAAGGAEARVRVMAALRRLARCVGCESKERLASIEALSSIVRSLSRDVDETREAIALLLDLSDIPQVRQRIGRIKGSIVMLVTLRNAHEPGTHDDAEKLLHMLSSNPQNVLLMAEAGYFRPLIHYLKEGSDMNKILMATAISKMFLSEPMKSSLGEDGAVEPLVEMFKSGNLEAKHSALGALLNLSSSLQNAEILINSGITGPLLQLLFSVTSVLMTLREPASAILAAIAQSERILLHKDVAPQMLSLLNLSSPVIQLHLLRALNSISGHTNAKRARAKIRQNGGVQLLLPFLTEKNIDIKIAALNFISNLSKDASQELAEQIRDTHLNIFVKIISSPTSGNEKAAAIGILSNLPVTDKKITELLTEANLLPLLISLLEINITAPLTPLRTSLLEGIAGVLIRFTVPWDKKLQSLAVGHGVVPCLVKLLSEGSIKAKSKAATSLAQLSQNSLALRKTKLPRWLCVAPSAETYCLVHNSQCTVKSTFCLVKAGAVSPLIQILEDDNREADGAVLEALATLMQDEIWENGSKVIEKASGVHALLRIAEAGNSTSQEKAIWMLERIFRLEAHRERYGEIAQALLIDLAQKGDPILKPMIGKILAHLELLQTQSSYF

SEQ ID NO: 5140 - protein, 406 aa, Streptomyces avermitilis MA-4680
MRRGGPSVLGIVLAGGEGKRLMPLTADRAKPAVTFGGTYRLVDFVLSNLVNADILRICVLTQYKSHSLDRHITTTWRMSSLLGNYITPVPAQQRLGPRWYLGSADAILQSLNLVYDERPEYIAVFGADHVYRMDPRQMLGEHIESGAGVTVAGIRVPRAESSSFGVIAPGSDGQTVENFLEKPADPPGLPGDPECVFASMGNYVFTTKVLIEALQRDAEDGDSVHDMGGSILPALTDRGEARLYDFSANHVPGETTRDQGYWRDVGTLDAYYDAHMDLIAERPAFNLFNRSWPIYTHSGQLSPARFNAGGIASESIISAGCLIRGQVTRSVLSPGVVVDPGAVVQGSVLHDNVHVGRGAVVRGAVLDKNVEVPPGATIGVNPGRDADLYTVSKGGVIGLGKGQRVS

SEQ ID NO: 5141 - protein, 156 aa, Enterococcus faecium
MSIYNFETTLEDGTVYSLKKYAGKPIIIVNTATKCGLAPQFKQLEELYQAYQTQGLVILGFPSNQFKQELDSATEAAEACKTTYGVTFPMHQLIDVNGENTDPLFTYLKNEAPGTVTKAIKWNFTKFLIDRNGKVIERFAPQTSPLKMTAAIESVL

SEQ ID NO: 5142 - protein, 136 aa, Triticum aestivum
MGGDGGTEEELTAQETALYDRQIRVWGVDAQKRLSKAHVLVCGVNGTTIEFCKNIVLAGVGSLSLMDDHIVTEDDLSANFLIPHDVCMQGVSSRAEACCESLKDFNPMVRVAVAIGDPSLIDEGFVDRFDIIVVSC

SEQ ID NO: 5143 - protein, 306 aa, Xanthomonas campestris pv. campestris str. ATCC 33913
MSLAILCPGQGGQHAGMFARIAQLPVASEVIATAASVLGADPIALAADPRRFDNAIAQPLVCAGTLAHWQALRAQLPTPTLVLGYSVGELTAHAVAGSIDIPTCLHLAATRARVMDAASPADAGLMAVVGLPITALDALCQSHGVALAIINGDDHAVLGGPRSALAALGNDASARGARVTHLPVSVPAHTHWLQPAADAFAAVLQDSAVRAPMHRVLAGIDARAVTTPQAVVSSLSAQIARTVRWHDVLVQAAERGARVFLELGPGSALARMARELLPACEARSVEDFHSLDGAAEWVSAACERVA

SEQ ID NO: 5144 - protein, 514 aa, Camptotheca acuminata
MEMDALRQVLHPMPTALFFIAPLFFLFILSRLRRKLPYPPGPNGLPLVGNMMMMDQLTHRGLAKLAKQYGGIFHLRMGFLHMVAVSSPEIARQVLQVQDNIFSNRPATIAISYLTYDRADMAFAHYGPFWRQMRKLCVMKLFSRKRAESWESVRDEVDSMVRVVVSHTGKSVNIGELVFSLTRDIIYRAAFGSSSHEGQDEFIKILQEFSKLFGAFNIADFIPGLGWVDPQGLNARLVQARASLDGFIDSIIDDHIEKHRRRNVVDSDGDMVDDLLAFYSDEAKVTESDDLQNAIRLTRDNIKAIIMDVMFGGTETVASAIEWAMAELMKSPEDLKRVQQELAEVVGLDRRLEESDFDKLTYLKCALKETLRLHPPIPLLLHETAEDTEVAGYYIPARSRVMINAWAIGRDKNSWDEPETFKPSRFLKEGVPDFKGSNFEFIPFGSGRRSCPGMQLGLYALEMAVAHLLHCFTWTLPDGMKPSELDTDDVFGLTAPRATLFVAVPSPRLLCPLY

SEQ ID NO: 5145 - protein, 312 aa, Moorella thermoacetica ATCC 39073
MSGIVFLFPGQGSQYVGMGQELAQHYPEAAAVFTEASEELGWPVDKLVFNGPAEELVRTENTQPAVLTTSIACYRVLEARGIKPRAVAGHSLGEYSALVAAGSLSFKDALRVVVQRARLMANAVPCGQGGMVAVLGLPAERVVALCQEVKEGVAEAANFNSPGQVVVAGDRAGLEAITALAREAGAKKVIPLQVSGPFHSSLMEPVARELATVLNRVPLSDPVVPVVANVTADYTVTAAAVRENLLRQVASPVRWEESMRRLLADGYRTFVEVGPGNVLSGLIKRLDRQVRIGQVENIQTLGKTLALLQEAQ

SEQ ID NO: 5146 - protein, 698 aa, Erwinia carotovora subsp. atroseptica SCRI1043
MQKVLTVCPYCGSGCKINLLVENGKVVGAEGANGVTNEGELCLKGYYGWDFLNDTKLLTPRLKQPLIRRQKGAPFEAVSWDEAIGFASSRLKGIKEKYGAESIMHTGSSRGPGNETNYVMQKFARAVTGNNNVDCCARLCHGPSVAGLQVTLGNGAMSNSICEIEKTDCILIFGYNAADSHPIVARRILKAKARGAKIIVCDPRRIETARIADLWLPLKNGSNMALVNAFANVLINEGRYDKAYVARHTEGFEEFSQTVAKYTPEYVADITGLSPKLIRDAMRMYAAAPSATILWGMGVTQWGQGVDVVKGLSGLALLTGNLGRPNVGVGPVRGQNNVQGACDMGALPNMFPGYQNVTDKAVLAKFADAWGVPELSDKIGYSLTDLPHKIKEGKIRANYVMGEDPLQTEPDLSMLRDAFNELDLLIVQDIFMTKTAAIADVILPATSWGEHEGVYTAADRGFQRFYKAVEPQGDVKPDWEIISLMATALGYPMHYNNTQEIWDELRQLCPLYYGATYEKMAGLGYVPWPCPTEDSPGTPWLYANNHFDRPGGKGLLLTAEWRPPMELVDEDYPLVLCTVREVGHYSCRSMTGNCTALQTLADEPGYVQVNPHDAERLGICDQQLVWISSRRGKVISRVAVSERINKGAVYMTYQWWIGACNELTLDHLDPVSKTPEYKHCAVKLEAIDDQQAAENYVQ

SEQ ID NO: 5147 - protein, 483 aa, Lycopersicon esculentum
MVSISKNNQKQQLLSKIATNDGHGENSPYFDGWKAYANNPFHLTDNPTGVIQMGLAENQLCFDLIQEWMVNNPKASICTVEGAENFQDIAIFQDYHGLPEFRQAVARFMEKVRGDRVTFDPNRIVMSGGATGAHEMLAFCLADPGDAFLVPTPYYPGFDRDLRWRTGVQLFPVVCESCNDFKVTTKALEEAYEKAQQSNIKIKGLLINNPSNPLGTLLDKDTLRDIVTFINSKNIHLVCDEIYAATVFDQPRFISVSEMVEEMIECNTDLIHIVYSLSKDLGFPGFRVGIVYSYNDTVVNISRKMSSFGLVSTQTQHMLASMLSDEIFVEKFIAESSERLGKRQGMFTKGLAQVGISTLKSNAGLFFWMDLRRLLKEATFDGELELWRIIINEVKLNVSPGCSFHCSEPGWFRVCFANMDDETMRIALRRIRNFVLQTKGLNNIAAIKKQCSRSKLQISLSFRRLDDFNSPAHSPMNSPLVRT

SEQ ID NO: 5148 - protein, 227 aa, Lactobacillus johnsonii NCC 533
MKTIGISAGIKNNEVIVDRSVVDTVVKLGFLPLVFAPVSLKTMPVPSVNFDALILSDGPDITPIFYNEEPLPELRETDPHRDQFELNLIKNAHDSNLPILGIGRGMQMLNVAFNGTLFQDIYAQNSGAGVQHIQPNDLSLESHHVNVTDESELAKAVGTHPYVNSNHHQAIKTIANNFNIVATAPDGIIEAIESTDQTMLGIQWRPDKLLNDPKQEKIFTNFFAKLN

SEQ ID NO: 5149 - protein, 321 aa, Arabidopsis thaliana
MQDDFKNERPMWKLTCYGHWKYFPCDVTGDISYEELRAVAYEEAKRGIPLQSIVERERNLQNSKIAEFENFLRNPYKGSVTANQSPFAATTPSIFPQSSQINSPSPAFSGFNQQTAFSNTNAGGLSSSGPPNAFASFNQQTTFPNTNAGGVSSSGPPNPFASFTQQSNNQQTAFSNTNAGGLSSSGPPNAFASFNKQPNAFSVNTPQPVPSGPSGFQTNPSTTFKPASFGPGPGFATTPQNNNIFGQSTPTPATNTSQNNQTAFNFNVPVASFTAPAINTTNTSSGTELQIGGDPVDSSIWLKEKWNPGEIPEQAPPDAFV

SEQ ID NO: 5150 - protein, 430 aa, Helicobacter pylori 26695
MELLHSINDFNEAKQVIAGGVNSPVRAFKSVKGTPPFILKGKGAYLYDVDNNHYIDFVQSWGPLIFGHADEEIEENIINALKKGTSFGAPTELETTLAKEIISCYEGLDKVRLVSSGTEATMSAIRLARAYSQKDDLIKFEGCYHGHSDSLLVKAGSGCATFGSPSSLGVPNDFSKHTLVARYNDLNSTEECFKKGNVGCVIIEPIAGNMGLVPAQKEFLLGLKALCEKYQAVLILDEVMSGFRASLSGSQEFYGVVPDLVTFGKVIGAGLPLACFGGRAEIMDLLSPIGSVYQAGTLSGNPLAVCAGLSALYKIKRDKTLYTRLDALAIRLTQGLQKSAQNYNIALETLNMGSMFGFFFNENAVHDFDDALKSDTEMFAKFHQKMLFKGVYLACSSFETGFICEPMTEEMIDLTIAKADESFDEIIKGV

SEQ ID NO: 5151 - protein, 321 aa, Triticum aestivum
  unsure (1)..(321): unsure at all Xaa locations
MEGKHTDQANVKAKLSTMHSKVICCKLYISESQNAAVVDAISRIGQKDPEVVLLNKFEDEYYNRVRYTLVSYITSESSTGEAVFSPIRKVLLAMIEAAFSAINLEVHCGTHPRIGVVDDISFHPLNQAATMEDAAQLAKLVASDIGNGLQVPVFLYAAAHXHQQELSVQSGRELGYYRPNHNGHXWAGPVLPDTLPVKPDVGPAHVSSKRGATMVGAKPFVESYNVPIFCKDVPTVRRITRRVTGRSGGFPTVQALALFHGDNCTEIACLLDPDHVGADQVQWLVEQIAEEQGLEVDKGYFTDLSKDMMLERYFEMVSAAD

SEQ ID NO: 5152 - protein, 358 aa, Candida albicans SC5314
MKAAVVPISIKDNYLTEIKDIPKPEIKDDQILIKAKACAINPIDWKHIVYQMSKPGDVAGSDVSGIVEQVGANVTNFKKGDLVSSFVMGNMSPMSGAFAEYVAAFPQATIKYDHDLDNPPKAKASMIDSFEGAASITMGLTTVAQSFSHSLNIPKHKKPGDSILIWSGATATGIVAIQVAKLVYNLKVITTASPRNHEYLKELGADFTLDYKDPKIVDKLKSLGHIKFGLDTIATPQTFQKLYDATQGTPEVYLDSLLGMDGNSIKTDPARETTVHWGHTMGYLCVLKTKTLGSTTYVQSTELLNDYNKWWENVMPTIINKIKHANLKILPNGLESANEGLQMSRESKVSGEKIVFKI

SEQ ID NO: 5153 - protein, 418 aa, Bordetella pertussis Tohama I
MSYQHIKVPTGGQKITVNADYSLNVPDQVIIPVIEGDGTGADITPVMIKVVDAAVQKAYAGKRKIHWMEVYAGEKATKVYGPDVWLPEETLDAVKDYVVSIKGPLTTPVGGGIRSLNVALRQQLDLYVCLRPVRYFKGVPSPVREPEKTDMVIFRENSEDIYAGIEYMAESEQAKDLIQYLQTKLGVTKIRFPNTSSIGIKPVSREGTERLVRKALQYAIDNDRASVTLVHKGNIMKFTEGGFRDWGYALAQNEFGAQPIDGGPWCKFKNPKTGREIIVKDSIADAFLQQILLRPAEYDVIATLNLNGDYISDALAAQVGGIGIAPGANLSDSVAMFEATHGTAPKYAGKDYVNPGSEILSAEMMLRHMGWTEAADLIIASMEKSILSKKVTYDFARLLEGATQVSCSGFGQVMIDNM

SEQ ID NO: 5154 - protein, 409 aa, ASPERGILLUS NIDULANS FGSC A4
MVQIKDFAVEQWMDKYETTAKYNVAETCSASISVRDLQALCEDPALNPLDGVLDRKLTYGEIRGSKQLRSTLANLYSVRTPTPLPSDNILVTAGAIQANFLLLYTLVGPGDHVICHYPTYQQLYSVPESLGAEVSLWKSKEAEGWKLDLEELKGLIRPNTKLIIINNPQNPTGAIIPQGTLDEIVEIARSSSIYVFCDEVYRPLFHSISPMDPDFPSSVLSLGYERAIVTGSLSKAYSLAGIRVGWIASRDRTVIEACASSRDYTTISVSQLDDAVASYALAPTTIHALLKRNIELGRTNLGILEKFIESHRWACDWVKPRAGTTAFVRFNKMGKPVNDTAFCEMLLERTGVMLVPGSLCFGGGEDFLGYVRIGYVCETQVLEEGLAKLKAFLEDDYEEVPAVKRKTQS

SEQ ID NO: 5155 - protein, 369 aa, Saccharomyces cerevisiae
MLRNTFFRNTSRRFLATVKQPSIGRYTGKPNPSTGKYTVSFIEGDGIGPEISKSVKKIFSAANVPIEWESCDVSPIFVNGLTTIPDPAVQSITKNLVALKGPLATPIGKGHRSLNLTLRKTFGLFANVRPAKSIEGFKTTYENVDLVLIRENTEGEYSGIEHIVCPGVVQSIKLITRDASERVIRYAFEYARAIGRPRVIVVHKSTIQRLADGLFVNVAKELSKEYPDLTLETELIDNSVLKVVTNPSAYTDAVSVCPNLYGDILSDLNSGLSAGSLGLTPSANIGHKISIFEAVHGSAPDIAGQDKANPTALLLSSVMMLNHMGLTNHADQIQNAVLSTIASGPENRTGDLAGTATTSSFTEAVIKRL

SEQ ID NO: 5156 - protein, 405 aa, Methanosarcina acetivorans C2A
MITNSRKGIHLTENIIESGDPQARYDSVIEKDSKYVMQTYGRQPLVLSKGKGAVVQDIYGKEYIDCVAGIAVNNVGHCHPTVVKAIQAQAENLIHVSNLYYTEIQAEFAETLASITGMERVFFCNSGAESVEAAMKLARVATGKSAFVAAEHSFHGRTIGALSVTHKSMYRDPFMPPVSSETTFVPYSDAEAIRQAISENTAAVILEPIQGEGGINIPDPGYLKEVREICDETGALLIFDEVQTGFGRTGTWFCKEQFGVEPDIMSMSKAIGGGFPMGAIAAHNGINFGRGQHASTFGGGPLACAAALASVKVIREEKLLERSKEMGAYFMKKLAGMVRDDVVEVRGKGLMIGVEIKYPCGKFVDFAREQGVLVNCTSDSVLRLVPPLVITKEQIDTVVDVLEQA

SEQ ID NO: 5157 - protein, 469 aa, Arabidopsis thaliana
VIKCEYAVRGEIVNIAQKLQEDLKTNKDAYPFDEIIYCNIGNPQSLGQQPITFFREVLALCSYTALLDESATHGLFSSDSIERAWKILDQIPGRATGAYSHSQGIKGLRDAIADGIEARDGFPADPNDIFMTDGASPGVHMMMQLLITSEKDGILCPIPQYPLYSASIALHGGTLVPYYLDEASGWGLEISELKKQLEDARSKGITVRALAVINPGNPTGQVLSEENQRDVVKFCKQEGLVLLADEVYQENVYVPDKKFHSFKKVARSMGYGEKDLALVSFQSVSKGYYGECGKRGGYMEVTGFTSDVREQIYKMASVNLCSNISGQILASLIMSPPKPGDDSYESYIAEKDGILSSLARRAKTLEEALNKLEGVTCNRAEGAMYLFPCLHLPQKAIAAAEAEKTAPDNFYCKRLLKATGIVVVPGSGFRQVPGTWHFRCTILPQEDKIPAIVDRLTAFHQSFMDEFRD

SEQ ID NO: 5158 - protein, 583 aa, Solanum tuberosum
MANFKVSRVETTPFEGQKPGTSGLRKKVKVFIQPHYLQNFVQATFNALGADRVEGATLVVSGDGRYYSKDAIQIITKMAAANGVRRVWIGQNGLLSTPAVSAVVRERVGADGSKATGAFILTASHNPGGPHEDFGIKYNMENGGPAPEGITNKIYENTTTIKEYLIAEGLPDVDISTTGVSSFEGPKGKFDVDVFDSTSDYLKLLKSIFDFPAIQKLLSSPKFSFCYDALHGVAGVHAKRIFVEELGANESSLVNCVPKEDFGGGHPDPNLTYAKELVARMGLSKTHSEPNPPEFGAAADGDGDRNMVLGKRFFVTPSDSVAIIAANAVQAIPYFSGGLKGVARSMPTSAALDIVAKHLNLKFFEVPTGWKFFGNLMDAGMCSICGEESFGTGSDHIREKDGIWAVLAWLSILAYKNKDNLGEGNLVSVEDIVRQHWAIYGRHYYTRYDYENVNADGAKDLMAHLVKLQSSIDEVNKLIKGIRSDVSNVVHADEFEYKDPVDGSVSKHQGIRYLFEDGSRLVFRLSGTGSEGATIRLYIEQYEKDSSKIGRDSQEALAPLVEVALKLSKMQEYTSRSAPTVIT

SEQ ID NO: 5159 - protein, 177 aa, Ficus carica
GHATFYGDMTGSETMQGACGYGDLFKQGYGLQTTALSTALFDQGLACGACFELMCVDDPQWCIPKAGTITVTATNFCPPNLPETGGNWCNPPQQHFDLSMPMFTNLANYKAGIIPVQYRRVPCQKQGGVKFELKGNPYWLLVLVYNVGGAGDVSSLKIQSANTSWSQMSRNWGQNWQ

SEQ ID NO: 5160 - protein, 478 aa, Synechocystis sp. PCC 6803
MQATMSQDFDYDLVIIGAGVGGHGAALHAVKCGLKTAIIEAKDMGGTCVNRGCIPSKALLAASGRVREMSDQDHLQQLGIQINGVTFTREAIAAHANDLVSKIQSDLTNSLTRLKVDTIRGWGKVSGPQEVTVIGDNETRILKAKEIMLCPGSVPFVPPGIEIDHKTVFTSDEAVKLETLPQWIAIIGSGYIGLEFSDVYTALGCEVTMIEALPDLMPGFDPEIAKIAERVLIKSRDIETYTGVFATKIKAGSPVEIELTDAKTKEVIDTLEVDACLVATGRIPATKNLGLETVGVETDRRGFIEVNDQMQVIKDGKPVPHLWAVGDATGKMMLAHAASGQGVVAVENICGRKTEVDYRAIPAAAFTHPEISYVGLTEAQAKELGEKEGFVVSTAKTYFKGNSKALAEKETDGIAKVVYRQDTGELLGAHIIGIHASDLIQEAAQAIADRKSVRELAFHVHAHPTLSEVLDEAYKRAV

SEQ ID NO: 5161 - protein, 3575 aa, Aeromicrobium erythreum
MNEQDPQDRTAALLRRATTELRAARRRVQQLESDPVAVVSMACRLPAGIDTPEKLWDLLDAGRETLSDFPDDRGWDLTGLFDPDPDHPGTSYVDQAGFLDDATGFDPELFGIAPREAEAMDPQHRILLESCWELFERAGMDPLGLRGSATGVFVGAAKFGYGEGDVGDPDGYAVTGTAPSVASGRLSYTFGLEGPSLTVDTACSSSLVALHLAVDSLRKGESSLAVVGGAAVMGSPDVFVDFSRQRALAADGRSKAFGAGADGFGFSEGVSLVLLERLSDAQRLGHPVLAVVRGSAVNQDGASNGLSAPSGRAQRRVLRAALERCGLEPADVDVVEAHGTGTALGDPIEAGALLEVYGQDRSEPLALGSVKSNLGHTQAAAGTTGLLKVVLALQHECLPRTLHVEEPSTHVDWTSGAVRLLDQARPWPRSDRPRRAGLSAIGISGTNAHVIVEEAPATEEESGPVDREPVSGPVLLPMSARTPEALVEQAHRVAGLLRAESVDLADLAVSLGTTRAHLEHRAVVVASTPAAALDALATVGRDQPDGDVVRGTADAGGRTTAFVFPGQGSQWPEMGRELMATSALFAEAVDACDAAMRPWQDWSVADVLRQEPGAPGLERVDVVQPVLFTVMVALARLWRSRGVEPAAVVGHSQGEIAAAHVAGILTLDGAARLVVLRSQALRRLSSQGGMVAVACDEDAARERISAWGSALSVAAVNGPRSVVVSGDRDALADLVATCERDGLAARTVDVDYASHSAHVDAVREEVLRHAREVRPRDGEIAFYSTVTAGPLAGSRLDAEYWFRNLRERVRLHETVDLMVDQGYDAFVEVGPHPVLLPALTATVESGSGGDGAVVLATLRRGEGGPTGFARAVAAAYVAGVEIAWSTVAPGGRGRALPVTYPFQHRRFWRSERRGGARPAGLVHHVEWSTLDRSDSTAAPAGTWLVVTPDDAAEGWSDVVLDAVGRAGGTAQVVSTAVVDAWADGTAEVPDGLAGTVVLPPSPGQDAVAVAEWGRSTVQALARTTSGAPLWLLTAGAVAAAPGEVPAHPEQATLHGIGHVARLELGDAWGGVVDLPASASEEVAASLADAWGRRRESVMAVRGGRLLGRRLRDGGARTSDRWRPRGTVLVSGAATPVGAVLARWVAQHGADRLVLVGRAPDPQLVRELEEGGVRVSTSPVDLADLRAAIGEDEPTAVVHAESDPVFAPVVEADADGFRRTVSARSSLPDLLDELLDGARLEREVLCSSVAATWGGAGMAAYAAGAAYLEATAARRRSQGHATSVVTWTPWDLPAGHHAAPDLSGSALRALAVPRALEAWESILAAAPSDVVVADADWPALADEFSAARPTALFDGLAQPAAPAAAGPTPSGPTHDAGSEELRAVAALGGEERREAARVLVADVAADVLGQDQASRVSRTRALREQGLDSLGTLALRKSLVARTGLTLPASLVYDHPSVNAIADHLLALVDPEAGAQDERPVARGAAEEPIAIIGVGCRFPGGIRSPEGLWDLLRTGADVTGSFPDDRGWDVEGLYDPEGLRPGTTYVDRGGFLDDVASFDPGFFGITPREALAMDPQQRLVLETSWEAMERAGIDPEAVRGSDVGVYLGMNGQSYASLLDGEGDRVDGYKGLGNAASVLSGRVAYTFGWEGPALTVDTACSASLVAVHLAVRALRSGECSMALAGGVTVMTDPYTFVDFSSQQGLARDGRCKAFSADADGFALADGVATMLLVPLSRAAELGYPVLGVVRGTAVNQDGASNGLAAPNGPSQERVVRAALADAGLGPQDVDVVEAHGTGTQLGDPIEAGALLSTYGRDPGRPVHVGSVKSNLGHTQAAAGAAGMLKVLLALRHGVVPRTLHADEPTPHVDWASGGLRLAQDDVPWPRGERPRRAGVSSFGVSGTNAHVVLEEAPDAGTVERPGADAARAVPLVLSGRSEGAVRGAARQLASRLADGTHDVRDVAWTLSRGRSAMEWRAAVPADDVPAAVAALEALADGSPTADGVGPTLSRPRRAVLVFPGQGSQWDGMARDLLATSTVFRQSMQECAQALSAHVTWDLFDVVEGRADVDPERVDVLQPVLFSMMVSLARTWRGHGLVPAAVVGHSQGEIAAACVAGALSLDEAARVVALRSRALREIDGDGGMVSVAVAADEAERLLAPWADQLAVAAVNGPRMVVVAGPVEQLDAFCAAVEQAGHEPRRVAVGYGSHSGEVERVRAQVVDALGDVRVRTSEVPVYSTVTAERIDSASMDAGYWYDNLRGRVRFTETVEALVRDGHDLFVEASPHPVLLGGVQDVADDLGADVDVVATLRRDRPGARELARATGEAFAHGASVEPATTVPDGRLVDLPTYPFQRERFWPRRHRPAPVTDSGLPGVEHPVLSTVVEVPGSGERVLVGRLDPHAHPWLAEHVVEGRRLVPGSVLVELALATGELVGLPVLEELLLQEPLELPAAGGLRLRLVVGPDDGGRCDLQVHAAPDGMQDPTWTLQASGVLGADASTSRPTSGGSAWPPADADAIELAGHYDTLAGLGFEYGPAFRGLRRAWRAGERVLAEVEVPAARHGFVVDPVLLDVVAQTLGVAAAESGRLPFAWNGVRVHGPVVGALRVVLGGDPRSDASLEVVTPAGVPVLTVDGIVVRDASAGTDLRSGTLQSLTWVPAQPDGPAPTVTTVEVTTLDELDAPGRPDADLVVLRHVDDDPDPITATRRAVAWAAEVVRRWGATDRRRARLVVVTDGAARVGADDPPARPGPAAVWGVLRAAQAESPNRFLLVDGALDVPARPDLPQVAGARRAHAGAPPAGPADLMGAGCGPAGRAGLGVESTGWCSRKVPASQLQPGPGEVRVAVCATGLNFRDVMLALQVYPDAALMGTEAAGVVEAVGEGVTSVEVGDRVLGLFAGAYAERAVTDARLVAPLPPGWSFAEGAAVPIAFTTAYYALHDLAGVQRGQTVLVHAAAGGVGMAAVSLALHAGADVLATASPAKHDAVQARGLPADQVRSSRTSGFAEAFLGHTRGRGVDVVLNSLTGPLLDETIRLVAPDGVVVELGKADLRDPADVAARYLPFDLGEVGPDRLGEILRTVVDLLAGGRVPPVPVSARPLADLRAALTEMSRGGHVGKLVVEQSRPAPLEGTVLVVGGTGTLGSLVARHLVSTRGVRHLLLVSRRGPDAPGAADLVAELEAEGARVDVVACEATDRARLAEVVRGVPAEHPLVGVVHAAGVLADSFVVSIDADAVETVVAPKVDVVQHLDELTADLDLGLFAVFSSAASVLAGPGQGVYAAANAVVEACVARRASRGARATALGWGLWQDSSDLTRGLEDQIARTGVAPLSRARALELLDEALGSDEPVLYPMALDVDALAEADVVPEVLRARVAPRDRVVPTRGRRGTGPDRDERGADWASRLRGLDADARRTEVLDLVRAHAAAVAGFSSAAQLPEQRAFRDLGFDSLAAVELRNRLRDATSVRLPSTLVFDYPTAEAVAERLLEDLEPVVEHDASSLEEQLAALERAVRDATPDQLPADLGSRVRGLLDVLPAGEVEGRAWDGGAAAAALVDDDTSDDELFSLLDARLGAEGDQDR

SEQ ID NO: 5162 - protein, 995 aa, Listeria monocytogenes EGD-e
MGAKVSVQINGVARDVVEGTRMLDYLNAEGIQHPHICYSEQIGPIQSCDTCMCEVDGELMRACSTNLTDGMEIKTNSELAKDAQLEAMDRILENHLLYCTVCDNNNGNCKVHNTTELLGVEKQERPYREKGYLNDFSHPFYRYDPDQCILCGRCVEACQQVQVNETLSIDWERSQPRVIWDDDRPANLSSCVSCGLCATVCPCNALMEKSMLGQAGFMTGLDEDMLEPMIDMVKKVEPNYQTVFAVSEMEASMRETRTKKTKTVCTFCGVGCTFEVWTKDRKILKVEPTGEGPVNKFATCVKGKFGWDFVNSEKRITTPLIREGNEFVPASWEDAIHLVATKLREIQAKYGNDSLGFISSSKTTNEENYLMQKLARQVFETNNIDNCSRYCQAPASDGLTRTVGIGADSGTVEDIESAGLVIIVGASPADGHPVLASRIKRAQKTRGQKLIVSDLRKHEMAERSDLFIHPKQGTDFVWLTAVAKYMIDQGWHDEVFMENRISNVADYLAFLEPFTLEYAEKETGLSVETLKKVAQMVHEADGTAVCWGMGVTQNIAGSHTSSAIANLLLVTGNFGRHGAGAYPLRGHNNVQGACDMGSLPNVLPGIQPLGNDEVRARFEEAYGVSISSEPGLKNNEMLDAIEAGTLHSMYVIGEEMAWVDSNSNHVQEILASLDFFVVQDVFLSKTAQFADVVFPAAPSLEKEGTFTNTERRVQRLYEVLEPLGDSKPDWWIIQEVARACGRTDWNYDHPSEIMDEIASLAPFFAGVRYDRMQGFNSLVWPVSADGKDMPLLYEERFNFPDGKAQFSTLPYIAPITFPEEYNLTLNNGRLLEQFHEGNLTDKSKGLDYKLPEVFVEVSHELAKERDLESGSLVRLSSPYGRIKLRAVVTDRMKGNEVYVPMHSVSSETAVNLLTSSAGDVRTKTPAYKQTKVNLTVLEKTGKNPLPDHNPRNRKRFPQNGAEVARKWSREDYQPISKVNCACGGNCGCGGKGRNH

SEQ ID NO: 5163 - protein, 431 aa, Desulfovibrio desulfuricans G20
MSTIVSVWAREILDSRGNPTVEVEVSLESGHSGRAAVPSGASTGSREALELRDGDKGRYLGKGVEKAVDNVMGEIAENIVGMDALRQVAVDNALIDLDGTDNKDRLGANAMLGVSLATARAAANFIGMPLYQYLGGINSKVLPVPMMNIINGGEHAPNNLDIQEFMIMPVGAPTFSEALRMGAEIFHNLKALLAADGHVTSVGDEGGFAPNLKSHDEAFRYIMRAIETAGYIPGSEVALAIDAAASEFYKDGKYHLKGENKVLSSSEMIDWLMDFTQRYPLISIEDGMAEGDWEGWQEMTVKMGDSVQIVGDDVFVTNPDILAQGIDEGVANSILIKLNQIGTLTETLDTVEMAKGAGYTTVISHRSGETEDHFIADLAVALNAGQIKTGSLCRSDRLAKYNQLLRIEEDLDDEGIYFGPYMASHFGLGEE

SEQ ID NO: 5164 - protein, 353 aa, Triticum aestivum
MATTVQPHSPDPTAITTTPAPPPPPSPPRQENPTAAGEGVEIAALDEQPAAVAVAVADKGKTAPGGGKLVAEAMRKCAAPRSSRYHGVTRLKWSGKYEAHLWDNTSQVEGRKRKGKHVYLGSYVTEENAARAHDLAALKYWGITQPTKLNFNISDYAKEIEIMKSMNQDEFVAYIRRQSSCFSRGTSSYRGVTRRKDGKWQARIGRIGESRDTKDIYLGTFETEVEAAEAYDLAAIQLRGVHAVTNFDISNYSEEGLKKLEGSSEVVNLEDQSEVTKLAVTNLDISKHCEDGLKKLDGASQVVNLEGQSEVTKLSVTNFDISNCCEDGLKKLEGSSEVANLEDQSEVTKLAGQ

SEQ ID NO: 5165 - protein, 181 aa, Moorella thermoacetica ATCC 39073
MHEDIAEVLVSAADIQKRVKEMGAAISRDYAGKDLLVVGILKGAIIFLADLVREITIPLQLDFMAVSSYGSGTSTSGAVRILKDLEVPVEDKHLLIVEDIIDTGLTLKYLLENLKARQPLSVKACTILDKPERRLVDVHVDYSGFCIPDYFVVGYGLDYAQKYRHLPDICVLKPEVYRRKK

SEQ ID NO: 5166 - protein, 102 aa, Zea mays
  unsure (1)..(102): unsure at all Xaa locations
KSRSSLGYKQVREEDKSKLVGNVFSSVASSYDLMNEXLMSVGLHRLWKDRFISKLNPFPGMKHLDVAGGTGNIYLLPSLQGTHIYVCDINPNMLNVGKKRAA

SEQ ID NO: 5167 - protein, 402 aa, Prochlorococcus marinus subsp. marinus str. CCMP1375
MAKRSLSNLSVEDLCGKRVLVRVDFNVPLNEEGSITDDTRIRAALPTIQHLIEKEARVILSAHFGRPKGKVNEDMRLTPVSQRLSELLGKTVVKTESCIGPDAEKKVHEMSNGDVVLLENVRFIGEEEKNDSEFAKKLASLAEVYVNDAFGAAHRAHASTEGVTNYLSPSVAGYLMEKELKYLQGAIDSPQRPLAAIVGGSKVSSKIGVLESLIDKCDKVLIGGGMIFTFYKARGLSVGKSLVEDDKLDLARALEKKAKEKGVQLLLPSDVVLADNFSPDASSQMVQIDSIPEGWMGLDIGKESVKLFQDALADCKTVIWNGPMGVFEFDKFANGTNSISTTLAELSAKGCCTIIGGGDSVAAVEKAGLASKMSHISTGGGASLELLEGKVLPGVAALDDEI

SEQ ID NO: 5168 - protein, 167 aa, Pisum sativum
VVVSKRGFSETESESESESEITTVDLKLNLSPKEGAADPQLKPKEKSLLVSDSGTKPPAKAQVVGWPPVRSFRKNMFAGQKSIGGSEETTKKSSDGSNAISFVKVSMDGAPYLRKIDLKMYKSYPELSDALAKMFNSITNGNCESQGIKDFMKESNKMMDLLNTSDY

SEQ ID NO: 5169 - protein, 241 aa, Lactobacillus johnsonii NCC 533
MKPIIGISGSIIIDDGGIFPGYRRSYVNDDYIDSVIQNGGIPYIIPFNEDEEVVKEQLLNVQGLILSGGHDVDPHNYGEEPEQKLGDIWPERDKFDMRLLKLAEENGIPVLGICRGAQIINVYHGGTLYQDLSYRKEKTLKHSQCQTPTLLTHTVKTIAGTKIAELLGKKEMQTNSFHHQLIKDVADDFKVSARCVDGVVEAIENEDASVIAVQWHPEMLHRVVPYQNNLFKYIIDNAKKK

SEQ ID NO: 5170 - protein, 369 aa, Oryza sativa
MAVVVDGVSPPWSKEAVVHLLSEFSSPDHVSISVTAHQPCLLKNGLEETETTRASGLPNLRNDSINRVLIESLVERLIALPLSQGERWLGERMEQQQEPWKKGKTARRSNFQRTLIADTDPWCMCMNKNLLILAEILGTYFMIFAGCGAVVVNQSTGGAVTFPGICAVWGLVVMVLVYTVSHISGAHFNPAVTVAFATCGRFRWKQVPSYVVAQVLGSTMASLTLRVVFGGGGGGARGEHLFFGTTPAGSMAQAAALEFVISFFLMFVVSGVATDNRAIGELAGLAVGATVAVNVLFAGPVTGASMNPARSLGPAMVAGRYGGVWVYVAAPVSGTVCGAWAYNLLRFTDKPLRDIANTASFLRRSSRRS

SEQ ID NO: 5171 - protein, 554 aa, Vibrio vulnificus CMCP6
MCSVFGILDIKSDAAALRPIALEMSKKLRHRGPDWSGIYASDRAILAHERLAIVGLNSGAQPLYSPDKKLILAVNGEIYNHKEIRARYEGKYDFQTDSDCEVILALYQEMGADLLEELNGIFAFVLYDEEKDQYLIGRDHIGIIPLYQGYDEHGNYYVASEMKALVPVCKTISEFPPGSYYSSTDAGPQRYYIRDWNEYAAVQGNTSSKEELTAALEAAVKRQLMTDVPYGVLLSGGLDSSITSAVAKRYAAMRIEDDEQTEAWWPQLHSFAIGLDGAPDLKAAREVAAKIGTVHHEMTYTIQEGLDAIRDVIYHIETYDVTTIRASTPMYLMGRKIKAMGIKMVLSGEGADEIFGGYLYFHKAPNAQEFHEETVRKLLALNMFDCARANKSLAAWGVEGRVPFLDKEFIDVAMRLNPADKMCGNGKMEKHILRECFEHYLPDSIAWRQKEQFSDGVGYGWIDTLKAVAEEKVTDQQMEAAKFRFPYNTPTTKEGYVYREIFEELFPLTSAAECVPGGPSVACSSAKAIEWDESFKNCIDPSGRAVKAVHNEAY

SEQ ID NO: 5172 - protein, 228 aa, Arabidopsis thaliana
MGSVELNLRETELCLGLPGGDTVAPVTGNKRGFSETVDLKLNLNNEPANKEGSTTHDVVTFDSKEKSACPKDPAKPPAKAQVVGWPPVRSYRKNVMVSCQKSSGGPEAAAFVKVSMDGAPYLRKIDLRMYKSYDELSNALSNMFSSFTMGKHGGEEGMIDFMNERKLMDLVNSWDYVPSYEDKDGDWMLVGDVPWPMFVDTCKRLRLMKGSDAIGLAPRAMEKCKSRA

SEQ ID NO: 5173 - protein, 306 aa, Candida albicans SC5314
MIQNTVRGSILRSAKFTAPRSLLSISRSLTTENTSSKPTPPPKNDETTHFGFKTVNKDDKEKLVGGVFSSVASNYDVMNDVMSMGVHRLWKHHFIQRLDAGMRPGSTQPLEFLDVAGGTGDIAFGLLDHAEKKYGDTMSKMTIADINPDMLKEGEVRFAKTKWANTDRVNFLVQNGETMDQIPDNSKDVYTIAFGIRNFTDIQAGLNTAYRVLKPGGIFACLEFSQVENPLLDYAYQAYSFSLLPLMGQLIANDRDSYQYLVESIRKFPKQEEFKGMIEKAGFYVPEPGYENLTFGVASIHIGVKI

SEQ ID NO: 5174 - protein, 480 aa, Oryza sativa
MAAGAIPMAYQTTPSSPDWLNKGDNAWQMTSATLVGLQSMPGLVILYGSIVKKKWAINSAFMALYAFAAVWICWVVWAYNMSFGDRLLPFWGKARPALGQSFLVAQSELTATAIRYHNGSAEAPMLKPLYPVATMVYFQCMFASITIIILAGSLLGRMNIKAWMAFVPLWITFSYTVCAFSLWGGGFLFQWGVIDYSGGYVIHLSSGIAGLTAAYWVGPRSASDRERFPPNNILLVLAGAGLLWLGWTGFNGGDPYSANIDSSMAVLNTHICASTSLLVWTILDVFFFGKPSVIGAVQGMITGLVCITPGAGLVQGWAAIVMGILSGSIPWYTMMVLHKKWSFMQRIDDTLGVFHTHAVAGFLGGATTGLFAEPILCSLFLSIPDSKGAFYGGPGGSQFGKQIAGALFVTAWNIVITSIICVIISLILPLRIADQELLIGDDAVHGEEAYAIWAEGELNDMTHHNESTHSGVSVGVTQNV

SEQ ID NO: 5175 - protein, 371 aa, Dendrobium sp. XMW-2002-2
MWRHSCCYKQKLRKGLWSPEEDEKLLKHITKYGHGCWSSVPKLAGLQRCGKSCRLRWINYLRPDLKRGTFSQQEENLIIELHGVLGNRWSQIAAQLPGRTDNEIKNLWNSCIKKKLRLRGIDPNTHKPLAETEVQLAEIDSADQPAPEPEKHTVQQTETGVPNNSVRPGNSPAASYFSLPDLTYSPDCGGSIGQIQQFWLNQSGKFFSNNNSNSEFSFNSVSSLVPSVPRSTLSTSKELKPLTSLLMENSPSGFYWETGNSSNSSASSGSNDPLFDGSIFQWTQLIPERDINVQLHGETEDLKWSEYLNGSIPLSTELQSQNPELCNGMKAEEQFGIDGLSIWLQNHQQQQQQQQQASNNYGKDSQRDIIC

SEQ ID NO: 5176 - protein, 628 aa, Neisseria polysaccharea
SPNSQYLKTRILDIYTPEQRAGIEKSEDWRQFSRRMDTHFPKLMNELDSVYGNNEALLPMLEMLLAQAWQSYSQRNSSLKDIDIARENNPDWILSNKQVGGVCYVDLFAGDLKGLKDKIPYFQELGLTYLYLMPLFKCPEGKSDGGYAVSSYRDVNPALGTIGDLREVIAALHEAGISAVVDFIFNHTSNEHEWAQRCAAGDPLFDNFYYIFPDRRMPDQYDRTLREIFPDQHPGGFSQLEDGRWVWTTFNSFQWDLNYSNPWVFRAMAGEMLFLANLGVDILRMDAVAFIWKQMGTSCENLPQAHALIRAFNAVMRIAAPAVFFKSQAIVHPDQVVQYIGQDECQIGYNPLQMALLWNTLATREVNLLHQALTYRHNLPEHTAWVNYVRSHDDIGWTFADEDAAYLGISGYDHRQFLNRFFVNRFDGSFARGVPFQYNPSTGDCRVSGTAAALVGLAQDDPHAVDRIKLLYSIALSTGGLPLIYLGDEVGTLNDDDWSQDSNKSDDSRWAHRPRYNEALYAQRNDPSTAAGQIYQDLRHMIAVRQSNPRFDGGRLVTFNTNNKHIIGYIRNNALLAFGNFSEYPQTVTAHTLQAMPFKAHDLIGGKTVSLNQDLTLQPYQVMWLEIA

SEQ ID NO: 5177 - protein, 978 aa, Acidithiobacillus ferrooxidans
MAEPYVIKMPQLSDTMTEGVLVSWEKPAGARVERGDVVATVETDKAIMDVEVFRSGYWRAPAEANSVIPVGGTIGYITDSAVETVAAPVPAAPAVVPTGPASATPPAPEGYAVKMPQLSDTMTEGVLVSWEKAPGDRIQRGDVVATVETDKAIMDVEVFREGYLSGPLVAVDAVVPVGEAIAWLVESPEQVSHENAVHDGGLRQPDATSAPVATPLPAAAMSGPVPGADPAPRPQQGAASPFARQLAGQRGVDINGLRGTGPAGVIVAADVLGAAGGRAAPVASSVLPSPRCPVTPRHDGHRKSDQPGDGRFPEYSGFSCHRAGQARGADPRRQGTQAFRHGGDRKAASQALHRHPLVNAAYQPVDKIVERSQHDIGIAATTEDGGLIVPVLRGVEGKTPEQLQTEWTSLLEKARKRRLSPPEYTNPTFTISNMGDVRIAQFDAIVTPGTAAIIAIAGNGPEGMPITITADHRVVNGAEAALFLNDLKQAIEHPENWLGSGGPVIPEGDYDVQVLVIGAGPGGEDCARELAENGIRVAMVNDAPAGRECLWRGCIPSKAWRAAADRIRPGARRAMGITLGTPRLDWAQLEQHRRGILQTRGRNGPENRSGCENSGAGRLCRFTGDHSVEISGKDARTLTFGACVIATGAPAFVPPIPGIQDALKSGAAVTSDTVWNLKQPPARLCVIGAGAIGMEMAQMFHDFGAEVRVLEALPRPVAEMEKEVAEQLMKAIAHNSLRLQVLTGVKVTEVAGATRPVGGALQSGDEAANYACDLLLVATGKRPDTSGLNLAAAGVALGDRAVIAVDASGRTNVPHIYAVGDVIGGYMLAHTAGQQGRVAAASLLGHSARYEAAKDCGVTFTRPQCAFVGLSLEQARAEGIDAVEVKVPLSIDAKAMMTGETDGLIKIVADKISHRIVGVHFLADHADTLVGEAVMMVSAGLTLEQVAGAIHPHPTQTELFGEMARRLLSRLRSARAAS

SEQ ID NO: 5178 - protein, 393 aa, Pseudomonas aeruginosa UCBPP-PA14
MRYSDFTQRIAGDGAAAWDIHYRALARVEQGEEILLLSVGDPDFDTPAPIVQSAIDSLLAGNTHYADVRGKRALRQRIAERHRQRSGQAVDAEQVVVLAGAQCALYAVVQCLLNPGDEVIVAEPMYVTYEAVFGACGARVVPVPVRSENGFRVQAEEVAALITPRTRAMALNSPHNPSGASLPRATWEALAELCTAHDLWMISDEVYSELLFDGEHVSPASLPGMAERTATLNSLSKSHAMTGWRVGWVVGPAALCAHLENLALCMLYGSPEFIQDAACTALEAPLPELEAMREAYRRRRDLVIECLADSPGLRPLRPDGGMFVMVDIRPTGLSAQAFADRLLDRHGVSVLAGEAFGPSAAGHIRLGLVLGAEPLREACRRIALCAAELLGQA

SEQ ID NO: 5179 - protein, 401 aa, Bifidobacterium longum
MKTLKDLGDLKGKRVLVRADFNVPLDGTTITDDGRIKAALPTIKTLREEGAKVILMAHLGRPKGKVVPELSLAPVAARLGELLGANVPLAKDTYGEDAQAKVAAMNDGDVVLLENVRFNPEETSKDADERAAYAKKIAALGEAFVSDGFGVVHRAQGSNYDVAADLPAAAGLLVEKEVKALSKATENPERPFTVVLGGSKVSDKLGVIENLLDKANRLVIGGGMVFTFLKAKGYEVGTSLLEEDQLEKVKGYIETAEKNGVELVLPTDVVVNAGFPAGDTPVAPEVVAADAIPADKMGLDIGPESQKLFHDKIVDSKTVVWNGPMGVFEVPEFAAGTKAVAQGLVDATAVGAFTIVGGGDSASAVRNLGFPEDGFSHISTGGGASLEFLEGKELPGLKVLE

SEQ ID NO: 5180 - protein, 341 aa, Uncultured crenarchaeote
MRAVPIYSHGDLNVLRYEQDFPTPIPNPSEILIRVKYCGLNHLDIWTRLGIPGITIGFPHICGSDIVGSVEEEYAEIPKGSRVLVYPGICCNDCDNCRNGTETLCRDFSIIGGLSKYNGGYAEYVTVPKTNIISLPREISDEQAATLSISYLTAWNIIKKLHLKENDTVLIYGASGGLGMAMIQISKALGIRTISTISDDSKLNFAYDIGSDYVINRKKKEIALEIEKITRGIGVDAVVDNAGQKTLNTSINSVRKGGKIALCGTTSGSEANFQIRTFYSKQIQLFGILIGSKLELLELINFVNEKNIVPKIDSVLPLAQVRQAHDKLEKGEQQGKILIKI

SEQ ID NO: 5181 - protein, 195 aa, Staphylococcus aureus subsp. aureus Mu50
MKEIVIASNNQGKINDFKVIFPDYHVIGISELIPDFDVEETGSTFEENAILKSEAAAKALNKTVIADDSGLEVFALNGEPGIYSARYAGENKSDEANIEKLLNKLGNTTDRRAQFVCVISMSGPDMETKVFKGTVSGEIADGKYGENGFGYDPIFYVPKLDKTMAQLSKEQKGQISHRRNAINLLQAFLEGEKNV

SEQ ID NO: 5182 - protein, 507 aa, Candida albicans SC5314
MDDSDEEYMGSKSPSSKLPSTAPEKSASPGGAKSGMSARTRSSRRGEVSDLKGANGYAWEDEYQRSWDIVKDDEQGGNSFEAMVQSIIENRKKKIMKNPSTPFQRGIIRTLIIIIDGSSAMSEKDLRPTRLSMTLNYLQEFVVEFFDQNPISRLGIILMRNGVANLVSEVSGSPQYHVDKIRNLKARQHNRFEPKGDPSLQNSLEMARSLLKFNFGSTSNNSKNSKEILVIFGALFTSDPGDIHKTIDSLVKDEIKASVIGLSAQVAICQELVNRTNNEPRNSQSKHYGVIMNESHFKELLMESVTPLPLTESEKQIQESEQNGVPVLRMGFPTKVQPTLTSAIGGSDYIVEFPHLNASFPTQGSEDSKDVVEIQTNKPAAAVATTSSSVIGYQCPQCKCKVCNLPTICPVCGLMLILSTHLARSYHHLVPLAPYKEVKVSPIYDSTYCFGCQLKFPEGVKLGTHKGTLESMTSSRYRCLKCSQDFCINCDVFVHEVLHNCPGCENN

SEQ ID NO: 5183 - protein, 452 aa, Zea mays
  unsure (1)..(452): unsure at all Xaa locations
MAVTITWVKARQIFDSRGNPTVEVDVGLSDGSYARGAVPSGASTGIYEALELRDGGSDYLGKGVLKAVSNVNNIIGPAIVGKDPTEQVEIDNFMVQQLDGTSNEWGWCKQKLGANAILAVSLXAVCKAGAMVKKIPLYQHIANLAGNKTLVLPVPAFNVINGXGSHAGNKLAMQEFMILPTGASSFKEAMXMGGLKVYHNLKSIIRKKYGQDATNVGDEGGFAXPNIQENKEGLELLKAAIEKAGYTGKVVIGMDVAASEFFGEKDKTYDLNFKEENNDGSNKISGDSLKDLYKSFVSEYPIESIEDPFDQDDWSTYAKLTDEIGQKVQIVGDDLLVTNPTRXVAKAINEKTCNALLLKVNQIGSVTESIEAVRMSKRAGWGXVMASHRSGETEDTFIADLSVGLSTGQIKTGAPCRSERLAKYNQLLRIEEELGDAAVYAGAKFRAPVEPY

SEQ ID NO: 5184 - protein, 174 aa, Lactuca sativa
MASISSSAIATVNRTTSTQASLAAPFTGLKSNVAFPVTKKANNDFSSLPSNGGRVQCMKVWPPIGLKKYETLSCLPPLSDEALSKEIDYLIRNKWIPCLEFELEHGFVYREHHHSPGYYDGRYWTMWKLPMFGCTDSAQVMKEVGECKKEYAGTEFAKGSLKVKLLKWPRSPLQ

SEQ ID NO: 5185 - protein, 419 aa, Oryza sativa
MQRAAAASRATAWSTARHGAARVTASASFSGGGGIVAGAALPLRVRGGQLMSLPLLSGGRAVTARVAAAEAPLPADDADAAAGRERGALAETAQLGAMIVAWYLLNIYFNIYNKQVFLPPQEPSPSSSSPSLNPISHGESQVLQPLPFPYTITAFQLAFGSFVIFLMWALKLHPAPRISISQLAKIAPLAAGHMLGTVFTNMSLSKVAVSFTHTIKASEPFFTVLLSAFFLGETPSLLVLGSLVPIVGGVALASLTELSFNWIGFWSAMASNLLYQSRNVLSKKLLGGEEEALDDINLFSILTILSFLLSLPLMLFSEGVKFSPGYLRSTGLNLQELCVRAALAGFCFHGYQKLSYLILARVSPVTHSVANCVKRVVVIVASVLFFRTPISPVNALGTGVALGGVFLYSRLKRTKPKNA

SEQ ID NO: 5186 - protein, 495 aa, Leptospira interrogans serovar lai str. 56601
MDLIYRSIYKRRKIMSRKTLTTAGGHPVSQNQHSLTAGPRGPVLIQDTHLIEKLAHFNRERIPERVVHAKGAGAYGTLTITQDLTKYSRASIFSKKGKQTSLFLRFSTVAGEKGSADTERDPRGFAVKFYTDEGIWDLVGNNTPVFFARDPLKFPDFIHSQKRDPVTGYKNPIRMWDYWAGSPEAFHQITILFGDRGIPDGYRFMNGYGSHTFGLWNSKGERFWTKFHFKSMQGIRNLSMEKASALAGTDPDYATRDLFEAIERKEFPKWKFCVQIMPEKEATKYKFNPFDLTKVWSHKDYPLIEVGVLELNSNPKNYFEEVEQAAFSPSNMPPGIGASPDKMLQGRLFAYPDAHRYRLGIQYQQLPVNRPKNSVNVYHRDGRTRFQCDGNYDNYEPNGFEGPVQDSSYAEPPLSISGDMDRYNSHIGNDDYSQAGDLYRLMSVEERERLTSAIASTMHNLPKPLLEANLKHFHLCDPEYGEQLAAKVGLALSRV

SEQ ID NO: 5187 - protein, 500 aa, Amaranthus hypochondriacus
MAIRVPSRQLFIDGEWREPIKKNRIPIINPSTEEIIGVIPAATAEDVELAVAAARRALKRNKGEDWASASGAHRAKYLRAIAAKITEKKDYFAKLEAMDCGKPLDEAAWDIDDVAGCFEYYADQAEALDAKQKAPIALPMDTFKCHVLKQPIGVVGLISPWNYPLLMATWKVAPALAAGCSAVLKPSELASVTCLELAEVCREVGLPPGVLNILTGLGPEAGGPLACHPDVDKVAFTGSTATGSKVMSSAAQLVKPVTLELGGKSPIVIFEDVDLDKAAEWTAFGCFWTNGQICSATSRLLVHESIAAEFLDRLVKWCKNIKISDPFEEGCRLGPVVSKSQYEKVLKFISTAKSEGATILCGGSRPEHLKKGYYVEPTIISDVSTSMQIWREEVFGPVLCVKTFGSEDEAIELANDTQYGLGAAVLSKDLDRCERITKALQAGIVWVNCSQPCFCQAPWGGTKRSGFGRELGEWGIENYLNIKQVTEYISDEPWGWYKSP

SEQ ID NO: 5188 - protein, 399 aa, Zea mays
MERRLSATSRRSAPSAIQRLSHLAQRVGAVNLAEGFPDFPAPPHVKAAAVAAIAADLNQYRHVQGICDILANTMKRDHDLDVDPLTDFVICCGQSEAFAAAIFAIIDQGDEVLIFDPAYETYETSIELARGVPVYVPLDPPSWTLNEEKFLKSFTSRTKALVLNSPHNPTGKVFSKEELLIISQACQKMDCFVITDEVYEYITYDANKHISLASLPGMQERTIITSSLSKTYSVTGWRLGWACAAASIASAIRNIHIKLTDSAPAPFQEAALIALTSTADYYISLRKDYEVKRDFILLLLKDLGFKISVKPQGSVFVFAELPRSCQLSDVEFVTKLINDAGVVAVPGRGFFHKTCDGESYCHRYVRFAFCKGDDTLKAAAMKMRKLASRQGEPWLTGRQ

SEQ ID NO: 5189 - protein, 429 aa, Oryza sativa (japonica cultivar-group)
MAAALARRGGGGLARALARGRGMCSATAAERAAGAALTSEELMRMERERSAHNYHPIPVVFSKGEGSHILDPEGNKYIDFLSAYSAVNQGHCHPKVLRALKEQAERLTLSSRAFYNDKFPIFAEYLTSMFGYEMMLPMNTGAEGVETAIKLVRKWGYEKKKIPKNEALIVSCCGCFHGRTLGVISMSCDNDATRGFGPLVPGHLKVDFGDTDGLEKIFKDHGERICGFLFEPIQGEAGVIIPPDGYLKAVRDLCSRHNILMIADEIQTGIARTGKMLACDWENIRPDVVILGKALGAGVVPVSAVLADKDIMLCIKPGEHGSTFGGNPLASAVAVASLKVVTDEGLVERAAKLGQEFRDQLQKVQQRFPQIIREVRGRGLLNAVDLSNEALSPASAYDICIKLKERGVLAKPTHDTIIRLAPPLSISQS

SEQ ID NO: 5190 - protein, 398 aa, Streptococcus pyogenes M1 GAS
MAKLTVKDVDLKGKKVLVRVDFNVPLKDGVITNDNRITAALPTIKYIIEQGGRAILFSHLGRVKEEADKEGKSLAPVAADLAAKLGQDVVFPGVTRGSKLEEAINALEDGQVLLVENTRFEDVDGKKESKNDEELGKYWASLGDGIFVNDAFGTAHRAHASNVGISANVEKAVAGFLLENEIAYIQEAVETPERPFVAILGGSKVSDKIGVIENLLEKADKVLIGGGMTYTFYKAQGIEIGNSLVEEDKLDVAKDLLEKSNGKLILPVDSKEANAFAGYTEVRDTEGEAVSEGFLGLDIGPKSIAEFDQALTGAKTVVWNGPMGVFENPDFQAGTIGVMDAIVKQPGVKSIIGGGDSAAAAINLGRADKFSWISTGGGASMELLEGKVLPGLAALTEK

SEQ ID NO: 5191 - protein, 432 aa, Prochlorococcus marinus subsp. marinus str. CCMP1375
MIDSLDLVIDSIFAREVLDSRGNPTVEAEVLLEGGAKGRAIVPSGASTGAYEAHELRDGGTRYMGKGVLRVVEHIEDRIAPSLCGLSASDQVNVDQIMRELDGTENKENLGANAILAVSIATARSAANAFGMPLYRYLGNPMSSLLPVPLMNVINGGAHAANNLDFQEFMLVPHGAESFREALRMGAEVFHTLKKLLSDKGLSTAVGDEGGFAPDLENNNAAGDLLVQAIEKAGFRPGEEISLALDVASTEFFKNGLYHFGEGKFSSEKMVEELKKLVNLYPIISIEDGLSEDDWSGWELLTKELGNKVQLVGDDLFVTNTKRLRQGIDRSIANSILIKVNQIGTLTETLEAIDLSHRMGYTSIISHRSGETEDTTIADLAVATRAGQIKTGSLSRSERVAKYNQLLRIEDQLGAQAVYAGSVGLGPRGLSK

SEQ ID NO: 5192 - protein, 311 aa, Zea mays
MAASVALSSGHRMPAVGLGVWRMEKADIRGLIHTALRVGYRHLDCAADYQNEAEVGDALAEAFQTGLVKREDLFITTKLWNSDHGHVLEACKDSLKKLQLDYLDLYLIHFPVATRHTGVGTTSSALGDDGVLDIDTTISLETTWHAMEELVSMGLVRSIGISNYDIFLTRDCLAYAKIKPAVNQIETHPYFQRDSLVKFCQKHGICVTAHTPLGGSTANTEWFGSVSCLDDPVIKSLAEKYGKTPAQLVLRWGLQRNTVVIPKTSKLERLQENFEVFDFDISGEDMEKMKAVDRKYRTNQPAKFWGIDLFA

SEQ ID NO: 5193 - protein, 424 aa, Microbulbifer degradans 2-40
MENIFKDLESNVQSYALSFPVIFNRAKNEELFDTEGNAYIDFLAGAGSLNYGHNNDVIKKALVEYIMEDGVTHGLDMHTKAKAEFMDSFNTHILQPRELDYTMQFTGPTGANAVEAALKLARKVKGRTNVVSFTNGFHGVTAGAVAATGNQHHRDGTGVPLANVSRMPFCGYHGQNVDTIKMIDKLIGDPSSGVDAPAAAIVEVVQGEGGLNVAQDEWLRQLEKLCRKHDMLLIVDDIQAGCGRTGTFFSFEKAGIKPDIITLSKSFSGYGLPMAVVLMSPELDIWKPGEHNGTFRGNNHAFVTAKAAIEHYWKDDKFQNEIAEKSAKVTKRLKHIADKYGVTKARLKGRGLMQGIDVVSGEIADEITTKAFEKGLIIETAGNLSQVIKVFCPLTITMEKLNAGLDIVESAFAEVLGDKLRNVS

SEQ ID NO: 5194 - protein, 613 aa, Phycomyces blakesleeanus
MPDYEKVIEASGNGRYSKLNTVLGKGAYKVVYKAIDREEAINDNEITNVKVTRQEFKDLGHEIDILKSVRHPNIITFHDAWYNETEFVFITELMTSGTLREYIRKLTPLPNIKIVKRWCRQILKGLAYLHGHEPPIIHRDIKCDNIFINGAHGEIKIGDMGTAEMKNGKKYTVIGTPEFMAPEMYEEQGYNEKVDIYAFGMCLLEMATGEYPYGECTNAVQVFKKVTQTIKPECLSRVQDPELLTLVNICLTPEDERMTAQEILEHRFLAVEPEVVLVSKDMTMKLLTLQVVFKGMDKLSVKFEFNADTDTAADVVAEMIEEQVLQNCYQQLITCEINRILRDIARNQGPPDKGEDEKIVWRRENDIRSELERAKKDLALAVERVFEAEKKCELLEQHNIIAEERCKETIFALEQAKFQIPDLLQPQPQPQPQPQPQPQPQPQFQLQPQLQYLSPQSTTSPGPTSDDNSTNSTMLSSLESELSKLCVSGDEQVETTTHSALMENVLAGKAKYYEYSNDTSIDKFVMDTAGATNRSKDKQKQWAAKLQDQDIMTVGDLRDLHDEDWSGIGLTVFALRALKNMLAGKKAAVTQRGLQGTRSGASTPVEEQEQELM

SEQ ID NO: 5195 - protein, 421 aa, Prochlorococcus marinus subsp. marinus str. CCMP1375
MTNLKTLRGMVDLLPSHSARWQKVETLAIKNFERAGIKEIRTPILELTELFSRGIGEATDVVGKEMYSFEDRGGRSCTLRPEGTASVARAVIQNGLLKQGPQRLWYGGPMFRYERPQAGRQRQFHQIGVEFFGLSSVRSDAELISIAWDFLNELGLRNLKLQINTLGTSEDRKNYRSKLISWLENFPELLGEDSLNQLKKNPLRILDSKNSNIQKLINDAPLLGDHLNQSSINRFESLQKVLNTLKIPFSVNQRLVRGLDYYCHTAFEIISDDLGAQATVCGGGRYDGLVEQLGGPHAPAIGFAVGMERLLILIGDRLANEIHPDVYLINKGEKAEAEALLLARQLRLQDFIVELDDSGAAFAKQFKRANRVGATWAIVIGDEEINKGEIRLKRMKVLNKDKNEILLKKSDSLELRKILET

SEQ ID NO: 5196 - protein, 143 aa, Arabidopsis thaliana
MDSRDTGETDQSKYKGIRRRKWGKWVSEIRVPGTRQRLWLGSFSTAEGAAVAHDVAFYCLHRPSSLDDESFNFPHLLTTSLASNISPKSIQKAASDAGMAVDAGFHGAVSGSGGCEERSSMANMEEEDKLSISVYDYLEDDLV

SEQ ID NO: 5197 - protein, 705 aa, Sinorhizobium meliloti 1021
MAKKPSAPNNTKPATIHDQKATRGNGGELHQIAEGDTPVLTTAQGGPVADDQNSLRAGERGPTLIEDFHFREKIFHFDHERIPERVVHARGYGVHGFFETYESLAAYTRADLFQRPGERTPAFVRFSTVAGSKGSFDLARDVRGFAVKIYTKEGNWDLVGNNIPVFFIQDAIKFPDVIHSVKPEPDREFPQAQSAHDNFWDFISLTPESMHMIMWVMSDRAIPRSFRFMEGFGVHTFRFVNAKDESTFVKFHWKPKLGLQSVVWNEAVKINGADPDFHRRDMWQAIQSGNFPEWDLHVQLFDQDFADKFDFDILDPTKIIPEEVLPTKPVGRLVLDRMPENFFAETEQVAFMTQNVPPGIDFSDDPLLQGRNFSYLDTQLKRLGSPNFTHLPINAPKCPFQHFQQDGHMAMRNPVGRVNYQPNSWGEGPRESPMKGFRHFPSEEQGPKLRIRAESFADHYSQARQFFISQTPPEQRHIADALTFELSKVETPVIRERMVAHLLNIDETLGKKVGHALGLETMPKPADAAVATRQDLDPSPALSIIQRGPKRFEGRKLGILATDGADGALLDALIAAVEKEKAAFELIAPKVGGFTASDGKRIAAHQMLDGGPSVLYDAVVLLPSAEAVTDLIDVATARDFVADAFAHCKYIGYAGAAVPLLERAGIAELLDEGTIELTDAASAAAFLTEIGKLRVWGREPSVKLK

SEQ ID NO: 5198 - protein, 494 aa, Synechocystis sp. PCC 6803
MGKPTGFLEYTREIPQELSPGDRLRNWDEFHVTMPDKQVETQGARCMDCGTPFCHTGSLISGMASGCPINNLIPEFNDLVYRGLWREALDRLHKTNNFPEFTGRVCPAPCEGSCVLGINNPPVTIKNIEYSIIEKGWQEGWVTPEPPAKRTGKKVAVVGSGPAGLAAAAQLNKAGHWVTVYEREDRPGGLLMYGIPNMKLDKEEVVLRRLNVLEAEGVTFVCNTEIGKDLPPETLLKDYDAVVLCTGATKPRDLAIAGRELEGIHFAMEFLTANTKAILDKTPGPNFISAKDKDVVIIGGGDTGTDCVGTSLRHGCRSLVQLEIMPKPPEERAANNPWPEWPKVYKMDYGQEEAAAVYGHDPRSYLTTATKIEGDDQGRVKAVHTVDVRWEKDGQGRFIPQQVAGTEQVRPAQLVLLAMGFVGPESQLLDAMKLDKDARGNIKAEYGQYETSIPGVFAAGDCRRGQSLVVWAFNEGRGAAKACDLYLMGETDLP

SEQ ID NO: 5199 - protein, 90 aa, Glycine max
  unsure (1)..(90): unsure at all Xaa locations
LQNRIAEXHTELELLSSAALENPCIKHAVELEQSFMEGAYNRVLSARQTVPHDTYVYFMDLLAKTVRDEIAGCSEKAYDYLSLRMLSKCC

SEQ ID NO: 5200 - protein, 334 aa, Saccharomyces cerevisiae
MLSRVAKRAFSSTVANPYKVTVLGAGGGIGQPLSLLLKLNHKVTDLRLYDLKGAKGVATDLSHIPTNSVVKGFTPEEPDGLNNALKDTDMVLIPAGVPRKPGMTRDDLFAINASIVRDLAAATAESAPNAAILVISNPVNSTVPIVAQVLKNKGVYNPKKLFGVTTLDSIRAARFISEVENTDPTQERVNVIGGHSGITIIPLISQTNHKLMSDDKRHELIHRIQFGGDEVVKAKNGAGSATLSMAHAGAKFANAVLSGFKGERDVIEPSFVDSPLFKSEGIEFFASPVTLGPDGIEKIHPIGELFSEEEEMLQKCKETLKKNIEKGVNFVASK

SEQ ID NO: 5201 - protein, 483 aa, Rhodopseudomonas palustris CGA009
MMSAVSALSRAELEARLEEAEETLRAIRDGEIDAVVVRAADEEQVFTLEGGGQSYRTFMETMDVGAAAFDQDGQLLYANQALCALLDCAHGSLTASALIALLDPANQAAFRRLLAQAQRERQSAEIHLRVGDAERSMLLTGTPLEFGVVHGAAITFTDISEREQAAAARESERLARAILASANEAVIVCDRAGRVTHLNGAAMRICAEAPVGKTFAEAIALSFPEASELMSSDDIVTMATAGLPVQGLEAAVRIPSAAITDVMISAAPLVVSGERTQGCVVTLVDLSQRKAAERHQALLMGELDHRVKNTLTMVMAICARTAAHERTIEDFQKSFTGRIQALAATHTLLSNASWQNLHIRDVLAAELAPFASLSSGRIVTDGLDIAVDAKTAVSLGLVFHELTTNAVKYGALSVPSGRISVRRVGATDEALTIEWQEHDGPPVTPPQSSGFGQTLISRSLGNGGAKLEFDSAGVVCRISIPRS

SEQ ID NO: 5202 - protein, 231 aa, Escherichia coli
MFRKLAAECFGTFCLVFGGCGSAVLPAGFPELGIGFAGVALAFGLTVLTMAFAVGHISGGHFNPAVTIGLWAGGRFPAKEVVGYVIAQVVGGIVAAALLYLIASGKTGFDAAASGFASNGYGEHSPGGYSMLSALVVELVLSAGFLLVIHGATDKFAPAGFAPIAIGLALTLIHLISIPVTNTSVNPARSTAVAIFQGGWALEQLWFFWVVPIVGGIIGGLIYRTLLEKRD

SEQ ID NO: 5203 - protein, 474 aa, Erwinia carotovora subsp. atroseptica SCRI1043
MHDKLLIEGKLIAGNGEALAVFNPATGEQIAAIPQADLHQIDAAVLAAESAFAHWGQTTPKTRATLLLKIADAIEENAEVFAKLESLNCGKPYHAVLNDEVPAVADVFRFFAGAARCLSGSAAGEYLEGHTSMIRRDPVGVVASIAPWNYPLMMASWKLAPALAAGNCVVLKPAEQTPLTTFYLAHLLADILPAGVVNIVFGRGADIGDALTGHEKVNMVSLTGSIATGAHILAHTAASVKRTHMELGGKAPVIVFDDADIDQVVDGIRSFGFYNAGQDCTAACRLYVQRAVYDEVVEALGKAVATLKIGDPRDETTELGPLITEPQLERVMGFVERAKALPHITVVTGGERVKGTGFYFQPTVLAGAKQDDEIVQKEVFGPVISITSFDDEAQVIGWANASNYGLASSVWTRDIGRAHRLAACLQYGCTWVNTHFMLVSEMPHGGQKLSGYGKDMSMYGLEDYTIVRHIMIRH

SEQ ID NO: 5204 - protein, 468 aa, Erwinia carotovora subsp. atroseptica SCRI1043
MSRSNAHLNPLECTQQALHWIHSDTLSPDDMAALNQEVLSCFREYVNPGFLEYRKSVTTGGDYGAVEWRASGPNTLIDTQGNEYLDCLGGYGIFNVGHRNPNVIAAVESQLARQPLHSQELLDPLRGLLAKTLAALTPGNLKYSFFSNSGTESVEAALKLAKAYQSPRGKYTFIAATGAFHGKSLGALSATAKPAFRRPFMPLLPGFHHVAFGDISAMRKQVQQCQKTGDDVAAIILEPIQGEGGVIVPPENYLPAVRALCDEVGALLILDEVQTGMGRTGKMFACEHYGVQPDILCLAKALGGGVMPIGATVATEAVFSVLFENPFLHTTTFGGNPLACAAALATVNELLTKNLPEQAAIQGEFLLQGLQQLAAEYPQLIIEARGMGLLQAIEFRKNEIGYAFAKELFQRNILVAGTLNNSKSVRIEPPLTITREQCARVLKEAKDVLKKLNGTMPDENKMKEYAVE

SEQ ID NO: 5205 - protein, 417 aa, Cytophaga hutchinsonii
MNEITELAAQQAELTHAVDTVWVAICAALIFQMEGGFALLESGFVRSKNAISIIAKVMIDIMFGGIAFYAVGFGIAYGASNGWWAFGFGIPEGDMGLGLTVSNKLFWFIQMGFAIAAISIVSGAVAERIKIWAYAFFVLFFCACMYPLAANWVWNPNGWLAQLGFNDFAGSAAVHAMGGFAGLAAAIVLGPRIGKYNADGSINPIPGHNLTLSAVGAFILWFGWFGFNPGSTLGAVGKWELIGSVATNTFLSSAMGGISTMVYTFLRYKRIDITMVINGVLAGLVAITAGCNVVSANSAIIIGLIAGILIDVAVVAIDKMKVDDPVGAVAVHGVNGFFGTVAVGLFATKGGLFTTGDAHLLGVQTLGVTVIAVCSFAVTYLVFIVLKKTTGIRLGEREELAGTDAVEFGIEAYTTIE

SEQ ID NO: 5206 - protein, 340 aa, Geobacillus sp. M10EXG
MKAAVVEQFKEPLKIKEVEKPSISYGEVLVRIKACGVCHTDLHAAHGDWPVKPKLPLIPGHEGVGIVEEVGPGVTHLKVGDRVGIPWLYSACGHCEYCLSGQEALCEHQQNAGYSVDGGYAEYCRAAPDYVVKIPDNLSFEEAAPIFCAGVTTYKALKVTGTKPGEWVAIYGIGGLGHVAVQYAKAMGLHVVAVDIGDEKLELAKELGADLVVNPAKENAAQFMKEKVGGVHAAVVTAVSKPAFQSAYNSIRRGGTCVLVGLPPEEMPIPIFDTVLNGIKIIGSIVGTRKDLQEALQFAAEGKVKTIIEVQPLEKINEVFDRMLKGEINGRVVLTLENNN

SEQ ID NO: 5207 - protein, 216 aa, Dendrobium sp. XMW-2002-8
MGRSPCCEKAHTNKGAWTKEEDERLVAYIKVHGEGCWRSLPKAAGLLRCGKSCRLRWINYLRPDLKRGNFTEEEDELIIKLHSLLGNKWSLIAGRLQGRTDNEIKNYWNTHIRRKLLSRGIDPTTHRPLHGQADASFVNEVEKVVSFRRREDENKSSNSSSSNSRSNSEEAKRWRCPDLNLELCISPPLQKQEDSEEDMMREEFGLCFTNGLLEFR

SEQ ID NO: 5208 - protein, 522 aa, Zea mays
NSGGKCDFDLAATFFCSVVYLVVGGDMQFALALDTNSGPHQIRSCEGDGIDRLEKLSIGGRKQEKALRNRCFGGRVAATTQCILTSDACPETLHSQTQSSRKNYADANRVSAIILGGGTGSQLFPLTSTRATPAVPVGGCYRLIDIPMSNCFNSGINKIFVMSQFNSTSLNRHIHRTYLEGGINFADGSVQVLAATQMPEEPAGWFQGTADSIRKFIWVLEDYYSHKSIDNIVILSGDQLYRMNYMELVQKHVEDDADITISCAPVDESRASKNGLVKIDHTGRVLQFFEKPKGADLNSMRVETNFLSYAIDDAQKYPYLASMGIYVFKKDALLDLLKSKYTQLHDFGSEILPRAVLDHSVQACIFTGYWEDVGTIKSFFDANLALTEQPSKFDFYDPKTPFFTAPRCLPPTQLDKCKMKYAFISDGCLLRECNIEHSVIGVCSRVSSGCELKDSVMMGADIYETEEEASKLLLAGKVPIGIGRNTKIRNCIIDMNARIGKNVVITNSKGIQEADHPEEGVI

SEQ ID NO: 5209 - protein, 209 aa, Zea mays
  unsure (1)..(209): unsure at all Xaa locations
MGFPVGYSESEMLLPRVLLQVLLLLGHFHRFLLWGXHAVGLGDLIDLGCNYPPPPPSASTAHEMMEHQHQHQGRDDVAAPLQHRRPEFRPVPAVRIEEALPVVRFDELCGAARGDGDCDCDCDCAVCLSGIGGGDEVRRLGNCRHAFHRACLDRWMAHDQRTCPLCRAPLIPWAADADYDMSYPSPLPPTPLRRPHELLLLLTGLGGFQ

SEQ ID NO: 5210 - protein, 150 aa, Sinorhizobium meliloti
MIRLLIALFLLLASVAPAFAVNPDEVLADPALEARARAISAQLRCMVCQNQSIDDSNAELAKDLRLLVRERLKNGDSDEAVISYVVSRYGEFVLLNPRLEAKTLVLWGMPAILLVAGITLVVAARRRGARVPGAPLSAEEKERLDRLLRP

SEQ ID NO: 5211 - protein, 106 aa, Glycine max
MELGSYSDQSKSTFSLVDEDHTFANSVRFTLNQDPRVTFCGYSIPHPSDNRVNIRVQTTGDPAREVLKDGCQDLMLMCQHVRSTFDNAMTDFKRTQTNTEQEMDTK

SEQ ID NO: 5212 - protein, 503 aa, Triticum aestivum
  unsure (1)..(503): unsure at all Xaa locations
MARKMLKDGEAPAVADGGGGEGEGSYDYDLFVIGAGSGGVRGSRTAAGFGAKVAICELPFHPISSEWLGGHGGTCVIRGCVPKKILVYGASFRGEFDDAKQFGWEINGDINYNWKKLLENKTQEIVRLNGVYKRILGGSGVTMIEGAGSIVDAHTVEVTQPDGSKQRHTTQHIXLIATGSXRXTLVDIPGKELAITSDEALSLEELPKRAVILGGGYIAVEFASIWKGLGAEVDLFYRKELPLRGFDDEMRTVVASNLEGRGIRLHPGTNLTELSKTADGIKVVTDKGDELIADVVLFATGRAPNSNRLNLEAVGVEVDQIGAIKVDEYSRTSVPSIWAVGDVTNRINLTPVALMEATCFAKTVFGGQTVKPDYKDVPCAVFCIPPLSVVGLSEQEALAEAKNDLLVYTSSFNPMKNSISKRVEKSTMKLVVDAETDKVLGAAMCGPDAAEIMQGIAVALKAGATKATFDSTVGIHPSAAEEFVTMRTLTRRVSPPSKPKTNL

SEQ ID NO: 5213 - protein, 176 aa, Zea mays
MAAPSGTMRAVQYDRYGGGARGLKHVEPPIPSPKKGEVLIRMEATSINVVDWKFQNGVARPFMPRRFPFISGFDLAGEVVELGAGVSSFKPGDKVIAINFPNGGGLAEYAVASASRTAARPPEVSAVEGVCVPIAAVTALGSLRTAGVTVTLDDPVRAPATPKNVLVTAVSGAVGH

SEQ ID NO: 5214 - protein, 434 aa, Candida albicans SC5314
MQASLFRIFRGASLTTTTAAASFTATATAGATTAKTLSGSTVLRKSYKRTYSSSVLSSPELFFFHQFNNNKRYCHTTTTTNTKTIMSEQIPKTQKAVVFDTNGGQLVYKDYPVPTPKPNELLIHVKYSGVCHTDLHAWKGDWPLATKLPLVGGHEGAGVVVGMGENVKGWKIGDFAGIKWLNGSCMSCEFCQQGAEPNCGEADLSGYTHDGSFEQYATADAVQAAKIPAGTDLANVAPILCAGVTVYKALKTADLAAGQWVAISGAGGGLGSLAVQYARAMGLRVVAIDGGDEKGEFVKSLGAEAYVDFTKDKDIVEAVKKATDGGPHGAINVSVSEKAIDQSVEYVRPLGKVVLVGLPAHAKVTAPVFDAVVKSIEIKGSYVGNRKDTAEAIDFFSRGLIKCPIKIVGLSDLPEVFKLMEEGKILSRYVLDTS

SEQ ID NO: 5215 - protein, 240 aa, Desulfovibrio desulfuricans G20
MKHTDSQEHACNVSGMFGRIAGCYDFLNHFLSVGMDYWWRYELVRQIIPGPTGRVLDLAAGTYDVSLEIRRQYPHMRVAALDYCLPMLTTGKKKLRGLKGAGVYPAQGDGRHLPLADNSVDCATIAFGIRNIIPREEAFREILRVLVPGGRLCVLEFGSGKNKVWKGLYNFYLQHALPRIGKIFSGDDSAYRYLADTIIAFPDARELAQEMRDAGFARVLHRPLTSGIVQLHVAQKANRK

SEQ ID NO: 5216 - protein, 241 aa, Phleum pratense
AIPKVPPGPNITATYGDKWLDAKSTWYGKPTGAGPKDNGGACGYKDVDKPPFSGMTGCGNTPIFKSGRGCGSCFEIKCTKPEACSGEPVVVHITDDNEEPIAPYHFDLSGHAFGAMAKKGDEQKLRSAGELELQFRRVKCKYPEGTKVTFHVEKGSNPNYLALLVKYVNGDGDVVAVDIKEKGKDKWIELKESWGAIWRIDTPDKLTGPFTVRYTTEGGTKTEAEDVIPEGWKADTSYESK

SEQ ID NO: 5217 - protein, 391 aa, Streptococcus pyogenes SSI-1
MTIGIDKIGFATSQYVLKLEDLALARQVDPAKFSQGLLIESFSVAPITEDIITLAASAADQILTDEDRAKIDMVILATESSTDQSKASAIYVHHLVGIQPFARSFEVKQACYSATAALDYAKLHVASKPDSRVLVIASDIARYGVGSPGESTQGSGSIALLVTADPRILALNEDNVAQTRDIMDFWRPNYSFTPYVDGIYSTKQYLNCLETTWQAYQKRENLQLSDFAAVCFHIPFPKLALKGLNNIMDNTVPPEHREKLIEAFQASITYSKQIGNIYTGSLYLGLLSLLENSKVLQSGDKIGFFSYGSGAVSEFYSGQLVAGYDKMLMTNRQALLDQRTRLSVSKYEDLFYEQVQLDDNGNANFDIYLTGKFALTAIKEHQRIYHTNDKN

SEQ ID NO: 5218 - protein, 253 aa, Glycine max
MADKYNLKNPAVKRILQEVKEMQSNPSDDFTSLPLEENIFEWQFAIRGPRDTEFEGGIYHGRIQLPSEYPFKPPSFMLLTPNGRFETQTKICLSISNHHPEHWQPSWSVRTALVALIAFMPTNPNGALGSLDYKKEERRTLAVKSREAPPKFGTPERQKLIDEIHEYMVSKAPSVPQPSASEASEENPRNEEAGTHANSLNPESLTAGEVILDQEVDGIVEEQEEVLANANPAGVEASKEVQPSVSRYEVLQK

SEQ ID NO: 5219 - protein, 481 aa, Thermosynechococcus elongatus BP-1
MKAMSKLKLKRARRQKRPLLNLDWQPNFRWRSPALVACIPLALIIVAVWGVAAQAQDKPLTPEDVQGVLNTIWVLVAAILVIFMNAGFGMLETGFCRQKNAVNILAKNLIVFALATLAYWAIGYSFMFGTEGNAFIGWGGFFLSSEDPATYGLNPFPKGLPISVAFLFQAAFAGTAATIVSGAVAERIKFVDFLIFSLLLTGISYPITGHWVWGGGLLSSIGFLGENVAFKDFAGSTVVHAVGGWSALMGAAFLGPRIGKYAADGTPQALPGHNMGFAMLGCLILWIGWFGFNPGSQLAADEAVPYIAVTTNLAAAAGGVAATITAWLAIGKPDLSMIINGILAGLVSITAGCAGVSYWSAVIIGTIGGVIVVYSVLFFDRIKIDDPVGATSVHLVCGTWGTLAVGLFDKELGLFSGYGVTQLIAQIIGILTIGGFTVLLTSIFWLALKQTLGIRVSEEEEIKGLDIGEHGMEAYSGFLKE

SEQ ID NO: 5220 - protein, 615 aa, Cytophaga hutchinsonii
MCGITGFISIKWGSDELHSMTRRLQHRGPDAEGFYINESVHLGHRRLSILDLSVAANQPFFSKDKRYVMVFNGEVFNYKELAVKYAIPTDTTSDTEVILELFALQGPAAFQEFNGMFAIAIWDTYEKKLTLLRDRFGIKPVCYYDGPDGFGFASEIKSLLELPIPRLINSEALADYLFLEYIPKPNTIFQNIKKLTNGCYLEVTDGVRVAVKAFYDIREKYDPKPLKEKEGLEEFHHLLSDAVKSRMISDVPIGAFLSGGVDSSLVVSKFQENSTLPVETFTIGFDEKQYDESAYAKKVSELLKTNHHEYRLPAEDVFSVLKDAIEFYDEPFAVSSVLPSLLISKVSRQHTTVALTGDGADELFMGYNTYYWYNRIETLKRIGGKASLKLAGNIFKMFGGKPAIKSRLFEGWADKHPYINLWSQEQQMFTQQEIGKLLNYRYTHETTIPYWESLEKISLNNEQAVSFFDIQHYLADDLMYKMDIASMRHGLEVRCPFLDYNLVEFAVNLPLELKINNGTQKYILKKALEKYIPQSLIYRTKWGFSAPSEEWLKRSHTYLIDHYLDPARISAQGIFNAQEIQKLIASFRSGHYYHGKRLWSLVIFQLWYEQYMVAK

SEQ ID NO: 5221 - protein, 235 aa, Zea mays
MPSQSTHTSSSLSSSTAPILPCSSAAALFRSVMAAVATETPFHVLAVDDSLPDRKLIERLLKTSSFQVTTVDSGSKALQFLGLHDQDSTVPPVHTHQLDVAANQDVAVNLIITDYCMPGMTGYDLLKKIKESSSLRDIPVVIMSSENIPSRINRCLEEGADEFFLKPVRLSDMNKLKPHILKSRCNQEQHQQSDSHSGERRNPTISSSDSINNRKRKGAGTEEILPQLANRSRHS

SEQ ID NO: 5222 - protein, 309 aa, Prochlorococcus marinus subsp. marinus str. CCMP1375
MDFPVIRRKKVNTLQVNLGYKCNQACVHCHVDASPSRTEMMNEYNISLIPEVLKTYRIKTLDITGGAPEMHPLFKELIHKVSKLNVKIIDRSNLTILTEPGYLSLANYLADNEVTIIASLPCYEEKNVDFQRGKDVFKKSIKVLKMLNELGYGKGDKKLELDLVFNPIGANLPPSQYELEKKYKDVLKTNYNVEFDNLLVLANMPIKRFSSFLKQQGKLNEYQSLLQESHNEANLESVMCRDTISVNWEGNLFDCDFNQQLGINEYLHPNTLKDLASGNILFEGKKITVAEHCFGCTAGCGSSCGGALT

SEQ ID NO: 5223 - protein, 181 aa, Zea mays
MASSMFSSTAVVTSAAQATMVAPFTGLKSSASFPVTRKANNDITSITSNGGRVSCMKVWPPIGKKKFETLSYLPDLSDVELAKEVDYLLRNKWIPCVEFELEHGFVYREHGNTPGYYDGRYWTMWKLPLFGCTDSAQVLKEVEECKKEYPGAFIRIIGFDNTRQVQCISFIAYKPPSFTEA

SEQ ID NO: 5224 - protein, 417 aa, Zea mays
  unsure (1)..(417): unsure at all Xaa locations
MDPYKHRPTSGANAGYWTTNSGAPVWNNNNALTVGQRGPILLEDYHLIEKLAQFDRERIPERVVHARGASAKGFFEVTHDVSQLTCADFLRAPGVQTPVIVRFSTVVHERGSPETLRDPRGFAVKFYTREGNFDLVGNNMPVFFIRDGMKFPDMVHAFKPSPKTNMQENWRIVDFFSHHPESLHMFTFLFDDVGIPLNYRHMDGFGVNTYTLISRDGKAHLVKFHWKPTCGVKCLLDDEAVTVGGTCHTHXATKDLTDSIAAGNYPEWKLFIQTIDADHEDKFDFDPLDVTKTWPEDIIPLQPVGRMVLNKNIDNFFAENEQLAFCPAITVPGIHYSDDKLLQTRIFSYADTQRHRLGPNYLMLPVNAPKCAHHNNHHDGLMNFMHRDEEVNYFPSRFDPTRHAEQYPIPPRVLSGC

SEQ ID NO: 5225 - protein, 283 aa, ASPERGILLUS NIDULANS FGSC A4
MPALQSSKLAFIGGGNMASAIIGGLLSQGINKQNITVSEPWEVNRNKIADLGVKTTTSNVVAGGEADLVIIAVKPQVTKAVCEELADAWSKRETLPVVVSIAAGITLGSLQQWLKTSDGRTTHLVRVMPNTPALVGEGASGLFASADVTAEEKELVNALLGSVSKATEWVDKEELIDVVTGLSGSGPAYFFAMVEHLIASATALGLPAEQATRLAAQTCLGAGKMLTESSDSPTQLRKNVTSPNGTTHAALETFNAQHFDQVVDKAVKAATSRAAELGNTLGK

SEQ ID NO: 5226 - protein, 419 aa, Leptospira interrogans serovar lai str. 56601
MSVEIKVPEMGESITEATIANWVKKEGESVKQDEILLELETDKATMEVPAPSSGVLQKIHKKAGETVKVKEIIGLIDSSATASSPSTSAPTNSAQTTQTSGNGTINETLPPAVRKLIEDNGLNPASITGSGKNGQITKEDVLKAIETKATSSVSNASVNVGTPAAVKATLTLPEIPKAVPAARRTDLPRENVVPMTRLRKVIAERLVSAQHNAAILTTFNEVDMSAVMELRNRYKDKFKEAHNVSLGFMSFFTKAAIHALKTIPAINAEIRGSDIVYKNYYDIGVAVGGPKGLVVPVVRDADLLSFAGVEQEIIRLANRVKDGKIELAEMEGGTFTISNGGIYGSMMSTPILNPPQSGILGLHNIVKRAVVVNDQIVIRPMMYLALSYDHRIVDGKEAVTFLVKVKEAIEDPSRLLLEL

SEQ ID NO: 5227 - protein, 467 aa, Leptospira interrogans serovar lai str. 56601
MSAEFDVVVIGAGPGGYVCAIRCAQLGFKTAIIEKRKTLGGTCLNVGCIPSKALLDSSEEYHKTLHKLEVHGISVGKVDLDLNKLMNRKDQIVKEVTDGVDFLMNKNKIKRYEGFGKVLSAGKVEVAFNDGKKETLSAKHIVVATGSVPIDIPGLTVDGKNIITSDHAIDVRKLPKKMIIIGAGVIGLELGSVWGRLGTSVTVVEFLPGLISNVDRQMGSLLERSLTSQGMEFLFEHKVKGAATTKNGVKVQIEDSKGESKDLEADVVLVAVGRRPFLEGVGLEEAGVAFTQRKRIQVDAHFKTSVPGIYAIGDAIDGPMLAHKAEEEGVALAELLAGQSGHVNYNAVPYVIYTWPEMAWVGKGEEELKAAGIEYKVGKSLFRPNARSKAMNEAEGQVKILADKKTDKLLGAFVFGPRASDMVAELAVAMEFGASAEDIARSFHAHPTLSEVIKEAAMAVDKWAIHA

SEQ ID NO: 5228 - protein, 378 aa, Sinorhizobium meliloti 1021
MGGFIDIQAPLEQEGTKAVVRNWLRKIGDPVKSGDPLVELETDKVTQEVSAPADGVLAEILMRNGDDATPGAVLGRIGSEAAGAGHAPHYSPAVRHAAEEYGLDPATVTGTGRGGRVTRADMDRAFTARQEGPASVAAEAGDRGAAPKSRRIPHSGMRAAIAEHMLNSVTTAPHVTAVFEADFSAVMRHRDEHGKRLAADGTKLSYTAYVVSACVAAMRAVPEVNSRWHEDALETFDDINIGVGISLGDKGLVVPVIHRAQDLSLAEIAARLQDLTTRARSNALSRADVTGGTFTISNHGASGSLLAAPIIINQPQSAILGVGKLDKRVIVREVDGADTIQIRPMAYVSLTIDHRALDGHQTNAWLTHFVRVIETWPK

SEQ ID NO: 5229 - protein, 340 aa, Oryza sativa (japonica cultivar-group)
MPRPAKIRKKHENVFDQLIKAIKAPVDFDLPPVLKEWKSNYYVPIKRNAYITRKRVEDDGIFCSCTPSGSSATCDKDCQCGMLFSCCSSTCKCENKCANKPFQHRTLRKTKLIKTEKCGNGVVAEEDIKKGEFVIEYVGEVIDDRTCEQRLWKMKRQGDTNFYLCEVSSNMVIDATNKGNMSRFINHSCEPNTEMQKWTVEGETRVGIFALRDIKTGEELTYDYKFVQFGADQDCHCGSSNCRKMLGITKPVNSIVLHNGNLSQDQHVRKKRKTYLENCIGEIVRLWHRRHSMYLAASIYDFNERNGIHTLLFTDATIEEFDLREEDWDFLPDPDGPEEV

SEQ ID NO: 5230 - protein, 594 aa, Mycobacterium tuberculosis H37Rv
MSNLLVTPELVAAAAADLAGIGSAIGAANAAAGAPTMALLAAGADEVSAAVAAVFSSYAQQYQALSAAAAAFHDQFVRALAAGAGAYAGAEAANVEQQLLNAINAPTLALLGRPLIGNGADGAAGTGQAGGAGGLLYGNGGNGGSGAAGQAGGAGGAAGLIGHGGTGGAVTGVSTTGGPGGHGGDAGLYGFGGAGGAGGFGQSGAAGGAGGAGGWLYGDGGDGGAGDNGGNESGTGVSAVGGVGGAGGAGGLLFGNGGDGGVGGDGGDGSSTQDSGGDGGAGGAGGAGGWLLGNGGAGGAGGAASIKVATGGLGGDGGDAGLFGFGGDGGWGGRGVDARFGAAGGAAGAGGAGGWLYGDGGAGGVGGVGGAVFSLSSGDGGAGGAGGGGGWLFGNGGDGGAGGGGGGRFGSGSGAGGDGAVGGAGGAGAWFGNGGAGGVGGGGGRGTTAIGGDGGAGGAGGAGGWLYGDGGAGGAGGGGGRGGTGNDGGDGGDGGRGGDAQLLGNGGDGGAGGAGGPAGLALPPGPARPAGAAVPAVRCSAAPARPARTADPWLAPIFARSTLRHSHHLGGIAQTGAVADQQGQIAGLGRAGRQ

SEQ ID NO: 5231 - protein, 178 aa, Yersinia pestis CO92
MRHTVEVMISEQEVKTRIAELGRQISEHYRDSGSDMVLVGLLRGSFMFMADLCRAIDVSHEVDFMTASSYGNGMSTTRDVKILKDLDEDIRGKDVLIVEDIIDSGNTLSKVREILQLRGPKSLAICTLLDKPERREVHVPVEWVGFTIPDEFVVGYGIDYAQRYRHLPYVGKVVTLDE

SEQ ID NO: 5232 - protein, 863 aa, Rhodobacter capsulatus
MIRTTCPYCGVGCGVIATPDGRGGATIKGDPDHPANRGRLCVKGTALGETIATAGRLTTPRIDGAEASWGTALDLIARRFSETIAEHGPDAVAFYVSGQLLTEDYYVANKLMKGFIGSANIDTNSRLCMASSVAGHRRAFGSDTVPGQYADLEEADLVVLVGSNLAWCHPVLFQRIMAAKATRPGLKIVVIDPRRTATCEGADLHLSLAPGADAHLFNLLLAHLPETGRIDPAFLRHLSGLPEALVAARTSTPAATDLEPADLDAFLRLWAETEKVVTVYSQGINQSETGTDKVNAILNCHLATGRIGRPGMGPFSVTGQPNAMGGREVGGLANMLACHLEIENPDHRAAVADFWAAPRIAEKPGLKAVDMFRAVEEGRVKALWVMHSNPAVTMPEADRVARAIAGCDFTVVSDLWAETDTARRAHVLLPATGWGEKSGTVTNSERCISRQRPFLAPPGQARPDWWALAQVAKRMGFSGFDWESPADIFAEYCALSGVAGGLGSDFDISGLEAADYDALPPTYWPQAAQKGGRFFGTGQFHTPDGKARMIPVTARLPDPVTPAHPYRLNTGRIRDQWHTMTRTGQSPRLAAHLGEPFLEIHPDDAAQLGFATADLAEVTNAHGRALLRVMISDRVAPSHPFAPMHWTGETAPSGRVDALVTATTDPVSGQPASKSAAVAIRRFEVRWHGFAITRSDLRPGCEYWAKAPIPGGWRAELAGTTPPEDWALWAENLLRLGPATLQVSDPSRGLYRFAFFEGDRLCAAIFIAPGPVALSRSHLVTQLGSTARSILAGQPEAARPDPGPTVCACLNVGMNTILRAIADQGLASVEAIGRALGAGTNCGSCRPELATLLSRFSSREAAQ

SEQ ID NO: 5233 - protein, 323 aa, Bradyrhizobium japonicum USDA 110
MEKLIDEFRKGWQGAAPPSLGLSIAFAVACLLVATLARWGLAQVRPDVYFTPYFPAVFFAAAFGGFRIGIVTAIVGGVLGVVVNFSDALADRARFALLALYWAVSALTIWGVEHYRTMLAEQRRISKRLIEEEDYRKLLVDELQHRLKNKLSTVHAVIHQVLHDQPQVWARVDPRLRSLAATDDLISRIDKAGCDIRDLLISELGPYGHVRFTLNGDRLFLPAKLAVTLSLMFHELATNAGKYGAFSAPRGLLQVSWTVSDDRLTITWDETEGPTVDKVSEPGFGTKLLKSALSAFDGRTEISYLKTGLHCIMQCRIPQGESR

SEQ ID NO: 5234 - protein, 279 aa, Bradyrhizobium japonicum USDA 110
MGRLDGKVAVITGATSGIGLRTAEVFVAEGAKIVIAGRRLPEGEALAKQLGANCIFRQTDVTVEAQMQALIALAVDKFGRIDCLFNNAGGPAQTGGIEGLEVERFDAAMATLVRSVMLGMKHAAPYMKKQGSGSIINNGSIAGRLAGFSSSVVYGAAKAAVIHLTKCVAMELGESNVRVNSISPGAIATGIFGKALGLATSAAEKTPAVMREVYKTAQPIPRAGIPDDIAHAAVFLASDESSFINGHDLVIDGAITGGRNWSQQQQGYVALRKAFDQGA

SEQ ID NO: 5235 - protein, 390 aa, Synechocystis sp. WH 8501
MATLLEQLREFTVVVADTGDIQAIETFTPRDATTNPSLITAAAQMPQYQSIVDDTLKTARKELGKDADESAVVTLAFDRLAVAFGLKILEIIPGRVSTEVDARLSYDTEATLEKARYLISEYEKAGVSRDRILIKIASTWEGIKAAEVLEKEGIHCNLTLLFGMHQAVACAEANVTLISPFVGRILDWYKKETGKEYAPTEDPGVMSVTTIYNYYKKFGHKTEVMGASFRNIGEICELAGCDLLTISPKLLDQLNSTEETLPRKLDPEAAAKMDIAKIAMDKAIFDKMHQEDKMAYEKLDEGIKGFTKALETLEEMLKERLTRIEGETRVNNAAADIFRVYDLDGDGFITREEWAGTDVVFDAIDINHDGKITPEEMAAGLGAAICLVEA

SEQ ID NO: 5236 - protein, 348 aa, Gloeobacter violaceus PCC 7421
MTTPLLGQSAEELRIWVESQGQPAYRAQQLHRWLYQRGVRSLMEITDWPKAWREQVHSVPVGRSQVVRQSAAADGTIKYLLAGADGETVETVGIPAAERLTVCVSSQVGCPMACRFCATGQSGFARNLGVHEIVDQVLTVQEGFGRRVSHVVFMGMGEPLLNLGAVVQALRVLNGDIGIGQRQITVSTVGVPGQIRRLGTYKLQITLAVSLHAPNQDLRLKLIPTAQHYPIEELLEDCRDYVETTNRRVSFEYTLLAGINDEPHHARELAAILRGFQSHVNLIPYNPIEGVEYERPGEARVRAFERELVRHKIAASVRHTRGLEEAAACGQLRRRSLSGEAQSASTRA

SEQ ID NO: 5237 - protein, 214 aa, Triticum aestivum
  unsure (1)..(214): unsure at all Xaa locations
MAPTVMAXXXTSVXPFQGLKXTAXLPVSRRSNGASXXSXSNXGRIRCMQVWXXEGIKKFETLSYLXPXNTEALLKQXDYLIXXKWVPCLEXSKVGFIFREHNASPGYYYGRYWTMWKLPMFXCTDATQVINEVEXXKKEXPDAYVRIIGFDNMRQVXXVSLIXFKPXGCEERGLKQNSPGQHIKVFAGFFDFWGCFLSHLFLVPKKNIGKGPFG

SEQ ID NO: 5238 - protein, 314 aa, Schizosaccharomyces pombe
MPGYDDKRYFTSTAVLLNELIKLVVCFSVGYHQFRKNVGKEAKLRAFLPQIFGGDSWKLAIPAFLYTCQNNLQYVAAGNLTAASFQVTYQLKILTTAIFSILLLHRRLGPMKWFSLFLLTGGIAIVQLQNLNSDDQMSAGPMNPVTGFSAVLVACLISGLAGVYFEKVLKDTNPSLWVRNVQLSFFSLFPCLFTILMKDYHNIAENGFFFGYNSIVWLAILLQAGGGIIVALCVAFADNIMKNFSTSISIIISSLASVYLMDFKISLTFLIGVMLVIAATFLYTKPESKPSPSRGTYIPMTTQDAAAKDVDHKH

SEQ ID NO: 5239 - protein, 339 aa, Agrobacterium tumefaciens
  unsure (1)..(339): unsure at all Xaa locations
MAKTMKAAVVRAFGKPLTIEEVAIPDPGPAEILINYKATGICHTDLHAATGDWPVKPNPPFIPGHEGVGYVAKIGAGVTGIKEGDRAGTPWLYTACGCCIPCRTGWETLCPSQKNSGYSVNGSFAEYGLADPKFVGRLPDNLEFGPAAPVLCAGVTVYKGLKETEVRPGEWVVISGIGGLGHMAVQYAKAMGMHVVAADIYDDKLELAKKLGADFTVNGRAPDAVEQVQKATGGVHGALVTAVSPKAMEQAYGFLRSKGTMALVGLPPGFISIPVFETVLKRITVRGSIVGTRQDLEEALSFAGEGKVAAHFSWDKLENINDIFRRMEEGKIDGRIVLX

SEQ ID NO: 5240 - protein, 466 aa, Arabidopsis thaliana
MNSGDVFILSRSKGHDMLAPFTAGWQSADLDPLVIAKSEGSYVYDDTGKKYLDSLAGLWCTALGGNEPRLVSAAVEQLNTLPFYHSFWNRTTKPSLDLAKVLLEMFTANKMAKAFFTSGGSDANDTQVKLVWYYNNALGRPEKKKFIARKKSYHGSTLISASLSGLPPLHQNFDLPAPFVLHTDCPHYWRFHLPGETEEEFSTRLAKNLEDLIIKEGPETIGAFIAEPVMGAGGVIPPPATYFEKVQAVVKKYDILFIADEVICAFGRLGTMFGCDKYNIKPDLVTLAKALSSAYMPIGAILMSQEVADVINSHSSKLGVFSHGFTYSGHPVSCAVAIEALKIYKERNIPEYVAKVAPRFQDGVKAFASGSPIIGETRGTGLILGTEFVDNKSPNEPFPPEWGVGAFFGAECQKHGMLVRVAGDGILMSPPLIISPEEIDELISIYGKALKATEEKVKELKAQHKK

SEQ ID NO: 5241 - protein, 323 aa, ASPERGILLUS NIDULANS FGSC A4
MVKIALLGAAGQIGTPLSLLCKASDLFAEISLYDIVHVPGIATDLMHIDTRARVTGHLPDDSGLKKALTGADIVVVTAGIARKPGMTRDAQTNASIIRDIFAEIAATCPNAVSCVVTNPVNSTLPVAAETLKKAGVFEPTRLFGITTLDVVRASTFAAHALDSNSDPKAFKVPVIGGHSGATILPLYSQAEPPVNLDKETLAAVIHRVQFGGDEIVKSKQGAGSATTCMAYAGFRFVKAIVAAMNGESVTEEAYVYLPGIAGGQEIAQELGVDYFALKVTLGRTGANQVLPIGEISENESTLLKVAINDLKANIVTGVSFMAA

SEQ ID NO: 5242 - protein, 638 aa, Glycine max
  unsure (1)..(638): unsure at all Xaa locations
MIGSLNQVSHVVTTCLVCIFPIPLMASISGICSSSPTLNHSTPKRRRTPLLPSSSFPSKPSPPRSLARETPAPQQQQQQLSAVTKPLHAGLEKKPRALWRRYVEWLYQHKELGLYLDVSRVGFSDDFVREMEPRFHAALRAMEDLEKGAIANPDEGRMVGHYWLRDSARAPTSFLKSQIDNTLVAICTFADDVVTGKIKPPSSPEGRFTQILSVGIGGSALGXPQFVAEALAPDNPPLKIRFIDNTDPAGIDHQIAQLGPELASTLVIVISKSGGTPETRNGLLEVQKAFREAGLSFPKQGVAITQENSLLDNTARIEGWLARFPMFDWVGGRTSEMSAVGLLPAALQSIDIREMLAGAALMDEANRSTVIRNNPAALLALCWYWATDGVGSKDMVILPYKDSLLLFSRYLQQLVMESLGKEFDLNGNRVNQGISVYGNKGSTDQHAYIQQLREGVHNFFVTFIEVLRDRPPGHDWELEPGVTCGDYLFGMLQGTRSALYANNRESITVTVQEVTPRSVGALVALYERAVGIYASLVNINAYHQPGVEAGKKAAGEVLALQKRVLAVLNEASCKEPVEPLTLEEVADRCHAPEDIEMIYKIIAHMAANDRALIAEGNCGSPRSIKVFLGECNLDELYA

SEQ ID NO: 5243 - protein, 391 aa, Triticum aestivum
  unsure (1)..(391): unsure at all Xaa locations
MSPSLDLPSRILPRVLIVSRRTVRKNKFVDFVGEYHLDLVVGYGAVPIIVPRVAGVHAMLDSFEPIHGVLLCEGEDIDPSLYDAGGDGIDGDALSPEQLEAVRRLHPSDAVVDHEKDSIELLLARRCLERSVPFLGICRGSQVLNVACGGSLYQDVEQELHPAAXATVCHMDYANYDGHRHPXLRVLPDTPLHDCFAESLTGXPPGDGKRLERPDDFDSPGCAKAYQEFVRAVVACKAKLAAAHAHVHVQSAVTTPAKLNHEMEKQRKVIGRSVSLAKNMYMFGNNNSAQHPAQHRDGDLDGGAEFLESNTALSVQQEKWLKQMGATVRNASGYMNRLKVSEEREAAARALMAKMSVAQLASLAAFYRAMGNVCSEVLDAKLQPPSTTLHE

SEQ ID NO: 5244 - protein, 278 aa, Vibrio alginolyticus
MMEIRQMEHKKIAFIGAGNMVRAIVSGLVANGYPAQNITATAPSEARRLPLEQDFGIRTTSDNIQAATEADVVVLSVKPQMMADVCKPLQAIDFTNKLVISIAAGINCSRLDDMLATKLNLVRVMPNTPSQLGLGMSGLFAPIHVTEHDKAFAAELMEAVGKVCWVEQESGINNVIAAAGSAPAYFFLFMEAMQAEAIAQGFDKESARLLVQQAALGAASMVVSNPETELSTLRENVTSKGGTTAEALRTFNEHQLSDIVAKAMQAAVARAEEMEKLF

SEQ ID NO: 5245 - protein, 399 aa, Bacillus subtilis subsp. subtilis str. 168
MEITPSDVIKTLPRQEFSLVFQKVKEMEKTGAHIINLGQGNPDLPTPPHIVEALREASLNPSFHGYGPFRGYPFLKEAIAAFYKREYGVTINPETEVALFGGGKAGLYVLTQCLLNPGDIALVPNPGYPEYLSGITMARAELYEMPLYEENGYLPDFEKIDPAVLEKAKLMFLNYPNNPTGAVADAAFYAKAAAFAKEHNIHLIHDFAYGAFEFDQKPASFLEAEDAKTVGAELYSFSKTFNMAGWRMAFAVGNEKIIQAVNEFQDHVFVGMFGGLQQAASAALSGDPEHTESLKRIYKERIDFFTALCEKELGWKMEKPKGTFYVWAEIPNTFETSHQFSDYLLEHAHVVVTPGEIFGSNGKRHVRISMVSKQEDLREFVTRIQKLNLPFGSLQETSR

SEQ ID NO: 5246 - protein, 300 aa, Porphyromonas gingivalis W83
MALSRIMECVPNFSEGRDKEKIEKIVNPFRTREGVKLLNYSNDEDHNRLVVTVVGEPEPLREAVLEAVGIAVELIDLTKHTGQHPRMGAVDVIPFIPIKNVTAEDADTLAKEVGRTIGEKYGVPVFLYEKSATAPHRENLAKIRKGEFEGMAEKIHEADWHPDFGPADRHPTAGTVAVGARMPLVAYNVNLNTNDLSIADAIAKKVRFLGGGLRFCKAMGVELTDRGIVQVSMNLTDFTKTAVYRAHEMVRMEAARYGVSVVGSEVIGLVPMQALIDCAEYYLGIENFSMDQILESRIME

SEQ ID NO: 5247 - protein, 285 aa, Oryza sativa (japonica cultivar-group)
MEAAADMGVLLDLYWHTPHIFDLAVADSLLMDGFGGGMYGPAAAPATPAMVEKEYDESLSELYAYTSQSRYADSSSPDVVNLCSTAVASAAAAASSKNIAMERDRRKRLNEKLFALRAVVPKITKMDKASIVRDAIAHIEKLQEEERQLLDEISVLQSAAAVAATAVEDVDDSGVTMPSMKKLRSTPPLDGGGGALRVASSPPLQILEVSKVGEKTVAVSIRCAKTRGAMAKVCHAVESLYLKVVSASVAAVDGTIVHTMFVETEQMSGAQEMKQRIQSSLLSAP

SEQ ID NO: 5248 - protein, 361 aa, Streptococcus pneumoniae TIGR4
MKPSIHSLVHQTMQEWVLEQGEKKFRADQIWEWLYRKRVQSFEEMTNLSKDLIAKLNDQFVVNPLKQRIVQESADGTVKYLFELPDGMLIETVLMRQHYGLSVCVTTQVGCNIGCTFCASGLIKKQRDLNNGEIVAQIMLVQKYFDERGQDERISHIVVMGIGEPFDNYNNVLNFFRTINDDKGMAIGARHITVSTSGLAHKIRDFADEGVQVNLAVSLHAPNNELRSSIMKINRAFPIEKLFAAIEYYIETTNRRVTFEYIMLNEVNDGVEQALELTELLKNIKKLSYVNLIPYNPVSEHDQYSRSPKECVLAFYDTLKKKGVNCVVRQEHGTDIDAACGQLRSNTMKRDRQKAVAAVNP

SEQ ID NO: 5249 - protein, 560 aa, Arabis glabra
MASSTALICDTEAWKDLKGHVEDIKKTHLRDLMSDANRCQSMIMEFDGLLLDYSRQRATVETMDKLLNLAKAAQLTEKISRMFNGEHINSTENRSVLHVALRAPKDAVIKADGKNVVPEVWNVLDKIKEFSEKIRSGSWVGATGKPLKDVVAIGIGGSFLGPLFVHTALQTDPEALECAKGRQLRFLANIDPVDVARNINGLNPETTLVVVVSKTFTTAETMLNARTLREWITTALGASAVAKHMVAVSTNLALVEKFGIDPNNAFAFWDWVGGRYSVCSAVGVLPLSLQYGFSVVEKFLKGASSIDQHFQSTPFEKNIPVLLGLLSVWNVSFLGYPARAILPYSQALEKFAPHIQQGSMESNGKGVSIDGLPLPFETGEIDFGEPGTNGQHSFYQLIHQGRVIPCDFIGIVKSQQPVYLKGEVVSNHDELMSNFFAQPDALAYGKTPEQLQKENVSENLIPHKTFSGNRPSLSLLLPELTAYNVGQLLAIYERRVAVQGFVWGINSFDQLGVELGKVLATQVRKQLHSSRTQGTALEGFNYSTTTLLKRFLETSSKPQM

SEQ ID NO: 5250 - protein, 224 aa, Glycine max
  unsure (1)..(224): unsure at all Xaa locations
MTTSFGGPATTSAPLKDTKLQIPSFHCFSSASASALSRNALSLPSSTRSFSLIRAVSTPAQSETATVKRSKVEIFKEQSNFIRYPLNEDMLTDAPNIGEAATQLIKFHGSYQQYNREERGSRSYSFMIRTKNPCGKVSNQLYLTMXDDLADQFGIGTLRLTTRQTFQLHGVLKKDLKTGMATIIRNMGSTLGACGDLNRNVLAPAAPLVRKDYLXAHQTAENIA

SEQ ID NO: 5251 - protein, 390 aa, Wolbachia endosymbiont of Drosophila melanogaster
MSKIIEIRAPKTLGGESVTEGIVKIKKGIGEAVKVDDLIFEIETDKTALELTAEASGQITEFLIKEDDVISPDQLLAKLSMGEVKEEARKEDKSESAAKKDAPSARKIMEENAISAESVKGTGMGGRITKADVIGHMNKAEQPAIKQYELPKSVVNGEQREERVKMSKIRQVIAARLKASQNTAAILTTFNEIDMKNVMDLRAKYKDAFEKKYGIKLGFMSFFIKAAVQALKEIAEINAEISGDEIIYKHYYDVGVAVGTDKGLVVPVIRGADQMSFAEIELTLVALGKKAREGKLQVSEMEGATFTISNGGVYGSLLSTPIINPPQSGILGMHSIQNRPVAVGNAVEIRPMMYIALSYDHRIVDGKGAVTFLVKIKNYIEDPNRLVLEV

SEQ ID NO: 5252 - protein, 247 aa, Prochlorococcus marinus subsp. marinus str. CCMP1375
MFAKSFPLNPFLESVADRIRERVKGLTGVESLELAPDLKNIYGKTDGEDFFIFNELHQSRGFRKLHIETAVFEPSLEILHVVFFPDPAFDLPIFGVDLIAVPQGISAAIVDLSPVRDKLPRTIENQLAQIEIPSFEKVRKLPDWGDIFSSHVQFITPIGAEENGFFLDLVDKFLTILIDYSESIEPDLDDSPFTIERIEGQMYYCLQQKQNDKTRNVLAKAFSPNWANQYIEMVLFDMPVHTKNLDN

SEQ ID NO: 5253 - protein, 130 aa, Oryza sativa
  unsure (1)..(130): unsure at all Xaa locations
DTTVATLQGLKSTAVMPVARRSGNSSLGNVSNGGRIRCMQVWPIEGMKKVETFCYLSPMTVEDLLKHIEYLLRYKWVPCLEFRQXVGSRYRENHRTRXYYDGRYWTMWKLPMFRGTDATQVLKELEEAKK

SEQ ID NO: 5254 - protein, 348 aa, Vibrio vulnificus CMCP6
MSHNWKKILVSPSASIRSVLRTIDQQALKLALVVDEQNKLLGTVSDGDIRRAILRDASLEDSVDLVMNTQPTTADVSMSRDNILSLMERKELHAIPILSNGIVIGLETLHGLLHKPEYANPVFLMAGGFGTRLKPLTDNCPKPLLKVGERPILETVILSFIRSGFSNFYISTHYLPEMIHEALGDGSRWGVSIQYIHEETPLGTGGALGLLPDSLPDLPVIVMNGDILTKINFEDVLEFHNKNDSKATMCVREFEYQVPFGVIEAQDFKITGIVEKPTYRFHVNAGIYVLNKSLITSVAKGEYLDMPTLFEQQIGRDIHVFPFHEYWLDIGRMDDYKRAQVDILTLGL

SEQ ID NO: 5255 - protein, 906 aa, Ralstonia eutropha JMP134
MNLSDIPVVSATPTTTTATTCPYCGVGCGVRATVRADGQVEIAGDAEHPSNHGRLCVKGSALGETVDLQGRLLHPKVRHEDGTLEQVSWDHALDTVAQGFSRIVREHGPDAVALYVSGQLLTEDYYVANKLMKGFIGTANIDTNSRLCMSSAVAGHKRAFGEDLVPGNYEDLELADLVVLVGSNTAWCHPILFQRLSKAKEARPEMKIVAIDPRRTATCELADLHLPVRAGTDVWLFNGLLSYLAREGKADTAFVAASTAGLDDALQATVDCSDPKAVARACKLDVEDVLAFYRLFADTEKVVTAFSQGVNQSSAGTDKVNSIINCHLLTGRMGRAGMGPFSLTGQPNAMGGREVGGLANMLAAHMELANPLHREIVQDLWQSPVMADQAGLKAVDLFNAIEQGRVKAVWVIATNPVVSLPDADQVRRALAKCELVVSSDIIERTDTNDAAHVLLPALGWGEKDGTVTNSERRISRQRAFLPAPGEARADWRVLCDVAQRMGFAGFDYAGPHEIFDEHARLSAWRNDEAPRAFDIGGMAGMDKDSYDTFEPLQWPVVAGSAAGTRRLFENGRYAHPDGLARFVATRTRAPAHAPDDDYPLILNTGRVRDQWHTMTRTGKSAKLADHLPEPFVDMHPQDALLCGVGEGKLARVATRWGAMVARVRHGGGIPRGSVFVPIHWNGQFSSDARVGALVNPVVDPVSGEPEFKHTPVSVEPFGVNWHGFVLSRRELPADTLTYWTRVQGKRFQRYEFAGREAIVDRAAWARSLLGVTDPEADWLEYEDRSAGTYHAGYVVNDRLEACVYVATRPELPSRSWLAELFGRDRLEDADRIGLLMGQPIEKGADAGPTVCSCFGVGRNTICDAVRKHGLTTPAEITACVKAGGNCGSCVPELKKLLVEVRVAEVA

SEQ ID NO: 5256 - protein, 106 aa, Triticum aestivum
MSRRYDSRTTIFSPEGRLYQVEYAMEAIGIMSDANILINTARLHAQRYALSYQEPIPVEQLVQSLCDTKQGYTQFGGLRPFGVSFLFAGWDKNHGFQLYMSDPSGN

SEQ ID NO: 5257 - protein, 743 aa, Magnaporthe grisea 70-15
MASLKDIGDTLSKGKSYVMHSQGDKISDLARNTVTPDEKGRQTTDAGVRITNPDDWLRVTSNDQIGPSLLEDQIAREKIHRFDHERIPERVVHARGTAAHGKFTLHKSIEHLTTAGVLTDTSRETPVFLRFSTVLGSRGSADTVRDVRGFAVKFYTPEGNWDIVGNNIPVFFIQDSMKFPDVIHAGKPEPDNEVPQAQSAHNNFWDFMYQHSEATHMFMWAMSDRTIPRSYRMMQGFGVNTYTLINAKGERHFVKFHFTPELGVHSLVWDEALKLAGQDPDFHRKDLMEAIANGAFPRWKFGVQVLPESREHEFDFDILDATKVWPEDLIPVDYIGTLELNRNIDEFFPETEQVAYCTSHVVPGIGFSDDPLLQGRNFSYFDTQISRLGINWEELPINRPVCPVLSFNRDGQSRHTITKGKVNYWPNRFGVNAPADGVKEGGYVEHATKVQGIKARTKSAKFLDHISQAQLFFNSMSDVEKRHMLAAFSFELDHCEEEVVYNNLVSRLTQIDIGLAQQVAEMVGAQIPDKATKENKGIKAKGLSQFDFLPENPTIASRKVAILIADGYDSVQFRAVKAALSAAQAIPLVIAPRRSPIYAAGETKGSSGAGLKPDHHLEGFRSTMVDAVYVPGGAESIKTLSKNGRALHYVREAFGHLKAIGASGEGVELVKLAVTLPEVTVSSADVMESYGVVTVRNVQADSLKEVVDLAKGGKDFLDQFFHSIAMHRNWAREADGLNSQVAY

SEQ ID NO: 5258 - protein, 234 aa, Mycobacterium tuberculosis H37Rv
MSRAALDKDPRDVASMFDGVARKYDLTNTVLSLGQDRYWRRATRSALRIGPGQKVLDLAAGTAVSTVELTKSGAWCVAADFSVGMLAAGAARKVPKVAGDATRLPFGDDVFDAVTISFGLRNVANQQAALREMARVTRPGGRLLVCEFSTPTNALFATAYKEYLMRALPRVARAVSSNPEAYEYLAESIRAWPDQAVLAHQISRAGWSGVRWRNLTGGIVALHAGYKPGKQTPQ

SEQ ID NO: 5259 - protein, 510 aa, Antithamnion sp.
MNNKSISPIILMILDGWGHSTNAKGNAIHEANTPIIDKLWDNYPKTLLSASGEHVGLPHKQMGNSEVGHTTIGAGRIINQDLVKISKSIKNKEFFNNYQLHNIYKYSCEKNSKVHIVGLCSNGGVHSHINHLKALIQISKQYKVMTCLHLITDGRDTLPKQAKLFVKEIIDIIDENYNTEICTISGRYYSMDRDCRWSRTEKAYKAMVENSCNQNSSSDILSIIDKYYEQNISDEFLPPTKISMHNIVHNDSLIFFNFRPDRIRQLLHSFAKPNFKGFQRKTIKNLMLTTFTEYDSTLSIPTVFPNEPKKNFLGQIISNSGLKQLRLAETEKYAHVTYFFNGGIEEPFPGENRELIASPKVETYDLPPEMSAYQLTNSLIEAINKQLYQFIVINYANPDMIGHTGNMNATIEAIEIVDQCIEKVLHTIEDTNNILIITSDHGNADYMLTDENKPCTSHSINPVPFILINNRQKKQTNLHSHGSLADIAPTILDILNINIPNEMNGKSLIT

SEQ ID NO: 5260 - protein, 246 aa, Bacillus subtilis subsp. subtilis str. 168
MKGVILAGGNGSRLMPLTKAVNKHLLPVGPYPMIYWSIMKLQEAGIKDILLISQKEHMPQFYKLLGNGEELGVTITYQVQPAASGISDGLSYAKRFTKKESFILLLGDNIFEDSLKPYTERFEQQGKGAKVLLKEVDDPERFGIAEIDEKNKRIRSIIEKPEQPPTNLCVTGIYMYDAEVFSYIEQISPSKRGELEITDVNNLYIENSQLTYDVLSGWWVDAGTHESLYLASQLVHQALRKGQDEK

SEQ ID NO: 5261 - protein, 393 aa, Porphyromonas gingivalis W83
MRSGFATRAIHGGAIENAFGCLATPIYQTSTFVFDTAEQGGRRFAGEEDGYIYTRLGNPNCTQVEEKLAMLEGGEAAASASSGIGAISSAIWVCVKAGDHIVAGKTLYGCTFAFLTHGLSRYGVEVTLVDTRHPEEVEAAIRPNTKLVYLETPANPNMYLTDIKAVCDIAHKHEGVRVMVDNTYCTPYICRPLELGADIVVHSATKYLNGHGDVIAGFVVGKEDYIKEVKLVGVKDLTGANMSPFDAYLISRGMKTLQIRMEQHCRNAQTVAEFLEKHPAVEAVYFPGLPSFPQYELAKKQMALPGAMIAFEVKGGCEAGKKLMNNLHLCSLAVSLGDTETLIQHPASMTHSPYTPEERAASDISEGLVRLSVGLENVEDIIADLKHGLDSLI

SEQ ID NO: 5262 - protein, 285 aa, Anabaena variabilis ATCC 29413
MTVKHLAIAPEGKKSLRLNWTNVAFFTTVHALALLAPWFFSWSALGLLLFLHWLFGSIGICLGYHRLLSHKSFQVPKWLEYAIATIGALAMQGGPIFWIGGHRQHHAHTEDVNLDPYSSQRGFWWSHMLWILYPRSEFFDYEIYQKYAPDLARQPFYRWLDRYFLLLQIPFGLLLYAIGGWSFVIYGVVLRAVLLWHSTWFVNSATHMWGYRTFNADDNARNLWWVSIVTYGEGWHNNHHTFPNVAKAGFQWWEVDVTWWSIKLLQTLGLAKKVVLPPSQRMNQG

SEQ ID NO: 5263 - protein, 560 aa, Crucihimalaya himalaica
MASSTALICDTEAWKDLKGHVEDIKKTHLRDLMSDANRCQSMMVEFDGLLLDYSRQCATVETTDKLLNLAKAAQLSEKISRMFNGEHINSTENRSVLHVAPRAPKDAVIKADGKNVVPEVWNVLDKIKEFSEKIRSGSWVGATGKPLKDVVAIGIGGSFLGPLFVHTALQTDPEALECARGRQLRFLANIDPVDVARNINGLNPETTLVVVVSKTFTTAETMLNARTLREWITTALGASAVAKHMVAVSTNLALVEKFGIDPNNAFAFWDWVGGRYSVCSAVGVLPLSLQYGFSVVEKFLKGASSIDQHFQSTPFEKNIPVLLGLLSVWNVSFLGYPARAILPYSQALEKFAPHIQQVSMESNGKGVSIDGLPLPYETGEIDFGEPGTNGQHSFYQLIHQGRVIPCDFIGVVKSQQPVYLKGEVVSNHDELMSNFFAQPDALAYGKTPEQLQKENVSENLIPHKTFSGNRPSLSLLLPELTAYNVGQLLAIYEHRVAVQGFVWVINSFDQWGVELGKVLAAQVRKQLHSSRTQGKALEGFNYSTTTLLKRYLETSSEPQM

SEQ ID NO: 5264 - protein, 401 aa, Arabidopsis thaliana
MATKRSVGTLKEADLKGKSVFVRVDLNVPLDDNSNITDDTRIRAAVPTIKYLMGNGSRVVLCSHLGRPKGVTPKYSLKPLVPRLSELLGVEVVMANDSIGEEVQKLVAGLPEGGVLLLENVRFYAEEEKNDPEFAKKLAALADVYVNDAFGTAHRAHASTEGVAKFLKPSVAGFLMQKELDYLVGAVANPKKPFAAIVGGSKVSTKIGVIESLLNTVDILLLGGGMIFTFYKAQGLSVGSSLVEEDKLDLAKSLMEKAKAKGVSLLLPTDVVIADKFAPDANSKIVPATAIPDGWMGLDIGPDSIKTFSEALDTTKTIIWNGPMGVFEFDKFAAGTEAVAKQLAELSGKGVTTIIGGGDSVAAVEKVGLADKMSHISTGGGASLELLEGKPLPGVLALDEA

SEQ ID NO: 5265 - protein, 444 aa, Glycine max
MATIVSIKARQIFDSRGNPTVEVDLTCSDGTFARAAVPSGASTGIYEALELRDGGSDYLGKGVSKAVDNVNTIIAPALVGKDPTQQTAIDNLMVQQLDGTVNEWGWCKQKLGANAILAVSLAVCKAGAAVLKVPLYKHIANIAGNKKLVLPVPAFNVINGGSHAGNKLAMQEFMVLPVGASSFKEAMKMGVEVYHNLKSVIKKKYGQDAVNVGDEGGFAPNIQENKEGLELLKTAIAKAGYTGKVVIGMDVAASEFYKEDKTYDLNFKEDNNDGSQKISGDALKDLYKSFVTEYPIVSIEDPFDQDDWEHYAKLTAEVGTNVQIVGDDLLVTNPKRVQKAIDTKACNALLLKVNQIGSVTESIEAVRMSKKAGWGVMASHRSGETEDTFIADLSVGLATGQIKTGAPCRSERLAKYNQLLRIEEELGAEAVYAGANFRTPVEPY

SEQ ID NO: 5266 - protein, 266 aa, Gossypioides kirkii
LSVEEIEVAPPQKNEVRVKIHFTSLCHTDVYFWEAKGQNPLFPRILGHEAGGVVESVGEGVKDVQLGDHVLPIFTGECNECPHCLSEASNMCDLLRINTERGGMLHDGKTRFSKDGKPIYHFLGTSTFSEYTVVHVGQVAKINPEAPLDKVCVLSCGMSTGFGATVNVAKPKKGGSVAVFGLGAVGLAAAEGARVCEASRIIGIDLNPNRFEEAKKFGCTEFVNPKDHDKPVQEVIAEMTGGGVDCSIECTGSIQAMISAFECVHD

SEQ ID NO: 5267 - protein, 405 aa, Arabidopsis thaliana
MPLSLQSPPCATLSASIRKGRWKTLAAGFSVTPLPAVNFSLRRSIPRILASASSSSSPASSSLEAGENNELNAVSAFSEIVPDTVVFDDFERFPPTAATVSSALLLGICGLPDTIFRNAVDMALADSSCAGLETTESRLSCFFNKAIVNVGGDLVKLVPGRVSTEVDARLAYDTNGIIRKVHDLLRLYNEIDVPHDRLLFKIPATWQGIEAARLLESEGIQTHMTFVYSFAQAAAASQAGASVIQIFVGRLRDWARNHSGDTEIESAIKSGEDPGLALVKRSYNYIHKYGYKSKLMAAAVRNKQDLFSLLGVDYVIAPLKVLQSLKDSPAIPDDEKYSFVRKLTPETATHYHFTNKELVKWDQLSLASSMGPASVELLSAGVEGYANQAKRVEELFGKIWPPPNV

SEQ ID NO: 5268 - protein, 213 aa, Wolbachia endosymbiont of Drosophila melanogaster
MEIFLDSVDLNEIKGLKEFIDGITTNPSLIAKSGRKDKYEDLVREICSIIKGPVSVEVVADSHEEMITEGLNLAKIADNVVIKLPLTHEGLISCKKLWTEHKIPVNITLCFSPGQALLAAKVGACFISPFVGRLDDISYDGLSLIEDICTIYSNYGFDTKVLVASVRSPAHVIEAARLGADSITVPAKVLRQLVNHPLTDQGLAIFEKDWGVK

SEQ ID NO: 5269 - protein, 637 aa, Microbulbifer degradans 2-40
MAKQIINVPDIGGADNVDIIEICVAVGDTVSAEDSLLVLESDKASMEVPSPVSGKVVGILVKEGGKVSEGDAIFEIEAEGAADAPAAEPAAAPAAAPAPEAAAPAASSEQLVKVPDIGGSENVEVIELCVAVGDEVAEGDSIIVLESDKASMEVPAPASGKVVSFAIKEGDKLSEGDDILVLEVSGGAAAPAAAPAESAPVAAAPAPAPAASGGVTDVNVPDIGGSENVEVIEVCVAEGDEISEGDSIVVLESDKASMEIPSPASGKVVSITVKEGDKVSEGAALLKLEIVGAAPAAAPAPAAAPAAPQAPAKPVEQPVKTTQELHPAEVSATTGEVYAGPAVRKLARQLGVNLSEVKPTGPRKRHTKDDVREFVKTVMKQRSTGGAAVTGGSGIPAVPAVDFSQFGEIEMQKMSKIKKVTAAAMVRNWLNVPHVTQFDDADITELEAFRKNMKAEAEAAGVKLTPLPFLLKACAAALKAEPSFNVSMHPDGEHIVQKKYIHIGMAVDTPNGLVVPVIRDVDKKGLFELAAETVALAKKARDGKLMPKDMQGGCFTISSLGPIGGTGFTPIVNAPEVAILGVSKADIKPRWNGKEFEPRQMLPLCLSYDHRAINGGDAGRFFTFLSAVLSDVRRLLL

SEQ ID NO: 5270 - protein, 198 aa, Azoarcus sp. EbN1
MTARLVLASNNAKKAVEMTTLLAPLGIEVLPQSAFDIPEADEPHPTFVENALAKARHAAALSGLPAVADDSGLCVAALGGAPGVQSARFAGEPKSDARNNALLVERLAGSADRRAFFYSVVALVRHADDPRPLIADGEWHGTILYAPRGANGFGYDPLFFLPELGQTAAELDAQLKNTLSHRGAAMRHLLARLSTAPL

SEQ ID NO: 5271 - protein, 448 aa, Streptococcus pneumoniae TIGR4
MREYDIIAIGGGSGGIATMNRAGEHGAKAAVIEEKKLGGTCVNVGCVPKKIMWYGAQIAETFHQFGEDYGFKTTDLNFDFATLRRNREAYIDRARSSYDGSFKRNGVDLIEGHAEFVDSHTVSVNGELIRAKHIVIATGAHPSIPNIPGAELGGSSDDVFAWEELPESIAILGAGYIAVELAGVLHTFGVKTDLFVRRDRPLRGFDSYIVEGLVKEMERTNLPLHTHKVPVKLEKTTDGITIHFEDGTSHTASQVIWATGRRPNVKGLQLEKAGVTLNERGFIQVDEYQNTVVEGIYALGDVTGEKELTPVAIKAGRTLSERLFNGKTTAKMDYSTIPTVVFSHPAIGTVGLTEEQAIKEYGQDQIKVYKSSFASMYSACTCNRQESRFKLITAGSEEKVVGLHGIGYGVDEMIQGFAVAIKMGATKADFDATVAIHPTASEEFVTMR

SEQ ID NO: 5272 - protein, 357 aa, Populus balsamifera subsp. trichocarpa
MGSLETERKIVGWAATDSTGHLAPYTYSLRDTGPEDVFIKVISCGVCHTDIHQIKNDLGMSHYPMVPGHEVVGEVVEVGSDVTKFKVGDVVGVGVIVGSCKNCHPCKSEIEQYCNKKIWSYNDVYTDGKPTQGGFAESMVVDQKFVVRIPDGMSPEQAAPLLCAGLTVYSPLKHFGLKQSGLRGGILGLGGVGHMGVKIAKAMGHHVTVISSSDKKREEAMEHLGADEYLVSSDVESMQKAADQLDYIIDTVPVVHPLEPYLSLLKLDGKLILMGVINAPLQFVTPMVMLGRKSITGSFIGSMKETEEMLEFCKEKGLASMIEVIKMDYINTAFERLEKNDVRYRFVVDVAGSKLIP

SEQ ID NO: 5273 - protein, 979 aa, Bacillus cereus ATCC 14579
MNNNMVHITIDGKKYTAEPGSTILGVINENGIEHPQICYVPEVDPIQTCDTCIVEVDGKLMRSCSTIATEGMNIERASVRAKEAQTEAMDRLLENHLLYCTVCDNNNGNCKLHNTAELMEIEHQKYPYEPKVDVSEVDMTHPFYRYDPNQCIACGQCVEVCQNLQVNETLSIDWEAERPRVIWDEGVNINDSSCVSCGQCVTICPCNALMEKTMLGEAGFMTGLKPDILEPMVDLIKEVEPGYSGIFAVSEVEAAMRDTRTKKTKTVCTFCGVGCSFEVWTKGRKILKVQPSSDAPVNAISTCVKRKFGWDFVNSKERITKPLIRKNGTFVESTWEEALNVVANKLGAIKEEYGKGSIGFISSSKITNEDNYVIQKLARQVFGTNNIDNCSRYCQSPATDGLFRTIGMGGDAGTIKDIAQSGLVIIVGCNPTEGHPVLATRIKRAHKLHGQKLIVADLRKTEMAERSDVFISPKQGTDQVWLMAVTKYMIDQGWHDQEFINENVNFFEDFKESLEEYTLEYAEEVTGISKETLIQMAEMIRDADGTCILWGMGVTQNTGGSDTSAAISNLLLATGNYRRPGAGAYPLRGHNNVQGACDMGTLPGWLPGYQHVTNEMERAKFETAYGVKIDSEPGLNNIEMLHAIDEGKMKAMYLVGEDMALVDSNANHVHEVLSSLDFFVVQDVFLSKTAQYADVVLPAAPSLEKEGTFTNTERRVQRLYQVLPTLGDAKPDWWIVQEVANKLGANWNYSHPSEIFAEMASLSPLFSQANYEVLEGWNSFHWGSFDGTNTPLLFQDGFNFPDKKARFAIADWVRPAEFPAEFDLHINNGRMLEHFHEGNMTNKSTGIQTKVPGVFVEISPDLAKERGVKTGSLVRLVSPFGALKLRALVTDRVKANELYLPMNSTDNETAINFLTGPAVDVRTNTPAYKQTKVRMEVLEVDGENPMPKANPRNKKRHPQAGIEVHRKWARPGYVHLTDK

SEQ ID NO: 5274 - protein, 392 aa, Wolbachia endosymbiont of Drosophila melanogaster
MDHVVNAYNRLDTPIVRGEGAYLFDKDGKKYLDFAAGISTTSLGHCHPYITDKLKEQSSSLWHCSNIFTIPEQERLAEHLTTLTFADKVFFCSSGLEATEAAIKFIRRYFYSKGQAKRNRIITIEGGFHGRSIAAISAGGNEKSREGFAPLLSGFDKVPRNNIKALEEKINNEIAAVFLEPIQSEGGVYPLDVEYLQKVREITKAQGIILCFDEVQCGYGRIGSLFHYQNVGIEPDMLTCAKAMGNGFPVAACLVKDYIAEAITPGTHGSTYGGNPLAMTVGNAVLDIMLKEGFFDHVKRISKYLKEKLLLLAKEFPEMILEVRGEGLLMGIELATLVADKIISRSLDKGLIITRVLNNKVVRVTPPLIIEDEHVNAACNMLYDLFLKIKGI

SEQ ID NO: 5275 - protein, 164 aa, Zea mays
  unsure (1)..(164): unsure at all Xaa locations
VRVAARGGGGAFGXAHRAAAFPVGVAXFLKPAVAGFLLRMGLDXLVGAVAXPEPWGGXGGSLVSRSIGVLVSLLAXVDVLLLGGGLIYPFCWARGCSVGCSLVGEGRLGLAPSLLGVAWAVGVSLLLPAGFVVAGRFAADAGSAIGPGPAVPGGWVGLGVGPGA

SEQ ID NO: 5276 - protein, 482 aa, Glycine max
MTGSLAARLVLRRCRSPASQFFFRREASWPATERTTKDVVTSPPKELPAFDYSPPAYSGPSRDEIIAKRREYLSPSIFHNYKSPLNVVEGKRQYLFDDKGRRYLDAFGGIATVCCGHCHPDVVEAIVEQTKRLQHSTVLYLNHAITDFAEALAAKLPGNLKVAFFTNSGTEANELAILIAKLYTGSHDIISLRNSYHGNGGGTMGTTAQSIWKYNVVQSGVHHAVNPDPYRGLFGSDGEKYVRDVQEIINFGTSGNVAAFISEAIQGVGGIVELAPGYLPAAYDIVRKAGGLCIADEVQTGIARTGSHFWGFEAHGVVPDIVTIAKSIGNGIPLGAVVTTPEIAKALTRRSYFNTFGGNPVCTAAGLAVLRVIEKEKLQENAFVVGSYLKERLNALKDKYELIGDVRGRGMMLGVELVSDGKLKTPAQSETLHVMDQMKELGVLIGKGGYYGNVFRITPPLCFTKEDADFLVDAMDYTFSRM

SEQ ID NO: 5277 - protein, 391 aa, Wolbachia endosymbiont of Drosophila melanogaster
MTISPILPVYSPVNINFSHGKGIYLYDVDGERYVDFHSGIAVSSLGHTNSRLISALKLQGEKLWHISNTYNIPAANNFAEKLINNSFADTVFFSNSGSEAVECGLKIARIYQNGKGNKNRHRILTFHGAFHGRTFLTCATNDKQKFSELLNPYIDWCDNIEPNIESVKKAISSGIGVILIEPIQGQGGIKVMNEVFMKELRRLCDENDILLFFDCVQCGAGRTGKLFAYEHIGVEPDICALAKGIGGGFPLGACLATENAAKYMAVGMHGSTFGGNPLATSVGNAVLEELLSPGFLKNVEIRGKYLKNKLEDLASKFPIIEEVRGKGLMLGIKVKADNQKFAEELSHRGLLTVGVTSDNVVRILPPLIITEKEIDEGIEILTQYLSEKSSD

SEQ ID NO: 5278 - protein, 474 aa, Prochlorococcus marinus str. MIT 9313
MAQFEKLSPPSQGTAIRFVNGQPVIPNEPIIPFIRGDGTGVDIWPATQRVLDAAVTKAYQGVRRIEWFKVYAGDEACDLYGTYQYLPEDTLEAIRTYGVAIKGPLTTPIGGGIRSLNVALRQIFDLYSCVRPCRYYKGTPSPHKRPQDLDVIVYRENTEDIYMGVEWEADDPVGKTLREHLNTVVIPANGKLGKRQIPEGSGIGIKPVSKHGSQRHIRKAIQHALRLKGDKRHVTLVHKGNIMKFTEGAFRDWGYELATSEFRDVCITERESWILGNLENDPQLSIQANARMIEPGYDSLTPERKASIDAEVHGVLDAIGTSHGNGQWKAMVLVDDRIADSIFQQIQTRPQEYSILATLNLNGDYISDAAAAMVGGLGMAPGANIGENAAIFEATHGTAPKHAGLDRINPGSVILSGVMMLEFLGWQEAADLITKGLSAAIANQQVTYDLARLMDPPVDPVSCSGFSEAVISHF

SEQ ID NO: 5279 - protein, 381 aa, Zea mays
FGSRKLDAQQKAHVSLPMDTFKSYVLKEPIGVVALITPWNYPLLMATWKVAPALAAGCAAILKPSELASVTCLELAEICKEVGLPPGVLNILTGLGPEAGAPLAAHPDVDKIAFTGSSATGSKIMTAAAQLIKPVSLELGGKSPIIVFEDVDLDKAAEWTIFGCFWTNGQICSATSRLIVHESIATEFLNRIVKWVKNIKISDPLEEGCRLGPIVSEGQYEKILKFISNAKSEGATILTGGSRPEHLKKGFFVEPTVITDVTTSMQIWREEVFGPVLCVKTFSTEEEAIDLANDTVYGLGSAVISNDLERCERITKAFKAGIVWINCSQPCFTQAPWGGIKRSGFGRELGEWGLDNYLSVKQVTQYISDEPWGWYQSPSRL

SEQ ID NO: 5280 - protein, 647 aa, Oryza sativa
MATIGWIRGYRTSLLLTGKWDKPDPFDGRGLLWHLKMYQEDKYSCIDHSTSYLHVQSVRDFPIEKLNAEVVLVRLDSELICNPLGSCSLSLERTVSTIKYLQKAGAKVLLVTSWTPVLQSVYPVLKSTETFADYMSSLLQVKVVPVNGVPGLTSFKPEGWMQNDIILFENLLNFKGENANCNDFSQKLASGAAIFVNDSFSLSHKMLASTVGITRFCHASLAGFHFEEELMQLRKITDTTRRPFIAIIGGSNFLGKAPALNLLASLCDGLFFVGKLSLQIMNGFGIPVPSCFVEKNSTKEVLQLIQTAHNRNIPIYYPTDTWCLNNKNNNHEKLEILDSAELLPGWTPADIGPSTLEKISSLMPLYKKVLWIGPTCFDLTEEFSGGAAQLGRILDKASHDSCDVILVGSAACKAVKGISGSSSKYTTFKNASVVLEFLKGKILPGVAALDKSYPYQIPWNAIFSDSSQPLVVDIGSGNGLFLFQMARDWEGSNFLGLEMNKKLVVRCLRDVASVDKRNLYFVSTNATSTFRSIVSSYPGQLALVTIQCPNPDFNREQNRWRMVRRMLVEAIADLLQPNGKVYLQSDVESVLLRMKEQFMTHGKGQLVVDDDGGGDHQMDNPFGAASDWERHVLARGAPMYRTMLRKV

SEQ ID NO: 5281 - protein, 815 aa, GIBBERELLA ZEAE PH-1
MDESQLQQPRRTYLFGYPLQHSLAPLLHSTIFESLNVPWTYDLIESIDKNDFIPKLKASDCVGAAVTMPHKVAWINECDEVTDEGRAIGAINTVFIRKDEVTGERKYIGTNTDCVGVRESFLQNSPGITEKSKGKPALVIGGGGACRSAVYALYKWLGASEIYLVNRLKEEADAVIESFSGLEDGPKMTYISSLEQAKQLETPVLIVGTIPDFEPSTEGEILARDIVTELVQKEEKGVLLEMCYHPRIVTRLYSLAEDNRWKVIPGTEAMIYQDIANMVKNIFARPKDDSANPAPPEVYNWRIYALAASAALGSSMFGYDSAFIGGTLSLPSFQERFNLASETGTALASLKANIVSTFQGGCFFGVLLCYYMTEKLGRRWVLILCGIIFNLGAIIQLVADGKLSFIYAGRVLTGLAVGASSMIIPVYISESGPPAIRGRLIGIFEIFLQFSQIIGFWVNYGVNIHISPTSDVQWHIPFGLQLAPGTLLVICMLFQPESPRWLLNAGRTDQARKVLQRLRQLPADHAYLNWEIDTVLKQIEEEKSMGADRSFFAKLREVVGPTNRPRLLLGIALMFIQNMSGINALNYYSPSIFKSIGFTGTSVGLLATGIFGIVKASATGLYMIWGVDALGRRQSLMIGSTGAAIALFYLGIYSKLSGSFDVGMVPAEKTPGAYVAIVMVYIFAVFYAISWNGIPWIFCAEIFPMAIRSICLVFTTCAQWLGQFIIVYSTPYMMTDITYGTFLLFACSVVFGLFFAFFLVPETKGISLEDMDVLFSRKGMPRTWRRQTNDVIAQRRAGEEVYSKQGESVVHEEKV

SEQ ID NO: 5282 - protein, 402 aa, Triticum aestivum
  unsure (1)..(402): unsure at all Xaa locations
MGRWRRGGMLSSPMDYLRSCWGPTSSPDGRPRKGVDAAGRQDGLLXWYKDAGQLVAGEFSMAXVVQANNLLEDHSQMESGSLSTTDPDLQGSFVGVYDGHGGPETGRCINDHMFSHLKGYASDQKCMSSXVPSPSTGVKKTRRPEKGRKRRRQEEQQPRSSVARFLCVLARXKTFRFNLVTSXARRGILDXGTVRVLSPDRLAIIVPPFKEVRREMQAMHPDDPHIVILKHNVWRVKGIIQITRSIEDVYLKRPEFNREPLHSKFRLPETFRRPLLSSEPAITVHQIQLTDQFIIFASDGLWEHLSNQKAVELVHSSPRNGIARKLVKAAMQEAAKKREMRYSDLKKIDRGVRRHFHDDITVVVVFFDSNAIAMDAWSRPTVSLRGGGVALPANSLAPFSGS

SEQ ID NO: 5283 - protein, 580 aa, Oryza sativa
MQKADTKQLLHCIMSKTRMDGKVAIVTGGASGIGEAAARLFASCGATVVIADVQDELGEAVAASVAGGGCRYVRCDVTDEAQVEAAVAAAVAEHGRLDVMVSNAGVLLPTGPVVDMDLAALDRVMSVNFRGAAACVKHAARAMVSRGTRGAIVCTASVASCQGGFGPAAYTASKPAVLGLVRAAAGELGRHGVRVNCVSPGGVATPLSCGLTGMSPEEMEAAAEPHNVLRGKVLKAADVAEAMLFLASDQAAFVSGHNLVVDGATTAVNYAVLQSVGLNDVTHFPFGCVHTGGLHFCSLSASGVSRSPPPLSEMGRAPAKRKPSSPPPPPPPGRCHFWLPNKRRHCANTPLPTSQYCGNHLPDSASDAGAPFRRLVPCPVDPSHTVLEENLEAHVGKCPLKKQAAALAAQPFYSKGINSGGGEGGGGVTSAAKRALVHKLTKDELRALIEKIKLAHASAAMAMRDSFLVTDACDNWMRNQVDRKVPYQEKHVTQQASIIGNMEAFGLLQKGDCYGIRNVFLVERRSYKLKWFLGTFGAEGQIWAVDGDHSSPDSSLEVEDSSVEDRCGKAEKSDVEAIMA

SEQ ID NO: 5284 - protein, 598 aa, Prochlorococcus marinus subsp. marinus str. CCMP1375
MTTENIQSEDIKDPELFPCIANGQDRSKFEQFKADSNYLKEPLASELKNESNHFSNDAVQLLKFHGSYQQDNRENRKKGLDKDWQMMLRLRSPGGYIPAELFVALDDLSNRFGNKTLRATTRQAFQMHGIRKENLKEVISTIVKSMGSTLAACGDINRNVMAPAAPYNKGGYPAARKLANEIADLLIPLTAEGTYLELWADGDLTYKICPSKKVQDTRKQQFSKGLFSGDSQEPLYGSTYLPRKFKCAVTVPGDNSVDLLTHDIGLVAFTKNNGELKGCNVYVGGGMGRIHNTETTFARIADPLGYIDAKDVLSLVQSILTLQRDFGNRKLRKNARMKYLLHNKGLKWFKNKLISKYFFKGLQEIHPEPTTRLKDYLGWNKQSKGLYFVGIPLISGRLSGDIKEIIRCVVEKYQLEIRLTPNQDLLLCNIGNYQVSSIKKELAGINIPAPSSMNDISRHAIACPALPLCGLAITEAERFLPELINRIDIQLKKLKIQKSILLRMTGCPNGCARPYMAELALVGSGVNQYQLWLGGSPNLQRLAKPYLQKMHIDKLEATLEPLFINWKQNSLETSFGDYISSLSDQLIMDLLSDSSTAP

SEQ ID NO: 5285 - protein, 446 aa, Tropheryma whipplei str. Twist
MYSCTGFSRRVCTWWKSVMCLIDSVHARQILDSRGTPTVEVEVTLEDGSMGRSAVPSGASTGAFEAHELRDQDNNEYLGKGVTRAVRSVNSEIAPVLIGFDAFDQVGLDHRMIELDGTNNKSRLGANAILGVSLASASAAARAADLSLFRYLGGPSSRILPVPMMNIINGGAHADTGVDIQEFMILPVGARSFSESLRWGCEVYHSLKVQLRESGLSSGLGDEGGFAPALRSNRTALDLILSAIEKAGFSPGIDIVLALDIAASEFCKAPGHYRFEGKDITSDELISYYEGLLSSYPLVSIEDPLDQDDWEGYRTLTTHIGDRVQIVGDDLFVTNTSRLSRGIQSGVANSILVKVNQIGTLTETFDAVDMAAKGGYTAVLSHRSGETEDTTIADMAVATNCGQIKTGAPARGERIAKYNQLLRIEEKLGRSARYAGWLSYPRWQGK

SEQ ID NO: 5286 - protein, 406 aa, Arabidopsis thaliana
MSFNAVTSLFEKYKIDPNQIGRLEVGSETVIDKSKSIKTFLMQLFEKCGNTDVEGVDSTNACYGGTAALLNCVNWVESNSWDGRYGLVICTDSAVYAEGPARPTGGAAAIAMLIGPDAPIVFESKLRASHMAHVYDFYKPNLASEYPVVDGKLSQTCYLMALDSCYKHLCNKFEKIEGKEFSINDADYIVFHSPYNKLVQKSFARLLYNDFLRNASSIDEAAKEKFTPYSSLTLDESYQSRDLEKVSQQIAKPFYDAKVQPTTLIPKEVGNMYTASLYAAFASLIHKKHNDLAGKRVVMFSYGSGSTATMFSLRLNDNKPPFSISNIASVMDVGGKLKARHEYAPEKFVETMKLMEHRYGAKDFVTTKEGIIDLLAPGTYYLKEVDSLYRRFYGKKGEDGSVANGH

SEQ ID NO: 5287 - protein, 305 aa, Burkholderia fungorum LB400
MSTLDEVATLELPFKPPFDWPRLLRFFGGRATPGVEAVEDGAYRRAIEWAGHSGTLSVRLHSRKRCLVASIEGPVSRHADALAAPIAKMFDLHADPKKIGAELAADPWLAPLVEAVPGLRVPGAWSGFELVVRAIVGQQVSVKAATTIIGRLVQRAGGRIEGHPHENTAWRFPTPAALAAVDLAQIGMPGKRVAALQGFAHAVATGDVPLDSSTADADSLRAALLALPGIGPWTVEYVAMRAWRDADAWPAWDLVLMQSICARDPSLVRPTQQRTRTDTWRPWRAYAAMHLWNEVADRAGAARGG

SEQ ID NO: 5288 - protein, 352 aa, Azoarcus sp. EbN1
MTYVQDGNKSELRKAKRQLVTVIDLNKCLGCQTCTVACKNIWTKRPGTEHMRWNNVTTYPGKGYPRDYERKGGGFLRGEPQPGVLPTLIDSGDDFQFNHKEVFYEGKGQTVHFHPTSKSTGKDPAWGYNWDEDQGGGKWPNPFFFYLARMCNHCTNPACLAACPTGAIYKREDNGIVLVDQERCKGHRHCVEACPYKAIYFNPVSQTSEKCILCYPRIEKGIANACNRQCPGRVRAFGYLDDTTSHVHKLVKKWKVALPLHAEYGTGPNIYYVPPMGARGFGEDGEITDKTRIPLDVLEGLFGPEVKRVLAVLHTERENMRAGRGSELMDLLISKKWSDRFGGFTNDPLTQS

SEQ ID NO: 5289 - protein, 484 aa, Pseudomonas syringae
TDTLTRDNGAVVGDNQNSQTAGAQGPVLLQDVQLLQKLQRFDRERIPERVVHARGTGVKGEFTASADISDLSKATVFKSGEKTPVFVRFSSVVHGNHSPETLRDPHGFATKFYTADGNWDLVGNNFPTFFIRDAIKFPDMVHAFKPDPRTNLDNDSRRFDFFSHVPEATRTLTLLYSNEGTPAGYRFMDGNGVHAYKLVNAKGEVHYVKFHWKSLQGIKNLDPKEVAQVQSKDYSHLTNDLVGAIKKGDFPKWDLYVQVLKPEELAKFDFDPLDATKIWPDVPEKKIGQMVLNKNVDNFFQETEQVAMAPANLVPGIEPSEDRLLQGRVFSYADTQMYRLGANGLSLPVNQPKVAVNNGNQDGALNTGHTTSGVNYEPSRLEPRPADDKARYSELPLSGTTQQAKITREQNFKQAGDLYRSYSAKEKTDLVQKFGESLADTLTESKNIMLSYLYKEDPNYGTRVAEVAKGDLSKVKSLAASLKD

SEQ ID NO: 5290 - protein, 212 aa, Methylobacillus flagellatus KT
MSHLEAASLTLVGGTVWEALVVRAALRVGESILIHGGVGGVGHVAIQVAKAMGARVFTTVREANFEFARTLGADVVIDYEKEDYVDAIMRETGGHGVDVVFDTIGGNTLSRSPDTLAQLGRIVTIVDTSLPQNLVQAWGKNASYHFVFTRQNRGKLDELSALIERGQLRPHIGAVYSLADIPLAHALLETPNNGLRGKIAIAVEPSSHTESA

SEQ ID NO: 5291 - protein, 470 aa, GIBBERELLA ZEAE PH-1
MAPSTIADFQDVPCHQAYTPIKPIHREGALMHRSLVQHPYMVESAQGIELKLSTGQTIIDGCGGAAVALIGHGREEVIHAITEQARKVSYVHTQSYTTAPAEELANVLLQGNPYGLEKAFFVGSGSEAVESALKLARQYHYEKGGLEKVHIISRRQCYHGNTMATMSISTNIARRAPYHGFLYPNVSHVSPAFAYHYKDSSESEDQFTARLLVELEEEFLRVGPQKVAAFIAETVVGATSGCVAAPAGYFQGVRALCDKYDVVMILDEIMCGIGRTGTFFAFEQEGVVPDITTVAKGLGGGYAAIAGVLIHKRVVDVLRQGSAAFNHGHTYQAHPISCAAALAVQRIVRRDNLVERCAEMGLVLEKMLKEDLSGCRSVGDIRGRGLFWGVEFVKDRQSKQPFDPAAKFGLLVQQLAFEKGVALYPGGATIDGVKGDHILLAPPFTVTEGSGGGGKNSLLGLTTAHKNMTI

SEQ ID NO: 5292 - protein, 213 aa, Zea mays
TATRYLLTVIGELKRILVQTTGLEPERQRLFFRGKEKSDREFLHTAGVKDGAKLLLLEKPAPANIEQKVEPVIMDESMMKACAAVARVRAEVDRLSAKVCDLEKNVLAGRKVDDKEFVVLTELLMIQLLKLDGIEAEGEARAQRKAEVRRVQSLVETLDKLKARNANPFSDHNNAVSVTTQWETFENGMGSFSAPPPHVPSEQVNTDWEQQFD

SEQ ID NO: 5293 - protein, 315 aa, Magnaporthe grisea 70-15
MAAATQKSCLQKLEEMLDVDVDDMDADYIRSMPIKPHDQTSNQAFVDVALAQESNKDLVFQVATEMKGSDWLAVYTRIAVLMCKKNLDLISGRVLLQTSPSKAYDTAATLAHARLYDAEFTRAGVPRDRFCIKIPSTGPGLNAAKVLQGEGISTLGTALFSVVQAVACSQAGCLSISPYFNGHFISVEEAMAAAEMGCQSATLSREILTKLAETPYDANTQPGEGRPKPPHAYNAPEPLPARLQPLLKHDPLTEGWDGSSPSTDVDYLADGGAALQAAIEADPATQKRVRDALEFFVDAEERSRKRIETVMAAVA

SEQ ID NO: 5294 - protein, 492 aa, Helianthus annuus
MDPYKYRPSSAYNAPFWTTNYGAPVYNNDSSLTVGTRGPILLEDYHFVEKLANFDRERIPERVVHARGASAKGFFEVTHDISALTCADFLRAPGVQTPVIVRFSTVIHERGSPETLRDPRGFAVKFYTREGNFDLVGNNFPVFFVRDGMKFPDMVHSLKPNPKSHIQEDWRILDFFSHHPESLHMFTFLQDDVGVPQDYRHMDGSGVNTYTLINKTGKTHYVKFHWRPTCGVKCLLEDEAIKVGGMNHSHATKDLYDSIADGNYPEWKLFIQTMDPDHEDRFDFDPLDVTKTWPEDILPLQPVGRMVLNKNIDNFFAENEQLAFCPAIIVPGIYYSDDKLLQTRIFSYADTQRHRLGPNYLQLPANAPKCAHHNNHHDGFMNFMHRDEEVIYFPSRYDPVRHAEQSPIPPVMLSGKRNKCVIEKENNFKQPGERFRSWDPDRQERFIRRIVGALSDPRVTHEVCTIWVSYWSQADKSLGQKIASRLNVKPSY

SEQ ID NO: 5295 - protein, 492 aa, Helianthus annuus
MDPYKQRPSSAYNAPFWTTNAGLPVYNNTASLTVGNRGPILLEDYHLIEKLANFTRERIPERIVHARGASAKGFFEVTHDITHLTCADFLRAPGVQTPTIVRFSTVIHERGSPETIRDPRGFATKFYTREGNFDIVGNNFPVFFTRDAMAFPDVIHAFKPNPKSHIQEDWRILDFLSHHPESLNTMTFWLDDVGIPTDYRHMEGSSVNTLTLVNKEGKIHYVKFTWKPTCGVKCLMDDEAIKIGGANHSHATQDLYDSIQAGNFPEWKLYLQVIDPDHEDRLDFDPLDGTMTWPEDIIPLQPVGRMVLNKNIDNFFAENEQLAFNPGLVVPGIYYSDDKMLQGRIFAYSDTQRHRLGPNYLQLPVNAPKCAHHNNHYDGNMNFMHRDEEVDYFPSRYDRVQHAKQYPINSRQVTGTRDRTVIPKYNDFKQPGDRYRSWDPARQERFIVRMCKMLSDPRVTHELRSIWISYWTQADQSLGQKIASRLNVRPNY

SEQ ID NO: 5296 - protein, 511 aa, Oryza sativa
MAVGTVPDSQDLPRRYGGRVTTFVVLSCITAGMGGVIFGYDIGVSGGVTSMDGFLSMFFPEVYRRMKGTSVSNYCKFDSELLTAFTSSLYIAGLLTTFLASSVTARCGRRPSMVIAGSAILAGSAIGGTAVNVSMVILGRVLLGVGLGFGNQAVPLYLSEMAPPLHRGAFSNGFQLCVGIGAVTARLTNFFTQKIRQGWGWRVSLAVAAVPGGLLTLGALFLPETPNSLLQQGRDKRRVRVLLTRIRGVSDVEDELEDIVAANSDKANSSRGLQMIVTQRQYRPQLVMAIMIPFFQQVTGINAISFYAPVLLRTIGMGESASLLSVVVTGLVGTSSTFVSMFLVDRYGRRTLFLVGGAQMLVSQLMIGGIMATQLGDHGQVSKTCALVLIFLIAVYVAGFAWSWGPLGWLVPSEVFPLEVRSAGQSITVAVNFLMTTAVAQLFLATLCRMRAGIFFFFAAWLVAMTAFVYLLLPETKGLPIEQVRRLWAQHWFWRRFVDTASNGEQAKLDC

SEQ ID NO: 5297 - protein, 492 aa, Helianthus annuus
MDPYKQRPSSAYDTPFWTTNAGAPVYNNTASLTVGNRGPILLEDYHLIEKLANFTRERIPERIVHARGASAKGFFEVTHDITHLTCADFLRAPGVQTPVIVRFSTVIHERGSPETIRDPRGFATKFYTREGNFDIVGNNFPVFFTRDAMAFPDVIHAFKPNPKSHIQEDWRILDFLSHHPESLNTMTFWLDDVGIPTDYRHMEGSSVNTLTLVNKEGKIHYVKFTWKPTCGVKCLMDDEAIKIGGANHSHATQDLYDSIQAGNFPEWKLFLQVIDPDHEDRLDFDPLDGTMTWPEDVIPLQPVGRMVLNKNIDNFFAENEQLAFNPGLVVPGIYYSDDKMLQGRIFAYSDTQRHRLGPNYLQLPVNAPKCAHHNNHYDGHMNFMHRDEEVDYFPSRYDRVQHAQKYPINPARVTGTRDRTVIPKYNDFKQPGERYRSWDPARQERFIVRMCKMLSDPRVTHELRSIWISYWTQADKSLGQKIASRLNVRPNY

SEQ ID NO: 5298 - protein, 236 aa, Zea mays
  unsure (1)..(236): unsure at all Xaa locations
PCIAVQLVSLSKSLAAAGGAADLDDGAARSPAPNDGGDSDSSDHDPFHADADADDDGRLPPAGSYEVIELGEEEILAPHVHSCKVCGKGFKRDANLRMHMRGHGEEYKTAAALAKPAAAAAATEQSSSSSSARCFYSCPFVGCKRNREAXHRSFQPLKTGVCVKNHYRRTHCDKSYTCRRCNVXKRFSVLADLRTHEKHCGRDRWVXCSCGTSFSRKDKLFAHVAAFDGHAPALPP

SEQ ID NO: 5299 - protein, 431 aa, Prochlorococcus marinus subsp. marinus str. CCMP1375
MKRVLAIILGGGKGSRLYPLTKMRAKPAVPLAGKYRLIDIPISNCINSNITKMYVLTQFNSASLNRHLAQTYNLSSPFAQGFVEVLAAQQTPESPSWFEGTADAVRKYQWLFQEWDVDEYLILSGDQLYRMDYSLFVEHHRETGADLTVAALPVDGAQAEGFGLMRTDNDGNIREFKEKPSGEALKAMAVDTSRFGLSPDSAKERPYLASMGIYVFSRSTLFDLLNKYPSYKDFGKEVIPEALSRGDALKSYVFDAYWEDIGTIGAFYESNLALTQQPTPPFSFYDEKFPIYTRARYLPPSKLVDAQITDSIVGEGSILKSCSIHHCVLGVRSRIESDVVLEDSLVMGSDFYESAEERIALRKGGGIPLGVGQGTTVKRAILDKNTRIGENVTIINKDRIEEADRADQGFYIRNGIVVVVKNASILDGTII

SEQ ID NO: 5300 - protein, 243 aa, Glycine max
MLGKTRKVSARGEAVAANYAFGPSEDDVIIKHRLLTRTTTTRGDPPLKKLQKKFTTFVSEVDKDEDINYNDCEKLARAFLQELTTFEIPLLKSKAIVEANVREKENFNELKEEMNRQILLAQSDIEDLKKQLEESKVERRHKEECEAIRKLIAMQPPRSETMKVISELEKEIAALDAENTAGSRLLELRKKQFALLLHVVDELQNTIEEEQKSLVEEMRMATEELKNGMVDTNGGAEAMAIDQ

SEQ ID NO: 5301 - protein, 174 aa, uncultured marine gamma proteobacterium EBAC31A08
MNKFYIFGLLFFTLNAFSCSDLLDTDMRVLDSAESRNLCEFEGKALLVVNVASRCGYTYQYAGLQKLYESYKDEDFLVIGIPSRDFLQEYSDESDVAEFCSTEYGVEFPMFSTAKVKGKKAHPFYKKLIAESGFTPSWNFNKYLISKEGKVVSTYGSKVKPDSKELISAIEGLL

SEQ ID NO: 5302 - protein, 181 aa, Zea mays
  unsure (1)..(181): unsure at all Xaa locations
MASSMLSSATMVASPAQATMVAPFNGLKSSAAFPATRKANNDITSITSNGGXRVNCMQVWPPIGKKKFETLSYLPDLTDSELAKEVDYLIRNKWIPCVEFELEHGFVYREHGNSPGYCDGRYWTMWKLPLFGCTDSAQVLKEVEECKKEYPNAFIRIIGFDNTRQVQCISFIAYKPPSFTG

SEQ ID NO: 5303 - protein, 355 aa, Mycobacterium bovis AF2122/97
MAGIGSAISAANALVAGPTTALAADRRRRGVDGYRGAVRRECAGIPTDQRAGGRVSRAVCRGPNLGWRVVRGRRDRQRHVGTRSAQCRQCAHPGIVGRPLIGDGANGGPGQPGGPGGLLYGNGGHGGAGAAGQDRGAGNSAGLIGNGGAGGAGGNGGIGGAGAPGGLGGDGGKGGFADEFTGGFAQGGRGGFGGNGNTGASGGMGGAGGAGGAGGAGGLLIGDGGAGGAGGIGGAGGVGGGGGAGGTGGGGVASAFGGGNAFGGRGGDGGDGGDGGTGGAGGARGAGGAGGAGGWLSGHSGAHGAMGSGGEGGAGGGGGARGEAGAGGGTSTGTNPGKAGAPGTQGDSGDPGPPG

SEQ ID NO: 5304 - protein, 470 aa, Exiguobacterium sp. 255-15
MVVGEFAQETDLLVIGAGPGGYVAAIRGAQLGLKVTIVERENVGGVCLNVGCIPSKALITAGHNFQHAKGSDSMGITSENVAVDFSKVQSWKQSVVNKLTGGVGGLLKGNNVETVVGEAYFQSEDTVRIINEDSSTPYKFKKCIIATGSTPIELPAFKWSKRVLSSTGALNLPELPKKLIVIGGGYIGMELGTAYANFDTEVVILEGTKDILSGFEPAMTQVVKKKLKQKGNITIHNEALAQSVEETEEGVKVTFEVKGETQTVEADYVLVTVGRRPNTSDLGLEMAEVKVSERGLVEIDDQCRTSNENIYAIGDIVPGPPLAHKASFEAKIAAEAAAGHPAYLDYSAIPAVVFTDPELATVGYTEAQAKEEGLDYIASKFPYAANGRALALNEPDGFLKMITRKADGLLIGAQIAGTGASDMIAEMGLAIESGMTAEDIALTIHAHPSLGEIAMETAEVAIGSPIHIMK

SEQ ID NO: 5305 - protein, 425 aa, Gloeobacter violaceus PCC 7421
MLITSIEAHEILDSRGNPTVEAQVALENGTTGSAIVPSGASTGEKEAVELRDSDPKRYGGKGVLSAVANVNDSIAPEIIGMEVTDQRSIDRKMIEIDGTANKATLGANAILAVSMAVARTAALSLGLPLYRYLGGTNASLLPVPCMNVINGGKHADNTVDFQEFMIAPHNAPNFAEALRMGAETFHALKSILRGKGYSTGVGDEGGFAPDLKSNEEAVEVILLAIEKAGYRPGEDISICLDPATSEMWKDGKYLFFKSDQSTKTSEEMVDLWASWAGQYPIVSLEDGMGENDWEGWKMLTDRIGATVELVGDDLFCTNAKILAEGIEKGVANSILIKLNQIGSVSETLDTIELAVKHNYKCFVSHRSGETEDTTIADLTVATAAGQIKTGSGCRSERVAKFNQLLRIERQLGEAARFAGKSAFAR

SEQ ID NO: 5306 - protein, 437 aa, Methylobacillus flagellatus KT
MPISLLPLTLLFSLCIVPLPVSAGEGAPQALAVDSVWVAISGALVFMMQAGFAMLESGMTRAKNAVNVMMKNYMDLAVGALLFWLVGYGLMFGSNPSGWIGTDHFALAHGDDWGASMLFFQVMFAATAATIVSGAMAERTNFIAYLLGACGIMALIYPVFGSWAWNEHGWLKQMGFIDFAGSTVVHSVGAWCALAGIMVLGPRLGRFGSKGEVHMIPGHNLSLVAMGGFLLWFGWFGFNGGSTLAAGVEIGPILLNTHMAGAAGAVGALLVALAMRRPILMAYVVNGSLGGLVAITAGCASMDVPFAVLTGFIGGIVTMLGVWALEKLRLDDVVGAVAVHGFSGVWGTVAAGLFLKDNMFDLNQVLVQMIGVAVAFVWVFLSALLMYGLLARTIGLRVSTMHEQRGLDITEHGEVGYPEFNREAAYQPEHVQHLSRL

SEQ ID NO: 5307 - protein, 423 aa, Kluyveromyces lactis
MRVIRQLHTSKRLLQSLVDKQKYQATTYARPNHLVLTRGKNAILYDDVNNKEYIDFTAGIAVTALGHANPEVAEIMYKQSKKLIHSSNLYYNEECLKLSENLVEATKSFGGQYDASRVFLCNSGTEANEAALKFAKRYGILKSPSKQGIIAFQNSFHGRTMGALSVTSNPKYREPFGSLIPGVEFLNINDELTKLDQQVSSLKEKTAGLIVEPIQGEGGVFPIPLDSLVGLKKICEDHDIIVIYDEIQCGLGRSGKLWAHSYLPKEAHPDIFTTAKALGNGFPIAATVTNDKVNDILKVGDHGTTYGGNPLGSAVGNYVVNVIAEQKFLDEVNKKGEIITNRLRKLQERFPEHIKDIRGKGLMIGCDFDEAPAKIVDAARDSGLLIITAGKTTVRFVPALTIEDNLLEKGLNIFEKAVEKVYS

SEQ ID NO: 5308 - protein, 289 aa, Lactococcus lactis subsp. cremoris
MKGIILAGGSGTRLYPLTRAASKQLMPIYDKPMIYYPLSTLMLAGIKDILIISTPTDTPRFKELLQDGSEFGINLQYAVQPSPDGLAQAFIIGEDFIGDDSVALILGDNIYHGPGMSKMLQNAAAKEKGATVFGYHVPDPERFGVVEFDKDMNAVSIEEKPEEPKSNYAVTGLYFYDNDVIEIAKSIEPSPRGELEITDVNKAYLERGDLSVELMGRGFAWLDTGTHESLLEAAQYIETVQRMQNMQVANLEEIAYRMGYITEEDVRTLAQPLKKNEYGQYLLRLIGDK

SEQ ID NO: 5309 - protein, 549 aa, Lotus corniculatus var. japonicus
MGHRHLYNTTPLFEGEPDQNWNHMHTDQHYVNLGRTSTAENGSYFYPVENVSIDSTSFPSHWNPATRSNGYASSSLNIEVPPHQSDTSGASNDHFIHSSSAGAFFAVSNNCVPQPPAANYDRPPFQVDGGFIDLTMGSGRGPHKRKSPGIPSVYERGGSSRYFNAGSSTDVPISSESRPEKPNIDSQYMPWDHVPMTSTVRGAGHSIKGESSLRNVRSRSALDLESNLSRTHLPSNHSHNSYSTIPPVDHSSMMDLSGQISTSLTGDWSQMNISPANGRVLLPDAGAYGLESSHFLAGSGATASNASVDVGSFHHEFGTSRNPTGPQSFHNLTQTARGIRSNYSQRSAPTFRASSSTHLGHVTPLDDGLPMVAESYSSRHQRPLSSIGWRNSDRNGRARISSERYRSLANEAGLHGRISPEVFMIVDRASMYGSRNMLDQHRDMRMDIDNMSYEELLALGERIGHVNTGLSEDSFSQCMTETIYCSSEQGQDEGSCVICLEEYKNMDDVGTLKTCGHDYHVNCIKKWLSMKKLCPICKASVMPEDKMNK

SEQ ID NO: 5310 - protein, 543 aa, Solanum demissum
MEVNLRGLSNSFSFSFSRAPWDAIDGKLMVVKVHRAYRNGGENIEWRKPVPWVFLVALYFILIEFTLDYILMKYAFFTIPQNQVEGAQQGASSMISSKLETVATQGKAPTCLANENVLKVNIPPMNVFQARKPYTITKQREKWTEEEHQRFLEALKLYGRAWRQIEEYVGSKTAIQIRSHAQKFFAKIARDSGNDGDESLNAIDIPPPRPKKKPLHPYPRKIADSSVANKAVSSQPERSPSPNASGRDSCSPDSVLPAIGLGAAEYSAAEQQNSRFSPVSCTTDAHTANVISAENDGESMSSNSNTVEEIHVALKPVAASTCPITNSEFMECDIVHMENSCNGEKLAVEPPSASIKLFGKTVFVPDANNLAPPALYNTEKEIEISNEDVLHAFQANQANSPFILAMVPGNMIPPASWLSQNMLENNPESTAAFPAATISWWSWYQDLIYRSISSCGQTAVGTAAHCQGPKDEEPQREGSSTGSSIGSASEVDDGNRSSETVESKCTTKSKGFVPYKRCLAERDGKSSGAVLEERESRRVRVCS

SEQ ID NO: 5311 - protein, 314 aa, Microbulbifer degradans 2-40
MSTTANLAFVFPGQGSQKVGMLADFYQEGSVFKQTFDEAQAALGYDLWALIQSGTQDELNMTEVTQPALLACSVALWRKWQAEGGAQPAYMSGHSLGEWSALVCAGVVAFEDALRLVRSRGKYMQEAVPAGVGAMAAIIGLDDAAVEAACATAAEGGDIVSPVNYNSPGQLVIAGMKAGVEKAMELCKEAGAKRALPLPVSAPFHTALMKPAADKLAAEVEAVEFNAPLIPVVHNVTAKTEADANTIKALMIQQISAPVLWVDCVNELVALGVEKTVECGPGKVLSGLNKRIQKSLAVSATETTDLFAEALANA

SEQ ID NO: 5312 - protein, 371 aa, Populus alba
MSFLQQQETHNQSPALALDGLYCEEDGFGEDYSCGLDDETSQVYDQNVKKEQNLSSVLLEQDLFWEDSELLSLISKEKETHVVFDSVGSRDGSLMVVRREAVEWFLRVKAHYGFSALTGVLAVNYFDRFISSSRFRRDKPWMGQLAAVACLSLAAKVEETQVPLLLDLQVEDAKYVFEAKTIKRMELWVLSTLHWRMNPVTSISFFDHIIRRLGLKTHMHWEFLWRCERLLLSVISDSRFMSYLPSILATATMLHVIKEVEPRNQLQYQTQLMAVLKTNEDEVNECYRLILEQPGSQNQRHKRKYLSTPSSPNGVIDASFSSENSNDSWAVASSISSSSSVPQFKRSRAQVQQMRLPSLNRMCVDVLSSPH

SEQ ID NO: 5313 - protein, 225 aa, Arabidopsis thaliana
MEDLDHEYKNYWETTMFFQNQELEFDSWPMEEAFSGSGESSSPDGAATSPASSKNVVSERNRRQKLNQRLFALRSVVPNISKLDKASVIKDSIDYMQELIDQEKTLEAEIRELESRSTLLENPMDYSTRVQHYPIEVLEMKVTWMGEKTVVVCITCSKKRETMVQLCKVLESLNLNILTTNFSSFTSRLSTTLFLQADEEESSAVEAKIQMAIAAYNDPNCLINF

SEQ ID NO: 5314 - protein, 253 aa, Rhodopseudomonas palustris CGA009
MTEPGETTHFGYRDVPLDEKQTLVNDVFHSVAGRYDLMNDLMSGGMHRLWKDVMITTLNPPRDDTPFRLLDVAGGTGDISFRAAKASGAGFHSTVCDINTDMLEVGRQRAVERNLDDKVDFVEGNAESLQFDDRSFDAYTIAFGIRNVPRIDLALKEAYRVLKPGSRFLCLEFSSVDVPGLSKLYDLFSFKVIPEIGRVVTGDADSYQYLVESIRKFPKPYDFAEMMRDAGFARANWQVMSGGIVALHSGWRL

SEQ ID NO: 5315 - protein, 158 aa, Glycine max
MAEEHRCQAPRFCANNCGFFGSPATQNMCSKCYRDFQLKEQQSSNAKMVLNQSLVPSPPPAVISQPSSSSSAAVDPSSAVVDDAPREAEEVKAPQQNRCMTCRRRVGLTGFKCRCGMMLCGTHRYPEQHACEFDFKGMGREQIAKANPVVKGEKLDKI

SEQ ID NO: 5316 - protein, 577 aa, Zea mays
KAFFPPSRIAPSLSLRSSRRRRVRPPNPNGVRGRSSNLPLPRGPAATRAAAAAAAPLRRGGLATAGQPPWSRAFAAGATSPWATPPFGAARRAPASTEGVADAPPTSLSLAARAATRAAAAAAAPLRRGGLATACQPARSLAFAAGDARLAVHVASRCRQAFSGRGTRAMATMAKKSVGELTEADLEGKRVFVRADLNVPLDENQNITDDTRIRAAIPTIQYILSKGAKVILSSHLGRPKGFTPKFSLAPLVGRLSELLGIQVQKADDVIGPEVEKLVAALPNGGVLLLENVRFYKEEEKNDPEFAQKLASLADLYVNDAFGTAHRAHASTEGVTKFLQPSVAGFLLQKELDYLVGAVSSPKRPFAAIVGGSKVSSKIGVIESLLEKCDILLLGGGMIFTFYKAQGLPVGASLVEEDKLELATSLLAKAKEKGVSLMLPTDVVIADKFAPDANSQIVPASAIPDGWMGLDIGPDSVASFNAALDTTKTVIWNGPMGVFEFDKFAVGTEAVAKKLAELSGKGVTTIIGGGDSVAAVEKVGVADVMSHISTGGGASLELLEGKELPGVVALNEAATVTV

SEQ ID NO: 5317 - protein, 432 aa, Exiguobacterium sp. 255-15
MGLFEFKLPDIGEGIHEGEIVKWFVKAGDTVKEDDILLEVQNDKAVVEIPSPVDGTVKEVKVDEGIVAVVGDVLITFDVEGEGSAPSEEEAPEQPKAADNAKDVQDTDKKVEDKPNEVQIHKSERVIAMPSVRKYAREKGVDIREVQGSGDNGRVVKEDIDAFANGGQSSTAPAAEEKAPAAQASASKSEVKPYVAAQPELETREKIKGIRKAISKAMVNSKHTAPHVTLMDEVDVTNLVALRKNFKEVAAAQGTKLTYLPFVVKALTAAAKKYPAINASIDDVNEEVVYKNYFNIGIAADTDNGLVVPVVKDADRKSIFGLADNINDLAGKARDGKLSGDEMKGGSITITNIGSAGGQWFTPVINHPEVAILGIGRIAEKAVVKNGEIVAAPVLALSFSFDHRLIDGATAQNALNLVKRLLNDPQLLIMEG

SEQ ID NO: 5318 - protein, 206 aa, Chlamydophila pneumoniae J138
MKIVIASSHGYKIRETKTFLKRLGDFDIFSLSDFPDYKLPQEQEDSITANALTKGIHAANHLGCWVIADDTMLRVPALNGLPGPLSANFAGVGAYDKDHRKKLLDLMSSLESLVDRSAYFECCVVLVSPNQEIFKTYGICEGYISHQEKGSSGFGYDPIFVKYDYKQTFAELSEDVKNQVSHRAKALQKLAPHLQSLFEKHLLTRD

SEQ ID NO: 5319 - protein, 481 aa, Nicotiana tabacum
MASATASHTLCGIPATSSSTTNKAIAPSSARFLAKTPLRRLGFAGAAADSLFTNHVATKLRSLKSSSKPIRGVASMAKKSVGDLTAAELKGKKVFVRADLNVPLDDNQNITDDTRIRAAVPTIKHLMANGAKVILSSHLGRPKGVTPKYSLAPLVPRLSELLGIQVVKVEDCIGPEVEKLVASLPEGGVLLLENVRFYKEEEKNEPEFAKKLASLADLYVNDAFGTAHRAHASTEGVTKFLKPSVAGFLLQKELDYLVGAVSNPKRPFAAIVGGSKVSSKIGVIESLLEKCDILLLGGGMIFTFYKAQGLSVGSSLVEEDKLELATSLLEKAKAKGVSLLLPSDVVIADKFAPDANSKIVPASAIPDGWMGLDIGPDSVKTFNDALDTTKTVIWNGPMGVFEFDKFAVGTEAIAKKLADLSGKGVTTIIGGGDSVAAVEKVGVASVMSHISTGGGASLELLEGKVLPGVIALDEADAPVAV

SEQ ID NO: 5320 - protein, 354 aa, Pseudomonas sp.
MFPKNAWYVACTPDEIADKPLGRQICNEKIVFYRGPEGRVAAVEDFCPHRGAPLSLGFVRDGKLICGYHGLEMGCEGKTLAMPGQRVQGFPCIKSYAVEERYGFIWVWPGDRELADPALIHHLEWADNPEWAYGGGLYHIACDYRLMIDNLMDLTHETYVHASSIGQKEIDEAPVSTRVEGDTVITSRYMDNVMAPPFWRAALRGNGLADDVPVDRWQICRFAPPSHVLIEVGVAHAGKGGYDAPAEYKAGSIVVDFITPESDTSIWYFWGMARNFRPQGTELTETIRVGQGKIFAEDLDMLEQQQRNLLAYPERQLLKLNIDAGGVQSRRVIDRILAAEQEAADAALIARSAS

SEQ ID NO: 5321 - protein, 481 aa, Haemophilus somnus 129PT
MNIQHLLKTQAYINGEFISAKNHRTFPVINPANQQVICEIACCGKEETELAIKSAKQAQVHWKKYTAKERSKILKKWFELIMQHQESLAYLLSLEQGKPLSESRAEIAYGASFVEWFAEEAKRAYGEIIPQVREDHRLLVIKQPVGVVAAITPWNFPNAMITRKAAPALAAGCAIIIKPAPETPLSALALAALAEQAGIPKGIFNVLPTVYAEEVGSVLTRSTDVRKLTFTGSTKIGKILMQQCADTVKKISLELGGNAPSLIFNDADLDRTVDSVIASKFRNSGQTCICTNRIYVQSEIYRAFADKLKQKVRSFIVGDFQQEAVNIGPLINESAVRKIERHIEDALSKGAILTLGGQRHSLGGTFFEPTILENVSQDMLVCHEETFSPLAALIPFDTEEQAISMANDSEFGLAAYVYTQDFSRIWRLSEELECGLVGVNEGIISNEVSPFGGVKQSGLGREGSRHGLDEFLEMKYLCMKV

SEQ ID NO: 5322 - protein, 401 aa, Nicotiana tabacum
MAVKKSVGSLKEADLKGKRVFVRVDLNVPLDENFNITDDTRIRAAVPTIKYLMQHGSHVILASHLGRPKGVTPKYSLKPLVPRLSELLGVEVKIANDSIGPEVEKLVAEIPEGGVLLLENVRFYKEEEKNEPEFAKKLASLADLYVNDAFGTAHRAHASTEGVAKYLKPAVAGFLMQKELDYLVGAVANPQKPFAAIVGGSKVSSKIGVIESLLEKVDVLLLGGGMIFTFYKAQGYAVGSSLVEEDKLDLATSLMEKAKAKGVSLLLPTDVVIADKFAADANSKVVPASEIPDGWMGLDIGPDAIKSFGSALDTTKTVIWNGPMGVFEFDKFAAGTEAIAKKLAELSGKGVTTIIGGGDSVAAVEKVGLAEKMSHISTGGGASLELLEGKPLPGVLALDDA

SEQ ID NO: 5323 - protein, 425 aa, Haemophilus somnus 129PT
MAKTIQAIRGMNDCSPTESLLWQWVEEKVRSVLQTYGYSEVRMPIVESTPLFARAIGEVTDVVSKEMYTFWDNDEQLTLRPEGTAGCVRAAIEHGWIYNNEQRLWYMGPMFRHERPQKGRYRQFHQAGVEVFGIANPEIDAELILLTARLWKQLGIFDHVTLQLNSIGSLESRQNYRSALVEFLQQHTDLLSEEEKERLVKNPLRILDTKNQVLQEVLNDAPKLLDYLDQESREHFSQLCDLLDAVGIQYEINPKLVRGLDYYNKTVFEWVTSALGAQGTVCGGGRYDGLVEQLGGHATCSVGFAMGLERLVLLVQEVNKQIVLPSAVDIYVVYFGEKTTLPAFQLAEKIRTELPHLRTMTHCGGGNFKKQFKRADKVGAKFALVIGETEVKTQQVVVKDLLGGAEQLSLALTDVVIYLKQAITQ

SEQ ID NO: 5324 - protein, 394 aa, Bacillus megaterium
MNKKTLKDIDVKGKRVFCRVDFNVPMKDGKVTDETRIRAAIPTIQYLVEQGAKVILASHLGRPKGEVVEELRLNAVAERLQALLGKDVAKADEAFGEEVKKTIDGMSEGDVLVLENVRFYPGEEKNDPELAKAFAELADVYVNDAFGAAHRAHASTEGIAQHIPAVAGFLMEKELDVLSKALSNPERPFTAIVGGAKVKDKIGVIDHLLDKVDNLIIGGGLSYTFIKALGHEVGKSLLEEDKIELAKSFMEKAKKNGVNFYMPVDVVVADDFSNDANIQVVSIEDIPSDWEGLDAGPKTREIYADVIKNSKLVIWNGPMGVFELDAFANGTKAVAEALAEATDTYSVIGGGDSAAAVEKFNLADKMSHISTGGGASLEFMEGKELPGVVALNDK

SEQ ID NO: 5325 - protein, 662 aa, Moorella thermoacetica ATCC 39073
MTAYHSVCPFDCPDACGLLVEVNDGRITGVRGDPEHPYTRGFICAKMRYYGKLVHSPERILTPLKRSGPKGSGLFTPISWTEALETIAGRWQKIMADYGSEAILPYSYAGVMGLLQRNAGHAFFHRLGATELQWTICSPAAEAGWQQVLGATWGNDPETIVASDLVIIWGMDPAATSIHFLSLAQQARKNGALIVVIDAYRTRTAALADEAILVRPGSDAALALGLMQVLVTEEMVDKDFLAAHVLGYEELRDKVLPLYTPDRVAALTGVPVATIVNLARAYGRARAPFIRIGYGFSRHRGGGMAVRVIASLPALVGAYGKHGGGALQSSGTGSAVRLEVVTRPDLRRKPVRALNMVQLGRALTGSLEPPVMSLYVYHGNPAAVAPDQNRILAGLRREDLFTVVHERFLTDTALYADIILPATFSVEQEDLYRSYGHYYVQRSRAILLPPGEAKSNWQTFCLLAQSLGFEEDIFRRSEAEMVAALIKEIKLEAEDREALAGGRPVKLKPAPGFATPSGKIELLPAGAGLPGYREPDDGHIVERYPFQLLTAPAHFALNSNFWQLEELRQRVGGPWVLVNPGDCQCRGLVEGAWAQVANQRGSCLLRIKVSSDVPPGIAVVPGVWWCQHSPGGHNINSVIGDELTDLGGGSTFNDHRVDIRPL

SEQ ID NO: 5326 - protein, 203 aa, Zea mays
GFTAHLPFEAEMKNQDLNTRRSLATPRGVGVMCDFYAVRAENATLWDANGKEYIDFAGGIAVLNTGHLHPKVKAAVSAQLDNFTHTAYQIVPYEGYVSLAERINRLAPIDGLKKSAFFTTGVEAVENAIKIARSATGRSGVIAFSGSFHGRTMLGMALTGKVAPYKLSFGPMPGDIYHVPFPNGTQSITVADSLKALDLLFKI

SEQ ID NO: 5327 - protein, 509 aa, Oryza sativa
MHHLRHVEERRLPYDHEERRLPYDHEERRRPRYVEDIRHPQFLKERHAITDSLHDPFRSRHVTHLPELQHAPPTYYHHVAHTFDERYHQPQVDIVYERAIVEATDREAFLARDYRVPEEIVARSDHVDELYRSYRLATRAMDLHQGPSYVTAAYENPGPAYSESIHQMPVSSTRPNVPVAQCTEIGPRQPYCQLVMVFFAREVETGTCARFVARTRTTRSPLQPTPVPLPSPPSPPSSPLLVRTDGDGRLNYPYLPSAVATSHLHESNSNISSSSSAAAGGIRAAPWEEEAAKNVVSRGTVVRGVLVQQAFQVAVSLTLFAVIGDESDIEQKQPSALVILLQFAIAMFVMDTWQYFMHRYMHINKFLYKHIHSKHHTLVVPYSFGALYNHPLEGLILDTIGGALSFLVSGMTPRTSIFFFSFATIKTVDDHCGLWLPGNILHALFNNNSAYHDIHHQLYGNKYNFSQPFFVIWDKILGTYMPYSIEHRKGGGFESRPVKLNIAEQTKTD

SEQ ID NO: 5328 - protein, 235 aa, Zea mays
MMDCAGGRDPVEDFLLGGAGAGDDGDLVAVFCDDGGLGIEGIHGDACGFEQSNLGKRGRDEPCSSGPTSKACREKMRRDKLNDRFLELSSIMNPGKEAKLDKANILSDAARMVAQLRGEAEKLKESNEKLRENIKDLKEEKNELREEKVRLKVEKDRLEQQVKAMSVAPTGYVPHLPHPASYHPAAFTPFAPPQQAPANKSAPIPAPFPGMAMWQWLPPTIVDTTQDPKLWPPNA

SEQ ID NO: 5329 - protein, 215 aa, Oryza sativa
MAHRVDNEYDYLFKIVLIGDSGVGKSNILSRFTRNEFCLESKSTIGVEFATRTLQIEGQTIKAQIWDTAGQERYRAITSAYYRGAVGALLVYDITKKQTFENIQRWLRELRDHADSNIVIMMVGNKSDLNHLRSVPEEDGQALAEKEGLSFLETSALEALNVEKAFQTILKDIHQIISKKALAAQEAAGSGPPTQGTTINVTDSAVNTKRGCCSS

SEQ ID NO: 5330 - protein, 339 aa, Escherichia coli O157:H7
MSMIKSYAAKEAGGELEVYEYDPGELRPQDVEVQVDYCGICHSDLSMIDNEWGFSQYPLVAGHEVIGRVVALGSAAQDKGLQVGQRVGIGWTARSCGHCDACISGNQINCEQGAVPTIMNRGGFAEKLRADWQWVIPLPENIDIESAGPLLCGGITVFKPLLMHHITATSRVGVIGIGGLGHIAIKLLHAMGCEVTAFSSNPAKEQEVLAMGADKVVNSRDPQALKALSGQFDLIINTVNVSLDWQPYFEALTYGGNFHTVGAVLTPLPVPAFTLIAGDRSVSGSATGTPYELRKLMRFAARSKVAPTTELFPMSKINDAIKHVRDGKARYRVVLKADF

SEQ ID NO: 5331 - protein, 329 aa, Coffea canephora
MCGGAILEGLIPPRNNNDGTRRLSSADLWPSAADFWPNSHLAKPSRSNPTDAPHKATHETCHDPHDEAGGKQQVLPKGAKRQRKNLYRGIRQRPWGKWAAEIRDPRKGVRVWLGTFNTAEEAARAYDKEARKIRGKKAKVNFPNEDSTSYPTCIPSQTQYQQVHIPSPPTFCGPSSSNCKFNQLRVGSSDCSASDCYHANSIDDCARFTNMMGFRNPSEEVSGSGSSDNECFLGHLKQVAKAAAEEEAASVITENDTKDNNKAAESEEYQVEKLSEELLAYESFMKFYQIPYIDGQSAAASANPAQELATSIQLWSFDDVSPANRPMPL

SEQ ID NO: 5332 - protein, 248 aa, Gossypium hirsutum
MAGIAFGRFDDSFSLGTVKAYLAEFISTLVFVFAGVGSAIAYNKLTTDAALDPDGLVAIAVCHGFALFVAVAIGANISGGHVNPAVTFGLALGGQITILTGIFYWIAQLLGSIVACFLLKAVTGGLTVPIHGLGAGVGAIQGVVMEIIITFALVYTVYATAADPKKGSLGTIAPIAIGFIVGANILAAGPFSGGSMNPARSFGPAVASGDFNGIWIYWVGPLIGGGLSGLIYGNVFMNSDHAPLSNDF

SEQ ID NO: 5333 - protein, 406 aa, Thermosynechococcus elongatus BP-1
MGLEWIQPADRLGALPPYVFARLDELKLKARQQGLDLIDLGMGNPDGSAPRPVIEAAIAAFEEPSYHGYPPFEGTAVFRQAITRWYQRRYNVSLDPEGEALPLLGSKEGLTHLALAYVNPGDVVLVPSPAYPAHFRGPAIAGANIYPLILKREKGWLIDLSEIPSDIARQAKVLYFNYPSNPTAAIAPRSFFEEVVAFAREYQILLVHDLCYAELAFDGYQPTSLLEIPGAKEIGVEFHTLSKTYNMAGWRVGFVVGNRHIIQGLRTLKTNLDYGVFSVLQKAAEVALSLPDSYIASVCDRYRQRRDFLIQGLNELGWQLTPTQATMYLWVPVPLGMSSTDFALKLLQETGIVVTPGNAFGEGGEGYVRISLIADCDRLGEALKRMAQANIRFDSLSHSLTPSSHD

SEQ ID NO: 5334 - protein, 319 aa, Glycine max
RNNKVRMIVDCHAKHVRVLQDEKLPFDLTLCGSTLRAPHSCHAQYMANMDSIASLVMAVVVNDNEEDGDTDAIQPQKRKRLWGLVVCHNTTPRFVPFPLRYACEFLAQVFAIHVNKEIELEYQIIEKNILRTQTLLCDLVMRDAPLGIVSESPNIMDLVKCDGAALIYKNKVWRLGVTPSESQIREIAFWLSEYHMDSTGFSTDSLSDAGFPSALSLGDVDCGMAAVRVTAKDVVFWFRSHTAAEIRWGGAKHEAGEKDDGTRMHPRSSFKVFLDVEKARSLPWNEYEIDAMHSLHLILRNAFKDTDSMDLNTKAIAGR

SEQ ID NO: 5335 - protein, 503 aa, Brassica napus
MAITVPRRQLFIGGQWTEPLRRQTLPVVNPATEDIIGYIPAATSEDVELAVEAARKALTRNKGNDWSKASGAVRARYLRAIAAKVTERKSELANLEAIDCGKPLDEAAWDMDDVAGCFEYYADLAQGLDSKQKAPLSLPLDTFKGYVLKEPIGVVGLITPWNYPLLMAVWKVAPALAAGCTAILKPSELASVTCLELADICREVGLPPGVLNILTGLGTEAGAPLASHPHVDKIVFTGSTATGSNIMTSAAKLVKPVSLELGGKSPIIVFDDVKIDKAVEWTMFGCFWTNGQICSATSRLLVHEKIADEFLDKLVKWTKNIKISDPFEEGCRLGPVVSKGQYERVVKFVSNARKEGATVLCGGARPGHLKKGYFVEPAIISNVTTSMEIWRDEVFGPVLCVKTFSTEDEAIQLANDSQYGLAGAVLSNDLERCDRVSKAFEAGIVWVNCSQPCFCQAPWGGTKRSGFGRELGEWGLENYLSVKQVTQYISNEPWGWYKSPSKL

SEQ ID NO: 5336 - protein, 348 aa, GIBBERELLA ZEAE PH-1
MASNNTIPLTMKAAQWRTIRGGIEKNLKLTVNAKLPEDSHSLANGHTLVKVAYASVNHLDYKVAEMPLASLLFTKPVTPGLDYSGTVISTTLEDFGAGERVFGRTELPTGGTMAEYVVVGEEGLAAVPDGVSLRDAACIGICGATNVQYLASVIKPGDKVFINGGSGGVGTFAIQVAKALGCSHITTTCSALNAEFCRALGADETIDYKSEDVLTMLKNREEQFDLVYDTIFGNPSLYWQSHHYLKPEGSYICVGFPPIFQFIRTLICIKLLPRWLGGGKRIFKFQSVVANRQDFEQMAEWIRQGKVKVIVEEGFVLEDAGRAYASLKGGRSRGKIVVRISGEPDGEQ

SEQ ID NO: 5337 - protein, 495 aa, Oryza sativa
MTGIELERQHISNKMHSCTRTRNTYFFLTCVGGKEEEKAAAAAAAVSCSICLDAVVAAGGERSTARLQCGHEFHLEFWAMVRIGSECLLGVTINVFPSGWVGWGMKGRFRAKIADCIGSAFNAKGVMQCPNCRKIEKGNWLYANGSRPTQDVNMDEWAHDEDLYDVSYSEMPFRFHWCPFGRLAQLPSFFDYIEFEICLDIGHAVHDFMGQHMFTEHVAAVSSAPGAAHPCPYVAYLHPLPSLASSSSSHVPERTMDGPAYHDPWHPLAGPSDGRPLQSVQPADFHHNHWAHVPNSYPQPNNNNGVAEQQGVPFGTTRAARVDGDTQRRGSSISPSYFSNGSGSRSRAPNVPPMVPQFMRAHGSISEQYQQSSSSSLFAGAHRSGGMRTAPPPPLPENPAFCLFPPGSSGHNSMETDDAGGNRFYAWERDRFAPYPLMPVDCETNWWSSQQSHGTSEPAPAPRRLFGQWIGVGRSSPENRSPEGSSYRQMHTPRM

SEQ ID NO: 5338 - protein, 404 aa, Haemophilus influenzae R2866
MRLFPKSDKLEHVCYDIRGPVHKEALRLEEEGNKILKLNIGNPAPFGFEAPDEILVDVLRNLPSAQGYCDSKGLYSARKAIVQYYQSKGILGATVNDVYIGNGVSELITMAMQALLNDGDEVLVPMPDYPLWTAAVTLSGGKAVHYLCDEDANWFPAIDDIKAKVNAKTKAIVIINPNNPTGAVYSKELLQEIVEIARQNNLIIFADEIYDKILYDGAVHHHIAALAPDLLTVTLNGLSKAYRVAGFRQGWMILNGPKHNAKGYIEGLDMLASMRLCANVPMQHAIQTALGGYQSINEFILPGGRLLEQRNKAYDLITQIPGITCVKPMGAMYMFPKIDVKKFNIHSDEKMVLDLLRQEKVLLVHGKGFNWHSPDHFRIVTLPYVNQLEEAITKLARFLSDYRQ

SEQ ID NO: 5339 - protein, 510 aa, Glycine max
MFFNQKIVLFKSFALMGTSNLLLFFSLMSLCAMAASKVVLIGNNITLSFDDIEANFAPAVKGSGKYGVLYLAEPLDACAELTNKVEQLPNASSPFALVVRGGCSFEEKVRIAQKAGFKAVIVYDNEEGGILVAMAGNSAGIRIHAVFVSKASGEILKKYAGLTNVEIWLIPTFENSAWSIMAISFISLLAMSAVLATCFFVRKHRIRRERPRASLVREFHGMSSRLVKAMPSLVFTSVLEDNCTSRTCAICLEDYCVGEKLRILPCCHKFHAACVDSWLTSWRTFCPVCKRDARTGLTDPPPSESTPLLSSTPASMASSVLSSARSSLASSSAIQIARTASMASSALPSARSSLASSSAIQIARTASMASSALHSARSSLASSSAIQISRAASQTPSVSRNHSIASTPYVQPSLRSSYHQSPSLSISRSSVDLRNASQRSLASHLNSPCSMGYPSLSSLNSRYMSPHIPSPSNASVSYMGSSSHQQHPLRYSESAASFSPFASTHSLPEC

SEQ ID NO: 5340 - protein, 180 aa, Agrobacterium tumefaciens str. C58
MPVVRGKNIEPLYTAEQIAERNRDMAKHIAGGPTKDLLVIAVLKGSFIFAADLIRALHDSGLAPEVEFITLSSYGAGTVSQGVRIVKDIDSDVKDRDVLLIDDILESGRTLRFAKELLYERGARNVTIAVLLDKKVKRKEDLEADYVGFECPDYFVVGYGMDVAYAFRELPFVGVVTGDA

SEQ ID NO: 5341 - protein, 449 aa, Bacillus firmus
MSNEREMQNKKDQQLESFRVEDEGKKLTTNQGLKVSEDEFSLKAGERGPTLMEDFHFREKMTHFDHERIPERIVHARGFAAHGEFQVYDSMKEFTKAKFLQDPSVKTPVFVRFSTVAGSKGSAETVRDARGFATKFYTEEGNYDLVGNNIPVFFIQDAIKFPDLVHALKPEPHNEIPQAQSAHDTFWDFIANNQESAHMVMWAMSDRSIPRSFRMMEGFGVHTFRFVNEEGKAHFVKFHWKPVLGIHSLVWDEAQKIAGKDPDFHRRDLWESIENGDYPEYELGVQLISEEDEFNFDFDVLDPTKIWPEEEVPVKIIGKMTLNRNVDNVFAETEQVAFHPGHVVPGIDFTNDPLLQGRLFSYTDTQLIRLGGPNFHELPINRPVCPFHNNQRDGYGRQTINKGQVSYHKNSLAANTPQPASEEEGGYAHYQEKVEGRKVRKRSESFKDP

SEQ ID NO: 5342 - protein, 425 aa, uncultured marine gamma proteobacterium EBAC31A08
MSCLVLKILEIFGHLIFELKPRYNIFMKEIIKEYTNYMVPFYAPADFVVKKASGSHVWDLNNKKYIDFTAGIAVTNLGHSNKDLIKILKKQSEELWHLSNLYINEPSVTLARKLCKNSFADKVFFCNSGAESIEAAVKIARKFCSSTVNKNKNEVISFSTSFHGRTMLGIALAKAKHLTDGFAPLPRGIKNHPYNDITNLEKVFSDKTAAVILELVQWQSGITKADKKFIAKIKKLAKKHKALVIIDEVQSGIGRTGTLFAYEQFNITPDILCFAKGISNGFPLGGILTSDKVSKHMSAGSHGTTFGGGPIACAIGNEVIDTISKKSFLNKVLKKEVRFINLLNKINEKHKCFEKITSAGLWVGVEVSKDSKIQIDDLIKKSHHNGLMILKANASTVRFSPSLIIENELVDEGLKIFEKSIISLL

SEQ ID NO: 5343 - protein, 174 aa, Burkholderia fungorum LB400
MSSRRIAVRRSGVHGKGVFAVEPIAAGERLIEYKGERISWKEALRRHPHNPAEPNHTFYFALDSGKVIDGKVNGNSARWINHSCAPNCEAEEIDGHVYVHALRDIAEGEEVFYDYGLVIDARQTNKLKKEYECRCGARKCRGTMLAPPEKEKGAGKSGKSAKKAGTTVKKAKKK

SEQ ID NO: 5344 - protein, 411 aa, Microbulbifer degradans 2-40
MSIFEQRESTIRAYSRVYPVVFKTAINALQTDTTGKTYIDFFAGAGLLNFGHNNPKMKKAMIEYMQKDGVLHSLDMETEAKAAFMQHFTDLILKPRNMPHRMQFTGPTGTNAIEAAMKLARRVTGRSTIVAFNNGFHGMTLGALAATANPYFRGAAGVPLEHVTHAEFNTSNGDISALEAKYCASSANAPAAFMLETIQAEGGVNVANKEWILAVAKLAKKLGALLIVDDIQVGCGRTGSYFSFDDIDIAPDIICLAKGLGGMGTPMAMNLVLPELDDQWSPGEHTGTFRGQNLSFIAGKVALEYFANNQLMSDVKLKTTLMQEALEPLLHSDSTLTLRGKGMIMGLDIGNSERAAAIVQECFKNGLIVASCGVGGQVIKLIPPLTIANAHLTEGLNILIQATRNTMEEAA

SEQ ID NO: 5345 - protein, 446 aa, Cynodon dactylon
MAATIQSVKARQIFDSRGNPTVEVDVFCSDGTFARAAVPSGASTGVYEALELRDGGSYYLGKGVSKAVNNVNSVIGPALIGKDPTAQTEIDNFMVQQLDGTKNEWGWCKQKLGANAILAVSLAVCKAGASIKRIPLYQHIANLAGNKQLVLPVPAFNVINGGSHAGNKLAMQEFMILPTGAASFKEAMKMGVEVYHHLKSVIKKKYGQDATNVGDEGGFAPNIQENKEGLELLKTAIEKAGYTGKVVIGMDVAASEFYSDKDQTYDLNFKEENNDGSQKISGDSLKNVYKSFVSEYPIVSIEDPFDQDDWVHYAKMTEEIGEQVQIVGDDLLVTNPTRVAKAIKEKSCNALLLKVNQIGSVTESIEAVKMSKRAGWGVMTSHRSGETEDTFIADLAVGLSTGQIKTGAPCRSERLAKYNQLLRIEEELGAIAVYAGAKFRAPVEPY

SEQ ID NO: 5346 - protein, 97 aa, Mycoplasma capricolum
  unsure (1)..(97): unsure at all Xaa locations
FGTAHRSHASNXGXXSNIKISAXGFLVEKELKMLSQAXNDSKKPFIAILGGAKVSDKIGVIENLLPKVDKLLIGGGMSYTFLKAQGRSIGKSLLEED

SEQ ID NO: 5347 - protein, 456 aa, Magnaporthe grisea 70-15
MASRPQNIGIKAIEIYFPSQYVEQSELEKFDGVSSGKYTIGLGQTKMAFCDDREDIYSLALTATSNLLKKYAIDTNSVGRLEVGTETLLDKSKSVKSVLMQLFGDNTNIEGVDTVNACYGGTNALINSVNWIEGSGWDGRDAIVVAGDIALYAKGNARPTGGAGCVAMLVGPDAPIVVEPGLRGSFMQHAYDFYKPDLASEYPYVDGHFSLTCYTKALDGAYRAYNKREAQLQNGHANGNGAADSSKTPLDRFDYIAFHSPTCKLVQKSYARLLYHDYLANPDHPAFAEVPGELRDMDYEKSLTDKGVEKAFMALTKKRFQERVNPGIQVATLCGNMYCASVWGGLSSLIGHVDSATLQGKRIGLFSYGSGLAASFLSFRVNGSTETISKALDIPNRLEARRAVQPQTYDDMCEMRKKAHLQKNFTPTGDVSTIVNGTYYLENVDDMFKRTYSVKA

SEQ ID NO: 5348 - protein, 469 aa, Chlorobium tepidum TLS
MQQADTLAAQFDVAVIGSGPGGYEAAIHAARYGLKTCIVEKAVLGGVCVNWGCIPTKALLRSAEVFDLAKNPETFGVNVGNVSFDLAQAVKRSRNVALKSSKGVAYLLKKAAVEVLAGEAVLTGGAGVMVTMPDGSVRMLGAKNIIVATGSTPRVIPGLEPDGKKIITSREALILKEVPKSMIVVGGGAIGVEMAWFYAKAGSKVTIVELMPRMLPAEEAEVSEALKRSFEKAGITVHCGAKLDNVAVSESGVSAELVVEGSAPQTLNASCLLVAVGVTGAIDGLGLDAVGVETERGFIRTDGQCRTSAPGIYAIGDVRGGMLLAHKASAEAAIAVEAIAGKSPEPLSEPLIPRCVYAQPSVASVGLTEEAAVNAGYQVAVGRSQFAASGKANAYGQLEGFVKLVFDAATGKMLGGHLIGHDAVELIGELGLACRYGVTAGGLVNTVHAHPTLSETVREAAFDALQSMG

SEQ ID NO: 5349 - protein, 356 aa, Streptomyces glaucescens
MKALVLAGGAGPRLRPITHTSAKQLVPVANKPVLFYGLEAIAAAGITDVGIVVGDTVAEITEAVGDGSKFGLDVTYIPQRKPLGLGHGVRISRDYLGDDDFAMYLGDNFVVGGIDQPIRAFRTHRPDAHLLLTRVSDPRSFGVAELDERGRVRHLEEKPTHPGSDLALVGVYLFSPAIHEAVRAIEPSWRGELEITHAVQWLIDEGKDVRSTLISGYWKDTGNVTDMLEVNRLVLETVEPRCDGDVDEDSELIGRVRVDEGAVIRNSRVIGPVVVGSGTTITDSYVGPFTSIAEGCLVEDQPSWSSPFVLRNASISGVRRIEASLIGRHVRVTAAPPVPHAHRLVLGDHSTAQISS

SEQ ID NO: 5350 - protein, 163 aa, Cyanophora paradoxa
MIEFSLLTKITLSFTILFLILSIISIIKGWKNRFQFIGVTSFSALLTISFFVFTFVPFTHKLIPGAEKYKVVFDDGANQIVIAVSSKLNQDQLVATLEQAASDLFSPGRLSRNNNSFIIKARALSDSIGTTNNSLYLGELDKILDSNTNDFETKIKIFNDSTL

SEQ ID NO: 5351 - protein, 637 aa, Thermococcus litoralis
MQIITCPYCGAGCRAYVKKELSHPFIIEYVTDINVPNDRGKLCPKGNAMFEYLLSKERLKTPLKAIERGKFVKISWKEAINEIASFIRGYMKDDPNRLMFIAGGKVSNESAYLFQKLARNIGTNNVDNTSHLCHGVSVRAILDANFERNWATYDDIEESNVIILWGANLAETAPLIFRRVLKAKNRSAKIIVIDPRKTKTTKFASIHVRPFPGTDIVLINALINLLLKRRNIKSAHFKASDLEIISKNTPEYAERITGVPVRDIEEIAREIGLARRGIILWGSGIAMHSNGYDVIRSIITLASIVDFKVLPLAGQNNSQGVMDMGVVPNFLPGYRTYDNVYIFREAWKNEELPTEVGLDIPKSIKEAQKRNVSAFYVMGANIALSFPEAEKALRRAEFVIVQDIFPTQTTELADIVLPAAAFLESNGSTTNAERRIQWSSRVKWPPGDAKPDWAILCELGNALGLRGFDFYFPEEILREISTLVPQYANANPRTLMRTPEGVMWNIVPDSQPTKVYVSNKMPLLEPPVMITVRYVGQFQTGTMTKRSPPLNIRWQDLLILVSEEDAQKWGIKDGDRVKLVSENGKYIGTVKVSKTVIPGTIKAPWHEGVNRIMGLKIDEKTGLPQLKACSCKLERVE

SEQ ID NO: 5352 - protein, 401 aa, Bifidobacterium longum NCC2705
MAQWQTLSDRINTVAPSATLAVDSKAKAMKAAGLDVVGFGAGEPNFPTPANVVKAAADACLDPKNYKYTPTPGLPELREAIAAKMLRDSGYEVNADQVVVTNGGKQAVYESFQILLNDGDEVIIPAPYWTSYPEAVKLAGGVPVEVFAGADVNFEPSLEALEAARTEHTKAIIVNSPNNPTGAVWKPETVEAIGRWAVEHHIWVISDEIYEHLNYDDAHTTYIGAAVPECRGQLLVLNGVAKTYAMPGWRVGWMVAPLEVAKAAAKLQGHMTSNVANISQRAALAAVAGPLDEVHEMRKAFDARRRAIVTALNDIEGVNCPTPTGAFYVFADITALLGKPLGPKGTVSDTSADFAAALLDEAHVAAVPGEAFGAPGYLRFSYALADEDLAEGMRRFKEWAN

SEQ ID NO: 5353 - protein, 352 aa, Brevibacterium sp. HCU
MKAFAMKAQGAALEEIELDRPKPMGREVLLKVTHAGVCHTDTHVQDGGYDLGSRGTLDMSTRGVTYPCVMGHETVGEVVEVGEDVTDVAVGDTCLAFPWIGCGECGKCAHGHENACDNGRALGIIQFGGFAEYLLLPDQRYAIDVAGVDPAWAATLACSGVTSYSSARKATATVNPDEPIGVMGVGGVGMMTVAALVALGHKNIIAIDVSDENLASAQELGATLTVNSKNATSHDLVEAAGGQFIAIIDLVNTGDTVALAFDALSRAGKIVQVGLFGGEFVVPTAIMALKGLTLQGNYVGTVEEVREVVELARQGSLPKLPITGGTLNVDGVNDGLERLRTGRARGRTVLTP

SEQ ID NO: 5354 - protein, 180 aa, Streptococcus pyogenes SSI-1
MLEQDIQKILYSENDIIRKTKKLGEQLTKDYQEKNPLMIGVLKGSVPFMAELMKHIDTHVEIDFMVVSSYHGGTSSSGEVKILKDVDTNIEGRDIIIVEDIIDTGRTLKYLRDMFKYRKANTIKIATLFDKPEGRVVKIEADYVCYNIPNEFIVGFGLDYAENYRNLPYVGVLKEEVYSK

SEQ ID NO: 5355 - protein, 447 aa, Glycine max
MQRWKWNRKKPPIFPLLVLILLFFIAFSTLHSEHTIQRIHENPDHVHNHQEVSSATFVKPNLSGHLKQAPEVLDRFSRCNSTVEYSGRKIAWLGDSRHSGHWSARPESCDVFSGKWVFDNVSHPLYNESDCPYMSDQLACHKHGRSDLGYQYWRWQPHNCNLKRWNVKEMWEKLRGKRLMFVGDSLNRGQWISMVCLLQSVIPADKRSMSPNAHLTIFRAEEYNATVEFLWAPLLAESNSDDPVNHRLDERIIRPDTVLRHASLWENADILVFNTYLWWRQGPVKLLWTHEENGACEELDGHGAMELAMGAWADWVSSKVDPLKKRVFFVTMSPTHLWSREWKPGSEGNCYGEKDPIDNEGYWGSGSDLPTMSTVEKILSNLSSKVSVINITQLSEYRKDGHPSIFRKFWEPLRPEQLSNPPSYSDCIHWCLPGVPDVWNELLFHFL

SEQ ID NO: 5356 - protein, 482 aa, Staphylococcus aureus subsp. aureus Mu50
MLVILQLPCHIISKTNRISLLIFIMKKQSKMSLKTFKRRIYVMKTYDLIVIGFGKAGKTLAKYAASTGQHVAVIEQSSKMYGGTCINIGCIPSKTLVHDGLEGKSFEASYNRKNDVVNALNNKNYHLLADDNNIDVLDFKAQFKSNTEVNLLDQHGDIVDSITAPHIIINTGATSIIPNIKGLDQAKHVFDSTGLLNISYQPKHLVIVGGGYIALEFASMFANLGSKVTVLERGESFMPREDQDVVAHAITDLENKGIALHTNVETTELSSDDHHTTVRTNVGNFEADAVLLAIGRKPNTALALENTDIELGDRGEIKVNAQLQTSVPHIYAAGDVKGGLQFTYISLDDYRIIKSALYGNQSRTTDNRGSVPYTVFIDPPLSRVGLTSKEAAAQHYDYTEHQLLVSAIPRHKINNDPRGLFKVVINNENNMILGATLYGKQSEELINIIKLAIDQNIPYTVLRDNIYTHPTMAESFNDLFNF

SEQ ID NO: 5357 - protein, 462 aa, Mesorhizobium sp. BNC1
MSDFDLIVIGAGPGGYVAALRAAQAGMRVACIDERATAGGTCLNVGCIPSKALLSSTEHWAGLKSLADHGIETEAARVDLSRMMARKDKVVSDLTKSIAFLFNKAGVEFIHGRASIAAPGRVTVGVREISSQHILIATGSAPAVLPNVPFDEKLVLSSTGALSLAKVPDRLVVVGAGVIGLEIGQIWSRLGAKVTVVEYLDRILPGMDGETAKNAQRIFARQGIGFMLNAAVEAVVDNGETAEIKIKSRASGKVEKLQADAVLVAIGRKPHTGGLGLEALRVRRDARGFIEVDEQFRTSVPGILAIGDVVPGPMLAHKAEEDAVACIDALAGKPHCAPDYGLVPGVVYTTPEIAGVGLTEDDASAAGRAVLIGKASFLANGRARAIGTTDGFAKVIACAETGKLLGAHILGHGAGELLQELVLALRFGASLNDVAGTSHAHPGMGEAVKEACLSVLDARSLD

SEQ ID NO: 5358 - protein, 281 aa, GIBBERELLA ZEAE PH-1
MTPSLQDAKITFLGGGNMAAAIIGGLLAKNTNKQNIYVSEPWDVNRNKMADLGVRTTADNKEAAADADVVILAVKPQVAKGVCEELSSAWAGRDSLPVVISIAAGITLASIAQWFKGDSGKAPHIVRVMPNTPALVGEGASGLYAAEDVTAAEKELTSALLGSVSKATEWVDKEELLDVVTGISGSGPAYFFAFVEHLISSGVSLGLSEEQATRLATQTCLGAGKMLVESSDEPSQLRKNVTSPNGTTHAALVSFESSGLKEIVNKAVKAAANRAQELGKN

SEQ ID NO: 5359 - protein, 644 aa, Nitrosomonas europaea ATCC 19718
MCGITGVFDTRSTSEIDRNLLHRMNETLTHRGPDEGEVYVESGLGLGHRRLSIMDVSSGQQPLFNEDGSVVVVFNGEIYNFQKLVGELTALGHRFRTHCDTEVIVHAWEEWGERCVERFSGMFAFGVWDRNRQTLFMARDRLGIKPFYYTLLDNGLFLFASELKALLVHPDFDKTFDHRAIEDYFAYGYIPEPKTIFKNAFKLNPGHLLSLQRGQQTVQSREYWDIPFTPHGSLSEEEAAEELILRLRNAVDSHLMSEVPLGAFLSGGVDSSAVVAMMGGLMKEPVNTCSIAFSDPAFDESDYARLVAERYQTRHFTEQVQQDDFDLIDRLAALYDEPFADSSAIPTYRVCELARKRVTVALSGDGGDENFAGYRRYRWHMIEERLRSKLPLGLRKPLFGLLGSVYPKADWAPKFLRAKTTFESLARDSVEGYFHSVSILDNKLRMQLFTRDFYRDLQGYRAVEVLRDYADKSPTKDALSLIQYLDMKTYLVGDILTKVDRASMAHSLEVRVPLLDHELVEWVSGLPASMKLRQQEGKYILKRSLEPYLPNEVLYRNKMGFSVPLASWFRGPLRERVRTALLGNTLAGTGIFDMGFIKKMLDQHQSGRRDYSAPIWTLLMFEAFLRNILSMGNMSYTGQDKKVA

SEQ ID NO: 5360 - protein, 293 aa, Glycine max
MHIQFFNICKKFVCCSHHNIWRQAEIPVKTFHYYHPDTKGLDFAALLNDVKNAPDCSFFLLHPCAHNPTGVDPTEEQWREISYHFQVKNHFPFFDMAYQGFSSGDLDKDAIALRIFLEDGHLIGCAQSFAKNMGLSEHKAGCLSVLCQSIKQVAALKSQLQLMSHAMYSSIPFQGISLVTMILSEPDTEALWRKEIKVMAKRIQTMRTTLRHCLENLHSSFNWEHITDQVGMFCFSGLTPDQVQQMEKLFHIYMTPDGRMSMSGVTSSNVDYLANAIHQVTRIDEEALRSCYV

SEQ ID NO: 5361 - protein, 434 aa, Escherichia coli O157:H7 EDL933
MFDFVCNHMSAKSEWFKNYLQQQPGFEDFFIAVDPQTDLSAVTRPRALPLLTPFQMDDNSTRHLWTTFSDDQIDLNYRSPDVLLAMVDVLLCYLEKGAEYVRLDAVGFMWKEPGTSCIHLEKTHLIIKLLRSIIDDIAPGTVIITETNVPHKDNIAYFGEGDDEAHMVYQFSLPPLVLHAVQKQNVEALCQWAQSLSLPSGKTTWFNFLASHDGIGLNPLRGLLPESEILALVEALQQEGALVNWKNNPDGTRSPYEINVTYMDALSRRESSDEERCARFILAHAILLSFPGVPAIYIQSILGSRNDYAGVEKLGYNRAINRKKYHSEEITRELNDEATLRHAVYHELSRLITLRRSHNEFHPDNNFTIDTVNSSVMRIQRSNAEGNCLTGLFNVSKNIQHVNITGLHGRDLISEVDILGNKITLRPWQVMWIK

SEQ ID NO: 5362 - protein, 784 aa, Triticum aestivum
  unsure (1)..(784): unsure at all Xaa locations
MQVWVDYESDSTQISVFLAPLKNGAKPSTPLVSAKSNLSKVLVEPAYAGFSSSTGTVRSRHYLLGWSFAMDGPAPPIDIGSLPKLPFVGAKPRSKVPDIVLPIANYKPPGLRCSHNRRGAADAASNARRTLAMAPRRFLLLLPVLLVLLGADGFGRGAAQDTDQFAYNGFASANLTLDGLAAVAPNGLLALSNGTSQAAGHAFHPTPLRMRNGAVQSFSVAFVFAIVSNFTVLSDNGMAFVVAPSTRLSTFNAGQYLGILNVTDNGKPDNGVFAVELDTMLNPEFQDMNSNHVGVDLNSLRSVQNHSAGWYDDATGVLNSLRRILGPHLERTVNSDRGTGGIGVSVGALDVTRWTRPLASSTTHTRRVVXDQAEADVPAAAGGLATRDAAGGXGPGGRGDAPRGGTEVLQLPHPGADAPRGMRLVTQFLPGNGAFVRALPIRLSLARLPPLRRRGIEXTEKKSMQEEPVREPFVGRRLYRDVRTSSAVTGAVALSLQFIDTGVCIGRLPHRNLVQLLGYCRRKGELLLVYDYMSNGSLDKYLYSGSKEKPALDWAQRFRIIKGVASGLLYXHEDFEQVIIHRDIKASNVLLDADMNGXDFGLARLYDHGADPQTTHVVGTMGYLAPELARTGKASPLTDVFAFGAFILEVACGRRPVEQAMNDSRLMLVDWVLEHWQKESLLEVVDARLDGNYDAGEVVLALKLGLMCSHPMPGARPSMRQVMQYLEGDMPIPELTPTQMSFSMLALMQSQGFDSFVLSATSDPSSATNTMMTMGTISGLSGGR

SEQ ID NO: 5363 - protein, 247 aa, Spinacia oleracea
MAIAFGRFDDSFSWASIKAYIAEFISTLLFVFAGVGSCIAFAKLTEDAALSPSGLVAVAVCHAFALFVAVSVGANISGGHVNPAVTFGLALGGQITILTGILYWIAQCAGSVAACLLLKASTGGLATPIHSVAAGVGSIEAVVMEIIITFALVYTVYATAVDPKKGSIGTIAPIAIGFIVGANILAAGPFSGGSMNPARSFGPAVASLDFSDHWVYWVGPLVGGGLAGLIYGNVFMQDDHAPLSNEY

SEQ ID NO: 5364 - protein, 86 aa, Salmonella enterica
VDAMRTRIISMRQTLVKELKAEMPDRNFDYLLQQRGMFSYTGLSAEQVDRLRDEFGVYLIASGRMCVAGLNASNVHRVAKAFAAVM

SEQ ID NO: 5365 - protein, 461 aa, Chlamydomonas reinhardtii
MALSMKMRANARVSGRRVAAVAPRVVPFSSASSSVLRSGFALRCLWTSAAWAALASVVEAVKKSVGDLHKADLEGKRVFVRADLNVPLDKATLAITDDTRIRAAVPTLKYLLDNGAKVLLTSHLGRPKGGPEDKYRLTPVVARLSELLGKPVTKVDDCIGPEVEKAVGAMKNGELLLLENCRFYKEEEKNEPEFAKKLAANADLYVNDAFGTAHRAHASTEGVTKFLKPSVAGFLLQKELDYLDGAVSNPKRPFVAIVGGSKVSSKITVIEALMEKCDKIIIGGGMIFTFYKARALKVGSSLVEDDKIELAKKLEEMAKAKGVQLLLPTDVVVADKFDANANTQTVPITAIPDGWMGLDIGPDSVKTFNDALADAKTVVWNGPMGVFEFPQVRQRTVSIANTLAGLTPKGCITIIGGGDSVAAVEQAGVAEKMSHISTGGGASLELLEGKVLPGVAALDEK

SEQ ID NO: 5366 - protein, 692 aa, Clostridium perfringens
MKRIQSTCNYCALACNLDFYTEDGKIKRVVPTPHYPVNKGFSCIKGLNLDKQCTKFNGSKKPLLKMKDGERKAIEWKEAFDLFASKMTAIQEKYGKESVAYISTGQLPTEEMALLGHVGRSYMGINGDGNTRLCMASAVVAYKQSFGFDAPPYTLKDLELSDTIFFIGANPVIAHPIAWGRVRKNKDAKIITIDPRKSETAMNSDMWIDIKTKGDLALFYTLANVLIEKGWINQDYINNYTEGFEDFKAHVKKYTLEDVEERTGISKMRVLELAKIIHEGKRVSFWWTMGVNQSYEAVRTAQAIINLALITGNMGREGTGANSLTGQCNAMGSRMFSNTTALYGGGEYNNKERRKVVADILGMDENMLPTKPTLDYEQIIKGINKGEIKGLWVVCTNPRHSFSNNEEFKKAMKNLDFFVVQDIYEDTDSSKECDLYLPSVPAIKKEGFLINTERRLSALVPVLEKEEDELSDYEILLGIGEALGMGSLLDKWRTPEDAFKLLRECSKGMPCDITGVSYERLRDSKGIQWPCRKGEELESDERRLFEDGKYYTPSGKAKFIFEDVTENPNATNEEFPFNLNTGRGTVGQWHTHTRTREIQAVTNIVSQKAYVDINRKDAEKLDIKENDEVLIHSSNGHTSKFIARLTDNLKEKTLYAPIHYIETNLLTPSVFDPYSKEPSYKTVQVNIEKVRK

SEQ ID NO: 5367 - protein, 275 aa, Bifidobacterium longum NCC2705
MAIQSTIMLNNGTVIPQVGLGVFQTPDGDTTVNAVQTALENGYRHIDTAMIYHNEASVGEGIRRAGVPRSDFFLTTKLWNDDIRARRGKDAFQESLDRLGVDYVDLYLIHWPADGWQQAWDDLQEIYASGRAKAIGVSNFQKHHIDELLTHSDVVPAVDQVESSPQFTNQELIGQLRAKGIHTEAWSPLGGTGGNLLSNPVLAGIGAKYGRSAAQVVIRWHIQRGIVVLPKSTHAERIKQNFEVFDFNLSVDDMTAISAINTGKRNGADPDNFNF

SEQ ID NO: 5368 - protein, 359 aa, Streptococcus pyogenes SSI-1
MKPSIYSLTRDELIAWAVERGQKQFRATQIWDWLYKKRVQSFEEMTNISKDFVSILNDSFCVNPLKQRVVQESADGTVKYLFELPDGMLIETVLMRQHYGHSVCVTTQVGCNIGCTFCASGLIKKQRDLNSGEITAQIMLVQKYFDDRKQGERVSHVVVMGIGEPFDNYKNVMCFLRVINDDNGLAIGARHITVSTSGLAHKIRDFANEGVQVNLAVSLHAPNNDLRSSIMRVNRSFPLEKLFSAIEYYIEKTNRRVTFEYIMLNEVNDSIKQAQELADLTKTIRKLSYVNLIPYNPVSEHDQYSRSPKERVLAFYDVLKKNGVNCVVRQEHGTDIDAACGQLRSKTMKKDREKVTATK

SEQ ID NO: 5369 - protein, 336 aa, Staphylococcus aureus subsp. aureus Mu50
MRAAVVTKDHKVSIEDKKLRALKPGEALVQTEYCGVCHTDLHVKNADFGDVTGVTLGHEGIGKVIEVAEDVESLKIGDRVSIAWMFESCGRCEYCTTGRETLCRSVKNAGYTVDGAMAEQVIVTADYAVKVPEKLDPAAASSITCAGVTTYKAVKVSNVKPGQWLGVFGIGGLGNLALQYAKNVMGAKIVAFDINDDKLAFAKELGADAIINSKDVDPVAEVMKLTDNKGLDATVVTSVAKTPFNQAVDVVKAGARVVAVGLPVDKMNLDIPRLVLDGIEVVGSLVGTRQDLREAFEFAAENKVTPKVQLRKLEEINDIFEEMEKGTITGRMVIKF

SEQ ID NO: 5370 - protein, 479 aa, Triticum aestivum
  unsure (1)..(479): unsure at all Xaa locations
MASSLLRRAAAGCGRCPSPAEAPRRPVSSEAAPEQALPRRLPDLPPFDHGASTFPGMGGAEILEKRKKFLGPSLFYYYQKPLNIEEGKMQYLYDEQGKRYLDXFGGIVTVSCGHCHPDIVKAVQEQTKLLQHTTTIYLHHAIVEFAEALASKMPGNLKVVYFVNSGTEANELAMLMARLYSGNLGMVALRNGYHGGSAGTIGLTGLQTWKYPIPQGEIHHVMNPDPYRGAFGSDAAAYAREVEEHINFGSSGRVGGFIAETFQGVGGTVELAPGYLKSVYDTVRKAGGVCIADEVQSGFGRTGSNYWGFQTQDVIPDIVTMAKGIGNGLPLGAVVTTPEIASVMAQKIQFNTFGGNPVCSAGGLAVLKVLDKEKRQAHCADVGAHLVERLKSLQQKHEIIGDVRGRGLMLGVELVTDRTEKTPAKAETAVLFEKLKDLGVLVGKGGLHGNVFRIKPPMCFSKDDADFLVDAMDYAMSGF

SEQ ID NO: 5371 - protein, 457 aa, Mesorhizobium sp. BNC1
MLYHRAKNSWEQRDQENVFHGFTDLETLNQNGPVVLTHGEGIHVFDVHGKSYMDANSGLWNNVAGFNHKGLIEAICDQARRFPGYHAFFGRIADTTVALSEKLIEISPFPSGRVYYTNSGSEANDTVVKMLWLLHRRNGQPQRRKIITRVNAYHGVTVATASMTGKTYNAEFGLPLPGFLHADCPHHWRYGEPGESEAAFSQRLARKLEELIIKEGPDTIAGMFAEPVQGAGGVIPPSRGYFEAIRPILRKYGIPLIADEVITGFGRTGEMWGGDKYNVEPDAIVASKCITAGYFPMGAIILGPELADALTRACEAAEEFPHGFTSGGNPLGSAIALKALEVIETEGLLDNVRRVSPRFLAGLDRLARHDHAGEARGVGLMGAVELVADKNSKAPLDGALRIPERIANKALEKGLICRPLGQAIVLGPPFIITEGQIGEIFDILEDTMAEVFADVGL

SEQ ID NO: 5372 - protein, 240 aa, Crocosphaera watsonii WH 8501
MFQPFLQHLEKELFSRFDLSSRPIDPELEFQISQRGKNPAMIESWCYQCPQFRKIRYTYINAGETAQIFNSVLYPSYEYDLPLLGVDLLAFGKKKILVVLDFQPLFRDEDYLEKYIEPIAPIRAKYNELAQDLEMKFYDANQYFSPYLLFAKTDAETVVNRLFPAYQEYLQLYWQLLEQAEPKTDSASIERITKAQKDYDQYSAERDPASGLFRSYFGSEWAEEFVHNFLFEDSVPVAVK

SEQ ID NO: 5373 - protein, 201 aa, Mesembryanthemum crystallinum
MGCASSAPDRTVSRGSSSLNSANEGASDAKNLKVKLVLLGDSGVGKSCIVLRFVRGQFDPTSKVTVGASFLSQTIALQDSSTVKFEIWDTAGQERYAALAPLYYRGAAVAVIVYDITSPESFTKAQYWVKELQKHGSPDIIMALVGNKADLQERREVPAQDGIEYAEKNGMFFIETSAKTADNINQLFEEIAKRLPRLLPS

SEQ ID NO: 5374 - protein, 425 aa, Nitrosomonas europaea ATCC 19718
MLIEVKVPALSESVAEATLINWHKQPGEYVERGENLIDIETDKVVLELPAPQSGILAEIIRNDGATVTSGEIIARIDTAAKETKTAAQQPAPIDSGHLEITESTVASMHPAQPLMPSAKKAAEENGLTMEEIAAIHGTGRGGRITRQDVLAHVRNKNSAVTDQQSDSRTDQSAAGIPQADTSPIPVDQTEKPDRLEKRVPMTRLRMRIAERLVQSQSTAAILTTFNEVNMQAIMDLRARYKDSFEKEHGIKLGFTSFFVKAVVAALKKFPIINASVDGNDIIYHDYYDIGIAVASPRGLVVPIIRDADKLTFAGIEKQIADLARRAQEGKLTLEELTGGTFSITNGGVFGSMLSTPIINPPQSAILGIHATKQRPVVENGQIVIRPINYLALSYDHRIIDGREAVLSLVAIKEALEYPVSPLFEG

SEQ ID NO: 5375 - protein, 312 aa, Actinobacillus succinogenes
MKVTLLGASGGIGQPLSLLLKLHLPAESDLSLYDVAPVTPGVAKDISHIPTSVEVEGFGGDDPSEALKGADIVLICAGVARKPGMTRADLFNVNAGIIQNLVEKVAQVCPQACVCIITNPVNSIIPIAAEVLKKAGVYDKRKLFGITTLDTIRSEKFIVQAKNIEINRNDISVIGGHSGVTILPLLSQIPHVEFTEQELKDLTHRIQNAGTEVVEAKAGAGSATLSMAYAAMRFVVSMARALNGEVITECAYIEGDGKFARFFAQPVRLGKNGVEEILPLGTLSAFEQQALEAMLPTLQTDIDNGVKFVTGE

SEQ ID NO: 5376 - protein, 461 aa, Tropheryma whipplei TW08/27
MSEDFILPALGESVSECVITRWLKEAGDRVEVDEPLVEVSTDKVDTELPSTLTGILEEILVQRDETAKPGQILARIAVDKDETKSNFDHGVKQSDVITGDSAGNLLGNTRPIEDNEWPVTLHTAESKPDLSAKADHIGDEGDKQGNLYAAHNAEIPYATPIVRQLARKLNIDLTNIVGSGVGNRILREDVLLASNRTTNTSTECAQNIPSSPEHDKSAASFDSEVSELRGTRIKMSRLRNIIAERAVHSMQNTAQLSTVIEVDLTRIVDYRNSIKEKFKEAEGVNLTVLPFIINATVQALRKYPVINSHIVDDQIVFPDYENISLAVDTERGLLTPVIKNAGDMTVAQFAKSVFDLARRARNNKLSPDELTGGTFTVTNTGSRGALFDTPVVFLPQLAILGIGAIARRPVIVLDAQGNECISIRSVAFFALSYDHRVIDGADAARFLGYIKSLLETGNCTV

SEQ ID NO: 5377 - protein, 450 aa, Tropheryma whipplei TW08/27
MDYDLIVLGAGSAGYATAIRATQLGMKVALAEGDKVGGTCLHRGCIPTKSLVQCAKAAHIAKNASKFGVINSFSGVDINAVNVFKNGIVESKYRGLQSLLRSYGIHVYPNFATLSSQNSVRIGTEDITGKNIVIATGSRPKGIPGLSGGCIFDSDSILEIDHLPSSLAIIGGGVIGVEFASIFNYLGVDVSILEAQETLIPSEERGVSKQLERVFRRRGIKLYLGHKIMDVSQTDGVVVSLDSNEKVNADLLLVAIGRAPATDAIGKVGIEIDGGAISVDEKLRTTVPNVFAAGDVVGGLQLAHRGYQQGIYLAEQIAGLDPSAVADINIPRVIYTSPEVASVGYTEAGAAEIYGVNEIVTYEYNLAGNAKSSIMGAAGSIKVVQHKNKDVLGVHMVGDGVSELVSEAQLIVNWEANPSDVASLIHPHPTQAEAIGEAMLALAGKPLHGI

SEQ ID NO: 5378 - protein, 351 aa, uncultured marine gamma proteobacterium EBAC31A08
MKSYQVFENAQPIKEVELDTPIPEGDEVLIKTIACGVCHTDIHIHDGFFDIGNGKKMTSRMVQPLAMGHEVFGEVVSFGQNVKNIEVGKKFVVYPWIGCGECEPCQADNEHECGPLTAENIGVAVDGGYGEYVLVKHSKYLFDAGNTPDDLAGSYACRGLTAYSSLKKANLKPNENKLVIISAGGLGLLALKIAKAAFNVSPIVVDIDDSKLEIAKAAGASEVINSSHEGAKKRIMDLTEGGATTVIDYVGAEASIQFGYDLFGFNKNGLYILVGMLGGKFEVQLPLMTFSSRVLQGSYLGSIQEMKELMDLVRAGKIEPVPVEARHVSMANDTIADLKAGNIPGLVCLKH

SEQ ID NO: 5379 - protein, 428 aa, Chlamydophila pneumoniae J138 [sequence omitted]

SEQ ID NO: 5380 - protein, 490 aa, Mycobacterium bovis AF2122/97
MSFVIAAPEVMAAAATDLANIGSSISAASAAAAGPTMGILAAGADEVSVAISALFGSHAQGYQTLSAQLAAYHNQFVRALNAGAGSYASAEAANVQQTLLNAINAPTQTLLGRPLIGNGADGGPGQNGGPGGLLYGNGGNGGAGDTANPNGGNGGSAGLIGNGGAGGAGAATGAGGAGGNGGWLYGNGGPGGAAGLGTAGGVSPAGGAGGAAGLWGHGGAGGAGGSASGAPGAGGAGGDGGRGGLLYGDGGAGGAGGNGSNGVTGVHGGNGGAGGAAGLIGNGGAGGDGGNGGLSNTGASGGAGGAGGAALIGNGGDGGHGGNGGHGNSGGAGGAGGAGGHVGLIGNGGNGGAGGNGGNDNSSTLADAGSGGAGAAGGNGGLFYGNGGVGGRGGNGGQAPTPGNAGDGGAGGNARLIGDGGRGGNGGEGGDGPPGVKGDGGNGGNGGNAVVIGNGGNGGAGGFGIPVGSGGAGGSRGVLFGTPGANGADG

SEQ ID NO: 5381 - protein, 974 aa, Saccharomyces cerevisiae
MNSMADTDRVNLTPIQRASEKSVQYHLKQVIGRGSYGVVYKAINKHTDQVVAIKEVVYENDEELNDIMAEISLLKNLNHNNIVKYHGFIRKSYELYILLEYCANGSLRRLISRSSTGLSENESKTYVTQTLLGLKYLHGEGVIHRDIKAANILLSADNTVKLADFGVSTIVNSSALTLAGTLNWMAPEILGNRGASTLSDIWSLGATVVEMLTKNPPYHNLTDANIYYAVENDTYYPPSSFSEPLKDFLSKCFVKNMYKRPTADQLLKHVWINSTENVKVDKLNKFKEDFTDADYHWDADFQEEKLNISPSKFSLRAAPAPWAENNQELDLMPPTESQLLSQLKSSSKPLTDLHVLFSVCSLENIADTIIECLSRTTVDKRLITAFGSIFVYDTQHNHSRLRLKFIAMGGIPLIIKFEHLAKEFVIDYPQTLIECGIMYPPNFASLKTPKYILELVYRFYDLTSTAFWCRWCFKHLDISLLLNNIHERRAQSILLKLSSYAPWSFEKILPSLIDSKLKKKILISPQITYVVFKSINYMITTNDDKIHKSAIPSSSSLPLSSSPTRNSPVNSVQSPSRSPVHSLMATRPSSPMRHKSISNFPHLTISSKSRLLIELPEGFFTWLTSFFVDMAQIKDLSVLKYFTKLCYLTVHINSTFLNDLLDNDAFFAFIRNIDTIIPFIDDAKTAAFIWKQITAICVEMSLDMDQMSASLFSTAMNFIRKKNNTSISGLEIILNCLHFTLRNVNDDVAPTVGSSESHSVFLIKVNNDAAIELPIDQLVDLFYALNDDDVNLSKLISIFTKICSLPGFENLTINIIFHPNFYEKIVSFFDTYFNSLLIQIDLLKFIKLIFSKSLLKLYDYTGQPDPIKQTEPNRRNKATVFKLRAILVQITEFLNNNWNKDVPKRNSNQVGGDSVLICQLCEDIRSLSKKGSLQKVSSVTAAIGSSPTKDERSNLRSSKDKSDGFSVPITTFQT

SEQ ID NO: 5382 - protein, 282 aa, Mesembryanthemum crystallinum
MSLIANFESDFAVLESIRRHLLEDWDPRAGAPAITTGSGPVYHRNSSFSSLYPCLTDNWGELPLKEDDSEDMVLFGVLRDAVHTGWSPQSGSESGSGSPAPVTVKPEPVDSPVSSPAPVRVAGGEAPVAAAPARGKHYRGVRRRPWGKFAAEIRDPAKNGARVWLGTFETAEDAALAYDRAAFRMRGSKALLNFPLRVNSGEPDPVRITSKRSSPERSVSSSSSESASPKRRKKEEVVVGPVAGQARPGLQQVGNVVEGMQVGVGCQVGVGTMPLGDQLLVT

SEQ ID NO: 5383 - protein, 267 aa, Rubrobacter xylanophilus DSM 9941
MVFPGQGASGGQTAGEAWKLARRKAAGGEVPYQLRVFAGSVDLFARLREAGVNPGAVAGHSLGEYAAAVAAGSLALEDAVDLVAERDRLMTRASRRRPGIMVAVVGADPGEVARAAEGAAGVVVAANFNSPRQTVLSGEREAVEAAAERLGGRKIRLNVAGAFHSPLMQEAALEMETLLAGVAFRDPEVQMVSGIDGAVLRRGEDVRLALQRQMLSPVRWVAVVERLAELGITEVIEAGEDGTLARMLRDFRDRGVRGRRAGEVLAP

SEQ ID NO: 5384 - protein, 144 aa, Zea mays
  unsure (1)..(144): unsure at all Xaa locations
RSSRRAGILPSPSFLLSLFLSIPRRETRAPDWRRPPVREARQIFDSRGNPTVEADVCCSHGTFAKAAVPSGGSTGAYAPLKLRDGGSDYLGQGVSKAVNNVNSIIAPXLVGKDPTRXTLCFDIFMAQELDGTXNEWGVVQRKSL

SEQ ID NO: 5385 - protein, 352 aa, Exiguobacterium sp. 255-15
DQTTPVHILDALKEAINDASNLQYPPFRGHDFLKQAVADFYQSEFGVNIDPASEVAILLGSKAGIVALPQTIVNPGEGVIVPDPGYPDYLSGAALAGAYPITLPLLAENAFLPDYTLLDTTDVERARMLFLNYPSNPTGATATAEAFEQTVSFADANDICVVHDLAYGGISFDGPTRSFLQTEGAKDVGIELFSLSKRFNMSGFRIAFAIGNPSVIASIETYQEHLYVSAFTPIQQAATVALSSDQTCVRELSALYEARRDALFGKLQEIGWDGPIPGGSFFVWLPVPSGYTSQSFTDHLLDEAHVAVTPGHFFGEYGEGYVRISLIADAERLVEAAERIGQLNLFRQTVAE

SEQ ID NO: 5386 - protein, 298 aa, Prochlorococcus marinus str. MIT 9313
MSIAWVFPGQGSQKLGMADPIISLPDAEERFALASRLLGRDLLAICRGSDQTNHDPADLNDTRNTQPALFVVESLLVDELRRQGREASLIAGHSLGELVALYAAEVFDVNTALLLLRRRSELMASAGGGAMTAILGFDRTQLKALVADTEGVVIANDNSAAQVVLSGTPEAVSKVSSQLTCKRAIPLPVSGAFHSPFMATAATEFAAELDQVTFKDARVPVLCNADPIPTCDANLLKQRLKDQMTTGVRWRETMDTMASQGVNTVVEIGPGNVLSGLVKRSLPGVATIQLSCAADLGN

SEQ ID NO: 5387 - protein, 249 aa, GIBBERELLA ZEAE PH-1
MGRLDGKVAIVTGAASGFGQGIAEHFAEEGAKVLICDINEEAGEKVAAHSEAFAFQAMNVTKAADWQAAVAKAVQIWGHIDILVNNAGTSYENKSTNLVTEDEFDKVMSVNVKSVFLGSNAFTTQVKKQGTKGSMINIASVGAHRPRPGLVWYNASKGAITNATMGLAAEYGPDGIRVNSICPLATMTGLLPKFIGKEITPEVQKALGNVPLGRMGEIRDVTKAAVFLASEESSFITGVNLDVDGGRAI

SEQ ID NO: 5388 - protein, 263 aa, Prunus ilicifolia
AHYKTEVDVGNAIAEAIRSGLVKREELFITSKASNHGHVVEACKNSLEKLQLDYLDLYLVHYPLATKHSGVGTTASLLDENKVLDIDVTVSLESTWHDMEKTVSLGLVRSIGLSNYELFLTRDCLSYAKIKPQVSQFETHPYFQRESLVRFCKKHGVTPMAHTPLGGATANVKSFGSISPLEDPVLLGLAKKYKKSVAQIALRWNIERDTPVIPKSSKVERLKENLEVLNFKLEKEDIELINTIDKKSRTTLPSKTWGLDVYA

SEQ ID NO: 5389 - protein, 170 aa, Zea mays
  unsure (1)..(170): unsure at all Xaa locations
MAPTVMMASSATAVAPFQGLKSTASLPIARRSSRSLXNVSNGGRIRCMQVWPAYGNKKFETLSYLPPLSTDDLLKQVDYLLRNGWIPCLEFSKVGFVYRENSTSPCYYDGRYWTMWKLPMFGCNDATQVYKELQEAIKSYPDAFHRVIGFDNIKQTQCVSFIAYKPPGSD

SEQ ID NO: 5390 - protein, 250 aa, Prunus andersonii
LKSEADVGNAIAEAIQSGLVKREELFITSKASNHGHVVEACKNSLKKLQLDYLDLYLVHYPLATKHSGVGTTASLLDENKVLDIDVTVSLETTWHDMEKTVDLGLVRSIGLSNYELFLTRDCLSYAKIKPQVSQFETHPYFQRESLVRFCKKHGVVPMAHTPLGGATANVNAFGSISPLEDPVLIGLAKKYQKSVAQIALRWNIERGTPVIPKSSKVERLKENLEVLNFKLEKEDIELINTIDKKSRTTL

SEQ ID NO: 5391 - protein, 492 aa, Triticum aestivum
MDPYKHRPTSGANSGYWTTNSGAPVWNNNNALTVGQRGPILLEDYHLIEKLAQFDRERIPERVVHARGASAKGFFEVTHDVSQLTCADFLRAPGVQTPVIVRFSTVVHERGSPETLRDPRGFAVKFYTREGNFDLVGNNMPVFFIRDGMKFPDMVHAFKPSPKTNMQENWRIVDFFSHHPESLHMFTFLFDDVGIPLNYRHMDGFGVNTYTLISRDGKAHLVKFHWKPTCGVKCLLDDEAVTVGGTCHTHATKDLTDSIAAGNYPEWKLFIQTIDADHEDKFDFDPLDVTKTWPEDIIPLQPVGRMVLNKNIDNFFAENEQLAFCPAITVPGIHYSDDKLLQTRIFSYADTQRHRLGPNYLMLPVNAPKCAHHNNHHDGLMNFMHRDEEVNYFPSRFDPTRHAEQYPIPPRVLSGCREKCIIEKENNFKQAGERYRSFDPARQDRFLQRWVDALTDARVTHEIQGIWVSYWSQCDTSLGQKLASRLKIKPSM

SEQ ID NO: 5392 - protein, 112 aa, Oryza sativa
MAEDDYNDMDMGYEDEPPEPEIEEGAEEEPENNNEDAVDDVVGAEDDREQEKTARPWKTSKYMTKYERARILSTRALQISMNAPVMVELEGGTYPLEVNGLDLFQKSIVHFS

SEQ ID NO: 5393 - protein, 436 aa, Acinetobacter sp. ADP1
MSSDILKKLGLCLLTLMPAYACAADTPFDAASTVWLMVSAILVLIMFIPGLALFYGGMLRAKNVLSIFSQFFAVAGAVGILWIAIVYSIVADTTHMSEGSLNLNSFIGGFGKAFMAGITDQTLIAGVPEYVVCIFGLTFAMITPCIALGGFAERMKFGAVVLFGALWLVLVYGPLAHMVWGGPGAIMHNWGVLDFAGGTAVHINSGVAALVGAIVVGQRRGWPTTAMPPHNLVFTMMGAALLWAGWYGFNVGSALAANTTAGLVLMTTTIATCGGIVGWIMIEKIMTQQVTSLGLASGVIAGLVGITPAAAYVGPFGAIAVGLITSLCCFFAVTGLKRKFGFDDALDVFALHGIGGMAGCILTGIFCIPALGGNQDVDLVKQLTAQIASIALTVIYCGVFTWIIMKIIDKTIGLRVTSEQEQQGLDVSDHNERAYN

SEQ ID NO: 5394 - protein, 282 aa, Streptococcus pyogenes SSI-1
MGHEGIGIVEEIGEGVTSLKVGDRVSIAWFFEGCGHCEYCTTGRETLCRSVKNAGYSVDGGMSEYAVVTADYAVKVPEGLDPAQASSITCAGVTTYKAIKEAGAAPGQWIVIFGAGGLGNLAVQYAKKVFNAHVVAVDINNDKLELAKEVGADIVVNGKEIEDVPGYIQEKTGGAHGVVVTAVSKVAFNQAIDSVRAGGTVVAVGLPSEYMELSIVKTVLDGIKVVGSLVGTRKDLEEAFAFGAEGLVVPVVEKVPVDTAPEVFDEMERGLIQGRKVLDFIS

SEQ ID NO: 5395 - protein, 959 aa, Wautersia eutropha
MNARNEIDFGTPASPSTELVTLEVDGVSVTVPAGTSVMRAAMEAQIAVPKLCATDSLRNFGSCRLCLVEIEGRRGYPASCTTPVEAGMKVKTQSDKLADLRRGVMELYISDHPLDCLTCPTNGNCELQDMAGVVGLREVRYNDGGPERAPIATHTQMKKDESNPYFTYDPSKCIVCNRCVRACEETQGTFALTISGRGFDSRVSPGTSQSFMESDCVSCGACVQACPTATLTETSVIKFGQPSHSTVTTCAYCGVGCSFKAEMKGNKVVRMVPYKDGKANEGHACVKGRFAWGYATHKDRILKPMIRAKITDPWREVSWEEAIDYAASQFKRIQAEHGKDSIGGIVSSRCTNEEGYLVQKLVRARFGNNNVDTCARVCHSPTGYGLKQTLGESAGTQTFKSVEKADVIMVIGANPTDGDPVFASRMKKGLRAGARLIVVDPRRIDLVDSPHIRADYHLQLRPGTNVALVTSLAHVIVTEGLLNEAFIAERCEDRAFQQWRDFVSLPENSPEAMESVTGIPAEHCAVPHACMPPAATLRIYYGLGVTEHAQGSTTVMGIANLAMATGNIGREGVGVNPLRGQNNVQGSCDIGSFPHELPGYRHVSDSTTRGLFEAAWNVEISPEPGLRIPNMFEAALAGSFKGLYFQGEDIVQSDPNTQHVSEALSSMECIVVQDIFLNETAKYAHVFLPGSSFLEKDGTFTNAERRISRVRKVMPPKARYADWEATILLANALGYPMDYKHPSEIMDEIARLTPTFAGVSYKRLDKLGSIQWPCNADAPEGTPTMHIDTFVRGKGKFIITKYVPTTEKITRAFPLILTTGRILSQYNVGGQTRRTDNVYWHAEDRLEIHPHDAEERGIKDGDWVGVQSRAGDTVLRAIVNERMQPGVVYTTFHFPESGANVITTDNSDWATNCPEYKVTAVQVLPVAQPSAWQREYQEFNAQQLQLLEAASADPAQAVR

SEQ ID NO: 5396 - protein, 355 aa, Streptomyces argillaceus
MKALVLSGGSGTRLRPITHTSPKQLVPVANKPVLFYALEDIAQAGITDVGIVVGETAREIEDAVGDGSKFGLQVTYLPQEKPLGLAHAVLIARDYLGDDDFVMYLGDNFVVGGIAGLVDEFRADRPDARILLTPVPDPTAFGIAELDGEGRVVRLEEKPTHPKSDMAVIGVYLFTPLVHEAVRAIEPSWRGELEITHAIQWLIDNRHDVRSTVIHGYWKDTGNVMDMLEVNRTVLEGVEPCTEGPVDAESEVIGRVRIEAGARVSNSRIVGPAVIGSGTVISGSYIGPYTSVSEGCRIEDSEIEFSIVLRDSRVRGVQRVRGSLIGRSVTVAPAPRKPAGTRLVLGDHSEGQISS

SEQ ID NO: 5397 - protein, 297 aa, Acinetobacter sp. ADP1
MIEPKLKIETAQTNPMSIEKNIPDLILHDGHSIPALGFGTYTLKGQQGVDTMLRALGHGYRMLDSAFNYENEGAVGAAVRQSGLLRDEIFITSKLPGRHHAYDKAMETIEESLYRMQFDYLDLYLIHWPNPQQGLYIEAWQALIDAQKKGYIRSIGVSNFLPKHIETLRRETGVIPVINQVELHPYFNQAEQRAYDESQQIITMAWSPLGRAKAILDDAVLKQIAQETSRTVVQVVLRWQVQMGVIPIPKAASDQNQMANQAIFDFSLSDDQVQRINALTCADGRIRNQDPAVYEEF

SEQ ID NO: 5398 - protein, 470 aa, Lactobacillus casei
MYQSKTHNHRFTGHLASAKTRLRLVALISTMGGLLFGYDTGVINGALPFISSELKLAPGSQGWVTSSLTLGAAFGAILVGRLSDRYGRRRLITMLAGLFFLATVASSLSPSAGWLIGARLILGLAVGGVSVLVPSFLAEIAPTSHRGRLVTQNELMVVTGQLLAFVLNAFLGTTFGNVPGIWRWMIVLAVIPAIILGIGTYFVPESPRWLMMKGRPAAARSSLEVLRSAAEVPAEIDHLKQNLAEDAKHKQASVRALKTKWIRRLVLIGIGLGVIQQIAGINVMMYYGTSILQMTGFGRDSALIANIANGVTAVAATIVTLQLLKHVPRRPMLIVGLIGSTVAITGVTFASRLPAGSPFRAFATIGMMMLFLAFFQGAISPMTWLLMSEIFPEQVRGIGMGAATFCLWLANFGVGVLFPIGLAQIGMFWTFVCFIGTNLISLLFVLIFVPETAGRSLETLHREEKARLNH

SEQ ID NO: 5399 - protein, 483 aa, Acinetobacter sp. ADP1
MDLQQQPLFRQKALVAGQWCDADNAEKTPIFNPATQELIGYVPNMGRAETERAIEAAYASWEMWKTKTAKERSALLKKWYDLILLNLDVLAEILTTEQGKPFNEAKGEIIYAASFIEWFAEEAKRIYGDIIPSPYPDARIVVNKQPIGVVAAITPWNFPAAMITRKVAPALAAGCPCIVKPAPETPFTALALADLAIQAGIPAEIMSVVTGDAAQIGDAIFASDHVRKFTFTGSTPIGKLLLEKSAKTLKKVSLELGGNAPFIVFDDADIEAAVEGALIAKFRNAGQTCVCVNRFLVQSGVYEKFIQVFKAKIESLKIGNGLEAGSEIGPLINAQAVAKVQSHIEDALSKNGRLITGGQVHATGELFFEPTLIADANTEMMVATQETFGPLAAIFKFDTEQQAIQMANDTEFGLAAYCYTRDLGRAWRMSEQLEYGMVGINKGLISNEVAPFGGIKHSGLGREGSKYGIEDYLEIKYTLFGGL

SEQ ID NO: 5400 - protein, 505 aa, Alteromonas sp.
MIYAKPGSEGSVVSFKESYGNFINGEWVAPVKGEYFTATSPVDGSDIAQVPRSTSEDVELALDAAHAAKKGWAEKSVAERSNVLLKIADRIEENLELLAVAETWDNGKAVRETLNADIPLCADHFRYYAGCIRSQEGTIGEIDKNTVAYHFHEPYGVVGQIIPWNFPLLMAAWKLAPALVTGNVVVLKPAEQTPVSILLFAELIQDLLPPGVLNIVNGFGAEAGQALATSTRIAKIAFTGSTPVGGHILRCAAENLIPSTVELGGKSPNLFFADIMDHEPEFIDKCAEGLVLGYFNQGEVCTCPSRAIIQEDIYDAFMEKVLEKIQKIKRGNPLDTETMVGAQASNEQFEKILKYIDIGKSEGAQVVTGGEKEQLPGFDDGYYIQPTILKGENHMRVFQEEIFGPVIAVQTFKTEEEAIEIANNTSFGLGAGVWSRDANVAFRVGRAIEAGRVWTNCYHLYPAHAAFGGYKKSGIGRETHKMMLDHYQQTKNLLVSYDINPLGFF

SEQ ID NO: 5401 - protein, 488 aa, Acinetobacter sp. ADP1
MQQFQLYINGKFEDGAAQFDSINPATGEIWAKMPEARTDQVNRAVDAAEQAFYDSSWSGLTASQRGKLLYKLADLVEKSAPRLAALETTDTGKIIRETSSQIAYVAEYYRYYAGLADKIEGSFIPVDKPDMQAWLVREPVGVVAAIVPWNSQLFLSAVKVGPALAAGCTVVLKASEEAPAPLLEFAKLIDEAGFPAGVVNVITGFGPECGAVLSAHPKVAHIAFTGGPETAKHIVRNSAENLAKVSLELGGKSPFIVFADTDINSALNAQIAAIFAATGQSCVAGSRLLIEESIKDEFLQRLAERVQSIKMGLPDDMQTEYGPLCTLKQREKIQQVVQRSVEQGAKLITGGQVCDGAGYYYPPTILDCSGVSDAQSIHTELFGPVLSVDTFSTEAEAIQKANSTPYGLASGVFTSNLTRAHRMTRAIRSGIVWLNTYRVVSPLAPFGGYGLSGHGREGGLSAALEYTTTKTVWLRMSDQPIDDPFVMR

SEQ ID NO: 5402 - protein, 251 aa, Prunus andersonii
AHYKSEADVGNAIAEAIQRGLVKREELFITSKASNHGHVVEACKNSLKKLQLDYLDLYLVHYPLATKHSVGTTASLLDENKVLDIDVTVSLETTWHDMEKTVDLGLVRSIGLSNYELFLTRDCLSYAKIKPQVSQFETHPYFQRESLVRFCKKHGVVPMAHTPLGGATANVNAFGSISPLEDPVLIGLAKKYQKSVAQIALRWNIERGTPVIPKSSKVERLKENLEVLNFKLEKEDIELINTIDKKSRTTL

SEQ ID NO: 5403 - protein, 252 aa, Prunus mexicana
AHYKSEADVGNAIAEAIQSGLVKREELFITSKASNHGHVVEACKNSLKKLQLDYLDLYLVHYPLATKHSGVGTTASLLDENKVLDIDVTVSLETTWHDMEKTVDLGLVRSIGLSNYELFLTRDCLSYAKIKPQVSQFETHPYFQRESLVRFCKKHGVVPMAHTPLGGATANVKAFGSISPLEDPVLIGLAKKYQKSVAQIALRWNLERGTPVIPKSSKVERLKENLEILNFKLEKEDIELINTIDKKSRTTL

SEQ ID NO: 5404 - protein, 251 aa, Prunus fasciculata
AHYKSEADVGNAIAEAIQSGLVKREELFITSKASNHGHVVEACKNSLKKLQLDYLDLYLVHYPLATKHSGVGTTASLLDENKVLDIDVTVSLETTWHDMEKTVSLGLVRSIGLSNYELFLTRDCLSYAKIKPQVSQFETHPYFQRESLVRFCQKHGVVPMAHTPLGGATANVKAFGSISPLEDPVLIGLAKKYQKSVAQIALRWNIERGTPVIPKSSKVERLKENLEVLNFKLEKEDIELINTTDKKSRPL

SEQ ID NO: 5405 - protein, 485 aa, Agrobacterium tumefaciens
MQNKVQFITYVDRLTRGGFRQLKELVDGKFAGLFGGVHVLPFFNPIDGADAGFDPTDHTIVDPRLGDWEDVRALSGSVEIMADLIVNHVSSQSGAFTDFIAKGSASEFADMFMTFDKVFPDPATEEDLLRIYRPRPGLPFSKVTLADGTQRMLWTTFTPEQIDIDVHSAKGTTYLETILDRFSEANVTAIRLDAAGYAIKKAGSSCFMIDDTYAFLEEVAGKARNRGMEVLVEIHSYHRDQIEIAKKVDRVYDFALPPLILHALFTGDATPLAKWLAISPRNAITVLDTHDGIGVIDVGAHSDGRAGLLEPQAIDNLVGEIHRRSDGQSRQATGAAASNLDLYQVNCTYYDALGRNDNDYLIARAIQFFAPGIPQVYYVGLLGGVNDMDLLAKTGVGRDINRHYYGNDEIGTALETPLFHRLSNLIRFRNTHPAFGGALKATIADAGALVLSWQHGDAFAELKISFADRKASIAASGQSEMQIVE

SEQ ID NO: 5406 - protein, 252 aa, Prunus fasciculata
AHYKSEADVGNAIAEAIQSGLVKREELFITSKASNHGHVVEACKNSLKKLQLDYLDLYLVHYPLATKHSGVGTTASLLDENKVLDIDVTVSLETTWHDMEKTVSLGLVRSIGLSNYELFLTRDCLSYAKIKPQVSQFETHPYFQRESLVRFCQKHGVVPMAHTPLGGATANVKAFGSISPLEDPVLIGLAKKYQKSVAQIALRWNIERGTPVIPKSSKVERLKENLEVLNFKLEKEDIELINTIDKKSRTTL

SEQ ID NO: 5407 - protein, 241 aa, Triticum aestivum
MASLFKDPSKLSVYRDRRFPGTQEEFEAALLASLTVYVGNMSFYTTEEQAYELFSRAGEIKKIIMGLDKNTKTPCGFCFVLYYSREDAEDAVKYISGTMLDDRPIRVDFDWGFEEGRQWGRGRSGGQVRDEYRTDYDPGRGGYGKMVQKELEAQRELVDYGVGFQTNAPPQFDRADRKRGYGDRNDRGDYQRRRSAPDMARRATDSDSKRDANQEPEKNPRFREKGDSDDEDDDYDKKRRR

SEQ ID NO: 5408 - protein, 366 aa, Thermosynechococcus elongatus BP-1
MQGTTIFRGDAFAKVSMKAQVFRGVNQLSYEEIPIPEIAADEVLVRVRVVGLCQSDIKKIRYPLYEPPRIFGHETAGEIAAVGDAVTGWQVGQRVVVMHHIPCMHCAYCLNENYSMCHVYKTVTTTAGFIPSGGGFAEYVKVPGHIVEHGGLIPIPDPISDEEASFVEPTNCCLKAVKKAGIAPGQTVLITGAGPIGLMFIMLVNLFGARAIATDLLPSRIAKAKEVGAAAAFDARDPDLSAKVQALTHGLGVDVSLLAVPSEKAFFQALECTRKGGKILFFAEFPDEVEIPLNPNILYRREIDLMGSYSSSYRLQSLACDIIFNRRIDVKTLVSDRYPLSKLAEAVEQAVHPTPETYKILIYPES

SEQ ID NO: 5409 - protein, 252 aa, Prunus subcordata
AHYKSEADVGNAIAEAIHSGLVKREELFITSKASNHGHVVEACKSSLKKLQLDYLDLYLVHYPLATKHSGVGTTASLLDENKVLDIDVTVSLETTWHDMEKTVDLGLVRSIGLSNYELFLTRDCLSYAKIKPQVSQFETHPYFQRESLVRFCKKHGVVPMAHTPLGGATANVKAFGSISPLEDPVLIGLAKKYQKSVAQIALRWNIERGTPVIPKSSKVERLKENLEILNFKLEKEDIELINTIDKKSRTTL

SEQ ID NO: 5410 - protein, 460 aa, Ferroplasma acidarmanus
MGYNALDNARINSLHKKITALSVGGTFLDGYDISIISVALIVMSKTAFGLDTDFGKAMIAASTTIGMLVGAILFGYITDLYGRRTMYMYDMALFIVLTAAEAFSWSFASLFIMRFILGLGLGADYAIGTTIIGEFSPVKYRGKLLVTNVLSWFLGAAVAAVTGYLLLPLGNESWRYMFLLGIIPAAIILVLRRDVPESPRWLSNKGNASEAEDIERRLTGTSDNLTAIKRDNKNPLKELLSRKYIKSLLFVGIFWFTFDAAFYGISIFSPTILELLGLKARLAVLGSAVFDTFAIIGSLIAILLIDRIGRKGITIIGFSGMVISLLSLGIITFYVPDRSAFITDGILIFALFLIFYITEAIGPGSTDFVYPVELFPTEDRASAQGFGTSVSRIGAILGITTFPFIVSIYGFSTSLFFFTGLSVIGLLATIFLATETKGKTLEQVNEIEEGKISKFKAGAK

SEQ ID NO: 5411 - protein, 154 aa, Eremothecium gossypii
MSDYEEAFNDGPEHFEDFEQEHFSDDGFEQEAEFQDGETKDINGTTVVTGGTGVEDFQQQEQHRRRTLKEKAIPKEERTTTPYMTKYERARILGTRALQISMNAPVFVDLEGETDPMRIAMKELAEKKIPLVIRRYLPDGSFEDWSVEELIVDL

SEQ ID NO: 5412 - protein, 175 aa, Triticum aestivum
MAPTVMASSATSVAPFQGLKSTAGLPVSRRSNGASLGSVSNGGRIRCMQVWPIEGIKKFETLSYLPPLSTEALLKQVDYLIRSKWVPCLEFSKVGFIFREHNASPGYYDGRYWTMWKLPMFGCTDATQVINEVEEVKKEYPDAYVRIIGFDNMRQVQCVSFIAFKPPGCEESGKA

SEQ ID NO: 5413 - protein, 282 aa, Glycine max
MKKATRIVSIFVISMLCFQELIHVSSSPFLYAHQVYEESSGGRNLKQEQEQEQKHAQEVHCSRERSRAARKVIEEYLTPFMERENYQLSSKCKLHPENDIFTDQEEHKIYIDRHEWRCGYCKKSFREEKFLDQHFDSRHYNFLNLSHGKCLGDLCGALHCDAVMNFKSSRSKCNPAAAARNRHLCENLADNCFPISEGPSAGRLHELFLHQFCDAHTCSGKHKPFSRGGKDQSSFFRLAAGALILVLLPVFYLFLYLVQSDVKSRTQELRRISKAGWKSKPS

SEQ ID NO: 5414 - protein, 308 aa, Azotobacter vinelandii
MTSKLEQLKQHTTVVADTGDLDAIARLQPVDATTNPSLLLKAASLPRYAGLLEHAITGCSGDLGLACDRFAVAVGQEILGVIPGRISTEVDARLSFDSQATIGRAERLIGLYEQAGITRERVLIKIAATWEGIRAAERLEKAGIQTNLTLLFSFAQAAACADAGVFLISPFVGRIYDWYKKAEGRDFASVEDPGVQSVTRIYNYYKANGYDTVVMGASFRNLGQIEQLAGCDRLTISPELLQQLAGEQGSLERKLAPGSSGEPRQTLDEPTFRWALNEDAMATEKLAEGIRLFARDQIKLEALLSEKI

SEQ ID NO: 5415 - protein, 472 aa, Pisum sativum
PQQLDTPGTSNDHFMHTSNAGPFFAVSENYVHPPPSSSNYDRHAFHVDSGFIDLTMGSGRGHHKRKSPGIPSVYERGSSSGYFNAGSSTDLPTPPESWPEKPNMNSQYLPWDHVAMTPTFRGAGLSMKGESSVRNVRSRSALDLESNLSRTHLPINHSLNSYLTASPFGHCSLADLSAQVTTPLTRDWSQMNVTPANGRVLLPDASTSGLETSHFPVGNAATASSNAPADVGSFHHEFGTSRNPTTAQSFQNLTQPARGTRSNYSQRSTPAFRASSNLRMSHAVPSDNGLPMVAEGYSSRHPRPLTTVGWRNGDRNGRSRISSERYRSLADEAGLHARFSSEVPGFMIVERASLYGSRNILDQHRDMRMDVDNMSYEELLALGERIGQVNTGLSEDVLSKCLTETIYCSSDQCQDEGSCVICLEEYKNMDDVGTLKTCGHDYHVSCIKKWLSMKKLCPICKSSVLPEDKKDK

SEQ ID NO: 5416 - protein, 497 aa, Pseudomonas fluorescens PfO-1
MFELADWQRKAAELSYPYQAVIDGKLRAAQSGQTFAAINPATGQLLANVAACGEEDVDAAVQNARQVFEAGTWAGRSPTERKQVLLRLADLILAHREELALLDSLNMGKPVMDAYNIDVPGAAGVFRWYAESLDKLYDQVAPSASNVLATITREALGVVAAVVPWNFPLDMAAWKLAPALAAGNSVILKPAEQSPFSALRLAELALEAGLPAGVLNVLPGLGEQTGKALGLHPDVDCLVFTGSTQVGKYFMQYSAQSNLKQVWLECGGKSANLVFADCQDLDLAAQKAAFGIFFNQGEVCSANSRLLVERSIHDEFVERLKAQAERWQPGDPLDPASAAGAIVDTRQTESILRFIHQAEREGATRVCGGRQLSFNGSDNFVQPTIFTDVQPHMTLFREEVFGPVLAVIPFDDEAHALHLANDSVYGLAASLWTDDLHRAHRVARQLRAGTVSVNSVDALDVTVPFGGGKQSGFGRDLSLHSFDKYTQLKTTWFQLRS

SEQ ID NO: 5417 - protein, 345 aa, Corynebacterium glutamicum ATCC 13032
MTTAAPQEFTAAVVEKFGHDVTVKDIDLPKPGPHQALVKVLTSGICHTDLHALEGDWPVKPEPPFVPGHEGVGEVVELGPGEHDVKVGDIVGNAWLWSACGTCEYCITGRETQCNEAEYGGYTQNGSFGQYMLVDTRYAARIPDGVDYLEAAPILCAGVTVYKALKVSETRPGQFMVISGVGGLGHIAVQYAAAMGMRVIAVDIADDKLELARKHGAEFTVNARNEDSGEAVQKYTNGGAHGVLVTAVHEAAFGQALDMARRAGTIVFNGLPPGEFPASVFNIVFKGLTIRGSLVGTRQDLAEALDFFARGLIKPTVSECSLDEVNGVLDRMRNGKIDGRVAIRF

SEQ ID NO: 5418 - protein, 269 aa, Solanum demissum
MVGSVNIDQQGKGGYVSDEVLGTFLPIVVYWVYSGLYLMLGNMDNYRLHSKKDEAEKNLVSKKEVVKGVLLQQIVQAAVATVLFVVTGDDGESGGDRHASIFVLGRQLFVAMLMLDTWQYFMHRYMHQNKFLYKHIHAQHHRLIVPYAFGALYNHPLEGLILDTIGGALAFLVCGMSPRTSIFFFSFATIKTVNDHCGLWLLGNLFHIFFKNNSAYHDIHHQLYGTKYNYSQPFFVTWDRILGTYMPYELERRPEGGFEAKPVKDCKEH

SEQ ID NO: 5419 - protein, 376 aa, Solanum demissum
MMQDVWTQLGPTIAAIMFIWTMYQNYFPHELRGHIRRYTDKLVSYFYPYMHIIFYELETEGWFERSKAYVAIERYLSKNSSTQAKRLKANAVKDGQSLVLTMDDHEEITDEYKGEKYDVYELELTSVKDNTELRKLLIDTTGLYLMLGNMDNYRLHSKKDEDEKNLVSKKEVVKGVLLQQIVQAAVATVLFVLACDSGTHKLALALSLMIAEIQLFVAMLMLDTWQYFMHRYMHQNKFLYKHIHAQHHRLIVPYAFGALYNHPLEGHILDTIGGALAFLVSGMSPRTSILFFSFATIKTVDDHCGLWLPGNLFHIFFKNNSAYHDIHHQLYGTKYNYSQPFFVTWDRILGTYMPYELEKRPEGGFEAKLLKDCKEH

SEQ ID NO: 5420 - protein, 252 aa, Prunus besseyi
AHYKSEADVGNAIAEAIQSGLVKREELFITSKASNHGHVVEACKNSLKKLQLDYLDLYLVHYPLATKHSGVGTTASLLGENKVLDIDVTVSLETTWHDMEKTVDLGLVRSIGLSNYELFLTRDCLSYAKIKPQVSQFETHPYFQRESLVRFCKKHGVVPMAHTPLGGATANVNAFGSISPLEDPVLIGLAKKYQKSVAQIALRWNIERGTPVIPKSSKVERLKGNLEILNFKLEKEDIELINSIDKKSRTTL

SEQ ID NO: 5421 - protein, 398 aa, Prochlorococcus marinus str. MIT 9313
MATSRRLGRLGRGVFDRNDRRKQAYRLANAGPQSLPLLDLSLGSTDLSPPAVALEAIEVALRAPESSSYCLHASTRPFREAVAAWSQRRFGVSVDPDREVLLLVGSQEGTAHLPLAVLDPGDSALILDPAYPSHRGGLILADARIERLLLRPEQEWRPDFKALSNSQWDQLRMMVFGFPHNPTAQVGEQSWLAEAMDRGIRHQVVVAHDNPYVDLALDGEAPALLRCPGWRECGIEFFSFSKAWCLGGFRLAFAIGAEHLITALRELKGVVDFNQSLALQRGAIAALTDAQDWPQEILGVYRERRDRTLAALHALGWHAPCPSMALYLWLPIPAWAKQQNYNDETLAADLLDQTGVALTPGSGFGSGGDGWLRLALVHPVEDLEAAVARMWPWWHAHI

SEQ ID NO: 5422 - protein, 396 aa, Rhodospirillum rubrum
MSTVPAVMPTYSRVDLSFDRGEGAWLLANDGRRFLDFASGIAVTGLGHAHPHLVEALTSQAAKLWHCSNLFRIPGQERLAQRLVDGSFADSVFFTNSGAEAIEAALKLARRHQHVVRGETARYRTIVTRNAFHGRTLATVTAGGQAKHVKGFEPLVEGFDRVDFGDLDAARAAVTEETAAILVEPIQGEGGIFPAPEGYLSGLRRLADEHGLLLILDEVQTGVGRTGKLFAHEWDGIIPDVVAIAKGIGAGFPMGACLAREPYASALVAGSHGSTFGGNPLAMAVGNAVLDIILAEGFLDGVSARGADLIARLDGLVHRHPTILAGVRGRGLMIGLVCAAPNGVVLNALREQGLLAVPAEAGVVRLLPPMIIGEAEVTAAEEMIDRACVHLEREAA

SEQ ID NO: 5423 - protein, 252 aa, Prunus salicina
AHYKSEADVGNAIAEAIQSGLVKREELFITSKASNHGHVVEACKNSLKKLQLDYLDLYLVHYPLATKHSGVGTTASLLDENKVLDIDVTVSLETTWHDMEKTVDLGLVRSIGLSNYELFLTRDCLSYAKIKPQVSQFETHPYFQRESLVRFCKKHGVIPMAHTPLGGATANVKAFGSISPLEDPVLIGLAKKYQKSVAQIALRWNLERGTPVIPKSSKVERLKENLEILNFKLEKEDIELINTIDKKSRTTL

SEQ ID NO: 5424 - protein, 255 aa, Zea mays
MIGNFDNAFFRGVLDAPSVGSAKIPDIVFMLFQGMFAALTPALAIGAAAERGRILPTLVFIFLWTTFVYDFIACWTWSANGWSFVMGGLDFAGGTPVHISSGGAALAYALVLGRRSGDHKDFRPHAMSNVVIGTCFIRVRWFGFNGGSALSANLRAAMACVVTNLAASVGGITWVLLDYRHDRKLSVLGFCSGAVAGLVSITPGSGYVSPASSVAIGFLGACACNMAVRLKHYLKYDHALEVLGVHGVGGIVGNS

SEQ ID NO: 5425 - protein, 231 aa, Mesorhizobium loti MAFF303099
MLRFWRLLLCCTLAGKATMQRIATLDDIARGLDALCTIDPRLEKVRGMAGEVPLRLSEPGFRSLASIIVSQQVSRASADAIFGRLTKLVDPLTPQAILAAGEDMFREAGLSRPKQRGLIAVAQAVADGLDLNHLCSLDAQEAITTMTAVPGIGPWTAEVYLLFAAGHPDIFPARDVALQSAVGHALGIDPRPPEKTLIALAESWSPWRGVASRLFWSYYRETRGRDAAPPS

SEQ ID NO: 5426 - protein, 274 aa, Rhodospirillum rubrum
MGCLTTDTPLAGVSLLLLGCGKMGGALLNGWLGRGLEPSAVHVVDPLADLPAGVTRLTAEQAVALPPPDVCLVAIKPQVVPEVLPAYAPLAQAGTVFLSVAAGKTIDGLSGLLGGDAAVVRAMPNTPAAVGRGASVLCANARVPAPTRALCETLMAAVGTVEWVDDESLIDAVTALSGGGPAYVFLLVECLAEAGRANGLPADLAMRLARSTVAGSGALLDGSAEDAATLRKNVTSHKGTTAAALAVLMAEDALQPMVTRAIAAAAERSRELAS

SEQ ID NO: 5427 - protein, 252 aa, Prunus armeniaca
AHYKSEADVGNAIAEAIQSGLVKREELFITSKASNHGHVVEACKNSLKKLQLDYLDLYLVHYPLATKHSGVGTTASLLDENKVLDIDVTVSLETTWHDMEKTVDLGLVRSIGLSNYELFLTRDCLSYAKIKPQVSQFETHPYFQRESLVRFCKKHGVVPMAHTPLGGATANVKAFGSISPLEDPVLIGLAKKYKRSVAQIALRWNLERGTPVIPKSSKVERLKENLEILNFKLEKEDIELINTIDKKSRTTL

SEQ ID NO: 5428 - protein, 363 aa, Eremothecium gossypii
MEEHTSTAGDANRPAKAYEQMEGEQKLDNDEIALYDRQIRLWGMAAQARMRNTRVLLVNFGALGGEVAKNLVLSGIGSLTILDNRVAAAEDLGSQFLLAEEDLGRLRAEVGAARLRDMNPRVSLAVDARNVTEQPAEYFAGHDLVVATDCSRADLEKINAACRARGVPFYAGGLHGLWGYVFVDLVQFDSTEEKAVTVDAPITALGSVSERREVVSVRREHEEDPRSAREIVTTRNYYRPFSEVLAQGTLAGRLTPRQLRRLLPALPLTLAAFLHGHGNDDVASFEAEVKKMCHQLGSSPSNVPAECTELFLRQIGVELPPVAAVIGGAMAQDIINTMGKRQSPLNNFVVLDGITLDMQIFEL

SEQ ID NO: 5429 - protein, 220 aa, Prunus emarginata
  unsure (1)..(220): unsure at all Xaa locations
NAIAEAIQSGLVKREELFITSKASNHGHVVEACKSSLKKLQLDYLDLYLVHYPLATKHSGVGTTASLLDENKVLDIDVTVSLETTWHDMEKTVSLGLVRSIGLXNYELFLTRDCLSYAKIKPQVSQFETHPYFQRESLVRFCKKHGVIPMAHTPLGGATANVKAFGSISPLEDPVLLGLAKKYQKSVAQIALRWNIERDTPVIPKSSKIERLKENLEILN

SEQ ID NO: 5430 - protein, 465 aa, Burkholderia fungorum LB400
MDDHYDVIVIGGGPGGYVAALRAAQLGRRTALCERDQLGGICLNWGCIPTKALLHTADTLRTVRKAAHLGIGIDDPVVDFTRVMARSREVAQKLNRGVSHLLRKAGVTVLAGTAAFAADRSVRVHGADGALRTLQARHTIVATGAAARQLPALPWDGERIWTYREALAATAVPKSLLVVGAGAIGMEFAGFYAAMGTEVTVVEVAPRILPASDADVSEFVARACERDGIRLRTGCSVVHSAAHAEGVRVMFRSENAEEQREFERVLVAVGLDGNTEGLGLEHTRVAFERGLIIADAAGATSDPVVHAVGDVTGAPMLAHKASHQAIACVERIAEVNRGERHASPKIPGCVYSHPQTASVGLTEDEARRTGRALRVGRFPLDANGKAIALGDPSGFVKTIFDAASGELLGAHIVGPEAPELIHGFTLAATLEATESELIETVFPHPTLSEAMHESVLAAFGRPLHI

SEQ ID NO: 5431 - protein, 241 aa, Agrobacterium tumefaciens str. C58
MPGLVQTYNSVERDGKSATQGGYSDHIVVREDYVLSIPDNLPLDASAPLLCAGITLYSPLQHWNAGPGKKVAIVGMGGLGHMGVKIGSAMGADITVLSQTLSKKEDGLKLGAKEYYATSDASTFEKLAGTFDLILCTVSAEIDWNAYLNLLKVNGTMVLLGVPEHAIPVHAFSVIPARRSLAGSMIGSIKETQEMLDFCGKHDIVSEIETIGIKDVNEAYERVLKSDVRYRFVIDMASLDA

SEQ ID NO: 5432 - protein, 428 aa, Burkholderia fungorum LB400
MRRELLVPKLGLTMTEGTLIEWMISPGDRFDADQGLYVIESDKAANEVSAEGSGVLLEVTAELGMPLSVGSVIGYWDDDPQAATNHAVRAEPSAHAAAASASSPDSNAANAAPSAQTSRPPAAMNGQSGQSGQSGARGISTPLARRLARERGIDLTNLAGSGPRGRIRARDVELAPANSPASAPDVPLPATASRAAQVAQAATVRAATSIEKTIARRLVTSKQTIPHFYLSVEAEISAVQRLRSQLNDAQSNRRFTVNHFVVAAVGRALALVPEANRVWDDSGITSFAATDVGVAVHTERGLLVPVLRDVGRQALGEVARHASEAIGRAQAGQLNAAEMAGGAITVSNAGMHDVTLMTSIINPGQSMILGVGSVRQVFRPDAHGQPALKNEVGLVLSVDHRVLDGVTALKFLRQVVAAIERPASLLVT

SEQ ID NO: 5433 - protein, 229 aa, Ferroplasma acidarmanus
MAYDRAITVFSPDGRLFQVEYAREAVKKGSTALGIKFKDGVLLLSEKKARSRLVEKNSLEKIQLVDDNVATVTSGLVADARVLIDFARVGAQQEKVTYGSLTNIENLVKKVADQMQQYTQFGGVRPYGVSIIFAGTDTIGPRLFDCDPAGTINEYKSVAIGAGKDAVTDYIEKEYKDDMSLEDTIKLGVAALKSALADASSMKEPEIASIKVGETFHVYTNEEVSKYLN

SEQ ID NO: 5434 - protein, 2108 aa, Mycobacterium bovis AF2122/97
MGKERTKTVDRTRVTPVAVIGMGCRLPGGIDSPDRLWEALLRGDDLVTEIPADRWDIDEYYDPEPGVPGRTDCKWGAYLDNVGDFDPEFFGIGEKEAIAIDPQHRLLLETSWEAMEHGGLTPNQMASRTGVFVGLVHTDYILVHADNQTFEGPYGNTGTNACFASGRVAYAMGLQGPAITVDTACSSGLTAIHLACRSLHDGESDIALAGGVYVMLEPRRFASGSALGMLSATGRCHAFDVSADGFVSGEGCVMLALKRLPDALADGDRILAVIRGTAANQDGHTVNIATPSRSAQVAAYREALDVAGVDPATVGMVEAHGPGTPVGDPIEYASLAEVYGNDGPCALASVKTNFGHTQSAAGALGLMKAVLALQHGVVPQNLHFTALPDKLAAIETNLFVPQEITPWPGADQETPRRAAVSSYGMTGTNVHAIVEQAPVPAPESGAPGDTPATPGIDGALLFALSASSQDALRQTAARLADWVDAQGPELAPADLAYTLARRRGHRPVRTAVLAATTAELTEALREVATGETPYPPAVGQDDRGPVWVFSGQGSQWAGMGADLLATEPVFAATIAAIEPLIAAESGFSVTEAMTAPEVVTGIDRVQPTLFAMQVALAATMKSYGVAPGAVIGHSLGESAAAVVAGALCLEDGVRVICRRSALMTRIAGAGAMASVELPAQQVLSELMARGVNDAVVAVVASPQSTVIGGATQTVRDLVAAWEQRDVLAREVAVDVASHSPQVDPILDELAEALAEISPLQPEIPYYSATSFDPREEPYCDAYYWVDNLRHTVRFAAAVQAALEDGYRVFTELTPHPLLTHAVDQTARSLDMSAAALAGMRREQPLPHGLRALAGDLYAAGAAVDFAVLYPTGRLINAPLPTWNHRRLLLDDTTRRIAHANTVAVHPLLGSHVRLPEEPERHVWQGEVGTVTQPWLADHQIHGAAALPGAAYCEMALAAARAVLGEASEVRDIRFEQMLLLDDETPIGVTATVEAPGVVPLTVETSHDGRYTRQLAAVLHVVREADDAPDQPPQKNIAELLASHPHKVDGAEVRQWLDKRGHRLGPAFAGLVDAYIAEGAGDTVLAEVNLPGPLRSQVKAYGVHPVLLDACFQSVAAHPAVQGMADGGLLLPLGVRRLRSYGSARHARYCCTTVTACGVGVEADLDVLDEHGAVVLAVRGLQLGTGASQASERARVLGERLLSIEWHERELPENSHAEPGAWLLISTCDATDLVAAQLTDALKVHDAQCTTMSWPQRADHAAQAARLRDQLGTGGFTGVFVLTAPQTGDPDAESPVRGGELVKHVVRIAREIPEITAQEPRLYVLTHNAQAVLSGDRPNLEQGGMRGLLRVIGAEHPHLKASYVDVDEQTGAESVARQLLAASGEDETAWRNDQWYTARLCPAPLRPEERQTTVVDHAEAGMRLQIRTPGDLQTLEFAALDRVPPGPGEIEVAVTASSINFADVLVTFGRYQTLDGRQPQLGTDFAGVVSAVGPGVSELKVGDRVGGMSPNGCWATFVTCDARLATRLPEGLTDAQAAAVTTASATAWYGLQDLARIKAGDKVLIHSATGGVGQAAIAIARAAGAQIYATAGNEKRRDLLRDMGIEHVYDSRSVEFAEQIRRDTAGYGVDIVLNSVTGAAQLAGLKLLALGGRFIEIGKRDIYSNTRLELLPFRRNLAFYGLDLGLMSVSHPAAVRELLSTVYRLTVEGVLPMPQSTHYPLAEAATAIRVMGAAEHTGKLILDVPHAGRSSVVLPPEQARVFRSDGSYIITGGLGGLGLFLAEKMANAGAGRIVLSSRSQPSQKALETIELVRAIGSDVVVECGDIAQPDTADRLVTAATATGLPLRGVLHAAAVVEDATLANITDELIERDWAPKAYGAWQLHRATADQPLDWFCSFSSAAALVGSPGQGAYAAANSWLDTFTHWRRAQDLPATSIAWGAWGQIGRAIAFAEQTGDAIAPEEGAYAFETLLRHNRAYSGYAPVIGSPWLTAFAQHSPFAEKFQSLGQNRSGTSKFLAELVDLPREEWPDRLRRLLSKQVGLILRRTIDTDRLLSEYGLDSLSSQELRARVEAETGIRISATEINTTVRGLADLMCDKLAADRDAPAPA

SEQ ID NO: 5435 - protein, 302 aa, Streptococcus sobrinus
LDSQKEICVLGGSKIGLVELPWALMNPGDLLLLPDPGYPDYLSGVALGRVDYETFPLLAENDFLPDLAAIPEEIARRAKFIYINYPNNPTGRVATSDFYQDLVAWAKKYQVGVVSDFAYVPWATRAMKILAFCLHRGPRRSVLNSIPSPRPLTWPAGRLAFAAGNADMIEALNLIQDHLFVSIFPAIQDAGVAALLDPQAKEAIVQLNQIYDQRREAFVQASAKIGWQAFPSKGSFYAWMPVPRGYTSQSFADLLLEKAHVAVAPGVGFGQAGDGYVRIGLLVEPERLAEAVERIGALNLFG

SEQ ID NO: 5436 - protein, 138 aa, Zea mays
TAPSTHAAGISAAVYAAYYFLLDRRAGALAALFCYLCWAASGALSARLGFSVGWKVVVVAQLFCWIMQFIGHGVFEKRAPALLDNLVQAFLMAPFFVLLEILHTFGGYEPYPGFHDKVSKLIEEARKEWEDKKSKKSS

SEQ ID NO: 5437 - protein, 500 aa, Mycobacterium tuberculosis CDC1551
MTTLWQPHRNDYSPIPGRGVHARRGARRPRPRGGRAERPGTGQLTRSGRRALLVGLTAASVGVLYGYDLSAIAGALLSLSEEFELTTREQELLTTTAVLGQIAGALGGGILANAIGRKKSVVLIVAGYAVFALLGATSVSVPMLVVARLLLGVTIGLSVVVVPVYVAESAPAAVRGSLVTAYQLATLSGIVVGYLVGYLLAGSHGWRAMFGLAAAPATLLLPLLWRMPIPPAGICSRAGSPTRVAAADPAGRDIDAELADMAAAVDERGGGIGEMVRRPYLRATLFVIALGFLVQITGINAIIYYSPRLFAAMGFAGYFAMLALPAMVQVAGLAAVCASLFLVDRLGRRPILLSGIATMITADAVLITVFANDSDGGTGLVLGFAGVLLFIIGFNFGFGSLVWVYAAESFPSRLRSMGSSLMLTSTLTANAIVAAFSLTMLRVLGGAGVFAVFGTFAVVAFVVVYRFAPETKGRKLEEIRHFWENGGRWPAERSPAADEP

SEQ ID NO: 5438 - protein, 461 aa, Chlamydophila pneumoniae J138
MTQEFDCVVIGAGPSGYVAAITAAQSKLRTALIEEDQAGGTCLNRGCIPSKALIAGANVVSHIKHAEQFGIHVDGYTIDYPAMAKRKNTVVQGIRQGLEGLIRSNKITVLKGTGSLVSSTEVKVIGQDTTIIKANHIILATGSEPRPFPGVPFSSRILSSTGILELEVLPKKLAIIGGGVIGCEFASLFHTLGVEITVIEALDHILAVNNKEVSQTVTNKFTKQGIRILTKASISAIEESQNQVRITVNDQVEEFDYVLVAIGRQFNTASIGLDNAGVIRDDRGVIPVDETMRTNVPNIYAIGDITGKWLLAHVASHQGVIAAKNISGHHEVMDYSAIPSVIFTHPEIAMVGLSLQEAEQQNLPAKLTKFPFKAIGKAVALGASDGFAAIVSHEITQQILGAYVIGPHASSLIGEMTLAIRNELTLPCIYETVHAHPTLSEVWAEGALLATNHPLHFPPKS

SEQ ID NO: 5439 - protein, 426 aa, Exiguobacterium sp. 255-15
MKLPRGTFDVLPGTVERWQYIENQLREISKRYNYKEIRTPIFEETELFKRGVGETTDIVQKEMFMLEKRGKEQFTLRPEGTAAVVRSFVTNKLYGAANQPVKLFYIGPMFRYERPQAGRFRQLHQYGVEALGSEEPAIDAEVISLAMSIYRSFGLKKLKLVINSLGDSESRAAHREALVNHFKPVAHELCQDCQNRLEVNPLRVLDCKVDRNHPSMATAPSILDFLNPASKEYFDQVLLHLDALGIEYVIDPTLVRGLDYYNHTSFEIMSEAEGFGAITTLCGGGRYNGLVEQIGGPATPGIGFGIGIERLLMALENEGVLPEIDDAIDVFIVAQGNDEVEKTATRLLQLMRLEGLAADRDYLGRKFKGQFKAADRLKARFTVILGDEEVERGAAALKDMSTGEQIDVPLSAVADTIVAKLKEEVQ

SEQ ID NO: 5440 - protein, 149 aa, Glycine max
  unsure (1)..(149): unsure at all Xaa locations
MAHDTTVGLSMAGVVAPFTGLKCMAGFPTRKTNNDITSIASNGGRVQCMQVWPPVGKKKFETLSYLPDLDDAQLAKEVEYLLRKGWIPCLGFELEPRFVYREHNRXPGYYDGRYWTMWKLAMFGWPGASQEWNELKELPLYTGAGYCYH

SEQ ID NO: 5441 - protein, 354 aa, Glycine max
PSSPHKSASSSCTSCAPSGAAYQISSKLPGNLKVVFFTNSGTEANELAILIARLYTGCHDIISLRNAYHGNAAGTMGATAQSIWKFNVVQSGVHHAVNPDPYRGIFGSDGEKYARDVQDIINFGTSGNVAAFISEAIQGVGGIIELAPGYLPAVYNTIKKAGGLFIADEVQAGFGRTGSHFWGFEAHNVVPDIVTMAKGIGNGIPLGAVVTTPEIAEVLTRRSYFNTFGGNPVCTAAGLAVLKVIEKEQLQQNAFVVGSYLKERLTALKDKYELIGDVRGRGLMLGVELVTDRELKIPAKGETLHVMDQMKELGVLIGKGGYYGNVFRITPPLCFTKEDADFVADAMDLTLSRM

SEQ ID NO: 5442 - protein, 252 aa, Prunus fremontii
AHYKSEADVGNAIAEAIQSGLVKREELFITSKASNHGHVVEACKNSLKKLQLDYLDLYLVHYPLATKHSGVGTTASLLDENKVLDIDVTVSLETTWHDMEKTVDLGLVRSIGLSNYELFLTRDCLSYAKIKPQVSQFETHPYFQRESLVRFCKKHGVVPMAHTPLGGATANVNAFGSISPLEDPVLIGLAKKYQKSVAQIALRWNIERGTPVIPKSSKVERLKENLEVLNFKLEKEDIELINTIDKKSRTTL

SEQ ID NO: 5443 - protein, 252 aa, Prunus dulcis
AHYKSEADVGNAIAEAIQSGLVKREELFITSKASNHGHVVEACKNSLKKLQLDYLDLYLVHYPLATKHSGVGTTASLLDENKVLDIDVTVSLETTWHDMEKTVSLGLVRSIGLSNYELFLTRDCLSYAKIKPQVSQFETHPYFQRESLVRFCKKHGVVPMAHTPLGGATANVKAFGSISPLEDPVLIGLAKKHQKSVAQFALRWNLERGTPVIPKSSKVERLKENLEVLNFKLEKEDIELINTIDKKFRTTL

SEQ ID NO: 5444 - protein, 233 aa, Prunus persica
NAIAEAIQSGLVKREELFITSKASNHGHVVEACKNSLKKLQLDYLDLYLVHYPLATKHSGVGTTASLLDENKVLDIDVTVSLETTWHDMEKTVSLGLVRSIGLSNYELFLTRDCLSYAKIKPQVSQFETHPYFQRESLVRFCKKHGVVPMAHTPLGGATANVKAFGSISPLEDPVLIGLAKKYQKSVAQIALRWNIERGTPVIPKSSKVERLKENLEVLNFKLEKEDIELINT

SEQ ID NO: 5445 - protein, 147 aa, Triticum aestivum
  unsure (1)..(147): unsure at all Xaa locations
MXPTVMGSSGTSVAPFQGLKSTAGLPVSRRSNGASLGSVSNGGRIRCMQVWPIEGIKKFETLSYLPPLNXEXLLKQVDYLIRSKWXVACLXFSKGGFIFREHNATPGYYEXXVLGKCGKLAMFGVEPTPQXVINEVGRRSKKGVTLA

SEQ ID NO: 5446 - protein, 589 aa, Neisseria meningitidis Z2491
MTVQTKTKGLAWQEKPLSDNERLKTESNFLRGTILDDLKDPLTGGFKGDNFQLIRFHGMYEQDDRDIRAERAEAKLEPLKFMLLRCRLPGGIIKPSQWIELDKFARENSHYRSIRLTNRQTFQFHGVPKAKLQTMHRLLHKLGLDSIATAADMNRNVLCTSNPIESELHRQAYEYAKKISEHLLPRTRGYLDVWVDGKKVQSSDDFLQEDEPILGKTYLPRKFKTAVVIPPLNDVDCYGNDLDFVAISDGNGQLAGFNVLAGGGLSMEHGNTKTYPNISLELGFVPPEHALKAAEAVVTTQRDFGNRSDRKNARTRYTIQNMGLDNFRAEVERRMGMPFEPIRPFKFTGRGDRIGWVKGIDGNWHLTLFIESGRLVDEGGKQLLTGVLEIAKIHKGDFRITANQNLIVANVPEGGKARIEQLARSYGLIHDGVSKLRENAMSCVSFPTCPLAMAEAERVLPDFIGELDKIMAKHGTSDDYIVTRITGCPNGCGRAMLAEIGLVGKAVGRYNLHIGGDREGVRIPRLYKENITLPEILAELDDLIGKWAAERNIGEGFGDFAIRTGIVKPVLNAPVDFWDASKAVAIARA

SEQ ID NO: 5447 - protein, 252 aa, Prunus maritima
AHYTSEADVGNAIAEAIQSGLVKREELFITSKASNHGHVVEACKNSLKKLQLDYLDLYLVHYPLATKHSGVGTTASLLDENKVLDIDVTVSLETTWHDMEKTVDLGLVRSIGLSNYELFLTRDCLSYAKIKPQVSQFETHPYFQRESLVRFCKKHGVVPMAHTPLGGATANVKAFGSISPLEDPVLIGLAKKYQKSMAQIALRWNLERGTPVIPKSSKVERLKENLEILNFKLEKEDIELINTIDKKSRTTL

SEQ ID NO: 5448 - protein, 231 aa, Prunus maritima
  unsure (1)..(231): unsure at all Xaa locations
NAIAEXXQSGLVKREELFITSKASNHGHVVEACKNSLKKLQLDYLDLYLVHYPLATKHSGVGTTASLLDENKVLDIDVTVSLETTWHDMEKTVDLGLVCSIGFSNYELFLTRDCLSYAKIKPQVSQFETHPYFQRESLVRFCKKHGVVPMAHTPLGGATANVKAFGSISPLEDPVLIGLAKKYQKSVAQIALRWNLERGTPVIPKSSKVERLKENLEILNFKLEKEDIELI

SEQ ID NO: 5449 - protein, 358 aa, Zea mays
MVPGYDCAASVLLCAEDNAAILGLDDDGEESSWAAAATPPRDTVAAAAATGVAVDGILTEFPLLSDDCVATLVEKEVEHMPAEGYLQKLQRRHGDLDLAAVRKDAIDWIWKVIEHYNFAPLTAVLSVNYLDRFLSTYEFPEGRAWMTQLLAVACLSLASKIEETFVPLPLDLQVAEAKFVFEGRTIKRMELLVLSTLKWRMHAVTACSFVEYFLHKLSDHGAPSLLARSRSSDLVLSTAKGAEFVVFRPSEIAASVALAAIGECRSSVIERAASSCKYLDKERVLRCHEMIQEKITAGSIVLKSAGSSISSVPQSPIGVLDAAACLSQQSDDATVGSPAVCYHSSSTSKRRRITRRLL

SEQ ID NO: 5450 - protein, 493 aa, Microbotryum violaceum
MVNVAYDTTGTLVANVDGTQTVYNGGDMAWVLVAGVLVMIMSPGVGFLYSGLLRRKNALSMMMLGVLVYAVITIQWFFWGYSLAFSSTGSAFIGDLKHFGLMNVTLEPSAGSSKIPALLYYFYQSMFATVTVVILVGGIAERARILPLLIFCFCWATIVYDPIANWVWNPNGWLYKLGELDFAGGGPVHITSGTAGFAWSLYLGRRRGYGTAKLAYRPHSVFQIILGTVFLWFGWFGFNGGSELAMNLRAVQASTVTNIAAAMGGITWFAMDWFYTKKWSAVSMCSGILAGLVGITPAAGYIGSPAALAIGFLTAIACNFGTGLKVLLGIDDAVDSFALHAIGGYCGSALTALFADSRVAGFDGYTEIPGGWINHNYIQLGWQLAGATTIMAYTFVVTYLLLFVIDHIPGLKLRATEDMEILGIDETELGENAYDFVFRNRDLENPEEFSELHNRATGEDLSRQVSHHSSSSHNKDIKSPHSAVPVTEEKLSV

SEQ ID NO: 5451 - protein, 97 aa, Glycine max
  unsure (1)..(97): unsure at all Xaa locations
MACRKMITLCLIDCLSLFSLTKNXGLXAKVPFLDKNFIGVAMNMDPDYKMIKQEHCRIXKCVLKRPFDDEERPYLXRHGMQLMEQVSDVSGYGWMHG

SEQ ID NO: 5452 - protein, 308 aa, Oryza sativa (japonica cultivar-group)
MASFRLMIAAVSLSLVQLSMGSRRLMELYIPPASDQLTYHHGSVLSGDIPVSILWYGKFTPTQMSIIADFVVSLTGAPNAATPSVGQWWGTIEQLYLSNAATNSQTSTRVLLDEQVSDEQCSLGKSLTLAQIDQLAARVGTKRGGVALVFTDEDVTVEGFCSSRCGKHGSDASAGTTHIWVGNSAKQCPGQCAWPFAQPVYGPQGTPLVAPNNDVGADGMVMILASMVAGTVTNPYGDGFYQGPQDAPLEACSACPGVYGSGAYPGNAGKLLVDATTGASYNANGANRRKYLLPALYNPATSSCDTLV

SEQ ID NO: 5453 - protein, 678 aa, Oryza sativa
MDGLVGLLKIRVVRGINLAYRDTRGSDPYVVLRLGKQCLTEFCVLIILQKVKTSVKKKSVNPIWHEELTLSIMNPIAPIKLGVFDKDTFSRDDPMGDAEIDLEPFMEVLNMDPENIRNGSIIKTIRPSNQNCLADESHLFWRNGKFVQDIILRLRNVESDESKGQVQLKGRGKEDDDAFVRRRRRRWLWTAGKMFGGGGGGGRKPLDYEELNENVKKVQYAVRGELYLRASELQKEGKKIIFTNVGNPHALGQKPLTFPRQVVALCQAPFLLDDPNVGLIFPADAIARAKHYLAMAPGGLGAYSDSRGIPGIRKEVAEFIERRDGYPSDPELIYLTDGASKGVMQMLNTIIRNERDGILVPVPQYPLYSAAISLFGGSLVPYYLEEEANWGLDFVNLRQTVASARSKGITVRAMVIINPGNPTGQCLSEGNIKELLKFCFHENLVLLADEVYQQNIYQDERPFISARKVLFDMGPPMSREVQLVSFHTVSKGYWGECGQRGGYFEMTNLPPKTVDEIYKVASIALSPNVPGQIFMGLMVNPPKPGDISYLKFSAESKSILESLRRRARLMTDGFNSCRNVVCNFTEGAMYSFPQIRLPPKAIDAAKRAGKAADVFYCLKLLEATGISTVPGSGFGQKEGVFHLRTTILPAEEDMPAIMTSFKKFNDTFMDQYDGYSRM

SEQ ID NO: 5454 - protein, 87 aa, Glycine max
DSSMISSPMLPLSTVARAGMYAPFSGLESMAVFPTRMTNNDITSFASYLGILQCMSGCAPDVKKTFDTLSYLPDLDDALLDYEVSIL

SEQ ID NO: 5455 - protein, 267 aa, Bacillus cereus ATCC 10987
MLTKHRILFIGAGRMAEAIFSGLLKTSKEYIEEIIVSNRSNVEKLEQLQARYNVSTTTDWKQHVTSVDTIVLAMPPSAHEGLLAELSPLLSHQLVVTVAAGIGPSYLEERLPKGTPVAWIMPNTAAEIGKSISLYTMGQSVTEIHQETLQLLLRGIGTSQLCTEEEVHQLTAVTGSAPAFLYYFAESLIEATKSYGVDEATAKHLVIQMISGSASMLEQTQDPANLREQVTTPGGSTAEGLKALYEYNFSEAIQKAVEATNKKARGK

SEQ ID NO: 5456 - protein, 338 aa, Mycobacterium tuberculosis CDC1551
MLGGKGGDGGNGDHGGPATNPGSGSRGGAGGSGGNGGAGGNATGSGGKGGAGGNGGDGSFGATSGPASIGVTGAPGGNGGKGGAGGSNPNGSGGDGGKGGNGGAGGNGGSIGANSGIVGGSGGAGGAGGAGGNGSLSSGEGGKGGDGGHGGDGVGGNSSVTQGGSGGGGGAGGAGGSGFFGGKGGFGGDGGQGGPNGGGTVGTVAGGGGNGGVGGRGGDGVFAGAGGQGGLGGQGGNGGGSTGGNGGLGGAGGGGGNAPDGGFGGNGGKGGQGGIGGGTQSATGLGGDGGDGGDGGNGGNSGAKAGGAGGKGQAGQPNSGTEPGFGGDGGLGGAGATP

SEQ ID NO: 5457 - protein, 291 aa, Lactobacillus gasseri
MTEVPTITLNDGNKMPQVGLGVFRIPDHDKARQTVEMALANGYRMIDTAEAYDNQIAVGEAIAESAVNRDDIFLTTKIWVSNMSFEKATKAIDHDLKELGTDYIDLVLLHQPYGDTFGAWNALEAAKSAGKIRSIGLSNFYPDQYMNLELAHEDKPAINQIEISPWFQQANDVKFFQGRNVAVEAWAQFANGKHDIFNNKVLTEIAETHHKTVGQVILRWLTQKSIIVIPKAVHDEHQKENINIFDFELTQDEMAKIGELDKGESQFFDHRDPAAIDDIFGESLKQLRDSE

SEQ ID NO: 5458 - protein, 229 aa, Zea mays
  unsure (1)..(229): unsure at all Xaa locations
GRDCHCGMLFSCCSSQCECDDTCTNKSFQHRPLKKTKLIKTEKCGHGLVAEDEIKKGEFVIEYVGEXNMVIDATNKGNRSRFINHSCEPNTAMQKWTVDGETRVGIFALRDIKIGEELTYDYKFVQFGAAQVCHCGSSKCRKMLGTTKYSGSSQNHRTKKKKRKTSCENCIQQFLRLWHPRQKMYVGCWIVDFDQGTKMHTLQFIDHHTEKFDLKEEEWHFLEVDSDED

SEQ ID NO: 5459 - protein, 410 aa, Acinetobacter sp. ADP1
MDVRLSDRVNAIKPSPTLAVTNKAAELKAAGKNVIGLGAGEPDFDTPQHIKDAAIEAINNGFTKYTAVDGTPGLKKAIIAKFKRDNNLDYQANQILVSCGGKQSFFNLALALLNKGDEVIIPAPYWVSYPDMVIIAEGTPVIVKCGEDQRFKITPEQLEAAITPNTRLLVLNSPSNPTGMIYTKAELEALADVLRKHPQVYIASDDMYEPIRWEDEFYNIATVAPDLYDRTLVLNGVSKAYAMTGWRIGYAAGPAKIIGAMKKIQSQSTSNPTSISQVAAEAALNGPQDVLEPMIEAFKRRHDLVVNGLNEIHGISCLPADGAFYAYANIRPLIRAKGLKSCTEFSEWLLEETGVAVVPGDAFGLGGFMRISYATADDVLVDALARIKKAADSIEGIDAAIASIEAEKNA

SEQ ID NO: 5460 - protein, 252 aa, Prunus maritima
AHYKSEADVGNAIAEAIQSGLVKREELFITSKASNHGHVVEACKNSLKKLQLDYLDLYLVHYPLATKHSGVGTTASLLDENKVLDIGVTVSLETTWHDMEKTVDLGLVRSIGLSNYELFLTRDCLSYAKIKPQVSQFETHPYFQRESLVRFCKKHGVVPMAHTPLGGATANVKAFGSISPLEDPVLIGLAKKYQKSVAQIALRWNLERGTPVIPKSSKVERLKENLEILNFKLEKEDIELINTIDKKSRTTL

SEQ ID NO: 5461 - protein, 427 aa, Exiguobacterium sp. 255-15
MKTETLTMPQLGESVTEGTISLWLVKPGDTVKKYDPIAEVITDKVTAEVPSSFDGVIDKLLAEEGDTLQVGEAIVTLQVSGGSTEVAATEEAVPAIEETPVSSDQSMKKRYSPAVLKLSAEHGIDLEQVSGTGAGGRITRKDLLKIVETGQIKQPDTVEAPTIESVPAAKPAEQRESAQPSRPQAAKSTASTTEDGDIEIPTAGVRQAIATNMVRSKHEAPHAWLMIEVDVTNLVEARNRHKDAFFKQEGVKLTFLPFFMKATVEGLKKHPIMNSTWAGDKIIQKKAINLSLAVATQEALFVPVVKNADELSIKGLARSIDDFGKRAQAGRLSSSEMQGGTFTVNNTGSFGSIQSAPILNFPQAAILSVESIVKRPVWINGMFAARDMVNLCMSIDHRVLDGLVAGQFLQTVKQSLESIDPNQLSLY

SEQ ID NO: 5462 - protein, 252 aa, Prunus maritima
AHYKSEADVGNTIAEAIQSGLVKREELFITSKASNHGHVVEACKNSLKKLQLDYLDLYLVHYPLATKHSGVGTTASLLDENKVLDIDVTVSLETTWHDMEKTVDLGLVRSIGLSNYELFLTRDCLSYAKIKPQVSQFETHPYFQRESLVRFCKKHGVVPMAHTPLGGATANVKAFGSISPLEDPVLIGLAKKYQKSVAQIALRWNLERGIPVIPKSSKVERLKENLEILNFKLEKEDIELINTIDKKSRTTL

SEQ ID NO: 5463 - protein, 163 aa, Solanum demissum
MEQVIGDDGESGGDRHASIFVIGRQLFVAMLMLDTWQYFMHQYMHQNKFLYKHIHAQHHQLIVPYAFGALYNHPLEGLILDTIGGALAFLVSGMSPRTSIFFFSFATIKTVDDHCGLWLPGNLFHIFFKNNSAYHDIHYQLYGTKYNYSQPFFVTWDRILGTY

SEQ ID NO: 5464 - protein, 505 aa, Populus balsamifera subsp. trichocarpa X Populus deltoides
MDLLLLEKTLLGSFVAILVAILVSKLRGKRFKLPPGPIPVPVFGNWLQVGDDLNHRNLTDLAKKFGDIFLLRMGQRNLVVVSSPDLSKEVLHTQGVEFGSRTRNVVFDIFTGKGQDMVFTVYGEHWRKMRRIMTVPFFTNKVVQQYRYGWEEEAAQVVEDVKKNPEAATNGIVLRRRLQLMMYNNMYRIMFDRRFESEDDPLFNKLKALNGERSRLAQSFDYNYGDFIPILRPFLRGYLKICQEVKERRLQLFKDYFVDERKKLASTKNMSNEGLKCAIDHILDAQKKGEINEDNVLYIVENINVAAIETTLWSIEWGIAELVNHPEIQKKLRHELDTLLGPGHQITEPDTYKLPYLNAVIKETLRLRMAIPLLVPHMNLHDAKLGGFDIPAESKILVNAWWLANNPAHWKNPEEFRPERFLEEEAKVEANGNDFRYLPFGVGRRSCPGIILALPILGITLGRLVQNFELLPPPGQSKIDTAEKGGQFSLHILKHSTIVAKPRSF

SEQ ID NO: 5465 - protein, 250 aa, Posidonia oceanica
MPFSRIAMGRREEVTHGDALKATLAEFISTLIFVFAGEGSGIAYNNLSGDGDTTASSLIAAALAHGLGLFVAVSVGANISGGHVNPAVTFGAFVGGNITFLRGILYWHGQLLGSIVACLLLKFVTGGMTTGGFAVSGVSVWNALVFEIVMTFGLVYTVYATAIDPKKGAIGTIAPLAIGLIVAANIFVGGVFTGASMNPAVAFGPALVSWNWVNHWIYWVGPLVGAAIAGIVYQLLFINHTHEQLPTTDY

SEQ ID NO: 5466 - protein, 231 aa, Prunus maritima
AHYKSEADVGNAIAEAIQSGLVKREELFITSKASNHGHVVEACKNSLKKLQLDYLDLYLVHYPLATKHSGVGTTASLLDENKVLDIDVTVSLETTWHDMEKTVDLGLVRSIGLSNYELFLTRDCLSYAKIKPQVSQFETHPYFQRESLVRFCKKHGVVPMAHTPLGGATASVKAFGSISPLEDPVLIGLAKKYQKSVAQIALRWNLERGTPVIPKSSKVERLKENLEILNF

SEQ ID NO: 5467 - protein, 492 aa, Capsicum annuum
MDLSKYRPSSAYDSPFLTTNAGGPVYNNVSSLTVGPRGPVLLEDYHLIEKLATFVRERIPERVVHARGASAKGFFEVTHDISHLTCADFLRAPGVQTPVICRFSTVVHERGSPESIRDIRGFAVKFYTREGNFDLVGNNVPVFFNRDAKSFPDTIRALKPNPKSHIQENWRILDFFSFLPESLHTFAFFYDDVCLPTDYRHMEGFGVHAYQLINKAGKAHYVKFHWKPTCGVKSMTEEEAIRVGGTNHSHATKDLYDSIAAGNYPEWKLFIQIMNPEDVDKFDFDPLDVTKTWPEDILPLMPVGRLVLNRNIDNFFAENEQLAFNPGHIVPGVYYSEDKLLQTRIFAYADTQRHRIGPNYMQLPVNAPKCAHHNNHRDGAMNFMHRDEEVDYLPSRFDPCRPAEQYPIPSCVLTGRREKCVIPKENNFKQAGERYRSWAPDRQDRYINKWVESLSDPRATHEIRSIWISYLSQADKSCGQKVASRLTVKPTM

SEQ ID NO: 5468 - protein, 252 aa, Prunus takesimensis
  unsure (1)..(252): unsure at all Xaa locations
AHYKSEADVGNAIAEAIXSGLVKREELFITSKASNHGHVVEACKNSLKKLQLDYLDLYLVHYPLATKHNGVGATASLLDENKVLDIDVTVSLETTWHDMEKTVSLGLVRSIGLSNYELFLTRDCLSYAKIKPQVSQFETHPYFQRESLVRFCKKHGVIPMAHTPLGGATANVKAFGSISPLEDPVLLALAKKYQKSVAQIALRWNLERDTPVIPKSSKVERLKENLEVLNFKLEKEDIELINTIDKKSRTTL

SEQ ID NO: 5469 - protein, 120 aa, Zea mays
  unsure (1)..(120): unsure at all Xaa locations
KLARDIYEHAXVLSGKLEDPDAXERDFXXLKPYYMDTXGIIPASPEEXXXLRLXXXXXXXHXRXXDXHTXLXXLPVKXLXHXXIKHAXXXXXXLXXXXXGRLPRXGPCVXNXAPAVGRRG

SEQ ID NO: 5470 - protein, 527 aa, Schizosaccharomyces pombe
DSTTKPSTVKNAISSSQIKNEKFSQEVLLQFNDPSFTSEVGESPQWQSFGDANILEPLKNELVKNEESTMSELLLCPICGITLESLTVDANIHVNDCLDGRTTEAVSKKLKKDSVVKADPSNSSTFPISDSCKQALLPLPGKQINVRSVVPFYKLMPYNIPFAVDAFAYGAIDGVEAYFLSHFHSDHYGGLTPKWKHGPIYCSEVTGNLLINVMHVDEQYVKRLKLNQPYNIMGITVYVLDANHCPGSAMFVFETLQSNQTRRVLHCGDFRASKDHVMHPVLREKTIHKVYLDTTYLNPKYTFPPQADVVQACADKAISIKKSTDSRLLVVVSTYSIGKEKVAVAIAKSLSSRIYVVPRKMHIIKQLENQDLIDLLTDDPTQASVHMVTMMGIHPNSLLDYLEQYNSSFDKIIGYKVTGWTFQPLENRAQLSSSLDSIISRPPKFVEYDLRAIRGSTDKVAAFVAPYSEHSSFYDLTMFCLSMNIGHIIPTVNVGSQRSREKMNVWLDRWAWRRKKQGLLSLENVDW

SEQ ID NO: 5471 - protein, 555 aa, Eremothecium gossypii
MATTNTFSDFKLASELPAWAKLQELYEKKGKTLSLKEAFATDEQRFQKYSRTFSNHDGSKILFDFSKNLVDDEILGALAQLAREANVTQLRDQMFNGEHINSTEDRAVYHVALRNRANKPMYVDGKNVAPEVDAVLQHMKEFSEQVRSGAWKGYTGKSIKDVVNIGIGGSDLGPVMVTEALKHYAGPLKVHFVSNIDGTHLAETLKEVDPETTLFLVASKTFTTAETITNATSAKNWFLSKTGNNPAHISKHFAALSTNETEVAKFGIDTKNMFGFESWVGGRYSVWSAIGLSVALYIGFDQFEDFLKGAEAVDKHFTSTPIEDNIPLLGGLLSVWYNNFFDAQTHLVVPFDQYLHRFPAYLQQLSMESNGKSVTRGNVFANYSTGSILFGEPATNAQHSFFQLVHQGTKVIPSDFILAAQSHNPIENNLHQKMLASNFFAQAEALMVGKDEAQVKAEGATGGLVPHKVFSGNRPTTSILVQKITPANLGALIAYYEHVTFTEGAIWNINSFDQWGVELGKVLAKVIGKDLDTTGETTSHDASTNGLINQFKAWL

SEQ ID NO: 5472 - protein, 322 aa, Paenibacillus macquariensis
MTIKKIAVLTSGGDSQGMNAAVRAVVRSGLFYGLEVYGIQRGYQGLLNDDIFSMDLRSVGDIIQRGGTVLQSARCKEFMTPEGQQKGADILRKRGIDGLVVIGGDGSYHGANKLSKLGINTMALPGTIDNDISYTDFTIGFDTSVSIVVDAINKLRDTMSSHERSSIVEVMGRHCGDIALYAGLASGAETIIVPEVPFDMDEIAERMKQNFAHGKRHSIVVVAEGAGNGENVAKQLVERCETLEPRVTVLGHIQRGGTPTPADRNLASRLGDFAVRMLIAGESAKACGIISNELVLTDIDKVVNSKKEFNMELYELAARLSQ

SEQ ID NO: 5473 - protein, 168 aa, Glycine max
  unsure (1)..(168): unsure at all Xaa locations
MGSLALETEDVISDIYLSLGLKESDKGVGVPRVLSLLSSLLERSVQRNETLLEAKHVKDVVTVFHGLRAPTLSVRKYIDRIFKYSGCSPSCFVVAHIYVDRFIQHTEIKLTSLNVHRLLITSIMLAAKFIDDAFYNNAYYAKVGGVSTSEXNRLEMSXLXGIEFRLQF

SEQ ID NO: 5474 - protein, 195 aa, Haemophilus influenzae Rd KW20
MKQKIVLATGNKGKVKEMADVLSDFGFEVIAQTDLGIESPEETGLTFVENALLKARYASEKSGLPAIADDSGLVVSALNGAPGLYSARYAGEEGNDAKNREKLLAELAHIAQEQRQAKFVSCIVFLQHPTDPSPIIAEGECCGVIGFEEKGENGFGYDSLFFSPEQGCTFAELETAEKKKISHRAKALSVLKSKL

SEQ ID NO: 5475 - protein, 1507 aa, Mycobacterium tuberculosis CDC1551
MVMSLMVAPELVAAAAADLTGIGQAISAANAAAAGPTTQVLAAAGDEVSAAIAALFGTHAQEYQALSARVATFHEQFVRSLTAAGSAYATAEAANASPLQALEQQVLGAINAPTQLWLGRPLIGDGVHGAPGTGQPGGAGGLLWGNGGNGGSGAAGQVGGPGGAAGLFGNGGSGGSGGAGAAGGVGGSGGWLNGNGGAGGAGGTGANGGAGGNAWLFGAGGSGGAGTNGGVGGSGGFVYGNGGAGGIGGIGGIGGNGGDAGLFGNGGAGGAGAAGLPGAAGLNGGDGSDGGNGGTGGNGGRGGLLVGNGGAGGAGGVGGDGGKGGAGDPSFAVNNGAGGNGGHGGNPGVGGAGGAGGLLAGAHGAAGATPTSGGNGGDGGIGATANSPLQAGGAGGNGGHGGLVGNGGTGGAGGAGHAGSTGATGTALQPTGGNGTNGGAGGHGGNGGNGGAQHGDGGVGGKGGAGGSGGAGGNGFDAATLGSPGADGGMGGNGGKGGDGGGGGAGGTAVAGTAGKAGDGGAGGDGGKAGDGGAGAAGDVTLAVNQGAGGDGGNGGEVGVGGKGGAGGVSANPALNGSAGANGTAPTSGGNGGNGGAGATPTVAGENGGAGGNGGHGGSVGNGGAGGAGGNGVAGTGLALNGGNGGNGGIGGNGGSAAGTGGDGGKGGNGGAGANGQDFSASANGANGGQGGNGGNGGIGGKGGDAFATFAKAGNGGAGGNGGNVGVAGQGGAGGKGAIPAMKGATGADGTAPTSGGDGGNGGNGASPTVAGGNGGDGGKGGSGGNVGNGGNGGAGGNGAAGQAGTPGPTSGDSGTSGTDGGAGGTGGAGGAGGTLAGHGGNGGKGGNGGQGGIGGAGERGADGAGPNANGANGENGGSGGNGGDGGAGGNGGAGRKAQAAGYTDGATGTGGDGGNGGDGGKAGDGGAGENGLNSGAMLPGGGTVGNPGTGGNGGNGGNAGVGGTGGKAGTGSLTGLDGTDGITPNGGNGGAGMINGGLGGFGGAGGGGAVDVAATTGGAGGNGGAGGFASTGLGGPGGAGGPGGAGDFASGVGGVGGAGGDGGAGGVGGFGGQGGIGGEGRTGGNGGSGGDGGGGISLGGNGGLGGNGGVSETGFGGAGGNGGYGGPGGPEGNGGLGGNGGAGGNGGVSTTGGDGGAGGKGGNGGDGGNVGLGGDAGSGGAGGNGGIGTDAGGAGGAGGAGGNGGSSKSTTTGNAGSGGAGGNGGTGLNGAGGAGGAGGNAGVAGVSFGNAVGGDGGNGGNGGHGGDGTTGGAGGKGGNGSSGAASGSGVVNVTAGHGGNGGNGGNGGNGSAGAGGQGGAGGSAGHGGNGGGATGGDGGNGGNGGNSGNSTGVAGLAGGAAGAGGNGGGTSSAAGHGGSGGNGGSGGSGGSGTTGGAGAAGGNGGAGAGGGSLSTGQSGGPRRQRWCRWQRRRWLGRQRRRRWCRWQRRCRRQRWRWRCRQRRLRRQWRQGRRRCRPWLHRRRGRQGRRWRQRRFQQRQRSRWQRR

SEQ ID NO: 5476 - protein, 1477 aa, Agrobacterium tumefaciens str. C58
MSDYTSASNQDRNAFRVAVIGMAGRFPGASDIESFWDNLVHGRESVKQWTDEELIALGVPPEQLADPDFVRASAPLEGADQFDAEFFGYSPSEAEILDPQQRLFLECAWAALERAGYQGDTFDGSIGVYASSGFNTYLLNLHANAAVRQSISPFELFVANDKDFLATRTAYKLNLRGPAMTVQTACSSSLVAVHVAAQSLIAGECDIALAGGVTVSRSHGYVAREGGILSPDGHCRAFDTDAAGTVPGSGVGVVVLKRLEDALADGDTIDAVIIGSAINNDGALKASFTAPQVDSQALVISEAHAAAGISADSIGYIEAHGTGTSLGDPIEIAALTQAFRKTTPRSGYCAIGSVKTNIGHLDTAAGIAGFIKTVLCLKHGRIPASLHFRQANAKIDFPASPFAVNTVLRDWTALESPRRAGISSLGIGGTNAHVVLEEAPAGASACAKAQPALPQLLVFSARNATALSALLAAHAKAFEANPELALEDIAFTLRHGRKAFSHRQSLVADDVASAAAELHRLAAQKPSIVGSTPSPVFLFPGQGSQYAGMGKDLYERLELFRAPFDACADRLSKIMQRDFRADLFAGHEDIQNTEFAQPALFAVEYALAKAWMAQGVIPQALHGHSIGEYVAACLAGVFDLDTALSLVVARGRLMQQAAPGAMLAVVHPDAPIDRWLGADIALAASNAPGLSVVSGSMDAITRLETELKQARYATRRLKTGHAFHSPMMAQAAARYLEELRHVRLSPPSIAMISNVTGTWLSPSQATDPNYWAAHLEQTVRFDEGMRTLFGIDNAVFIEAGPGSALSGLIREHAIAADRIIPCLGRSRPENETSQYLAALGDYWRTGGQLDWQAVSPEGARVPLATYPFQGQRYWISAETAENQAPITTPVDSARIYRPTWQRLSPATPADCRNRRVLILDEGRIGKSLAARLEGAGAQVYRAIAGDRFDECDFRCFSLAGHTAADFAQLLETLSERGALPQDILYLWPLKPGRRDEIEALLNLVRALTAQGHKGKLTLVTNGAADVTGLESLDDLQSQLPGILKVAGQEYEDLTCRHIDIMVAQDMADQAIADRLLAEFNGTGAVVAIRGPHRWSHGFAPLDLPEPQASARLKKNGVYVVIGNIAEGVGTVWLDHLAKISGTRLSVLQPVEDAETAIQSDAAIDTRQIDCNDPAALGAALDEVVSMHGRIDGIFLSMPQANRQAAAPLSMMDETHLSYNEAVRIAPLRALIEAMEQRRAGFCCIQSSLATVIGGVGLAAYTSGYQAVELLVAAQSRSARMPWFAIGYPLIDVLAAGKRSSLDTNAYAVASDDAWDLTRKIIENGITGTTMLSRSDITVAPTAGKKAQLSKVPVSGRARPAMSTPFIAPRTHTETTVAGIFEEMIGVSGIGVDDGFYELGGHSLLAIRVVAKLRETFPVKIEMRELLFENPTVARVASMITAHMHDEGDLDEMAALLMEIEGLSDSEVQSALGGAEAR

SEQ ID NO: 5477 - protein, 389 aa, Streptomyces vinaceus
MTGPLGAGPQALPAAPLEDWLRERYFQAKTDISSSGVHNYTFGELRALDPALLGTRELDQLMFRDGPSLGDERLRAAVAARVRPGPGHVVMTTHGSSEALYLAFAALVRPGDEVVVATPAYHSLSGLATAAGASLRPWPLRPENGFAPDLDDLRAVLSDRTRLVVVNFPHNPSGACVDPRGRTELLDLVANSQAVLLWDGAFTDLVHDHPPLAEPSQDLDRVLSFGTLSKAYGLPGLRVGWCVVPQDLVSELVRIRDYLTLSLSPLVERVAAVAVEHADALITPRLTEARHNRRRVLEWAAASEGAIDCPVPRGGVTAFPRFTAHTDVTDLCERLLARHGVLVVPGRVFGQADRMRIGFSCPRPELERGLAAISEELGTHARGRRRGTG

SEQ ID NO: 5478 - protein, 380 aa, Chlorobium tepidum TLS
MHFETIAIHDGNTPESCTGSVTPPVYQTSTFARPSLDERGEFFYSRIGNPTRSALESTLALLENGKHATTFASGVAAMMAAMQVLKPGDHVVSSLDVYGGSYRIFEQLMRPWGVETSYAASEATESYIECIRPETRMIWIESPSNPLLQICDIRALAEIANERGIVLAVDNTFASPYFQRPLDLGAHIVVHSTTKYLGGHSDVIGGAVVASDDNLNLTIRNYQGAAGAIPGPWDCWLISRGIKTLKIRMEEHQKNALHLARALEKHPAVSRVIYPGLESHPQHELAKRQMSGFGGMLTIALKGGLPAVRKMIESLKLFVIADSLGGVESLVASPARMTLGPLSQAERDRRACTDDLVRLSIGLENAEDLEADLLQALATI

SEQ ID NO: 5479 - protein, 294 aa, Oryza sativa
  unsure (1)..(294): unsure at all Xaa locations
MPSSTAVVPAAXQEASSRIILVHXAQGHGGWCWYRVATLLRAAGHRVXHAPDLAASGADARXVLRDDDAPTFDDYSRPLLDAVRALPDGERAVLVGHSFGGMSVALAADTLPDKVAAAVFVAALMPDCASPRPDVIEKLTQSSSSSSSSSSSSSSSSSSSPGKLPLTDWVDCATDEEHAPPSVLFGPEFMRRKLYQLSPEEDITLSRSLVRVSSYYVDDMRRQPPFGEDRYGAVRKVYVVCGKDQAIVEAYQRRMIAGCPVEEVREIAGADHMAMFSAPVELAGHLADVANTYT

SEQ ID NO: 5480 - protein, 167 aa, Magnaporthe grisea 70-15
MICVPLILFSGFTIASNTGPLFHLPSWLVIPHLEPTLGTLAALTWGGLYLLLEPVAGTLLAIICLGAAATGNHLVEVDAETTTKAAIAVHVVSWILQFIGHGTFEGRAPALLDNLVQAVFLAPLFVWLELLFSLGYRPELQARVEKAVQKEIAKFKSSKDAKNGKAN

SEQ ID NO: 5481 - protein, 473 aa, Exiguobacterium sp. 255-15
MAREFDVVVLGGGPGGYVAAIRAAQAGKTVAIVEQGKLGGTCLHRGCIPSKAFLKSAAVYQTVKHAATYGVDVPESFLRFEQVKQRKQDIIDGLESGIQHLMKKGKIEVFHGRGSILGPSIFSPMPGTISVEPEEGDGELILPRQLIVATGSRPRPLNGLAFDSEYVLSSDEALDMNALPKSIVIIGGGVIGIEWASMLTDFDVEVTVVEFSDRILPTEDQAVSREVARQLKKRGVKIMTSAAAQSDSFQLTESGVTIDVDRNGDKTTLAADKLLVAIGRMANVEGIGLENTNIIVENGFIQVDDEFRTKDNHIFAIGDVIGRLQLAHVASAEGAKAVETIVNGSTTPLNYAFVPRCIYSVPEAASVGLTEAEAKAAGLDVKTGMFSFNGLGKARIEGEAAGFIKLVSDAKTDDLVGVHIVGPKATELISEGGLALVLNATAWEVGQLVHPHPALSEAFGEAALAVDGLAVHA

SEQ ID NO: 5482 - protein, 247 aa, Zea mays
MGGVCVPPARPRGPEPERLIKEFVTLEAGGKSHVLRGHKSKFAQVIMVYAWSLHPEIGDGFANFLTDIFIGKDKNEDAITRVSAGSYVGSYLSRARFISVNIVVSVLKRLVDWCDYYCGHQLDNGVTANPIKHQLFYASCQAVMYVLCFRVRSIMDYPNLKQQLFRMRIRDILVHPLQPLKVCLPSIVNEFLRQATAASLFHAPAISMHEDAVESDLSKAFGGLNRLDMFFPFDPYLLKESDRFDYQ

SEQ ID NO: 5483 - protein, 252 aa, Prunus fruticosa
VDYKSEADVGNAIAEAIQSGLVKREELFITSKASNHGHVVEACKNSLKKLQLDYLDLYLVHYPLATKHNGVGATASLLDENKVLDIDVTVSLETTWHDMEKTVSLGLVRSIGLSNYELFLTRDCLSYAKIKPQVSQFETHPYFQRESLVRFCKKHGVIPMAHTPLGGATANVKAFGSISPLEDPVLLALAKKYQKSVAQIALRWNLERDTPVIPKSSKVERLKENLEVLNFKLEKEDIELINTIDKKSRTTL

SEQ ID NO: 5484 - protein, 263 aa, Triticum aestivum
  unsure (1)..(263): unsure at all Xaa locations
MSPSSVPAAAVATSTRLILVHGTGHGGWCWYKVATLLRAAGHRVDAPDLAACGADARRLSDAPTFEDYTRPLLDALRDLPDGERAVLVGHSFGGMSIALAAEEFPDKVAAAVFLTAFMPDCDAPRTRVIEEVPVSDWMDSVVDEEHAPPSVFLGPEFVRRKLYQLTSEEDYTLCQSLARVSSYYVADQQQRPPFSAARYGAVTKVYVIAKQDQAMVEEYQRQMIAGIPVAEVXREMADADHMAMLSAPEELAGLLADIANNYT

SEQ ID NO: 5485 - protein, 420 aa, Synechococcus sp.
MVHQPPAGTRDLLPQDVTQKRWIESRLQQVFQQWGYQRIITPTLERLDTLVAGGAVQRSAVIQVQSDEESGLGLRPELTASIARAAVTRLAGSSLPLRLYYLANVFRPAFQGDRLQQRELFQAGVELLGVGGTLADAEVLHVLADALAELGFGQPPLGSWHLVVGEASLTRSLLQPFPKDLREKVRQAIAQFDRVTLESLPLESQLRDRALLLHDLRGQPDQVFAKLQQLTLTPLEQTLRDRLAQLVELYNASAGPQDSPLLLDLSLLRSFDYYTGIVFEVVYETPTGPWVLAQGGRYDRLLDVYDPQAAGQPGIGFSCNIENLQQVLLAANRLPHRPPAIDQLVIPVDSEAYGAALAEAQRLQRQDQLRVELYLDSDRRPEVVQAFAQRRRIGRIVWVSSGSAPQSEAVAVAERATTTC

SEQ ID NO: 5486 - protein, 180 aa, Mesorhizobium loti MAFF303099
MPIVRDKDIEVLFSASAIARRNLELAKEIAGHDYHDLLVISVLKGSFIFAADLIRAMHDVGLSPEVEFIFISSYGAGTTSGEVRVLRDIDNEVAGRDVLLIDDILESGKTLTFTRDLMLSRGAKSCSIAVLLDKRMRRQTALVADYVGFDCPDYFVVGYGMDVAHAFRELPFVGVVKGDA

SEQ ID NO: 5487 - protein, 447 aa, Oryza sativa
MASISGAAAPPSSSAACRLRLRRQLLLRPSHLRLRAPHSIADLSRSSSSSSEQQPSSTPAAPLASRPGQNGSTRGAVEKDPIKLWERYVEWLYQHKELGLFVDVSRMGFTEEFLRRMEPRMQRAFAAMRELEKGAIANPDEGRMVGHYWLRDPGLAPNSFLRTKIETTLDRILAFSQDVVSGKIRFIDNTDPAGIDHQIAQLGPELASTLVIVISKSGGTPETRNGLLEVQKAFRDAGLDFSKQVKENPAALLALCWYWASEGIGNKDMVVLPYKDSLLLLSRYLQQLVMESLGKEFDLDGNRVNQGLTVYGNKGSTDQHAYIQQLREGVHNFFVTFIEVLRDRPPGHDWELEPGVTCGDYLFGMLQGTRSALYSNDRESISVTVQEVTPRAVGALVALYERAVGIYASLVNINAYHQPGVEAGKKAAGEVLALQKRVLTVLNEARH

SEQ ID NO: 5488 - protein, 228 aa, Actinobacillus pleuropneumoniae serovar 1 str. 4074
MKKYFAEFFGTFWLVFGGCGSAVLAAGIPELGIGYAGVSLAFGLTVLTMAYAVGHISGGHFNPAVSIGLLVGGRFNAKDLVPYIVAQVIGAIAAAAVLYTIASGAAGFDVTAGFASNGFAEHSPHGYSMAAALVIEVVLTAFFLIIIMGATDKRAPAGFAPIAIGLALTLIHLISIPVTNTSVNPARSTGVALFQGSWAIEQLWLFWVAPILGAIIGALAYRFIAEEK

SEQ ID NO: 5489 - protein, 457 aa, Lotus corniculatus
MAASSVFSVASHSVSPSNHHAHKGKTKIGGSGLRLANSRSFGSGRISMAVAVNASRFEGIPMAPPDPILGVSEAFKADKCDLKLNLGVGAYRTEELQPYVLNVVKKAENLMLNRGENKEYLPIEGWAAFNKATAELLLGADNPAIKEQRVATVQGLSGTGSLRHAAALIERYFPGAKVLISSPTWGNHKNIFNDARVPWSEYRYYDPKTVGLDFEGMLEDIKSAPEGSFVLLHGCAHNPTGIDPTPEQWVKIADLIQQKNHIPFFDVAYQGFASGSLDEDAASVRLFVSRGMEVLVAQSYSKNLGLYAERIGAINVISSSPESAARVKSQLKRIARPMYSNPPVHGARIVADIVGNPDLFNEWKAEMEMMAGRIKNVRQKLYDSISSKDKSGKDWSFILKQIGMFSFTGLNKNQSDNMTNKWHVYMTKDGRISLAGLSLAKCEYLADAIIDSYHNVS

SEQ ID NO: 5490 - protein, 2740 aa, Pseudomonas fluorescens PfO-1
MWWSKQKSRVTEGQRTLAAPMIMSLEPRMLFDGAVAATVADTAAQADSHATADAAKAPAADHPSASKDTHGQADATPAASPVAVPGQSVVFVDSRVKDTDSLVKGVAPGTQVVKLDAGKDGLQQIADYLDQHQGVSSVQIIAHGNAGDLWLGNSYLSADNVAQRSAILAEIGKDMNVGGDILIYGCYTAEGDRGLSFVDSLAQLTGRDVAASNNRTGIGGDWDLEIATGTIESANVLSTQAMSEYQWGLATWTATNNANTGVGSLRAALASAQNGDIVTFSSGMTVQLTSELLINKNITVDGDLNNDGVADVTLDGQYRTRVVEITSGSTVTLDGLVITRGLVSGNGGNGGYGATGAMGGGIFNAGILTLNNVSVTGNAAAGGGGGGGVTGAFYGGAGGGGGGLGGQGGGHGGTAGPGTGTLGGQAGSAGVGGYGGGYDATHMGGRGGSTTGGAGGVGVSYYSNGGNGGTASNGTISIGGGGGGAGWDKVGGAGGNAAGGIYNASTGTLRIVGTSVISNNIGAGGGGGGGSGQGSNNLNGGDGGRGVGAIWNQGGTVLITAANFSAISGNAAGSGSGGAELGGGVTGSVPLAFAAIYNNGGTLNTAYVEPPTATIVMADTALKIGETSLVTITFSRAVTGFTNADLTIANGTLTAVSSSDGGLTWTATFTPTNNITDSTNLITLDNTGVTAISDGVAGVGTTSSVNYAIDTARPTVTIVMSDTALKIGDTSLVTFTFSEAVTGFTNADLTIANGTLSAVSSSDGGITWTGTFTPTASITDTTNLISLDNTGIADLAGNAGSGTTDSANYVIDTVRPTATIVVADSNLAAGETSLVTITFSEAVSGFTTADLTVANGTLSALSSSDGGITWTVTLTPTSNITDTTNLITLDNTGVVDLAGNAGSGTTNSNNYAIDTARPTATIVVADNSLRIGETSLVTITFSEAITGLTNADLTIANGTLTAVSSSDGGITWTATFTPTASITDATNLITLNNTGIADLNGNAGSGTTDSNNYAIDTVRPTATIVVADNNLRIGETSLVTITFSEAVSGFTNADLTVANGTLSALSSSDGGITWTATFTPSASVTDTTNLITLDNTGIADLAGNAGSGTTDSNNYAIDTQRPTATIVVADSNLSAGETSLVTITFSEAVTGFTNADLTVANGTLTAVSSSDGGITWTATFTPNVGVNDATNLITLANTGIADLSGNTGSGTTNSNNYSIDTVLPTATIVIADNALKIGETSLVTITFSEAVTGFTNADLTIANGTLSAVSSSDGGITWTATFTPTTSITDATNLITLDNSGVQNLSGNAGSGTTDSNNYAIDTVRPTATILVADTALGIGQTTLVTITFSEAVSGFTNADLTIANGTLSAVSSSDGGITWTATFTPSASIADTTNLITLDNTGIADLAGNAGSGTTDSNNYAIDTVRPTATIVVADSNLSAGETSLVTITFSEAVTGFTNADLTIANGTLSAVSSSDGGITWTATFTPTVGIHDATNLITLANTGIADLAGNAGSGTTNSNNYSIDTVLPTATIIVADPSLKIGETSLVTITFSEAVTGFTNADLTIANGTLSAVSSSDGGVTWTATFTPTTSIADATNLITLDNTGVQNLSGNAGSGTTDSNNYSIDTVRPTATIVVADTALGVGQTTLVTITFSEAVTGFTNADLTIANGTLSAVSSSDGGITWTATFTPAAGITDTTNLITLDNTGIADLAGNAGSGTTDSNNYAVDSQRPTATIVLSDNTLSAGETSLVTITFSEAVTGFDNSDLSVANGTLSNVSSSDGGITWTATFTPNIGVIDLTNLIVLNNTGITDLAGNTGTGTTNSPNYSIDTVLPTATIVIADNALKIGETSLVTITFSEAVTGFTNADLTIANGTLSAVSSSDGGITWTATFTPTTNITDATNLITLDNTGVQNLSGNAGSGTTDSNNYSIDTVRPTATIVVADTALGVGQTSLVTITFSEAVTGFTNADLIIANGTLSAVSSSDGGITWTATFTPAAGITDTTNLITLDNTGITDLAGNAGSGTTDSNNYAVDSQRPTATIVMSDIDLRPGETALVTITFSEAVTGFDNSDLSVANGTLSNVSSSDGGLTWTATFTPNIGVSDLTNLIVLNNTGTTDLAGNTGTGTTNSANYQVQTQVPTATIVVADPALKAGETSLVTITFSEAVSGFDNSDLTIANGTLSNVSSSDGGITWTATFTPTANVTDATNLISLNYAGVTNVSGNSGIGTTDSNNFAIDTALPTATIVVADNRLGIGETTTVTFTFNEAVIGFDLGDISVANGSLSNLTSSDGGVTWTATFTPTANVNDPTNLILIDTGGVQDLAGNLGASIAISNNYILDATRPTVNIVVANPNLGIGQSTTVTFTFSEAVSNFDLSDLSVTNGDLSNLSSSDGGKTWTATFTPTANVTDPSNFIALDTSNVTDLAGNTGSTVAVSNNYALDSERPTATVVIANPNLGVGQTSQVTITFNEAVSGFDLSDLSVANGTLSNLSSSDGGKTWTATLTPNANVNSASNAISINTAGVSDLSGNSGSSVSSSGNYVINTVPVPPVTPTTPLIVVTPDPEFRSSDPVAPPPPPNVPLQPIVFTAPTGDLGSPLTFAPLFEQRVIGNGIRPLGDIFINRGALSPSFIAQVFTSSDNGGDGSGHGFLGFGGGDGGVFGSSTLSSLFNQDSSAERDSLNAFGSQSIKGGDISQGLRGVFGAPTLGQQLQQIKDSEQHRVDNLAAALQQIGISEMPA

SEQ ID NO: 5491 - protein, 432 aa, Burkholderia cepacia
SLNDDATFWRNARHHLVRYGGTFEPMIIERAKGSFVYDADGRAILDFTSGQMSAVLGHCHPEIVSVIGEYAGKLDHLFSGMLSRPVVDLATRLANITPPGLDRALLLSTGAESNEAAIRMAKLVTGKYEIVGFAQSWHGMTGAAASATYSAGRKGVGPAAVGSFAIPAPFTYRPRFERNGAYDYLAELDYAFDLIDRQSSGNLAAFIAEPILSSGGIIELPDGYMAALKRKCEARGMLLILDEAQTGVGRTGTMFACQRDGVTPDILTLSKTLGAGLPLAAIVTSAAIEERAHELGYLFYTTHVSDPLPAAVGLRVLDVVQRDGLVARANVMGDRLRRGLLDLMERFDCIGDVRGRGLLLGVEIVKDRRTKEPADGLGAKITRECMNLGLSMNIVQLPGMGGVFRIAPPLTVSEDEIDLGLSLLGQAIERAL

SEQ ID NO: 5492 - protein, 344 aa, Enterococcus casseliflavus
ATAFENDWVKASGLPQEATGFKVAIVGSGPAGLSAAWRLNQLGHQVTVYERSDRFGGLLMYGIPNMKLDKDVVQRRIDLMAELGVTFVANTEIGRDLSAEELAAQYDRVILATGASVPRDLKIPGRELTGVQFAVDYLTEATKDVLKHGKAATSKKLAGKHVIVIGGGDTGNDCIGSAIRQGAASVRQLEITPQLPLTRTDSNPWPEYPMTARTGYGQEEAAEVLQTQVTYHGVSTTAFIGAERGQLIAIETVSVDQQFQPIPGTEQVIKADLVLLAMGFVGAETQLFDAFGVREVYDDYTTNNERVLVAGDAKRGPSLVIWAIREGRLAAEKVDQALRSLVYQ

SEQ ID NO: 5493 - protein, 514 aa, Oryza sativa (japonica cultivar-group)
MNGGDAAAAAATPSHRRLPDFLQSVNLKYVKLGYHYLITHLLTLLLLPLMAVIVLEAGRTDPDDLRQLWLHLQYNLVSVLVLSAVLVFGATVYVLTRPRPVYLVDFACYKPPDKLKVRFDEFLHHSKLCGFSDDCLEFQRKILERSGLSEETYVPEAMHLIPPEPTMANARAEAESVMFGALDKLFKFTGVKPKDVGVLVVNCSLFNPTPSLSAMIVNKYKLRGNIKSFNLGGMGCSAGVIAVDLARDMLQVHRNTYAVVVSTENITQNWYFGNRKSMLIPNCLFRVGGAAVLLSNRGADRRRAKYALKHVVRTHKGADNKAFNCVYQEQDDEGKTGVSLSKDLMAIAGGALKTNITTLGPLVLPFSEQLLFFATLVAKKLFNAKIKPYIPDFKLAFEHFCIHAGGRAVIDELEKNLQLQPVHVEASRMTLHRFGNTSSSSIWYELAYMEAKGRVRRGHRIWQIAFGSGFKCNSAVWHALRNVNPSPESPWEDCIDRYPVELVDGFATHNNTQQ

SEQ ID NO: 5494 - protein, 304 aa, Glycine max
MALNYNIALAFSAVLTLLLFPLPTVGELVEEQPLVLKYHNGQLLKGRITVNLIWYGTFTPIQRSIIVDFINSLSSAPNAPLPSTATWWKTTEKYKVGGGSSALVVGKQFLHSAYSLGKNLKGKDVLALASKFNELKSITVVLTAKDVAVEGFCMSRCGTHGSTRNVKNAARTAYIWVGNSETQCPGQCAWPFHQPIYGPQTPPLVAPNGDVGVDGMVINLATLLAGTVTNPFNNGYFQGPPTAPLEAVSACTGVFGSGSYPGYPGRVLVDKATGASYNAHGANGRRYLVPAMWDPQTSTCKTLV

SEQ ID NO: 5495 - protein, 278 aa, Triticum aestivum
GTSLSLSLSLSLSCQAHTPPALTLPSLLSPHSILLHQAKHTFALSSPMAVAIAEAPFHVLAVDDSVLDRKLIERLLKTSSFQVTTVDSGTKALEFLGLHDEDASISSVHADQLDVEVNVNLIITDYCMPGMTGYDLLKKIKESSSFRDIPVVIMSSENIPSRINRCLEEGANEFFLKPVRLSDMSKLKPHIMKSRCKEHCHQDEDLLSNSETNPTNNSSSSSDTITISSSNPMDNSSGDTISSSNPTDNSSGDSSNIRKRKAADDEILTKTSRPNHNC

SEQ ID NO: 5496 - protein, 388 aa, Deinococcus radiodurans R1
MTSPFRLSARAQSLKPSATVAVTSRALELQRQGLDVISMSVGEPDFDTPPHVKAAGIAAIEEGKTKYTPVSGIPELREAISAKFRRENGLDYAPNAVTVTSGGKQALFNAFFALLNPGDEVLIPAPHWVSYPEMVALTGAVPVTVPTTPQQGFQLDPDALAAAITPRTRMVILNSPGNPTGAVFPPETLRAVADLATQHGLMIVTDEIYEHLVYDAEQVSIGTYAPEHTLTINGASKAYAMTGWRIGYAGGPREVIAAMNALQSQSTSNASSVSQYAALAALEQHEETMRFIDRARTAYRERRDRIVAGLNALGLPTPTPQGAFYVMADTRAIHTDELEAARIILDEAQVAVVPGTDFAAPGQVRLSYATSMDNIEEVLRRLEGVVRR

SEQ ID NO: 5497 - protein, 442 aa, Pseudomonas aeruginosa PAO1
MTLRKIAGLGALLSLALPGVALAAEEPVLNSGDTAWMLISTALVLLMTIPGLALFYGGMVRAKNVLSIMMQCFAITGLITILWVVYGYSLAFDTAGMEKGVLNFNSFVGGLDKAFLSGLTADGLTSATALFPESVFITFQMTFAIITPALIVGAFAERMKFSAMLIFMAVWFTVVYAPIAHMVWSGDGALMWDWGVLDFAGGTVVHINAGIAGLVACLVLGKRKGYPTTPMAPHNLGYTLVGAAMLWIGWFGFNAGSAAAANGTAGMAMLVTQIATAAAALAWMFAEWITHGKPSALGIASGVVAGLVAITPAAGTAGPMGALVIGLASGVICFFAATSLKRALKYDDSLDAFGVHAVGGIVGALLTGIFAAPSLGGFGSVEDIGAQFFVQFKGVAFTVVYTAVVTFVILKVLDLVMGLRVTEEEEAVGLDLALHNERGYNL

SEQ ID NO: 5498 - protein, 816 aa, Neurospora crassa
MPGGSWRALGCRRYLLYLPKIPGPGRAVVNTSTSTSRCGRGLLQNSSISSKIPPPQPTPIANHLPSNIPLRTLSAHAAARDDPSTHSHGNRKQGSSSFLAPHPAERLRYSEDGDGDDSNDYGSSESSWIDTGDIAEQLDHEDPLRQRLYDTLEDDTLVGVVHHRHPKRHRHSGKHVHYHESVSSSSAHSSRPSGQAGVVDKEAIRIPDAAPRTVSRAERLIASIMAGTRNPIHGLTGKPLMFDVSCCPAIYFTSIFVSLGVFLFGYDQGVMSGIITGPYFKDYFNQPTSAQIGTMVAILEIGALISSLLVGRIGDIIGRRKTILYGSCIFFVGGALQTMATDMAMMMTGRIIAGLGVGMLSTIVPVYQSEISPPHNRGKLACIEFSGNIIGYTTSVWVDYFCGFLEGNISWRLPLLMQCIMGALLGLGSLIIVESPRWLLDNDHDEEGIVVIANLYGGGDIHNPRARDEFREIKMGVLLARQEGERTYSEMFKRYSRRVFIAMSAQALAQLNGINVISYYAPLVFESAGWVGHDAVLMTGFNGITYLLSTIPPWYIVDRWGRRHILLTGAVAMVLSLSAISYFLYLDTHWTPSAVVVMVMIYNAAFGYSWGPIPWLYPPEILPLKIRSKGASLSTATNWAFNFLVGEMTPILQELIHWRLYLIHAFFCAVSFVIGEYLLTATPQGIQLTEFPVYFLYPETCGVRLEDMDALFGDSTNAFGTPTVSTPSLHAEVDPLVGPGSPVPRLDIRGRPLASAAIPGLPIDPPDEVEIINKSSSNQNRGGIGGLLSRLVGRRGRGSAEGSDSGSYAPLRQGDD

SEQ ID NO: 5499 - protein, 72 aa, Glycine max
SSSQVLRTRNRAGAGMGAPFTGLKSMAGLKTRKTNDDITYIASNGCRVQCMHETTPIGMKNLETLDYLPDDL

SEQ ID NO: 5500 - protein, 136 aa, Glycine max
HASDHAYGCELRRRSKWLPSMISSPAVTTVNRAGAGMVAPFTGLKSMAGFPTTKTNNDITSIASNSGRVPCMQVWPPACTKNFETLSYLPYLDDAQLAKAVVYLPKKAWISCWAFELEHVYLYREHIMSPGYYYGR

SEQ ID NO: 5501 - protein, 337 aa, Neurospora crassa
MSKAADIPKEQWAQVTEKDGVITYKKIPVPTPGHDEVLVNIKYSGVCHTDLHALDNDWPLPRKTPVIGGHEGAGVVVQKGELVTNVDIGDKVGVKWLMSTCFHCTFCQQALESLCPKAQLSGYTKDGTFQQYCVANAAHLARFPPQTDLSAVAPIMCAGLTVYKGLKESDTRPGQYVAIVGAGGGLGTIGIQKRGEACKKLGASMYIDFKESKDLVADVKKATHDGLGPQGVVLLAPQEQPFQQATGYVRSHGTVVCIGMPAGAKVSMPVFDTVVRMIKVKGSYVGNREDTAEALDFFLRGKVHAPYKVIGLSQLQSVFDEMRANRVIGRYVMDMSK

SEQ ID NO: 5502 - protein, 389 aa, Thermotoga maritima
MGSDKIHHHHHHMVSRRISEIPISKTMELDAKAKALIKKGEDVINLTAGEPDFPTPEPVVEEAVRFLQKGEVKYTDPRGIYELREGIAKRIGERYKKDISPDQVVVTNGAKQALFNAFMALLDPGDEVIVFSPVWVSYIPQIILAGGTVNVVETFMSKNFQPSLEEVEGLLVGKTKAVLINSPNNPTGVVYRREFLEGLVRLAKKRNFYIISDEVYDSLVYTDEFTSILDVSEGFDRIVYINGFSKSHSMTGWRVGYLISSEKVATAVSKIQSHTTSCINTVAQYAALKALEVDNSYMVQTFKERKNFVVERLKKMGVKFVEPEGAFYLFFKVRGDDVKFCERLLEEKKVALVPGSAFLKPGFVRLSFATSIERLTEALDRIEDFLNSR

SEQ ID NO: 5503 - protein, 488 aa, Pseudomonas aeruginosa PAO1
MSSPSLVELKAILRLAGPLIAAQLAYVAMVFTDTVMMGKLGPDALAAGGLGAVSYAFVSTFCVGVVAAVGNLVAIRHGCDDAAGAAAAARSGLWVGAALALAAGLLLWNLRPLLLVFGQAPQTVDGAMQFLHSLTFALPGYMAFMVLRGFTSAIDRAGPVMAISVLGALANLALNYSFIEGLFGLPRLGLAGIGLVTALVMNCMPLLLALYIRLQPAYAEYSLLRGLGRPQRAMVEEILRLGLPIGGTYAVESGMFTVATLCMGIIGDHALAAHQIAIQAVYVAFMVPVGLSYATTYRIGQHFGAGRLLEARRAGRVGIGFGALCMLLFAGLFWWMPEAIIGLFLDRDAPANREVAAMAVSLLAIAAWFELFDGTQNVAMGAIRGLKDARTTFLVGLACYWLVGVPLACLLAFAAGWGAAGVWWGLAGGLACAAIGLTLAFEWKTARLLPKATASEASALNCRAAGRGAPSARLCPGNAPVPPTAAAD

SEQ ID NO: 5504 - protein, 479 aa, Streptomyces avermitilis MA-4680
MNETARTYDVIVIGGGPVGENVAERARAAGLSAVIVERELLGGECSFWACDPSKALLRPVVARADASRVPGLDPAVAGPLDVEAVLAHRDMMSSYWKDEDQADWLNAVSVDLIRGHGRLTGCKEVAVQTSEGDTIALTARHAVAVSTGTRAALPPIPGFDTVRPWTSREATSADKVPDRLAVVGGGVVAVEMATAWQALGSQVTMLVLENGLLERMEPFAGELVADGLREAGVDIRFSTTVTSMAREGGEDGEVRITLSDGRELAADEILLATGRAPQTRDVGLETVGLTPGDWLTVDDTFRVTGVDGGWLYAVGDVNRRALMTHQGKYQARIAGTVIGARAKGEPIDDAPWGAHVATADHAAVPQVVFTTPEVASVGLTSREAEQSGRRIEVVDYDLARVAGAHQYGDDYRGRARMLIDTDRNTVVGVTFAGPGVGELVHSATIAVAGEVPLDRLWHAVPAFPTLGEVWLRLLETYRG

SEQ ID NO: 5505 - protein, 263 aa, Schedonorus arundinaceus
MSRKKKVRRRSTGPDSVSEIIKKWKEQNQKLQEENGARKAPAKGSKKGCMAGKGGPENSNCKYRGVRQRTWGKWVAEIREPNRGNRLWLGSFPTAVEAAHAYDEAARAMYGATARVNFSERSLDANSGCTSAPPVLMSNGPTAVSHPADGKDESESPSLRSDGPTATLRRSDAKDEPESAGTVVHEVKTEVSNDSTSVREERKTVEVFQPKGKALHKEEKVSYDYFNVEEVLDMIIVELSADRKMEVHEEYQDGDDGFSLFSY

SEQ ID NO: 5506 - protein, 307 aa, Schizosaccharomyces pombe
MGNHNINAEEIALYDRQIRLWGFNAQQALKQSRVLLITASPLANEIAKNLVLSGIGKLCVLDSMTVYEKDVEEQFFIEASDIGQLRANVFKKKLHELNPLVEIDTDTSLISEIDEGKISKFSMVIATQLDYEEFCRINELTRICNASFYATSCFGLYGFAFCDLINHNFAIDRVVDNTKVEEDMFIVQKPMKEAFQSILGETLKPRLAKKIPTLYPAMLSLLKSKKSDPDSIRQVCIEQKLNEKTVLNGEFLSKFSSNISFQWTPVMSVVGGVVSQDALNSISKKQFPIDNFWIFDAESGLAPIYRL

SEQ ID NO: 5507 - protein, 1473 aa, Schizosaccharomyces pombe
MSVKASINNSQEAVSRIAFRCSDALYVVHPNNSILNGALTESLKDLKKFETLNVSGKVPHVLPLKSHADPFAHIADAILAEEEVASTQPKQITSVVASADALFFATPHLYKLAHEPLVAHVAIESTEAFDFASVRDTGFVILFSGNRPGDSSEAALEDTLETASLAHRLALKLNTGVLHFYSPVYDTTAALENIETLPSKEDAQHARVAHIPIEEKQEDSEKEGNIKEAFVPPKFDQPERDAATSEYLESLSIKPFEYSGSDDATDVLLVFGSAASELAKAAVTSSVAVAIVRVLRPWLPSKLQEVLPTSTKRLTVLEPITSLPRKWDPLYLDVLSSFVASGSSIELFAVRYGLSSSEQATEIIKAVRDNLSGALKPSLVCDFTDGVSQVFVPTPPSIEEAYHKLLHRVFKSRLNIVNDPASSATKQNIPSRLIISPQFALGSVLEYENQRRAFCDEVATLLKEKNSSVSSESLEVLSNWIVSVDNLESPVDPELVISELKKDSSAPIKSLLDRSEFFTNVSHWIIGSDAWAYDLGNSALHQVLCLEKNVNLLIVDTQPYSTREAVRSSSRKKDIGLYAMNFGNAYVASTALYSSYTQLISALLEADKFKGPSVVLAYLPYHSADDDAITVLQETKKAVDIGYWPLYRWTPALEDGEYSDFKLDSERIRRELKTFLERDNYLTQLTLRVPSLARTLTQSFGAEVRHQQNVDSRNALNKLIEGLSGPPLTILFASDGGTAENVAKRLQNRASARGSKCKIMAMDDFPIEELGNEKNVVVLVSTAGQGEFPQNGREFWEAIKGADLNLSELKYGVFGFGDYEYWPRKEDKIYYNRPGKQLDARFVELGAAPLVTLGLGNDQDPDGWETAYNLWEPELWKALGLDNVEIDIDEPKPITNEDIKQASNFLRGTIFEGLADESTGALAESDCQLTKFHGIYMQDDRDIRDERKKQGLEPAYGFMIRARMPAGVCTPEQWIAMDDISTKWGNHTLKITTRQTFQWHGVLKKNLRNTIRNIVKVFLTTLGACGDVARNVTCSSTPNNETIHDQLFAVSKQISNELLPTTSSYHEIWIEDPETVEKRKVAGEAVQDVEPLYGPTYLPRKFKVGVAAPPYNDVDVYTNDVALIAIIENDKVLGFNVGIGGGMGTTHNNKKTYPRLATVVGYVLTDKIMEVVKAILIVQRDNGDRENRKHARLKYTVDTLGVSTFVEKVEEVLGYKFEEARDHPQFIKNHDDFEGWHKTEKNKYWRSIFVENGRIENNGILQFKTGLRELAERLYTEKSEAEFRLTANQHVILFNVAENELGWINEHMAKYKLDNNAFSGLRLSSAACVALPTCGLAMAESERYLPKLITKVEEIVYEAGLQKDSIVMRMTGCPNGCSRPWVAEIACVGKAPNTYNLMLGGGFYGQRLNKLYRSSVQEKEILNLLRPLIKRYALEREDGEHFGDWVIRAGIITAVENGGANGAVHEGVSPEAF

SEQ ID NO: 5508 - protein, 550 aa, Chlamydophila pneumoniae J138
MHPLYVDLDTIISSYSPPLPKEFQEAASLIAVPDTSHSKPVVPGVKTLFPQTYHLPYLKFVQGENVVHTPLKVGVMFSGGPAPGGHNVIQGLFNSLKDFHPDSSLVGFVNNGDGLTNNKSIDITEEFLSKFRNSGGFNCIGTGRKKIVTPEAKEACLKTAEALDLDGLVIIGGDGSNTATAILAEYFAKRRPKTSIVGVPKTIDGDLQHTFLDLTFGFDTATKFYSSIISNISRDALSCKAHYHFIKLMGRSASHIALECALQTHPNIALIGEEIAEKNLPLKTIIHKICSVIADRAAMEKYYGVILIPEGIIEFIPEIINLITEIESLSEYEDKISRLSPESQRLLKSFPAPIIEQILNDRDAHGNVYVSKISVDKLLIHLVSNHLQQYFPNVPFNAISHFLGYEGRSGLPTKFDNTYGYSLGYGAGILVRNHCNGYLSTIESLACPFMKWKLRAIPVVKMFTVKQQADGTLQPKIKKYLVDIGSTAFRKFKLYRKIWALEDSYRFLGPLQIETPPEMHSDNFPPLTLLLNHNFWQRHQGCIEIPDTTY

SEQ ID NO: 5509 - protein, 262 aa, Cicer arietinum
GLHHQDQKLFYKDKERDSKVFLDIVGVKDKSKLVLVEDPISQEKRVLEIRKNAKMEKAAKSISQISLEVDRLAGRVSAFESIISKGGKVVETDMLGLIELLMNQLLKLDSIIADGDVKLQRKMQVKRVQKYVETMDMLKVKSYMIGNGVHAPIQPQQKNSNGKRLETIEEQPQQIYSNGSIVPIQEQQQEQQARNNSKELSLIFEEHENQPSNNSTSGVVVTTKWETFDSMPPLITLPSTSTNHSMTNNNSTPPKFNWEFFD

SEQ ID NO: 5510 - protein, 374 aa, Oryza sativa
  unsure (1)..(374): unsure at all Xaa locations
CMSMRNEEMRFTMELAGEGKLKMVANSWHPFEEAAEPWEKSTGGHATRKVIVXDVKTTGEIQELLGIMAAGGGIPATMRAVQYTGYGGGAGALKHVEIPVPSVKKHEVLIKVEAASVNPIDWSIQKGMLRPFLPKFPFIPGVYPLKGGGLAEYVAAPESLTVVRPAGVSAVDAAGLPVAGLTALKALMSIGTKFDGTGGTGANVLITAASGGVGTYAVQLAKLGNHRVTATCGARNMDLVRSLGADEVLDYNTPQGAALTSSASDEKYDYIINTAMNVNWSAMKPTLSSRGRVVDITPNPGNYVAAMLTMFARKKITMMALMSLGKEEMRFLMELVGEGKLRTVVDSRCPFEKAAEAWEKSMGGHATGKVIVEM

SEQ ID NO: 5511 - protein, 628 aa, Mycobacterium tuberculosis CDC1551
MRSMNLPQTPRPLAHIALASGCCDLAGCVLAAWGWVVMSFVVAVPEALAAAASDVANIGSALSAANAAAAAGTTGLLAAGADEVSAALASLFSGHAVSYQQVAAQATALHDQFVQALTGAGGSYALTEAANVQQNLLNAINAPTQALLGRPLIGDGAVGTASSPDGQDGGLLFGNGGAGYNSAATPGMAGGNGGNAGLIGNGGTGGSGGAGAAGGAGGSGGWLYGNGGNGGIGGNAIVAGGAGGNGGAGGAAGLWGSGGSGGQGGNGLTGNDGVNPAPVTNPALNGAAGDSNIEPQTSVLIGTQGGDGTPGGAGVNGGNGGAGGDANGNPANTSIANAGAGGNGAAGGDGGANGGAGGAGGQAASAGSSVGGDGGNGGAGGTGTNGHAGGAGGAGGAGGRGGWLVGNGGNGGNGGNGAAGGNGAIGGTGGAGGVPANQGGNSALGTQPVGGDGGDGGNGGTGGTGGRGGDGGSGGAGGASGWLMGNGGNGGNGGTGGSGGVGGNGGIGGDGAGGGNATSTSSIPFDAHGGNGGAGGDAGHGGTGGDGGDGGHAGTGGRGGLLAGQHANSGNGGGGGTGGAGGTHGTPGSGNAGGTGTGNADSTNGGPGSDGLGGDAFNGSRGTDGNPG

SEQ ID NO: 5512 - protein, 427 aa, Coxiella burnetii
MTELTGVSIVTYQHIKVPSQGEKITVNKAVLVVPDRPIIPFIEGDGIGIDIAPVMKNVVDAAVEKSYAGKRKIEWMEIYAGEKATKVYGKDNWLPDETLEAIKEYQVAIKGPLTTPVGGGIRSLNVALRQQLDLYVCLRPVRYFTGVPSPVKTPEKVNMVIFRENSEDIYAGIEWPAGSPEAVKLINFLQNEMGVKKIRFPETAGIGIKPVSKEGTSRLVRRAIQYAIDNDRDSVTLVHKGNIMKFTEGAFKDWGYEVAVKEFGAKPLDGGPWHVFENPKTGQKITIKDVIADAFLQQILLRPAEYSVIATLNLNGDYISDALAAEVGGIGIAPGANLSDTVGLFEATHGTAPKYAGQDKVNPGSLILSAEMMLRYLGWKEAADLVVQGIEGAIESKTVTYDFARLMTGAKEVSTSQFGKAIIKHIL

SEQ ID NO: 5513 - protein, 350 aa, Ralstonia eutropha JMP134
MFVRNTWYVAGWDNEVGASNLFSRTIIGIPVLMYRAEDGTLHALEDRCCHRGAPLSIGRREGDCVRCMYHGLKFDTSGRCIEAPAQQRIPPQARVRVLPVVERNRWIWIWMGDPEAADPALIPDTHWLADPAWRSLDGYIHYDVNYLLIADNLLDFSHLPFVHPTTLGGSEAYAAAQPKVERLDDGVRITRWTLNTEAPPFAKQVKNWPGKVDRWNIYNFTIPAILLMDSGMAPTGTGAPEGQRIDAAEFRGCQALTPETENSTHYFFAHPHNFAIDNPEVTRSIHQSVVTAFDEDRDIITAQQRSLALAPDFKMVPFSIDAALSQFRWVVERRVADEAAQAQQRQAKEA

SEQ ID NO: 5514 - protein, 241 aa, Lactobacillus gasseri
MKPIIGISGSVIIDDGGIFPGYRRSYVNEDYVDSVIQNGGIPYIIPFNENEEVIKEQLLNVQGLILSGGHDVDPHNYKEEPEQKLGDIWPQRDQFDMLLLKLAEENGIPVLGICRGAQIINVYHGGTLYQDLSYRKVKTLKHNQGQTPTLLTHTVETVAGTKIAELLGKEKIQTNSFHHQLIKDVAPDFKVSARCVDGVVEAIENKDASVIAVQWHPEMLHRVVSYQNNLFKYIIDNAKKE

SEQ ID NO: 5515 - protein, 427 aa, Coxiella burnetii
MTELTGVSIVTYQHIKVPSQGEKITVNKAVLEVPDRPIIPFIEGDGIGIDIAPVMKNVVDAAVEKSYAGKRKIEWMEIYAGEKATKVYGKDNWLPDETLEAIKEYQVAIKGPLTTPVGGGIRSLNVALRQQLDLYVCLRPVRYFTGVPSPVKTPEKVNMVIFRENSEDIYAGIEWPAGSPEAVKLINFLQNEMGVKKIRFPETAGIGIKPVSKEGTSRLVRRAIQYAIDNDRDSVTLVHKGNIMKFTEGAFKDWGYEVAVKEFGAKPLDGGPWHVFENPKTGQKITIKDVIADAFLQQILLRPAEYSVIATLNLNGDYISDALAAEVGGIGIAPGANLSDTVGLFEATHGTAPKYAGQDKVNPGSLILSAEMMLRYLGRKEAADLVVQGIEGAIESKTVTYDFARLMTGAKEVSTSQFGKAIIKHIL

SEQ ID NO: 5516 - protein, 203 aa, Triticum aestivum
  unsure (1)..(203): unsure at all Xaa locations
MSATCAADLAPLLGAAAMNATDYLCNRFADTTSAVDSTYLLFSAYLVFAMQLGFAMLCAGSVRAKNTMNIMLTNVLDAAAGALFYYLFGFAFAFGTPSNGFIGKHFFGLKDMPQTGFDYSFFLFQWAFAIAAAGITSGSIAERTQFVAYLIYSAFLTGFVYPVVSHWIWSVDGWAXAARTSGPLLFKSGVIDFAGSGVVHMVG

SEQ ID NO: 5517 - protein, 325 aa, Chlorobium tepidum TLS
MKAIIPVAGVGSRLRPHTFSQPKVLLNVAGKPIIGHIMDKLIESGIDEAVIIVGYLGGKIEEYLTSHYAIKLTFVTQADQLGLAHAVHMCRPHVIDEEPLFIILGDTIFDVDLKLVLGSSISTLGVKEVDDPRRFGVVVTEGDRIVRLVEKPEQPVSNLAIVGLYFLHRAGTLFNSIDYIITNDIRTKGEFQLTDALQHMIDLGEPFSTFPVQGWYDCGKPETLLSTNEVLLQRDTRQKSLPGCIINPPVFIADSATVTNSIIGPNATIAEHAVVRDSIIMNSIIGRKSQVSEIMLDRSIVGNNAIVSAMGHELNIGDYSEIRMG

SEQ ID NO: 5518 - protein, 401 aa, Oryza sativa (japonica cultivar-group)
MASKRSVGTLTESDLKGKKVFLRADLNVPLDDSQKITDDTRIRASVPTIKFLMGKGAKVILASHLGRPKGVTPKYSLKPLVPRLSELLGVDVVMANDCIGEEVQKLAATLPDGGVLLLENVRFYKEEEKNDPEFANKLASVADLYVNDAFGTAHRAHASTEGVTKYLRPSVAGFLMQKELDYLVGAVANPKKPFAAIVGGSKVSTKIGVIESLLAKVDILILGGGMIYTFYKAQGYAVGKSLVEEDKLELATSLIEKAKSKGVSLLLPTDIVVADKFAADAESKTVPASAIPDGWMGLDIGPDSIKTFSETLDTTKTVIWNGPMGVFEFEKFAAGTDAIAKKLADITAKGVTTIIGGGDSVAAVEKAGLADKMSHISTGGGASLELLEGKTLPGVLALNDA

SEQ ID NO: 5519 - protein, 334 aa, Deinococcus radiodurans R1
MTQPDMAYPNPAGIKRVAVLTSGGDAPGMNAAIRAVVRTGAQQGIEVVGVRRGFSGLHRGEVQLLGPRDVANTIQRGGTILLTARSHTWRSPEGRAKGAAVLREWGVDGLVVIGGDGSFHGGYFLQEEHGIPVIGVPGTIDNDLYGTDHTIGYFTAVETALEAVDKLRDTGASHERIFVIEVMGRHAGHIALDVAVAGGAEEVFIPEDKKPIGDVVNIVKDSIAKGKRGSIIIVAEGYDGGAEAVAQAIHAGTGLETRVSILGHIQRGGTPVSSDRILASRLGEAAVYALMDGKKGVMVGRIGGGIAYTPLHETWEKRKDVSRDLYRCAKMLSI

SEQ ID NO: 5520 - protein, 482 aa, Neurospora crassa
MAPASTLLRAAAPAPHAHTSFPSHHTPTSSPNRTTITNTNPSANSTSSTPLHRIQTIAKHMALPQITSFPAEVVPQAPEDPLFGLARAFKADPSPQKVDLGIGAYRDENAKPWVLPVVKKADEIIRNDPEANHEYLPIAGLASLTSKAAELVVGASAPAITEGRVASIQTISGTGACHLGGLFLSRFYNPYGDASKKPTVYLSNPTWANHNQIFSNVGLPIAQYPYFDQKTKGLDIDGMKKALSDAPERSIILLHACAHNPTGVDPTLAQWREIAEIMAAKGHFPFFDTAYQGFASGDLDRDASAIRLFVELGFELVVAQSFAKNFGLYGQRAGCFHFISAPSPDAASITTRVASQLTLLQRSEISNPPIYGAKVASIVLNDPALFAEWKENLRTMSGRIIDMRKALRAKLEELGTPGPWNHITDQIGMFSFTGLNEKQVAKLREEFHIYMTKNGRISMAGLNKKNVDYVARAVDKVVREVQ

SEQ ID NO: 5521 - protein, 584 aa, Astragalus sinicus
MCGILAVLGCADASRAKRVRVLELSRRLKHRGPDWSGLHQHGDCYLAHQRLAIVDPASGDQPLFNEDKSVIVTVNGEIYNHEDLRKQLPNHTFRTGSDCDVIAHLYEEYGEDFVDMLDGIFSFVLLDTRDNSYIVARDAIGVTSLYIGWGLDGSVWISSEMKGLNDDCEHFECFPPGHLYSSKNGGFRRWYNPLWYSEAIPSAPYDPIVLRQAFEKAVIKRLMTDVPFGVLLSGGLDSSLVASITSRYLATTKAAEQWGSKLHSFCVGLEGSPDLKAGKEVADYLGTVHHEFTFTVQDGIDAIEDVIYHVETYDVTTIRASTPMFLMSRKIKSLGVKWVISGEGSDEIFGGYLYFHKAPNKEEFHRETCRKIKALYQYDCLRANKSTFAWGLEARVPFLDKEFINVAMNIDPANKMINLDEGRIEKYILRKAFDDEEHPYLPKHILFRQKEQFSDGVGYSWIDGLKAHAAKHVTDKMMRNAANIYPHNTPSTKEGYYYRMIFERFFPQNSARLTVPGGPTVACSTAKAVEWDAAWSKNLDPSGRAALGVHASAYENQNNSVNKSIEFEKIIPLEASSVGVAIQT

SEQ ID NO: 5522 - protein, 496 aa, Crocosphaera watsonii WH 8501
MRSLTYFGSLIKEQPLINDHCMYEKLTAPTTGSKITFEDGNPIVPNDPIIPFIRGDGTGIDIWPATEKVIDAAVKTAYGDSKKINWFKVYAGDEACDQYGTYQYLPEDTLTAIKEYGIAIKGPLTTPVGGGIRSLNVALRQIFELYACVRPCRYYPGTPSPHKSPEKLNVIVYRENTEDIYLGIEWTEGTEIAQKLINYLNNELIPATAEHGKKQIRIDSGIGVKPISKTGSQRLVRRAIEHALRLPKAKQMVTLVHKGNIMKYTEGAFRDWGYELATSEFRDVCVTERESWILSNKEGKADISIEDNARKVEPGYDSLTPEKKQEICDEVKGVIDAIWDSHGDGKWKEKIMVNDRIADSIFQQIQTRPDEYSILATMNLNGDYLSDAAAAVVGGLGMGPGANIGDTCAIFEATHGTAPKHAGLDRINPGSVILSGVMMLEYMGWQEAADLIKKGIGNAIANRQVTYDLARLMEPKVDPPLKCSEFAQAIIDYFND

SEQ ID NO: 5523 - protein, 250 aa, Triticum aestivum
  unsure (1)..(250): unsure at all Xaa locations
MYGVGVGGGGGGFNAPSTASGRRKNQEDDDDEEEEETGDGRVLEAWERAYADDRSWEALQEDESGLLRPIDTKNLVHSQYRRRLLLRSAAAAARIQKGLIRYLYIVIDLSKAASEMDYRPSRMAGRCLSGAEGIHXXEFFDQIPLSHGGLATIKDGISHRLTEIGGSPESQINALMGKLECSGDSSLQNALELXNGYLNQIPSYGHKEVLFLXXALNTCDPGDIMETIEKCKKSKXRCSVLGLLEKFHLQ

SEQ ID NO: 5524 - protein, 348 aa, Oryza sativa
MGVAAANVAAFVLLAIAPVAAAPSSPPRSGGDSLSFSDVISISFFMAVFFPVFIVLLAFACLRLFRPLDDDDGEPALADTSSSEWSRRGGGGGNRAGLDAAEIAALPLVSYRDARRHRIGDARGDPLECAVCLLEFEDDDALRLLPACPHAFHPECIGLWLEKHVTCPLCRANVLDAPPPPPPPPPSLEQDTASPPPAHETVVVIGDAGASEEAEAEERIRIQCLAGVRRAAGRQALPRSNSTGHERGGGGMERFALRLPEHVRLEILMSHRLRHVTSAVASVRVREGSAHDAGAVRNAVARLLSLFVPGAGWKGDDEGKSSKAAEGSSRRRRDESARGGVGEEKRSE

SEQ ID NO: 5525 - protein, 321 aa, Zea mays
MPIRRDPCGPPCPSPDFPACALSLSLSLSLRRRRAWATCAAAPSPGLHRTLRQVLFRPIAGTEQLLHSFDFSYRIPHRGMLAKGRKVAGRREEMSANYAFGPQDDDAIIKHRLLTRTTTTRGEPPLKKLQKKFMSFATEIEKDADNISDCERLYKAFLHEINTFELPLLKSKAVVDANIREKESFNELQVEIERQILHAKTDIEDLKKQLEQSKIERQHKEECEAIRKLICLQPPRSETEKLIADLEKEITDLKAENVACIRTLELRKKQFALLLHVVEELQISIEDEQKSIADELRAIAGEQKMSMEEGSVGASDSMVVD

SEQ ID NO: 5526 - protein, 221 aa, Lycopersicon esculentum
KPFYAILHRVDVGIVIDLEPARTEDPALSIAGAVQSQKLAVRAISHLQSLPGGDIKLLCDTVVESVRELTGYDRVMVYKFHEDEHGEVVAESKRSDLEPYIGLHYPATDIPQASRFLFKQNRVRMVVDCHATPVRVTQDESLMQPLCLVGSTLRAPHGCHAQYMANMGSIASLTLAVIINGNDEEAVGGGRNSMRLWGLVVGHHTSVRSIPFPLRYACEFL

SEQ ID NO: 5527 - protein, 404 aa, Haemophilus influenzae Rd
MRLFPKSDKLEHVCYDIRGPVHKEALRLEEEGNKILKLNIGNPAPFGFEAPDEILVDVLRNLPSAQGYCDSKGLYSARKAIVQYYQSKGILGATVNDVYIGNGVSELITMAMQALLNDGDEVLVPMPDYPLWTAAVTLSGGKAVHYLCDEDANWFPTIDDIKAKVNAKTKAIVIINPNNPTGAVYSKELLQEIVEIARQNNLIIFADEIYDKILYDGAVHHHIAALAPDLLTVTLNGLSKAYRVAGFRQGWMILNGPKHNAKGYIEGLDMLASMRLCANVPMQHAIQTALGGYQSINEFILPGGRLLEQRNKAYDLITQIPGITCVKPMGAMYMFPKIDVKKFNIHSDEKMVLDLLRQEKVLLVHGKGFNWHSPDHFRIVTLPYVNQLEEAITKLARFLSDYRQ

SEQ ID NO: 5528 - protein, 220 aa, Lycopersicon esculentum
KPFYAILHRIDVGIVIDLEPARTEDPALSIAGAVQSQKLAVRAISLLQSLPGGDIDLLCDTVVKSVRELTGYDRVMVYKFHDDEHGEVVAESRRSDLEPYIGLHYPATDIPQASRFLFKQNRVRMIVDCTAIPVRVIQDESLMQPLCLVGSTLRAPHGCHPQYMVNMGNVASLTLAVVINGNDDEVVGGRNAMRLWGLVVGHHSSARFIPFPLRYACEFL

SEQ ID NO: 5529 - protein, 409 aa, Schizosaccharomyces pombe
MSDYGFANIEEAKADAIFKLNAQYHQDEDPKKVNMSVGAYRDDTGKPWILPAVKKASKIVEEQASFNHEYLPIAGLPRFTKAAAEVLFRPNPHLLSEDRVASMQSVSGTGANFLAASFIETFYVKHTGAHVYISNPTWPVHRTLWEKLGVTVDTYPYWDAKNRSFDYEGMLSTIKSAPEGSIFLLHACAHNPTGIDPTREQWLSIFESLLSRKHLVVFDIAYQGFASGDLNRDSWALNEFVKYNKDFFVCQSFAKNMGLYGERTGCMHYVAKDASTKNKVLSQLCIVQRNTISNPPAYGARIAAEILNSPQLFAEWEQDLKTMSSRIIEMRKRLRDSLVALKTPGSWDHITQQIGMFSFTGLTPAQVQFCQERYHLYFSANGRISMAGLNNSNVEHVAQAFNHAVRELP

SEQ ID NO: 5530 - protein, 113 aa, Lycopersicon esculentum
KPFYAILHRIDVGIVIDLEPANSSDPALLLAGAVQSQKLAVRSISRLQSLPGGDIGVLCDTAVEDVQKLTGYDRVMVYKFHDDNHGEIVSEIRRSDLEPYLGLHYPATDIPQA

SEQ ID NO: 5531 - protein, 400 aa, Nitrosomonas europaea ATCC 19718
MNPSLENLQLYPFQKLTKLFEDLVPRDSLPTPIGLHIGEPRHSTPEFIRQELINSLEGLAHYPTVLGTDRLRASIATWLTQRYHLSSIDPDTEVIPVNGSREALFSFAQAVIDTDHKAIQPAVVCQNPFYQIYEGAALLAGATPYFLNQLPENNFSADTAQLPDTVWERTQLVYICSPNNPTGKVLTLDEWKHLFDLSDRYGFVIAADECYSEIYFDEGHPPLGALEAAEKLGRSGFPRLVVFSSLSKRSNVPGMRSGFVAGDATILRKFLLYRTYHGSAMNPAVQAASTVAWSDEQHVAENRKLYYEKFTGAMHILGDTLPVSMPDAGFYLWLRTPVSGIEFSRRLYREGNVTVLPGSYLAREAHGMDPGEDFVRIALVAPVVECMEAMERIRDIARKF

SEQ ID NO: 5532 - protein, 386 aa, Ferroplasma acidarmanus
MQPLDLYRLKSGTEIVNQTFSFTDKGGREVTMIPEATPSTVRLLTARKDLPRPVRWYSFPKVWRYEEPQEGRFREHYQFNADVFGLDSEEADAEIVGLASSILDYLGLSGVYEININDRFLMEYVLKDLNIEDIPDAFSIIDKYKKVDKSSFIEAFKGIGAGEDEIKKILSLLGEKVDIGNMEKKIKRVVNNYEEIKPRIERIKKTFDLIGLYTESKINFDFSIVRGLSYYTGIVFEAFDVKGELRAILGGGRYDGLSQLFTQEKIPAAGFAIGDAVIELLLKRQNLWLKRNIKESYYICNLSSENDDYIIKVASVIRSLNKIAVVDMTHRKISSQMKSASGFDFAVIIGEREIEENTLTVKNMHSSEQSTIGYDEFFLKLRSGNN

SEQ ID NO: 5533 - protein, 264 aa, Zea mays
  unsure (1)..(264): unsure at all Xaa locations
MSRRYDSRTTIFSPEGRLYQVEYAMEAIGNAGSALGILAADGVVLVGEKKVTSKLLQSSRSAEKMYKIDSHLACAVAGIMSDANILINTARLHAQRYALSYQEPIPVEQLVQSLCDTKQGYTQFGGLRPFGVSFLFAGWDKNHGFQLYMSDPSGNYGGWKAAAVGANSQAAQSMLKQDYKDGMTREEAVALALKVLSKTMDSTSLTADKLELAEVFVQPGTGXKVQYQVGSPDAMGEAAWQGLGSTPPAPEGLMVLGLVWFWDA

SEQ ID NO: 5534 - protein, 194 aa, Triticum aestivum
  unsure (1)..(194): unsure at all Xaa locations
ATSVAPFQGLKSTAGLPVSRRSNGASLGSVSNGGRIRCMQVWPIEGIKKFETLSYLPPLSTEALLKQVDYLIRSKWVPCLEFSKVGFIFREHNASPGYYDGRYWXTMWKLPMFGCTDAXQVINEVEEXKKEYLTLFRIIGFKTCSAMLTYRLKPRAARSGKATHHKGIKMHVTRMLGSSNYFYVQFFMFNCQNL

SEQ ID NO: 5535 - protein, 179 aa, Glycine max
  unsure (1)..(179): unsure at all Xaa locations
MASSMISSPAVTTVNRAGAGMVAPFTGLKSMAGFPTRKTNNDITSIASNGGRVQCMQVWPPVGKKKFETLSYLPDLDDAQLAKEVEYLLKKGWIPCLEFELKHSFIYHKHNKSPKYYDRRYXNHXKLPIFNYTNTSQVLKELQQAKTTYPNHFIHIIKFDNXVRQVHYIIFITYKPPSF

SEQ ID NO: 5536 - protein, 270 aa, Clostridium tetani E88
MEKSIGFIGCGNMAQAMITGIVTSKIVKGKNVFVSDRDEEKLKYIKDNFNVNTSKSNEEVAEKSDIIILAVKPNKYGEVIEGIKDYVKKDVIIVVIGAGITIDYVEESFKKKLKVIRTMPNTPALVGEGMSAICYNELVEEYDLKVVVDIFKSFGKVEIIEENLMDAIPAISGSSPAYVYMFIEALADGAVLDGVPRDKAYKMAAQSVLGAAKMVLETGEHPGELKDRVCSPAGTTIEAVYSLEKNNFRGTVMEAMRKCTDKTREMSKRN

SEQ ID NO: 5537 - protein, 498 aa, Nostoc punctiforme
MTTPLSCRNYINGQWLNAVGEATLESRNPADKTEIVATYPRSQVNDVDTAVASARKAYRSWRTVPAPARAEYIFRVGEILLQHKEELAQLISREMGKPLTEARGDVQEGIDCAFYSAGEGRRLFGQTTPSEMSNKFAMTVRMPIGVCALITPWNFPVAIPCWKAMPALVCGNTVILKPAEDTSACATKLIEIFQQAGLPPGVINLVHGVGEEAGKALVEHPNVDLVSFTGSSETGAFVGATCGRTHKRVCLEMGGKNAQIVMEDADLELALDGAVWGAFGTTGQRCTATSRLILHRDIKEKFTTMLYERTSKLRLGAGNDTDTDIGPIINEKQLQQVSKYLDIAREEGAKVLIGGEIASEGSLKNGYFFQPTILDRVTPDMRVAREEIFGPVVALIEVSSFEEAIAILNDSNYGLSSSVYTRDINRAFTAMRDIEAGITYINGPTIGAEVHLPFGGVKQTGNGHREAGTTALDVFTEWKSVYVDFSGSLQRAQIDNRS

SEQ ID NO: 5538 - protein, 520 aa, Magnaporthe grisea 70-15
MSYSWIGAPAEFNGTNAETGGNSATENLNQWYQSGDQAFILVSSCLVLIMIPGIAFLYSGLARRKSALSLIWVVMMSFSVVIFQWYFWGYSLAFSTSTTNGFIGDLSKFGLMNTLGKPSQGSPLIPELLYSFYQMQFCGVTAALVIGATAERGRVVPAMVFTFFWATIVYCPLAHWVWNANGWAFKYGVLDYAGGGPVEIGSGMSALAYSWVLGRRNEKMMLNFRPHNISLITLGTILLWFGWLGFNGGSAFGANLRAAMACWNTCLTAMFAAMTWTLLDFRLAKKWSLVGWCSGTISGLVAATPASGFIPPWASIVLGVVTGVCCNFGTKVKFLLRIDDSLDVFAEHYIGGVVGLFFNGFFAADYIIGLDGVNTGLVTGGFLNQNYKQLYIQIAFIVAASAYSFVVSAILAKIIDMIPGLKLRADEKAELLGMDDDQHGEFAYDYVEVRRDYLAWTPAERDPKEDGHAVVPQLGIEGHQTIHDNIINGVGSVRHTPAVPNDAHAQHDSEKPKSVDRSSE

SEQ ID NO: 5539 - protein, 453 aa, Pirellula sp. 1
MNSRSRTSTSKQPSPLLTGRRNSKDSIGSWKIHAFASLELSEPILMSIKRVGILTAGGLAPCLSSAIGALIEAYTEQAPEIEILCYRSGYKGLLLGDSFVVDAHSRKNAAILHQHGGSPIGNSRVKLTNVADCVKRGLVSEGQDPLQVAAERLQSDEVDVLHTIGGDDTNTTAADLAAYLAKHEYQLTVVGLPKTIDNDVIPIKQSLGAWTAAEEGAKFFENVVGEHNANPRMLIIHEVMGRNCGWLTAATAAKYRERLQKLNFLPEMGLSQERRDVHGVFVPEMSFDLEEEAKRLRAIMDEIDCVNIFISEGAGVDTIVKEMESRGESVPKDAFGHYKLDAVNPGKWFGKQFADMLGAEKTLVQKSGYFSRAAAANAEDIALIGRCAKKAVECAMQGIGGVVGEDEDQNNELRAIEFERIAGGKPFDINVEWFGDLLSQMGQPKGEVLETSH

SEQ ID NO: 5540 - protein, 586 aa, Astragalus sinicus
MCGILAVLGCSDDSQAKRVRILELSRRLKHRGPDWSGLHQHGDNYLAHQRLAIVDPASGDQPLFNQEKSIIVTVNGEIYNHEELRKQLPNHKFRTDCDCDVIAHLYEEYGENFVDMLDGIFSFVVLDTRDNSFLVARDAIGVTSLYIGWGLDGSVWIASELKGLNDECEHFEVFPPGHLYSSKEREFRRWYNPKWFSETVPSSPYDPLVLRHAFEKAVIKRLMSDVPFGVLLSGGLDSSLVASVTARYLEDTKAAKQWGAKLHTFCVGLKGAPDLKAGREVADYLGTVHHEFEFTIQDGIDAIEDVIYHTETFDVTTIRASTPMFLMSRKIKSLGVKMVLSGEGSDEIFGGYLYFHKAPNKKEFHEETCRKIKALYKYDCLRANKSTYAWGLEARVPFLDKDFINVAMDIDPEEKMIKRDEGRIEKWVLRKAFDDENKPYLPRHILYRQKEQFSDGVGYGWIDGIKDHAAKHVTAKMMLNASHIFPDNTPTSKEGYYYRMIFERFFPQNSARLTVPGGASIACSTEKAIEWDASWSNNLDPSGRAALGVHVSAYENQVNSSVGKGVEPEKIIPKMKVSPLGVAILG

SEQ ID NO: 5541 - protein, 1422 aa, Vibrio parahaemolyticus RIMD 2210633
MIEIVIDGKYRIVEEGLTLLEAAKVCGVEIPSLCGMNKSNEKIPCDLCVVEVESGGTKRACDLKVYRGLNVVTQSEQLSEHRRKALNRIMTDHYADCEAPCKTACPAGVDIQSYLYHISQNDHQKAIEVIKRTLPMPLSIGRVCPAFCESECRRSLVDEPIAIRQLKRHAADADLAAHEAYVPEKKPAKHRKIAVVGSGPGGLTAGYYLSNEGYDVTIFESMPKAGGWLRYGIPEYRLPKDILDKEIELMCRNGMQVETNKKLGVDFTLSQLSEDYDAVCLAVGASQAVEMNYPGSDLDGCYLGVDYLKDYVTEQNYVTGKKVAVIGGGNTAIDCARTARRAGADTTLIYRRTRDEMPAEDYEIVEAEHEGVTFHFLTNPAENIADENGRVKAIRLERMALGEPDASGRRSPKPTGEFFTEAFDTVIAAVSQKPDLSFLENDDLSIPLTRWNTSESDSQTMHTGTGNIFSIGDFRRGPATAVEAVGDGRVAAKAIDLFLNGDMADMPKPAFNSRKEKKLAQVDPLHFENIQKVARSIMPELTPAQREQSFAEVELGFDNEEAMKEAARCLECGCQANTDCALRDYSTEYHAEQHFDVSVDVSSASVIGHQDWLDLRAKDLRHKYEVDRSSEFIEFDANRCISCGQCIQACREQAVHGVLSFVSDKNGRPALRPDDRPRFRSDEKGVGCSGLTLMGDSKCVQCGVCVQACPTGAMVDSRDRSQGRTEQLKAVDTICTYCGVGCKLTMFVDERQNKIRYVKGADSPVNQGMLCVKGRFGFDFISSEERLTTPLIRKDGWLQPATWDEAIQLVASKLSTIKQDFGSNALAGFSSAKTTNEDNYAFQKFIRRELGTNNVDHCARLCHASSVTGLEASLGSGAMTNDIPSIKHSDVIFIIGSDTTSAHPIIASHIKQAIRHHGARLIVADPKRVDMAEHAELYLAHRPGTDVMLLNGVMQQIIKNGWYDQEYIEERVDGFDTLLQEVMSPAYNLDKVELVTGVKADDIFAMARMIGTAKRTAVYYSMGITQHTTGHDNVRSIANLQLLCGNIGIEGGGINPLRGQSNVQGACDMGALPNCYPGYQKVYNPIVRQKFAIEWDAPNLPSEQGLTLTEIIDAACKREVRGMYIMGENPVLSDPNQAHVIEGLEALDFLVVQDIFLTETAQYADVVLPSCSFAEKSGHFTNTERRVQRVNAAVKAPGEAKEDWWIIQAIANAMGSDWHYQCVSEITSEIARVTPQYAGLRWDAITPNGVQWPSNKNNPNGTRIMHQTQFTRGKGQMVGVPFRYAAELPDEEYPLVLTTGRVLEQFHTGTMTRKTKGLDNLAGPRAMISVEDAEAIGIHNGQRLKVSTRRGNIEIDAFVTKRMQKGVVFIPFHFVESPVNRLTTTATDPHAKIPEFKVAAVKIEISETAAQPEPVEEAVHHV

SEQ ID NO: 5542 - protein, 128 aa, Crocosphaera watsonii WH 8501
MLSPVETIKLLKSQPEQTFSKGDTIFANGDEGTVMNGIIEGEIEMYINGKVIEVIQQGDVFGQGALVHENHLRASTAIAKTDCKLAFLDRKHFLFAVQQTPMFALEVMRSYSDRHRRLKKVLDALGNM

SEQ ID NO: 5543 - protein, 414 aa, Schizosaccharomyces pombe
MSLSTKLAITDVDLKGKNVLIRVDFNVPLDGDRITNNARIVGALPTIKYALEQQPKAVILMSHLGRPNGARVAKYSLKPVAAELSKLLGKPVKFLDDCVGPEVEKACKEAKGGEVILLENLRFHIEEEGSAKVDGKKVKADASAVEAFRKSLTSLGDIFVNDAFGTAHRAHSSMVGVDLPRVSGFLMKKELDYFSKALENPARPFLAILGGAKVADKIQLIDNLLDKVNRLIICGGMAFTFLKVLNGMKIGDSLFDEAGSKNVESMMAKAKKNNVEVFLPVDFVTADKFDKDAKVGSATAEEGIPDGWMGLDCGPKSSAKFAEVITTSKTIVWNGPAGVFEFDNFAKGTKSMLDACVKTCEAGNVVIVGGGDTATVAKKYGKEDALSHVSTGGGASLELLEGKALPGVVALSSK

SEQ ID NO: 5544 - protein, 350 aa, Schizosaccharomyces pombe
DPCEDDHVEVIDRNIDEGNWYFWGIFDGHSGWNTSLFLRQHLVPAVVRELQKCTASYYHQNACPSSLALDKSISEAFAKVDHQIVHEHVSHVFNNPESLQVAASLLLPALSGSCALLTSYSAKSKSLQVACTGDSRAVLGECTPDGSWEAIPLSRDQTGMNPDEASRLEVEHPGEEVLRNNRILGRLMPSRAFGDARYKWSQEISERLHREYFSASPIPVKTPPYVTAVPEIESITVNPKKHRFLIMASDGLWDTMSSEQAVQLVGEWADTVLGKTTNEKNTTQDDKQSWSLFKKTSKVIDDNAATHLIRHSLGGSDQRISALLTLTYPISRRYRDDITVTVIFFDEKTL

SEQ ID NO: 5545 - protein, 132 aa, Lotus corniculatus
PLKYYGLDKPGLHVGVVGLGGLGHMAVKFAKALGAKVTVVSTSPNKKTEAIEKLGADSFVVSPEQDQMKAVMGTFDGIIDTVSAVHPLLPLISLLKPHGKLVMVGAPEKPLEVPVFSLLGGRKTIAGSMIGG

SEQ ID NO: 5546 - protein, 344 aa, Triticum aestivum
MGKKKKRVEKVFCYYCDREFDDEKILVQHQKAKHFKCHVCHKKLSTAGGMAIHVLQVHKESVTKVPNAKPERDSTEIEIFGMQGIPSDVLAAHYGEEEEPSKVAKVEVPTIRPPIMPNYPLGMPFPPRPYGAARPMYNPAMMVRPPIWPLQQPQPWFAQQPPVSVPPMIAGQAPQQPLFPIQNMPNPMMTSAPANLLQTSYPMPTTGVPSPVAPQASQPLFPVNTSGNGAANSSFSSSISPATIAANSPASVGTAGYGYVANNHGTGGPAIGQPPAPATNSKTSATQPATSEVYLVWDDEAMSMEERRLALPMYQVHDETSQMSSVDAAFDRRISDITFSRQLT

SEQ ID NO: 5547 - protein, 628 aa, Neisseria polysaccharea
SPNSQYLKTRILDIYTPEQRAGIEKSEDWRQFSRRMDTHFPKLMNELDSVYGNNEALLPMLEMLLAQAWQSYSQRNSSLKDIDIARENNPDWILSNKQVGGVCYVDLFAGDLKGLKDKIPYFQELGLTYLHLMPLFKCPEGKSDGGYAVSSYRDVNPALGTIGDLREVIAALHEAGISAVVDFIFNHTSNEHEWAQRCAAGDPLFDNFYYIFPDRRMPDQYDRTLREIFPDQHPGGFSQLEDGRWVWTTFNSFQWDLNYSNPWVFRAMAGEMLFLANLGVDILRMDAVAFIWKQMGTSCENLPQAHALIRAFNAVMRIAAPAVFFKSEAIVHPDQVVQYIGQDECQIGYNPLQMALLWNTLATREVNLLHQALTYRHNLPEHTAWVNYVRSHDDIGWTFADEDAAYLGISGYDHRQFLNRFFVNRFDGSFARGVPFQYNPSTGDCRVSGTAAALVGLAQDDPHAVDRIKLLYSIALSTGGLPLIYLGDEVGTLNDDDWSQDSNKSDDSRWAHRPRYNEALYAQRNDPSTAAGQIYQDLRHMIAVRQSNPRFDGGRLVTFNTNNKHIIGYIRNNALLAFGNFSEYPQTVTAHTLQAMPFKAHDLIGGKTVSLNQDLTLQPYQVMWLEIA

SEQ ID NO: 5548 - protein, 987 aa, Eremothecium gossypii
MSVETAYGVAFRSLATTDERLYKATVQFYKRLSFATVKLYDKFKNHGDEMLLSGTSQSSRHETWLMSFKLSEVDSSGCRVPQQEAERKLQSDGAMIKVRLVNEVAAADCGALRVSYYSGSFAEAAAAFPDREEVSEHEFRIRDPLGNEIALTDTPHLHDAVLGEQAVGADFFLSGSGETHRLAQGRETAAALMRSLRETPGAPDSKPKKKLAVMTSGGDSPGMNAAVRAVVRAGIYYGCDVFAVYEGYEGLLKGGEYLKHMQWSDVRGWLSEGGTLIGTARCMEFRERKGRKQAAANLIEQGIDALVVCGGDGSLTGADLFRSEWPSLVEELVSDGRFTAQQVHPYRNLTIVGLVGSIDNDMSGTDSTIGAYSALERICEMVDYIDATAKSHSRAFVVEVMGRHCGWLALMAGIATAADYIFIPERAAPQNKWQDEMKEVCRRHKAKGRRNITVIVAEGALDTELNPITAEQVKTALVELGLDTRITTLGHVQRGGTAVAHDRWLATMQGVDAVKAVLEMTPDTPSPLIGILEEKIIRIPLMESVKLTKQVAAAIQEKDFDKAISLRDTEFIELYESFISTTIKDSTAVPESGPLRVAIVHVGAPSAALNAATRAASLYCLANGHKPFAIINGFSGLIQTGEVRELSWIDVEDWHNLGGSEIGTNRCAAADDMGAVAYHFQKNEFDGLIIIGGFEGFKSLQQLYSARSQYPVFNIPMVMIPSTVSNNVPGTEYSLGTDTCLNALVNYTDAIKQSASATRRRVFVVEVQGGHSGYVASFTGLVTGAVSVYTPEKKIDLHSIQEDLALLKENFRHDQGENRNGKLLIRNEQASSIYTTELIADIIAEQSNGRFGVRTAVPGHVQQGGVPSSKDRVAACRFAVKSVKFLESWNEKAKQAASHDDRQLGFRYVKGVKTPMLPNNDASAAVICVNGSTVSFKPVNDLWQNETDVELRKGHDIHWSEFTKVGDILSGRCNLRKEVDAMRAASA

SEQ ID NO: 5549 - protein, 328 aa, Rubrobacter xylanophilus DSM 9941
MIRAVTVKCVEDYGYEVVGIKRGWRGLLAPQEDSVEKLTVDGVRYILDEGGTVLLSSRTNPYKKEGDAEKVVKNMQEFGIDALVAIGGDDTLGVASRLHKDFGVQVVGCPKTIDNDLSGTDICFGYDTAVSIATEALDRVRTTAKSHERILVVEIMGRHAGWITYGAGLAGAANVTLIPEVEPDIDAIADLFKKRAERGERWGVVAVSEGVTIGEEYITQSAERDEFGHVRLGGIGETLAKELKERTGIDTRHVVLGHLQRGGTPTAYDRILSTRYGLRAAEAVKNGEWGKMVALRGSDIVTVPLEEATGETRTVPEDLYGVLKTFFG

SEQ ID NO: 5550 - protein, 317 aa, Glycine max
YPIKEYTDTEQFDLGLAWVHPIVWSSPHAPLYASRFLMGSGNERGAIAISLKSTEMTQGLVAAYNVEERCKLQVNVLQIVPWYVKVYYHTLQLLVDERPQALTDFVEIMRVSPSEDKVSPGVMELVLQFPCEMKSAVLSIEFDKGFLHIDEYPPDANQGFDIPSAIISFPDFHAGLQFSDKSQSKSPLLSKLQERSPVLSYTEVLLVPLTTPDFSMPYNVITITCTVFALYFGSLLNVLRRRVGEEERLLKNKDANKTVFFRRELAKLSAKLRGRPLELTLPCPSSSSSSSSFVSPKLILRVLLVAGIAVVWQYYSQ

SEQ ID NO: 5551 - protein, 425 aa, Pseudomonas fluorescens PfO-1
MSKTNAELMARRTAAVPRGVGQIHPIFAESAKNATVTDVEGREFIDFAGGIAVLNTGHVHPKIIAAVTEQLNKLTHTCFQVLAYEPYVELCEKINARVPGDFAKKTLLVTTGSEAVENAVKIARAATGRAGVIAFTGAYHGRTMMTLGLTGKVVPYSAGMGLMPGGIFRALYPNELHGVSIDDSIASIERIFKNDAEPKDIAAIIIEPVQGEGGFYVAPKEFMKRLRALCDQHGILLIADEVQTGAGRTGTFFAMEQMGVAADLTTFAKSIAGGFPLAGVCGKAEYMDAIAPGGLGGTYAGSPIACAAALAVMEVFEEEKLLDRCKAVGERLVTGLKAIQAKHPVIGEVRALGAMIAVELFENGDSHKPNPTAVAAVVAKARDKGLILLSCGTYGNVLRVLVPLTSPDEQLDKGLAIIEECFSEL

SEQ ID NO: 5552 - protein, 314 aa, Brucella suis 1330
MAVAFTFPGQGSQAVGMGKALAEQFAEARAVFDEVDEALGEKLSATMFEGPEDVLTLTANAQPALMAVSMAVQRIMEARGFSLKDKVSYVAGHSLGEYSALCAAGTFSLADTARLLRIRGNAMQKAVPVGEGAMAAIIGLEHGDVEAVCMEAKASGPVQIANDNGGGQLVISGARAAVELAAKLGSEKGAKRAIMLPVSAPFHSTLMAPAADAMREALAAVEKHDPVVPLIANVRAAPVTDANEIAALLVEQVTGQVRWRETIEWFSANGVTTLYEVGCGKVLTGLARRISKDVSGATVGSAEEIEAALAALNA

SEQ ID NO: 5553 - protein, 775 aa, Mycobacterium tuberculosis CDC1551
  unsure (1)..(775): unsure at all Xaa locations
MQPRLFQVLVISGRRFGSTGALRRNTRRDAVIGDTLRPIEGRTAMSFVIANPEMLAAAATDLAGIRSAISAATAAAAAPTIQVAAAGADEVSLAISALFGQHAQAYQALSAQATIFHDQFVQALTSGGNLYAAAESHTVEQMVLNAINAPTQTLFGRPLIGDGANGTAENPDGQNGGLLFGNGGNGFTQTTAGVAGGNGGSAGLIGNGGAGGGGGAGAAGGLGGNGGWLYGNGGAGGIGGAGTGTGGHGGAGGAGGRAWLWGTGGAGGAGGDGGWLFGDGGAGGTGGNGGSGFNSLTSSVGGAGGAGGHAGLFGAGGTGGTGGIGGQNTETGPAASNGGAGGAGGGGGYLVGDGGAGGTGGAGGKNSSGGATLTGGTGGTXGAGGAAGWLYGSGGAGGAGGAGGLNNAGGATGGTGGTGGAGGSGAWLYGNGGAAGAGGNGGNNTSAGTGGVGASGGTGGNAGLIGAGGHGGAGGAGGNQTGGVGNGGAGGNGGAGGAGGQLYGNGGDGGNGGAGGANIAGGNGSDGGAAGHGGAGGSARLIGAGGRGGDGGAGGNTAGRRADAIAGTGGDGGNGGNGGLLSGNAGAGGHGGAGGSSTATTTTGTPPTGATGGNGGNGGAGGTAGFTGSGGIGGNGGAGGTGGNAGVALSVGSTGGLGGNGGSGGLGGGGGSLFGNGGAGGVGATGGNGGSGIGPASVGGNGGKGGVGAAGGLAGQIGNGGSGGSGGAGGNGGTGDTAGNGGNGGAGAVGGNAQLIGNGGNGGGGGNGGTGADGT

SEQ ID NO: 5554 - protein, 394 aa, Pseudomonas fluorescens PfO-1
MWYEGFLGLSAWSLVAVTLVMTHVTIVAVTVYLHRYSAHRSLELNAGLKHFFRFWLWLTTAQNTREWTAIHRKHHAKCETEDDPHSPVVKGLSTVLCKGAELYREEAQNPETLRIYGKNCPEDWIERNLYSRYRLLGVAIMAVVDLLLFGTIGITIWAIQMMWIPVWAAGVVNGLGHAVGYRNFECRDAATNLVPWGILIGGEELHNNHHTYPNSAKLSVKKWEFDLGWAWIQVFSFLRLAKVQRVAPIAHRVEGKGSLDMDTAMAILNNRFQIMAQYRKLVIGPLVKQELAKVDHSVRHQFHRAKRLLSRETSLLEDRHHARIQSMLEHSQALKVIYEKRLALQQIWVKTSANGHDMLAAIKEWVHEAEASGIQSLREFADQLKTYSLRPAAV

SEQ ID NO: 5555 - protein, 266 aa, Chlorobium tepidum TLS
MARLSIGFIGTGRIAQALISGLSHDPNIVICGYDKMPDALHSVSLQYGVNTEESIESLARDAEIIVIAVKPYQMAEVLAELKPALHGQHLIVSVAAGISTGFIESNCPEGTRVVRVMPNTPAFVGEGMTALCKGMHATADDLLVAERIFNAIGKTAIIEESGMDAATAVSGSGPAYMFRIIDSLAEGGEACGLDRETAQLLAAQTMLGAAKMVLSGHKSPEELVREVTTPGGTTEAGLKAMDERDLRGALIDTVRAAAARSKELMK

SEQ ID NO: 5556 - protein, 521 aa, Zea mays
  unsure (1)..(521): unsure at all Xaa locations
MQFSSVLPLEGKACMSPVRRGSGGYGSERMRINCCSIRRNKALRRMCFSARGAVSSTQCVLTSDAGPDTLVVRTSFRRNYADPNEVAAVILGGGTGTQLFPLTSTRATPAVPIGGCYRLIDIPMSNCFNSGINKIFVMTQFNSASLNRHIHRTYLGGGINFTDGSVEVLAATQMPGEAAGWFQGTADAVRKFIWVLEDYYKHKAIEHILILSGDQLYRMDYMELVQKHVDDNADITLSCAPVGESRASDYGLVKFDSSGRVIQFSEKPKGAALEEMKVDTSFLNFATCTLPAEYPYIASMGVYVFKRDVLLDLLKSRYAELHDFGSEILPKALHEHNVQAYVFTDYWEDIGTIRSFFDANMALCEQPPKFEFYDPKTPFFTSPRYLPPTKSDKCRIKDAIISHGCFLRECAIEHSIVGVRSRLNSGCELKNTMMMGADLYETEDEISRLLAEGKVPIGVGENTKISNCIIDMNCQGWKERLHNKQRGRSKSPDRPGRRILXIRSGIVVVLKNATIKDGTVI

SEQ ID NO: 5557 - protein, 397 aa, Lycopersicon esculentum
MGRGKVELKRIENKINRQVTFAKRRNGLLKKAYELSILCDAEIALIIFSSRGKLYEFCSNSSMSKTLERYHRYNYGTLEGTQTSSDSQNNYQEYLKLKTRVEMLQQSQRHLLGEDLGQLGTKDLEQLERQLDSSLRQIRSTKTQHILDQLAELQQKEQSLTEMNKSLRIKLEELGVTFQTSWHCGEQSVQYRHEQPSHHEGFFQHVNCNNTLPISMEQILERYERYSYAERRLLANNSESPVQENWSLEYTKLKARIDLLQRNHKHYMGEDLDSMSLKDLQNLEQQLDSALKLIRSRKNQLMHESISELQKKERAILEENNMLTKKIKEKDKIVEQQGEWHQQTNQVSTSTSFLLQPHQCLNMGGNYQDEVAEARRNNELDLNLDSLYPLYNMNKHL

SEQ ID NO: 5558 - protein, 533 aa, Zea mays
MAGAGAAANGGRNKYAVLDRSEERQTDARTERRRRPLAPESERGRRERFVYACAVFASLNAVLLGYDVGVMSGAIIYMQKDLHITEFQQEILVGCLSVVSLLGSLSGGRTSDAIGRKWTMGLGAIVFQIGATIMTFAPSFTVLMIGRLLAGVGIGFGAMVSGVYIAEISPAGARGTLTSLPEICINFGILLGYVSNYAFSGLSEHINWRIMLGVGILPSVFIGFALFVIPESPRWLMMEKRVSEARAVLLQISESEAEAEERLAEIEEAAGLMKSMKSEDKEVWRELLNPSPAVRRMLYAGCGIQLFQQITGIDATVYYSPTIFKDAGIKSDQELLAATVAVGFTKTVFILVAIFLIDRVGRKPLLYVSTIGMTICLFLLGVALTLQNHAVGLMSPRVGIDLAIFAVCGNVAFFSIGMGPICWVLSSEVFPLRLRAQGSALGQVGGRVSSGLVSMSFLSMARAISVAGMFFVFAAISTISVLFVYFCVPETKGKTLEQIEMMFESGDEWGGGEIELEDTQHLIPSIKKSVPLG

SEQ ID NO: 5559 - protein, 523 aa, Oryza sativa (japonica cultivar-group)
MACVLRLASRSRSRSGLRPTLAAPRPSPVPPPPPRVGPTPVAPSPAPLRGLLLPLSPLRLASPDAFSSSSPSPAWLLDGLNWRRAGIGRRWFATEASAASTAAELVDVPLAQTGEGIAECELLRWFVTEGDQVDEFQRLCEVQSDKATIEITSRFKGKVHQIHFGPGDIVKVGETLLKMMVGDSQTVSHDSIASSTDHSHAVDAANPSGEGSVPSGTLSTPAVRHLAKQYGLNISDIQGTGKDGRVLKEDVLSYAASKGLCKEPTSALEENIDQVELLEGRGSLPDANSYEDRRISLRGYQRSMVKSMTLAAKVPHFHYLEEINCDALVELKASFQNANKDHTIKHTFLPFLIKSLSKALSKYPLLNSCFVEETNEVIFKGSHNIGVAMATEHGLVVPNIKNVQSLSILEITKELSRLHEMASHNRLSTEDIAGGTITLSNIGAIGGKFGSPLLNLPEVAIIALGRIQKLPRFDDDENVYPSSIINVTVGADHRVVDGATVARFCNEWKSLVEKPERLLLHMR

SEQ ID NO: 5560 - protein, 562 aa, Neurospora crassa
MKNMFLRQSSRAVGRHEVSRLSRRGLSRVAPTATSTRTPSTTSSPTRPLPGNSRSSTLAQQLPSTRRAFHATRDLKVIKPVLLADIGEGIVECEVIQWFVEPGARVEEFSQLCEVQSDKASVEITSRFAGVVKKLYYEAGEMAKVGKPFVDIDIEAGPESKEVEAWTPPGPVSTLEGQQAIKGEAISTSTPQAVAPELKQSFIEAPWARQTPTTSSHAPVTKQTGKHASLATPAVRHLARELSVDITQIPGTGKDGRVLKEDVYKFLQARDSAPTLYPSAATPTSPGGTAAAAAAAATAASAFSSPDATIPGPQKETPVPLTRTQEMMFKSMTRSLTIPHFLYADEVDFTPLVELRTRLNRVLSKSGLPEGQVSKLSYLPFIIKAVSMALYKYPVLNARVELDSNSNGKPSLVMRSQHNIGVAMDTPSGLLVPVIKNVGSLNILSIAAELARLQSLAVAGKLSPQDMSGGTITVSNIGSIGGTYLSPVIVDREVAILGIGRMRTVPAFSTVPGEEDKILRRQICNFSWSADHRVIDGATMARAADVVRTIVEEPDVMVMHLR

SEQ ID NO: 5561 - protein, 66 aa, Glycine max
  unsure (1)..(66): unsure at all Xaa locations
CLQELTTFEIPLLKSKAIVEANXXRSETMKVISELEKEIAALDAENTAGSRLLELRKKQFALLLHV

SEQ ID NO: 5562 - protein, 497 aa, Zea mays
  unsure (1)..(497): unsure at all Xaa locations
MATCATTLAPLLGPAANATEYLCNQFADTTSAVDSTYLLFSAYLVFAMQLGFAMLCAGSVRAKNTMNIMLTNVLDAAAGALFYYLFGFAFAYGTPSNGFIGKHFFGLKRLPQVGFDYDFFLFQWAFAIAAAGITSGSIAERTQFVAYLIYSAFLTGFVYPVVSHWVWSADGWASPTRTSGKLLFGSGIIDFAGSSVVHMVGRHRGAAGRAHRGPPHXRFDHAGRSVALKGHSASLVVLGTFLLWFGWYGFNPGSFTTILKSYGPAGTVHGQWSAVGRTAVTTTLAGSVAALTTLFGKRLQTGHWNVVDVCNGLLGGFAAITAGCSVVEPWAAVICGFVSAWVLIGANALAARFRFDDPLEAAQLHGGCGAWGVLFTGLFARRKYVEEIYGAGRPYGLFMGGGGKLLAAQIIQILVIAGWVSCTMGPLFYALKKLGLLRISADDEMSGMDLTRHGGFAYVYHDEDPGDKAGVGGFMLKSAQNRVEPAAAVAAATSSQV

SEQ ID NO: 5563 - protein, 175 aa, Capsicum annuum
MGRGKVELKRIDNKINRQVTFAKRRNGLLKKAYELSVLCDAEIALIIFSSRGKLYEFCSSSSMSKTLERYHKHNYGALEGTQPSADSQNNYQEYLKLKTRVEVLQQSQRHMLGEDLGELNTKDLEQLERQLDSSLRQIRSTKTQHMFDQLAELHQKEQSLTEMNKSLKTKVSISP

SEQ ID NO: 5564 - protein, 516 aa, Lycopersicon esculentum
MKSTVHLGRVSTGGFNNGEKEIFGEKIRGSLNNNLRINQLSKSLKLEKKIKPGVAYSVITTENDTETVFVDMPRLERRRANPKDVAAVILGGGEGTKLFPLTSRTATPAVPVGGCYRLIDIPMSNCINSAINKIFVLTQYNSAALNRHIARTYFGNGVSFGDGFVEVLAATQTPGEAGKKWFQGTADAVRKFIWVFEDAKNKNIENILVLSGDHLYRMDYMELVQNHIDRNADITLSCAPAEDSRASDFGLVKIDSRGRVVQFAENQRFELKAMLVDTSLVGLSPQDAKKSPYIASMGVYVFKTDVLLKLLKWSYPTSNDFGSEIIPAAIDDYNVQAYIFKDYWEDIGTIKSFYNASLALTQEFPEFQFYDPKTPFYTSPRFLPPTKIDNCKIKDAIISHGCFLRDCTVEHSIVGERSRLDCGVELKDTFMMGADYYQTESEIASLLAEGKVPIGIGENTKIRKCIIDKNAKIGKNVSIINKDGVQEADRPEEGFYIRSGIIIISEKATIRDGTVI

SEQ ID NO: 5565 - protein, 271 aa, Haemophilus influenzae Rd KW20
MQHKLIAFIGGGNMAQAIILGLLKQGYPAEQIIVNDPNEEKRAFFANLDVATSENNVGSAIKAEVVLLAVKPQMMAEVCSPLSAVDFSDKLLISIAAGISTERLNALIPSVKSIVRVMPNTPALVGEGMAGLFAPKNTSENYRTFAQDLLGAVGRTVWVNDETQMHAVTAASGSSPAYFFLMLEAMQKALIKMNIDEKTARELVQQSMLGAAKMVTENPQIALSTLRENVTSKGGTTAAALAVFDAQHFNQTIEQAMQACLSRSQEMETLF

SEQ ID NO: 5566 - protein, 278 aa, Brucella suis 1330
MNPNIKKSSRPLVAVPTDVKPFENYVWHAAPEQYLAAAIEVAQVTPLLVPSFGDKMDFDAILDAVDGLLVTGSKSNVHPSLYGVEPSEAFEPYDDARDATSLPLIRAAIEKGVPVLAICRGLQELNVALGGTLATEIQGLAGRMDHRATDSESQAERFAIRHPVKLNPNSCLAEILKEESVRVNSVHRQAIDKLAPRLEVEAVAEDGTVEAVSVKNARGFVVGVQWHPEYWVQSDAPSRRIFEAFGDAVREHRAVKNMVAALMRNQNILPYSLIPLFP

SEQ ID NO: 5567 - protein, 518 aa, Lycopersicon esculentum
MDALCAGTAQSVAICNQESTFWGQKISGRRLINKGFGVRWCKSFTTQQRGKNVTSAVLTRDINKEMLPFENSMFEEQPTAEPKAVASVILGGGVGTRLFPLTSRRAKPAVPIGGCYRVIDVPMSNCINSGIRKIFILTQFNSFSLNRHLARTYNFGNGVGFGDGFVEVLAATQTPGDAGKMWFQGTADAVRQFIWVFENQKNKNVEHIIILSGDHLYRMNYMDFVQKHIDANADITVSCVPMDDGRASDFGLMKIDETGRIIQFVEKPKGPALKAMQVDTSILGLSEQEASNFPYIASMGVYVFKTDVLLNLLKSAYPSCNDFGSEIIPSAVKDHNVQAYLFNDYWEDIGTVKSFFDANLALTKQPPKFDFNDPKTPFYTSARFLPPTKVDKSRIVDAIISHGCFLRECNIQHSIVGVRSRLDYGVEFKDTMMMGADYYQTESEIASLLAEGKVPIGVGPNTKIQKCIIDKNAKIGKDVVILNKQGVEEADRSAEGFYIRSGITVIMKNATIKDGTVI

SEQ ID NO: 5568 - protein, 174 aa, Pseudomonas fluorescens PfO-1
MKSLVDHLSQYAAYHRDPRNIASHFIGIPLIVVAVAVLLSRPEWSVGGLWISPAVIAALASAWFYLRLELKLGALMTVLMGLSVWAGHVLAQQSTMVWLSSGLAMFVIGWAIQFVGHHYEGRKPAFVDDLSGLIVGPLFVVAELAFMLGMRHELKEQIEARAGVVRVNPNRAAV

SEQ ID NO: 5569 - protein, 251 aa, Anabaena variabilis ATCC 29413
MMLKDKVALVTGGTSGIGRATAIAYAKQQAKVVVVGRRIDEGEETVRLIQEAGGEAFFVQSDVTKEADVKAMVDKAVGVFGRLDIAFNNAGMVGENPSLIEQTEAEYDRIMNVNVKGVWLSMKYEIAQMLKQGSGAIVNTSSGAGVVALPGVPLYTASKHAVVGLTKAAALQYAKAGIRINAVAPGSIETDMFEAATGGQDEVKAYITGLHPIGRIGTPLEVANAVLFLSSDIASFITGEMLMVDGGFVAQ

SEQ ID NO: 5570 - protein, 475 aa, Anabaena variabilis ATCC 29413
MSHEFDYDLVIIGAGVGGHGAALHAVSCGLKTAIIEAGDMGGTCVNRGCIPSKALLAASGRVRELRDAHHLKSLGIQIGNVEFDRQAIANHANNLVSKIQGDLTNSLKRLGVDIIRGWGKIAGTQKVTVTGDGGEKTITARDIILSPGSVPFVPPGIEVDGKTVFTSDQGVKLETLPEWVAIIGSGYIGLEFSDIYSALGCEITLIEALDQLMPGFDRDIAKLAERVLITPRDIETKVGVYAKKVIPGSPVVIELADFKTKEVVDVIEVDACLVATGRIPATKNLGLESIGVELDRRNFIPVDDRMAVLSAGEVVPHLWAIGDANGKMMLAHAASAQGIVAVENIIGKERTVDYRSIPAAAFTHPEVSYVGLTETGAKELGQAEGFEIATSRSYFKGNSKALAENEADGIAKVIYRKDTGEVLGVHIFGLHASDLIHEASAAVANRQTVQTLAHLVHAHPTLSEVLDEAYKRAIV

SEQ ID NO: 5571 - protein, 247 aa, Rubrobacter xylanophilus DSM 9941
MESYIAEFIGTMVLILFGDGVVAAVLLRASKAENSGWIVITFGWGMAVAMAVYAVGWVSGAHINPAVTVALAVVGQFDWAQVPGYIIAQFLGAFVGAVLVWLAYLNHWEGTADPVLKRGVFCTIPQIRNTPANFVTEVIGTAALLFGILAILGSGAQIQGGQSELFTAGLFPLLVGLLVFAIGLSLGGPTGYAINPARDLGPRVAHAVLPIPGKGDSDWSYSWIPVVAPLVGGIIGAVLYTVLGFGD

SEQ ID NO: 5572 - protein, 283 aa, Glycine max
  unsure (1)..(283): unsure at all Xaa locations
ALQSYKLAAKAITRLQSLPSGNMERLCDTMVQEXXELTGYDRVMAYKFHEDDHGEVIAEITKPGLEPYLGLHYPATDIPQASRXXFRKNKYMANMDSIASLVLAVVVNDNEEDGDTDAVQPQKRERLWGLVVCHNTTPRFVPFPLRYACEFLAQVFAVHVHKEIELEYQIIEKNILRTQALLCMLMRDAPLGIVSESPNIMDLVKCDGAALIYRNKVWRLGVTPSEPQIREIALWLSEYHMDSTGFSTDSLFDAGFPSALSLGDVVCGMASVRVTAKDMXXGF

SEQ ID NO: 5573 - protein, 688 aa, Oryza sativa (japonica cultivar-group)
MAGVAAVRLLLLQAAAALALAAAAAAGGPEAATLLAFRGALRGPHGAPPEPLSQWATTTPGPCAGAGTGVSLWYGVTCHQRTGQVRGLRLEYLGLQGPAPDMAPLAALRGLRALSIANNNLTGPFPDVSMLPALKMLYMSRNKLDGGIPPAAFAHMRGLRKLFLSDNAFTGPIPTSITSPKLLVLQLSKNRFDGPLPDFNQKELRLVDVSDNNLSGPIPPGLRRFDAKSFQGNKNLCGPPVGAPCPEVPILASPSPSPLSSSWWSPRSLKILMIIALVVVVVGALLAFAGALTAMLARRREATTETQGGGVGGAAANAAAARMKATPNPAVTVAHGGGGGGGEQQPHVTVSAVPAKRGGRRDDHGRLVFIQEGRERFELEDLLRASAEVLGSGSFGASYKATLVEGQSMVVKRFKEMNGVGRQDFNEHMRRLGRLVHPNLLPVVAYLYKKDEKLFVTEYMVNGSLAHLLHGGSSMAALDWPRRLKIIKGVTRGLAHLYDELPMLTVPHGHLKSSNVLLDAAFEPILSDYALVPVMTPRHAAQVMVAYKSPECGETGRPSKKSDVWSLGILILEVLTGKFPANYHRQGRTGTDLAGWVHSVVREEWTGEVFDQEMRGARGGEGEMVKLLKVGLGCCESDVDKRWDLRDALARIEELRERDAGAGADDSSAASSVASGGGGGEASRSHSS

SEQ ID NO: 5574 - protein, 268 aa, Streptomyces avermitilis MA-4680
MTSPYGLEGRVAVVTGASRGIGRAVAEAFAAAGAHVCVTARDADGVRRAAEELGGVGLAGSVADPAHPRELTELALAAFGRLDVVVNNAATNEPYGPLMDADPDRWREAFTINVEAPLRLVQCAWRAWMGEHGGAVVNICTEGAGHVGPNVGAYGTTKAALLHLTRQLAGELAPKVRVNSVSPGLVRTELARFVWEHGEDELAAGLPLGRIGHPADIARAVVWLASDAAEWITGADLLVDGGTRVRTAYSADGYAVQERLRSYAPPHS

SEQ ID NO: 5575 - protein, 279 aa, Azotobacter vinelandii
MHDMRSPSLLGQCLAEFIGTALLIFFGTGCVAALVVGGASLGLWEISLIWGLAVSLAIYVSAGVSGAHLNPAVSIALCLFAGFDRRKLPAYILAQVAGAFCAAALVYGLYSNLFFDYEQSHQIVRGSPDSLALASVFSTYPNPLLSVGQAFAVETVITAILMAVIMALADDGNGLPRGPLAPLLIGLLVAVIGGSMGPLTGFAMNPARDLGPRLMAFLAGWGDIALTGGREVPYFLVPLSAPLLGACLGAAGYRGLIARHLPGRAGPEDTASPACKARV

SEQ ID NO: 5576 - protein, 159 aa, Schizosaccharomyces pombe
MSTLDLNHLADLYDRKDWNACKKELLKLKVELAKQNLFVPTSDKEKASFARNVFEYGVLVSIQTCDIESFARYASQVIPFYHDSLVPSSRMGLVTGLNLLYLLSENRIAEFHTALESVPDKSLFERDPYVEWVISLEQNVMEGAFDKVASMIRSCNFPE

SEQ ID NO: 5577 - protein, 397 aa, Neisseria meningitidis Z2491
MFFKHIEAAPADPILGLGEAFKAETRPEKVNLGIGVYKDASGATPIVKAVKEAEKRLLESETTKNYLTIDGVADYNEQTQILLFGKDHEIIASRRAKTAQSLGGTGALRIAAEFAKRQLNAQTIWISNPTWPNHNAIAKAVGIQDQPYRYYDAAKHGLDWDGMIEDLSQAQKGDIVLLHGCCHNPTGIDPTPEQWETLAKLSAEKGWLPLFDFAYQGFGNGLEEDAYGLRVFLKHNTELLIASSYSKNFGMYNERVGAFTLVAEDEATAARAHSQVKTIIRTLYSNPASHGANTIALVLKNDDLKAQWIAELDEMRGRIKAMRQKFVELLKAKGATQDFDFIIEQNGMFSFSGLTPEQVDRLKNEFAIYAVRSGRINVAGITDDNIDYLCESIVKVL

SEQ ID NO: 5578 - protein, 381 aa, Deinococcus radiodurans R1
MHPRARHAQTSIFTHMSLLAARHGAVNLGQGFPSNPPPAFLLDAARRAVGTVDQYTPPLGLPALREALGADLNVDPADVIVTSGATEGLLTLALSLLVPTRDGQPAELVVFEPVYDVYVPQAELAGARAVPVPLHLDPEEGWSLDLAAVRAAITPRTQALLVNTPHNPTGLVFSWAELTELVALAREHDLWLISDEVYDELYASERPTSLRELAPERTFTVGSAGKRLEVTGWRVGWILCPPGLGGGLSLAGGLANVRQVTSFCSPAPLQAAVAEALPLARSQGYYAALRADYAARRALLSSGLRSLGAQVHEPQGTYFLTAQHPTWTAEGLVESGAVAVIPGEAFYVTSPPPAGLLRFAFCKSRAELEQALERLARLSNF

SEQ ID NO: 5579 - protein, 371 aa, Agrobacterium tumefaciens str. C58 (Cereon)
MECCRFSRTAAILDANRNWREETRMRGVVIHAAKDLRVEDVAGQPLAADEVRVAVAVGGICGSDLHYYNHGGFGTVRVREPMALGHEFAGTVVEVGSSVSHLVPGMRVAVNPSLPCGTCRYCAQGRQNQCLDMRFMGSAMRSPHVQGGFREVVTVHSTQPVQIADGLSMGEAAMAEPLAVCLHAARQAGSLLGKTVLITGAGPIGMLSLLVARLAGAAHIVVTDVADAPLDLARRIGADEAVNILRDADMLEKYRFEKGVFDVLFEASGNQAALLPALDLLRPGGIIVQLGLGGDFTIPMNLIVAKELQLRGTFRFHEEFAQAVNMMGRGLIDVKPLISATLPFDQAREAFDLAGDRAKSMKVQLAFSGAA

SEQ ID NO: 5580 - protein, 408 aa, Methanococcus maripaludis S2
MATADLFADPTNIVTGLSTLATSGDVMFLVLMGVLVFSMQLGFALLEGGQVRKKNVNNVMMKNMADWLIGAVSWLFIGGVLSVSLVPADFFSWWGQIFTTNFANNGIDLANWFFGLVFAATAATIVSGGVAERIKFKSYLLMSIIITAILYPLFVYLGPWGSGMIPFNDYAGSFVVHGLGGFLALGAIAALGPRIGKFVNKKAISIPGHNIPMSVFGAFVLAIGWYGFNVGSSFAVADISGLVCATTTLAMAGGGIGALLASKDDVLFTANGIVAGLVAICSGTDVVSPIGALIIGLVAGIQVPIVYKIVEKMGLDDVCGVIPVHGTAGILGGILTGVFGMAALGGAGGVSLVNQLIAAGLTVVYGTGLGFGLGKLVGGFTGGLRVTEEEEKMGLDLAEHKLPAYPDE

SEQ ID NO: 5581 - protein, 514 aa, Agrobacterium tumefaciens str. C58
MLASMKGYSRECNMRDGPSALTFIHLCDSFASGTRVRRKEQPWFSTGAAGGGINTATPMRIETIIFDCFRQAAEKPQEISIFRHKFTLHLHAAVASICQTCLWVYAKRRAMMAKQKVAMLTAGGLAPCLSSAVGGLIERYSDIAPEIDIIAYRSGYQGVLLGERIEITKDMREKAHLLHRYGGSPIGNSRVKLTNAADCAKRGLVKEGDNPLRVAAERLAADGITILHTIGGDDTNTTAADLAAYLGANGYDLTVVGLPKTVDNDVVPIKQSLGAWTAAEVGAAFFDNVSNEQSAAPKTFVIHEVMGRHCGWLTAATARAYIQKTRGNDYVEGLMMNTQMKNIDGIYLPEMAFDIEAEAERLKEVMDKHGYVTLFVSEGAGLDAIVAEREAAGEAVKRDAFGHVKIDTINVGGWFQKQFAGLIGAERSMVQKSGYFARSAPANGDDLRLIQGMVDLAVESALNKVSGVTGHDEDQNGKLRTIEFPRIKGGKHFDLSAKWFTEVMEHVGQPFTAA

SEQ ID NO: 5582 - protein, 1124 aa, Nicotiana tabacum
MSSSRPSQSSTTSARSKHSARIIAQTTIDAKLHADFEESGDSFDYSSSVRVTSVAGDERKPKSDRVTTAYLNQIQKGKFIQPFGCLLALDEKTFKVIAFSENAPEMLTMVSHAVPSVGELPALGIGTDIRTIFTGPSAAALQKALGFGEVSLLNPVLVHCKTSGKPYYAIVHRVTGSLIIDFEPVKPYEVPMTAAGALQSYKLAAKAITRLQALPSGSMERLCDTMVQEVFELTGYDRVMTYKFHDDDHGEVVAEITKPGLDPYLGLHYPATDIPQAARFLFMKNKVRMICDCRAKHVKVVQDEKLPFDLTLCGSTLRAPHYCHLQYMENMSSIASLVMAVVVNDGDEEGESSDSTQSQKRKRLWGLVVCHNTTPRFVPFPLRYACEFLAQVFAIHVNKELELESQILEKNILRTQTLLCDMLMRVAPLGIVSQSPNIMDLVKCDGAALLYKNKIHRLGMTPSDFQLHDIVSWLSEYHTDSTGLSTDSLYDAGFPGALALGDVVCGMAAVRISDKGWLFWYRSHTAAEVRWGGAKHEPGEKDDGRKMHPRSSFKAFLEVVKTRSVPWKDYEMDAIHSLQLILRNASKDADAMDSNTNIIHTKLNDLKIDGLQELEAVTAEMVRLIETASVPIFAVDVDGQLNGWNTKIAELTGLPVDEAIGNHLLTLVEDSSVDTVSKMLELALQGKEERNVEFEIKTHGPSGDSSPISLIVNACASRDVGDSVVGVCFIAQDITGQKNIMDKFTRIEGDYRAIIQNPHPLIPPIFGTDQFGWCSEWNSAMTKLTGWRRDDVIDKMLLGEVFGTQAACCRLKNQEAFVNFGVVLNNAMTGQECAKISFGFFARNGKYVECLLCVSKRLDREGAVTGLFCFLQLASHELQQALHIQRLSEQTALKRLKVLAYIRRQIRNPLSGIIFSRKMLEGTNLGEEQKNILRTSSQCQRQLNKILDDTDLDSIIDGYLDLEMLEFKLHEVLVASISQIMMKSNGKNIMIVNDMVEDLLNETLYGDSPRLQQVLANFLLVCVNSTPSGGQLSISGTLTKDRIGESVQLALLEVRISHTGGGVPEELLSQMFGTEAEASEEGISLLISRKLVKLMNGEVQYLREAGRSTFIISVELAVATKSSC

SEQ ID NO: 5583 - protein, 251 aa, Escherichia coli CFT073
MVDKSQETTHFGFQTVAKEQKADMVAHVFHSVASKYDVMNDLMSFGIHRLWKRFTIDCSGVRRGQTVLDLAGGTGDLTAKFSRLVGETGKVVLADINESMLKMGREKLRNIGVIGNVEYVQANAEALPFPDNTFDCITISFGLRNVTDKDKALRSMYRVLKPGGRLLVLEFSKPIIEPLSKAYDAYSFHVLPRIGSLVANDADSYRYLAESIRMHPDQDTLKTMMQDAGFESVDYYNLTAGVVALHRGYKF

SEQ ID NO: 5584 - protein, 234 aa, Triticum aestivum
QIRQLMRSKALLPFFDSAYQGFASGSLDKDAQSVRMFVADGGELLMAQSYAKNMGLYGERVGALSIVCGSADIAVKVESQLKLVIRPMYSNPPLHGASIVATILKDSAMFDEWTLELKAMADRIISMREQLFNALKIRETPGDWSHIIKQIGMFTFTGLNSDQVAFMRQEYHIYMTSCRCHTCRSNKTEVNDNIATPSHNKILNSLQQFPRGSTRGVLLAELENLPCRLIKLVV

SEQ ID NO: 5585 - protein, 198 aa, Gossypium barbadense
MCGGAIISDFVAPKYDRKLTGDDLWSELDIFSDLLGFDNNGKSFVNHQFHNNNNNKLINPKDNQLNKERSETIQKTSQVTKKVEKTQRTRKNFYRGIRQRPWGKWAAEIRDPQKGVRVWLGTYNTAEEATRAYDEAAKRIRGDKAKLNFPQTPTKNQAASPALTLLPPAKKRCIVPGVNSTEFTRLDSPPISLWVLGV

SEQ ID NO: 5586 - protein, 558 aa, Mycobacterium tuberculosis H37Rv
MKVMAQMAMVMNLDKCIGCHTCSVTCKQAWTNRSGTEYVWFNNVETRPGVGYPRTYEDQERWRGGWVRDKKGRLRLRDGGRIHKLLRIFANPKLPTIGDYYEPWTYDYENLTSAPAGDTFPTAAPRSLISGNPMKVSWGSNWDDNLAGSPEIVPNDPVLKKVNQVNQEVKLKLEETFMFYLPRICEHCLNPSCVASCPSGAMYKRTEDGIVLVDQDRCRGWRMCVSGCPYKKVYFNHKTGKAEKCTLCYPRIEVGLPTVCSETCVGRLRYLGLVLYDVDQVLQAASVESDTDLYEAQRRILLDPHDPRVIAGARAEGIADEWIEAAQRSPVYALINTYRVALPLHPEYRTMPMVWYIPPLSPVVDAVSRDGHDGEDLGNLFGALDALRIPIAYLAELFTAGDTEVVAGVLRRLAAMRCYMRDINLGRETQPHIPESVGMTEEQIYQMYRLLAVAKYEERYVIPTSYAGELPAAAMTDDMGCSLSVDGGPGMYESGPFGQGSPTPVPIAVESFHALQHAGSAATGGAGRSRVNLLNWDPNGAAAGLFPEPQPSKDVVQR

SEQ ID NO: 5587 - protein, 401 aa, Synechocystis sp. PCC 6803
MLSKQSIANLTEADLAGKRVFVRVDFNVPLDNGSITDDTRIRAALPTIKDLLSKGAKVILGSHFGRPKGKVVDSMRLTPVGDRLGELLGQPVVKCDDCIGAEVTAKIASLPNGGVALLENLRFHAGEEGNDAEFAKALAANADLYVNDAFGTAHRAHASTEGVTHFLSPNVAGYLIEKELQFLQGAIEAPKRPLVAIVGGSKVSSKIGVIETLLDKCDKLIIGGGMIFTFYKAQGLNTGKSLVEEDKLDLAKSLMAKAKEKGVEFLLPTDVVVADNFAPDANAQTVGVDAIPDGWMGLDIGPDSVKTFQDALAGCGTVIWNGPMGVFEFDKFAVGTEAIACSLAELTASGTVTIIGGGDSVAAVEKVGVAEKMSHISTGGGASLELLEGKVLPGIAALDDR

SEQ ID NO: 5588 - protein, 319 aa, Gossypium barbadense
MSNVYLWFMYPYDIKFFFLCSIIEGSNSEKSMQFDGQAEKCAKRKRKNQYRGIRQRPWGKWAAEIRDPRKGVRVWLGTFNTAEEAARAYDAEARRIRGKKAKVNFPNETPRTSPKHAVKTNSQKPLSKSNLSPVQLNLDQNYNYLSQPEQEYFDTMGFVEEKPLVNQFAYVDPVPTSIDAGSNQSDNAPLYFNSDQGSNSINCSDYGWGEQGARTPEISSILEASVVGEEFLEDANPSKKLKPSSDNVMPAEDNSAKTLSDELLALDNQMKYFQMPPFIEGNWDATIDAFLNGDATQDGGNPMDLWNFDDFPTMAEGVF

SEQ ID NO: 5589 - protein, 192 aa, Ephedra foeminea
DDHGEVISEIRRSDLEPYLGLHYPATDVPQASRFLFMKNRVRMICDCYSPPVRVIHDKRLKKELSFCGSTLRAPHGCHAQYMANMGSVASLVMAVIVNEKEDEEAENEGQSQPKGRKLWGLVVCHHTSPRFVPFPLRYACEFMMQVFSIQLNKEVELACQMREKQILRTQTLLCDMLLRDTPLGIISQKPSI

SEQ ID NO: 5590 - protein, 470 aa, Mesembryanthemum crystallinum
MNMRPALPMQTSGGNCFNELKVSGPYSSQLPVLPNPLEDFPKSPDPFAVSSSREMIPNPLQIQANPMVSHFGSSHNSSTYASGFPTDLHFPSFSPRERQSQNSPLGGGVAFPPSQNTSPDVQSAGFINYQKEDDDNSWSTGHLQDLLDFPEGIPVSNGQVGTSTEVMSNDNHVKRIGWRELTEDLYADSIEPNWNDFLADSNVADQQPKVTQPSSDVRVHQPLIQQQLSLPPREVSAAANQTSAAANQTSAAHSNRPRMRWTPELHEAFVDAVNQLGGSERATPKGVLRHMNVEGLTIYHVKSHLQKYRTARVRPESSEGNSERRASSVDPVSSVDLKTSVTITEALRMQMEVQKQLHEQLEIQRKLQLQIEEQGKYLLQMLENQNKVEKEKLNPDGSSAHNDKSEGSQPEPSREGAVISISSQGPGESSHGSKGKQKAPEADTTGDHHLEDGGSNPPPMKRARTDDSFL

SEQ ID NO: 5591 - protein, 411 aa, Methanococcus maripaludis S2
MVTADLFNNPTNIMDALNTLANSSDVMFLIFTGAFIFIMHLGFAMLEGGQVREKNVNNAMMKNMGDWIIGCISWLLVGSVIARTLNPADFFIWWGKIASATPFLTNNGLELANWFLGLVFAATAATIVAGGIAERIKFKSYILISIVITALLYPFFSYLGPWGAGVIPFHDYAGSLMVHGVGGFLALGLIAAIGPRFGRFVNKKAITIPGHNIPMSILGAYILAFGWYGFNVGSSLALSDISGLVCATTTLAMAGGGLGGCLFSKNDVLYTANGLLAGTVAICAGTDIVSPLGALIIGFIAGSQVPLIFKIVEKMGLDDVCGVIPVHATSGALGAILAGIFGMTAFGGVGGVSLTEQIIATLICAVYGTGAGFILGKLVGAVTGGLRVKESEEKAGLDISIHKLPAYPKEN

SEQ ID NO: 5592 - protein, 91 aa, Gossypium barbadense
MDGAPYLRKIDLKIYSGYPELLQAIENMFKFTIGEYSEREGYKGSDYAPTYEDKDGDWMLVGDVPWEMFITSCKRLRIMKGSEARGLGCGV

SEQ ID NO: 5593 - protein, 515 aa, Edwardsiella tarda
MHIVNGINGLIAKKNVLFFLTSLAISPSVLADTLTRDNGAPVGDNQNSQTAGPIGPVMLQDVQLLQKLQRFDRERVPERVVHARGTGAHGVFTPTADISDLTVAKVFTPGSTTPVFVRFSSVVHGTHSPETLRDPRGFATKFYTAEGNWDLVGNNFPTFFIRDAIKFPDMVHAFKPDPRTNLDNDARRFDFFSHLPESTRTLTLLYSNEGTPLSYRNMDGNSVHAYKLINDKGEVHYVKFHWKTRQGIKNLDPQQVEQIQGKDYSHMTQDLVTAINRGDYPKWDLYIQVLKPADLKNFDFDPLDATKVWPDVPERKIGEMVLNKNPDNVFQETEQVAMAPSNLIPGIEPSEDKLLQGRLFAYADTQFYRIGANGLSLPINKPHSAVNNGNQDGQLNSGHTLDKGVNYQPSRIYPREELVSSRYSQTPLSGTTQQSKIQREQNFKQAGELYRSYSKKEQNDLINSLGTSLASADTVSKNIMLSYFYKADKDYGTRLTSVANGDLPTVKNLADKLQD

SEQ ID NO: 5594 - protein, 482 aa, Rhodococcus rhodochrous
MSMQYDSLFIGGDWIAPSSSKRITAISASTEQPIGSVPEAQEADVDAAVAAARRALDDPAGWAHWAPAARAAAIERLADVLERRAEDVVQCVSAQNGMPVAVARQLEGVFPVVLLRYYAGLARDTATEETRPGLFGGSTLVCREPLGVVGAIVPWNFPQTLAAFKYAPALAAGCTLVIKPSPETVLDAFVFAEAVAEAGIPAGVVNVVPGGREVGAYLVEHPGVDKISFTGSTAAGRSIGEVCGRLLRPVTLELGGKSAAIVLDDAGLDLQTMSEKLFAATLLNNGQTCFLGTRVLAPRSRYSEIVDLFTDLAGTLKVGDALDDTTQIGPMATAAQRDRVEQYIAKGLGDGARITIGGGRPADQDKGWFVEPTIFADVENNHTIAQEEIFGPVLSVIPYSDEDEAVRIANDSDFGLGGTVWTNDPDRGLALAKRVQTGTIGINGYLPEPTAPFGGVKASGLGRELGPEALSNYQQLKSIYLD

SEQ ID NO: 5595 - protein, 401 aa, Treponema denticola ATCC 35405
MNRKELEKLGFASKQIHAGSIKNKYGALATPIYQTSTFAFDSAEQGGRRFALEEEGYIYTRLGNPTTTVVEEKLACLENGEACMSASSGIGAVTSCIWSIVNAGDHIVAGKTLYGCTFAFLNHGLSRFGVDVTFVDTRDPENVKKALKPNTKIVYLETPANPNMYLCDIAAVSKIAHAHNPECKVIVDNTYMTPYLQRPLDLGADVVLHSATKYLNGHGDVIAGFVVGKKEFIDQVRFVGVKDMTGSTLGPFEAYLIGRGMKTLDIRMEKHCANAQKVAEFLEKHPAVESIAFPGLKSFPQYELAKKQMKLCGAMIAFTVKGGLEAGKTLINSVKFATIAVSLGDAETLIQHPASMTHSPYTPEERAASDIAEGLVRLSVGLEDAEDIIADLKQALDKLVK

SEQ ID NO: 5596 - protein, 219 aa, Nostoc punctiforme PCC 73102
MMTVNQIIGDSQNQINANFGKRFFAWIMAQSSSTYNKIVSDRKRSLFANLQGKVLEIGPGTGPNLPYYPKDIHWIGIEPNPHMHSYLQKQAKKLGLNIDLRIGNAEWLDAEDNSIDTVVSTLVLCSVPNIDYTLQAILRVLKPGGRFLFIEHVAAPQGTVLRQVQSAIRPTWQVIGDGCHPDRETLIALENAGFASINYERFDAQLPIVSPHIIGVATN

SEQ ID NO: 5597 - protein, 272 aa, Leptospirillum ferrooxidans
GPQDRKNTPKMAKSNAHCGPKHSPLLFLGTFILWLGWFGFNPGSTLMATTPSVGYFAYIAMTTNLAAAAGALAAMFTAWKILGAPDMSMVANGAIAALVAITASCAFVDPWASVVIGAVAGVIAVVGVLAIDRIHIDDPVGAVSVHGMAGIWGTLSNGLFATPDRVKLLAVGTPGLFYGGGFHQLLVQAEGVSASLAYVFFVSLLVFYVIKVTIGLRVSEHDEVSGLDISEHKMWGYPEMFSGGFGGGTAPGELAGRSEMSMSAAKPVTQRT

SEQ ID NO: 5598 - protein, 249 aa, Vitis berlandieri x Vitis rupestris
MPKIAFGRFDDSFSLASFKAYLAEFHSTILFVFAGVGSVMAYNKLTSDAALDPAGLVAVAVAHGFALFVAVAVSANISGGHVNPAVTFGLVVGGQITILTGILYWIAQLVGSILACFLLKLVTGGLTTPVHSLGAGVGVIDAIVFEIVITFALVYTVYATAVDPKKGSLGIIAPIAIGLVVGANILAAGPFSGGSMNPARSFGPAVVSGDFKDNWIYWVGPLIGGGMGGSVYAFMYLGSDHQPLASSEF

SEQ ID NO: 5599 - protein, 205 aa, Ephedra foeminea
DEHGEVVSEIRRSDLVPYLGLHYPATDIPQASRFLFMQNRVRMICDCRALPVKVIQSGELKQPLCLVGSTLRAPYGCHAHYMANMGSIASLVMAVIVRNEDDGGNNNTGSGGGGSGGEGSGSHIGRNTMKLWGLVVCHHTSPRTVPFPLRYACEFLMQAFGLQLNMELQLAAQLTEKHILKTQTLLCDMLLRDTPMGIVTQSPSI

SEQ ID NO: 5600 - protein, 655 aa, Burkholderia multivorans
MCGIDGFLNSVAFDEETARGTLARMTASLAHRGPDAQGLWVDPAAGIALGHRRLAIVDLSVHGRQPMASACGRYVMVFNGEIYNHRELRAQLERVGRAPAWRGHSDTEVLLAAFAAWGVDATLRRATGMFALALWNRESRVLTLARDRIGEKPLYYGRIGDALVFASELKALRAYPGFGGEIDRDALCLYLRHSAVPAPHTIYRGIRKLPPGSWIQFEHAQDTPRIRTYWALEHAIDAGHHEPFAGTAAEAVDRLDTVLRQAVARQMEADVPLGAFLSGGVDSSAIVALMQAQSAAPVDTFTIGFHEAGYDEAGYAKAVARHLGTRHTELYVTADHALDVVPKLPAIYDEPFSDASQIPTFLVAELTRRHVKVSLSGDGGDELFGGYTRYFLTPRLWRKLHRVPAAVRTRIAGALHALRPDHADQLAAVAQGAWGAGELRDSPTRIGDRLHKLGHVMTADSRIGLYRLLMSSVHHPERIALAGHEPPTPLDTVSAWPAHLSFAEQAMAIDTLTYLPTDILTKVDRAAMAVSLETRMPFLDHHVVEFAWRLPASLRLPEGQSKALLRRLLDRYVPTELIDRPKQGFCAPIDHWLRGALRDWADALLQPSRLRDEGFFDAAAVERLWRQHQTGRMNWQHQLWTVLMFQAWLDAQRAA

SEQ ID NO: 5601 - protein, 133 aa, Triticum aestivum
  unsure (1)..(133): unsure at all Xaa locations
MAPTVMASSATSVAPFQGLKSTAGLPVXRRSNGASLGSVSNGGRIRCMXVWPIEGIKKFETLSYLPPLSTEALLKQVDYLIRSKWVPCLXFNKVGFIFREQNATPGYYHXRYXWTMXWKLPMFGXCTDPTQGD

SEQ ID NO: 5602 - protein, 469 aa, Glycine max
  unsure (1)..(469): unsure at all Xaa locations
MAATRPVQCLLRRVCRGSRTIGVATEVNASGSTSSRIGSGKEYEHSAHNYHPLPIVFAQAKGTSVWDPEGNKYLDFLSGYSAVNQGHCHPKILKALQEQAQRLTVSSRAFYNDRFPVFAEYVTNMFGYDMVLPMNTGAEGVETALKLARKWGYEKKRIPKDEAIIVSCCGCFHGRTLGVISLSCDNEATRGFGPLLPGNLKVDFGDAEALERIFKEKGEHIAAFILEPVQGEAGVIFPPDGYLKAVRDLCSKYNVLMIADEIQTGLARTGKMLACEWEEVRPDVLILGKALGGGVIPVSAVLADKDVMLCIQPGQHGSTFGGNPLASAVAIASLDVIKYVRLVERSAQMGEELTGQLXRFQQQYPDYVKEVRGRGLFIGVEFNSKKLFPVSGYELCKKLKYRGVLAKPTHDAIIRFTPPLCISVDEIQQGSKALADVLEIDLPKLQKTKPIDAAPVATSACDRCGRVLY

SEQ ID NO: 5603 - protein, 190 aa, Neurospora crassa
MSLNLEKQLTFYGAYHSNHVNVVIHMICVPLILFSAFEIASNYGPFFTLPSWLQVPYLEPNLGTFAALTWGGLYVLLEPVAGTALALICLGACAFTNYLRIADPVLTTKVAIVVHIVSWLAQFLGHGKFEGRAPALLDNLFQAIFLAPLFVWLELLFMLGYRPELKTRVDKAVAVEIAKFRESRNAKKAQ

SEQ ID NO: 5604 - protein, 362 aa, Mycobacterium tuberculosis H37Rv
MSASLPVFPWDTLADAKALAGAHPDGIVDLSVGTPVDPVAPLIQEALAAASAAPGYPATAGTARLRESVVAALARRYGITRLTEAAVLPVIGTKELIAWLPTLLGLGGADLVVVPELAYPTYDVGARLAGTRVLRADALTQLGPQSPALLYLNSPSNPTGRVLGVDHLRKVVEWARGRGVLVVSDECYLGLGWDAEPVSVLHPSVCDGDHTGLLAVHSLSKSSSLAGYRAGFVVGDLEIVAELLAVRKHAGMMVPAPVQAAMVAALDDDAHERQQRERYAQRRAALLPALGSAGFAVDYSDAGLYLWATRGEPCRDSAAWLAQRGILVAPGDFYGPGGAQHVRVALTATDERVAAAVGRLTC

SEQ ID NO: 5605 - protein, 253 aa, Azotobacter vinelandii
MNDPRKTESTTHFGYQSVPESQKARKVAEVFHSVAAKYDLMNDVLSGGLHRLWKRFTIELSGVRRGNRVLDIAGGTGDLTLQFSRLVGESGEVLLADINDSMLKVGRDRLLDRGVAGNVRFVQADAEKLPFPDNHFDVITIAFGLRNVTRKEDALRSMLRVLKPGGRLLVLEFSKPSNALLGKVYDAYSFAFMPLAGKLITNDADSYRYLAESIRMHPDQETLKSMMAGAGFERVTYHNMTGGIVALHRGLKP

SEQ ID NO: 5606 - protein, 424 aa, Agrobacterium tumefaciens str. C58 (Cereon) [sequence omitted]

SEQ ID NO: 5607 - protein, 406 aa, Oryza sativa
QLRSAHPKLGMASTVAINLIGAQAGIISKLRNCDITSYSGLKARSSISFESRSSFLGQNASLRSSISPRIVPKANSGSHISPEASYKVAVLGAAGGIGQPLGLLIKMSPLVSALHLYDIANVKGVAADLSHCNTPSQVLDFTGPSELANCLKGVDVVVIPAGVPRKPGMTRDDLFNINASIVKTLVEAVADNCPEAFIHIISNPVNSTVPIAAEVLKQKGVYNPKKLFGVTTLDVVRANTFIAQKKNLKLIDVDVPVVGGHAGITILPLLSKTRPSVTFTNEETEELTRRIQNAGTEVVEAKAGAGSATLSMAYAAARFVESSLRALAGDPDVYECTFVQSELTELLFFASRVKLGKNGVESIISSDLEGVTEYEAKALESLKPELKASIEKGIEFVHKQQAAATS

SEQ ID NO: 5608 - protein, 312 aa, Moritella marina
MKVAVLGAAGGIGQALALLLKTQLPAGSDLSLYDIAPVTPGVAVDLSHIPTDVTIAGFAGMDPTDALVGADVVLISAGVARKPGMDRSDLFNINAGIIKNLAGKCAEVCPNACIGIITNPVNTTVPIAAEVLKQAGVYDKRKLFGITTLDVIRSETFVSELKGISLADVEVPVIGGHSGVTILPLLSQVKGVEFTAEEIATLTPRIQNAGTEVVEAKAGGGSATLSMGQAAARFGLSLVRALQGEEGIVECTYVDGGSEHATFFAQPVLLGKNGVEEVLAYGELSEFETNARDAMLEELKANITLGEEFVAG

SEQ ID NO: 5609 - protein, 196 aa, Glycine max
MASATRLVHCELRSARPAVRAREPAGPVQVTIPKPKAAEAEGANIVLQPRLCTLRSYGSDRAGVLIKARKEGDDDDVSPFFAALSDYIESSKKSHDFEIISGRLAMMVFAATVTMEMVTGNSMFRKMDIEGITEAGGVCLGAVTCAALFAWFSSARNRVGRIFTVSCNAFIDSVIDQIVDGLFYEGDDPTDWPDEP

SEQ ID NO: 5610 - protein, 312 aa, Moritella yayanosii
MKVAVLGAAGGIGQALALLLKTQLPAGSDLSLYDIAPVTPGVAVDLSHIPTDVTIAGFAGTDPTEALVGADVVLISAGVARKPGMDRSDLFNINAGIIKNLAAKCAEVCPNACIGIITNPVNTTVPIAAEVLKQAGVYDKRKLFGITTLDVIRSETFVSELKGISLADVEVPVIGGHSGVTILPLLSQVKGVEFTAEEIVTLTARIQNAGTEVVEAKAGGGSATLSMGQAAARFGLSLVRALQGEQGIVECTYVDGGSEHATFFAQPVLLGKNGVEEVLAYGELSEFEASARDAMLEELKANITLGEEFVAG

SEQ ID NO: 5611 - protein, 457 aa, Agrobacterium tumefaciens str. C58
MGGLVMPINITMPALSPTMEEGNLTKWLVKEGDKVAPGDVIAEIETDKATMEVEAVDEGTVAKLVVPAGTEAVKVNALIAILAAEGEDVAEAAKGGDAVPAKAEAPKPEAAKAEAPKEEAAPVKAEKPVADQAAASSTPAPVAKSGERIFASPLARRLAKEAGLDLSAVSGSGPHGRIVKTDVEKAAASGGAKAAPAAAASAGAPAPALAKGQSDEAVLKLFEQGSYELVPHDGMRKVIAKRLVESKQTVPHFYVSVDCELDTLLALRAQLNAAAPEKDGKPVYKLSVNDMVIKALALALRDVPDANVSWTESAMVKHKHADVGVAVSIPGGLITPIIRKAEEKSLSTISNEMKDYGKRAKERKLKPEEYQGGTTAVSNMGMMGVKSFSAVINPPHATILAVGAGEQRAVVKNGEIKIANVMTVTLSTDHRCVDGALGAELIGAFKRYIENPMGMLV

SEQ ID NO: 5612 - protein, 481 aa, Agrobacterium tumefaciens str. C58
MAQSYDVIIIGSGPGGYIAAIRAAQLGMKVAVVEREHLAGICSNWGCIPTKALLRTADVMHTATHAKDYGLTLEGSIKPDVKAIVARSRGIAARMNNGVGFLFKKNKVDIIWGEAKITKPGEIVVGKSTKPVVQPQGPVPKNTLGEGTYTAKHIIVATGARPRALPGIEPDGKLIWTYFEAMKPEELPKSLLVMGSGAIGIEFASFYRTMGVDVTVVEIMSQVMPVEDAEISAFAKKQLEKQGIKIHLETKVSKVEKAANSVTATLEKKDGSSEKIIADRMISAVGVVANVEGIGLEAAGVKTDRGFIIIDGYGKTNVPGIYAIGDVAGPPLLAHKAEHEAVICVEKIAGLPNVHPMDKLKIPGCTYCNPQVASVGLTEAKAKEQGRDIRVGRFSFAANGKAVALGEDQGMVKTIFDKKTGELLGAHMVGAEVTELIQGFVVAMNLETTEEDLMHTIFPHPTISESMKESVLDAYGRVLNA

SEQ ID NO: 5613 - protein, 262 aa, Rubrobacter xylanophilus DSM 9941
MRRVGVIGAGKIGGSLLSRLAESGDFELAVSDVHPEQVERFRRYDRVRPASSNLELAEASEIVIVAVKPWDVAGVLEEISPAMGSGGRSVTSVAAGVEIRTIESYLPEGTPVLRVMPNVCASVGLGAAVITANEPGRRVLPEVMDIFGRVGEVMELPERLFDAATALHGSGPAYVALFADALIQAGVREGLPREVARRLVVGTLAGTAVLLKDRSAHQVRDEVMTPGGTTAAAFVAMEKAGFVGAVYDGVNAATRRARELGG

SEQ ID NO: 5614 - protein, 499 aa, Arabidopsis thaliana
METEDDLCNTNWGSSSSKSREPGSSDCGNSTFAGFTSQQKWEDASILDYEMGVEPGLQESIQANVDFLQGVRAQAWDPRTMLSNLSFMEQKIHQLQDLVHLLVGRGGQLQGRQDELAAQQQQLITTDLTSIIIQLISTAGSLLPSVKHNMSTAPGPFTGQPGSAVFPYVREANNVASQSQNNNNCGAREFDLPKPVLVDEREGHVVEEHEMKDEDDVEEGENLPPGSYEILQLEKEEILAPHTHFCTICGKGFKRDANLRMHMRGHGDEYKTAAALAKPNKESVPGSEPMLIKRYSCPFLGCKRNKEHKKFQPLKTILCVKNHYKRTHCDKSFTCSRCHTKKFSVIADLKTHEKHCGKNKWLCSCGTTFSRKDKLFGHIALFQGHTPAIPLEETKPSASRSTQRGSSEGGNNNQGMVGFNLGSASNANQETTQPGMTDGRICFEESFSPMNFDTCNFGGFHEFPRLMFDDSESSFQMLIANACGFSPRNVGESVSDTSL

SEQ ID NO: 5615 - protein, 178 aa, Glycine max
MASSMISSPAVTTVNRAGAGMVAPFTGLKSMAGFPTRKTNNDITSIASNGGRVQCMQVWPPVGKKKFETLSYLPDLDDAQLAKEVEYLLRKGWIPCLEFELEHGFVYREHNRSPGYYDGRYWTMWKLPMFGCTDASQVLKELQEAKTAYPNGFIRIIGFDNVRQVQCISFIAYKPPGF

SEQ ID NO: 5616 - protein, 564 aa, Vibrio parahaemolyticus RIMD 2210633
MTALITQWLARDPDPKTREELQHLVDTNNEQELSDRFGSRLAFGTAGLRGKVGAGPNRMNRLVIQETATGLGHYLLEQVQDAASRGVVIGYDGRPDSKQFAHDTASVLTALGIKVYLTYQVAATPIVAFGVRTMNAAAAVVVTASHNPPEYNGFKVYWENGAQIIPPHDSGIAAKIDEATTKPLPLMSLDDAKQQGLLVWLEDDYYQTYRKTMNENALLTPDSNTDISIAYTAMHGVGADMAETLLADAGFKKVASVAEQREPDGTFPTVNFPNPEEAGAMDMVMALGKSVDADIACANDPDADRFAVAVKRPDGEYQMLTGDQVGSLFGDYLLEQQPNSLVGNTIVSSRLLSSIAKAHGAEYYQTLTGFKWLTNVAMSQETEQHPFLFAYEEALGYTVGNKVWDKDGLSAIVAFSQLTGKLKAQGKTLWDKLEALYRQHGFYFNAQRSIALDPNSPPIGDKLRANPPSEIAGKKVSVTEDLKTSVRTFEDGSEETIDLPASDVLIYHLEDKSRVIVRPSGTEPKLKCYYEVISDFPADMSYEQAQQAAEAKMNALIDAHQKSL

SEQ ID NO: 5617 - protein, 192 aa, Candida albicans SC5314
MPGLFDLESHLVFYRSYHFNHTNVTIHLICIPIILLSTIAFLTPVTINFGGLINNSNYNLGSLLAWSYGIYYILLDWQIGLPAAGVLFSFAHYIKQYYLTLSETSVPTSNEFVKIAVALHVFSWFAQFYGHGVHEKRAPALLDNLLQALVLAPFFVAFEIAFFLGYRKDLKKNMDNRAGVLIRDYIKQKKQT

SEQ ID NO: 5618 - protein, 217 aa, Methanocaldococcus jannaschii DSM 2661
MKFFLDTANVEEIKKYAELGLVDGVTTNPTLVAKEGRDFYEVVKEICEIVEGPVSAEVISTDAEGMVKEARELAKLADNIVIKIPMTKDGMKAVKILSAEGIKTNVTLVFSPLQALVAAKAGATYVSPFVGRLDDIGHVGMKLIEDVVKIYKNYDIKTEVIVASVRHPWHVLEAAKIGADIATMPPAVMDKLFNHPLTDIGLERFLKDWDEYLKSRK

SEQ ID NO: 5619 - protein, 417 aa, Rhizopus niveus
MSLSNKLSIRDLDLKNKRVLIRVDFNVPMKDGAITNNNRIVQALPTVKYALDNGASAVILMSHLGRPNGEAVAKYSLKPVAAEVEKLLGKPVEFLNDCVGPDVEKACQSATGGKVILLENLRFHIEEEGSAKVRWSKVKADAEAVKKFRASLTALADIYVNDAFGTAHRAHSSMVGVDLSQRAAGFLMQKELEYFAKALENPARPFLAILGGAKVSDKIQLIENMLDKVNALIVCGGMAFTFKKTLDNVKQIGKSLFDEAGSKLVRNLVKKAAEKNVKLVFPVDFVTADKFAPDANTGYATDADGIPDEWEGLDCGKKSSELFREEILKSKTIVWNGPSGVFEFDAFANGTKSVLNAVIEATKEGATTIIGGGDTATAALKWGAEGKVSHISTGGGASLELLEGKELPGVTALSSKN

SEQ ID NO: 5620 - protein, 655 aa, Burkholderia cepacia
MCGIDGFLNSVACDEETARGTLARMTASLAHRGPDGQGIWVDPEAGIALGHRRLAIVDLSVHGRQPMASACGRYVMVFNGEIYNHRELRAELERAGRAPAWRGHSDSEVLIAAIVAWGVDATLRRATGMFAFALWNRASRVLTLARDRIGEKPLYYGRIGDALVFASELKALRGYPGFDGAIDRDALCLYLRQSSVPAPHTIYRGIHKLPPGTYIQFEHARDTPRLRAYWTLEQVIEDGRAQPFEGSADDAVGQLDAVLRQAVARQMEADVPLGAFLSGGIDSSTIVALMQAQSSTPVDTFTIGFHEAGYDEAGYAKAVARHLGTRHTELYVTADHALGVVPKLPSIYDEPFSDASQIPTFLVSELTRRHVKVSLSGDGGDELFGGYTRYFLTPRLWRKLHRVPGAVRARIAAALHALRPDHADQLAAVAQGAWGGVEARESAARIGDRLHKLGHVMTAESRIGLYRLLMSSVHHPERLALSGQEPATPLDTVSAWPAHLSFAEQAMAIDTLTYLPTDILAKVDRAAMAVSLETRMPFLDHHVVEFAWRVPAHVRLPEGQSKALLRRLLDRYVPSALIDRPKQGFCAPVDHWLRGALRDWAEALLRPSRLREEGYFDADAVERLWRQHVTGRMNWQHQLWTVLMFQAWLEAQRAA

SEQ ID NO: 5621 - protein, 312 aa, Moritella japonica
MKVAVLGAAGGIGQALALLLKTQLPAGSELSLYDIAAVTPGVAVDLSHIPTDVTIAGFAGTDPTDALVGADVVLISAGVARKPGMDRSDLFNINAGIIKNLAGKCAEVCPNACIGIITNPVNTTVPIAAEVLKQAGVYDKRKLFGITTLDVIRSETFVSELKGISLADVEVPVIGGHSGVTILPLLSQVKGVEFTAEEIATLTPRIQNAGTEVVEAKAGGGSATLSMGQAAARFGLSLVRALQGEEGIVECTYVDGGSEHATFFAQPVLLGKNGVEEVLAYGELSEFEANARDAMLEELKANITLGEEFVAG

SEQ ID NO: 5622 - protein, 475 aa, Arabidopsis thaliana
MAGAYDPSLPEVPEWLNKGDNAWQLTAATLVGLQSMPGLVILYASIVKKKWAVNSAFMALYAFAAVLLCWVLLCYKMAFGEELLPFWGKGGPAFNQGYLKGQAKIPNSNVAAPYFPMATLVYFQFTFAAITTILVAGSVLGRMNIKAWMAFVPLWLIFSYTVGAYSIWGGGFLYQWGVIDYSGGYVIHLSSGVAGFVAAYWVGPRPKADRERFPPNNVLLMLAGAGLLWMGWSGFNGGAPYAANLTSSIAVLNTNLSAATSLLVWTTLDVIFFGKPSVIGAIQGMVTGLAGVTPGAGLIQTWAAIIIGVVSGTAPWASMMIIHKKSALLQKVDDTLAVFYTHAVAGLLGGIMTGLFAHPDLCVLVLPLPATRGAFYGGNGGKQLLKQLAGAAFIAVWNVVSTTIILLAIRVFIPLRMAEEELGIGDDAAHGEEAYALWGDGEKFDATRHVQQFERDQEAAHPSYVHGARGVTIVL

SEQ ID NO: 5623 - protein, 347 aa, Schizosaccharomyces pombe
MSSETKSEFGTKSAWLYNRTGKPKDVLYLEKGLHIPNPAELGPYDVLVEVVATSINPLDYKLMNTYQMIAKALFKLPNIPGYDFAGRVLAVGSEVKEFSATQRVWGCQSFPRAGRQGGSCATHIVTGDKDVWHLPDGVSFNEGAGFGIAGLTAWEVLVRQMKVKPGTKLVIEGASGGVGTFAVALAKALECEVTTISSTENLDLCKSLGATHTLDYKKDNLVERLADLGPYDFVFDCVNDNVLYRASSKFVKPDGAFFGIGGDITLSYVGSRLSRTLRPRVLGGSSHSYYNILLHVDQEMLRDFVDFVMKHNIKTVIDSVYDFEDTVEAFNRLMTHRCKGKVIIKTD

SEQ ID NO: 5624 - protein, 443 aa, Pseudomonas putida KT2440
MTLRKIAGLGALLSLVMPGLALAEEAAPALNSGDTAWMLTATALVLFMTIPGLALFYGGMVRSKNVLSVMMQCFAITGLMSILWVVYGYSMAFDTAGMEKGVLNFNSFVGGFSKAFLSGVTPDSLTSATALFPEAVFITFQMTFAIITPALIVGAFAERMKFSAMLVFMGIWFTLVYAPIAHMVWSGDGALMWDWGVLDFAGGTVVHINAGIAGLVCCLVLGKRKGYPTTPMAPHNLGYTLMGAAMLWIGWFGFNAGSAAAANGTAGMAMLVTQIATAAAALGWMFAEWVGHGKPSALGIASGVVAGLVAITPAAGTVGPIGALIIGLVSGVLCYFCATTLKRKLGYDDSLDAFGVHGVGGIIGAILTGVFAAPALGGFGTVTDIGMQVWIQAKGVIFTVVYTAIVTYVILKVLDVVMGLRVNEEEESVGLDLAQHNERGYNL

SEQ ID NO: 5625 - protein, 196 aa, Anabaena variabilis ATCC 29413
MTKILVVATSNSGKLREMQAYLANTDWKLTLKPPELDVEETGDTFAANACLKASEVAKATGNWAIADDSGLQVDALNGVPGVYSARYGKTDSERISRLLKELDGEVNRKAQFVCVVAIASPDGAITLQAEGICRGEILHAPRGSGGFGYDPIFYVTEKQLTFAEMTPELKKSVSHRGKAFAALLPKMATVLSSSSE

SEQ ID NO: 5626 - protein, 461 aa, Aspergillus fumigatus
MASRLPFHRLSELHLRSIPRTAQCSRLPCIGARRSITSLALRRHKSGAVLLHAPFLGANLPRGSLARLGGYQIRNYADTIVKVPQMAESITEGTLKQFSKQVGDYVERDEEIATIETDKIDVSVNAPESGTIKELLVNEEDTVTVGQDLVKLELGGAPGPKEETATEKPKEPADVGKRPPLESNKPQPSEAPKASSPPPEQPPTAKPQPPAPKSDSPSDVKPSFEGREERRVKMNRMRLRIAERLKQSQNTAASLTTFNEVDMSSLMEFRKLYKDDVLKKTGVKLGFMSAFSRACVLAMKDVPAVNASIEGPNGGDTIVYRDYVDISVAVATEKGLVTPVVRNAETMDLVGIEKAIADLGKKARDNKLTIEDMAGGTFTISNGGVFGSLMGTPIINLPQTAVLGLHAIKDRPAVVNGKVEIRPMMYLALTYDHRLLDGREAVTFLVKVKEYIEDPRRMLLG

SEQ ID NO: 5627 - protein, 319 aa, Clostridium tetani E88
MRKIAVLTSGGDAPGMNAAIRAVVRTGLDKGITVLGIERGFDGLLNGEIFEMTRRSVADIIQRGGTILRTARSEEFKTEEGQKKATDILRVFGVEGLVVIGGDGSFQGAKSLSELGVKTIGIPGTIDNDLAYTDYTIGFDTAVNTVLDAINKLRDTSTSHGRASVVEVMGRNCGDIALYAGLAGGAESIIVPELRFDIDKLCKTILEGKKNGKMHNLIIVAEGAGKANDIAKTIEKVTGVGTRATVLGHIQRGGSPTANDRILASRMGNRAVELLLEEKSSRVVGINDNRIVDMDIHEALSIEGKFDEKLYEIAKALSY

SEQ ID NO: 5628 - protein, 237 aa, Zea mays
MAGADVDVGTELRLGLPGGGADAAKAAKRGFEDTIDLKLKLPTAGMEEAAAAAAAKPEPAAEKAKRPAEAPAADAEKPPAPKAQAVGWPPVRSYRRNVMTVQSVKSKKEEEPEKQQSAANAGGNGSAFVKVSMDGAPYLRKVDLKMYNSYTELSVALKKMFSTFTTSGNNMNEGKLVDPVSGADVVTTYEDKDGDWMLVGDVPWEMFVESCRRLRIMKSSEAIGLAPRTKDKCKNRS

SEQ ID NO: 5629 - protein, 181 aa, Arabidopsis thaliana
MALEKHIEKVLFSDEVIAHRVNQLGIDITSDFSGDSEETPIFVGVATGACLFLADLVRRIDLPIAIDFIRAESYGSGTVSSGVPRVSFDLKLDITNKHVVLVEDIVDTGNTLSCLIEHMKAKKASSVSVCTLLDKPSRRKVHYKLVGKGKFYSGFECPDEFVVGYGMDFAEQYRNLSYIGV

SEQ ID NO: 5630 - protein, 391 aa, Anabaena variabilis ATCC 29413
MAMKAVCWNGANDVRVETVPDPKIINPRDAVIKITTTAICGSDLHLYNGYVPTMEKGDILGHEMMGEVVEIGSAVKNLNIGDRVVVPFPIACGNCWYCQHDFWSLCDNSNPNAWLAEKFMGYSPSGIFGYSHMLGGYAGGQAEYARVPFADTGLFKIPDGLTDEQVVFLTDIFPTGYMAADNCNIQPGDIVAVWGCGPVAQFTIRSAYLLGAERVIAIDRIPERLQMAKDQGKAEILNYEEVNVSEALKEMTGGRGPDACIDAVGLEAHGTGLEGVYDEVKQAVRLETDRPHVLRQVMMDCRKGGHVSIPGVYVGVVDKIPMGAAMNKALVFKMGQTHVHKYLNTLLDHIQNGRIDPSFVITHRLPLDEAPRGYGIFKDKKENCIKVVLKP

SEQ ID NO: 5631 - protein, 505 aa, Zea mays
  unsure (1)..(505): unsure at all Xaa locations
VAAPVPSNGAFPKMPAFDYTPPPYNGPRAEIFRKRAQFLSPSLFHFYDRPLDIVEGKMQYLFDEDGRRYLDAFGGIATVCCGHWHPDVVEAIVNQAKRIQHSTVLYLNHAMKDFEGKMQYLFDEDVRRYLDAFGGIATVCCGHCHPDVVEAIVNQAKRIQHSTVLYLNHAIADFAEALASKMPGDLKVVFFTNSGTEANELALMIARLYTGCNDIISLRNGYHGNAAGTMGATAQSNWKFNXHHALDPDPFRGAFGSDGEKYARDVQEIIEFGTTGRVGGFISEAIQGVGGIVELAPGYLPVAYSMVRKAGGLCIADEVQAGVARTGSHFWGFEGHGVIPDIVTMAKGIGNGIPIGAVVTTPEIAQVLTRKSYFNRSTFDGNPVSTAGGHAVLKVLEKEKLQENAFVVGSYLKEQLNNLKDKHEIIGDVRGKGFLLGVELVTDREKKTPAKAEISRVMNHMKDMGVLVGKGGFYGNVFRITPPLCFTKEDSDFFIEVMDIALSKL

SEQ ID NO: 5632 - protein, 484 aa, Proteus mirabilis
MEKKKLTTAAGAPVVDNNNVITAGPRGPMLLQDVWFLEKLAHFDREVIPERRMHAKGSGAFGTFTVTHDITKYTRAKIFSEVGKKTEMFARFSTVAGERGAADAERDIRGFALKFYTEEGNWDMVGNNTPVFYLRDPLKFPDLNHIVKRDPRTNMRNMAYKWDFFSHLPESLHQLTIDMSDRGLPLSYRFVHGFGSHTYSFINKDNERFWVKFHFRCQQGIKNLMDDEAEALVGKDRESSQRDLFEAIERGDYPRWKLQIQIMPEKEASTVPYNPFDLTKVWPHADYPLMDVGYFELNRNPDNYFSDVEQAAFSPANIVPGISFSPDKMLQGRLFSYGDAHRYRLGVNHHQIPVNAPKCPFHNYHRDGAMRVDGNSGNGITYEPNSGGVFQEQPDFKEPPLSIEGAADHWNHREDEDYFSQPRALYELLSDDEHQRMFARIAGELSQASKETQQRQIDLFTKVHPEYGAGVEKAIKVLEGKDAK

SEQ ID NO: 5633 - protein, 180 aa, Escherichia coli
VPENPIIPYIEGDGIGVDVTPAMLKVVDAAVEKAYKGERKISWMEIYTGEKSTQVYGQDVWLPAETLDLIREYRVAIKGPLTTPVGGGIRSLNVALRQELDLYICLRPVRYYQGTPSPVKHPELTDMVIFRENSEDIYAGIEWKADSADAEKVIKFLREEMGVKKIRFPEHCGIGIKPCS

SEQ ID NO: 5634 - protein, 261 aa, Pinus radiata
MGRGRVQLRRIENKINRQVTFSKRRNGLLKKAYELSVLCDAEVALIIFSTRGKLYEFASSSMNKTLERYEKCSYAMQDTTGVSDREAQNWHQEVTKLKGKVELLQRSQRHLLGEDLGPLNVKELQQLERQLEVALTHLRSRKTQVMLDQIEELRQRERLLHEVNKSLQKKLSETEGRDVITGIEQTSNTNTGTNGPWDSSITNTAYALSHPQQDSNSSLHHVDCEPTLQIGYQPVAPESIVPPHQPPHNQTPNQYMQGWWV

SEQ ID NO: 5635 - protein, 458 aa, Pseudomonas syringae pv. syringae B728a
MLNNGLLHSTTSQKTNANYLDRQSKFESNVRSYPRKLPLAIAKAHGVWVTDVEGTTYLDCLAGAGTLALGHNHEAIMASLDSFLTSGMPMHTLDLTTAVKDAFSETLLSLLPGQGRDYCLQFCGPSGADAVEAAIKLAKTATGRHNIISFSGAYHGMTHGALALTGNTAPKNAVANLMPGVQFLPYPHEYRCPLGIGGEAGTEALSYYFTQFIEDVESGVSLPAAVILEAVQGEGGVNPAPAAWLRQIREVTRKHGILLILDEVQAGFGRTGKMFAFEHAGIEPDIIVMSKAVGGGLPLAVLGFKREFDAWSPGNHAGTFRGNQMAMATGLATLEVLQRQNLAGQAAKRGDWLKEQLGLLQQRYPAIGNVRGRGLMLGIEIVDERKAADRLGSLPMDPDLAVAIQQHCFKQGLLLERGGRNGNVIRLLPPLIITEEQCQLVIQRFEQALKAALSQLRK

SEQ ID NO: 5636 - protein, 533 aa, Chlorella kessleri
MAGGGVVVVSGRGLSTGDYRGGLTVYVVMVAFMAACGGLLLGYDNGVTGGVVSLEAFEKFFPDVWAKKQEVHEDSPYCTYDNAKLQLFVSSLFLAGLVSCLFASWITRNWGRKVTMGIGGAFFVAGGLVNAFAQDMAMLIVGRVLLGFGVGLGSQVVPQYLSEVAPFSHRGMLNIGYQLFVTIGILIAGLVNYAVRDWENGWRLSLGLAAAPGAILFLGSLVLPESPNFLVEKGKTEKGREVLQKLRGTSEVDAEFADIVAAVEIARPITMRQSWASLFTRRYMPQLLTSFVIQFFQQFTGINAIIFYVPVLFSSLGSANSAALLNTVVVGAVNVGSTLIAVMFSDKFGRRFLLIEGGIQCCLAMLTTGVVLAIEFAKYGTDPLPKAVASGILAVICIFISGFAWSWGPMGWLIPSEIFTLETRPAGTAVAVVGNFLFSFVIGQAFVSMLCAMEYGVFLFFAGWLVIMVLCAIFLLPETKGVPIERVQALYARHWFWNRVMGPAAAEVIAEDEKRVAAASAIIKEEELSKAMK

SEQ ID NO: 5637 - protein, 458 aa, Mesorhizobium loti MAFF303099
MTAKTFDAIIIGAGQAGTPLAGRLNAAGMSVALIERKLVGGTCVNTGCIPTKTMVASAYAAHLARRATDYGVTLGGPVGVDYKAIKARKDKVSGASRTGLESWIAGMDKCTLYRGHARFESANTVRVGDDLLTADKIFLNTGGRASVPDLPGIHDIDYLTNSSMMDLEVLPRHLIVVGGSYISLEFAQMFRRFGSEITVIEKSPRLTGREDEDVSATILSILENEGITVHVGADDIGFAKQGDDIAVTFSAGKPPAVGSHVLLALGRTLNTDDLGLDRAGVAVDKRGAIIVDDQLRTSVPGIWAMGDCNGKGAFTHTSYNDYEIVAANLLDNDPRKVSDRIEAYALYIDPPLGRCGMTEAAVKKSGRRALVGQRPMTRVGRAVEKGETQGFMKILVDADTRQILGCSVLGPGGDEAVHCVLDLMYAKAPVDTLARATHIHPTVSELLPTIAQELKPLA

SEQ ID NO: 5638 - protein, 585 aa, Zea mays
MPDLSTSYLPPFPELSLDAGALAVDHAGNAAAAASADAASAYASSSASVGSGVDDLVIPAECRWKGHVRTFDMAGAGAVTTCPAARRGGGKKLSLIPSLEPARTQASASAPTLEERVSEWAAKKAAAGVPTHHCVLPFLTGAPMAVECRLCSKIIYVGEEIKCSVKKCPQMFHLKCVAEDTSNFTVESFRCPQHGCMVCKQKMFFWRCGRCTVAAHTKCAPWPVVHLKNDQGSAICWRHPSDWLLQNKNADFTNSVEEVFCRLPLPYVNEDLNIDSIIRDYAEAVYKPPPYTSIRRNVYLIKKKRTGVRVDIGCTNCRADSTCKEDCECRGLSMSCSKNCRCSDLCTNRPFRKDKKIKIVKTKRCGWGAVALEPLERGDFVIEYVGEVIDDATCEQRLWDIRRRGDKNFYMCEISKDFTIDATFKGNVSRFLNHSCEPNCKLEKWQVDGETRVGVFASRSIEVGEPLTYDYRFVHFGEKVKCHCEAVNCQGYLGSQIKNPIQSILATVAPQVQLREYSPMHHEAPRLKPINHLLPWTNCIEVSFNLRSKRKIDRLCWARKKKRTSLVPSSTSMPASPSEVPAADF

SEQ ID NO: 5639 - protein, 504 aa, Arabidopsis thaliana
MVVINSLRRLARTTQVHLHSRYATCMSGNSTSRRIFTTEAAPEKKNTVGSKGHDMLAPFTAGWQSADLDPLVIAKSEGSYVYDDTGKKYLDSLAGLWCTALGGNEPRLVSAAVEQLNTLPFYHSFWNRTTKPSLDLAKVLLEMFTANKMAKAFFTSGGSDANDTQVKLVWYYNNALGRPEKKKFIARKKSYHGSTLISASLSGLPPLHQNFDLPAPFVLHTDCPHYWRFHLPGETEEEFSTRLAKNLEDLIIKEGPETIGAFIAEPVMGAGGVIPPPATYFEKVQAVVKKYDILFIADEVICAFGRLGTMFGCDKYNIKPDLVTLAKALSSAYMPIGAILMSQEVADVINSHSSKLGVFSHGFTYSGHPVSCAVAIEALKIYKERNIPEYVAKVAPRFQDGVKAFASGSPIIGETRGTGLILGTEFVDNKSPNEPFPPEWGVGAFFGAECQKHGMLVRVAGDGILMSPPLIISPEEIDELISIYGKALKATEEKVKELKAQHKK

SEQ ID NO: 5640 - protein, 58 aa, Haemophilus somnus 129PT
MRKLEFKGEVQAKPQPLTESQFYWQHNSDPMAVEKLADGIRKFAIDQEKLEKMLLEKF

SEQ ID NO: 5641 - protein, 365 aa, Apium graveolens
MAKSSEIEHPVKAFGWAARDTTGLLSPFKFSRRATGEKDVRLKVLFCGVCHSDHHMIHNNWGFTTYPIVPGHEIVGVVTEVGSKVEKVKVGDNVGIGCLVGSCRSCESCCDNRESHCENTIDTYGSIYFDGTMTHGGYSDTMVADEHFILRWPKNLPLDSGAPLLCAGITTYSPLKYYGLDKPGTKIGVVGLGGLGHVAVKMAKAFGAQVTVIDISESKRKEALEKLGADSFLLNSDQEQMKGARSSLDGIIDTVPVNHPLAPLFDLLKPNGKLVMVGAPEKPFELPVFSLLKGRKLLGGTINGGIKETQEMLDFAAKHNITADVEVIPMDYVNTAMERLVKSDVRYRFVIDIANTMRTEESLGA

SEQ ID NO: 5642 - protein, 258 aa, Manihot esculenta
MVTAHFVLIHTICHGAWIWHKLKPALERAGHKVTALDMAASRIDPRQIEQINSFDEYSEPLLTFLEKLPQGEKVIIVGESCAGLNIAIAADRYVDKIAAGVFHNSLLPDTVHSPSYTVEKLLESFPDWRDTEYFTFTNITGGDNYNNEAGLRILRENLFTKCTDGEYELAKMVMRKGSLFQNVLAQRPKFTEKGYGSRKKVYIWTDQDKIFLPDFQRWQIANYKPDKVYQVQGGDHKLQLTKTEEVAHILQEVADAYA

SEQ ID NO: 5643 - protein, 90 aa, Chlorobium tepidum TLS
MNIYIGNLPYSVTDEDLRDKFSEFGQVHSANIITDKFSGRSKGFGFVDMPNESEAREAIDAMNDKDFKGRTIKVNEARPREQRPPRREQY

SEQ ID NO: 5644 - protein, 443 aa, Chlorobium tepidum TLS
MAKKISAAVMLFFAVMMAHGTVWAGEPVSIDTGTTSWMLTSTALVLLMVPGLAMFYGGLVRTKNVIGTMMHSFGAMVIIGVLWPLVGYSLSFGHGILGGLVGWDPKYFMLQGIDDTIMASHIPEYVFAMFQGKFAIITPALIAGAFAERVNFKGYLLFIALWSIFVYSPICHWVWAGDGFLFNLGAMGAIDFAGGTVVHISSGVTGLVAALFLGSRRGYPSNVTSPNNLVMTLVGAGLLWVGWFGFNAGSAIASDLATARALTVTQVAAASGAFTWLIIELVHHNKATSLGVASGILAGLVAITPAAGVVQPSGAFALGAIAAIVCYLGLMLKSKLGYDDSLDAFGVHGVGGIVGALCLIFFIRPSWMADAAVKAGGSWTVWQQLGVQATAVGITVVYAAVVSLVILFIVEKTIGLRAKENDEMSGLDHSMHSEQGYGLINPN

SEQ ID NO: 5645 - protein, 398 aa, Microbulbifer degradans 2-40
MTQEEISMAVIQMKDLDLKGKRVLIRQDLNVPLQDGEITSDVRIQASLPTIKAAVDAGAKVMLMSHLGRPTEGEYADEFSLKPVAARLTKLLGKEVGLVKNWQEGVAVAEGEVVLLENVRFNVGEKKDDETLAKAYAALCDVFVMDAFGTAHRAQASTHGVAKFAPVACAGPLLSGELSALEKALANPARPMVAVVGGSKVSTKLTVLDALSKIVDVMVVGGGISNTFVAAAGNEVGNSLYEKDLIPEAQRLCAETEVIYAHDVRVTKEGFSDWNHNSVTEVKVPADIQADEEIIDYGPETAQKVAAILKDAKTIIWNGPCGVFEFDAFAKGTEVVARAIAESEGFSIAGGGDTLAAIDKFGLADGVSYISTGGGAFLEYVEGKPLPAVVMLEERAKG

SEQ ID NO: 5646 - protein, 295 aa, Zea mays
  unsure (1)..(295): unsure at all Xaa locations
MAVTITWVKARQIFDSRGNPTVEVDVGLSDGSYARGAVPSGASTGIYEALELRDGGSDYLGKGVLKAVSNVNNIIGPAIVGKDPTEQVEIDNFMVQQLDGTSNEWGWCKQKLGANAILAVSLAVCKAGAMVKKIPLYQHIANLAGNKTLVLPVPAFNVINGGSHAGNKLAMQEFMILPTGASSFKEAMKMGVEVYHNLXKSIIKKKYGQDATKRWGNERXGFAPNIQENKEGXLELLKAAIEKAGXYTGKVVIGMDVAASEFFGEKDKTYDLNFKEENNDGSNKISGDSLKDLYK

SEQ ID NO: 5647 - protein, 492 aa, Triticum aestivum
MDPYKYRPSSSFNAPMWSTNSGAPVWNNDNSLTVGSRGPILLEDYHLVEKIADFDRERIPERVVHARGATAKGFFEVTHDVSHLTCADFLRAPGVQTPVIVRFSTVIHERGSPETLRDPRGFAIKFYTREGNWDLVGNNFPVFFIRDGMKFPDMVHALKPNPKTHIQENWRILDFFSHHPESLHMFTFLFDDIGVPADYRHMDGSGVNTYTLVNRAGKAHYVKFHWKPTCGVKSLLEEEAVTVGGTNHSHATKDLTDSIAAGNYPEWTFYIQTIDPDYEERFDFDPLDVTKTWPEDVVPLQPVGRLVLNRNIDNFFSENEQLAFCPGIIVPGVYYSDDKLLQTRIFSYSDTQRHRLGPNYLLLPANAPKCSHHNNHYDGLMNFMHRDEEVDYFPSRFDPAKHAPRYPIPSRTLNGRREKMVIEKENNFKQPGERYRSMDPARQERFINRWIDALSDPRLTHEIKAIWLSYWSQADKSLGQKLASRLSSKPSM

SEQ ID NO: 5648 - protein, 234 aa, Arabidopsis thaliana
MGMAAESQFHVLAVDDSLFDRKLIERLLQKSSCQVTTVDSGSKALEFLGLRQSTDSNDPNAFSKAPVNHQVVEVNLIITDYCMPGMTGYDLLKKVKESSAFRDIPVVIMSSENVPARISRCLEEGAEEFFLKPVRLADLNKLKPHMMKTKLKNQKLEEIETTSKVENGVPTAVADPEIKDSTNIEIEILPLQQDLLLVQQEEQTLSINNKRKSVEEGISTDRARPRFDGIATAV

SEQ ID NO: 5649 - protein, 534 aa, Parachlorella kessleri
MAGGGVVVVSGRGLSTGDYRGGLTVYVVMVAFMAACGGLLLGYDNGVTGGVVSLEAFEKKFFPDVWAKKQEVHEDSPYCTYDNAKLQLFVSSLFLAGLVSCLFASWITRNWGRKVTMGIGGAFFVAGGLVNAFAQDMAMLIVGRVLLGFGVGLGSQVVPQYLSEVAPFSHRGMLNIGYQLFVTIGILIAGLVNYAVRDWENGWRLSLGPAAAPGAILFLGSLVLPESPNFLVEKGKTEKGREVLQKLCGTSEVDAEFADIVAAVEIARPITMRQSWASLFTRRYMPQLLTSFVIQFFQQFTGINAIIFYVPVLFSSLGSANSAALLNTVVVGAVNVGSTLIAVMFSDKFGRRFLLIEGGIQCCLAMLTTGVVLAIEFAKYGTDPLPKAVASGILAVICIFISGFAWSWGPMGWLIPSEIFTLETRPAGTAVAVVGNFLFSFVIGQAFVSMLCAMEYGVFLFFAGWLVIMVLCAIFLLPETKGVPIERVQALYARHWFWNRVMGPAAAEVIAEDEKRVAAASAIIKEEELSKAMK

SEQ ID NO: 5650 - protein, 540 aa, Parachlorella kessleri
MAGGGPVASTTTNRASQYGYARGGLNWYIFIVALTAGSGGLLFGYDIGVTGGVTSMPEFLQKFFPSIYDRTQQPSDSKDPYCTYDDQKLQLFTSSFFLAGMFVSFFAGSVVRRWGRKPTMLIASVLFLAGAGLNAGAQDLAMLVIGRVLLGFGVGGGNNAVPLYLSECAPPKYRGGLNMMFQLAVTIGIIVAQLVNYGTQTMNNGWRLSLGLAGVPAIILLIGSLLLPETPNSLIERGHRRRGRAVLARLRRTEAVDTEFEDICAAAEESTRYTLRQSWAALFSRQYSPMLIVTSLIAMLQQLTGINAIMFYVPVLFSSFGTARHAALLNTVIIGAVNVAATFVSIFSVDKFGRRGLFLEGGIQMFIGQVVTAAVLGVELNKYGTNLPSSTAAGVLVVICVYVAAFAWSWGPLGWLVPSEIQTLETRGAGMSMAVIVNFLFSFVIGQAFLSMMCAMRWGVFLFFAGWVVIMTFFVYFCLPETKGVPVETVPTMFARHWLWGRVMGEKGRALVAADEARKAGTVAFKVESGSEDGKPASDQ

SEQ ID NO: 5651 - protein, 198 aa, Zea mays
  unsure (1)..(198): unsure at all Xaa locations
MASSMLSSAAVVTSPAQATMGAPFTGLKSSAAFPVTRKANNDITSIASNGGRVSCMKVCPPAAKKKFETLSYLPDLTELELGXGEVDYLLRNKWIPCVEIRCWKHGILCNREHGSTPRNTTRARYWTMWEAFPLFRMALNSWLQGVERKTPKKGRNREVTPKTLPLHQGILRDFNTTTRPRPQGDSSFQSPQTSPHKL

SEQ ID NO: 5652 - protein, 537 aa, Neurospora crassa
MTDNPEEPLIANTQSTERDQDDGSHDVEHAHDSRGGKQHISPPGLFIWLLTFSAGISGLLFGYDTGVISATLVSIGTSLSHRPLTSLDKSVITSCTSLFALLALPFASALADDRGRKRVVLFADTLFIIGALCQAASRTVEVMVIGRSVVGIAIGAASFVTPLYIAELAPATHRGRLVTMNIVFITLGQVVAYVVGWIFGTYGSPETTGWRWMVGLGAVPAVCQVVILLWMPESPRWLVKDGRSQEARAVIAKIAAGDDAQDPSTRREVDAVLKSIEIEVREEATAMRLGGAGAGYANGNAVNAWMEAMRELIRVRRNRRALAIACLLQGLQQLCGFNSLMYFSATIFTMVGFSEPTLTSLVVAVTNFAFTLVALVLIDRVGRRRILLWSLPFMIAGLVLAGYGFSFIELPNSETSSPSTTGGQGGAVIILASIMIYVAGYAIGLGNVPWMQSELFSLSVRSVGSGVATATNWSANFVIGLTFLPLMEALSPSWTFVLYAVICAVGYGLIWTVYPETAGLSLEDAATLLEADDWGVR

SEQ ID NO: 5653 - protein, 545 aa, Glycine max
MATSLSVSPSLSLNTLFIAKALPLSRPSFLSLPLPKSLLSLSTRRRTFIVRAESQNGRDPVPAHYDFDLFTIGAGSGGVRARRFAANYGASVAICELPFSTISSETTGGVGGTCVIRGCVPKKLLVYASKFSHEFEESNGFGWRYDSEPKHDWSSFIANKNAELQRLTGIYKNILNNAGVKLIEGHGKMIDPHTVDVNGKLYSAKHILVAVGGRPFIPDIPGKELAIDSDAALDLPTKPVKIAIVGGGYIALEFAGIFNGLKSEVHVFIRQKKVLRGFDEEIRDFVEEQMSVRGIEFHTEESPQAITKSADGSFSLKTNKGTVDGFSHIMFATGRRPNTQNLGLESVGVKLAKDGAIEVDEYSQTSVYSIWAVGDVTNRINLTPVALMEGGALVKTLFQDNPTKPDYRAVPSAVFSQPPIGQVGLTEEQAVQQYGDIDIFTANFRPLKATLSGLPDRVFMKLVVCAKTNEVLGLHMCGEDAPEIVQGFAVALKARLTKADFDATVGIHPSAAEEFVTMRTPTRKIRKSESSEGKSGSQAKAAAGV

SEQ ID NO: 5654 - protein, 301 aa, Glycine max
  unsure (1)..(301): unsure at all Xaa locations
MVPQSVITQVSDSSGVNAISNVSSSGYGFYDWLFKCHGFXHNATLIIPSFLFVFYLALQARHSLLKVSLARSYIIISYNLCLCLVTLLNLAWCFLQAWECTSGRELTWNLLSLFTTSGMLFLEVSLLAFLLQGNNAGGLEAMKRTFGISTLVVGLDILLKAIYLFVFGIPLFVDSNDHTHHGKWNLWVVHKLLLTAVYGFIMFMYHSGWKETLPAKIAFYKYVAIMFIFNAIATLACGLAGTGAAFAFWLYRVTVVFYHAFYLPFLYTTFLADFFQEENFHLENVYYSEMKDAGFFDTDWE

SEQ ID NO: 5655 - protein, 389 aa, Pirellula sp. 1
MKAVCWHGRNDIRVDNVDDPKILDPRDAIIRITASGICGSDLHLMAGAAPAMEAGDIIGHEPMGEVVEVGNAVSNLSVGDRVVVPFTISCGECFFCQSTLYSLCDQSNRNAEQAEKIMGHSPAGLFGYTHMLGGYAGGQAEYLRVPYADVGPIKVPDGLPDEQVVFLSDIFPTGYMAAENCEITPNDTVAVWGCGPVGQFAIQSAWMLGAKRVIAIDNVPERLEMARSVSKAEVIDYEKSDVYETLQEWTKGRGPDCCIDAVGAENHAAGNLQSVLDDAKTALHLGSDRPHVLNEIFKCCRKGGRVSVPGVYFSSVNLQWGTAMNKALQIRLGQTHMQRYLTPLMEKITDGEIDPSFVITHVEPLDNAPEAYKKFRDKEDGCIKVVLKP

SEQ ID NO: 5656 - protein, 158 aa, Schizosaccharomyces pombe
MSHFYDLAPKDKDGNPFPFSNLKGKVVLVVNTASKCGFTPQYKGLEALYQKYKDRGFIILGFPCNQFGNQEPGSDEEIAQFCQKNYGVTFPVLAKINVNGDNVDPVYQFLKSQKKQLGLERIKWNFEKFLVNRQGQVIERYSSISKPEHLENDIESVL

SEQ ID NO: 5657 - protein, 152 aa, Pneumocystis carinii f. sp. muris
IDREGNLKLADFGLARAFGVPLRGYTHEVVTLWYRAPEVLLGGRQYATALDIWSIGCTFAEMATKKPLFPGDSEIDEIFRIFRILGTPDENSWPGITSYPDFKATFPKWSPKNLGELITELDGDGIDLLQKCLRYYPAERISAKKALDHPYF

SEQ ID NO: 5658 - protein, 556 aa, Agrobacterium tumefaciens str. C58
MYRYDEFDHAFVEGRVAQFRDQVERRLSGELAEDAFKPLRLMNGVYLQLHAYMLRVAIPYGTLNSQQMRMLAHIARKYDRGYGHFTTRQNIQYNWPRLSDTPDILSELASVEMHALQTSGNCIRNVTADHFAGAAADEVADPRPYAEILRQWSSVHPEFSFLPRKFKIAVTGAERDRAAIQVHDIGLHLKKNDKGEIGFAVYVGGGQGRTPMIAKKIRDFLPEEDLLSYTTAVMRVYNLHGRRDNKYKARIKILVHETGAEELARQVEVEFAELKNTELKLPDADIAAITAYFAPPALKDRPEGWESLARWKRADEGFARFVEQNVAPHKHPDYGMVTISLKPIGGIPGDATDEQMELVADIAAEYAFDEIRISHEQNIILPHVALADLEPVYRALVGAGLATANAGLITDIIACPGLDYCALANARSIPVAQEISTRFGAPERQAEIGELKIKISGCINACGHHHVGHIGLLGVEKKGAELYQITLGGSGDENTSIGEIIGRGFEPEKVTDAVETIVDTYLGLRLSKEETFLEAYRRVGPQPFKDALYGSAAEAA

SEQ ID NO: 5659 - protein, 278 aa, Triticum aestivum
  unsure (1)..(278): unsure at all Xaa locations
MAGGGDNSQTNGGSQEPRAMEEGRKDDYDQGCSLAISLPFVQKIISEIFGTYFLIFAGCGAVTSNKSNGQITFPAVAIVWGLTVMVMVYSVGQLSLAPLTPAVTFAFATVRRFPWRQVPAYVLAQMLGATLASGTLRLMFGGRHEHFPGTLPTGSDVQSLXVTFAFATVRRFPWRQLLAYVLAQMLGATLASGTLRLMXAGIAGPVSGASMNPARTVGPALIGSEYRSIWVYVVGPVAGAVAGAWAYNLIRFTNKPLRELTKSTSFLRSMSRMNSVSV

SEQ ID NO: 5660 - protein, 213 aa, Streptomyces griseus
MSAATSPSERRVSARIGAISESATLAVDAKAKALKAAGRPVIGFGAGEPDFPTPDYIVDAAVEACRNPKYHRYTPQRAPELKAAIAEKTLRDSGYEVDAGQILVTNGGKQAIYEAFAAILDPGDEVIVPAPYWTTYPESIRLAGGVPVEVVADETTGYRVSVEQLEAARTEKTKVVLFVSPSNPTGAVYSEADAEAIGRWAVEHGLWVMTDEI

SEQ ID NO: 5661 - protein, 437 aa, Chlorobium tepidum TLS [sequence omitted]

SEQ ID NO: 5662 - protein, 462 aa, Arabidopsis thaliana
MASNGVDEQIKLVEGPAGYVLEDVPHLSDYILDLPTYPNPLQSNAAYSVVRQYFVDEDDTVQEKIVVHKDSPRGTHFRRAGPRQKVYFKPSDVRACIVTCGGLCPGLNTVIREIVCGLHFMYGVTEVIGVDCGFRGFYSKNTVALTPKTVSDIHKRGGTILGTSRGGHDTSKIVDNIQDREINQVYIIGGDGTQKGANAIYKEIRRRGLKVAVAGIPKTIDNDIPVIDKSFGFDTAVEEAQRAINAAHVEATSVENGIGIVKLMGRYSGFIAMYATLASRDADCCLIPESPFYLEGKGGLYEFIAKRLRENGHMVIVIAEGAGQDLVAESIEQQDASGNKLLKDVGLWMSLKIKEYFAKHNVMDITLKYIDPTYMIRAIPANASDNVYSTLLAQSAVHGAMAGYTGFVSGLVNGRHTYIPFNRITERQNKVVITDRMWARMLSSTNQPSFMNPPKGTTEFTD

SEQ ID NO: 5663 - protein, 132 aa, Glycine max
LQGHSRATMFLICNNAAQGILSSFFFKYADTILKKYSSTVATIFTGLASAAFLGHTLTINFLLGISVVFISMHQFFSPIAKVKDDKPGELLELQDTQNHRSSDSSFVNMTAGAAEDASHQLGTDERQPLLPI

SEQ ID NO: 5664 - protein, 165 aa, Escherichia coli
PALEGADVVLISAGVARKPGMDRSDLFNVNAGIVKNLVQQVSKTCPKACIGIITNPVNTTVAIAAEVLKKAGVYDKNKLFGVTTLDIIRSNTFVAELKGKQPGEVEVPVIGGHSGVTILPLLSQVPGVSFTEQEVADLTKRIQNAGTEVVEAKAGGGSATLSMGQ

SEQ ID NO: 5665 - protein, 569 aa, Clarkia lewisii
MATPALISETEAWKDLKAHLEGIKRTHLRELMGDTERCQSMMVEFDNIFLDYSRQQASPDTINKLYKLAEAAHLKQKIDRMYNGDHINSTENRSVLHVALRAPRNSAICSDGKNVVPDVWNVLDKIKDFSERVRNGSWVGATGKELKDVIAVGIGGSFLGPLFVHTALQTDPEASKNARGRELRFLANVDPIDAARNISGLNPETTLVVVVSKTFTTAETMLNARTLREWISSALGVAAVAKHMVAVSTNLPLVEKFGIDPNNAFAFWDWVGGRYSVCSAVGVLPLSLQYGFAVVEKFLQGAHNIDQHFSSAPFEKNIPVLLGLLSVWNVSFLGYPARAILPYSQALEKLAPHIQQVSMESNGKGVSIDGLPLPFESGEIDFGEPGTNGQHSFYQLIHQGRVIPCDFIGVVKSQQPVYLKGEVVNNHDELMSNFFAQPDALAYGKTPEELKKENVSEHLIPHKTFTGNRPCLSILLPTLDAYRIGQLLAIYEHRVAVQGFVWGINSFDQWGVELGKSLATQVRKQLHASRVKGEPVEEGFNFSTKTLLTRYLQATTDVPADPSTLLPNI

SEQ ID NO: 5666 - protein, 466 aa, Microbulbifer degradans 2-40
MAEFQYDFLVIGAGPAGEAAAMAAAKSDLRVGVIESQGMLGGNCTHRGTIPSKSLRHTVKQVIQFGSQPIFRNIGGARPLTYPAVLDAASQVIPKQVELHTEFFARNRVRVHSGNARFLSNTQVEVMDSHGVRDVISAERVLIATGSRPYRPDDVDFTHPRVYDSDTILDMQHTPRTIIIFGAGVIGCEYASIFAGLGLKVDLINTRERLLEFLDDEISDALSYHLRDNGVMVRHSEECASVDATSKGVTLNLKSGKRIRADALLWCNGRTGNTDMLDLENAGLEANHRGQVKVDNNYCTEVDNIYAAGDVIGWPSLASASYDQGRAVVAAMLQKEMRFVEDAPTGIYTLPEISSVGKTEAELTSARIPYEVGRAFFKDTARGQISGEDVGMLKILFHIDTLEILGIHCFGAEAAEIIHIGQAIMNQPNGANTVKYFVNTTFNYPTMAEAYRVAALNGLNRVNRHS

SEQ ID NO: 5667 - protein, 208 aa, Vibrio vulnificus CMCP6
MPHQTSQQIHQALLMQCQSFPFLCSVLERNGPRTLERQPTSSFLPYLSRAVAGQQLSVNAAKTIWRRVESLSAEKGSLQQTFVDEHYQALRDCGLSNAKVKTILGINQALMEGALDSAFLASNDPQTIVKQLTGLWGIGPWTAEMALMFFFGMPDVWSAGDAALMRGLSSLAEKEGVDAEAILSAATPYRTYLALHIWEMLDAELLSE

SEQ ID NO: 5668 - protein, 209 aa, Saccharomyces cerevisiae
MSQQVGNSIRRKLVIVGDGACGKTCLLIVFSKGQFPEVYVPTVFENYVADVEVDGRRVELALWDTAGQEDYDRLRPLSYPDSNVVLICFSIDLPDSLENVQEKWIAEVLHFCQGVPIILVGCKVDLRNDPQTIEQLRQEGQQPVTSQEGQSVADQIGATGYYECSAKTGYGVREVFEAATRASLMGKSKTNGKAKKNTTEKKKKKCVLL

SEQ ID NO: 5669 - protein, 391 aa, Synechocystis sp. PCC 6803
MGKNLLEQLRQFTVVVADTGDIQAIETFTPRDSTTNPSLITAAAQMPQYQEIVDSTLLKAKDEAGENASIKDIVRLAFDRLAVAFGLKILQIIPGRVSTEVDARLSYDTEATIAKARYLIGEYAKAGIDKKRILIKIASTWEGIKAAEVLEQEGIHCNLTLLFGLHQAIACAEAKVTLISPFVGRILDWYKKSTGKEYDSHEDPGVQSVTTIYNYYKRFGYKTEVMGASFRNIGEIIELAGCDLLTISPQLLDQLRNTEGDLPRKLDPATVPQDIEKIVMDKATFDKMHAEDPMASEKLAEGIAGFTKALEVLEHLLEERLKVLDGQEHIKHGAEEIFHAYDLDGDGFITREEWAGTDVVFDALDRDHDGKITAAEMSAGLGAAFRLASVG

SEQ ID NO: 5670 - protein, 1016 aa, Escherichia coli CFT073
  unsure (1)..(1016): unsure at all Xaa locations
MQVSRRQFFKICAGGMAGTTAAALGFAPSVALAETRQYKLLRTRETRNTCTYCSVGCGLLMYSLGDGAKNAKASIFHIEGDPDHPVNRGALCPKGAGLVDFIHSESRLKFPEYRAPGSDKWQQISWEEAFDRIAKLMKEDRDANYIAQNAEGATVNRWLSTGMLCASASSNETGYLTQKFSRALGMLAVDNQARVXHGPTVASLAPTFGRGAMTNHWVDIKNANLVVVMGGNAAEAHPVGFRWAMEAKIHNGAKLIVIDPRFTRTAAVADYYAPIRSGTDIAFLSGVLLYLLNNEKFNREYTEAYTNASLIVREDYGFEDGLFTGYDAEKRKYDKSTWTYELDENGFAKRDTTLQHPRCVWNLLKQHVSRYTPDVVENICGTPKDAFLKVCEYIAETSAHDKTASFLYALGWTQHSIGAQNIRTMAMIQLLLGNMGMAGGGVNALRGHSNIQGLTDLGLLSQSLPGYMTLPSEKQTDLQTYLTANTPKPLLEGQVNYWGNYPKFFVSMMKAFFGDKATAENSWGFDWLPKWDKGYDVLQYFEMMKEGKVNGYICQGFNPVASFPNKNKVIGCLSKLKFLVTIDPLNTETSNFWQNHGELNEVDSSKIQTEVFRLPSTCFAEENGSIVNSGRWLQWHWKGADAPGIALTDGEILSGIFLRLRKMYAEQGGANPDQVLNMTWNYAIPHEPSSEEVAMESNGKALADITDPATGAVIVKKGQQLSSFAQLRDDGTTSCGCWIFAGSWTPEGNQMARRDNADPSGLGNTLGWAWAWPLNRRILYNRASADPQGNPWDPKRQLLKWDGTKWTGWDIPDYSAAPPGSGVGPFIMQQEGMGRLFALDKMAEGPFPEHYEPFETPLGTNPLHPNVISNPAARIFKDDAEALGKADKFPYVGTTYRLTEHFHYWTKHALLNAILQPEQFVEIGESLANKLGIAQGDTVKVSSNRGYIKAKAVVTKRIRTLKANGKDIDTIGIPIHWGYEGVAKKGFIANTLTPFVGDANTQTPEFKSFLVNVEKV

SEQ ID NO: 5671 - protein, 748 aa, Candida albicans SC5314
MKNLSVFPFLTRIMYDASLEDEYYRQMRQKSSSISAFKVGLVAAMGGFLYGYDTGLINDLLEMEYVYTHFPSNNKSFTSHERSILVAILSLGTFIGALIAPLASDRYGRKFSIMMSSGLIFITGNILQIASASIALMCVGRFVSGVSVGILSAIVPLYQAEVSPKWSRGSVVFTYQWSITAGLLVSSAVCQGTRKINNSESYRIPIGLQFLWALILFFGMSFLPESPRYYVQQDNLQSALDSLCKLRKLPPDDDDLIEELVDIKANYDYELSYGKTTVLDCFKSGGGRHKQGLRMLTGIGVQFFQQCSGINFIFYYGVNFFSSTGINNYYIMSFITYLVNVIFTVPGIMMIDVVGRRPLLFWGGVGMAVCNFIIAIAGVSVKNDEVNGILCVSFACVFIAFFASTWGGCTWALCSDIYGISIRQKAVALTAATNWLVNFIFAFITPYLIDTGQHTAAIGSKIFFIWGSFNACGAIFVFFTVYETKGLKLEEVDYMYVHCDNARVSTKFISTKIDFAHLDENYNPIPMTQLPDSTSSNEMYHDKGSDENSSPQQLPHYHQQQPLYNGEDQNNLTIIPYDNSSTISSVNSIEERRDSIPSTNGLSFTSSSQSHPQSNSYSHSNSHSATYRSKSHNSMISNDYQSYLESIQREYSQHYQNSSAMIKQLSRNSRNNGSDQEERHEPIQKQEIIDSPLNINSINHINNIPTTVIATPFFAHPPSDSDSSDDEEEEEVVVEQEGVKINDVTTIK

SEQ ID NO: 5672 - protein, 138 aa, Moorella thermoacetica ATCC 39073
MKKVEPEQVLTVCPYCGTGCGLNLTVQDGKITGVAPDRLHPVSEGELCVKGYYGYQYVQDSRRLTAPLIKKDGGFVAVSWDEALEYVVSRLKKIKEESGPDAFALFTSARATNEDNYAAQKFTRAVMGTNNIDHCARL

SEQ ID NO: 5673 - protein, 598 aa, Moorella thermoacetica ATCC 39073
MTLGSGAMTNSIAEISTYSDVIFIIGSNTAECHPLVARHVLKAKERGAKLIVADPRLTEMANKADIWLRVPVGYNIPLINGMLHLIIKEGLVKKDFIQKHAEGLDELVRAVEQYTPAYVEELTGIPQRDLIEAARLYGRAQAAMILYCMGVTQFSHGTGNVVSLSNLAVVTGNLGRPGTGVCPLRGQNNVQGACDMGGLPDVLPGYLNVTREEWRRRFEKEWKVKLPSKPGIRIPEVPEAILEGKIRALYIFGENPIMSDPDSDHLRHALEHLDLLVVQDIFLTETARLADVVLPAASWAEKDGTFTNTERRVQRVRKAVDLPGEARPDWQIFGMLAQKMGYMGLNYSNSQEIWDEVRRLVPEKFGGISYARLESVRGITWPCPQEEHPGTPILYEGGKFLTPSGKARLYPVIFYAKASNGASKEKAKAGNQVIVGTIAELPDEEYPFILTNGRRVYHYHTGTMTRKSWLLDQIGPNELVEINPQDARKMGINDGDFVKVSTRRGYVAVRAWVTERVPEGTIFMTFHYWEACCNELTNTANDAICSTPEFKLAAARMDKISPEEARAIYLEKKAKYLVDLEKANVPKTVIGEGGRVDA

SEQ ID NO: 5674 - protein, 1185 aa, Xanthomonas campestris pv. campestris str. ATCC 33913
MSLADATLMTDTPIRSDVHSDVAVHSALFILGVGATGLDATRLAELLETIGNGANLAVMLLLRDRALLDEARLRDLLGPQSQQLVAPCDGDRLQPGRFYLPPADTLVTLEEGRLRLRPLDGESDHGLIDSFFVSMAHDQDGNVIGLIMGRVDGDGTLGTAAIKECGGLALVVDDASLHGLDLHSASSPAAVSDDILPLPRVAARISAHMQRHHGVAHAVPEGVRSGAESNQLSQVAGILRNTTGHDFHGYKRATFLRRVQRRMQVVQVDTLDHYLDVLRSRQDEPLLLFNDLLIGVTQFFRDRREFEFLEQQVIPRLFQGKQNGDNLRVWVLGCSTGEEAYSLAMLLREHAETLESVPQIQIFASDIDGRALATARVGRYSSSIVGEVAPERLKRWFTKEGDTYAVSKELRELCVFSQHSIVKDPPFSRLDLVSCRNLLIYLDAELQNRVIPLFHFALKPGGYLFLGNAENVSRHAKLFAPVERSFRVFQKIDAETRLHSTFPSLPPARPGKVPAPVQRLRSSSQALVRAGERIADRYAPAYAVLDEHFDVMHFSSQAGRFVRPGSGPPSLNLLNLVHRDLRLELRGALSRAESENAPVQVKGIQMRGDGVTWAVDIFVEPTSDSEVPRGYVVLFQEVESRELAEPAARAPASDNEHVQVLENELRITRERLQAMIEELESTNEELKSSNEEYQSLNEELQSANEELETSKEELQSVNEEVTTVNGELAHRVQELAHANSDLKNLLESTQIATVFLDNELRVTNFTPAVTDIVPLVESDIHRPISHIKMRVAYVELQDDVRRVIRTLAVLDREVENPTTRARYMVRVLPYRTVDNFIGGAVITFMDVTPLTRAEDALRGSEQRLRTLMEGIPQLVWRSLDGGRWTWSSPQWSAYTGQTDQESRELGWLEAVHPDDRELTMDAWRDCPASGGLDVEHRLYNAAERGYRWFHTRSAPVRNDDGHVLEWLGTSTESDNLRRLQEEQRVLVTELQHRTRNLITVVQSVATQTMQSSGTMDEFAGKFEDRLAALSRVQGLLSQAENAPATIGALLRMELDALGAEPDQRRIILDGPDVALRKSTVQTLALALHELATNARKYGALAVDTGTLTIRWRVETSENAPARLVLSWVEEGASLQLRSDRADAGGFGRRLIEKALPYSHGAQTRYELSDTRLECEIQLPLTSVDD

SEQ ID NO: 5675 - protein, 1124 aa, Lathyrus sativus
MSTTRPSQSSNNSGRSRNSARIIAQTTVDAKLHATFEESGSSFDYSSWVRVSGSVDGDQQPRSNKVTTAYLNHIQRGKQIQPFGCLLALDEKTCKVVAYSENAPEMLTMVSHAVPSVGDHPALGIGTDIRTVFTAPSASALQKALGFAEVSLLNPILVHCKTSGKPFYAIIHRVTGSLIIDFEPVKPYEVPMTAAGALQSYKLAAKAITRLQSLASGSMERLCDTMVQEVFELTGYDRVMAYKFHEDDHGEVIAEIAKPGLEPYLGLHYPATDIPQAARFLFMKNKVRMIVDCNAKHVKVLQDEKLPFDLTLCGSTLRAPHSCHLQYMANMDSIASLVMAVVVNDSDEDGDSADAVLPQKKKRLWGLVVCHNTTPRFVPFPLRYACEFLAQVFAIHVNKEIELEYQILEKNILRTQTLLCDMLMRDAPLGIVSQSPNIMDLVKCDGAALFYRNKLWLLGATPTEYQIREIALWMSEYHTDSTGLSTDSLLDAGFPGALSLSDTVCGMAAVRITSKDIVFWFRSHTAAEIRWGGAKHEPGEQDDGRKMHPRSSFKAFLEVVKARSVPWKDFEMDAIHSLQLILRNASKDTDIIDLNTKAINTRLNDLKIEGMQELEAVTSEMVRLIETATVPILAVDVDGTVNGWNIKIAELTGLPVGEAIGKHLLTLVEDSSTDIVKKMLNLALQGEEEKNVQFEIKTHGDQVEFGPISLIVNACASRDLRENVVGVCFVAQDITAQKTVMDKFTRIEGDYKAIVQNPNQLIPPIFGTDEFGWCCEWNAAMIKLTGWKREEVMDKMLLGEVFGTQMSCCRLKNQEAFVNFGIVLNKAMTGLETEKVAFGFFSRKGKYVECLLSVSKKIDAEGLVTGVFCFLQLASPELQQALHIQRLSEQTALKRLKVLTYMKRQIRNPLAGIVFSSKMLEGTDLETEQKQIVNTSSQCQRQLSKILDDSDLDGIIDGYLDLEMAEFTLHEVLVTSLSQVMNRSNTKGIRIANDVAEHIAKESLYGDSLRLQQVLADFLLISINSTPNGGQVVIASSLTKEQLGKSVHLVNLELSITHGGSGVPEAALNQMFGNNVLESEEGISLHISRKLLKLMNGDVRYLKEAGKSSFILSVELAAAHKLKG

SEQ ID NO: 5676 - protein, 465 aa, Mesorhizobium sp. BNC1
MIGAGSGGLTVAAAAASLGASVVLIERGKMGGDCLNYGCVPSKALIASARQAHRLSHGGSLGIAAVEPSIDFARVAGHIEQAIAAIAPNDSKERFTALGVEVISAQGHFKDPRTVVAGGSEIRARRFVIATGSSPAIPPIPGLSDVPFLTNETTFGLKQSPAHLIIVGGGPIGMERAQAHRRLGADVTVLEADTVLGKEDPELALGVKQALLKEGVAILEHARAERVERYKGTGIRVHVADEKGAHSIDGSHLLIATGRRPNVEALALENAGVAYGPGGITISPKLRTTNRRIFAIGDVAGGPQFTHVANYHAGLVIRAILFRLPVKANHEHIPRVTFTDPELAQIGLTENEARRRGLQVKVLRSSFSENDRAHAEGHTDGFIKLIVGRRGRILGVSILGRGAGEMMHFWSLALSRRMRVHDISQYVAPYPTLGEIGKRAALSYFAEAARSSSVRGILGFLRLFG

SEQ ID NO: 5677 - protein, 462 aa, Pseudomonas putida KT2440
MHVAPTTELKALLRLAGPLIASQLAHMLMVLTDTLMMARISPQALAGGGLGAASYSFVSIFCLGVIAAVGTLVAIRKGANDIEGATRLAQNGLWLAWALALFAALVLWNLEPVLLLFGQKPENVASAAEFLTLLPLALPGYLTFMALRGFTSALGRSTPVMVISLFGTVLNYLFNVALIEGMFGLPKLGLMGIGLVTAVVSMGMATALALYIRWHPAYTAYPLRKGLSRPSLAALRELWRLGLPIGGTYMVEVGLFAFAALCMGVLGSTELAAHQIALQIVSTAFMVPTGLSYAVTMRVGLYYGAGNLLAARSAGRVGIGFGAMIMFAFATLFLLLPEALVGLFIDRNDPAFAAIFQVAVQLLMVAAWFELFDGMQTIAMGSIRGLKDAKTTFLIGLVCYWLVGAPSAWLFTFTLGGGAVGIWWGLALGLACAAVALTFGFEWRMKRLLGKAGVRTEAAVSA

SEQ ID NO: 5678 - protein, 438 aa, Hypocrea jecorina
MGQTLSEPVVEKTSEKGEDDRLIYGVSAMQGWRISMEDAHTAELNLPPPDNDTKTHPDRLSFFGVFDGHGGDKVALFAGENIHNIVFKQESFKSGDYAQGLKDGFLATDRAILNDPKYEEEVSGCTACVTLIAGNKLYVANAGDSRSVLGIKGRAKPLSNDHKPQLETEKNRITAAGGFVDFGRVNGNLALSRAIGDFEFKKSAELSPENQIVTAFPDVEVHELTEEDEFLVIACDGIWDCQSSQAVVEFVRRGIAAKQDLDKICENMMDNCLASNSETGGVGCDNMTMVIIGFLHGKTKEEWYDEIAKRVANGDGPCAPPEYAEFRGPGVHHNYEDSDSGYDVDADSGGKFSLAGSRGRIIFLGDGTEVLTGSDDTEMFDNADEDKDLASQVPKSSGKTDAKEETEAKPAPEAESSKPADGSEKKQDEKTPEESKKD

SEQ ID NO: 5679 - protein, 356 aa, Moorella thermoacetica ATCC 39073
MAMTTRIDLRGLLPQELEELAVRLGEAPYRGRQIFRWLHARRAKGIEVMSDLPRAFRERLALVAELPPVRVLNRLVAADGLTRKLLLGLGDGNSIECVLMIYKDGRRRNTACLSSQVGCAMGCSFCATGQGGLQRNLTASEIILQALALGAELAEGEGGNRISNIVFMGMGEPLNNYEAVMKGVRIFEDPSGWGISHRRITLSTCGIVPGIERLAREKPPLELAVSLHAVTNELRDKLMPINRRYPLEELIPACRRYAEITGRRVTFEYALIAGVNDRREDARGLSRLLRDMLAFVNIIPLNPVAGSGFKGVPPAAARAFVALLQEAGLEAAIRDSRGQDIAAACGQLRFASREVL

SEQ ID NO: 5680 - protein, 460 aa, Erwinia carotovora subsp. atroseptica SCRI1043
MTDKVRIDSLGANSLNGNNETYLARQAEFESNVRSYPRKLPLAIAKAEGVWITDVENNQYLDCLAGAGTLALGHNHPDVLQSIQRVITSGLPLHTLDLTTPLKDQFSEYLLSLLPGQGKEYCLQFTGPSGADAVEAALKLAKKYTGRSGVISFSGGYHGMTHGALSVTGNLSPKEAVDGMMPEVQFMPYPHQYRCPLGIGGDAGVKALTYYFENLLNDVESGVRKPAAVILEAVQGEGGVNPAPAEWLQRIRKVTQEHGILLIIDEVQAGFARTGKFFAFEHAGIEPDIIVMSKAVGGGLPLAVLGIKKQFDAWAPGHHTGTFRGNQLAMATGLTTLMHLKDNQVADKVAEQGEWLKAKLAELQKRYPVIGHIRGLGLMIGIEMVKPGEAQDHMGCYPADGDLSALLQKKCFESGLILERGGRNGCVLRLLPSLLISNAELEIFLDKFENALLSAGVKPV

SEQ ID NO: 5681 - protein, 416 aa, Methanocaldococcus jannaschii DSM 2661
MIVMFQKPRGTRDFLPEEMKKRRFVENKLREVFERYGYKEILTPTFESFELIAKKTGEEIRKQLYVFKDHGGREMALRPEMTSPVVRFYLNELKNLQKPLRLYYFANCFRYERPQAGRFREFWQMGCELIGCKEPLADAEVLNLAMDGLINIGLDFDVHIGHLGVLKGVLEKFNVSEEEEVKIRRLIDKEDYDNLKIYLTQILGEEKKELIFEILKFKGSREVLDELKEILKDFPKSMEAINNLEEILEFVIHDKYTINLGIARGLDYYTGMVFEIYGKKGAKQICGGGRYDNLIETFGGEPTPAVGFAYGFDRIMMNIDDLDIEEESILIIPVKKDKELIKKSLIIADKLRKAGKIVELEIMGRKLRKALDYANSRGFKKVIIVGEKELNEGKVTVKDMITGEQKLIGIDELTNF

SEQ ID NO: 5682 - protein, 320 aa, Trichodesmium erythraeum IMS101
MKAITINRYGSIDVLEYSEIQEPLITSNQLLVKIHATSVNPVDWKIRQGQLQLLSAFNFPIILGCDLSGVVLKVGEKVEDFKPGDEIYTFVNPLLGGAYAEYIAVPANTVALKPKNMNYCQAAAVPVAGLTAFQALLDLGQIRPGKKILINGASGGVGTFAVQIAKAMKAEVIGVCSSKNITLVESLGADRVIDYNQVDFTKEFEQYDIIFDAVGKETFSSCENVLKSEGVYISTLPNLENLPSTLLTLFVPGKKSKLILVQPNPRDLISLRKLIEDGLVKSVIDRTYKLAEIAAAHTYSEMNHAVGKIVIINEEISLVE

SEQ ID NO: 5683 - protein, 400 aa, Haloarcula marismortui [sequence omitted]

SEQ ID NO: 5684 - protein, 308 aa, Staphylococcus aureus
MSKTAIIFPGQGAQKVGMAQDLFNNNDQATEILTSAANTLDFDILETMFTDEEGKLGETENTQPALLTHSSALLAALKNLNPDFTMGHSLGEYSSLVAADVLSFEDAVKIVRKRGQLMAQAFPTGVGSMAAVLGLDFDKVDEICKSLSSDDKIIEPANINCPGQIVVSGHKALIDELVEKGKSLGAKRVMPLAVSGPFHSSLMKVIEEDFSSYINQFEWRDAKFPVVQNVNAQGETDKEVIKSNMVKQLYSPVQFINSTEWLIDQGVDHFIEIGPGKVLSGLIKKINRDVKLTSIQTLEDVKGWNEND

SEQ ID NO: 5685 - protein, 398 aa, Arabidopsis thaliana
MRSSDHMAFAGVLPIVFLLILSSADLAASQSQPGPTNQPYNYGRLSPAMAVIVEILIAALFFRGFFSINFRHCSGVPDAGVSPAGGVRSRATVNAAARGLDVSVVETFPTFLYSDVKTQKLGKGELECAICLNEFEDDETLRLLPKCDHVFHPHCIDAWLEAHVTCPVCRANLAEQVAEGESVEPGGTEPDLELQQVVVNPEPVVTAPVPEQLVTSEVDSRRLPGVPVDLKRVKFSRSHTTGHSVVQPGECTERFTLRLPEDVRKRIMKDWKLNRTNSLLVLPRGGSSRRGKPIDRSRARSDRWLFRKTPSFLWRSRDDGSIRLGATGSVRASAVPNSTGSDSVRAGDRWAFLRNASFLWRNSSVHVPRGGVNKDGEGTSVKSTGASGSTSGSVRLPV

SEQ ID NO: 5686 - protein, 272 aa, Vibrio vulnificus CMCP6
MEHKNIAFIGAGNMVRAIVSGLVANGYPADKITATAPSETRRLPLEQQFGIQTTSDNLMAATQADVIVLSVKPQMMEEVCKPLQSVDFSNKLVISIAAGINCARLNDMLATQLNLVRVMPNTPSQLGLGMSGLYAPASVAEQDRHFAEQLMQAVGKTCWVDEESGINHVIAAAGSAPAYFFLFMEAMQAEAMAQGFDKQTARLLVQQSALGAASMVVENPDTELATLRENVTSKGGTTAEALRTFNEHQLSDIVAKAMQAAVARAQEMEKLF

SEQ ID NO: 5687 - protein, 458 aa, Neurospora crassa
MIVPVLSRQALRHASVARVALPSLTRWYASYPPHTVVKMPALSPTMTSGGIGAWQKKPGDKIEPGEVLVEIETDKAQMDFEFQEEGVLAKILKDSGEKDVAVGNPIAILVEEGTDVNAFKDFTLKDAGGETSPAVPKDEPKNESTASAPTPAPTPAPEPENTSFTGRFQTALEREPNALPAAKRLAREKGIDLRNVKGSGPGGKITEEDVKKALASAPAAGAAAAAYTDVPISGMRKTIAARLKESVTENPHFFVSTNLSVSKLLKLRQALNSSADGRYKLSVNDFLIKAMGIASKRVPTVNSSWRDGVIRQFETVDVSVAVATPNGLITPIVKGVEGKGLESISAAVKELAKKARDGKLKPEEYQGGSISISNMGMNPAVQSFTAIINPPQAAILAVGAPQKVAVPVENEDGTTGVSWDEQIIVTASFDHKVVDGAVGAEWIRELKKVIENPLELLL

SEQ ID NO: 5688 - protein, 370 aa, Bacillus cereus ATCC 14579
MSTIETKLAQIGNRSETTTGTVNPPVYFSTAYRHEGIGKSTGFDYSRTGNPTRGLLEQAIADLEYGEQGYACSSGMAAVLLVLSLFRSGDELIVSEDLYGGTYRLFSEHEKKWNVRCRYVNTQSIKQIEQAITTETKAIFIETPTNPLMQVTDIAAVATVAKRNGLLLIVDNTFYTPYIQQPLTEGADIVLHSATKYLGGHNDVLSGLVVAKGKELCEEIAHYHNASGAVLSPFDSWLLIRGMKTLALRMRQHEENAKAVVAYLNDEDGVTDVFYPGRGGMISFRLKDEAWINPFLQSLSLITFAESLGGVESLMTYPATQTHADIPEEIRTANGVCNRLLRFSVGIENSNDLIQDLKQAIKLVKEGVRI

SEQ ID NO: 5689 - protein, 370 aa, Solanum tuberosum
MNSSTYTQFVASKRMGICDPIHQIGMWGDFKGSSFPDTLILEVENCLENEMPIMEKRLENEIEEPSQVTVGMSNRYEPETTKRIDKVRRRLAQNREAARKSRLRKKAYVQQLENSKLKLLQLEQELERNRQQGLYVGDGLDASQIGCSGTANSGIASFEMEYGHWVEEQDRQTDDLRNALNSQMGEIELRILVESCLNHYFDLFRLKATAANADVLYLMSGTWKTSAERFFLWIGGFRPSELLKVLTPHVEPLSDQQIQEVSNLTQSCQQAEDALSQGMVKLHQILAEAVAAGTLGEGIILPQMTATIEKLEALVRFVNQADHLRQETLLQMSCILAAHQSAQGLLALGEYFKRLRALSSLWAGRLSEPA

SEQ ID NO: 5690 - protein, 387 aa, Bacillus cereus ATCC 14579
MSYSIDTLLLHNQYKHDSQTGAVNVPIYNTSTFHQFDVDTFGKYDYSRSGNPTREALEDIIALLEGGTKGFAFASGIAAISTAFLLLSQGDHVLISEDVYGGTYRVITEVLSRYGVSHTFVDMTNLEEIKQNIKPNTKLFYVETPSNPLLKVTDIREVSKLAKSIGALTFVDNTFLTPLFQKPLELGADVVLHSATKFIAGHSDVTAGLAVVKDSELAQKLGFLQNAFGAILGPQDCSLVLRGLKTLHVRLEHSAKNANKIAHYLQEHSKVKNVYYPGLQTHLGFDIQQSQATSAGAVLSFTLQSEDALRKFLSKVKLPVFAVSLGAVESILSYPAKMSHAALSQEARDKRGISNSLLRLSVGLENVNDLISDFENALSYVEEPVNA

SEQ ID NO: 5691 - protein, 657 aa, Aspergillus fumigatus
MVRSQGSRSLNADEQTYHGRRMSSSPLAETAIARDLENYADNEDSINNTEDEEHSEASTVRAINSQPGTTPHSLVGSYQRPSFFTTVSHSTVVPHRGEPECLSWRERDQAIEEERRLLADNHVIPDKIRAGDQNGRRRRFSGLLSRSLRSGDSLESSSGVERRERTEAVAVPTETTSLLEAGNGGSGYSLRDAEAIDRKWEEAVVAGLIHTTWKREALVISRYAAPLTVTFLLQYSLTVASIFSVGHLGKKELGAVSLASMTANITGYAVYQGLATSLDTLCSQAYGSGKKKLVGLQMQKMVFFLWTITIPIALIWFFADMILLRIVPEKEVAKLAGLYLKVVALGAPGYACFESGKRYMQAQGLFSASLFVLLICAPFNAFMNWFLVWKVGLGFVGAPISVAITDWLMPFFLFLYVYFVAGSECWNGLTNRAFRNWGPMIQLALPGLVMVEAECLAFEVLTLASSWLGTTPLAAQSILSTIASITFQIPFPVSISGSTRVANLIGATLVDAAKTSAKVTMGGAVIVGLLNMIVLSSLRHYIPLLFTSDEEVIKLVAGVLPLCAAFQLFDALAANCNGIMRGIGRQEIGGYVQLFSYYAIAMPISFGTTFGLNWGLFGLWSGVAIALCLVSIIEMIFLTRADWNRAVTDALRRNAMA

SEQ ID NO: 5692 - protein, 511 aa, Oryza sativa
MAMASLARRRAAEAALLRRAPAAAWASAWRGYAAAAAGEESDVVVIGGGPGGYVAAIKAAQLGLKTTCIEKRGTLGGTCLNVGCIPSKALLHSSHMYHEAKASFAHHGIKFSNLEIDLPAMMSQKDKAVAGLTKGIEGLFKKNKVEYVKGFGKFVSPSEVSVDLLDGGSTTVKGKNIIIATGSDVKSLPGVTIDEKKIVSSTGALALSEIPKKLVVIGAGYIGLEMGSVWNRLGSEVTVVEFASDIVPSMDGEIRKQFQRMLEKQKMKFMLKTKVVGVDTSGSGVKLTVEPAAGGEQSVLECDIVLVSAGRVPYTSGLGLNALGVETDKGGRILVDKRFMTNVKGVYAIGDAIPGPMLAHKAEEDGVACVEFIAGKEGHVDYDTVPGVVYTHPEVASVGKTEEQVKASGVAYQVGKFPLLANSRAKAIDDAEGLVKVVAEKETDRILGVHIMAPNAGEIIHEAVLALQYGASSEDIARTCHAHPTVSEALKEACLQTYLKAIHILNTRKHF

SEQ ID NO: 5693 - protein, 459 aa, Triticum aestivum
  unsure (1)..(459): unsure at all Xaa locations
MAFSSLSTPSSSSPSSSFTLPTKPSPGAGSLSFSRASTGRFRMAAVRAEAVDTSISPRVSALRPSKTMAITDMASALRQAGVPVIGLAAGEPDFDTPAVIAEAGINAIRDGSTRYTPNAGTMELRKAICNKLQEENGLTYSPDQVLVSNGAKQCITQAVLAVCSPGDEVLIPAPFWVSYPEMARLAGATPVILPTSISDNFLLKPESLASVITEKSRLLILCSPSNPTGSVYPKELLEEIAAIVKKYPRLLVLSDEIYEHIIYHPAKHTSFAALPGMYDRTLTVNGFSKAFAMTGWRLGYLAAPKHFVSACGKIQSQYTSGASSISQKAGLAALNLGYAGGEAVATMVKAFQERRDYLVSSFRELPGVKISEPQGAFYLFIDFSSYYGSEVEGFGTIKDSETLCMFLLEKAQVALVPGDAFGDDKXVRISYAAALSTLQSAMEKIKDAMALLKAPAAVQ

SEQ ID NO: 5694 - protein, 230 aa, Zea mays
MMDCAGGRDPVEDFLLGGAGDDGDLVAVFCDDGGLGIEGIHGDACGFEQSNLGKRGRDEPCSSGPTSKACREKMRRDKLNDRFLELSSVMSPGKEAKLDKVNILSDAARMVAQLRGEAEKLKESNEKLRENIKDLKEEKNELREEKVRLKVEKDRLEQQVKAMSVAPTGYVPHLPHPASYHPAAFTPFAPPPANKSAPIPAPFPGMAMWQWLPPTIVDTTQDPKLWPPNA

SEQ ID NO: 5695 - protein, 364 aa, Staphylococcus aureus subsp. aureus Mu50
MITAEKKKKNKFLPNFDKQSIYSLRFDEMQNWLVEQGQQKFRAKQIFEWLYQKRVDSIDEMTNLSKDLRQLLKDNFTVTTLTTVVKQESKDGTIKFLFELQDGYTIETVLMRHDYGNSVCVTTQVGCRIGCTFCASTLGGLKRNLEAGEIVSQVLTVQKALDATEERVSQIVIMGIGEPFENYDEMMDFLRIVNDDNSLNIGARHITVSTSGIIPRIYDFADEDIQINFAVSLHAAKDEVRSRLMPINRAYNVEKLIEAIQYYQEKTNRRVTFEYGLFGGVNDQLEHARELAHLIKGLNCHVNLIPVNHVPERNYVKTAKNDIFKFEKELKRLGINATIRREQGSDIDAACGQLRAKERQVETR

SEQ ID NO: 5696 - protein, 462 aa, Anabaena variabilis ATCC 29413
MAKNDKINFSTPSGFPEFLPSEKRLELYLLDTIRRVYESYGFTPIETPAVERLEVLQAKGNQGDNIIYGIDPILPPNRQAEKDKSGETGSEARALKFDQTVPLAAYIARHLNELTFPFARYQMDVVFRGERAKDGRFRQFRQCDIDVVGREKLSLLYDAQMPAIITEIFEAVHIGDFLIRINNRKVLTGFFQSLDISETQIKSCISIIDNLEKIGEAKVKLELEKEGINPEQTQKIIDFIKIDGSVDDVLDKLKHLSQTLPESEQFNLGVSELETVITGVRNLGVPDKRFCIDLAIARGLNYYTGTVYETTLIGHEALGSICSGGRYEELVGTFIGEKMPGVGISIGLTRLISRLLKAGILNTLPPTPAQVVVVNMQDNLMPTYLKVSQQLRQAGLNVITNFEKRQLGKQFQAADKQGIQFCVIIGADEAAAQKSSLKDLKSGEQVEVALADLPEEVKRRLT

SEQ ID NO: 5697 - protein, 307 aa, Glycine max
IRLERLELLGICGLPDTIFRNAVEMALADSECYGLENPNARLSCFVNKAFANIGSDMAKLVPGRVSTEVDARLAYDTHAIIRKVHDLLKLYNDSNVPPQRLLFKIPSTWQGIEAARLLESEGIQTHLTFVYSFAQAAAAAQAGASVIQIFVGRIRDWARNHSGDTEIESAQLRGEDPGLALVTKAYNYIHKYGHKSKLMAAAVRNKQDLFSLLGVDYIIAPLKVLQSLKESVASPDEKYSFVRRLSPQSAAKYTFSDEELVRWDEDSLSKAMGPAAVQLLAAGLDGHADQAKRVEELFGKIWPPPNV

SEQ ID NO: 5698 - protein, 269 aa, Brucella suis 1330
MSQQNGNVNRVGAQDRVGASGGMEHSFGFKAVDENEKQGLVNDVFHKVAKRYDIMNDLMSAGMHRVWKDAMVAWLTPSKRPGWTSLDVAGGTGDIAFRIVEVSGRQAHVTILDINGSMLGVGRERAIKKGLIDNLEFVEANAEELPFEDNSFDAYTIAFGIRNVPHIDKALSEAYRVLKPGGRFLCLEFSEVELPVLDKVYDEWSFRAIPRIGKMITGDADSYSYLVESIRKFPKQQDFAAMIEKAGFERVSYRNFTGGIAALHSGWKL

SEQ ID NO: 5699 - protein, 502 aa, Prochlorococcus marinus subsp. marinus str. CCMP1375
MTTALQSPPRRRIARLQEVSLLEGPMLLLRSIRGFRSNQSLIWLATVPLALLGLGVFGFAARAGVGLSDLSGAQAASFLADNLWLFIATILVIFMNAGFAMVEAGMCRQKNAVNILAKNLFVFALAVTAYWFIGYSIMYGGTPIIGGVIFSNGFFFNPDPSDALSCAAGLGADGCSQLVPAVDFLFQAAFAGTAATIVSGLVAERVKFGEFVVFSLVLTAFIYPIAGSWQWNGAGWLSQLGFIDFAGSSIVHSVGGWAGLVGAMLLGPRIGKFVDGKPQAMPGHNMAIATLGALILWIGWYGFNPGSELAMDEYVAYVAVTTTLAAAGGAIAATLLSTLTSGKPDLTMIINGILAGLVSITAGCGNMTLSGSWLAGFVGGLIVVFAVSALDSAGIDDPVGAFSVHGVCGVWGTVVIGLWGVDGMDPGAAGIGLFNGGGLNTLLIQALGAGAYAIWTVVTCWLAWTVIGGFFGGIRVSEEEEIQGLDIGEHGMEAYPDFASSN

SEQ ID NO: 5700 - protein, 199 aa, Glycine max
MHSCVCGCIYSSRSLHPISCIESLKNTYILLTLVRAEMGNYISCTLSTAGSSKLHWRGIKVIFPSGEIEQLEEGVKAAELMLEMPSFFVVDTRSLQIGRRFSALNADEELECGYVYVMPPMKRLNSLVKASDMGALLLTAKRVSAVVPEKEESEEPKFKLDDGILEFSSPEFMHRLSMSRSKKPLLETIAEEPHVCSRS

SEQ ID NO: 5701 - protein, 191 aa, Microbulbifer degradans 2-40
MDVSNFENAIKTATCLYTLEQVEASIAKIGDSLNNEFADYISESGVPAKDMALLTIMNGAMVFAGKLLPKLKFSIEVDYIHATRYGNGTQGGALALLAEPKIELQGKTVLLVDDIFDDGITIDRVKQYCLDRGAESVRTVVLAYKDKTREGLAQLVSPPDFVGFNVPDKYVFGMGMDAEGLLRNAPGIYYF

SEQ ID NO: 5702 - protein, 557 aa, Arabidopsis thaliana
MATSSAWKLDDHPKLPKGKTIAVIVLDGWGESAPDQYNCIHNAPTPAMDSLKHGAPDTWTLIKAHGTAVGLPSEDDMGNSEVGHNALGAGRIFAQGAKLCDQALASGKIFEGEGFKYVSESFETNTLHLVGLLSDGGVHSRLDQLQLLIKGSAERGAKRIRVHILTDGRDVLDGSSVGFVETLEADLVALRENGVDAQIASGGGRMYVTLDRYENDWEVVKRGWDAQVLGEAPHKFKNAVEAVKTLRKEPGANDQYLPPFVIVDESGKAVGPIVDGDAVVTFNFRADRMVMHAKALEYEDFDKFDRVRYPKIRYAGMLQYDGELKLPSRYLVSPPEIDRTSGEYLTHNGVSTFACSETVKFGHVTFFWNGNRSGYFNEKLEEYVEIPSDSGISFNVQPKMKALEIGEKARDAILSGKFDQVRVNIPNGDMVGHTGDIEATVVACEAADLAVKMIFDAIEQVKGIYVVTADHGNAEDMVKRDKSGKPALDKEGKLQILTSHTLKPVPIAIGGPGLAQGVRFRKDLETPGLANVAAKVMNLHGFVAPSDYEPTLIEVVE

SEQ ID NO: 5703 - protein, 369 aa, Haemophilus somnus 129PT
MTQQYALDTLLAQTGNRTDERTGAVSTPIFLSTAYGHHGIGESTGFDYTRTKNPTRTVLEETIAKLEGGDRGFACSSGMAAIQLLMNLFASPDEWIVSSDVYGGTYRLLDFAHKNIHGVKPVYVNTASSEEIEKAITENTKAIFVETPSNPLMEECDVAEIAKIAKKYKLLLIVDNTFLTPVLFRPMEHGADIVIHSGTKYIAGHNDTLVGLIVAKGQEICNRLYYIQNGAGPVLSPFDSWLTIRGMKTLALRMERHQKNAQELANFLREQPQVKDVLYPNKGGMLSFRLQNENWVNPFLKAMKLITFAESLGGTESFITYPATQTHMDIPEVERVARGVCNRLLRFSVGLENVEDIKADLLQAFSQLK

SEQ ID NO: 5704 - protein, 784 aa, Bacillus cereus ATCC 14579
MKGVILAGGKGRRLRPLTCNTPKPMLPLLEKPVLEYNIELLRQHGIREIAITVQYMSTTIKQYFGDGSKWGVNLYYFEDSPPLGTAGSIKQAEQFLDETFVVISGDALTDFQLSEGIRFHEQKKRMVTMFVKEVENPLSFGLVVMNKDQEVTRYIEKPGWNEVVSNVVNTGIYIMEPEIFSYIPPRQFFDFSHDVFPLLANKNVLFAYLSEGYWLDIGTFNQYRQAQFDLLTKKLQVPIPYTEVLPMVWMGEGVTIGKGTKIHGPSFIGEGAKIGTGAVIEPYSIIGKNSIVSNYSHLQKSIVFANTHIGKYCELLETTIGERTIVEDDVTLFQKSVVADHCHIGRSTVIKQKGKLWPYKAIDSHSIVGAAGIQESEMSAGWLQKSRIVGRGNVEITPQFIVKIAMAYGSLFKKGESILIGSQENIETTSYKNLFLHAIHGIGIHTMECKEMNESLFQYSVHHLQCAGGVFIQVENENEIVIKLYGQAGMPLTYKQQKEIEQVYMSELFYYVHEKEMGRNKLVHVSMNEYIEVILEHIDIEKIQMQKFHLLINKRNDTLQHLLMLFLQRLGCTVTWIYASEQKDHVKALMKSSKANMALMFSEQGNHFELYDKHSNIYQGTDLEEVDIPDFLLESTGNIYPMSLKLGECYLLFYTQDERKSFQVRWKRDILYRIGKLFELIALQGKTFLSIVEQSPPLYLLYDEVVCSWNEKGEIMRKLLDDIERKGEGIFEGVQFKYTEKEWSYIVSDTKQPKFLVYSHARNPVIARENMKNLIEKIRQYQKV

SEQ ID NO: 5705 - protein, 155 aa, Saccharomyces cerevisiae
MSDYEEAFNDGNENFEDFDVEHFSDEETYEEKPQFKDGETTDANGKTIVTGGNGPEDFQQHEQIRRKTLKEKAIPKDQRATTPYMTKYERARILGTRALQISMNAPVFVDLEGETDPLRIAMKELAEKKIPLVIRRYLPDGSFEDWSVEELIVDL

SEQ ID NO: 5706 - protein, 386 aa, Vibrio vulnificus CMCP6
MSVIKMTDLDLAGKRVFIRADLNVPVKDGKVTSDARIIASLPTIKLCLEAGAKVMVTSHLGRPTEGEYAEEFSLQPVVNYLNDALDCEVKLAKDYLDGLELNAGELVVLENVRFNKGEKKNDEELSKKYAALCDVFVMDAFGTAHRAQASTHGVGMFAEVACAGPLLAAELEALGKAMSNPERPLVAIVGGSKVSTKLTVLESLSKIADQLVVGGGIANTFIAAEGHNVGKSLYEADLVETAQKLMKECAIPVATDVACAKAFDENAEAEIKHVSEVQDDDMIFDLGPDSTAALAEIIANAKTILWNGPVGVFEFKNFEAGTKGISEAIAQSPAFSVAGGGDTLAAIDKFGIKADVSYISTGGGAFLEFVEGKVLPAVEMLEARAK

SEQ ID NO: 5707 - protein, 829 aa, Pseudomonas aeruginosa PAO1
MNSPRPTPPPFAAAAAGLPILVRASNLVTEADVTSLVWNKAPCRFCGTGCSVMVATRDGQVVATHGDIKAEVNRGINCVKGYFLSKIMYGSDRLTRPLLRMKDGKFDKQGEFQPISWEQAFDIMAEKFKAALKAKGPESVGMFGSGQWTVWEGYAANKLFKAGLRSNNIDPNARHCMASAVMGFMRSFGMDEPMGCYDDIEATDSFVLWGSNMAEMHPVLWSRVTDRRLSAPQVKVAVLSTFEHRSFELADLPMVFKPQTDLIILNYIANHIIESGAVNRDFVERHVRFAHGAEDIGYGLRPDDPLEKKAKNADKANTWSDIDFKAFAEFVKPYTLERTARESGVPAERLKALAELYADPKRKVVSFWTMGFNQHTRGVWANNLIYNIHLLTGKISEPGNSPFSLTGQPSACGTAREVGTFSHRLPADLVVTNPKHRETAEKIWKVPAGTIQEKVGFHAVQQSRMLKDGVLNVYWTQVSNNMQAGPNVMQEVLPGWRNPDNFVIVSDVYPTVSAQAADLILPSAMWVEKEGAFGNAERRTQFWHQLVKAPGEAKSDLWQLVEFSKRFTTDEVWPAELLAKAPELKGKTLYDVLFRNGQVDRFPASDLAKGYANDEVDAFGFYIQKGLFEEYAAFGRGHGHDLAPFDAYHEARGLRWPVVDGKETRWRYREGYDPYVSKGSGVQFYGYPDKKAIVFALPYEPPAEAPDQDYPFWLATGRVLEHWHTGSMTARVPELYKAVPDALVYMHPEDARQLKLRRGSEVKVVSRRGEIRARVETRGRNKPPQGLVFVPFFDANKLINKVTLDATDPISKQTDYKKCAVRIELLNLA

SEQ ID NO: 5708 - protein, 173 aa, Pseudomonas syringae pv. syringae B728a
MLLAMSGAAMAADCPPLLQGELPKLRAKENIDLCKRFAGKPLVVVNTASFCGFAPQFKGLEALSQRYKGQGLEVLGVPSNDFKQEAKDGEETAKVCYVNYGVTFTMTEPQAVRGDDATHLFKVLAEQSSAPRWNFYKYVVDRQGKVIANFSSMTKPDDPELIAAIEKAIASKP

SEQ ID NO: 5709 - protein, 387 aa, Xanthomonas campestris pv. campestris str. ATCC 33913
MLALNYHGSRDVRVETVPDPLLVERDDLILRVTATAICGSDLHLYHGKIPDLRPGDILGHEFMGIVEEVGPDVTAVRPGDRVVIPFVVACGQCFHCLLQEFSACETTNTGKGAALNHKDMRPPAALFGFSHLYGGLSGGQAEYVRVPKANVGPLVVPDALHDEQVLFLSDILPTGYQAVVDAGVKQRSTVAIFGAGPVGLMAAACCRMLGAERVFMVDRHAYRLDFASRTYGVIPINFDEIDDPADIIVSQTDGRGVDASIEAVGFEAEGSALETALTTLKLEGSSGVALRQCIAATRRCGTVSVPGVYAGFIHAFMFGDAFDKGLTFKMGQTHVQKHMPYLLERIGNGELKPSAIISHRLPLAEAARGYEVFDKKQDDCRKVVLTP

SEQ ID NO: 5710 - protein, 350 aa, Listeria monocytogenes EGD-e
MRAAVLYENNVIKAEQIDEATCGKDQVRVEVKAVGICGSDIHKMQTRWKYPLPAVMGHEFAGVITEIGSEVTNVAMGDRVAGIPLEPCMECNYCKAGDFALCDNYRMVGSHFHGGFAENVVMKADNVISIGDLDFEEGAMIEPLAVSMHGVLGIQPRLGDTVIVFGIGTIGILVVQCLLLAGVKDIIAVDISDKKLADAREFGCKYTINPKNEDLKERVFAYTNGLGADIALECAGSKITQEQCLLVTKKKGKVGFLGIAYADVLLHEEAFENIFRRELTLKGFWNSYSAPFPGEEWRTSIEFVKQGRIKLKPLISHRYKLEETKEAFDMILSREHDYNKVMILPQKGDD

SEQ ID NO: 5711 - protein, 497 aa, Pseudomonas putida KT2440
MTTLTRADWEQRAQQLKIEGRAFINGEYTDAVSGETFECLSPVDGRFLAKVASCDLADANRAVENARATFNSGVWSQLAPAKRKAKLIRFADLLRKNVEELALLETLDMGKPIGDSSSIDIPGAAQAIHWTAEAIDKVYDEVAPTPHDQLGLVTREPVGVVGAIVPWNFPLLMACWKLGPALATGNSVVLKPSEKSPLTAIRIAQLAIEAGIPAGVLNVLPGYGHTVGKALALHMDVDTLVFTGSTKIAKQLMVYAGESNMKRIWLEAGGKSPNIVFADAPDLQAAAEAAASAIAFNQGEVCTAGSRLLVERSIKDKFLPMVVEALKGWKPGNPLDPQTTVGALVDTQQMNTVLSYIEAGHKDGAKLLAGGKRTLEETGGTYVEPTIFDGVTNAMRIAQEEIFGPVLSVIAFDTAEEAVAIANDTPYGLAAGIWTSDISKAHKTARAVRAGSVWVNQYDGGDMTAPFGGFKQSGNGRDKSLHALEKYTELKATWIKL

SEQ ID NO: 5712 - protein, 1306 aa, Mycobacterium tuberculosis H37Rv
MSFVIATPEMLTTAATDLAKIGSTITAANTAAAAVAKVLPASADEVSVAVAALFGTHAQEYQTVSAQVATFHDRFVQTLSAAASSYVAAEAVNVEQSLLAAVNAPTQALFGRPLIGNGADGSPGTGQAGGPGGILYGNGGNGGSGAPGQRGGAGGAAGLIGNGGNGGAGGVGTTGGAGGHGGAGGWLYGNGGAGGFGGAGAVGGNGGAGGTAGLFGVGGAGGAGGNGIAGVTGTSASTPGGSGTAGGAGGIGGNGGAGGAGGVLMGNGGNGGAGGEGGPGGAGGAGASGAHATNLGADGQAGGNGGNGGAGGTGGVGGPGGGHGLLGLGGSHGAGGAGGSGGDGGAPGDGGNGATGTWGHNLGAGGTGGNGGNPGAGGAGGAGGASVGGSAHGANGAPGTTSTSGGNGGDGGKGADAISSGQTGANGGRGGDGGQVGNGGAGGAGGRGGAGGLGFGSEAPGRPGGAGGTGGAGGNGGTQAGDGGTGGAGGAGGDGGSGGAGSIGFNASAPGAAGSPGGNGGNGGPGGAGGEGGAGGLALAASGQNGSQGAGGDGGAGGNGGTPGNGGHGAAGALGVNGGVGGAGGHGGDPGVGGAGGQGGSGSTPGANGAPGNTPTSGGNGGNGGRGADATGFGQTGASGGRGGDGGLVGNGGAGGAGGNGSKGLPGLGRLGNPGLDGGTGGNGGAGGSGGAWAGNGGTGGAGGTGGVGGTGGSGSDGVNGSSAGADGHPGGTGGVGGTGGKGGDGGDGGAAPNGVAGSQGPGGAGGDGGTGGVGGNGGRGIDGADGATAGARGQDGGAGGAGGKGGRGGTGGPGGAGPAGTTGSQGAGGNGGSGGTGGDPGDGGNGANGSVFTNNGIGGNGGNGGNAGPSGAGGSGGAGSTFGATGSSSSIHVNGGNGGNGGNGDHALSGNGAAGGNGGNGGNGSLRGSGGAGGHGGNGGNASRGMGGDGGTGGAGGNAGQIGNGGAGGNGGDGGTGSDGNPGAITGSGGRGGDGGVGGQGGSVAGDGADGGRGGAGGTGGTGLRGTTGATGATGTFDAGADGHGGNGGTGGVGGTGGAGGGGGNGGAGGKALSPTGNNGSQGAGGDGGAGGAGGTGGTGGDGGRGAHGTLFSSLAGTGGTGGNGGTGGTGGTGGAGGAGGTGSTLGATGATGAAGRAGNGGVGGSGGLGSAFGPGGTGGMGGAGGTSTVSAGGDGGRGGFGGDGLDASSGGNGGDGGHGGDGFRTAGAGGRGGDGGKGADPGGLFPIPGAGGKGGTGGTGGTAHLGPLAIIGQSGQPGQFGSPGADGRGGAGGAGGGGGAGGSF

SEQ ID NO: 5713 - protein, 526 aa, Triticum aestivum
MAMAMRRAAALGARHILAASASASSRVASRRHMGSVDAGAAMDKIRAAGLLRTRGLIGGQWVDAYDGKTTEVQNPATGEVLANVACMGNRETADAITSANTTFYTWSKLTASERSKALRKWHDLLMSHKEELALLMTLEQGKPMKEALGEVNYGASFIEFFAEEAKRVYGDIIPPTLADRRLLVLKQPIGVVGAITPWNFPLAMITRKVGPALACGCTVVVKPSEFTPLTALAAADLALQAGIPAGALNVVMGNAPEIGGELMQSTQVRKITFTGSTAVGKKLMAGSANTVKKVSLELGGNAPCIVFDDADIDVAVKGSLAAKFRNSGQTCVCANRILVQEGIYEKFASAFVKAVQSLQVGNGLEESTSQGPLINEAAVEKVEKFVGDATSKGANIMLGGKRHSLGMSFYEPTVVGNVSNDMLLFREEVFGPVAPLIPFKTEEEAIHLANDTNAGLAAYMFTKSIARSWRVSEALEYGLVGVNEGLISTEVAPFGGVKQSGLGREGSKYGMDDYLEIKYVCMGNLG

SEQ ID NO: 5714 - protein, 344 aa, Burkholderia fungorum LB400
MIGAAVLALAGGFAYTAGWLTPSRLTAPRLINTFETVAGQPHPGYRRNHAKGLCIEGYFDSNGDGAVLSRAAVFAPGRTPVTGRFAVPGGNPSAPDTSSPVRSLALQFLLQNGEQWRTGMNSTPVFAVHTPEQFYQQLVAAKPDPATGKPDPARLKAFYAANPETQPFQAWVKAHPPSSSLANAAYYSINAFRFTDSAGNTRAVRWAMVPETPYAPITDAEKAEKNFLEADLDQRLENGPLRWHLILTVAKPGDPTDDATLQWPDDRQHIDAGTLVVDHTTSQENGACRDVNFDPTILPAGIEPSDDPLLAARSAAYALSFKRRTREEALHPAVHQAQTNGEHS

SEQ ID NO: 5715 - protein, 194 aa, Treponema denticola ATCC 35405
MKIYLASGNVNKKREVQELLPSHTIVLPKDEGIEFDPEETGSTFFENAMIKAKALYHIVKAPVLADDSGLCVDFLNGAPGIHSARYGSIEGEHVSAEAGINKVLSELKGVKDRSARFACCMVCLLDENRFYSVQETCEGHITEAPSGSGGFGYDPIFFVEKFGKTFAELTSEQKNSISHRGRALFSISRFIKGS

SEQ ID NO: 5716 - protein, 223 aa, Enterobacter cloacae
  unsure (1)..(223): unsure at all Xaa locations
IWYNNFFGAETEAILPYDQYMHRFXAYFQQGNMESNGKYVDRNGNAVDYQTGPIIWGEPGTNGQHAFYQLIHQGTKMVPCDFIAPAITHNPLSDHHPKLLSNFFAQTEALAFGKSRDVVEQEYRDQGKDPATLDHVVPFKVFEGNRPTNSILLREITPFSLGALIALYEHKIFTQGAILNIFTFDQWGVELGKQLANRILPELGDDNAINSHDSSTNGLINRY

SEQ ID NO: 5717 - protein, 487 aa, Triticum aestivum
  unsure (1)..(487): unsure at all Xaa locations
MSPASARALTVDSLNPKVLALADHLRGAVAGRAQRMQKELETNPGLYPFDEIIYCNLSNPHYLGQQPIKFFREVLALCDYPHLLNCSVTSSIFSSDAITRAREILDLIPGRAMGGYSHCQGTEGLRNAIAAGIATRDAFPCNAEDIFLTDGAAAPVHMVMHLLIRDEKDGILCPIPSHFLYTSSMALCGATLVPYYLDESGGWAVSISNLKKQLDGARSEGITVRGLVVVNPGNPTGQVLVKENQCEIVEFCRNENLVLLADEVYQENVYTDEKKFISFKKIARSXGFGEEDISLISFHSVSNGYYGECGRRXGGYMEVTGFNSEVRKQVYKVASLSSCSNLAGQVLVSLVMNPPKVGDESYTSYREERDRIMLSLSRCAEAMVQAFNSLEGLTCSKAEGAMFVFPSVRLPKRAIAAAEAMNAKPDVFYALRLLENTGIVVLPGSVFGQVPGAWHFRCTILQQEEKVQLIIYRFKAFHKAFMEEFRD

SEQ ID NO: 5718 - protein, 223 aa, Enterobacter cloacae
IWYNNFFGAETEAILPYDQYMHRFAAYFQQGNMESNGKYVDRNGNAVDYQTGPIIWGEPGTNGQHAFYQLIHQGTKMVPCDFIAPAITHNPLSDHHPKLLSNFFAQTEALAFGKSRDVVEQEYRDQGKDPATLDHVVPFKVFEGNRPTNSILLREITPFSLGALIALYEHKIFTQGAILNIFTFDQWGVELGKQLANRILPELGDDNAINSHDSSTNGLINRY

SEQ ID NO: 5719 - protein, 275 aa, Zea mays
MLCCAGHQASLLLFALLSVSSLLLVDGSHQDQEFGEAVGSRILQTNPDAHEVHCSRERSRAAWEAIDEYLMPFVEKEKYELPSKCRLRPDNDMFREQEQHKIHFDINEWHCGFCKKAFRAEKFIDQHFENRHKNLVDNSEGRCMADLCGALHCDLMMQFKKPKSKCNAAAATRNRHLCESLADSCFPINQGLAASRLHEFFLRQFCDAHTCSKGTKPFPKGGRKQTNRLYLALSILTLILLPLFYLIVFLHQREMRKGTQDLKRFSKIGQKKKPS

SEQ ID NO: 5720 - protein, 352 aa, Escherichia coli CFT073
MLYYLHIRWITSMCKKTSGNRFHFAFQSSEVVMIKKIGVLTSGGDAPGMNAAIRGVVRSALTEGLEVMGIYDGYLGLYEDRMVQLDRYSVSDMINRGGTFLGSARFPEFRDENIRAVAIENLKKRGIDALVVIGGDGSYMGAMRLTEMGFPCIGLPGTIDNDIKGTDYTIGFFTALSTVVEAIDRLRDTSSSHQRISVVEVMGRYCGDLTLAAAIAGGCEFVVVPEVEFSREDLVNEIKAGIAKGKKHAIVAITEHMCDVDELAHFIEKETGRETRATVLGHIQRGGSPVPYDRILASRMGAYAIELLLAGYGGRCVGIQNEQLVHHDIIDAIENMKRPFKGDWLDCAKKLY

SEQ ID NO: 5721 - protein, 477 aa, Streptomyces avermitilis MA-4680
MTETESIAYDVVVLGAGPVGENVADRTRAAGLSTAVVESELVGGECSYWACMPSKALLRPVIARADARRVPGVSHLAQGHLDTAAVLAHRDYEVSHWKDDGQVGWLDGIGADLYRGHGRLSGPREVTVTGPDGDRRVLTARHAVAVCTGSRALLPDLPGLDQVEPWTSREATSAQAAPGRLIVVGGGVVAVEMATAWRALGSEVTVLVRGKGLLPRMEPFAGELVAEALKEAGADVRTGTSVSAVTREGPTVVVLTDTGDRIEADEILFATGRAPRTDDLGLDTVGLEPGSWLSVDDSLRVTGSDWLYAVGDVNHRALLTHQGKYQARIAGAAIAARASGVPLLESDPWGAHAATADHAAVPQVVFTDPEAAAVGLSLAEAERAGHHVRAVDVEFSSVAGAGLYADGYRGRARMVVDVNRETLLGVTFVGPGVGELIHSATIAVAGEVPIGRLWHAVPSYPTISEVWLRLLEAYRDA

SEQ ID NO: 5722 - protein, 583 aa, Schizosaccharomyces pombe
MGQGESIPSRQIQRDASMQAVSSESENINDSDRQNSGFSRLWNRFPSLQRVLGLRRAKRHRNDEGNSENGNRDRTTERSAFRSRYRGSLLNRNSPSLRSLSPPATPATPRSRIEGESQTSAIPQTDRLILENHQQEFERAARRFRSSIAALRNLNTQNNQSTLASNHEDENVSSSGGQEMQDHGSVNNLESPGTAIGRLPVRSVTSLADSNMEDYTRAVMNYINNSENTQQASVSPEESQLVMLSRFVFSVASGWVSVLMNSSSAHQSNNLEFPSSISGNVESGNVAFDEFLSLLHAGNLVQAMNAETNPRTAELIANAVDLEEESGPINLFRTFRFDNLHRNHEGQEVIPIIIVGIRSLRNSGSDEDDQPSADSPTLMHPSDLISSLVNSQNQTTSVSDNTGPNENVNEAEHISEDEQASTATDVNGISDNNGSSTQQAPETRNNNSQTDHQLPRSWAIYVREAFVPQNHPVLRAPSLFTDSPTYEDMLLLNSIIGIEKPPVASQKDLEKAGGVFPFSGTDERCLVCLSNFELNDECRRLKQCNHFFHRECIDQWLTSSQNSCPLCRTKGVASASTPSSPKP

SEQ ID NO: 5723 - protein, 450 aa, Streptococcus pyogenes SSI-1
MVIPYDYIVIGGGSAGIASANRAAMHGAKVLLAEGKEIGGTCVNLGCVPKKVMWYGAQVADILGTYAKDYGFDFKEKAFDFKQLKANRQAYIDRIHVSYERGFEQNGVNRIYDYAVFKDAHTVEIAGQLYTAPHILIATGGHPVFPDIEGAQYGISSDGFFALDEVPKRTAVVGAGYIAVELAGVLHALGSKTDLFIRHDRPLRSFDKAIVDVLVEEMAVGGPCLHPHSEVAKVVKNTDESLTLYLKDGQEVEVDQLIWAIGRKPNLEGFGLDKTGVTLNDKGYIETDAYENTSVKGIYAVGDVNGKLALTPVAVAAGRRLSERLFNGKTDEKLDYQNVATVIFSHPVIGSVGLSEEAAVKQYGQEAVKTYQSRFTSMFTAITNHRQPCLMKLVTVGDTEKIVGLHGIGYGVDEMIQGFAVAIKMGATKADFDNTVAIHPTGSEEFVTMR

SEQ ID NO: 5724 - protein, 335 aa, Bdellovibrio bacteriovorus
MKAPVRVAVTGAAGQIGYALLFRIASGAMLGADQPVILQLLEIPDEKAQKALKGVMMELEDCAFPLLHSMIATGDPAVAFKDADVALLVGARPRGPGMERKDLLTANGQIFTVQGEAIGKYANPNVKVLVVGNPANTNAYIAMKSAMKHGRVKAKNFTAMLRLDHNRALSQLATKTGKPVASFKKVAVWGNHSPTMYPDVRFATADGAKVPELLKLGTAEGDAWNKDTFIPTVGKRGAAIIEARGLSSAASAASAAVDHIRDWWLGTNGEWVTMGIPSDGSYDIPEGIMYGFPVTCKNGEYEIVKGLEIDAFSREKMNNTLKELNEEKDAVASML

SEQ ID NO: 5725 - protein, 514 aa, Escherichia coli K12
MLVSKKPMVLVILDGYGYREEQQDNAIFSAKTPVMDALWANRPHTLIDASGLEVGLPDRQMGNSEVGHVNLGAGRIVYQDLTRLDVEIKDRAFFANPVLTGAVDKAKNAGKAVHIMGLLSAGGVHSHEDHIMAMVELAAERGAEKIYLHAFLDGRDTPPRSAESSLKKFEEKFAALGKGRVASIIGRYYAMDRDNRWDRVEKAYDLLTLAQGEFQADTAVAGLQAAYARDENDEFVKATVIRAEGQPDAAMEDGDALIFMNFRADRAREITRAFVNADFDGFARKKVVNVDFVMLTEYAADIKTAVAYPPASLVNTFGEWMAKNDKTQLRISETEKYAHVTFFFNGGVEESFKGEDRILINSPKVATYDLQPEMSSAELTEKLVAAIKSGKYDTIICNYPNGDMVGHTGVMEAAVKAVEALDHCVEEVAKAVESVGGQLLITADHGNAEQMRDPATGQAHTAHTNLPVPLIYVGDKNVKAVEGGKLSDIAPTMLSLMGMEIPQEMTGKPLFIVE

SEQ ID NO: 5726 - protein, 361 aa, Synechocystis sp. PCC 6803
MGEIKRIGILTSGGDCAGLNAVIRSVVHHAIGTYGWEVIGIQEATQGLMENPSKAIALHRDNIDHLLMMGGTFLGTTNKGNPFAFPMADGTVRDRTEDIIAGYRQLGLDALIGIGGDGSLAILRRIAQQGGINLVGIPKTIDNDVGATEISIGFDTATNIATEALDRLHFTAASHNRVMVLEVMGRDAGHIALAAGIGGGADIILIPEIPYRIQSVCNKIRQRQAEGKNFCLVMVSEAVRTELGDQVKQIQQFGEDRYGGIGKYIAEQIAQRTGAETRVTVLGHIQRGGIPSPFDRLLGSVFGVAAVDLIAEGKFDHMVAWRNRQTISVPIEEAIQTYQTVQLDGTLVKTARGLGICLGND

SEQ ID NO: 5727 - protein, 562 aa, Mycobacterium tuberculosis H37Rv
MEYLIAAQDVLVAAAADLEGIGSALAAANRAAEAPTTGLLAAGADEVSAAIASLFSGNAQAYQALSAQAAAFHQQFVRALSSAAGSYAAAEAANASPMQAVLDVVNGPTQLLLGRPLIGDGANGGPGQNGGDGGLLYGNGGNGGSSSTPGQPGGRGGAAGLIGNGGAGGAGGPGANGGAGGNGGWLYGNGGLGGNGGAATQIGGNGGNGGHGGNAGLWGNGGAGGAGAAGAAGANGQNPVSHQVTHATDGADGTTGPDGNGTDAGSGSNAVNPGVGGGAGGIGGDGTNLGQTDVSGGAGGDGGDGANFASGGAGGNGGAAQSGFGDAVGGNGGAGGNGGAGGGGGLGGAGGSANVANAGNSIGGNGGAGGNGGIGAPGGAGGAGGNANQDNPPGGNSTGGNGGAGGDGGVGASADVGGAGGFGGSGGRGGLLLGTGGAGGDGGVGGDGGIGAQGGSGGNGGNGGIGADGMANQDGDGGDGGNGGDGGAGGAGGVGGNGGTGGAGGLFGQSGSPGSGAAGGLGGAGGNGGAGGGGGTGFNPGAPGDPGTQGATGANGQHGLNG

SEQ ID NO: 5728 - protein, 233 aa, Moorella thermoacetica ATCC 39073
MAKPRIGLTCDLDPERGRIVLREGYCRAILAAGGLPVLLPNVPPEKAAGYLEIVDGLLLTGGGDIEPSFFGARATASLHKVLPQRDAFELALTRAALAGGKPILAICRGIQVLNVAAGGDLYQDIPTEVPEALNHDQEQPRHEPSHLVTTIPGTRLARLLGPEAGVNSLHHQAVRRVGDGLRVAALAPDGVIEGIEGQGKSLVLGVQWHPEDLYPGDGRQKALFEYFVEIAGG

SEQ ID NO: 5729 - protein, 411 aa, Sinorhizobium meliloti 1021
MKGRAARPVLFFFFQRSTRSSDVKALTWHGKGDIRCESVPDPKIEDDRDAVIKVTACAICGSDVHIFHGLIPSMENGDILGHETMGEVVEVGKGARGLEVGDRVVVPFTIACGECFFCRKGFYSACERTNPDREKAAKLWGNSPAGLFGYSHLLGGYSGGQAEYLRVPHADVGPIKVPDELTDEQALFLSDIFPTGYMAAEFCNIEPGQTIAIWGCGPVGQMAIRSAFLLGAERVIAIDSIPERLRLAESAGAMTLDYMAEDIYDRIMEITHGRGADACIDAVGTEADSRASLDSLVDRVKVATFMGTDRPHVLRQAIHCCRNFGTVSVVGVYGGYLDKVPLGSAINRGLTLRMAQTPVQRYLPSLLDRIRKGEIDPSFVVTHRGGLDDGPELYKTFAERKDGCIKVVLRP

SEQ ID NO: 5730 - protein, 191 aa, Crocosphaera watsonii WH 8501
MKNLIVATGNPGKLQEMQEYLIGLNWKLKLKPPEIEIEETGQTFRENAILKASQVAKGLGEWAIADDSGLAVAALNGAPGLYSARYGATDEERINRLLRELGENENRKAEFICAIAIASPDGSIALETQGICPGEILKTPQGSQGFGYDPIFYVPQHQQTFAQMTPKLKRDISHRGKAFALLLPHLKKIYP

SEQ ID NO: 5731 - protein, 389 aa, Moorella thermoacetica ATCC 39073
MASNLPLQLPAGVSDLLPPEAAALRQLEQRLLNCFRSWGYQEVMTPTFEFATTFQAGSPAGEEGALYKFIDRQGRVLALRPEMTAPIARLVATSLRRRELPLRLGYSARVFRYEEPQAGRRREFHQAGVELIGAGGVAGDVEIIALAVESLAQAGLEDFRLGLGQVAVTKGVLQDLALPPEAVAGIKSALASKDLVALERIYDEYHLEGERRRRLELLATIHGGREALEEARACFGRTAAAASLAELSRVWEALGAAGLEKWLFIDLGILRDFDYYTGIVFEGYVPGLGAPVCGGGRYDGLLAQFGYPCPATGFALGLERLLLARGETAPASLAGGYLVAGRDLAALLKRARELRSKGTAVVLDGESRSRQEAAARAAARGLNLEWIGE

SEQ ID NO: 5732 - protein, 1214 aa, Mycobacterium tuberculosis H37Rv
MYRKFRDDPSSVDPSWHEFLVDYSPEPTSQPAAEPTRVTSPLVAERAAAAAPQAPPKPADTAAAGNGVVAALAAKTAVPPPAEGDEVAVLRGAAAAVVKNMSASLEVPTATSVRAVPAKLLIDNRIVINNQLKRTRGGKISFTHLLGYALVQAVKKFPNMNRHYTEVDGKPTAVTPAHTNLGLAIDLQGKDGKRSLVVAGIKRCETMRFAQFVTAYEDIVRRARDGKLTTEDFAGVTISLTNPGTIGTVHSVPRLMPGQGAIIGVGAMEYPAEFQGASEERIAELGIGKLITLTSTYDHRIIQGAESGDFLRTIHELLLSDGFWDEVFRELSIPYLPVRWSTDNPDSIVDKNARVMNLIAAYRNRGHLMADTDPLRLDKARFRSHPDLEVLTHGLTLWDLDRVFKVDGFAGAQYKKLRDVLGLLRDAYCRHIGVEYAHILDPEQKEWLEQRVETKHVKPTVAQQKYILSKLNAAEAFETFLQTKYVGQKRFSLEGAESVIPMMDAAIDQCAEHGLDEVVIGMPHRGRLNVLANIVGKPYSQIFTEFEGNLNPSQAHGSGDVKYHLGATGLYLQMFGDNDIQVSLTANPSHLEAVDPVLEGLVRAKQDLLDHGSIDSDGQRAFSVVPLMLHGDAAFAGQGVVAETLNLANLPGYRVGGTIHIIVNNQIGFTTAPEYSRSSEYCTDVAKMIGAPIFHVNGDDPEACVWVARLAVDFRQRFKKDVVIDMLCYRRRGHNEGDDPSMTNPYVYDVVDTKRGARKSYTEALIGRGDISMKEAEDALRDYQGQLERVFNEVRELEKHGVQPSESVESDQMIPAGLATAVDKSLLARIGDAFLALPNGFTAHPRVQPVLEKRREMAYEGKIDWAFGELLALGSLVAEGKLVRLSGQDSRRGTFSQRHSVLIDRHTGEEFTPLQLLATNSDGSPTGGKFLVYDSPLSEYAAVGFEYGYTVGNPDAVVLWEAQFGDFVNGAQSIIDEFISSGEAKWGQLSNVVLLLPHGHEGQGPDHTSARIERFLQLWAEGSMTIAMPSTPSNYFHLLRRHALDGIQRPLIVFTPKSMLRHKAAVSEIKDFTEIKFRSVLEEPTYEDGIGDRNKVSRILLTSGKLYYELAARKAKDNRNDLAIVRLEQLAPLPRRRLRETLDRYENVKEFFWVQEEPANQGAWPRFGLELPELLPDKLAGIKRISRRAMSAPSSGSSKVHAVEQQEILDEAFG

SEQ ID NO: 5733 - protein, 454 aa, Zea mays
  unsure (1)..(454): unsure at all Xaa locations
HWVPRGRPGRHVRRHPVASHPTTTHLVVRRFDPVLPTQGAVMATKRSVGTLGEADLKGKKVFVRADLNVPLDDAQKITDDTRIRASVPTIKFLLEKGAKVILASHLGRPKGVTPKYSLKPLVPRLSELLGVEVVMANDCIGEEVEKLAAALPEGGVLLLENVRFYKEEEKNEPEFAKKLASVADLYVNDAFGXTAHRAHASTEGVTKYLKPAVAGFLMQKELDYLXVGAVANPKKPFXAAIVGGSKVSSKIGVIESLAGRRSISSSLGGXGMIYTFLQGTRDILVGKSLVEEDKLELATSLIEKAKAKGVSLLLPTDIVVADKFAADGXSKIVPATAIPDDWMGLDVGPDATKTFNEACATPPRLLFGNGPHGEWFEFEKFAAGTEAIAKKXLAELTTHEGVSLPIIGXGGDSVAAVEKAGLADKMSHISTGGGASLELLEGKTLPGVLALDDA

SEQ ID NO: 5734 - protein, 177 aa, Gloeobacter violaceus PCC 7421
MVKVLYSEEQIAKQVQLLAGQISVHYAPLVSISYPLVVLPVLKGAFVFSSDLLRRLTVPLRVEFLRASSYRGGTVSGGLELDIPETAFLSGHHLLLLEDIIDTGKTASQILAALKSCGPASLQVCALLDKPARRVAPVEVGFRGFTAPDRFVIGYGMDLAERYRELPYVGELEECTF

SEQ ID NO: 5735 - protein, 392 aa, Desulfovibrio desulfuricans G20
MNVLKMTDLDLRGKRVLIREDLNAPIKDGAVANDNRLRAAAPTIRLAMQAGARVMVMSHLGRPAEGAFDESASMAPVAARLADILGCPVPVVRDWLDGVDVPEGGVVLTENVRFNKGEKKNDEELGRRMAALCDVYVMDAFGTAHRAQASTHAVAAFAPVACAGPLLAAELEALGKALGAPRHPVVGIIGGSKVSTKLTLLETLSSKVDKLIVGGGIANTFIRAAGFAVGKSLYEEDLVAEAARLMQAAAAAGGEIPVPVDVVVATEFAETATPVCKPVDQVADNEMIMDIGPQTAAMYAEVLRGAGTIVWNGPVGVFEFDAFGAGTEALCRAVAQSSAFSIAGGGDTVAAVDKYGVRDGVSYISTGGGAFLEFLEGKELPAVAMLEQRAKA

SEQ ID NO: 5736 - protein, 429 aa, Neurospora crassa
MKLSSFFLLTSALSAYAAPTGFAPGDSGSLAARHPDSPGVIASPSPTIRAGARRSVPVRRDPRAVVFDDGSNLEPSVIGKRKHRGSAASSATAASTTASSSGSTASSGTTAGGATAGGATKGGASKGADKGGASKGGAAKGGASKGGASKGGAAAGGGGAAAGGATAGGGGASKGGASKGGAAAGGGGAAAGGATAGGGAASKGGASKGGAAAGGGAAAGGATAGGGAAAGGAAAGGGAAKGGASKGGASKGGAAAGGGGAAAGGATAGGGASAAGGGSAKGGASKGGAAAGAASGKGGASGGAAAGGGGGDSSAKGGASKGGAAAGGATAGGGGAAKGGASKGGASKGGDSKGGASKGGAAAGGGGAAAGGATAGGGASAAGGGSAKGGASKGGAASGGGAAGGSAKGGASKGGAAAGGGASGSAGGP

SEQ ID NO: 5737 - protein, 454 aa, Staphylococcus sciuri
MKKFDVVFIGSGHAAWHAALTLKHAGKSVAIIEKDTIAGTCTNYGCNAKILLEGPYEVLEEASHYPQIIESDQLHVNWENLMQYKKAVINPLSNTLKSMFEQQGIEVIMGAGKLVDAHTIDVEGTPIQADNIVIATGQHSNKLDIEGSALTHDSRDFLSLDKMPNNITFIGAGIISIEFASIAIKSGAEVHVIHHTDKPLEGFNEKHIAKLIHKLESEGVQFHFNENVQSVQQAGNSYNVTTESGLSIDTEYVLDATGRKPNVQNIGLDELGIEYSEKGIRVDDHLRTNIHNIYASGDVLDKTIPKLTPTATFESNYIASHILGINPNPIQYPAIPSVLYSLPRLSQIGVTVKEAEDNEAYTIKDIPFGKQMVFEYKNEIEAEMTIILNADKQLVGAEIYADDAANLINLLTFIVNQKLTAKDLNQLIFAFPGSSSGVLDLLKSCYDVIYKKQR

SEQ ID NO: 5738 - protein, 223 aa, Escherichia coli
IWYNNFFGAETEAILPYDQYMHRFAAYFQQGNMESNGKYVDRNGNVVDYQTGPIIWGEPGTNGQHAFYQLIHQGTKMVPCDFIAPAITHNPLSDHHQKLLSNFFAQTEALAFGKSREVVEQEYRDQGKDPATLDYVVPFKVFEGNRPTNSILLREITPFSLGALIALYEHKIFTQGVILNIFTFDQWGVELGKQLANRILPELKDGKEISSHDSSTNGLINRY

SEQ ID NO: 5739 - protein, 407 aa, Microbulbifer degradans 2-40
MNPDLSKLQPYPFEKLNALKATVSAPADKSHIALSIGEPKHQPPAFALKALTDNLARFANYPSTKGLPELRTAIANWANTRFNLQRATLDAEANVLPVNGTREALFAFAQACIDSSKADAKVLMPNPFYQIYEGAAFLAGAEPVFLNCLPENGFIPDFDAISEQTWQACQLLFICTPGNPTGAVMSRELLEKLIGLADKHNFIIASDECYSELYFDEANPPTGLLEACESLGKTDFKNCVVFHSLSKRSNLPGLRSGFVAGDAHIIDQFFQYRTYHGCAMSVPCQLASIAAWQDEAHVLENRNLYRQKFDAVIEILKDVLPVSTPDASFYLWPKTPIADTDFAQQLFAQQNVTVLPGRFLARDCDGVNPGENYVRLALVAELEECIEAAHRIKAFVQSLNQTLYTNS

SEQ ID NO: 5740 - protein, 183 aa, Escherichia coli
DRNGNVVDYQTGPIIWGEPGTNGQHAFYQLIHQGTKMVPCDFIAPAITHNPLSDHHQKLLSNFFAQTEALAFGKSREVVEQEYRDQGKDPATLDYVVPFKVFEGNRPTNSILLREITPFSLGALIALYEHKIFTQGVILNIFTFDQWGVELGKQLANRILPELKDGKEISSHDSSTNGLINRY

SEQ ID NO: 5741 - protein, 151 aa, Rhizobium etli
MMRRLLLVLALMLSAVPAFAVNPDEVLADPALEARARALSAELRCMVCQNQSIDDSNAELAKDLRLLVRERISNGDSDAAVLNYIVSRYGEFVLLKPRFSMRTVLLWGAPVLLVLAGGVSLLVFARKRTGRPTGSKLTPEEQAKLSELLEK

SEQ ID NO: 5742 - protein, 223 aa, Escherichia coli
IWYNNFFGAETEAILPYDQYMHRFAAYFQQGNMESNGKYVDRNGNVVDYQTGPIIWGEPGTNGQHAFYQLIHQGTKMVPCDFIAPAITHNPLSDHHQKLLSNFFAQTEALAFGKSREVVEQEYRDQGKDPATLDYVVPFKVFEGNRPTNSILLREITPFSLGALIALYEHKIFTQGVILNIFTFDQWGVELGKQLANRILPELKDDKEISSHDSSTNGLINRY

SEQ ID NO: 5743 - protein, 379 aa, ASPERGILLUS NIDULANS FGSC A4
MASTVGKTITCKAAIAWAAGEPLSIEDVEVAPPKAHEVRIQVLHTGVCHTDAYTLSGKDPEGAFPVILGHEGAGIVESVGEGVTSVKPGDHVIALYTPECRECKFCKSGKTNLCGKIRATQGKGVMPDGTSRFKARGKDLLHFMGTSTFSQYTVVADISVVAVTDKIPTDRSCLLGCGITTGYGAAVVTAKVEEGSNIAVFGAGCVGLSVMQGAVKNKAGKIIAVDVNDAKEEWSRKFGATDFVNPTKLNGQTIQEKLIEMTDGGCDYTFDCTGNVGVMRAALEACHKGWGESIVIGVAAAGQEISTRPFQLVTGRVWRGCAFGGIKGRTQLPGLVDDYLDGKLKVDEFITHREPLANINTAFEQMKAGDCIRCVVDLS

SEQ ID NO: 5744 - protein, 466 aa, Methanothermobacter thermautotrophicus
MCAIAGFRGDDAPVKVQEMLDVLRHRGPDATGIYHDSRIVIRTATGEDVKEAPQSAEIAVGHNLLSIVGGPQPVSGDGVLVFNGEIYNQEELNWTGSDSELILDLIEGHGGDLEDALRFTVNKIDGDYAFAYTDGENLASRQDPVGVKPLYHSGEAFASEKKALWRIGLRNVETLPPGHAMINGVKVKLRGLPRAEPSDAEPEELRENLKSALRESVERRVRGLDEAALVFSGGVDSTLLAVLLDEHIDVRLYTVGLPGSSDPQFASRAAADLGMELEVLEVTEDTIREALPHVLGAIEEYNLMKIGVAMPLYLASEAASADGYRVMFSGQGADELFAGYHRYRRLLAEGRLEDALRHDLENIHHVNLERDDAVTMANSVELRVPFLDLQLIGVALTIPADLKIRGPEDELRKRILREAALEMGVPEYIAMRPKKAAQYGSGIDKVLRRKVLPGFDHETFLRRLMF

SEQ ID NO: 5745 - protein, 369 aa, Leuconostoc mesenteroides subsp. mesenteroides ATCC 8293
MSIKIDTLLAQGGNGSDDIKTGAVVSPLYFSTAYRHPNLGESSGFDYARLQTPTRQILEEQLADLEQGVQAFATSSGMAAIDLLFASLIKNGDHFVTSDDLYGGTYRYFDAIVEQSGVSYDVWNGVDDISTLINETTRLVWLETPSNPTMKVIDIQKLSAKVKGINPDILIAVDNTFLTPIFQQPLTLGADIVVHSATKYLGGHNDILAGAVIVNSDDLAEKLEISLTTRGQVLDSFSSWLLLRSLKTLHLRMQRHNENGQYLAKKLPCIPGIDKVLYAGVGGMLSFYLSNDYDVDAFLKGLQIGSFAESLGGPETLITIPAVQTHHDMSQEQRDHLGITNQLVRVSAGLEDKEDLLADLRQAVEGAKR

SEQ ID NO: 5746 - protein, 379 aa, Leuconostoc mesenteroides subsp. mesenteroides ATCC 8293
MSDWTNIIDAATTNDPLSGAINTPIQLSSTFSQKSFDEFGEYDYARSGNPTRDAGEKALAQLEHGKYGYLFSTGMAAISSVLFTLSAGDHIVVSKHVYGGTFRVLEDVLPRWGITHDFVDFSDLAAIEQAIKPETKALYIETPSNPVLNITDIRAVVGIAKKHQLFTIADNTFLSPFLQKPLDLGVDIVVHSATKFLAGHSDILAGAVVVNDKKLADQVYFIQNAVGATLSVFDTWLLLRGIKTLGVRMTHSSESAHKIAEHLEAHEKVSNVLYPGLKTHKGYEIHASQAKNGGAVLSFDVGSQENAKKVVESLHIPVFSVSLGAVETIISYPPKMSHAELNVDELAKCGITPGLLRFSVGLEDADDLIADLDSALALI

SEQ ID NO: 5747 - protein, 252 aa, Chloroflexus aurantiacus
MEPPFIGKVALVTGAAAGIGRASALAFAREGAKVVVADVNVEGGEETIALCRALNTDAMFVRCDVSQRDEVERLIALAVDTFGRIDFAHNNAGIEGVQAMLADYPEEVWDRVIEINLKGVWLCMKYEIRHMLKQGGGAIVNTSSVAGLAGSRGVSAYVASKHGIVGITKAAALEYARNGIRVNAICPGTIHTAMIDRFTQGDPQLLAQFAEGEPIGRLGSPEEVANAVIWLCSDKASFVTGATLAVDGGRLA

SEQ ID NO: 5748 - protein, 255 aa, Pseudomonas putida KT2440
MSANAVPLIGVSACRQQVGKNSSHTVGDKYVEAAGFAGLPLILPARDGGSDTQALLARLHGIVFTGSPSNIEPHHYNGAPSVAGTRHDLARDRLTLPLLQAAIAVGVPVFCICRGYQELNVALGGSLHQRVQELPGYLDHREPEDAPLEVQYGPRHSVSIEPGGLFERLGLVAQFEVNSLHSQGIDRLAPGLRVEARAPDGLIEAVSMPAAPGFVLGVQWHPEWRFNENPVSLRLFQAFREACNAYAAREGLRQE

SEQ ID NO: 5749 - protein, 606 aa, Pinus thunbergii
MQAEEVPSPWIDSQSYEAQPRSLQMQQEHHDLCEFVQESQQMPFQVQLDPNSNDTMFADCSLQLPPGSGMVGLSALKTWLRQNPSNADHHKVVPSGSGSPGKSNLGGGLGDFQSLTLSMSPGSQNSSAIISQPTIIDQCTPVETKKRGAGKAGTKEPVPRKSIDTFGQRTSQYRGVTRHRWTGRYEAHLWDNSCRKEGQTRKGRQVYLGGYDKEEKAARAYDLAALKYWGPSTHINFPLETYEKEIEEMKNMTRQEYVANLRRKSSGFSRGASVYRGVTRHHQHGRWQARIGRVAGNKDLYLGTFSTQEEAAEAYDIAAIKFRGISAVTNFDISKYDVQRICSSSTLIAGDLAKRNKEIEQSSEPSGDSPLQIEAAAPLQIEAAHNSQSRSHNDNAKDGNNSTSNDSHHNNNVVGSMSDKIAQDWQLMDSNSEQDQHKVFNNWVVENEDRKPDQSFIESLQLGPHSHSAVLHDLIGLDSSTAADSDQSNNEETSRLLTDISGGNNSLLTMSNASNTGPVESPVNSASENEEGHHRKIPVYDNMMPAGEFPQALFFSSPQQASKLVKYENGSTTLSPWMIPPNTVPPLQSRPNLSVGHLPMFALWNE

SEQ ID NO: 5750 - protein, 503 aa, Staphylococcus sciuri
MKKFDVVFIGSGHAAWHAALTLKHAGKSVAIIEKDTIAGTCTNYGCNAKILLEGPYEVLEEASHYPQIIESDQLHVNWENLMQYKKAVINPLSNTLKSMFEQQGIEVIMGAGKLVDAHTVDVEGTPIQAENIVIATGQHSNKLDIEGRALTHDSRDFLSLDKMPNSITFIGAGIISIEFSSIAIKSGAEVHVIHHTDKPLDGFNEKHIAKLIHKLESEGVNSISMKMFNQYNKLGNSYHVTTETGLSVDTDYVLDATGRKPNVQNIGLDELGIEYSEKGIQVDDYLRTNIHNIYASGDVLDKTIPKLTPTATFESNYIATHILGINPNPIQYPVIPSVLYSLPRLSQIGVTVKDAEQSEAYTIKDIPFGKQMVFEYKNETEAEMTIIINADKQLVGAEIYADDAANLINLLTFIVNQKLTAKDLNQLIFAFPRIIKRRARFIKSSNDFRYINTEVRLPSLTRKTYLCFCFGKSSARNYLVSLLRQMHHFICAICKYAINAPVC

SEQ ID NO: 5751 - protein, 153 aa, Triticum aestivum
  unsure (1)..(153): unsure at all Xaa locations
MSKPGGSAGGATAGPTAAAAAAAAQKQRALLQKADADVSSLVDNFSALINIARVNDPPVRNSQEAFQMDMRASRMVHSADSLLKLVSELKRTAISSGLASLSENVDRRIEVLSQQSEETERMLERIGQEAAASLKELEXAHYYFIVVRTPLYD

SEQ ID NO: 5752 - protein, 464 aa, Glycine max
MFGVVRRRVASGSPSPWLLGQSAQKIRSGPSVSARASSIVEKEIVFRSGGCGFVQNFSHITPGSWINSKPMRVVIHPEATVRTWGRLFSSESGDTVDVVVPPLAESISDGTLAQFLKRPGDRVNADEPIAQIETDKVTIDVSSPESGVILKLLANEGDTVEPGNKIAIISRSADATHVAPSETISEKAAPQPTQKVSEEKKAPKVETAPAKEKPKTPPATLKSPTEPQLPPKERERRVPMTRLRKRVATRLKDSQNTFAMLTTFNEVDMTNLMKLRSDYKDAFVEKHGVKLGLMSGFVKAAVNALQHQPIVNAVIDGDDIIYRDYIDISIAVGTSKGLVVPVIRNADTMNFADIEKQINTFAKKANDGTLSIDEMAGGTLTISNGGVYGSLLSTPIINPPQSAILGMHSIVSRPTVVGGNIVPRPLMYVALTYDHRIIDGREAVFFLRRIKDIVEDPRRLLLDI

SEQ ID NO: 5753 - protein, 223 aa, Klebsiella oxytoca
IWYNNFFGAETEAILPYDQYMHRFAAYFQQGNMESNGKYVDRNGNAVDYQTGPIIWGEPGTNGQHAFYQLIHQGTKMVPCDFIAPAITHNPLSDHHPKLLSNFFAQTEALAFGKSREVVEQEYRDQGKDPATLEHVVPFKVFEGNRPTNSILLREITPFSLGALIALYEHKIFTQGVIMNIFTFDQWGVELGKQLANRILPELKDGSEVSSHDSSTNGLINRY

SEQ ID NO: 5754 - protein, 364 aa, Streptococcus pneumoniae TIGR4
MSKELHINTILAQAGIKSDEATGALVTPLHFSTTYQHPEFGRSTGFDYTRTKNPTRSKAEEVLAAIESADYALATSSGMSAIVLAFSVFPVGSKVLAVRDLYGGSFRWFNQVEQEGHFHFTYANTEEELIAELEKDVDVLYIETPTNPLMLEFDIEKLAKLAHAKGAKVVVDNTFYSPIYQRPIEDGADIVLHSATKYLAGHNDVLAGVVVTNSLELYEKLFYNLNTTGAVLSPFDSYQLLRGLKTLSLRMERSTANAQEVVAFLKDSPAVKEVLYTGRGGMISFKVADETRIPHILNSLKVFSFAESLGGVESLITYPTTQTHADIPAEVRHSYGLTDDLLRLSIGIEDARDLIADLRQAIEG

SEQ ID NO: 5755 - protein, 198 aa, Klebsiella oxytoca
AYFQQGNMESNGKYVDRNGNAVDYQTGPIIWGEPGTNGQHAFYQLIHQGTKMVPCDFIAPAITHNPLSDHHPKLLSNFFAQTEALAFGKSREVVEQEYRDQGKDPATLEHVVPFKVFEGNRPTNSILLREITPFSLGALIALYEHKIFTQGVIMNIFTFDQWGVELGKQLANRILPELKGGSEVSSHDSSTNGLINRY

SEQ ID NO: 5756 - protein, 223 aa, Klebsiella pneumoniae
IWYNNFFGAETEAILPYDQYMHRFAAYFQQGNMESNGKYVDRNGHAVDYQTGPIIWGEPGTNGQHAFYQLIHQGTKMVPCDFIAPAITHNPLSDHHQKLLSNFFAQTEALAFGKSREVVEQEYRDQGKDPATLEHVVPFKVFEGNRPTNSILLREITPFSLGALIALYEHKIFTQGAILNIFTFDQWGVELGKQLANRILPELKDGSEVSSHDSSTNGLINRY

SEQ ID NO: 5757 - protein, 343 aa, Bordetella pertussis Tohama I
MKETYRAMQASRPGVLELVERRTPRPAAAEVLIRVEACGMCGADIADIEKAGPTVPPRVPGHEVVGRIVALGGQVPPIWRLGQRVGVGRLGGHCNECDQCRQGRFQLCESQPIVGASCDGGYAEMMLARATGLVSIPDELDAQEAAPILCAGVATFNALRKCGAQPGDLVAVVGIGGLGHMALQYARRMGFRVVAIGRGADIATDAMALGAHAYIDNLEQNVVATLRRMGGAQAVLTTIDQAEAVSALLGALAPEGRLVVLNPGKSALQVSAGLLVGGQRSIVGSLTGTPHDNEKALNFSVLVDARPSIEVWPLARADEAYRQLQSGAPRFRLVLAMGNTDQD

SEQ ID NO: 5758 - protein, 207 aa, Neurospora crassa
MPCGLGGSKTVQRKLVLLGDGACGKTSLLNVFTRGYFPTVYEPTVFENYVHDIFVDNVHIELSLWDTAGQEEFDRLRSLSYDDTDLIMLCYSVDSKDSLENVESKWQGEIAENCPGVKIVLVALKCDLREATEDEEDGGANEDGAQREKKPMISYDQGLEVARRIKALRYLECSAMRNRGVNEAFTEAARVALSVKKDREESKCVVM

SEQ ID NO: 5759 - protein, 212 aa, Triticum aestivum
  unsure (1)..(212): unsure at all Xaa locations
IASGRPRSRTAEDVIGPEVEKLVADLANGAVLLLENVRFYKEEEKNDPEFAKKLASLADLFVNDAFGTAHRAHASTEGVTKFLKPSVAGFLLQKVLDYLDGAVSTPRRPFAAIAGGSKVXSSKTGVIESLLAKVDILLLGGGLTFTFYKAQGLTAGQTIEEEDKLDLVTTLCDPEEAMAGQLMIPTVVVADVKDALDDTRTIVAATGIPARW

SEQ ID NO: 5760 - protein, 475 aa, Magnaporthe grisea 70-15
MASSSSSVPELAAAFPDGTTDFKPMRNTKGYDVSKPHISETPMTLKNWHKHVNWLNTTFILFVPLAGLISTYWVPLQWKTAVWAVVYYFNTGLGITAGYHRLWAHSSYKASLPLKIYLAAVGAGAVEGSIRWWSNGHRAHHRYTDTEKDPYSVRKGLLYSHMGWMLLKQNPKKQGRTDITDLNEDPVVVWQHRNFLKCVIFMALVFPTLVAGLGWGDYWGGFIYGGILRVFFVQQATFCVNSLAHWLGDQPFDDRNSPRDHVITALVTLGEGYHNFHHEFPSDYRNAIEWYQYDPTKWSIWIWKQLGLAHNLKQFRQNEIEKGRVQQLQKKLDQKRAKLDWGIPLEQLPVVSWDDFVEQSKNGKAWIAVAGVIHDVGDFIKDHPGGRALINSAIGKDATAIFNGGVYNHSNAAHNLLSTMRVGVLRGGCEVEIWKRAQSENKDVSTVVDSSGNRIVRAGGQATKVVQPVPGAQAA

SEQ ID NO: 5761 - protein, 464 aa, Escherichia coli K12
MPDAKKQGRSNKAMTFFVCFLAALAGLLFGLDIGVIAGALPFIADEFQITSHTQEWVVSSMMFGAAVGAVGSGWLSFKLGRKKSLMIGAILFVAGSLFSAAAPNVEVLILSRVLLGLAVGVASYTAPLYLSEIAPEKIRGSMISMYQLMITIGILGAYLSDTAFSYTGAWRWMLGVIIIPAILLLIGVFFLPDSPRWFAAKRRFVDAERVLLRLRDTSAEAKRELDEIRESLQVKQSGWALFKENSNFRRAVFLGVLLQVMQQFTGMNVIMYYAPKIFELAGYTNTTEQMWGTVIVGLTNVLATFIAIGLVDRWGRKPTLTLGFLVMAAGMGVLGTMMHIGIHSPSAQYFAIAMLLMFIVGFAMSAGPLIWVLCSEIQPLKGRDFGITCSTATNWIANMIVGATFLTMLNTLGNANTFWVYAALNVLFILLTLWLVPETKHVSLEHIERNLMKGRKLREIGAHD

SEQ ID NO: 5762 - protein, 184 aa, Zea mays
MVPLISLSRPESSAPPGTKACREKLRRDRLNERFNELCAILEPGKPPKADKVAILSDAARLLNQLQGEAQKLKQSNESLQESIKSLKAEKSELRDEKTRLKAEKERLEQMLKGVVSHAAVAAPGPFVPHPAAVAPSFHHHPAAFAQAGKFVPYPSYPPPAAFWQWIPPTSLDTTKDPAHWPPVA

SEQ ID NO: 5763 - protein, 203 aa, Schizosaccharomyces pombe
MNPEYDYLFKLLLIGDSGVGKSCLLLRFADDTYTESYISTIGVDFKIRTFELEGKTVKLQIWDTAGQERFRTITSSYYRGAHGIIIVYDVTDQDSFNNVKQWLQEIDRYAVEGVNRLLVGNKSDMVDKKVVEYSVAKEFADSLNIPFLETSAKDSTNVEQAFLTMSRQIKERMGNNTFASSNAKSSVKVGQGTNVSQSSSNCC

SEQ ID NO: 5764 - protein, 295 aa, Gloeobacter violaceus PCC 7421
MATAWIFPGQGSQVVGMADALSGHPDTAALFERASGILGWSVAAVCAGPQERLDRTLYTQPALFTVCVALAQRARKQGELGEPALVAGHSLGEYAALWAAAVFDFETGLELVAERARLMDAQQAGAMSAIVGFDRDKLEKLCAERPGVVIANDNNPMQVVISGEPERVAEVSAAIRAKRVIPLAVSGAFHSPLMAPAAAEFAAVLARAELHPAHIPVLFNADPTRPVADVASMRELLRRQIDHPVRWRETILRMADSGITELVEIGPGAVLTGLAKRTVPALALRNIEPAAALAV

SEQ ID NO: 5765 - protein, 387 aa, Pseudomonas aeruginosa PAO1
MTVLKMTDLDLKGKRVLIREDLNVPVKDGQVQSDARIKAALPTLKLALEKGAAVMVCSHLGRPTEGEFSAENSLKPVAEYLSKALGREVPLLADYLDGVEVKAGDLVLFENVRFNKGEKKNADELAQKYAALCDVFVMDAFGTAHRAEGSTHGVARFAKVAAAGPLLAAELDALGKALGNPARPMAAIVAGSKVSTKLDVLNSLAGICDQLIVGGGIANTFLAAAGHKVGKSLYEADLVETAKAIAAKVKVPLPVDVVVAKEFAESAVATVKAIAEVADDDMILDIGPQTAAQFAELLKTSKTILWNGPVGVFEFDQFGEGTRTLANAIADSAAFSIAGGGDTLAAIDKYGIAERISYISTGGGAFLEFVEGKVLPAVEILEQRAKG

SEQ ID NO: 5766 - protein, 600 aa, GIBBERELLA ZEAE PH-1
MSTFNGIVSEFPEIWNAQPPLACFLSHVHSDHLAGLESLRSPLINYGKGVLEARQQTFKHLSKVLRSLPLETPTSIELCPGREIQVTLFDANHCPGAVMFLVEGDGKAILYTGDIRSEPWFVNAIERNPNLIEYTSGLKTLDKIYLDTSFTEDVPFETKAQGITELLKKISKYPNDTVFHFQAWTYGYEDVWIALSKALKSKIHVDDYKLRIYGSLKSRNPRSQFDADMHLAPESPALTGHMCGNTPHLGCMTSDVNVRLHSCERGNICEVASKDMTVSIQPIIAHLSGGKDLAEVGVGGGGDDFKQEAELEFVDQANLAALFDVFVLPYQPYRTELISYRALSSSATSSQKSDMLREGLEQLLSTGRNIPLDWDVDTLSTNSAKEVIAILVQKLRTNRKNQKSVHEEALPKTIYFPYSRHSSLPELRHFVEAFRPKDIWPCTVNTAECWIGLMPRRIRLFLSSYLSMSEWLRNGTTIESLFGQFCSSKEFEHDRVMQAIAAKNALCSQNQQHASQTTVDSDPAPSSPNHEPQDLQEQKPGNFEHVFVSLLVDTQVSGYQEQTNLDPEQPDDLNTLPENLSARWGYQKTTLLLVKRRIGR

SEQ ID NO: 5767 - protein, 184 aa, Magnetococcus sp. MC-1
MASHPRDVTPAPLITEAKIQRRVQALAKEIIARMGQEPVMVALLKGSFLFAADLLREMGRQGAKPKLDFLAVSSYGSGTQSTGQVQVQLAIKEPLQGRDVLLVDDILDTGNTFAHVIELLKAQGAQQVLTCTLLNKQARRQQPVVADFIGFEVPDAFVVGYGIDWDNHFRELPYVGVIPPEAYR

SEQ ID NO: 5768 - protein, 210 aa, Brownea sp. 'Lavin 6225'
YDRVMAYKFHEDDHGEVIAEITKPDMEPYLGLHYPATDIPQAARFLFMKNKVRIIVDCRAKHVKVLQDEKLPFDLTLCGSTLRDPHSCHLQYMENMNSVASLVMAVVVNDNDEDGDSSDSVQPQKRKRLWGLVVCHNTTPRFVPFPLRYACEFLVQVFAIHVNKELELEYQIVEKNILRTQTLLCDMLMRDAPLGIVSQGPNIMDLVKCD

SEQ ID NO: 5769 - protein, 454 aa, Magnaporthe grisea 70-15
MAGQPSIPSAIGAKKALGLVDVDGHDLPPSPAPSSPSNGRRRYALATELVYTETKDQYGASSIPIYQSATFKQSSAAGGNSEYDYTRSGNPTRTHLERHMAKIMNANRALAVGSGMGALDVITRLLRPGDEVITGDDLYGGTNRLLTYLSANQGIIVHHIDTTDIDRVAATVSDKTAMVLLETPTNPLIKIVDVATIARAAHDRNSKALVVVDNTMLSPMLCNPLDLGADIVYESGTKYLSGHHDIMSGIVACNDAALADRMYFTVNATGCGLSPNDSFLLMRGIKTLAVRMEKQQANAQRIAEFLESHGFRVRYPGLKSHPQYDLHWSMARGAGAVLSFETGDAELSQRIVEAARLWAISVSFGCVNSLISMPCQMSHASIDAKTRKERQMPEDIIRLCVGIEDVQDLIDDLSRALVTAGAVSITVDGFHATGTALELGQTPLTTTKNDSPAQ

SEQ ID NO: 5770 - protein, 508 aa, Haemophilus influenzae R2866
MSSQCPFSHLAATNLTMGNGAPVADNQNSLTAGPRGPLLAQDLWLNEKLADFVREVIPERRMHAKGSGAFGTFTVTHDITKYTRAKIFSEVGKKTEMFARFTTVAGERGAADAERDIRGFALKFYTEEGNWDLVGNNTPVFFLRDPRKFPDLNKAVKRDPRTNMRSATNNWDFWTLLPEALHQVTVVMSDRGIPASYRHMHGFGSHTYSFWNEAGERFWVKFHFRTQQGIKNLTDAEAAEIIANDRESHQRDLYEAIERGDFPKWTLFVQIMPEADAEKVPYHPFDLTKVWPKKDYPLIEVGEFELNRNPENFFADVEQSAFAPSNLVPGIGASPDRMLQARLFNYADAQRYRLGVNYRQIPVNRPRCPVHSNQRDGQGRVDGNYGSLPHYEPNSFSQWQQQPDFAEPPLRINGDAAHWDYRNDDKDYFSQPRALFNLMNAEQKQSLFNNTAAAMGDAPDFIKYRHIRNCHWCDAAYGEGVAKALGLTVEDALKARDTDPALGQGGLL

SEQ ID NO: 5771 - protein, 223 aa, Klebsiella pneumoniae
IWYNNFFGAETEAILPYDQYMHRFAAYFQQGNMESNGKYVDRNGHAVDYQTGPIIWGEPGTNGQHAFYQLIHQGTKMVPCDFIAPAITHNPLSDHHPKLLSNFFAQTEALAFGKSREVVEQEYRDQGKDPATLEHVVPFKVFEGNRPTNSILLREITPFSLGALIALYEHKIFTQGAILNIFTFDQWGVELGKQLANRILPELKDGSEVSSHDSSTNGLINRY

SEQ ID NO: 5772 - protein, 223 aa, Citrobacter freundii
IWYNNFFGAETEAILPYDQYMHRFAAYFQQGNMESNGKYVDRNGNAVDYQTGPIIWGEPGTNGQHAFYQLIHQGTKMVPCDFIAPAITHNPLSDHHPKLLSNFFAQTEALAFGKSREVVEQEYRDQGKDPATLDHVVPFKVFEGNRPTNSILLREITPFSLGALIALYEHKIFTQGAILNIFTFDQWGVELGKQLANRILPELNDDKEITSHDCSTNGLINRY

SEQ ID NO: 5773 - protein, 223 aa, Citrobacter freundii
IWYNNFFGAETEAILPYDQYMHRFAAYFQQGNMESNGKYVDRNGNAVDYQTGPIIWGEPGTNGQHAFYQLIHQGTKMVPCDFIAPAITHNPLSDHHPKLLSNFFAQTEALAFGKSREVVEQEYRDQGKDPATLEHVVPFKVFEGNRPTNSILLREITPFSLGALIALYEHKIFTQGAILNIFTFDQWGVELGKQLANRILPELNDDKEITSHDCSTNGLINRY

SEQ ID NO: 5774 - protein, 358 aa, Haemophilus somnus 129PT
MKSYTIAVLSGDGIGPEIMAEAIKVLDAVQKKYNFKLNYRTFDVGGIAIDNHGTPLPASTLNGCEESDAILFGSVGGPKWEHLPPNQQPERGALLPLRKHFKLFCNLRPATLYQGLEKFCPLRADIATKGFDMMTVRELTGGIYFGQPKGRDGEGMQTRAFDTEVYYKYEIERIAKVAFETAMKRRKHVTSVDKANVLISSVLWRETVNEVAKNYPDVTLDHIYIDNATMQLIKQPEFFDVLLCSNIFGDIISDEAAMITGSMGMLPSASLNEHGFGLYEPAGGSAPDIAGKGIANPIAQILSAAMMLRYSFNLNEAADSIENAVKQVLSQGYRTADLADEHPPISTAEMGDLIVNAI

SEQ ID NO: 5775 - protein, 214 aa, Enterobacter cloacae
IWYNNFFGAETEAILPYDQYMHRFAAYFQQGNMESNGKYVDRNGNAVDYQTGPIIWGEPGTNGQHAFYQLIHQGTKMVPCDFIAPAITHNPLSDHHPKLLSNFFAQTEALAFGKSRDVVEQEYRDQGKDPATLDHVVPFKVFEGNRPTNSILLREITPFSLGALIALYEHKIFTQGAILNIFTFDQWGVELGKQLANRILPELGDDNAINSHDS

SEQ ID NO: 5776 - protein, 209 aa, Klebsiella oxytoca
IWYNNFFGAETEAILPYDQYMHRFAAYFQQGNMESNGKYVDRNGNAVDYQTGPIIWGEPGTNGQHAFYQLIHQGTKMVPCDFIAPAITHNPLSDHHPKLLSNFFAQTEALAFGKSREVVEQEYRDQGKDPATLEHVVPFKVFEGNRPTNSILLREITPFSLGALIALYEHKIFTQGVIMNIFTFDQWGVELGKQLANRILPELKDGSEV

SEQ ID NO: 5777 - protein, 451 aa, Vibrio vulnificus YJ016
MATHFDYICIGGGSGGIASANRAAMYGAKVALIEAKDLGGTCVNVGCVPKKVMWHGAQIAEAMSLYAPDYGFDVEVKGFDWSKLVESRQAYIGRIHQSYDRVLGNNKVNVIKGFAKFVDEKTVEVNGEHYTADHILIAVGGRPTIPNIPGAEYGIDSNGFFDLAEQPKRVAVVGAGYIAVEIAGVLNALGTETHLFCRKESPLRSFDPMIIDTLVEVMAAEGPTLHTHSVPKEVVKEADGSLTLHLENGESQNVDQLIWAIGRHPATDAINLSATGVATNERGYIKVDEFQATNVAGIYCVGDIMEGGIELTPVAVKAGRQLSERLFNNKPNAKMDYDLVPTVVFSHPPIGTIGLSEPEAIAQYGKENVKVYTSGFTAMYTAVTQHRQPCKMKLVCAGEDEKVVGLHGIGFAVDEMIQGFGVAMKMGATKADFDSVVAIHPTGSEEFVTMR

SEQ ID NO: 5778 - protein, 330 aa, Pirellula sp. 1
MTHTDQSVAPAASPEAESQARDAVSEVEPYEFTEIAMPIIAMHVLALFAFIPEFITGTNVLLLMISLVVFSNGITLGYHRLLTHKSLRVPKWLEYGYVGLALCCLQESPAKWVSTHRRHHSHSDEPDDPHSPTASFWWSHVGWLLWKRKGQHEFRTDDRYCADIIADPFYALMEKYPDLPAGIYILHAGVIWLLASALFLVDNSFVSAVWQGAGLVLWCVVLRTVMIWHFSWSVNSLTHCFGYQNHKTSDQSRNNWLVAIVSNGEGWHNNHHHDPASASVQHKWWEFDATYLQIRVLKRLGLATHVIEPRQFRKGSVEPDNPSRLNKQTG

SEQ ID NO: 5779 - protein, 449 aa, Chloroflexus aurantiacus
MTTHTETARLPTDYMPGPVPGPRAQELVARDHTVIAPLGRVYPLVIDHAQGCEVWDVDGNRFLDMNAGIAVLAAGHCHPRLIQVAQEQLQRFTHMAGTDFYNEPMVRAAEKLVSLMPGGKDWQVFFTNSGTEAVEASIKLARYATGRQNIIAFYGAFHGRSYGSLSLTASKPRQRQGFFPLLPGVSHTYYPNCYRCPINLRFPECDIACLDLIERTLFKTTTPPEEVAAIIIEPIQGEGGYVVPPPGALARLRSICDRYGILLIVDEVQSGVGRTGKMWAFEHEGIVPDIVASAKGLGGGLPLGAMIARSELARKWQPGSHGNTYGGNGLTCAVAYELLTMVEEELMDNAATVGAYLLEQLQALQQRFPQIGAVRGRGLMIGVEFVDSQGNPAGALAEAVMVESFRKGLLVLTCGASTIRFCPPLTLTKAQADEAVARFALAIEACLTA

SEQ ID NO: 5780 - protein, 268 aa, Triticum aestivum
  unsure (1)..(268): unsure at all Xaa locations
QGPDRHGGEASLAGLRPLPAVPGPLLCQGPRHRHLRRSGGPVVRGAGDHALLGPVDALNLVWGVLQAWKRMPDRAFRWNVLSFFTKDGKFFLEASLIAFLLQRKWKPVVMSLWDVPFVISGAVVSADVLLKTIYVFGFGVPLFIDADQRTGGKXWGLWILHKLVLTGVYGLIVFMHHSRWKDRLPAKPAYYQYVCAMLALYGLSLFGAFLSACRSSFGSWLYNSTTVSHQSLYLPPLFVTFLAGFFEEVYVRRQNAYSSGKGDSGCPF

SEQ ID NO: 5781 - protein, 635 aa, Synechocystis sp. PCC 6803
MVTTPTAAPRKPSKVEGIKERSNYLREPLATELLNDANYFTDDAVQILKFHGSYQQDNRDNRVKGQEKDYQFMLRTRNPGGLIPAQLYTALDDLSKTHGNQTLRVTTRQGLQIHGIVKKDLKMAIATVVNNLGSTLGACGDINRNVMAPAAPFRDKPEYGYAWDYANKVADLLSPQSGAYYEIWLDGEKVISGEEAPEVKAARQKDLNGTNLNDPKEPIYGQQFMPRKFKISVTVPGDNSIDVYTHDISLVVITDRHGELRGFNVLAGGGLGRTHNKEETFARAADPIGYVSKDDVYDLVKAIVATQRDYGDRHNRRHARMKYLLADWGVEKFRKQVETYMGKPFQSFKPLPAWRYQDYLGWHEQGDGKLFFGLSVENGRIKDEGDFQLKTALRKVVDQFQLPLRLTANHNILLYDINAQDKAAIEQIFQQHGVVTDPEAIDTLVRYSMACPALPTCGLAVTESERIMPSVNARLRDLLNSLDLPNESIVTRMTGCPNGCARPYMAEIGFVGSAPNSYQVWLGGSPNQERLAAAYTEKMPLEQLESLFEPLFVYFKQSRKGKESFGDFCHRVGFTALREFSHGYTAPAKGGKNRKNQRRVSLSDEMYAQLKARSERDNCPMNQIVQQALTAYLGK

SEQ ID NO: 5782 - protein, 433 aa, Vibrio vulnificus CMCP6
MSKIVKVLGREIIDSRGNPTVEAEVHLEGGFVGMAAAPSGASTGSREALELRDGDKARFLGKGVLKAIEAVNGAIADALVGKDAKDQAAIDAIMIELDGTENKSKFGANAILAVSLANAKAAAASKGMPLYEHIAELNGTAGQFSMPLPMMNIINGGEHADNNVDIQEFMIQPVGAKTLKEAVRMGAEVFHNLAKVLKSKGYNTAVGDEGGFAPNLKSNAEALEVIAEAVAAAGYVLGKDVTLAMDCAASEFFDKEAGIYNMKGEGKTFTSEEFNHYLAGLVEQFPIVSIEDGLDESDWAGFAHQTQLLGDKIQLVGDDLFVTNTKILAEGIEKGIANSILIKFNQIGSLTETLAAIKMAKDAGYTAVISHRSGETEDATIADLAVGTAAGQIKTGSMSRSDRVAKYNQLIRIEEALAGRAPFNGLKEVKGQA

SEQ ID NO: 5783 - protein, 381 aa, Triticum aestivum
MRAAVALLLAAVLCLGGGGAASASPDFDYPAAFNFGDSNSDTGGRIAAGFEPMPPPYGSTFFGAPSGRFSDGRLILDFLMDAMDMPFLNAYLDSLGAPNFRAGVNFAQAGCSITPASATSVSPFSFGLQIKQFFAFKEKVTRLLSQGDRYRRYIPQLDYFSKGLYMFDIGQNDLAGQFYSRTEDQVIASIPTILLEFETGLKTLYDQGARKFWIHNTGPLGCLPQNIDLFGKDPTQLDELHCVAKHNRAAKIFNLQLHALCTKLRGQFAGANITYIDIYSIKYALIGNYSRYGFESPTEACCGYGGPPLNYDGRVPCGQTKSVNGNLVTAKGCSDSTEYVNWDGIHYTEAANFHVTSQILTGKYSDPPFVDKMPFLIKPRF

SEQ ID NO: 5784 - protein, 386 aa, Oryza sativa
MRMAAPQQVHVRAAPLARALRTRVAAAAASASSPERALLGLSEPDLRQLAVDLGQQSYRGKQLHDLLYKSRAKQIQEFSHVPKVFREALVGAGWKVGRSPVHHAVTASDGTTKILLKLEDNRLIETVGIPVDDDKGPSRLTACVSSQVGCPLRCSFCATGKGGFARNLHAHEIVEQVLAIEETFQHRVTNVVFMGMGEPMLNLKSVLEAHRCLNKELKIGQRMITISTVGVPSTIKKLASHKLQSTLAVSLHAPNQKLRETIVPSAKSYPLEALMDDCKNYFLETGRRVSFEYTLLAGINDAKEHAEELAELLHTCGGGYHVNLIPYNPIQGSEYKRPYRKVVQAFVDALEARKITSPTSYQLDEKTEFMMAMHNDCRLSVHHTES

SEQ ID NO: 5785 - protein, 391 aa, Synechocystis sp. PCC 6803
MQFADRLNAFGGNVFADMDLAKAQARAQGQTIIDLSLGSSDLPTPAPILATIAKALEDPSTHGYLLHQGTLPLRQAIAVWYEKRFGLAVDAETEVLPLIGSQEGTAHLPLAVLNPGDVALLMDPGYPSHMGGVYLAGGEIYPMALRSENQFLPVFTAIPNSVLAKAKMTVLSYPHNPTTAIASLEFFQTAVQFCRDHDLVLVHDFPYMDLVFDGIAMPPSVLQADRQKSCAIEFFTFSKSYNMGGFRIGFAIGNIQLISALKKIKAVVDFNQYAGILQGAIAALESPPETVQQTVQIFAQRRATLIDALAKIGWAVPLPTATMYVWAPLPESWLGNSLEFCQKLVAKTGVALSPGSGFGAGGEGYVRFALVQEPDILATAAKKIGQFLDQN

SEQ ID NO: 5786 - protein, 378 aa, Bacillus amyloliquefaciens
MKALTYQGKEHMEVKEVPAPAIQDERDVIVRITATGICGSDLHLYKNGIPADPGYIVGHEPMGIVEETGSQVKKLRKGDRVVIPFNIGCGECHYCKHQMESQCDESNPNPHTDAGGLFGFSEFNGNYPGGQAEYLRVPYADFSSFLVPADSELEDEQVLLLSDVMPTAFWSVQHSGVKKGDTVVILGSGPIGLMAQKFAWKKGAKRVIAVDQVPHRLEHARRINGAETFNFSEHDEIGKLLHEYTSGGADVVIDCVGMDGTPLSKEKAEQKPNQFGTISPILTASEAVKKFGTVQLTGAYISEADGFPLGDFFTRNVSLKMGQAPVIHLMPMLYQMIEQNEIDPTDIITHKMSLAEAPAAYDIFDKKEDGNIKVILKP

SEQ ID NO: 5787 - protein, 258 aa, Leuconostoc mesenteroides subsp. mesenteroides ATCC 8293
MSKKVAIITGSGRGIGKAIAERLATENYYVAVVDIDESSAKYVSDSINAIKENQAKYYVLDVADRKSVFDLVDKVVADFGRLDVFVNNAGIAYIDSIIDSDPEKVERLFDVNLKGTFWGIQAAAKQLKKQGSGGRIINAASLAAVEGSALQGAYSASKFAIRGLGQSAAKELAKYNITVNTYDPGIVITPLRDYIDQRTAQIKNTTAEIQRQSVVNEIALGRAALPDDVADVVSFLVSQQAKYITGQSILIDGGMRFH

SEQ ID NO: 5788 - protein, 176 aa, Callerya atropurpurea
YDRVMAYKFHEDDQGEVIAEVTKPGLEPYLGLHYPATDIPQATRFLFMRNKVRMIVDCSAKHVKVHQDKNIPFEGTLCGSTLRAPHSCHLQYMENMNASASLVMAVVVNDDEEDEDSAGDVEPQKRKRLWGLVVCHHITPRFVPFPLRYACEFLAQVFAIHVNKEIELEYQIIEKE

SEQ ID NO: 5789 - protein, 411 aa, Bartonella vinsonii subsp. berkhoffii
MTTEIRVPTLGESVTEATVGKWFKKLGEAVAIDEPLVELETDKVTVEVPSPVAGKLFEIIAKEGDTVEVNALLGAVEAGAASVAKSPSSSETSVSAAPSELEQSSSSNTMPPAPSAAKLMAENNIAKSDILGSGKRGQILKEDVLNVLAQGVKTSPPAVSASSSTPVSVSSSAVAPVQEMREERVRMTKLRQTIARRLKDAQNTAAMLTTFNEVDMSAVMGLRKRYKDLFEKKHGVKLGFMGFFTKAVCHALKELPAVNAEIDGTDIIYKNYVNAGIAVGTDKGLVVPVVRDADQMSLAEIEKEIGRLGRLARDGKLAVSDMQGGTFTITNGGVYGSLMSTPILNAPQSGILGMHAIKERAMVVDGQIAIRPMMYLALSYDHRIVDGQEAVTFLVRVKESLEDPERLVLDL

SEQ ID NO: 5790 - protein, 364 aa, Bartonella vinsonii subsp. berkhoffii
MLAVFLLKHCYMLRKCLLKRNMAFETLGISIAKSKLNLDQMMAHKKAVVTANTSGVSFLMKKNKVDTFFGTAKILAAGQIEVVARDGNKQTIATKNIIIATGSESSSIPGVNVEIDEKVVVSSTGALALEKVPTRMIIVGAGIIGSELSSVWSRLGAKVTIIEYLNKVLGSMDGEVSRQFQKIMEKQGIEYKTGVKVTAITQSGSGAQVSFEAVKGGESETLEADVVLIATGRSPYTEGLGLVETGVKVDERGFIDIDAYWQTNIPGIYAIGDVVKGPMLAHKAEEEGVAVAEILAGQKGHVNFDVIPSVVYTQPEIASVGKTEEELKAAGIDYNVGKFPFMANGRARAMQKSDGFVKILADKK

SEQ ID NO: 5791 - protein, 328 aa, Nicotiana tabacum
MAVDFIGFSKMNEQLALQEAASAGLKSMEHLIRLVSHQQQQQPVQLDCREITDFTLSKFKKVVSILDRTGHARFRRGPVQVHPDNFTSLSLSPSNQQLLNLAPAKETPPPPSVSLPLTALTLDFTKPNVDRPTGNSNAIVAVKSKETFCISTPMATSANSSSFMSSITGEGSVSNGKQGSSVFLPPAPSVSAGKPPISGKRCREHEPSEDISGKSNGSGKCHCKKRKSRVKKVVRIPAISSRIADIPGDEYSWRKYGQKPIKGSPYPRGYYKCSSVRGCPARKHVERAMDDPAMLIVTYEGEHRHTIGAMQENNTQMMVFGSTEERRE

SEQ ID NO: 5792 - protein, 624 aa, Oryza sativa (japonica cultivar-group)
MASISGAAALRPRRRRAGCGCGGTPPPPLPPPPPRPPLHRGPLPLLLVLVGAAALLYPGGAARLQAGAERQHPRRVEKDPIKLWERYVEWLYQHKELGLFVDVSRMGFTEEFLRRMEPRMQRAFAAMRELEKGAIANPDEGRMVGHYWLRDPGLAPNSFLRTKIETTLDRILAFSQDVVSGKIKPPSSPAGRFTQILSIGIGGSALGPQFVSEALAPDNPPLKIRFIDNTDPAGIDHQIAQLGPELASTLVIVISKSGGTPETRNGLLEVQKAFRDAGLDFSKQGVAVTQENSLLDNTARIEGWLARFPMFDWVGGRTSEMSAVGLLPAALQGIDIKEMLVGAALMDEETRNTVVKENPAALLALCWYWASEGIGNKDMVVLPYKDSLLLLSRYLQQLVMESLGKEFDLDGNRVNQGLTVYGNKGSTDQHAYIQQLREGVHNFFVTFIEVLRDRPPGHDWELEPGVTCGDYLFGMLQGTRSALYSNDRESISVTVQEVTPRAVGALVALYERAVGIYASLVNINAYHQPGVEAGKKAAGEVLALQKRVLTVLNEASCKDPAEPLTLDQIAERCHCPEDIEMIYKIIQHMAANDRALIAEGSCGSPRSIKVYLGECNVDEDMLAA

SEQ ID NO: 5793 - protein, 175 aa, Citrobacter freundii
IWYNNFFGAETEAILPYDQYMHRFAAYFQQGNMESNGKYVDRNGNAVDYQTGPIIWGEPGTNGQHAFYQLIHQGTKMVPCDFIAPAITHNPLSDHHPKLLSNFFAQTEALAFGKSRDVVEQEYRDQGKDPATLDHVVPFKVFEGNRPTNSILLREITPFSLGALIALYEHKIFTQ

SEQ ID NO: 5794 - protein, 297 aa, Burkholderia fungorum LB400
MARKGIILAGGSGTRLYPITHVVSKQLLPVYDKPMIYYPLSTLMVAGIRDVLIISTPQDTPRFEAMLGDGSQWGMNIRYAVQPSPDGLAQAFIIGRDFVGNDPSALILGDNIFYGHDLAKQLENADGKTEGATVFAYHVQDPERYGVVEFDRQFRALSIEEKPVKPRSNYAVTGLYFYDNQVCDIAADIKPSPRGELEITDVNSRYLANAALNVEIMGRGYAWLDTGTHDSLIEAATFIETLQKRQGLVVACPEEIAFRQQWIDEERLLQLAKPLSKNAYGQYLLNLPQDQVAWPAR

SEQ ID NO: 5795 - protein, 120 aa, Citrobacter freundii
IWYNNFFGAETEAILPYDQYMHRFAAYFQQGNMESNGKYVDRNGNAVDYQTGPIIWGEPGTNGQHAFYQLIHQGTKMVPCDFIAPAITHNPLSDHHPKLLSNFFAQTEALAFGKSREVVE

SEQ ID NO: 5796 - protein, 452 aa, ASPERGILLUS NIDULANS FGSC A4
MGSVDHVEAFFDKADKYLMSTGVPYSPFVVTKAKGTRLYNQDGRSILDFTSGQMSSLLGHSHPDIVEVVKQYIGELDHLLSNMITHPVVDLAERLARFLPAPLEKSFFLNTGSESTEAAIKIAKVYTGNFEVIAFAASYHGLTQGSGSVTYSAGRRRGGPVMPGALAFPAPYAYRSPFKKADGSYDWEAELDFGWSMIDRQSVGSIAAFIMEPILSTGGILDPPKGYFKRMVEECRKRGILVIMDEAQTGVGRTGQMFAFEYDGIVPDILALSKTLGCGLPLASVSTTAEIAKGCKEAGFLWLSTHINDPLTAAVGNKVLEVVERDNIARRAAERGAQLREGLVKLQQKYWCIGDVRGRGLLQGIEIISDPETRAPGPELGQAVSDQAMTKGLSCNVVNLPGMGGVFRLAPPVTVTAEEIEEGLAILDEAFGDVLKTWSASESDSKLGGLFK

SEQ ID NO: 5797 - protein, 470 aa, Microbulbifer degradans 2-40
MTDSALPSGENKSFVILISCIATIGGFLFGFDSGVINGTVDGLVTSFGVTKTAVGVHVAFMLLGCAVGAAAAGRLADLYGRRAMLIVAAILFIVSAWGSGVATGIVEFDIYRLLGGLAVGAASVMAPAYISEVAPARYRGRLTTIQQVAIISGLTAAFLSNYVLAHTAGSSLEPFWMGIATWRWMFWIEIAPAAIFFFALMVIPESPRFLVASGKKDKALTVLTKLYGAQAAPGKVAEIDSSLDHDHKPRLSDLISKVTGKVRPIVWVGIGLATFQQLVGINVIFYYGSILWQSVGFSEDHALLINVVSGAVSIGAVVLSLVLVDKIGRKPLLWIGSAGMAVTLTLTAIAFATGTLDANGDLQLSDNMGILALVAANVYVIFFNMSWGPVMWVMLGEMFPNQIRGSGLAVAGLFQWGSNWAITMSFPALLAGLGLAVTYGFYALCAFISIIFVIKYVNETNGVELEDMEG

SEQ ID NO: 5798 - protein, 147 aa, Phytophthora infestans
MALKRINKELQDLGRDPPANCSAGPVGDDLFHWQATIMGPEDSPYAGGVYFLNIYFPADYPFKPPKVNFTTRIYHCNINANGGICLDILKDQWSPALTISKVLLSICSLLTDANPDDPLVPEIAQIYRTDRARHDATAREWTAKYAT

SEQ ID NO: 5799 - protein, 560 aa, Arabidopsis thaliana
MQSSTYAVKGNAAFAFQRRTFSSDRSTTSTGIRFAGYKSLATTGPLYCSGSEAMGATLARADNGIQSVMSFSSVKARSVRAQASSDGDEEEAIPLRSEGKSSGTVLPFVGVACLGAILFGYHLGVVNGALEYLAKDLGIAENTVLQGKYMMIHFFTPPVNGWIVSSLLAGATVGSFTGGALADKFGRTRTFQLDAIPLAIGAFLCATAQSVQTMIVGRLLAGIGIGISSAIVPLYISEISPTEIRGALGSVNQLFICIGILAALIAGLPLAANPLWWRTMFGVAVIPSVLLAIGMAFSPESPRWLVQQGKVSEAEKAIKTLYGKERVVELVRDLSASGQGSSEPEAGWFDLFSSRYWKVVSVGAALFLFQQLAGINAVVYYSTSVFRSAGIQSDVAASALVGASNVFGTAVASSLMDKMGRKSLLLTSFGGMALSMLLLSLSFTWKALAAYSGTLAVVGTVLYVLSFSLGAGPVPALLLPEIFASRIRAKAVALSLGMHWISNFVIGLYFLSVVTKFGISSVYLGFAGVCVLAVLYIAGNVVETKGRSLEEIELALTSGA

SEQ ID NO: 5800 - protein, 338 aa, Saccharomyces cerevisiae
MSLQHEKVTIAPLVLLSALDHYERTQTKENKRCVGVILGDANSSTIRVTNSFALPFEEDEKNSDVWFLDHNYIENMNEMCKKINAKEKLIGWYHSGPKLRASDLKINELFKKYTQNNPLLLIVDVKQQGVGLPTDAYVAIEQVKDDGTSTEKTFLHLPCTIEAEEAEEIGVEHLLRDVRDQAAGGLSIRLTNQLKSLKGLQSKLKDVVEYLDKVINKELPINHTILGKLQDVFNLLPNLGTPDDDEIDVENHDRINISNNLQKALTVKTNDELMVIYISNLVRSIIAFDDLIENKIQNKKIQEQRVKDKQSKVSDDSESESGDKEATAPLIQRKNKKN

SEQ ID NO: 5801 - protein, 250 aa, Phytophthora infestans
MSRRYDGRTTTFSPEGRLFQVEYAMEAINNAGSAVGILAKDGIVIAAEKKTVSKLLTPSKTSEKTIKLDDHLICAVAGLTADANILVNYARLSAQRYELAYQEKEPCEQLVQTLCNYKQAYTQFGGQRPFGVSFLYAGWDRHHGFQLYHSDPSGNYGGWKATAIGANNRAAKSMLKSDYEEGMTVEEALAFSVKVMNKTMDSTSPSAEKLEFTTVTRNADGKIVHRQLTESETDELLKKAAADTASSGDM

SEQ ID NO: 5802 - protein, 207 aa, Glycine max
  unsure (1)..(207): unsure at all Xaa locations
MKLSVFHHQHHPMILNCPLTLTRTHKRLNNTGSYRGLPCHCSHSSTSKTAAEPVTVSLNIEGRRALLICLLTTVAGFYACDVAGAVSTSRRAITGAKIPESDYTTLPNGLKYYDXKVGNGAEAKMGSRVAIHYVAKWKGITFMTSRQGMGLGGGTPYGFDVGQSERGTALKGLDLGLQRMQLGGQLDIELLSIKQSPFGTPVKIVEG

SEQ ID NO: 5803 - protein, 271 aa, Haemophilus influenzae R2866
MQHKLIAFIGGGNMAQAIILGLLKQGYPAEQIIVNDPNEEKKAFFANLGVATSENNVESVIKAEVVLLAVKPQMMADVCLPLSAVDFSDKLLISIAAGISTERLNALIPSVKSIVRVMPNTPALVGEGMAGLFAPKNTSENHRTFAQDLLGAVGRTVWVDDETQMHAVTAASGSSPAYFFLMLEAMQQALIKMNIDEKTARELVQQSMLGAAKMVIENPQIALSTLRENVTSKGGTTAAALAVFDAQHLNQTIEQAMQACLSRSQEMETLF

SEQ ID NO: 5804 - protein, 343 aa, Triticum aestivum
GLDFSKQGVAITQENSLLDNTARIEGWLDRFPMFDWVGGRTSELSAVGLLPAALQGIDVKEMLVGAALMDEETRNTVVKENPAALLALSWYWATDGIGSKDMVVLPYKDSLLLLSRYLQQLVMESLGKEYDLDGNRVNQGLTVYGNKGSTDQHAYIQQLREGVHNFFVTFIEVLRDRPPGHDWELEPGVTCGDYLFGMLQGTRSALYSNDRESISVTVEEVTPRAVGALVALYERAVGIYASLVNINAYHQPGVEAGKKAAGEVLALQKRVLTVLNEASCKDPAEPLTLEQIADRCHCPEDIEMIYKIIQHMAANDRALIAEGSCGSPRSVKVYLGECNVDDL

SEQ ID NO: 5805 - protein, 291 aa, Rhodopseudomonas palustris CGA009
MIIKGIILAGGSGTRLHPMTAAVSKQLMPIYDKPLIYYPLATLMMAGIREILVISTPADLPRFQQLLGDGASWGMSFSYAEQPKPEGLAQAFVIGADFVAGQPSALVLGDNLFYGHDLIPLLQNAAQHPEGATVFAYQVSDPERYGVVEFDTNQVARSIEEKPAQPRSNWAVTGLYFYDQDVVEIAANLKPSARGELEITDVNRAYLERGKLRVEKMGRGFAWLDTGTPDSLLDASEFVRVLEKRQGFKICCPEEIAFRFGWIDTRQLERLAQPLAKSNYGGYLLKLAANP

SEQ ID NO: 5806 - protein, 759 aa, Rhodopseudomonas palustris CGA009
MDEADSGGIVTARNVDLSSCDRELVQYPEAIQPHGAMLTVDEQSDRVLHASANCAAFIGKPPEAVIGAPIAAVLGAGWHELLGSLHRMPLDSGPVNIARESFLGSDQGWHLFAHRCGGLIILEFEKAEPEAAGTTSNLYSEVRADLAALQATEGVQAFFDLAVERIRAFTGYDRVMAYRFAEDGSGQVIAEARRDDLEPYLGLHYPATDIPAPARRLFALSWVRHLPDVGYTPVPLLAAKSPLVTGPVDMSFASLRSVSVMYTGYLKNMGVQSTLVMPLVKEGRLWGLISAMHHAAPRHISHQMRMAAEFLAHTLSLLMSAKEDAEQFERSSARKAAAEALTRLLDSEADIGAALHAAGALDLLSALIDAGGVVVQTGDEVATRGEAPAAAPLHELTSWLRERARPVFATDRLPNLDPAAQAVASQASGVLALRPLPDQPMLIAWLRPEQIEDVQWAGDPRKPVEISDADGMQRLRPRNSFALWKESVQGRAVPWRDDEKDAATRLAAAIAEIAAARKGRIERINRALDASHSELSRYTDVASAELKEHLRGIHHLTTSLRRRQGEVLDEEGRQQVATILKLTQRMDALVDALLDRSRGGSEAASETVDLEAVVDDALAPFARRIAEDRIEVRRPMRLGTAQGHREWIGEVFTNLIGNAIRYNDKPERWIEIGVEAGSPPRYYVRDNGIGIADTDQQLVFQMFHRVDQSEQKAEGAGVGLAMTRRIVAHHGGRIWVQSRLGEGATFYFTLAPDEERHDA

SEQ ID NO: 5807 - protein, 210 aa, Carmichaelia sp. 'Lavin 6201'
YDRVMAYKFHEDDHGEVIAEVKKPGLEPYLGLHYPATDVPQAARFLFMKNKVRIIVDCSAKRVKVIQDKNIPFDLTLCGSTLRAPHNCHLQYMDNMKASASLVMAVVVNDSNEDGDSSDAVQPQKRKRLWGLVVCHHITPKFVPFPLRYACEFLAQVFAIHVNKEIELEYQVIERNILRTQTLLCDMLMRDAPLGIISQSPNIMDLVKCD

SEQ ID NO: 5808 - protein, 188 aa, Carmichaelia sp. 'Lavin 6201'
YDRVMAYKFHEDDHGEVVSEIRRSDLEPYLGLHYPSTDIPQAARFLFKQNRVRMICDCHAKPVKVIQSEELRQPLCLVNSTLRSPHDCHTQYMANMGSIASLVMAVIVNGNDSTRLWGLLVCHHSSPRYVPFPVRYACEFLMQAFGLQLYMEIQLASQMAEKRILKTQTLLCDMLLRDAPFGIVTQSQ

SEQ ID NO: 5809 - protein, 135 aa, Hafnia alvei
DRNGNPVTYQTGPIIWGEPGTNGQHAFYQLIHQGTKLVPCDFIAPAISHNALGDHHSKLLSNFFAQTEALAFGKSREEVEEEFAKAGKTAAEVAHIVPFKVFEGNRPTNSILLREITPYSLGLLIALYEHKIFTQ

SEQ ID NO: 5810 - protein, 256 aa, Lactococcus lactis
MGKLAIVTGSGQGIGEGIVYRLAKDGFAVAVADINPQTAKNVAKTLIDKGFEAKAYVLDVANRSAVFQLIEQAVSDFGELAVFVNNAGVAFIDSIIDSDSERVERLFDVNIKGTYWGIQAAATQFKKQGHGGRIINAASLASVEGSALQSAYSASKFAIRGLTQSAAKELAKDYITVNAYNPGIVRTAMRDEIDKKTAQIKGISIEQQQQNCLNEIYLGREGRPEDVAEVVAWFASDAAEYITGQSILVDGGMRFN

SEQ ID NO: 5811 - protein, 214 aa, Bordetella pertussis Tohama I
MSSADIVIVKPEYWDDAVAHLMRRDRILKRIIPQHGETWLTSRGSPFVTLARAIIGQQISVKAADALWQRFLETVGKRPTPATVLRAGVPALRAAGLSQRKAEYLVDLATHFGQRLVHPEKWAAMDDEAVIAELVAIRGIGRWTAEMFLIFNLQRPDVLPLDDLGLLKAISLHYFSGEPVSRFEAREVSLAWQPWRTVATWYLWRSLEPAAVQY

SEQ ID NO: 5812 - protein, 512 aa, ASPERGILLUS NIDULANS FGSC A4
MSFFKNSRVYMLSAVAYMGSFLFGYDTGVMGSVLALDSFKHDFHMATGSTGFASSKEAEISSNVVALLTAGCFFGAIAGAIANDRYGRKNSLLVLSVIFMIGAAVQTGGRGTIAYIYGGRVIAGFGIGGMSAITPIYVSENCPPNVRGRIAGLFQEFLVIGVTVSYWLCYGVEKNIAPSTKQWRIPIGFQLVPSGLMFIGLWFLKESPRWLMKQGRREEATASLAFTRRADPNSDEVQQELAEIRASIEEELRSTEGVTWREVLLPGNRLRFLNAFLIMFWQQFSGTNSIGYYAPQLFQTIGVASTDTSLFTTGIYGVVKVVSTGLFLLIGIDRFGRKWSLVGGGWAMAVFMFILGAVLVSYPPVNTDTISNASIAMIVMIYLYVISYSASWGPIPWVYISEIFPTRLRAYGVGMGSATQWLFNFVVTKFTPSAISNIGWRTFIMFGVFCFAMGLWVCIFIKETKGKRLEDMDDIFGGKTVEQMQKDIEQADVEEQTEVEKTQTRHEEQVVR

SEQ ID NO: 5813 - protein, 101 aa, Serratia plymuthica
DRNGNPVDYQTGPIIWGEPGTNGQHAFYQLIHQGTKLVPCDFIAPAISHNPLGDHHAKLLSNFFAQTEALAFGKSLETVEAEFAAQGKTPEQVKHVAPFKV

SEQ ID NO: 5814 - protein, 481 aa, Microbulbifer degradans 2-40
MKIHNMKNFINGEYIASQADGAIDVLSPSTGKKVGDIPAGCVEDAQLALDTANAAQKLWAKKTNRERAKILRVFAANIRAAADDLAKLLVSEQGKLLSVAQMEVEATATFIEYACDNALTIEGDILPSDNPNEKIYIHKVPRGVVVAITAWNFPLALAGRKIGPALVTGNAIVVKPTQETPLATLALGELANAAGIPAGVLNIVNGRGSVVGQHLCESPITRLITMTGSTPAGQRIYRTSADHLTPVMLELGGKAPFIVMEDANLESAVEAAFTTRYANCGQVCTCAERLYVHESIYPAFMDKLLEKVKAIKVGDPMAADTDMGPKVNQSEIENIDALVKKGIEQGATLLHGGKRAHVPGFEGGNWYEPTLLGDVQQSNILVHEETFGPILPVVKINSIEQAIEYTNDSEYGLSTYLFTQNLKYIHQYIAEVEAGEVYVNRGIGEQHQGFHNGWKLSGAGGEDGRYGLEQYLEKKTVYFAE

SEQ ID NO: 5815 - protein, 504 aa, Methanococcoides burtonii DSM 6242
MSDEKTSSLTTAFGIPVGDDQNSLTAGERGPVLIQDVHLLEKLGHFNRERIPERVVHAKGAGAGGYFEVTADVTKYTKAKFLSEIGKRTEVFARFSTVGGEKGSADAARDPRGFAIKFYTEDGNHDLTGNNTPVFFIRDPLKFPDFIHTQKRNPATNCKDPNMFWDFLSLTPESIHQVTILFSDRGTPATFRNMNGYSSHTYKWYNDKGEYFWVQYHFKTDQGTKTLTREEAEKLSGTDPDHAVRDLYDAIEKGDYPSWTLEMQIMTPEQAEEYRFDILDITKVWPHGDFPTIKIGKMVLNRNPTNYFAEVEQSAFSPGNLVPGIDISPDKMLQARVFSYHDSHVHRLGPNYHQIPVNAPKNAPETSYQRDGFMRIDANGGSGPNYWPNSFGGPAPDPDALKPPFEVSGKADRTPYVHSNDDFVQAGNLYRDVMDDQARENLVGNIISHLSGAQKRIQLRQTALFFKADPDYGGRVADGLGLDVKEIERLANMTQTERVKATEK

SEQ ID NO: 5816 - protein, 271 aa, Haemophilus somnus 129PT
MQHKLISFIGGGNMAQAIVLGLLKQGYPAHYIRVCDPNQSRRDLFIAQGTQVSSNNVEAIQDADVVLLAVKPQIMAEVCVPLSVVDFSDKLVISIAAGISTVRLTALLPSAKNIIRVMPNTPALVSAGMSGLFATPQVSVNLKQFAQDLLSAMGEICWLEQEQDMHAVTAGSGSSPAYFFLFMEAMQQALIEMNLDPKTARLLVQQSALGAAKMVIENPQIALSELRENVTSKGGTTASALVVFNEQNVTQIIKQAMLACVKRSQEMESLF

SEQ ID NO: 5817 - protein, 517 aa, Agaricus bisporus
GLIGGILSLRSFQEYLGINTKNAVKKAILDGNIISVLQAGCFFGALGTGYLSSRFGRRPCLIASGIVYITGGLLQCTVGLGPSQAAALHVFYIGRFISGIGVGMVSTLVPLYISECVPRTIRGRCTGTLQFATNSGLMLGFWVNYSVSKNVPFGEMQWRIPLIIQMIPSLLFIIAMFFQPESPRWLVEHGKHKEAATVLARTGGKDVDHPSVVQTLEEIKQEFVASKQPSFLKQIRLVGESRAVALRCFIPPLVMFFQQWTGTNAINLYSPEVFRHLGIHGTSGALFATGVYGVVKVVSVALALTFAVERFGRKRGLIFGGIGQALMMFWLGGYSATHQDGTVSPASHVSIVALYLYGAFFSMGWGPLPWVVAGEVAPNHVRSFALSIAVGTHWLFGFVISKVTPIMLDRIKYGTFLLFGFCCMIVATWAYFCLPETSGFALEDIKYLFERDVIIRSLQDAPGGKIFLGGRRVESVASLKERRVGVAGEQGEKITGLNSELEDVSSKKSTLKETSSV

SEQ ID NO: 5818 - protein, 414 aa, Phytophthora infestans
MAKLSIKNVDVKGKRVLIRVDFNVPFAQDGSISNTQRIDAALPTVQYVLDQGAKAVVLMSHLGRPEGKPKAKDSLAPVAVAVEQKLGRKVTFLKDCVGPEVEAACANPTEGSIILLENLRFHVEEEGKGKDAEGNKTKASSEAVAAFRASLSKLGDVYVNDAFGTAHRAHSSMVGVDLPIKAAGFLLDKELVYFAKALDAPQRPFVSILGGAKVADKIQLIMNMLDKVDEMVIGGGMAYTFKKVINNMEIGGSLYDEEGAKIVPQIVEKAKAKGVTLHLPVDFVIADKFAADAATKISTEEEGIPAGWMGLDVGPKSQEAFSAAVAKAKTVVWNGPMGVFEFDAFADGTKVVMDAVVKATESGATTIIGGGDTATCCVKFNTEDKVSHVSTGGGASLELLEGKILPGVDALSSA

SEQ ID NO: 5819 - protein, 458 aa, Xanthomonas campestris pv. campestris str. ATCC 33913
MSVPHSSPSATPRFAAEVRTTGLLALPLVLGHVSTGLIGFVDNVIAGHHGTATLAAVTIGTSLLWLPMLVPIGTLISLTASVSQLVGAGREREIGPLFRQALWLSLGLGALMFGFLTAVPPLLPTFGIAPDIVPGATDFLHAVRWGGPALTFYFCMRYLSEGMHWTLPTMLLGFGGLLVLAPLGYVLTYGKFGFAEHGAQGLGMASAITMWVQAIAFALYLWRSRRFAHLELFTHLEGPRWRAIGELLRTGLPIGITVLMEGGLFIVTALLIGRLGSTEAAAHQIAINVSQLCFMIPMGVAEATTVRVGHAVGRGDPLGMRRAAWAGYAIVLGTQAVSASILLLGHDAIVGVYTNDAAVAALASVLLLFAATFQFPDGIQVLSAGALRGLKDTRVPMFLAMFSYWGLGMPLGAGLGLGLGWGPQGMWIGLILGLTAAAILMGLRFRQTSRRLTAGAAP

SEQ ID NO: 5820 - protein, 569 aa, Clarkia gracilis
MSTPALISETEAWKDLKAHLEDIKRTHLRELMGDTERCQSMMVEFDNIFLNYSRQQASPDTINKLYKLADAAHLNQKIDRMYNGDHINSTENRSVLHVALRAPRNSAICSDGKNVVPDVWNVLDKIKDFSERVRNGSWVGATGKELKDVIAVGIGGSFLGPLFVHTALQTDPEASKNARGRELRFLANVDPIDAARNISGLNPETTLVVVVSKTFTTAETMLNARTLREWISSALGVSAVAKHMVAVSTNLPLVEKFGIDPNNAFAFWDWVGGRYSVCSAVGVLPLSLQYGFAVVEKFLQGAHSIDQHFSSAPFEKNIPVILGLLSVWNVSFLGYPARAILPYSQALEKLAPHIQQVSMESNGKGVSIDGLPLPFESGEIDFGEPGTNGQHSFYQLIHQGRVIPCDFIGVVKSQQPVYLKGEVVNNHDELMSNFFAQPDALAYGKTPEQLKKENVSEHLILHKIFTGNRPSLSILLPTLDAYRIGQLLAIYEHRVAVQGFVWGINSFDQWGVELGKSLATQVRKQLHASRVKGEAVEEGFNFSTKTLLTRYLEATSDVPADPSTLLPKI

SEQ ID NO: 5821 - protein, 203 aa, Clarkia lassenensis
KFLLGAHSIDQHFSSAPFEKNIPVLLGLLSVWNVSFLGYPARAILPYSQALEKLAPHIQQVSMESNGKGVSIDGLPLPFESGEIDFGEPGTNGQHSFYQLIHQGRVIPCDFIGVVKSQQPVYLKGEVVNNHDELMSNFFAQPDALAYGKTPEQLTKENVSEHLIPHKTFTGNRPSISILLPTLDGYRIGQLLAIYEHRVAVQG

SEQ ID NO: 5822 - protein, 256 aa, Clarkia gracilis
KFLQGAHSIDQHFSSAPFEKNIPVLLGLLSVWNVSFLGYPARAILPYSQALEKLAPHIQQVSMESNGKGVSIDGLPLPFESGEIDFGEPGTNGQHSFYQLIHQGRVIPCDFIGVMKSQQPVYLKGEVVNNHDELMSNFFAQPDALAYGKTPEQLKKENVSEHLIPHKTFTGNRPSLSILLPTLDAYRIGQLLAIYEHRVAVQGFVWGINSFDQWGVELGKSLATQVRKQLHASRVKGETVEGFNFSTKTLLTRYLE

SEQ ID NO: 5823 - protein, 547 aa, Bacillus subtilis subsp. subtilis str. 168
MKDDHQNKQHQSNAQGSEEAFSHKTSGKNESEDTLTNRQGHPVTDNQNVRTVGNRGPTTLENYDFLEKISHFDRERIPERVVHARGAGAHGYFEAYGSFGDEPISTYTRAKLFQEKGKKTPAFVRFSTVNHGKHSPETLRDPRGFAVKLYTEDGNWDLVGNNLKIFFIRDPLKFPDLVHAFQPDPVTNIQDGERIFDFISQSPEATHMITFLFSPWGIPANYRQMQGSGVHAYKWVNEEGKAVLVKYHFEPKQGIRNLTQKEAEEIQGKNFNHATQDLYDAIENGDYPEWEVYAQIMSDDEHPELDFDPLDPTKLWYKDDFPWKPIGKLVLNKNPENYHAEVEQASFGTGVLVDGLDFSDDKLLQGRTFAYSDTQRYRVGANYLQLPINSPKKHVATNQEGGQMQYRVDRAEGQNPHVNYEPSIMGGLKEAKQDGKDHTPHVEGDVKREAIDRTNNFGQAGETYRRFTEFERNELITNLVNTLSTCRKEIQDQMIENFTKADPDYGKRVAEGLKKVSENNSNGPIGTTETEQAAKQAEQESHPSDPY

SEQ ID NO: 5824 - protein, 203 aa, Gossypium anomalum
  unsure (1)..(203): unsure at all Xaa locations
GYTPLFPRILGHEASGIVESVGEGVNDLKPGDHVLPIFTGECKECRHCLSEESNNMCELLRINCDRXVMLADGKTRFSINGKPIYHFVGTSTFSQYTVVHVGQVAKISPTAPLDKVCPISCGICTGFGATVNVAKPKKGQTVAVFGLGAVGLAAAEGARVCGASRIIAVDVNPRRFEEAKRFGITEFVNPKDYDKPVQEVIVE

SEQ ID NO: 5825 - protein, 594 aa, GIBBERELLA ZEAE PH-1
MNRVAVKSLRTTSLSTVHALPRAPRRGFSISSTVLAHQSRSKASAHARYAHRKSTKHIPLKSSMYFRRLPTALLSSIVVGYGAWYSYNSTDSVPTSTFSANSLTSTQTADAVPTRTVLVVGADELRQGTIVGEGPISKATSDDGRRIVEMLTPDQATQKLRRLEQSYSVSRGQGVTRYDLVQLPSNDPIEDDHAEKIVQVPSRSSAETDNSDWMFWGVFDGHSGWTTSATLRESLINYVARELNATYKLASGELPSEDAVTQAIKTGFNNLDNEIVHKSVEKVFKGGSKTVAAELLQPALSGSCALLSFYDSRSNLLRVACTGDSRAVLGRRAANGKWTATALSDDQTGSNPSEVDRMRKEHPGEENVIRNGRVLGGLEPSRAFGDAVYKWSRDVAYKLRENFFGRSPSPLLKTPPYVTAEPVVTTTKVSPENGDFLVLATDGLWEMLTNEEVVGLVGKWIETEGQSGTNSQFDAAWDRIFGSSKTPLPVEESKTAGPDGNKTPIRVQQWGIDPDAKDRFTVKDKNVATHLIRNALGGNNDEQVCALLTLPSPFSRRYRDDLTVQVIFFGHGEKTGEITVNLEATAGEGVKAKL

SEQ ID NO: 5826 - protein, 386 aa, Oryza sativa (japonica cultivar-group)
MLGALLRLLSACGGVWPTSPAPPARSSSSSSAAAAADQAAAEGRDGLLWWRDLARCHAGELSVAVVQGNHVLEDQCRVESGPPPLAATCIGVFDGHAGPDAARFACDHLLPNLREAASGPEGVTADAIRDAFLATEEGFLAVVSRMWEAQPDMATVGTCCLVGVVHQRTLFVANLGDSRAVLGKKVGRAGQITAEQLSSEHNANEEDVRQELMAQHPDDPQIVALKHGVWRVKGIIQVSRSLGDAYLKHSQYNTEQIKPKFRLPEPFSRPILSANPSIIARCLQPSDCFIIFASDGLWEHLSNQQAVEIVHNHQRAGSARRLIKAALHEAARKREMRYSDLMKIDKKVRRHFHDDITVIVLFINYDQLAKGHSQGQSLSIRCALDH

SEQ ID NO: 5827 - protein, 245 aa, Eucalyptus globulus
MGRGRVQLKRIENKINRQVTFSKRRCGLLKKAHEISVLCDADVALIVFSTKGKLFEYATDCCMERILERYERYSYAESQVLTNNAETNGNWTLEHAKLKARMEILQKNQKNLMGEELDSLSLKELQNLEHQLDTALKNIRSRKIQLMCESISELQRKDKALQEQNNMLAKKVKEKEKALAQQTQWDNPQDDGLTSSSVILSQSLQPLNIGGPYHPSGIEEGAALGPPQHRNATLFPSWMLSHLQE

SEQ ID NO: 5828 - protein, 308 aa, Sorghum bicolor
MEINIVDKYEKLEKVGEGTYGKVYKAQDKATGQLVALKKTRLEMDEEGIPPTALREISLLNLLSHSIYVVRLLAVEQAAKNGKPVLYLVFEFLDTDLKKYLDVYRRGPAARPLPATLIKNFLYQLCKGVAHCHGHGVLHRDLKPQNLLVDKDKGILKIADLGLGRAFTVPMKSYTHEIVTLWYRAPEVLLGATHYSTGVDMWSVGCIFAEMARRQALFPGDSELQQLLHIFRLLGTPSEEQWPGVSELRDWHEFPQWKPQSLARVVPTLEPEGVDLLSKMLQLDPSNRISAIAAMEHPYFDSLDKSQF

SEQ ID NO: 5829 - protein, 210 aa, Enterolobium cyclocarpum
YDRVMAYKFHEDDHGEVIAEITKPGLEPYLGLHYPATDIPQAARFLFMKNKVRMIVDCHARHVKVLQDEKLPFELTLCGSTLRAPHTCHLQYMENMNSIASLVMAVVVNDNDEDVDSSDSIQPQKRKRLWGLVVCHNTTPRFVPFPLRYACEFLAQVFAIHVNKELELENQIVEKKILRTQTLLCDMLMRDAPLGIISQSPNIMDLVKCD

SEQ ID NO: 5830 - protein, 203 aa, Gossypium longicalyx
GYTPLFPRILGHEASGIVESVGEGVDDLKPGDHVLPIFTGECKECRHCLSEESNNMCELLRINCDRGVMLADGKTRFSINGKPIYHFVGTSTFSQYTVVHVGQVAKISPTAPLDKVCPISCGICTGFGATVNVAKPKKGQTVAVFGLGAVGLAAAEGARVCGASRIIAVDVNPRRFEEAKRFGITEFVNPKDYDKPVQEVIVE

SEQ ID NO: 5831 - protein, 647 aa, Candida albicans SC5314
MSELTELHPHHHVQIKESILVGKALLNFTTFFVTLGILVMGFEQSVYAPIITNKYFKQYYHNPSPTEIGFMIAILEIGALFSSIIAGKIGDLVGRKRATRYGAVFFYIGGFIQCISPNMFILCIGRLLGGFGIGFLTTIVPMFQSEISPAEARGFYACVEFTGNILGYAIGIWLDYAFSYLENDYSWKAPLIVQFLLGVVLWLGTFIVVETPRWLLNHDHDLEGMIVIADLYADGDVEDDHAMSEYRNIKESVLIDRIEGGERSYEYLFKRYAKRLSVACFGLMFAQLNGINLISYYAPMIFEEAGWVGRQAVFMTGINGIIYVISTIPPWYLVDSWGRKPLLMSGALIMGIPFCIAGYSLSLNNEYTSTIVVTSIIISNFGFGFSWGGIGWLLPAEVLPLSVRSKGAALATATNWFSNFVVGLASPILLDQIKWKTYFIPAISCFISFFAVWYLFPETKGLSLEEMGSVFDDKSSIFSHHASGSVGGSSSSIFNYGATNDLNRRTSMTNDSTPSIAGALPGAVPGAIDSIHQSAASMARNPTSNNNQQLDGIITGAAPPPMPINTNNNNIIKPVKSDNAADTLSLDSGFGGSQSDIVQEIEPPSLEEILKYKIQKQIEPNAFIATFHWLFSKKGQPNDEESRLLQQ

SEQ ID NO: 5832 - protein, 58 aa, Zea mays
LGLHAVKDRAVVVNGKVEVRPMMYLALTYDHRLLDGREAVQFLVKIKEYIEDPRKMLL

SEQ ID NO: 5833 - protein, 241 aa, Triticum aestivum
MSCGVGQGGWLLDYGLVEEEIQASDFIYMVDDPPVSSVILGFDAPRREDAAAAAQDNSGAKKRSRPESSAQPGTKACREKLRRDRLNERFNELCAVLEPGKPPKADKVAILSDATRLLDQLRAEAQKLKASNESLQDSIKSLKSEKSELRDEKTQLKAERERLEQMLKGVSAAAAAAPRQFVPHPAAAAAPQFHPAAAYAHAGKFVPAYAAGYPPPAAFWQWIPPTSLDTSKDPAHWPPVA

SEQ ID NO: 5834 - protein, 500 aa, Medicago sativa
FLHLRPTPSAKSKALRHLPNPPSPKPRLPFIGHLHLLKDKLLHYALIDLSKKHGPLFSLSFGSMPTVVASTPELFKLFLQTHEATSFNTRFQTSATRRLTYDNSVAMVPFGPYWRFVRKLIMNDLLNATTVNKLRPLRTQQIRKFLRVMAQSAEAQKPLDVTEELLKWTNSTISMMMLGEAEEIRDIAREVLKIFGEYSLTDFIWPLKYLKVGKYEKRIDDILNKFDPVVERVIKKRRGIVRRRENGEVVEGEASGVFLDTLLEFAEDETMEIKITKEQIKGLVVDLFSAGTDSTAVATEWALAELINNPRVLQKAREEVYSVVGKDRLVDEVDTQNLPYIRAIVKETFRMHPPLPVVKRKCTEECEINGYVIPEGALVLFNVWQVGRDPKYWDRPSEFRPERFLETGAEGEAGPLDLRGQHFQLLPFGSGRRMCPGVNLATSGMATLLASLIQCFDLQVLGPQGQILKGDDAKVSMEERAGLTVPRAHSLVCVPLARIG

SEQ ID NO: 5835 - protein, 500 aa, Medicago sativa
FLHLRPTPTAKSKALRHLPNPPSPKPRLPFIGHLHLLKDKLLHYALIDLSKKHGPLFSLYFGSMPTVVASTPELFKLFLQTHEATSFNTRFQTSAIRRLTYDSSVAMAPFGPYWKFVRKLIMNDLLNATTVNKLRPLRTQQIRKFLRVMAQGAEAQKPLDLTEELLKWTNSTTSMMMLGEAEEIRDIAREVLKIFGEYSLTDFIRPLKHLKVGKYEKRIDDILNKFDPVVERVIKKRREIVRRRKNGEVVEGEVSGVFLDTLLEFAEDETTEIKITKDHIKGLVVDFFSAGTDSTAVATEWALAELINNPKVLEKAREEVYSVVGKDRLVDEVDTQNLPYIRAIVKETFRMHPPLPVVKRKCTEECEINGYVIPEGALILFNVWQVGRDSKYWDRPSEFRPERFLETGAEGEARPLDLRGQHFQLLPFGSGRRMCPGVNLATSGMATLLASLIQCFDLQVLGPQGQILKGGDAKVSMEERAGLTVPRAHSLVCVPLARIG

SEQ ID NO: 5836 - protein, 175 aa, Rubrobacter xylanophilus DSM 9941
MMPEIGPVLVPAGEIQRKVRELGERITRDYAGQNLLLVGILRGAFVVLSDLIRQIEIPCEVDFMEVSSYGAGTTSSGVVRILKDLEEDISGRHVLIVEDIIDTGLTLSYLRRSLLARKPASLEICALLSKPARRQVDIQVRYQGFEVPDVFVVGYGIDYAGFYRNLRDIYALKQP

SEQ ID NO: 5837 - protein, 454 aa, Phytophthora infestans
MVSIVSIKARQIFDSRGNPTVEVDLVTELGEYRAAVPSGASTGEFEALEMRDGGKDYMGKGVLNAVKNVNEIIAPALIGKDVTKQAEIDRFMVEKLDGTQNEWGWYKKKLGANAILGVSLALCRAGAAAKKQPLWQHIADLAGNPTPCLPVPSFNIINGGSHAGNKLAMQEFMILPVGAKNFTEAMKIGSEVYHNLKKVIKGRYGLDATAVGDEGGFAPNIQSNGEAIDLIEEAIKAAGYTNQVRLGMDVAASEFYTGAEDARYNLDFKNENAAESEKIPADKLLEVYEGFIAKCADSSKIVSIEDPFDQDDWESWVKITGKVGKDVQIVGDDLTVTNPTRVKKAIEQKACNALLLKVNQIGSITESIEAVTMAKKAGWGIMASHRSGETEDTFIADLAVGLSAGQIKTGAPCRSERLAKYNQLLRIEEELGNKARYAGEDFRDVEKLGKYSTF

SEQ ID NO: 5838 - protein, 366 aa, Enterococcus faecium
MTELAESRGDDPAKYHIGIGQDQMAVNRANEDIITLGANAASKIVTEKDRELIDMVIVGTESGIDHSKASAVIIHHLLKIQSFARSFEVKEACYGGTAALHMAKEYVKNHPERKVLVIASDIARYGLASGGEVTQGVGAVAMMITQNPRILSIEDDSVFLTEDIYDFWRPDYSEFPVVDGPLSNSTYIESFQKVWNRHKELSGRGLEDYQAIAFHIPYTKMGKKALQSVLDQTDEENQERLMARYEESIRYSRRIGNLYTGSLYLGLTSLLENSKSLQPGDRIGLFSYGSGAVSEFFTGYLEENYQEYLFAQSHQEMLDSRTRITVDEYETIFSETLPEHGECAEYTSDVPFSITKIENDIRYYKI

SEQ ID NO: 5839 - protein, 500 aa, Medicago sativa
FLHLRPTPTAKSKALRHLPNPPSPKPRLPFIGHLHLLKDKLLHYALIDLSKKHGPLFSLYFGSMPTVVASTPELFKLFLQTHEATSFNTRFQTSAIRRLTYDSSVAMVPFGPYWKFVRKLIMNDLLNATTVNKLRPLRTQQIRKLLRVMAQGAEAQKPLDLTEELLKWTNSTISMMMLGEAEEIRDIAREVLKIFGEYSLTDFIWPLKHLKVGKYEKRIDDILNKFDPVVERVIKKRREIVRRRKNGEVIEGEVSGVFLDTLLEFAEDETTEIKITKDHIKGLVVDFFSAGTDSTAVATEWALAELINNPKVLEKAREEVYSVVGKDRLVDEVDTQNLPYIRAIVKETFRMHPPLPVVKRKCTEECEINGYVIPEGALILFNVWQVGRDPKYWDRPSEFRPERFLETGAEGEARPLDLRGQHFQLLPFGSGRRMCPGVNLATSGMATLLASLIQCFDLQVLGPQGQILKGGDAKVSMEERAGLTVPRAHSLVCVPLARIG

SEQ ID NO: 5840 - protein, 560 aa, Listeria monocytogenes EGD-e
MQTELVNQIEVKLRKIYQAAYQPAYLEKMLACAENYSNNTRGSIDTISEKNVYLIAYGDSIFEKNKHPLQTLNEFLQEYAQDAITDVHLLPIFPSTSDDGFSVTDYKQIDEQLGDWDDVQKMSENFRVMLDFVANHMSKSSDWFKRFSDNEAPYNQFFIEKDSQFDYKNVTRPRTSPLFHKYENGKELWTTFSEDQLDLNVRNIDCLVALTDVLLFYASKQATSIRLDAIGFLWKTSGTTCMHLPETHEIISLWRLLIDELYPNLQIITETNVPHEENISYFGDGKNEANMVYQFPLPPLVLHTFTCHDTTKLSKWAKSISQVSDTATYFNFLASHDGIGMRPATGILSDEEINSLVQKAVQNGGQVSYKDNADGTQSVYELNINYGEALQNLDEDTTEELVTKKIIAAHSILLTLQGVPAIYYHSLLGSKNDLVGYEESGINRRINREKLEKNQLVHELKTDTYRKTIFTSLKKLVQIRRNHTAFSPFATQEILDLGPDVFAIKRESEGECIYGIINVTSHDISKKVAFSGTNLLANQPVTSELELTAYEVVWIKKAVQ

SEQ ID NO: 5841 - protein, 283 aa, Enterococcus faecium
MNSLTSTYRLSNGYEIPVVGFGTWQTPDGDVAVSSVKEALAAGYRHIDTAQGYKNEESVGQAIKESGIPREEIFLTTKLWNANHSYELVMSSFEESLKKLQTDYLDLFLIHWPNPVAFRDNWEQANADTWRAFEELYEAGKIKAIGVSNFLPHHLDTLAKTAKIMPMVNQVFLAPGELQTTVVEYAKKHDMILEAYSPLGTGKIFDVPEMKQIAEAHDKTIAQVALRWSLQHEFLPLPKSVTPSRIKENTELFDFELTEEEMKQIDQLDGVVGKAKDPDTTQF

SEQ ID NO: 5842 - protein, 435 aa, Streptococcus pyogenes SSI-1
MSIITDVYAREVLDSRGNPTLEVEVYTESGAFGRGMVPSGASTGEHEAVELRDGDKSRYLGLGTQKAVDNVNNIIAEAIIGYDVRDQQAIDRAMIALDGTPNKGKLGANAILGVSIAVARAAADYLEVPLYTYLGGFNTKVLPTPMMNIINGGSHSDAPIAFQEFMIMPVGAPTFKEGLRWGAEVFHALKKILKERGLVTAVGDEGGFAPKFEGTEDGVETILKAIEAAGYEAGENGIMIGFDCASSEFYDKERKVYDYTKFEGEGAAVRTSAEQVDYLEELVNKYPIITIEDGMDENDWDGWKVLTERLGKRVQLVGDDFFVTNTEYLARGIKENAANSILIKVNQIGTLTETFEAIEMAKEAGYTAVVSHRSGETEDSTIADIAVATNAGQIKTGSLSRTDRIAKYNQLLRIEDQLGEVAQYKGIKSFYNLKK

SEQ ID NO: 5843 - protein, 193 aa, Enterolobium cyclocarpum
YDRVMAYKFHEDDHGEVVSEIRRSDLEPFFGLHYPATDIPQAARFLFKQNRVRMICDCHANPVKVIQSEESRQPLCLVNSTLRSPHQCHAQYMENMGSIASLVMAVIVNGNDTTKLWGLLVCHHTSPRHVPFPLRYACEFLMQAFGLQLYMEMQLASQMAEKRTLKTQTLLCDMLLRDALFSIVTQSPNIMDL

SEQ ID NO: 5844 - protein, 203 aa, Gossypium bickii
GYTPLFPRILGHEASGIVESVGEGVNDLKPGDHVLPIFTGECKECRHCLSEESNNMCELLRINCDRGVMLADGKTRFSINGKPIYHFVGTSTFSQYTVVHVGQVAKISPTAPLDKVCPISCGICTGFGATVNVAKPKKGQTVAVFGLGAVGLAAAEGARVCGASRIIAVDVNPRRFEEAKRFGITEFVNPKDYDKPVQEVIVE

SEQ ID NO: 5845 - protein, 243 aa, Fremyella diplosiphon
MYKCFLEHLEQSLLQRFTLESRPIPPGLDYQVSDRGRNPATIQSWCYQCPELRKIRYTYIDAGASAQIMNSVIYPSHHYDLPLLGIDFLSFGQVKNLIVMDFQPLFQDEAYLKKYIHPLQTLHDKYPDLAQGLEMKFYDANQYFSKYLLFAKTDPETVKTRVFEAFKDYLNLYWQMLAQAEPLIDQSDIQRIVKAQKDYDQYSADRDPASGLFSSYFGHQWSERFLYEFLFEDAVPLATVVAK

SEQ ID NO: 5846 - protein, 310 aa, Pseudomonas aeruginosa UCBPP-PA14
MSVLFAYPGQGAQRPGMLAALPDEPPVRACLEQAADCLGQAPAELESAEALRGTRAVQLCLLIAGVAASRLLETRGHRPGLVAGLSIGAYPAAVVAGALDFDDALRLVALRGELMQAAWPEGYGMSAILGLDQAQLDALILMVRREHPPLYLANVNAERQLVVAGSEAALAALAERARAAGASAAKRLAVSVPSHCALLDEPAARLAEAFAGVRLRRPRVPYLSSSRARLVAEPAALADDLAGNMARRVEWLATLRSAYERGARLHLELPPGRVLSGLARPLFGCATPAFEGSRADTLDALLREEEKRTR

SEQ ID NO: 5847 - protein, 255 aa, Fremyella diplosiphon
MRSEAKLTLYQPFLDYAIALLQERLNLQPYPIPTGFESKQATVGKGKHQEEVLTTSYAYQSSKLRQIRAAHVQGGKSLQVLNFVIFPHLNYDLPFFGGDLVTLPGGHLIALDMQPLFRDDLDYQAKYTQPILPIFQTHQQHLPWGGDFPEEAQPFFSPAFLWTRPQQTELVETHVFAAFKDYLNAYLDFVDQAQPITDSKHLAEIEQAQLRYLRYRAEKDPARGMFTRFYGTEWTEEYIHGFLFDLERKLTSAIK

SEQ ID NO: 5848 - protein, 289 aa, Streptococcus pneumoniae
MKGIILAGGSGTRLYPLTRAASKQLMPVYDKPMIYYPLSTLMLAGIRDILIISTPQDLPRFKELLQDGSEFGIKLSYAEQPSPDGLAQAFIIGEEFIGDDSVALILGDNIYHGPGLSKMLQKAAKKEKGATVFGYHVKDPERFGVVEFDENMNAISIEEKPEYPRSNYAVTGLYFYDNDVVEIAKSIKPSPRGELEITDVNKAYLDRGDLSVELMGRGFAWLDTGTHESLLEASQYIETVQRMQNVQVANLEEIAYRMGYISREDVLALAQSLKKNEYGQYLLRLIGEA

SEQ ID NO: 5849 - protein, 260 aa, Oryza sativa (japonica cultivar-group)
MDGKVAIVTGGASGIGEAAARLFASCGATVVIADVQDELGEAVAASVAGGGCRYVRCDVTDEAQVEAAVAAAVAEHGRLDVMVSNAGVLLPTGPVVDMDLAALDRVMSVNFRGAAACVKHAARAMVSRGTRGAIVCTASVASCQGGFGPAAYTASKHAVLGLVRAAAGELGRHGVRVNCVSPGGVATPLSCGLTGMSPEEMEAAAEPHNVLRGKVLKAADVAEAMLFLASDQAAFVSGHNLVVDGATTAVNYAVLQSVGL

SEQ ID NO: 5850 - protein, 203 aa, Kokia drynarioides
GYTPLFPRILGHEASGIVESVGEGVDDLKPGDHVLPIFTGECKECRYCLSEESNNMCELLRINCDRGVMLADGKTRFSINGKPIYHFVGTSTFSQYTVVHVGQVAKISPTAPLDKVCPISCGICTGFGATVNVAKPKKGQTVTVFGLGAVGLAAAEGARVCGASRIIAVDLNPRRFEEAKRFGITEFVNPKDYDKPVQEVIVE

SEQ ID NO: 5851 - protein, 195 aa, Zea mays
RPADDCCCRHRWTGRFEAHLWDKNSWNPTQRKKGKQVYLGAYDEEEAAARAYDLAALKYWGPTTYTNFPVMDYEKELKVMENLTKEEYLASLRRKSSGFSRGVSKYRGVARHHQNGRWEARIGRVFGNKYLYLGTYSTQEEAARAYDIAAIEYKGVNAVTNFDLRSYITWLKPSAPPAASPGCARGAGSAGRAAA

SEQ ID NO: 5852 - protein, 118 aa, Zea mays
  unsure (1)..(118): unsure at all Xaa locations
MXXGDRTPGRGSCCTKKHASLXQXPRRXXXKKGGNADGDTXDEXXGKXXEXRHKEPXXEERQXSANXDRXPGQEXXPXESPKARXTGSGXRXDTPTEKGEKNKPXRPPKPTXPEPEKQ

SEQ ID NO: 5853 - protein, 496 aa, Pseudomonas aeruginosa UCBPP-PA14
MFELSDWQRRAATQRFIDQALIGGRQRPAASGATFDAIDPASNRLLARVAACDAADVDAAVAAARRAFDEGPWARLAPVERKRVLLRLAELMLAHREELALLDSLNMGKPVMDAWNIDVPGAAHVFAWYAESLDKLYDQVAPTAQQALATITRVPLGVIGAVVPWNFPLDMAAWKLAPALAAGNSVVLKPAEQSPFSALRLAELALEAGVPEGVLNVVPGLGEQAGKALGLHPEVDALVFTGSTEVGKYFMQYSAQSNLKQVWLECGGKSPNLVFADCRDLDLAAEKAAFGIFFNQGEVCSANSRLLVERSIHDEFVERLLAKARDWQPGDPLDPASRAGAIVDRRQTAGILAAIERAQGEGATLLGGGRQLTINGSDNFIEPTLFGDVRPDMQLAREEIFGPVLAISAFDSEDEAIRLANDSRYGLAASLWSDDLHRAHRVARRLNAGTVSVNTVDALDVAVPFGGGKQSGFGRDLSLHSFDKYTQLKTTWFQLR

SEQ ID NO: 5854 - protein, 175 aa, Triticum aestivum
MAPTVMASSATSVAPFQGLKSTAGLPISRRSSSAGLSSVSNGGRIRCMQVWPIEGIKKFETLSYLPPLSTEALLKQVDYLIRSKWVPCLEFSKVGFVFREHNSSPGYYDGRYWTMWKLPMFGCTDATQVLNEVEEVKKEYPDAYVRVIGFDNLRQVQCVSFIAFRPPGCEESGKA

SEQ ID NO: 5855 - protein, 121 aa, Glycine max
  unsure (1)..(121): unsure at all Xaa locations
MADKYNLKNPAVKRILQELKEMNSNPSDDFMSLPLEENIFEWQFAIRGPRDTEFEGGIYHGRIQLPSEYPFKPPSFMLLTPNGRFETQTKICLSISNHHPXEHWQPSWSVRTALVALIAFM

SEQ ID NO: 5856 - protein, 432 aa, Comamonas testosteroni
MALTKDNEDLVRVGRGTPMGGLMREYWIPALKSTELEAGGSPVRLLLLGEKLVAFREPSGAVGVMDSRCPHRGVSLFMGRVEEGGLRCVYHGWKFSAEGKCVDMPSVRPEDEFKNSVRVARYPVKEMAGVVWVYMGTRKVLPELPRLEVLNLPENEVDVICLQRKSNWLQNLEGEIDTSHFNFLHVGGLHADEVPDDHPLKYTAQVAPQYLVKETALGTCYAAQVPAEEDHTYTRFAHFLFPFWALIPQADIAQNILARAWVPMDDEHTMMFFFRWTGSKAKRLDTPLKSGSPMPGVTLTDMKYKENTTDWYGRWQPLGDESNDWLIDRDLQKVGRVFSGIYGIHAQDQAMTDSMGPIIDHGLEQLAPTDLMIVRTRRRILKALRAHEANGTLPPGVDEADQYFTPRSGYYLTPKSVDWETAYEQRIEGLVR

SEQ ID NO: 5857 - protein, 447 aa, uncultured bacterium
MTTDRRPQSRGTCKTCGSGLARDGSVSGDINAGCTCLIASKLAPTGIGDYHDGHPTPAFMRSRMTFDFDQVFDRHNTGSTKWSRYPADVLPMWVADMDFAAPPVIVQGLQKRLEHPLLGYSVPQDDLRAAIVADLWNKYAWRIEPQELIFLPGVESGFNMALKALVQPQQNVVVQVPNYPPLRHAPGHWGLNKVELGFEAQADGTYVTPLDTLSQSLQGGGALLLSNPHNPLGKAFPREELQAIADICLEHGAWIISDEIHAELCFDGRQHIPMATLSPQVAQRTITLMSASKAYNIAGLKTSFMIIQDRHLREKVNHARCGMVDSVNPLGLEATRIAFSEAGPWLAELKDYLQSNRDYLVDAVRTRLPGITMNVPQSTYLAWLDCTALGLDNPQQFFLEHAKVGLSAGLDFGDDGQQFVRLNFGCPRSLLEEGISRMERSLRHLKC

SEQ ID NO: 5858 - protein, 207 aa, uncultured bacterium
MYRVPPDQECTMDLSRRQFFKVAGIGLAGSSLGALGMAPTSAFAEQVRHFKLAHTHETRNTCPYCSVGCGLIMYSQGDAAKNVAQNIIHIEGDADHPVNRGTLCPKGAGLLDFIHSPGRLQYPQVRKPGSTEWTRISWDEALDRVADLMKADRDANFIEKNAQGQTVNRWLTTGFLAASAASNEAGYITHKVVRSLGMLGFDNQARV

SEQ ID NO: 5859 - protein, 615 aa, Mycobacterium bovis AF2122/97
MLYVVASPDLMTAAATNLAEIGSAISTANGAAALPTVEVVAAAADEVSTQIAALFGAHARSYQTLSTQAAAFHSRFVQALTTAAASYASVEAANASPLQVALDVINAPAQTLLGRPLIGNGADGSTPGQAGGPGGLLYGNGGNGAAGGPNQAGGAGGNAGLIGNGGAGGAGGVGAVGGNGGTGGLLFGNGGAGGQGGLGLAGINGGSGGQGGHGGNAILFGQGGAGGPGGTGAMGVAGTNPTPIGTAAPGSDGVNQIGNGGNTDLTGGAGGDGNAGSTTVNGGNGGTGGAARNSSGGTGNSFGGAGGAGGDGANGGDGGAGGEALTEGGATAVSGAGGKGGNAEASGGAGGNGGKGGFAQATTSVTGGNGGNGGNGHDSNAPGGAGGSGGVGGDGGRGGLLAGNGGTGGAGGNGGTGGAGAPGGAGGAGGKADIANSLGDNATVTGGNGGTGGDGGSALGTGGAGGAGGLGGHGGAGGLLIGNGGAGGAGGLGGAGGAGGAGGEGGAGGAGGEAIPGGASTNSAGGDGGAGGTGGNGGDGGAGGAPGLGGAGGAGGWLIGQSGSTGGGGAGGAGGAGGAGGAGGSGGAGGHGDTTSGKNGSSGTAGFDGNPGQPG

SEQ ID NO: 5860 - protein, 323 aa, Candida albicans SC5314
MSSNSLEQLKATGTTIVTDTGEFEQIAKYKPQDATTNPSLILAATKNPEYASVIDVAIEYAKDKGSSPKEKAEIALDRLLIEFGKNILDIVPGRVSTEVDARLSFDKEATVKKALELIDLYKQQGIEKDRILIKIASTWEGIQAARELESKHGIHCNLTLLFSFAQAVACAEAGVTLISPFVGRILDWYKASTGEEYTAETDPGVQSVKAIYNYYKKYGYKTIVMGASFRNTGEIKALAGCDFLTISPKLLEQLYNSTEEVPKQLDAATAKDEDVEKVTYVDDESAFRFALNEDAMATEKLSQGIRQFGKDAVTLLTELESRF

SEQ ID NO: 5861 - protein, 500 aa, Vicia villosa
FLHLRPTPTAKSKALRHLPNPPSPKPRLPFIGHLHLLKDKLLHYALIDLSKKHGPLFSLYFGSMPTVVASTPELFKLFLQTHEATSFNTRFQTSAIRRLTYDSLVAMVPFGPYWKFVRKLIMNDLLNATTVNKLRPLRTQQIRKFLRVMAQGAEAQKPLDLTEELLKWTNSTISMMMLGEAEEIRDIAREVLKIYGEYSLTDFIWPLKHLKVGKYEKRIDDILNKFDPVVERVIKKRREIVRRRKNGEVVEGEVSGVFLDTLLEFAEDETTEIKITKDHIKGLVVDFFSAGIDSTAVATEWALAELINNPKVLEKAREEVYSVVGKDRLVDEVDTQNLPYIRAIVKETFRMHPPLPVVKRKCTEECEINGYVIPEGALILFNVWQVGRDPKYWDRPSEFRPERFLETGAEGEARPLDLRGQHFQLLPFGSGRGMCPGVNLATSGMATLLASLIQCFDLQVLGPQGQILKGGDAKVSMEERAGLTVPRAHSLVCVPLARIG

SEQ ID NO: 5862 - protein, 260 aa, Vibrio vulnificus CMCP6
MTDISVQSNTALESSETTHFGFTTVAKEEKVAKVAQVFHSVAAKYDIMNDLMSGGIHRLWKRFTIDCSGARPGQRVLDLGGGTGDLTAKFSRIVGEKGHVILADINNSMLNVGRDKLRDSGIVGNVHYVQANAEELPFPDDYFDIITISFCLRNVTDKDKALRSMFRVLKPGGRLLVLEFSKPVFDPLSKVYDAYSFHLLPKMGELVANDADSYRYLAESIRMHPDQETLKGMMQEAGFENTSYYNLTGGIVALHRGYKF

SEQ ID NO: 5863 - protein, 157 aa, Glycine max
  unsure (1)..(157): unsure at all Xaa locations
GIRHEAGAGMVAPFTGLKSMAGFPTRKTNNDITSIASNGGRVQCMQVWPPVGKKKFETLSYLPDLDDAQLAKEVEYLLRKGWIPCLEFHLEHGFVFREHNRSPXYYHGRYWTMWKLPMCGRTVASQVVKELKEDKTECXSGFIRVIGCTTAPSAVFE

SEQ ID NO: 5864 - protein, 500 aa, Lens culinaris
FLHLRPTPTAKSKALRHLPNPPSPKPRLPFIGHPHLLKDKLLHYALIDLSKKHGPLFSLYFGSMPTVVASTPELFKLFLQTHEATSFNTRFQTSAIRRLTYDSSVAMVPFGPYWKFVRKLIMNDLLNATTVNKLRPLRTQQIRKFLRVMAQSAEAQKPLDVTEELLKWTNSTISMMMLGEAEEIRDIAREVLKIFGEYSLTDFIWPLKYLKVGKYEKRIDDILNKFDPVVERVIKKRREIVRRRKNGEVVEGEASGVFLDTLLEFAEDETMEIKITKEQIKGLVVDFFSAGTDSTAVATEWALAELINNPRVLQKAREEVYSVVGKDILVDEVDTQNLPYIRAIVKETFRMHPPLPVVKRKCTEECEINGHVIPEGALVLFNVWQVGRDPKYWDRPSEFRPERFLETGAEGEAGPLDLRGQHFQLLPFGSGRRMCPGVNLATSGMATLLASLIQCFDLQVLGPQGQILKGDDAKVSMEERAGLTVPRAHSLVCVPLARIG

SEQ ID NO: 5865 - protein, 246 aa, Crocosphaera watsonii WH 8501
MTTLQTSPTTLPLHPLIHQLAEVIISHWEEYLDLSPYQLPDGLGYVEGKLEGERLVIENRCYQSPQFRKMHLELAKVGRGVDILHCVMFPNPDYALPMFGCDIVAGKKGVSAAIADLSPTNPELTLSNEYNQALSQLETPNFSDQRELPEWGDIFSDYCLFIRPHTQEEERLFLQRVGNFLRVHCQQANQSQTVSNKERELNIQGQQYYCEKQQQNDKTRRVLERAFGQAWADKYMTQVLFDIPNN

SEQ ID NO: 5866 - protein, 500 aa, Lens culinaris
FLHLRPTPTAKSKALRHLPNPPSPKPRLPFIGHLHLLKDKLLHYALIDLSKKHGPLFSLYFGSMPTVVASTPELFKLFLQTHEATSFNTRFQTSAIRRLTYDSSVAMVPFGPYWKFVRKLIMNDLLNATTVNKLRPLRTQQIRKFLRVMAQGAEAQKPLDLTEELLKWTNSTISMMVLGEAEEIRDIAREVLKIFGEYSLTDFIWPLKHLKVGKYEKRIDDILNKFDPVVERVIKKRREIVRRRKNGEVVEGEVSGVFLDTLLEFAEDETMEIKITKDHIKGLVVDFFSAGTDSTAVATEWALAELINNPKVLEKAREEVYSVVGKDRLVDEVDTQNLPYIRAIVKETFRMHPPLPVVKRKCTEECEINGCVTPEGALILFNVWQVGRDPKYWDRPSEFRPERFLETGAEGEARPLDLRGRHFQLLPFGSGRRMCPGVNLATSGMATLLASLIQCFDLQVLGPQGQILKGGDAKVSMEERAGLTVPRAHSLVCVPLARIG

SEQ ID NO: 5867 - protein, 1122 aa, Arabidopsis thaliana
MSGSRPTQSSEGSRRSRHSARIIAQTTVDAKLHADFEESGSSFDYSTSVRVTGPVVENQPPRSDKVTTTYLHHIQKGKLIQPFGCLLALDEKTFKVIAYSENASELLTMASHAVPSVGEHPVLGIGTDIRSLFTAPSASALQKALGFGDVSLLNPILVHCRTSAKPFYAIIHRVTGSIIIDFEPVKPYEVPMTAAGALQSYKLAAKAITRLQSLPSGSMERLCDTMVQEVFELTGYDRVMAYKFHEDDHGEVVSEVTKPGLEPYLGLHYPATDIPQAARFLFMKNKVRMIVDCNAKHARVLQDEKLSFDLTLCGSTLRAPHSCHLQYMANMDSIASLVMAVVVNEEDGEGDAPDATTQPQKRKRLWGLVVCHNTTPRFVPFPLRYACEFLAQVFAIHVNKEVELDNQMVEKNILRTQTLLCDMLMRDAPLGIVSQSPNIMDLVKCDGAALLYKDKIWKLGTTPSEFHLQEIASWLCEYHMDSTGLSTDSLHDAGFPRALSLGDSVCGMAAVRISSKDMIFWFRSHTAGEVRWGGAKHDPDDRDDARRMHPRSSFKAFLEVVKTRSLPWKDYEMDAIHSLQLILRNAFKDSETTDVNTKVIYSKLNDLKIDGIQELEAVTSEMVRLIETATVPILAVDSDGLVNGWNTKIAELTGLSVDEAIGKHFLTLVEDSSVEIVKRMLENALEGTEEQNVQFEIKTHLSRADAGPISLVVNACASRDLHENVVGVCFVAHDLTGQKTVMDKFTRIEGDYKAIIQNPNPLIPPIFGTDEFGWCTEWNPAMSKLTGLKREEVIDKMLLGEVFGTQKSCCRLKNQEAFVNLGIVLNNAVTSQDPEKVSFAFFTRGGKYVECLLCVSKKLDREGVVTGVFCFLQLASHELQQALHVQRLAERTAVKRLKALAYIKRQIRNPLSGIMFTRKMIEGTELGPEQRRILQTSALCQKQLSKILDDSDLESIIEGCLDLEMKEFTLNEVLTASTSQVMMKSNGKSVRITNETGEEVMSDTLYGDSIRLQQVLADFMLMAVNFTPSGGQLTVSASLRKDQLGRSVHLANLEIRLTHTGAGIPEFLLNQMFGTEEDVSEEGLSLMVSRKLVKLMNGDVQYLRQAGKSSFIITAELAAANK

SEQ ID NO: 5868 - protein, 354 aa, Eucalyptus gunnii
MGSLEKERTTTGWAARDPSGVLSPYTYSLRNTGPEDLYIKVLSCGICHSDIHQIKNDLGMSHYPMVPGHEVVGEVLEVGSEVTKYRVGDRVGTGIVVGCCRSCSPCNSDQEQYCNKKIWNYNDVYTDGKPTQGGFAGEIVVGERFVVKIPDGLESEQAAPLMCAGVTVYRPLVRFGLKQSGLRGGILGLGGVGHMGVKIAKAMGHHVTVISSSDKKRTEALEHLGADAYLVSSDENGMKEATDSLDYVFDTIPVVHPLEPYLALLKLDGKLILTGVINAPLQFISPMVMLESITGSFIGSMKETEEMLEFCKEKGLTSQIEVIKMDYVNTALERLEKNDVRYRFVVDVVGSKLD

SEQ ID NO: 5869 - protein, 522 aa, Vigna radiata
MLLELALGLLVLALFLHLRPTPTAKSKALRHLPNPPSPKPRLPFIGHLHLLKDKLLHYALIDLSKKHGPLFSLYFGSMPTVVASTPELFKLFLQTHEATSFNTRFQTSAIRRLTYDSSVAMVPFGPYWKFVRKLIMNDLLNATTVNKLRPLRTQQIRKFLRVMAQGAEAQKPLDLTEELLKWTNSTISMMMLGEAEEIRDIAREVLKIFGEYSLTDFIWPLKHLKVGKYEKRIDDILNKFDPVVERVIKKRREIVRRRKNGEVVEGEVSGVFLDTLLEFAEDETMEIKITKDHIKGLVVDFFSAGTDSTAVATEWALAELINNPKVLEKAREEAYSVVGKDRLVDEVDTQNLPYIRAIVKETFRMHPPLPVVKRKCTEECEINGYVIPEGALILFNVWQVGRDPKYWDRPSEFRPERFLETGAEGEARPLDLRGQHFQLLPFGSGRRMCPGVNLATSGMATLLASLIQCFDLQVLGPQGQILKGGDAKVSMEERAGLTVPRAHSLVCVPLARIGVASKLLSK

SEQ ID NO: 5870 - protein, 214 aa, Listeria monocytogenes EGD-e
MRFFIDTANVEEIKKANRMGFISGVTTNPSLVAKEGRDFNEVIQEITSIVDGPISGEVVSLEADEMIAEGRVIAKIHPNMVVKIPMTGEGLAAVKVLTEEGIKTNVTLVFSATQALLAARAGATYVSPFLGRLDDIGDDGLVLIRDIADIFEIHGIPTEIISASVRHPIHVIECAKAGADIATVPFKVFEQMLKHPLTDSGIDKFLADWEAAKK

SEQ ID NO: 5871 - protein, 521 aa, Vigna radiata
MLLELALGLLVLALFLHLRPTPTAKSKALRHLPNPPSPKPRLPFIGHLHLLKDKLLHYALIDLSKKHGPLFSLYFGSMPTVVASTPELFKLFLQTHEATSFNTRFQTSAIRRLTYDSSVAMVPFGPYWKFVRKLIMNDLLNATTVNKLRPLRTQQIRKFLRAMAQGAEAQKPLDLTEELLKWTNSTISMMMLGEAEEIRDIAREVLKIFGEYSLTDFIWPLKHLKVGKYEKRIDDILNKFDPVVERVIKKRREIVRRRKNGEVVEGEVSGVFLDTLLEFAEDETMEIKITKDHIKGLVVDFFSAGTDSTAVATEWALAELINNPKVLEKAREEVYSVVGKDRLVDEVDTQNLPYIRAIVKETFRMHPPLPVVKRKCTEECEINGYVIPEGALILFNVWQVGRDPKYWDRPSEFRPERFLETGAEGEARPLDLRGQHFQLLPFGSGRRMCPGVNLATSGMATLLASLIQCFDLQVLGPQGQILKGGDAKVSMEERAGLTVPRAHSLVCVPLARIGVASKLLS

SEQ ID NO: 5872 - protein, 252 aa, Trichodesmium erythraeum IMS101
MAFLHIGALFALFPSNFSWTAVGLALLLHWVTGGLGITLGFHRMLTHRSFKTPKWLEYFFIFCGTLACEGGVCDWVGLHRIHHQHSDNEQDPHDSHRGFWWSHMGWMLHKLPMKSEISRYTKDIANDPVYKFLQANFILIQFAFGILLFFIGGWSFVVWGIFVRIVAVFHCTWLVNSATHKFGYRTYDSGDSSTNCWWVAVLTYGEGWHNNHHAFQYSARHGLKWWEIDTTWMMIQLLQAFGLATNVKLATK

SEQ ID NO: 5873 - protein, 313 aa, Eremothecium gossypii
MSTKATLKASTDTVTLNTGAKIPLFGLGTWQSTDDDASSAVAAALKHGYKHIDTASFYKNEELVGKAVKESGIPREELFITTKVWNDQQRDPAGALDLSLKKLGTEYVDLLLMHWPVPFKEPENSTLDAYKVPRGPDGKVTRDEEWDFVKTWHLMQKLLGTGKVKAIGVSNFSINNLEELLNAEGTTVVPAVNQVELHIRLPQLELVEYCQKKGIVVEAYSPLGSSSAPLLKDATVNKVAEKYGVTPAHVLLNYVANRGIVVLPKSVKESRIISNFEYFKMDEEDIKLLNDIHKKEGVQRFVDPDFSPFPLFQ

SEQ ID NO: 5874 - protein, 210 aa, Myrospermum sousanum
YDRVMAYKFHEDDHGEVVAEITKSGLEPYLGLHYPATDIPQAARFLFMKNKVRMIVDCHAKHVKVLQDEKLPFDLTLCGSTLRAPHSCHLQYMANMDSIASLVLAVVVNDSDEDGDSSDAVQPQKRKRLWGLVVCHNTTPRFVPFPLRYACEFLAQVFAIHVNKEFELEYQIIEKNILRTQTLLCDMLMRDAPLGIVSQSPNIMDLVKCD

SEQ ID NO: 5875 - protein, 615 aa, Glycine max
MASLSGICSSSPTLKKFPNQSPSLTDPLRKDHVSFPARLADRTLSLAPLRAVAREVSDGALAAAVKKGLEKDPRALWRRYVGWLYQHKELGIYLDVSRVGFSDEFVKEMEPRFQAAFRAMEELEKGAIANPDESRMVGHYWLRDPKRAPNSFLKTQIENTLDAVCKFANDVVSGKIKPPSSPEGRFTQILSVGIGGSALGPQFVAEALAPDNPPLKIRFVDNTDPAGIDHQIAQLGPELASTLVIVISKSGGTPETRNGLLEVQKAFREAGLDFPKQGVAITQENSLLDNTARIEGWLARFPMFDWVGGRTSEMSAVGLLPAALQGIDIREMLAGASLMDEANRSTVIRNNPAALLALCWYWATDGVGSKDMVILPYKDSLLLFSRYLQQLVMESLGKEFDLDGNRVNQGISVYGNKGSTDQHAYIQQLREGVHNFFVTFIEVLRDRPPGHDWELEPGVTCGDYLFGMLQGTRSALYANNRESITVTVQEVTPRTVGALIALYERAVGIYASLVNINAYHQPGVEAGKKAAGEVLALQKRVLAVLNEASCKEPVEPLTLEEVADRCHAPEDIEMIYKIIAHMAANDRALIVEGSCGSPRSIKVFLGECNIDGLYA

SEQ ID NO: 5876 - protein, 211 aa, Triticum aestivum
  unsure (1)..(211): unsure at all Xaa locations
MAPTVMASSATSVAPFQGLKSTAGLPVSRRSNGASLGSVSNGGRIRCMQVWPIEGIKKSETLSYLPPLXTEALLXKQVDYLXIRSKWVPCLEFSKVGFIFXREHNASPGYYDGRYWXTMWKLPMSGCTDATQVVNEVEEXKKEYPDPYSAHRVHNIASASSAHRLNQPAARSGRLNTHHDSILNANLQMLGFHYFYCPKRFLGLSMAKQPL

SEQ ID NO: 5877 - protein, 541 aa, Oryza sativa (japonica cultivar-group)
MDPYKHRPSSSFNGPLWSTNSGAPVWNNNNSLTVGSRGPILLEDYHLVEKLANFDRERIPERVVHARGASAKGFFEVTHDITHLTCADFLRAPGVQTPVIVRFSTVIHERGSPETLRDPRGFAIKFYTREGNWDLVGNNFPVFFIRDGMKFPDMVHSLKPNPKSHVQENWRILDFFSHHPESLHMFTFLFDDIGIPADYRHMDGSGVNTYTLVNRAGKSHYVKFHWKPTCGVKSLLDDEAVTVGGTNHSHATQDLYDSIAAGNFPEWKLFIQTIDPDHEDRFDFDPLDVTKTWPEDIVPLQPVGRMVLNRNIDNFFSENEQLAFCPGIIVPGIYYSDDKLLQTRIFSYSDTQRHRLGPNYLLLPPNAPKCAHHNNHYDGFMNFMHRDEEVDYFPSRYDPAKHAPRYPIPSATLTGRREKVVIAKENNFKQPGERYRSWDPARQDRFIKRWIDALSDPRLTHEIRSIWLSYWSQADRSLGQKLASRLSAKPSMAQVHEDITDGLTEGDDEVVRSRRGVRWWMLWRRRRLGRNGIAVGRKEIK

SEQ ID NO: 5878 - protein, 423 aa, Microbulbifer degradans 2-40
MTLPKDPESSTVKPVKKDKRKNIIKSEKLLGVCYDIRGPVLEHANRLEEEGHRILKLNIGNPAPFGFEAPDEIITDVVYNIREAQGYTASRGLFPARKAIMHECQRQEIPNVEIEDIFLGNGVSELIVMANQALLNNGDEVLVPSPDYPLWTAAVNLAGGKAVHYMCDEQSDWFPDIDDMRSKITSRTRAIVVINPNNPTGAVYSQELLEQIVALAREHQLVIFADEIYSKILYDDAEFVPMGRIAKDVLCVTFNGLSKSYRLAGFRSGWIILSGAKHLAKDYIRGIDMLASMRLCANVPAMLAVQTALGGYQSINELILPGGRLLEQRDAAIEELAKIPGVSCVVPKGAIYLFPKIDRTMYDFDDDQQLILDFLIQEKILLVQGTAFNWKQPDHFRIVFLPQADQLRQAIIKFGEFLQQYRI

SEQ ID NO: 5879 - protein, 500 aa, Cytophaga hutchinsonii
MGKPTGFMEFGRELPGKRDPQARLKDYKELYLDFSATQIKNQAARCMNCGVPFCHSGCPLGNIIPEFNDAVYRNDWEEAAEILFSTNNFPEFTGRICPAPCEASCVLGINKPPVTIENIEKSIVETAFEKGILKPNPPKKRTGKTVAVVGSGPAGLAAAAQLNSAGHTVTVFERADQVGGLLRYGIPDFKLEKWVIDRRVKLMEEEGVIFKTNTNVGVTVKAKDIVKEFDAVVLTGGSTVGRDLPIPGRQFKGVHFAMEFLSQQNKRVANIKPEIDHTGEAYKNGDLLATAKNVVVIGGGDTGSDCVGTSNRHGAKSVLQFELMPKPPENKNETTPWPNWPMILRTSTSHEEGCDRLWSITTKEFIGDADGNLTGLKIAEMGWVTAPDSKLPKYQELPGTERVIPCELTLLAMGFLHPQHAGMLNELGVEYDERGNIKANGKYQTNVDKVFTAGDMRRGQSLVVWAISEGREAARNVDIFLMGTTSLEAKDHGMLDTVYA

SEQ ID NO: 5880 - protein, 364 aa, Zea mays
MVKENKRKQPPADAAPPPGDEGEGRSGRKGKKARKEKAEAILPSQIKNKDKRREVHAKLKREKKAQKRALARERGQAARRAEELGEQPPERQVPRTIENTREPDETVCRPDDQELFAGNDADEFSAVLKQHITPKILITTCRFNSGRGPAFIDELMPWFTQVIPNSQYVKRGTYELKKIVEYANNRDFTSLVVVHTNRREPDALLIIGLPDGPTAHFKLSKLVLRKDIKNHGNPTSHKPELVLNNFTTRLGHRVGRMIQSLFPQDPNFRGRRVVTFHNQRDYIFFRHHRYIFETKEKKVASKEKTSGSKSGSEKQQVICRLQECGPRFTLKLLTLQHGTFDTRSGEYEWVHKPDMDTSRRRFFL

SEQ ID NO: 5881 - protein, 267 aa, Glycine max
MDPKLKEVSQLFDRFKASFIRNDFDTCSNLLSQLKVLLTGFRSLPPLFADTPNAVHELTIARDIYEHAVVLSVKNEDQDAFERDFFQLKPYYTDACNRLPPSPQEYPILGLNLLRLLVQNRIAEFHTELELLSSAALENPCIKHAVELEQSFMEGAYNRVLSARQTVPHDTYVYFMDLLAKTVRDEIAGCSEKAYDYLSIKDAKQMLLFSSDQELLEYIKEEHPEWEIKNGSVFFQKAKESAPCKEIPSLQLINQTLSYARELERIV

SEQ ID NO: 5882 - protein, 335 aa, Streptococcus pneumoniae TIGR4
MKRIAVLTSGGDAPGMNAAIRAVVRQAISEGMEVFGIYDGYAGMVAGEIHPLDAASVGDIISRGGTFLHSARYPEFAQLEGQLKGIEQLKKHGIEGVVVIGGDGSYHGAMRLTEHGFPAIGLPGTIDNDIVGTDFTIGFDTAVTTAMDAIDKIRDTSSSHRRTFVIEVMGRNAGDIALWAGIATGADEIIIPEAGFKMEDIVASIKAGYECGKKHNIIVLAEGVMSAAEFGQKLKEAGDTSDLRVTELGHIQRGGSPTARDRVLASRMGAHAVKLLKEGIGGVAVGIRNEKMVENPILGTAEEGALFSLTAEGKIVVNNPHKADIELSSLNKSLS

SEQ ID NO: 5883 - protein, 436 aa, Zea mays
MPPSLFTPRFRFSSAPVPEPLLGLIDLGASRDLSGIYEALELRDGGSDYLGKGVLKAVSNVNNIIGPAIVGKDPTEQVEIDNFMVQQLDGTSNEWGWCKQKLGANAILAVSLAVCKAGAMVKKIPLYQHIANLAGNKTLVLPVPAFNVINGGSHAGNKLAMQEFMILPTGASSFKEAMKMGVEVYHNLKSIIKKKYGQDATNVGDEGGFAPNIQENKEGLELLKAAIEKAGYTGKVVIGMDVAASEFFGEKDKTYDLNFKEENNDGSNKISGDSLKDLYKSFVSEYPIESIEDPFDQDDWSTYAKLTDEIGQKVQIVGDDLLVTNPTRVAKAINEKTCNALLLKVNQIGSVTESIEAVRMSKRAGWGVMASHRSGETEDTFIADLSVGLSTGQIKTGAPCRSERLAKYNQLLRIEEELGDAAVYAGAKFRAPVEPY

SEQ ID NO: 5884 - protein, 152 aa, Triticum aestivum
MASAEDVKQRQVVEDRARNISHNVRCTECGSQSIEDSQADVAVLLRRLIRDEIKSGKSDKEIYKKLEEDFGETVLYAPKFDLQTAAIWLSPVIVGGVAAGVWAYQKHRQRTNVHIMALNLVRGVPLTPREKETMIDILTPPPPARRWWWPLK

SEQ ID NO: 5885 - protein, 987 aa, Candida albicans SC5314
MPSSSDAINRISYISLVTSDNDKFNQTFQFYSQLGFRLTKSFSKVSSYGSGLGANHPEFQLGVSHDSLKEVWLESYPLQNVDSNGNLRPWQEMEVYDGDNCERLNESTVIKVRLLGETPLKSISQKQFVFFTTQLNKIEKILTDANVKYGKVVDNVILAEDPLSNIISFSNTQNELCKTRFQSPEEYVEKTTAEILAKRKKSQLGSKFGSFEEISPSEVGGGNGLRKKKIGVMTSGGDAPGMNPAVRAVVRAGIYYGCDVYAVYEGYEGLVKGGDLLKKMEWSDVRSYMSLGGTSIGTARCKEFRERAGRLQGAYNMIKNGIDALVVCGGDGSLTGADLFRSEWPSLVKELVDTGKLTKEEVSPYEHLTIVGLVGSIDNDMSGTDVTIGAFSALERITEMVDYIGATAASHSRAFVVEVMGRHCGWLALLSGLATGADFVFIPERPPKAGLWKEQLKEVCLRHREYGRRKTTVIVAEGAIDDELNPITSEEVKQVLADLGLDTRNTILGHVQRGGTAVAFDRRLATLQGVEAVKAVLEMTPDTPSPMIGILKHKIVRIPLVDAVKQTKAVAEAISNKDFDKAMSLRDNSFYDDYRYFRDISIYDDGSKQLSEDKRLNIAIVHVGAASAGLNAATRAVALYSLSRGHKLYAVQDGFAGLVKGDLKNLTWMDVEGWHSLGGSEIGTNRSLPSQNIGKVAYNLQKFNIQGLLIVGGFEAFTSLHELSEQKANYPIFEIPMVVVPATVSNNVPGTEYSLGADTCLNQLVSYCDAVQQSASSTRRRVFVVEVQGGHSGYVASYCGLITGALATYTPESNINLRELQGDIDLLQKVFATDRGEDHNGTLIVRNEQASAVYSTQLIADILKENANKRFETRTAIPGHVQQGFTPSANDRVMAVKFSLKAMEFIETRNGCYGKHDRKFSDEEISEHSQVVIGIHGDVVKFTCIKHLYDNEANVALRKGKTVHWTDMIDVANILNGKSLLKKQERY

SEQ ID NO: 5886 - protein, 174 aa, Griffithsia japonica
MSTNTATLQSGAKMPLNGFGTWKASVEETEQAVTAALRAGYRHIDCAAVYWNEAAVGTAISKAISGGVVKREDLFITSKVWNTCHATDKVVDSCRQSLKDHQVDYFDLFLVRDIGVSNYSVALLVDTLNYARIKPSVNQCEAHVYFARPQLRDVCREFGVHLPCTPSSQRPKGR

SEQ ID NO: 5887 - protein, 346 aa, Rubrobacter xylanophilus DSM 9941
MKAMALAAGKGTRLFPLTGEVPKPMAPVVNTPIIEHIFALLASHGMRKVYVNVHYLADALLNAYGQTSRINGMEVHLSREERLMGTAGGVKRLADRFDETFVVVSGDALTDIDLGELVAFHREKGALATIALKRVYDTSEFGVVDIDAGGNIRGFQEKPPPEEAISTLANTGIYVLEPRALEYIPEDTFFDFAKDVFPQLLEAGEKFVGYQGDFYWSDIGTLSAYRQAHYDVLSGKVRVRIPGEKRSKGLWIGEDAKIHPSASFEGYVVIGGDAVIGRDVVLSGSVTVGRDCWIRRGATIKSSILLPGSTVGDGAYLEDCIVGHGYDVRPGEIIRGGALIRRPPGH

SEQ ID NO: 5888 - protein, 211 aa, Magnaporthe grisea 70-15
MADLGGFLPNAVVLIGDSGVGKSNLLSRFTRNEFNLDSKSTIGVEFATRSIQVDSKTIKAQIWDTAGQERYRAITSAYYRGAVGALLVYDISKHQTYENVTRWLKELRDHADANIVIMLVGNKSDLRHLRAVPTEEAKAFASENHLSFIETSAFDASNVELAFQNILTEIYRIVSSKALDSGDTPSMPQTGTNIALSNPTEDSAAKNGKCC

SEQ ID NO: 5889 - protein, 521 aa, Vigna radiata
MLLELALGLLVLALFLHLRPTPTAKSKALRHLPNPPSPKPRLPFIGHLHLLKDKLLHYALIDLSKKHGPLFSLYFGSMPTVVASTPELFKLFLQTHEATSFNTRFQTSAIRRLTYDSSVAMVPFGPYWKFVRKLIMNDLLNATTVNKLRPLRTQQIRKFLRVMAQGAEAQKPLDLTEELLKWTNSTISMMMLGEAEEIRDIAREVLKIFGEYSLTDFIWPLKHLKVGKYEKRIDDILNKFDPVVERVIKKRREIVRRRKNGEVVEGEVSGVFLDTLLEFAEDETMEIKITKDHIKGLVVDFFSAGTDSTAEATEWALAELINNPKVLEKAREEVYSVVGKDRLVDEVDTQNLPYIRAIVKETFRMHPPLPVVKRKCTEECEINGYVIPEGALILFNVWQVGRDPKYWDRPSEFRPERFLETGAEGEARPLDLRGQHFQLLPFGSGRRMCPGVNLATSGMATLLASLIQCFDLQVLGPQGQILKGGDAKVSMEERAGLTVPRAHSLVCVPLARIGVASKLLS

SEQ ID NO: 5890 - protein, 521 aa, Trifolium pratense
MLLELALGLLVLALFLHLRPTPTAKSKALRHLPNPPSPKPRLPFIGHLHLLKDKLLHYALIDLSKKHGPLFSLYFGSMPTVVASTPELFKLFLQTHEATSFNTRFQTSAIRRLTYDSSVAMVPIGPYWKFVRKLIMNDLLNATTVNKLRPLRTQQIRKFLRVMAQGAEAQKPLDLTEELLKWTNSTISMMMLGEAEEIRDIAREVLKIFGEYSLTDFIWPLKHLKVGKYEKRIDDILNKFDPVVERVIKKRREIVRRRKNGEVDEGEVSGVFLDTLLEFAEDETTEIKITKDHIKGLVVDFFSAGTDSTAVATEWALAELINNPKVLEKAREEVYSVVGKDRLVDEVDTQNLPYIRAIVKETFRMHPPLPVVKRKCTEECEINGYVIPEGALILFNVWQVGRDPKYWDRPSEFRPERFLETGAEGEARPLDLRGQHFQLLPFGSGRRMCPGVNLATSGMATLLASLIQCFDLQVLGPQGQILKGGDAKVSMEERAGLTVPRAHSLVCVPLARIGVASKLLS

SEQ ID NO: 5891 - protein, 521 aa, Trifolium pratense
MLLELALGLLVLALFLHLRPTPTAKSKALRHLPNPPSPKPRLPFIGHLHLLKDKLLHYALIDLSKKHGPLFSLYFGSMPTVVASTPELFKLFLQTHEATSFNTRFQTSAIRRLTYDSSVAMVPFGPYWKFVRKLIMNDLLNATTVNKLRPLRTQQIRKFLRVMAQGAEAQKPLDLTEELLKWTNSTISMMMLGEAEEIRDIAREVLKIFGEYSLTDFIWPLKHLKVGKYEKRIDDILNKFDPVVERVIKKRREIVRRRKNGEVVEGEVSGVFLDTLLEFAEDETTEIKITKDHIKGLVVDFFSAGTDSTAVATEWALAELINNPKVLEKAREEVYSVVGKDRLVDEVDTQNLPYIRAIVKETFRMHPPLPVVKRKCTEECEINGYVIPEGALILFNVWQVGRDPKYWDRPSEFRPERFLETGAEGEARPLDLRGQHFQLLPFGSGRRMCPGVNLATSGMATLLASLIQCFDLQVLGPQGQILKGGDAKVSMEERAGLTVPRAHSLVCVPLARIGVASKLLS

SEQ ID NO: 5892 - protein, 259 aa, Digitalis lanata
MSSKPRLEGKVAIITGAASGIGEETARLFVEHGASVVVADVQDELGRQVVASVNSDDKISYYHCDVRDEKQVAATVRYAVEKYGRLDIMLSNAGVFGALMTNVIDLDMVDFENVLATNVRGVANTIKHAARAMVEGKVKGSIICTASVSASLGGMGPPAYTASKHAVLGLVKGACAELGVHGIRVNSVAPYGVATPMPCSAYGMTPSQMEEANNSRANLKGVVLKAKHVAEAALFLASDESAYVSGQNLAVDGGFTVVR

SEQ ID NO: 5893 - protein, 521 aa, Pisum sativum
MLLELALGLFVLALFLHLRPTPSAKSKALRHLPNPPSPKPRLPFIGHLHLLKDKLLHYALIDLSKKHGPLFSLSFGSMPTVVASTPELFKLFLQAHEATSFSTRFQTSAVRRLTYDNSVAMVPFGPYWKFVRKLIMNDLLNATTVNELRPLRTQQIRKFLRVMAQSAEAQKPLDVTEELLKWTNSTISMMMLGEAEEIRDIAREVLKIFGEYSLTDFIWPLKYLKVGKYEKRIDDILNKFDPVVERVIKKRREIVRRRKNGEVVEGEASGVFLDTLLEFAEDETMEIKITKEQIKGLVVDFFSAGTDSTAVATEWALAELINNPRVLQKAREEVYSVVGKDRLVDEVDTQNLPYIRAIVKETFRMHPPLPVVKRKCTEECEINGYVIPEGALVLFNVWQVGKDPKYWDRPSEFRPERFLETGAEGEAGPLDLRGQHFQLLPFGSGRRMCPGVNLATSGMATLLASLIQCFDLQVLGPQGQILKGDDAKVSMEERAGLTVPRAHSLVCVPLARIGVASKLLS

SEQ ID NO: 5894 - protein, 378 aa, GIBBERELLA ZEAE PH-1
MGSYSPTSRFKDLDTIPLDPHYALKETFQADPDPRKVILGSGLYRDDDSKPWVLPVVKKVLFGPQSLNESRLVSIQTISGTGANFLGARFLAETLKPSAVWLSDPSWVNHANIWGLVNVNVKRYPYWNAKTKSLDFNNMIEKLQTDAIAGDVILLHACAHNPTGVDPNKEQWRKIADVCERKQLFPLFDCAYQGFATGNLDDDAWAIRHFIDRGTMELAVCQSFSKNMGLYGERVGALHMFCATSTDAEKVRGHLCRLQRGQISQPPTNGARIAATILSDSKLFQDWVTDLGEMSSRIKEMRKSLYDNLMILDTPGKWDHIVSQIGMFSYTGLTPEQVASIQQDSHVYILKSGRISVAGLNSKNVDKSVVEFAIVGMK

SEQ ID NO: 5895 - protein, 519 aa, Lycopersicon esculentum
MPADPDNSSAMNDSTGSGEASVSSSGNQVVPLKESAKKKRNLPGMPDPDAEVIALSPTTLLATNRFVCEICSKGFQRDQNLQLHRRGHNLPWKLRQRSSNEVKKRVYVCPESSCVHHDPSRALGDLTGIKKHFCRKHGEKKWKCDKCSKKYAVQSDLKAHSKICGTREYKCDCGTLFSRAFCDALAQESAKTLPEKPPSTNEEPKTQAVASSSPPPSPPAPPPATESQPPPPPPAAPKSLMTPTVPPSTAVMSFASSVQNRELRENPVTNSAGAATKQVVEEAAVVASLTGNCSSSCSNGSSSSNVFGSLFASSTASGSLPSQAPVFSDIFRAMAPEHTLEMAPPSSTEPISLGLAMSHSSSIFRPAGQERRQYAPAPQPAMSATALLQKAAQMGAAATSSSFLRGIGVMSSTSSSNGHQEWSGRPSDANGASLAAGLGLGLPCDAGSGLKELMLGTPSVFGPKHPTLDLLGLGMAASVGPSPGLSALLTSMGSNLDMVTSAGSFGSADFSGKDLGRNS

SEQ ID NO: 5896 - protein, 208 aa, Gossypium klotzschianum
VYYWECKGYTPLFPRILGHEASGIVESVGEGVNDLKPGDHVLPIFTGECKECRHCLSEESNNMCELLRINCDRGVMLADGKTRFSINGKPIYHFVGTSTFSQYTVVHVGQVAKISPTAPLDKVCPISCGICTGFGATVNVAKPKKGQTVAVFGLGAVGLAAAEGARVCGASRIIAVDVNPRRFEEAKRFGITEFVNPKDYDKPVQEVI

SEQ ID NO: 5897 - protein, 348 aa, Kluyveromyces wickerhamii
MSIPKTQKAVVFYKHGGALEYKEIPVPTPKANEILINVKYSGVCHTDLHAWQGDWPLDTKLPLVGGHEGAGVVVALGANVKGWKIGDFAGIKWLNGSCMACEYCELSNEPNCPEADLSGYTHDGSFQEYATADAVQAARIPAGTDLAAVAPILCAGVTVYKALKSAHLKAGDWVAISGACGGLGSLAIQYANAMGYRVIGIDAGEEKAALFKELGGEYFVDFIKSKDVIKEINDVTKGGAHGVINVSVSENAIEDSTKYVRSNGTVVLVGLPKGAQAKSDVFSQVVKSISIVGSYVGNRADTREALDFFSRGLVHAPIKIVGLSELASIYDKMSKSQVVGRYVVDTSK

SEQ ID NO: 5898 - protein, 215 aa, Gossypium klotzschianum
DVYYWECKGYTPLFPRILGHEASGIVESVGEGVNDLKPGDHVLPIFTGECKECRHCLSEESNNMCELLRINCDRGVMLADGKTRFSINGKPIYHFVGTSTFSQYTVVHVGQVAKISPTAPLDKVCPISCGICTGFGATVNVAKPKKGQTVAVFGLGAVGLAAAEGARVCGASRIIAVDVNPRRFEEAKRFGITEFVNPKDYDKPVQEVIVEMTGG

SEQ ID NO: 5899 - protein, 248 aa, Zea mays
MAVAVPNAPGRLFLLQSTPFPNPSSSASAARAQSFRVPPLRLSLFRRMAGRSLTVIAGASGGSERDLSASAVSVEALDSVASDSDLETKEPSVSTMLTSFENSFDKYGALSTPLYQTATFKQPSATDYGTYDYTRSGNPTRDVLQSLMAKLEKADQAFCFTSGMAALAAVTHLLQAGQEIVAGEDIYGGSDRLLSQVVPRNGIVVKRVDTTKISDVVSAIGPSTRLVWLESPTNPRQQITDIKTISEI

SEQ ID NO: 5900 - protein, 209 aa, Gossypium davidsonii
VYYWECKGYTPLFPRILGHEASGIVESVGEGVNDLKPGDHVLPIFTGECKECRHCLSEESNNMCELLRINCDRGVMLADGKTRFSINGKPIYHFVGTSTFSQYTVVHVGQVAKISPTAPLDKVCPISCGICTGFGATVNVAKPKKGQTVAVFGLGAVGLAAAEGARVCGASRIIAVDVNPRRFEEAKRFGITEFVNPKDYDKPVQEVIV

SEQ ID NO: 5901 - protein, 371 aa, Kluyveromyces wickerhamii
MLRLTQTKTISPLRAAIGSIRTMASVPETQKGVIFYENGGKLEYKDIPVPVPKPNEILINVKYSGVCHTDLHAWKGDWPLATKLPLVGGHEGAGVVVGMGSNVKGWKIGDLAGIKWLNGSCMSCELCEQGFESNCAHADLSGYTHDGSFQQYATADAVQAAQIPKGTDLAEVSPILCAGVTVYKALKSANLKAGDWVAISGAAGGLGSLAVQYAKAMGYRVLGIDGGADKGKLVKELGGEVFIDFTKSKDMVADIQEATNGGPHGVINVSVSEGAINASTQYVRPTGTVVLVGLPAGAVIKSEVFSHVVKSINIKGSYVGNRADTREAIDFFVNGKVKSPIHVVGLSELPSVYELMEQGKILGRYVVDTSK

SEQ ID NO: 5902 - protein, 215 aa, Gossypium aridum
DIYYWECKGYTPLFPRILGHEASGIVESVGEGVNDLKPGDHVLPIFTGECKECRHCLSEESNNMCELLRINCDRGVMLADGKTRFSINGKPIYHFVGTSTFSQYTVVHVGQVAKISPTAPLDKVCPISCGICTGFGATVNVAKPKKGQTVAVFGLGAVGLAAAEGARVCGASRIIAVDVNPRRFEEAKRFGITEFVNPKDYDKPVQEVIVEMTGG

SEQ ID NO: 5903 - protein, 156 aa, Haemophilus influenzae
NRANTPVLVDGKDVMPEVNAVLAKMKDFCQRIISGEWKGYTGKAISDVVNIGIGGSDLGPYMVTEALRPYKNHLNMHFVSNVDGTHIAETLKKINPETTLFLVASKTFTTQETMTNAQSARDWLLKAAKDESAVAKHFAALSTNAKDVEKFGIDTN

SEQ ID NO: 5904 - protein, 214 aa, Gossypium aridum
DIYYWECKGYTPLFPRILGHEASGIVESVGEGVNDLKPGDHVLPIFTGECKECRHCLSEESNNMCELLRINCDRGVMLADGKTRFSINGKPIYHFVGTSTFSQYTVVHVGQVAKISPTAPLDKVCPISCGICTGFGATVNVAKPKKGQTVAVFGLGAVGLAAAEGARVCGASRIIAVDVNPRRFEEAKRFGITEFVNPKDYDKPVQEVIVEMTG

SEQ ID NO: 5905 - protein, 211 aa, Gossypium schwendimanii
DVYYWECKGYTPLFPRILGHEASGIVESVGEGVNDLKPGDHVLPIFTGECKECRHCLSEESNNMCELLRINCDRGVMLADGKTRFSINGKPIYHFVGTSTFSQYTVVHVGQVAKISPTAPLDKVCPISCGICTGFGATVNVAKPKKGQTVAVFGLGAVGLAAAEGARVCGASRIIAVDVNPRRFEEAKRFGITEFVNPKDYDKPVQEVIVE

SEQ ID NO: 5906 - protein, 216 aa, Gossypium schwendimanii
DVYYWECKGYTPLFPRILGHEASGIVESVGEGVNDLKPGDHVLPIFTGECKECRHCLSEESNNMCELLRINCDRGVMLADGKTRFSINGKPIYHFVGTSTFSQYTVVHVGQVAKISPTAPLDKVCPISCGICTGFGATVNVAKPKKGQTVAVFGLGAVGLAAAEGARVCGASRIIAVDVNPRRFEEAKRFGITEFVNPKDYDKPVQEVIVEMTGGG

SEQ ID NO: 5907 - protein, 369 aa, Oryza sativa (japonica cultivar-group)
MGKGGKGAEAAAAAVAGAGEEENMAAWLVAKNTLKIMPFKLPPVGPYDVRVRMKAVGICGSDVHYLREMRIAHFVVKEPMVIGHECAGVIEEVGSGVTHLAVGDRVALEPGISCWRCRHCKGGRYNLCEDMKFFATPPVHGSLANQIVHPGDLCFKLPENVSLEEGAMCEPLSVGVHACRRADVGPETGVLIMGAGPIGLVTLLAARAFGATRVVIVDVDEHRLSVARSLGADAAVRVSARAEDVGEEVERIRAAMGGDIDVSLDCAGFSKTVATALEATRGGGKVCLVGMGHNEMTVPLTSAAIREVDVVGIFRYKDTWPLCIEFLRSGKIDVKPLITHRFGFSQEDVEEAFEVSARGRDAIKVMFNL

SEQ ID NO: 5908 - protein, 509 aa, Medicago sativa
MTMAGPGQLNVIESPSRGSRSVDCFEKLEQIGEGTYGMVYMAREIETGEIVALKKIRMDNEREGFPITAIREIKILKKLHHENVIKLKEIVTSPGPEKDDQGRPDGNKYKGGIYMVFEYMDHDLTGLADRPGMRFTVPQIKCYMRQLLTGLHYCHVNQVLHRDIKGSNLLIDNEGNLKLADFGLARSFSNEHNANLTNRVITLWYRPPELLLGTTRYGPAVDMWSVGCIFAELLHGKPIFPGKDEPEQLNKIFELCGAPDEVNWPGVTKTPWYNQFKPSRPMKRRLREVFRHFDRHALELLEKMLTLDPAQRIPAKDALDAEYFWTDPLPCDPKSLPKYESSHEFQTKKKRQQQRQNEENAKRLKMQNPQQHTRLPPIQQGGHAQMRQGPNHLIHGSQPAGAAGPSHHYGKPRGPSGGPGRYPPGGNPSGGYNHPNRGGQGGGAGYGSGPYPPQGRGAPYGSSGMPAGTGGGPRGGGGFGAPNYPQGGPPYGGSAAGRGNRNQQYGWQQ

SEQ ID NO: 5909 - protein, 391 aa, Prochlorococcus marinus subsp. marinus str. CCMP1375
MPIQPAFGNKDLNPQEVRKNQLISSRLSSIYERWGYEEVSPPKVERLETLTACGGISNKEIVKLVADDPIGLRPDMTASIARAASTRLAYKDRPLRLWTSGTIFKSKEDCDGKFVIEEGLQSGVELIGISDMAAEIELLYLLLDSMNQLEICSNQNPILLIGHQSILKLILSGISNDYKNKIQKYLTNYDLVETEDLDIDIEIKNKLLKVLKIRGNPSDVLDKLVNIYGSNTLFDELRRLFLIIEPISKKYGVSIQLDPTYQPHFKLYNGLIFQLICQTDYAPKVIARGGRYDDLVNSFTTSIENETGAGFSFSIDKIRELKLKVEYDDKKVARTLIAFSKSKRYEDALEKQLEIHRKGSMAMVELKPCDTKKEAEFLVNKRGFDKLVWIS

SEQ ID NO: 5910 - protein, 559 aa, Apium graveolens
MGSSGVSWKLADHPKLPKGKVVAMIVLDGWGEAHDNQYNCISVAETPTMDSLKNGAPDRWRLVRAHGTAVGLPTEDDMGNSEVGHNALGAGRIFAQGAKLCDLALESGKIYDGEGFNYIKESFESGTLHLIGLLSDGGVHSRIDQVLLLVKGASERGAKRIRVHALTDGRDVLDGSSVAFVETLQNYLSELREQGIDAQIASGGGRMYVTMDRYENDWDVVKRGWDAQVLGEAPYKFKSALEAVKTLRAEPKANDQYLPPFVIVDESGKAVGPIVDGDAVVTFNFRADRMVMAAKAFEYEDFDKFDRVRVPKIRYAGMLQYDGELKLPNHYLVSPPEIDRTSGEYLTHNGVRTFACSETVKFGHVTFFWNGNRSGYFDSEMEEYVEVPSDSGITFNVQPKMKALEIAEKARDAILSGKFHQVRVNLPNSDMVGHTGDIAATVVACKAADEAVKMILDTIEQVGGIYVVTADHGNAEDMVKRNKKGEPALDKDGKIQILTSHTLEPVPIAIGGPGLLPGVRYRKDVPSGGLANVAATVMNLHGFVAPDDYETTLIEVVDN

SEQ ID NO: 5911 - protein, 201 aa, Arabidopsis thaliana
MRSKSLLPFFDSAYQGFASGSLDTDAQSVRTFVADGGECLIAQSYAKNMGLYGERVGALSIVCKSADVASKVESQVKLVVRPMYSSPPIHGASIVATILKSSDMYNNWTIELKEMADRIKSMRQQLFEAIQARGTPGDWSHIIKQIGMFTFTGLNKEQVEFMTKEFHIYMTSDGRISMAGLSSKTVPHLADAMHAAVTRLG

SEQ ID NO: 5912 - protein, 407 aa, Oryza sativa
MALSISTPPTSSSLLPASLQVRPPAPPPPPLSDELSFARFGRSSRPFHPFLVTAAASSSSGRQVELVGGDVTELDAVASFSEIVPDTVVFDDFEKFAPTAATVSSSLLLGIAGLPDTKFKSAIDTALADGECNTMEKPEDRMSCFLTKALANVGAEMAHLVPGRVSTEIDARLAYDTQGIIQRVHELLKLYSDHDVLSERLLFKIPATWQGIEASRLLESEGIQTHLTFVYSFAQAAAAAQAGASVVQIFVGRVRDWARTHSGDPEIDEALKKGEDAGLALAKKVYAYIHKNGYKTKLMAAAIRNKQDVFSLLGIDYIIAPLKILQSLEESVTDTDVKYGYVPRLTPALGKTYNFTEEELVKWDQLSLAAAMGPAAEELLASGLEGYVNQARRVEELFGKIWPPPNV

SEQ ID NO: 5913 - protein, 154 aa, Griffithsia japonica
MNPEYDYLYKNLLIGDSGVGKSCLLLRFADDTYTESYISTIGVDFKIRTIELDGKTIKLQIWDTAGQERFRTITSSYYRGAHGIIIVYDVTDQESFNNVKSWLQEIDRFASEHVCKLLVGNKNDMTSKKVVDTETAKNFADSLGIKFLETSAKT

SEQ ID NO: 5914 - protein, 500 aa, Lupinus albus
FLHLRPTPTAKSKALRHLPNPPSPKPRLPFIGHLHLLKDKLLHYALIDLSKKHGPLFSLYFGSMPTVVASTPELFKLFLQTHEATSFNTRFQTSAIRRLTYDSSVARVPFGPYWKFVRKLIMNDLLNATTVNKLRPLRTQQIRKFLRVMAQGAEAQKPLDLTEELLKWTNSTISMMMLGEAEEIRDIAREVLKIFGEYSLTDFIWPLKHLKVGKYEKRIDDILNKFDPVVERVIKKRREIVRRRKNGEVVEGEVSGVLLDTLLEFAEDETMEIKITKDHIKGLVVDFFSAGTDSTAVATEWALAELINNPKVLERAREEVYSVVGKDRLVDEVDTQNLPYIRAIVKETFRMHPPLPVVKRKCTEECEINGYVIPEGALILFNVWQVGRDPKYWDRPSEFRPERFLETEAEGEARPLDLRGQHFQLLPFGSGRRMCPGVILATSGMATLLASLIQCFDLQVLGPQGQILKGGDAKVSMEERAGLTVPRAHSLVCVPLARIG

SEQ ID NO: 5915 - protein, 499 aa, Trifolium repens
SHLRPTPSAISKALRHLPNPPSPRPRLPFIGHLHLLKDKLLHYAPIDLSKKHGPLFSLSFGSMPTVVASTPELFKLFLQTHEATSFNTRFQTSAIRHLTYDNSVAMVPFGPYWKFVRKLIMNDLLNATTVNKLRPLRTQQIRKFLRVMAQSAEAQKPLDVTEELLKWTNSTISMMMLGEAEEIRDIAREVLKIFGEYSLTDFIWPLKYLKVGKYEKRIDDILNKFDPVVERVIKKRREIVRRRKNGEVVEGEASGVFLDTLLEFAEDETMEIKITKEQIKGLVVDFFSAGTDSTAVVTEWALAELINNPRVLQKAREEVYSVVGKDRLVDEVDTQNLPYIRAIVKETFRMHPPLPVVKRKCTEECEINGYVIPEGALVLFNVWQVGRDPKYWDRPSESRPERFLETGAEGEAGPLDLRGQHFQLLPFGSGRRMCPGVSLATSGMATLLASLIQCFDLQVLGPQGQILKGDDAKVSMEERAGLTVPRAHSLVCVPLARIG

SEQ ID NO: 5916 - protein, 288 aa, Cucurbita pepo
MSSSQDPQLVQQQSVVDVEEFVSVENPDSKRSQFGSLFKNHYPPGFSRKLVAEVIATYLLVFVTCGAAALNGSDAQRVSQLGASVAGGLIVTVMIYAVGHISGAHMNPAVTTAFAATRHFPWKQVPLYAAAQLSGATCAAFTLRLLLHPIKHLGTTTPSGSDLQALVMEIVVTFSMMFVTCAVATDTKAVGELAGLAVGSAVCITSILAGPVSGGSMNPVRTLGPAMASDNYKGLWVYFVGPVTGTLLGAWSYKFIRASDKPVHLISPHSFSLKLRRMSRSDVGEGER

SEQ ID NO: 5917 - protein, 500 aa, Trifolium repens
FLHLRPTPTAKSKALRHLPNPPSPKPRLPFIGHLHLLKDKLLHYALIDLSKKHGPLFSLYFGSMPTVVASTPELFKLFLQTHEATSFNTRFQTSAIRRLTYDNSVAMVPFGPYWKFVRKLIMNDLLNATTVNKLRPLRTQQIRKFLRVMAQSAEAQKPLDVTEELLKWTNSTISMMMLGEAEEIRDIAREVLKIFGEYSLTDFIWPLKYLKVGKYEKRIDDILNKFDPVVERVIKKRREIVRRRKNGEVVEGEASGVFLDTLLEFAEDETMEIKITKEQIKGLVVDFFSAGTDSTAVATEWALAELINNPKVLQKAREEAYSVVGKDRLVDEVDTQNLPYIRAIVKETFRMHPPLPVVKRKCTEECGINGYVIPEGALVLFNVWQVGRDPKYWDRPSEFRPERFLETGAEGEAGPLDLRGQHFQLLPFGSGRRMCPGVNLATSGMATLLASLIQCFDLQVLGPQGQILKGDDAKVSMEERAGLTVPRAHSLVCVPLARIG

SEQ ID NO: 5918 - protein, 489 aa, Trichodesmium erythraeum IMS101
MLDYDVVIVGGTITGIYAAITATKLQGRVALIQPPPTEINTVTSPIFSNTQGFNHNKIISKIANFVEQIHHKKQFGIYEGTDDSGEVWVKFQEAKKYADYVVNNQLAKYEPEVLATLGIDVIFGEGKFVDRPKLAFVVKGRHLRSRKYLLATPSQPIIPAIPGLISTGFITPEEIQELSKVPETLAVIGGDPSGIEIAQSFSRLGTQVTIVVKNSHILGKEDSEAAFLVQAQLEAEGIRILTQTEVSQVRKIKNKKWILARNEAIEVDEIILAAGNKANLQTLNLEAVGVKFNGHKLLLNKKLQTSNYRIYGCGDLMGGYSFRHVANYEARVAIKNILYLPIFSVNYSGIPWAIFSDPQLARVGLTEQQARRRYGENVFVHRQYLKHQDWAQILNKTTGYCKIVGHSNGKILGVSVVGNQASEIIHVMALAIREGITIEAIADLPHIWPTASEINGQTATVWLRQKRENNKIVKDCLLNLFHWRRSLIE

SEQ ID NO: 5919 - protein, 499 aa, Beta vulgaris
LHLRPTPTAKSKALRHLPNPPSPKPRLPFIGHLHLLKDKLLHYALIDLSKKHGPLFSHYFGSMPTVVASTPELFKLFLQTNEATSFNTRFQTSAIRRLTYDSSVAMVPFGPYWKFVRKLIMNDLLNATTVNKLRPLRTQQIRKFLRAMAQGAEARKPLDLTEELLKWANSTISMMMLGEAEEIRDIAREVLKIFGEYSLTDFIWPLKHLKVGKYEKRIDDILNKFDPVVERVIKKRREIVRRRKNGEVVEGEVSGVFLDTLLEFAEDETMEIKITKDHTKGLVVDFFSAGTDSTAVATEWALAELINNPKVLEKAREEVYSVVGKDRLVDEVDTQNLPYIRAIVKETFRMHPPLPVVKRKCTEECEINGYVIPEGALIPFNVWQVGRDPKYWDRPSEFRPERFLETGAEGEARPLDLRGQHFQLLPFGSGRRMCPGVNLATSGTATLLASLIQCFDLQVLGPQGQILKGGDAKVSMEERAGLTVPRAHSLVCVPLARIG

SEQ ID NO: 5920 - protein, 500 aa, Beta vulgaris
FLHLRPTPTAKSKALRHLPNPPSPKPRLPFIGHLHLLKDKLLHYALIDLSKKHGPLFSLYFGSMPTVVASTPELFKLFLQTHEATSFNTRFQTSAIRRLTYDSSVAMVPFGPYWKFVRKLIMNDLLNATTVNKLRPLRTQQIRKFLRVMAQGAEAQKPLDLTEELLKWTNSTISMMMLGEAEEIRDIAREVLKIFGEYSLTDFIWPLKHLKVGKYEKRIDDILNKFDPVVERVIKKRREIVRRRKNGEDVEGEVSGVFLDTLLEFAEDETMEIKITKDHIKGLVVDFFSAGTDSTAVATEWALAELINNPKVLEKAREEVYSVVGKDRLVDEVDTQNLPYIRAIVKETFRMHPPLPVVKRKCIEECEINGYVIPEGALILFNVWQVGRDPKYWDRPSEFRPERFLETGAEGEARLLDLRGQHFQLLPFGSGRRMCPGVNLATSGMATLLASLIQCFDLQVLGPQGQILKGGDAKVSMEERAGLTVPRAHSLVCVPLARIG

SEQ ID NO: 5921 - protein, 82 aa, Moorella thermoacetica ATCC 39073
MVRTLYVGNLPWATSEEELARAFASHGEVLSARIITDRQTGRSRGFGFVEVNDADADQMIAAMNGAELGGRILTVNEARARS

SEQ ID NO: 5922 - protein, 374 aa, Kluyveromyces wickerhamii
MFRLARAQSSIANKSVARHFLRLNSTYAIPETQKGVIFYENGGELHYKDLPVPVPKPNEILINVKYSGVCHTDLHAWKGDWPLAVKLPLVGGHEGAGIVVAKGENVTNFEIGDLAGIKWLNGSCMSCELCEQGYESNCLKADLSGYTHDGSFQQYATADAVQAAQIPKGTDLAEIAPILCAGVTVYKALKTADLKPGQWVAISGAAGGLGSLAVQYAKAMGLRVLGIDGGDGKEELFKKCGGEVFIDFRKSKNMVADIQEATNGGPHGVINVSVSEAAISMSTEYVRPTGTVVLVGLPANAYVKSEVFSHVVKSISIKGSYVGNRADTREAIDFFTRGLVKSPIKVIGLSELPEAYELMEQGKILGRFVVDTYK

SEQ ID NO: 5923 - protein, 348 aa, Saccharomyces bayanus
MSIPKTQKGVIFYESHGKLEYKDIPVPTPKANELLINVKYSGVCHTDLHAWHGDWPLPVKLPLVGGHEGAGVVVAMGENVKGWNIGDYAGIKWLNGSCMACEYCELGNESNCPHADLSGYTHDGSFQQYATADSVQAAHIPKGTDLAECAPVLCAGITVYKALKSANLSAGQWVAISGAAGGLGSLAVQYAKAMGYRVVGIDGGEGKEELFRSIGGEVFIDFTTEKDIVGAVIKATDGGAHGIINVSVSEAAIEASTRYCRANGTTVLVGMPAGAKCCSDVFNQVVKSISIVGSYVGNRADTREALDFFARGLVKSPIKVVGLSTLPEIYEKMEKGQIVGRYVVDTSK

SEQ ID NO: 5924 - protein, 418 aa, GIBBERELLA ZEAE PH-1
MSLSNKLSIADVDVKGKKVLIRVDFNVPLDADKNITNNQRIVGALPTIKYALENGAKSVILMSHLGRPNGSPNEKYSLKPVVAELEKLLSKKVTFAPDCVGPEVEEIVNKAEDGSVILLENLRFHIEEEGSSKDKEGNKTKADKAQVEAFRKGLTALGDVYINDAFGTAHRAHSSMVGVDLPQKASGFLVKKELEYFAKALENPQRPFLAILGGAKVSDKIQLIDNLLDKVNTLIICGGMAFTFKKTLENVSIGNSLFDEAGSKTVGNLVEKAKQKGVKLVLPVDYITADKFDKDANTGYATDKDGIPDGWQGLDCGEESVKLYKEAIADAKTILWNGPAGVFEFEKFASGTKATLDAVVDAVQKDGKIVIIGGGDTATVAKKYGVEDKISHVSTGGGASLELLEGKELPGVTALSSK

SEQ ID NO: 5925 - protein, 189 aa, Zea mays
  unsure (1)..(189): unsure at all Xaa locations
MDPTKFRPSSSHDTTVTTTNAGAPVWNDNEALTVGPRGPILLEDYHLIEKGAHFPRERIPERVVDPRGASPQGFFQXAPHLTALTWGQFLGAARGGTPRNRGFSTGVHQRGAPENIPEPRGVPREVYPPQGNWELVGNNFPRFFIREGIKFPHVVHAVQPHPRSHVEEYWRVVQFLAHLPERLDTFFFL

SEQ ID NO: 5926 - protein, 501 aa, Glycine max
MARKMLIDGEAELAQGGGEEVSNFDFDLFIIGAGSGGVRAARFSSNFGAKVGICELPFHPISSETIGGVGGTCVIRGCVPKKILVYGASFGGDLEDARNYGWELSEKVDFNWKKLLQKKTDEINRLNGLYKRMLSNWGVKLFEGEGKIVGPNEVEVTQLDGTKLSYTAKHILIATGSRAQRPNIPGQELGITSDEALSLEDLPKHAVVLGGGYIAVEFASIWRGMGSTVDLVFRKELPLRGFDDEMRAAVARNLEGRGINLHPRTNLTQLIKTEDGIKVITDHGEELIADAVLFATGRAPNSKRLNLETVGVELDNTGAIKVDEYSRTSIPSIWAVGDVTNRMNLTPVALMEASYFAKTVFGGQTIKPDYSNIPYAVFSIPPLSVVGLSEEQAIEQTNGDLLVFTSTFNPMKNTISGRQEKTVMKLVVDAETDKVLGASMCGPDAPEIMQGIAVALKCGATKAQFDSTVGIHPSAAEEFVTMRSVTRRVAGTGSVKPKTNL

SEQ ID NO: 5927 - protein, 436 aa, Actinobacillus pleuropneumoniae serovar 1 str. 4074
MAKIVKVIGREIIDSRGNPTVEAEVHLEGGFVGLAAAPSGASTGSREALELRDGDKSRFLGKGVLKAVSAVNNEIAQAILGKDGSAQAEIDQIMIDLDGTDNKSKFGANAILAVSLATAKAAAASKGLPLYAYIAELNGTPGVYSMPLPMMNIINGGEHADNNVDIQEFMIQPVGASTLKEALRIGAEVFHNLAKVLKSKGLNTAVGDEGGFAPNLASNADALACIKEAVEKAGYVLGKDVTLAMDCASSEFYNKENGLYEMKGEGKSFTSQEFTHYLEGLCNEYPIKSIEDGQDESDWEGFAYQTKVLGGKIQLVGDDLFVTNTKILKEGIEKGIANSILIKFNQIGSLTETLAAIKMAKDAGYTAVISHRSGETEDATIADLAVGTAAGQIKTGSMSRSDRVAKYNQLIRIEEALAAAGTPAPFNGLKEVKGQA

SEQ ID NO: 5928 - protein, 348 aa, Saccharomyces bayanus
MSIPKTQKGVIFYESNGKLEHKDIPVPTPKPNELLINVKYSGVCHTDLHAWHGDWPLATKLPLVGGHEGAGVVVAMGENVRGWKVGDLAGIKWLNSSCMACEYCELGNESNCPHADLSGYTHDGSFQQYATADAVQAVHIPEGTDLAEVAPILCAGITVYKALKSANLRAGHWVAISGAAGGLGSLAVQYAKAMGYRVVGIDGGPGKEELFTSLGGEVFIDFTKEKDIVGAVIKATDGGAHGIVNVSVSEAAIEASTRYCRANGTVVLVGLPAGAKCTSDVFNHVVKSISIVGSYVGNRADTREALDFFARGLVKSPIKVVGLSHLPEIYEKMEKGQIAGRYVVDTYK

SEQ ID NO: 5929 - protein, 269 aa, Methanococcoides burtonii DSM 6242
MHLTEKRIGFIGTGKMGESLIRGILAAHSEITLNASDVYKPALERLNNELGINVSTDNTETIGDSDVVVLAVKPQILKDVLVAIKDSITADKLVISIAAGVSVTAIEDELNEGTRVVRVMPNIAATVAEAASAVCAGKNATEDDMEVALEMFQSIGSAITIPEKLMDAVTGLSGSGPAYIFPVIEALADGAVHEGLDRANAITLAAQTVLGAAKMVLETGMHPGELKDMVTSPAGTTIRGIHTLEESGIRAAFMNAVIESSKRSKELGK

SEQ ID NO: 5930 - protein, 375 aa, Saccharomyces bayanus
MLRTSTLFTRRVQPSLFARNILRLQSTIAIPQTQKGVIFYENNGKLHYKDIPVPEPKPNEILINVKYSGVCHTDLHAWHGDWPLPVKLPLVGGHEGAGVVVKLGSNVKGWKVGDLAGIKWLNGSCMTCEFCESGHESNCPDADLSGYTHDGSFQQFATADAIQAAKIQQGTDLAEVAPILCAGVTVYKALKEANLKAGDWVAISGAAGGLGSLAVQYATAMGYRVLGIDAGAEKEKLFKQLGGEVFIDFTKTKDMVSDIQEATKGGPQGVINVSVSEAAISLSTEYVRPTGTVVLVGLPANAYVKSEVFSHVIKSINIKGSYVGNRADTREALDFFSRGLIKSPIKIVGLSELPMVYDLMEKGKILGRYVVDTSK

SEQ ID NO: 5931 - protein, 220 aa, Gossypium schwendimanii
DIYYWECKGYTPLFPRILGHEASGIVESVGEGVNDLKPGDHVLPIFTGECKGCRHCLSEESNNMCELLRTNCDRGVMLADGKTRFSINGKPIYHFVGTSTFSQYTVVHVGQVAKISPTAPLDKVCPISCGICTGFGATVNVAKPKKGQTVAVFGLGAVGLAAAEGARVCGASRIIAVDVNPRRFEEAKRFGITEFVNPKDYDKPVQEVIVEMTGGGVDRS

SEQ ID NO: 5932 - protein, 686 aa, Bacillus subtilis subsp. subtilis str. 168
MSDDQNKRVNEHSKDEQLEQYRTDNSGKKMTTNQGLRVSEDEHSLKAGVRGPTLMEDFHFREKMTHFDHERIPERVVHARGFGVHGFFQVYEPMTEYTRAKFLQDPSVKTPVFVRFSTVAGSKGSADTVRDARGFATKFYTEEGNYDLVGNNIPVFFIQDAIKFPDLVHAFKPEPHNEMPQAATAHDTFWDFVANNPESAHMVMWTMSDRGIPRSYRMMEGFGVHTFRFVNEQGKARFVKFHWKPVLGVHSLVWDEAQKIAGKDPDFHRRDLWETIENGGKVEYELGVQMIDEEDEFKFDFDILDPTKLWPEELVPVKIIGKMTLNRNQDNVFAETEQVAFHPGNVVPGIDFTNDPLLQGRLFPYTDTQLIRLGGPNFHEIPINRPVCPFHNNQYDGYHRMTINKGPVAYHKNSLQNNDPSPATAEEGGYVHYQEKVEGKKIRQRSDSFNDYYSQAKLFWNSMSPVEKQHIISAFCFEVGKVKSKDVQRQVVDVFSNVDADLAEEIAKGVGVAAPAKRKASKENLTSPALSQARTVKTASTRKVAVLAGNGFHEKELQTVLEALKQEGITVDIISQNLGYMTSGSGQQLEASGTFLTVDSVLYDAVYAAGGLELKDNKQAMAFIREAYNHYKAIGAANEGIDLLQSSVGTTEGLGIVTAKDEPDYTAFSKAFIDAVAAHRHWDRRI

SEQ ID NO: 5933 - protein, 423 aa, Haemophilus influenzae R2866
MAKTIQAIRGMNDCAPTESPLWQWIEAQVRNVLNSYGYSEVRMPIVESTPLFARAIGEVTDVVSKEMYTFWDNDEQLTLRPEGTAGCVRAAIEHGWIYNNEQRLWYIGPMFRHERPQKGRYRQFHQVGVEVFGIANPEIDAELIMLTYRLWKALGIDQHVTLQLNSIGSLEARANYRSALVGFLENHQDLMNDEEKERLVRNPLRILDTKNPELQKVLDNAPKLLDYLDDESRAHFEQLCSLLDAVGIQYEINPKLVRGLDYYNKTVFEWVTSALGAQGTVCGGGRYDGLVEQLGGHATPSIGFAMGLERLVLLVQEVNPNIPVKSAVDIYVVYQGEGATLAAFELAEKVRSELPHLNTMLHCSGGNFKKQFKRADKSGATLALVIGESEVQNKQVVVKHLQGGTDQQTLDLVNIIDYLQTQF

SEQ ID NO: 5934 - protein, 220 aa, Gossypium schwendimanii
DVYYWECKGYTPLFPRILGHEASGIVESVGEGVNDLKPGDHVLPIFTGECKECRHCLSEESNNMCELLRTNCDRGVMLADGKTRFSINGKPIYHFVGTSTFSQYTVVHVGQVAKISPTAPLDKVCPISCGICTGFGATVNVAKPKKGQTVAVFGLGAVGLAAAEGARVCGASRIIAVDVNPRRFEEAKRFGITEFVNPKDYDKPVQEVIVEMTGGGVDRS

SEQ ID NO: 5935 - protein, 351 aa, Saccharomyces bayanus
MSSQAIPESQKAIVFYETNGKLEYKDIAVPEPKANEILVHVKYSGVCHSDLHAWRGDWPFQLKFPLIGGHEGAGVVVKLGSNVKGWKVGDLAGIKWLNGTCMSCEYCEVGNESQCPHLDGTGFTHDGTFQEYATADAVQAAHLPENVDLAEVAPILCAGVTVYKALKRANLIPGQWVTISGACGGLGSLAIQYATAMGYRVIGIDEGETKKQLFEGLGGEVFIDFTKEKDIVGAVIKATDGGSHGVINVSVSEAAIEASTRYCRPNGTVVLVGMPAHAYCKSDVFNQVVKSISIVGSCVGNRADTREALDFFARGLIKSPIHLASLSDVPEIFEKMEKGEIVGRYVIDTSK

SEQ ID NO: 5936 - protein, 289 aa, Streptococcus pneumoniae
MKGIILAGGSGTRLYPLTRAASKQLMPVYDKPMIYYPLSTLMLAGIRDILIISTPQDLPRFKELLQDGSEFGIKLSYAEQPSPDGLAQAFIIGEEFIGDDSVALILGDNIYHGPGLSKMLQKAAKKEKGATVFGYHVKDPERFGVVEFDENMNAISIEEKPEQPCSNYAVTGLYFYDNDVVEIAKSIKPSPRGELEITDVNKAYLDRGDLSVELMGRGFAWLDTGTHESLLEASQYIETVQRMQNVQVANLEEIAYRMGYISREDVLTLAQPLKKNEYGQYLLRLIGEV

SEQ ID NO: 5937 - protein, 280 aa, Oryza sativa
  unsure (1)..(280): unsure at all Xaa locations
MMAEALREXVLPLPYFPGQPCWYLQERRGAEAWSAEENKVFERALAQVDLDSPNRWEMXVAAMLPRKTVIDVVNHYRDLENDVGSIEAGLVPFPHYSSSLSPASSGFTLQDWDGSDGRFRHSGYLKRGRAPDQERKKGVPWXEEEHKSFLMGLKKYGRGDWRNISRYFVTSRTPTQVASHAQKYFIRLNSGGKDKRRSSIHDITTVNLPEEDTSNPSPSPPSVLTAHSSPSAAAVGEQSGVPVDGKPPPPALGRGAGHHHFMPHPYAQVKIEKNNSHITG

SEQ ID NO: 5938 - protein, 533 aa, Prochlorococcus marinus subsp. marinus str. CCMP1375
MNFPDFNNNNKDDQWERFSQLLFYDEEIGFWLDISRMKFSSEDIGSLQDNFKEACKSMKALEKGSIANIDESRQVGHYWLRNASLAPSKQTSNSIRNEINDIKTFGENILNGKITTAQGKPFTDVLWIGIGGSGLGPLLIVNSLQDNNKGLNFSFLDNVDPNGINKTLNSFRDKLSTTLFVVVSKSGGTPEPQIAMDQTRFFLDKNGLDWSSRAVAITMEGSSLDQIAENEKWLKRFDLPDWVGGRTSITASVGLLPLVLIGEDIDSFLDGASQMDQITRRIDIYKNPSALLAASWYFSGAGKGKRDMVVLPYQDRLQVFSKYLQQLVMESLGKEEDRNANKVNQGLAVYGNKGSTDQHAYVQQLRDGIDNFFVTFVEILEDCTEIPKINKKSPGDYLSGFLQGTRLALSENDRQSITITIKKFNSYTLGSLIALFERAVGIYAELIDINAYHQPGVEAGKKAASNILKLQSEIELLLEDGKLYSIEGIMNTIPGSSQESIYIILRHLSNNDHTYKFVGNLSDPRELQIKKAV

SEQ ID NO: 5939 - protein, 487 aa, Chlorobium tepidum
MSIAADSGGDALHTTSYVMQQADTLAAQFDVAVIGSGPGGYEAAIHAARYGLKTCIVEKAVLGGVCVNWGCIPTKALLRSAEVFDLAKNPETFGVNVGNVSFDLAQAVKRSRNVALKSSKGVAYLLKKAAVEVLAGEAVLTGGAGVMVTMPDGSVRMLGAKNIIVATGSTPRVIPGLEPDGKKIITSREALILKEVPKSMIVVGGGAIGVEMAWFYAKAGSKVTIVELMPRMLPAEEAEVSEALKRSFEKAGITVHCGAKLDNVAVSESGVSAELVVEGSAPQTLNASCLLVAVGVTGAIDGLGLDAVGVETERGFIRTDGQCRTSAPGIYAIGDVRGGMLLAHKASAEAAIAVEAIAGKSPEPLSEPLIPRCVYAQPSVASVGLTEEAAVNAGYQVAVGRSQFAASGKANAYGQLEGFVKLVFDAATGKMLGGHLIGHDAVELIGELGLACRYGVTAGGLVNTVHAHPTLSETVREAAFDALQSMG

SEQ ID NO: 5940 - protein, 335 aa, Oryza sativa (indica cultivar-group)
MAVYDQSGDRNRTQIDTSRKRKSRSRGDGTTVAERLKRWKEYNETVEEVSTKKRKVPAKGSKKGCMKGKGGPENSRCSFRGVRQRIWGKWVAEIREPNRGSRLWLGTFPTAQEAASAYDEAAKAMYGPLARLNFPRSDASEVTSTSSQSEVCTVETPGCVHVKTEDPDCESKPFSGGVEPMYCLENGAEEMKRGVKADKHWLSEFEHNYWSDILKEKEKQKEQGIVETCQQQQQDSLSVADYGWPNDVDQSHLDSSDMFDVDELLRDLNGDDVFAGLNQDRYPGNSVANGSYRPESQQSGFDPLQSLNYGIPPFQLEGKDGNGFFDDLSYLDLEN

SEQ ID NO: 5941 - protein, 85 aa, Triticum aestivum
WLSSATCVAPFQGLKCTGVLRVSRRSNGASLGSVSIGGRIRCMHVWSFEGIKKFETLSYLPPLSTVALLKQVDYLMRSKRVPWLE

SEQ ID NO: 5942 - protein, 343 aa, Acinetobacter sp. ADP1
MGSLMKAAVVTAFNQPLEIKDVEIPKVTSGKVLVKMIATGVCHTDLHAMHGDWPIKPSLPFIPGHEGVGEVVEIGEGITHLKIGDTVGVPWLYSACGHCDHCYAGWETLCKQQQNSGYSVNGSFAEYCLADGEYVGVIPEGVDLLEIAPILCAGVTVYKGLKMTEAKTGDWVAISGIGGLGHVAVQYAKTMGFNVVAIDVDDSKLELAKQLGADVGINALKVDVKEEVLKATGEGCHGVLVTAVSPKAFEQAVSVVRRGGTMVLNGLPPGKFDLSIFDMVLDGITVRGSIVGTRLDLKEALDIAARGKVKAHISVEPLENINDIFERMEQGKIDGRIVIDLKL

SEQ ID NO: 5943 - protein, 647 aa, Arabidopsis thaliana
MESKCLMFVSIVSVFFMVVNGVSETETLLKFKNSLVIGRANALESWNRRNPPCKWTGVLCDRGFVWGLRLENLELSGSIDIEALMGLNSLRSLSFINNKFKGPFPEFKKLVALKSLYLSNNQFDLEIPKDAFDGMGWLKKLHLEQNNFIGEIPTSLVKSPKLIELRLDGNRFTGQIPEFRHHPNMLNLSNNALAGQIPNSFSTMDPKLFEGNKGLCGKPLDTKCSSPYNHSSEPKSSTKKTSSKFLYIVAAAVAALAASLIIIGVVIFLIRRRKKKQPLLSAEPGPSSLQMRAGIQESERGQGSYHSQNRAAKKMIHTTKLSFLRDDKGKFELQDLLKASAEILGSGCFGASYKTLLSNGSVMVVKRFKHMNSAGIDEFQEHMKRLGRLNHENLLPIVAYYYKKEEKLFVSDFVANGSLAAHLHGHKSLGQPSLDWPTRFNIVKGVGRGLLYLHKNLPSLMAPHGHLKSSNVLLSEKFEPLLMDYGLIPMINEESAQELMVAYKSPEYVKQSRVTKKTDVWGLGVLILEILTGKLLESFSQVDKESEEDLASWVRSSFKGEWTQELFDQEMGKTSNCEAHILNLMRIGLSCCEVDVEKRLDIREAVEKMEDLMKEREQGDDDFYSTYASEADGRSSRGLSSEGINLS

SEQ ID NO: 5944 - protein, 369 aa, Ralstonia eutropha JMP134
MRVFKLPDLGEGLQEAEIVTWHVKVGDTVAADQPLLSVETAKAIVEIPSPYAGTIGKLFAQAGDLVHLGAPLASFEGAGNDADAGTVVGAVKVGSHVVAESATPLSGGAAGAGIKATPAVRALARRLGVDLAMANPSGPDGVVTAADVERVASTLAETGPGEVLRGVRRAMAQNMARAQSEVAAATVMDDADIHAWQGAHDVTIRLVRALVAGCRAEPGLNGWYEGQTGKRHVMQKIDVGIAADLPEGLFVPVLRNVGNRDAADLRHGLDRMRADIRARTIAPEEMRGNTITLSNFGMIAGRYAAPIVVPPTVAILGAGHIRDEVVAANGVPAVHRVIPLSLTFDHRVVTGGEAARFLAAVIADLALPE

SEQ ID NO: 5945 - protein, 386 aa, Chlorobium tepidum TLS
MGLSLGERCGLVMQSDIRAMSIECARMGGINLSQGVCDTPVPPVVLQGAADAVMQGANIYTHHTGIRELREAIVAKQRRFTGVAFDAEREVVVSAGATGAMYCAFQALLNRGDEVIVFEPFYGYHVSTLRAVEAVPLFVPLDPSDGWSFRVEALEAAVTPKTKALLINTPANPSGKVFSCDELALLAEFAIRHDLFVFTDEMYEHFVFGGLSHVSMASMPGMRERTITISGLSKTFSVTGWRIGYALCDPRWAASIGYFNDLFYVCAASPLQVGVTAGLRLLGDDYYHGLAAEYEVRRDLFCAALAEAGLEPHVPQGAYYVLAGTERLPGATAREKAMHILRETGVASVPGSAFYHDGGGENLVRFCFAKESHVLEAACEKLLKLR

SEQ ID NO: 5946 - protein, 636 aa, Magnaporthe grisea 70-15
MQSLFAFLLFPLLAAAQYHEQLVLRPLPLSALLASFNFRANTTIADFEAHNYRLFPRSLAQILQHAGTRELHLRFGLGRWDAESWGARPWDGTREGGTGVELWAWLDASTDEEADRKWLTLTNALSGLFCASLNFIDGTRTTRPVMSFQPEGDHPNVTAANMHLLYGTLPREVVCTENLTPFLKLLPCKGKAGIASLLDGHKLFDASWQSMAIDVRPVCSEDGGCVLEIEQTIDMVLDLDRAKRPRDNPIPRPPPSEELKCDTTKEYHNEHTCFPADYTAHQDWTLSKVFGRSMQGSCPLANSDVPPVCMQIPESRSVYTSEGVHEIKNPDGRSRCFKVDDGALVELVLAEPSQESSAHPESPGADFESRGLLKPEVPALYAERSLTGHGAERGGVQTIFTNPSPDKEIEFVYMESLPWFMRIYLHTLTARVADSEIDSRGSTVSAGQAQAKGDKKVIQEIYYRPALDRARGSQVEVRMRVPPASTVFLTYDFEKSILRYTEYPPDANRGFDVASAVVTILNSNQSSSTSSRNANLRTASVLLSLPTPDFSMPYNVIILSSTAIALGFGGLFNILVRRFVGADEGPRPGLANGLARLKQKIKGKFGANKTPGKDDAPTLASAGDQGADGSKQQALT

SEQ ID NO: 5947 - protein, 483 aa, Gloeobacter violaceus PCC 7421
MRRAAGDRPVAGPMRELLQGPGVENPPASSGPYLQRQAQRESNARSYPRRIPFAFKKAEGVYLTSVEGKQYIDCLAGAGALPLGHNHPVAIQAIQTVIRGKFPLLTLDLPTPLKDRFVDELFACLPAEFARNARIQFCSPAGTDAVEAALKLVKTATARRGILSFQGAYHGMSHGSLSLTGNLAAKVVPNLMPEVQFLPYPYELRCPFGLGGEVGYRTGLHYIENLLKDPEGGVPSPAGIILEVVQGEGGVIPAPDEWLRGLRRITQEQQIPLIVDEIQTGFGRTGKLFAFEHSGIVPDVLLLSKAIGGGLPLAVVVYRESLDRWQPGAHAGTFRGNQLAMATGLATLRHILEHRLWEHAQVMGERLLTHLHQIRSSWIGEVRGRGLMLGVEIVDPTGEPDYRGIAPHAGAMARRIQAECLERGVIVEVGGRDGSVVRFLPPLIVTDSQIDTIAEVFHDAVHAATRITSTAPDSRIALPTAAL

SEQ ID NO: 5948 - protein, 351 aa, Saccharomyces kluyveri
MSAPQIPETQKAVIFYENGGELQYKDIPVPKPKSNEILINIKYSGVCHTDLHAWKGDWPLPTKLPLVGGHEGAGIVVGMGENVKGWKIGDYAGIKWLNGSCMSCEYCELSNESNCPDADLSGYTHDGSFQQYATADAVQAARIAPGTDLAEVAPVLCAGITVYKALKSANLRAGEWVAISGACGGLGSLAIQYAKAMGYRVLGIDGGDEKAALFKELGGEVFIDFTKTKDVVKAVVDATNGGAHGVINVSVSEAAIEASTVYCRANGTVVLVGLPGGAKCKSDVFNQVVKSISIVGSYVGNRADTREALDFFSRGLVKSPIMIVGLSELPSIYEKMEKGAIVGRYVVDTSK

SEQ ID NO: 5949 - protein, 485 aa, Nitrosomonas europaea ATCC 19718
MDDAKKKLTTSAGAPVADNQNVMTAGPRGPMLLQDIWFLEKLAHFDREVIPERRMHAKGSGAYGTFTVTHDITRYTRANIFSQIGKKTDLFVRFSTVAGERGAADAERDIRGFAIKFYTEEGNWDLVGNNTPVFFLRDPLKFPDLNHAVKRDPRTNLRSARNNWDFWTLLPEALHQITIVMSDRGLPATYRHMHGFGSHTFSFINARQERYWVKFHFRTQQGIKNLTDAEAEALVGKDRESHQRDLYESIENGEFPRWTLFVQIMPESDAASLPYNPFDLTKVWPHKDYPLIEVGVMELNRNPENYFAEVEQAAFNPASVVPGISFSPDKMLQGRLFSYGDAQRYRLGVNHYQIPVNAPRCPFHHYHRDGAMRVDGNQGSTLGYEPNSYQEWQQQPEYAEPPLTLEGAAAHWNHRVDEDYYIQPGNLFRLMNSSQQQVLFDNTARSIGEAPREIQIRHITNCLKADRAYGEGVARALGIALSEVD

SEQ ID NO: 5950 - protein, 321 aa, Parasitella parasitica
MVVDYLTLDRTEDKMPLRGFGCWKIEKKDAENTIYQAIKIGYRLFDGACDYGNEVEVGRGINKAIKEGLVKREELFIVTKLWNTFHSKQHVRTAFDRQLKDWGLEYFDLYLIHFPIPLQYVDPAVSYPPEWYVPHADKLNFERSPIHECWAEMEKLVQAKLTRNIGVANFNCQAILDLLSYAKIKPAVLQIEIHPLLPQERLVKWVQEQGIQVTAYSSFGPTSYVDLCESGKTYSSLLANADVKSIANKHNANTGQILLRYALDRNIAVIPKSVHEDRMKSNLDILNIQLDQDDRKILNSLKTNQRFNDPMIFGFGLPLFD

SEQ ID NO: 5951 - protein, 216 aa, Gossypium lobatum
DIYYWECKGYTPLFPRILGHEASGIVESVGEGVNDLKPGDHVLPIFTGECKECRHCLSEESNNMCELLRINCDRGVMLADGKTRFSINGKPIYHFVGTSTFSQYTVVHVGQVAKISPTAPLDKVCPISCGICTGFGATVNVAKPKKGQTVAVFGLGAVGLAAAEGARVCGASRIIAVDVNPRRFEEAKRFGITEFVNPKDYDKPVQEVIVEMTGGG

SEQ ID NO: 5952 - protein, 219 aa, Eremothecium gossypii
MSNNEDYGYDYDYLFKIVLIGDSGVGKSNLLSRFTTDEFNVNSKSTIGVEFATRTIEVEGKKVKAQIWDTAGQERYRAITSAYYRGAVGALIVYDISKSSSYENCNHWLTELRENADENVAVGLIGNKSDLAHLRAVPTDEAKNFAQGNQMLFTETSALNAENVDLAFRELITAIYQMVSKNQVDLSENNGSGTVPRGPTISLAPAPSEKSKKKTNNCC

SEQ ID NO: 5953 - protein, 292 aa, Sphingomonas sp. S88
MKGIILAGGSGTRLYPATLSISKQLLPVYDKPMIFYPLSVLMLTGIRDILIISTPRDLPMFQALLGDGSAFGINLSYAEQPSPNGLAEAFIIGADFVGNDPSALILGDNIYHGEKMGERCQAAAAQASQGGANVFAYHVDDPERYGVVAFDPETGVATSVEEKPANPKSNWAITGLYFYDKDVVDIAKSIQPSARGELEITDVNRIYMERGDLHITRLGRGYAWLDTGTHDSLHEAGSFVRTLEHRTGVKIACPEEIAFESGWLGADDLLKRAAGLGKTGYAAYLRKLVAAA

SEQ ID NO: 5954 - protein, 215 aa, Gossypium lobatum
IYYWECKGYTPLFPRILGHEASGIVESVGEGVNDLKPGDHVLPIFTGECKECRHCLSEESNNMCELLRINCDRGVMLADGKTRFSINGKPIYHFVGTSTFSQYTVVHVGQVAKISPTAPLDKVCPISCGICTGFGATVNVAKPKKGQTVAVFGLGAVGLAAAEGARVCGASRIIAVDVNPRRFEEAKRFGITEFVNPKDYDKPVQEVIVEMTGGG

SEQ ID NO: 5955 - protein, 156 aa, Haemophilus influenzae
NRANTPVLVDGKDVMPEVNAVLAKMKDFCQRIISGEWKGYTGKAITDVVNIGIGGSDLGPYMVTEALRPYKNHLNMHFVSNVDGTHIAETLKKVNPETTLFLVASKTFTTQETMTNAQSARDWLLKASKDESAVAKHFAALSTNAKDVEKFGIDTN

SEQ ID NO: 5956 - protein, 219 aa, Gossypium lobatum
DIYYWECKGYTPLFPRILGHEASGIVESVGEGVNDLKPGDHVLPIFTGECKECRHCLSEESNNMCELLRINCDRGVMLADGKTRFSINGKPIYHFVGTSTFSQYTVVHVGQVAKISPTAPLDKVCPISCGICTGFGATVNVAKPKKGQTVAVFGLGAVGLAAAEGARVCGASRIIAVDVNPRRFEEAKRFGITEFVNPKDYDKPVQEVIVEMTGGGVDR

SEQ ID NO: 5957 - protein, 1118 aa, Lycopersicon esculentum
MSSSSTTNKTNCSRGSSARSRRSARVIAQTPVDAKLHVEFEESEQQFDYSSSVNLSNSTSNVPSSTVSDYLQKMQRGSLIQPFGCMIAIDAQNFAVIAYSENAPEMLDLTPHAVPSIEQQEALTFGTDVRKLFRSSGASALEKAVSFGELSLLNPILVHCKNSGKPFYAILHRIEVGLVIDLEPVDPHEVPVTTAGAIKSYKLAAKAIRKLQSLPSGDISLLCDVLVREVSHLTGYDRVMVYKFHEDEHGEVVAECRTPELEPYLGLHYPATDIPQASRFLFMKNKVRMICDCLAPPIRVIQDPRLAQSLSLGGSTLRAPHGCHAQYMTNMGTVASMAMSVMINEQDDELDSDQQVGRKLWGLVVCHHTCPRFLSFPLRYASEFLLQVFSVQVNKEVEMAAQLKEKQILQIQTVLCDMLLRDAPMGIVTQSPNVMDLVKCDGAALYYRNKLWLHGVTPAESQIRDIAEWLNESHGDSTGLNTDSLMEAGFPGASVLGDAVCGMAAVKITSKDFLFWFRSHTAKEIKWGGAKHLPGDKDDGRKMHPRSSFKAFLEVVKRRSLPWEDVEMDAIHSLQLILRGSLQDEAADCSKMIVNVPAVDTIIDRVDTLHINDMVRLVETASMPVLAVDTSGRINGWNSKVSELTGLPVENVIGVPLVDLVIGGTTNTIKRVLSLALQGKEEKNVEIKLRTLGPQEKVGSISIVVNACCSRDFKQNIVGVCFTGKDVTGLKLIKDKYSRVQGDYVGIIHSPSPLIPPIFVMDEQGRCVEWNDAMHKLTGSKREEVIDQMLLGEVFTVNSFGCRVKDQDTLTQLTILLNRVIAGGEGEKLFFGLFNKQDKYIEALISANKKVDDDGRVTGVLCFLHVPSPELQYAMHVQKLSEQAAKNSLKKLAYVRLELKNPLNGINCIQNLLKSSDLSKDQRQLLKTSTMCQKQLAKIIDDTDIESIEECYTEMNSCEFNLGEVVTVVINQVMILSQERKVQVTWDSPVEVSQLYLIGDNLRLQQVLSDFLTTAILFTPFEDSSVHFRVIPRKERIGTKMYIMHLEFRITHPSPGIPDDLIQHMFHYSRSISREGFGLYISQKLVKIMDGTVQYLREADRSSFIILVEFPLMEKKNN

SEQ ID NO: 5958 - protein, 156 aa, Haemophilus influenzae
NRANIPVLVDGKDVMPEINAVLAKMKDFCQRIISGKWKGYTGKAITDVVNIGIGGSDLGPYMVTEALRPYKNHLNMHFISNVDGTHIAETLKKINPETTLFLVASKTFTTQETMRNAQSARDWLLKAAKDESAVAKHFAALSTNAKDVEKFGIDTN

SEQ ID NO: 5959 - protein, 219 aa, Gossypium lobatum
DIYYWECKGYTPLFPRILGHEASGIVESVGEGVNDLKPGDHVLPIFTGECKECRHCLSEESNNMCELLRINCDRGVMLADGKTRFSINGKPIYHFVGTSTFSQYTVVHAGQVAKISPTAPLDKVCPISCGICTGFGATVNVAKPKKGQTVAVFGLGAVGLAAAEGARVCGASRIIAVDVNPRRFEEAKRFGITEFVNPKDYDKPVQEVIVEMTGGGVDR

SEQ ID NO: 5960 - protein, 467 aa, Rhodopseudomonas palustris CGA009
MATYDLVVIGTGPGGYVCAIRAAQLGLKVAVVEKNATLGGTCLNVGCMPSKALLHASELFEEAGHSFAKMGIGVSAPKLDLPAMMNFKQQGIDGNVKGVEYLMKKNKIDVLVGKGKILGTGKVEVTGADGKATSVEAKSIVIASGSAVAQLKGIEIDEKRVVSSTGALSLDKVPGKLIVVGAGVIGLELGSVWRRLGAEVTVVEFLDRILPGMDGEVVKQFQRILEKQGFAFKLGAKVTGVDTSGAKLAVKVEAAAGGNPETLEADVVLVAIGRVPYTEGLGLKEAGVALDERGRVVIDDHFATSLKGVYAIGDVVRGPMLAHKAEDEGVAVAELIAGKAGHVNYDVIPGVVYTTPEVSSVGKTEEDLKQAGVAYTVGKFPFTANGRSKVNQTTDGFVKILADAKTDRVLGVHIIGREAGEMIHEAAVLMEFGGSAEDLARTCHAHPTRSEAIKEAALTVGKRAIHM

SEQ ID NO: 5961 - protein, 489 aa, Cucumis sativus
MLGQKQAEEAIVPTTANEVEHGGGKEEGEEADGGEQPQNSVFQMKNLLWHGGSAWDAWFSCASNQVAQVLLTLPYSFAQFGMLSGIIFQIFYGLIGSWTAYLISVLYIEYRSRKEKENVNFKNHVIQWFEVLDGLLGPHWKALGLAFNCTFLLFGSVIQLIGCASNIYYINDHLDKRTWTYIFGACCATTVFIPSFHNYRIWSFLGLGMTTYTAWYLAARALIHGQTEGVTHSGPTKLVLYFTGATNILYTFGGHAVTVTVEIMQSDVETQKFKYIYLMATLYVFTLTLPSASAVYWAFGDELLNHSNAFSLLPKNRFRDAAVILMLIHQFITFGFACTPLYFVWEKVIGMHDTKSLCLRALVRLPVVVPIWFLAIIFPFLGPINSAVGALLVSFTVYIIPAAAHMLTYRKASAKQNAAEKPPFFLPSWTAMYVLNSFIVVWIFVFGFGFGGWATITNFVRQINSFGLFAKCYQCKPSHPPAPPPTHRH

SEQ ID NO: 5962 - protein, 406 aa, Escherichia coli
MSQPITRENFDEWMIPVYAPAPFIPVRGEGSRLWDQQGKEYIDFAGGIAVNALGHAHPELREALNEQASKFWHTGNGYTNEPVLRLAKKLIDATFADRVFFCNSGAEANEAALKLARKFAHDRYGSHKSGIVAFKNAFHGRTLFTVSAGGQPAYSQDFAPLPADIRHAAYNDINSASALIDDSTCAVIVEPIQGEGGVVPASNAFLQGLRELCNRHNALLIFDEVQTGVGRTGELYAYMHYGVTPDLLTTAKALGGGFPVGALLATEECARVMTVGTHGTTYGGNPLASAVAGKVLELINTPEMLNGVKQRHDWFVERLNTINHRYGLFSEVRGLGLLIGCVLNADYAGQAKQISQEAAKRGVMVLIAGGNVVRFAPALNVSEEEVTTGLDRFAAACEHFVSRGSS

SEQ ID NO: 5963 - protein, 360 aa, Cytophaga hutchinsonii
MEKKIAVLKGDGIGPEVTDQALKVLKAVEKTFGHKFHYTEALVGAVAIDATGNPFPEETLKVCQSSDAILFGAIGHPKYDNDPKAKVRPEQGLLAMRKALGLFANIRPVNTYKILENASPLRADLVQNVDFVVFRELTGGIYFGTRGRSEDGNMAFDTCTYTRDEILRISKLAFESARQRKNHVTLVDKANVLASSRLWREVVKEYHAANFADVTLDFMFVDNAAMKIIQQPAFFDVVLTENMFGDIITDEASVITGSMGMLPSASVGSVVGLYEPIHGSYPEGAGLNIANPNGAILSAALLLETSFGMVAEAKAIRAAVEKAMEDGILTIDIRREKPNSTTEVGDYVANLVAKGASVVA

SEQ ID NO: 5964 - protein, 136 aa, Triticum aestivum
  unsure (1)..(136): unsure at all Xaa locations
MAPAVMASSATTVAPFQGLKSTAGLPVGRRSSGSLXQASSNGGRIRCMQVWPIEGIKXKFENLSYLATLSKXGLLKQVHYLIRSXKWVAXLXFNKXGFXXRXXNXSPGYXEGRYWAMXELPMFRCTDPNKVLXEGE

SEQ ID NO: 5965 - protein, 163 aa, Zea mays
  unsure (1)..(163): unsure at all Xaa locations
MAMAVSGAVLSGLGSSFLTGGKRSATALGSGVGTGAQRVGRKTLIVAAAAAQPKKSWIPAVKGGGNFLDPEWLDGSLPGDFGFDPLGLGKDPAFLKWYREAELIHGRWAMAAVLGIFVGQAWSGVAWFEAGAQPDAIAPFSFGSVLXNQIXLMDGVXXKXGVS

SEQ ID NO: 5966 - protein, 272 aa, Griffithsia japonica
RFVQACTRRLMSDVPVGVFISGGLDSSLVASIAKKHLPDGYVFHSFSCGLEGSPDVRAAQKVADYLGTKHHVLTFTVEDGISALRDVIYHLETYDVTTIRASTPMYLLSRLCKQYVKVVLSGEGADEVYGGYLYFHNAETERDFHEETVRRVKLLYTSDVLRGDRSTAAQSLELRVPFLDRDFLDVSMSFSAQDKVTQKGKRIEKWPMRQAFAKEFCGEEFLPDDILWRSKEQFSDGVGYNWIDGLKEFCDKEVSDKLLANASDKFPHQPPK

SEQ ID NO: 5967 - protein, 440 aa, Exiguobacterium sp. 255-15
MRTYDCIVIGTGSAGNQAAYKFAEKGLNVAIIENFTPGGTCAQRGCDAKKILLTGSEAKDAVERLLGYGLKGLVSIDWRQLMERKNEYTRAIPEQTRNRYDEVGIDYYHGEPRFLSNKKLLVDDIELEADQFLIATGLRPRELSVPGSERFLNSNEFLELRDVPRRLVCIGGGYISFEFAHLARIAGSEVTILLRSGALKQFEQDLVSVLLEATQALGIKILHETEAVSYSDTTLTLSDGTRLEADVVLNATGRVASIEHLQLEKAGVIYEEKGIHVNDYLQSSASNIYAAGDVAVSGNPALTPFAGTEGRLAACNMLEGNTRRLELLPVPSIVFTTPNLAKVGQTEASLKQNNTRYRGKLIDTSSWQTNVRIKDPFARAKVLIGEDDQILGAHFIGVHAAELANYFSFAMQHRIPSSALQKTSFAYPTPASDIASLLED

SEQ ID NO: 5968 - protein, 224 aa, Escherichia coli
  unsure (1)..(224): unsure at all Xaa locations
AEAAKPATAADSKAAFKNDDQKSAYALGASLGRYXENSLKEQEKLGIKLDKDQLIAGVQDAFADKSKLSDQEIEQTLQAFEARVKSSAQAKXEKDAADNEAKGKEYREKFAKEKGVKTSSTGLVYQVVEAGKGEAPKDSDTVVVNYKGTLIDGKEFDNSYTRGEPLSFRLDGVIPGWTEGLKNIKKGGKIKLVIPPELAYGKAGVPGIPPNSTLVFDVELLDVK

SEQ ID NO: 5969 - protein, 238 aa, Prunus tomentosa
AHYKSEADVGNAIAEAIQSGLVKREELFITSKASNHGHVVEACKSSLKKLQLDYLDLYLVHYPLATKHSGVGTTASLLDENKVLDIDVTVSLETTWHDMEKTVDLGLVRSIGLSNYELFLTRDCLSYAKIKPQVSQFETHPYFQRESLVRFCKKHGVVPMAHTPLGGATANVKAFGSISPLEDPVLIGLAKKYQKSVAQIALRWNIERGTPVIPKSSKVERLKENLEILNFKLEKEDI

SEQ ID NO: 5970 - protein, 245 aa, Escherichia coli
AEAAKPATAADSKAAFKNDDQKSAYALGASLGRYMENSLKEQEKLGIKLDKDQLIAGVQDAFADKSKLSDQEIEQTLQAFEARVKSSAQAKMEKDAADNEAKGKEYREKFAKEKGVKTSSTGLVYQVVEAGKGEAPKDSDTVVVNYKGTLIDGKEFDNSYTRGEPLSFRLDGVIPGWTEGLKNIKKGGKIKLVIPPELAYGKAGVPGIPPNSTLVFDVELLDVKPAPKADAKPEADAKAADSAKK

SEQ ID NO: 5971 - protein, 259 aa, Zea mays
  unsure (1)..(259): unsure at all Xaa locations
MASPEGTTWVFDCPLMDDLAVAADFAAAPAGGFFWAAPPSLQPQAPVQSVVAASAPNPCMEISSSVDCGQEKEQPTNKRPRSESTTESSTKASREKIRRDKLNERFLELDGILGIXGAILEPGKTPKMDKTAILSDAIRVVGELRSEAKKLKDSNENLQEKIKELKAEKNELRDEKQRLKAEKESLEQQIKFLNARPSLVPHHPVIPASAFPAPQGPAAAARHKLMVPVIGYPGFPMWQFMPPSDVDTSDDPRSCPPVA

SEQ ID NO: 5972 - protein, 143 aa, Oryza sativa
  unsure (1)..(143): unsure at all Xaa locations
RPRRPRVRNFPDSPEPIYGTQYLPRKFKIAVTVAGDNSGDILTNDIGVGVVSKXXXKPCGFNIYGGXGNXFAHRGEATFPRLADPLGYVXKEGILDAIKAIIVTQRGIXXRXYPPFSNAPDWQEELWDHDRHRDDNIVENKGN

SEQ ID NO: 5973 - protein, 252 aa, Prunus padus
AHYKSEADVGNAIAEAIQSGLVKREELFITSKASNHGHVVEACKNSLKKLQLDYLDLYLVHYPLATKHNGVGTTASLLDENKVLDIDVTVSLETTWHDMEKTVSLGLVRSIGLSNYELFLTRDCLSYAKIKPQVSQFETHPYFQRESLVRFCKKHGVIPMAHTPLGGATANVKAFGSISPLEDPVLLGLAKKYQKSVAQIALRWNIERGTPVIPKSSKVERLKENLEVLNFKLEKEDIELIDTIDKKSRTTL

SEQ ID NO: 5974 - protein, 347 aa, Magnaporthe grisea 70-15
MSDLPKTMKALQYSKPKEFAVVDVPLPELRDDDVLVKVKACGVCGTDLHIHEGEFIAKFPLIPGHETVGVVAAVGKDVKDFKVGDRVSADNAELCGHCFYCRRGESLLCENWAGHGTTLSGGFAEYCAYPQGKVFKFNNMTDVEATLIEPASCACHGLDKIKPRLGSSVLMFGAGPTGLMLAQLLRQNGCSQVTIAAPAGLKMDLARSLDAADTYVDLSREDSGPQLEQLKKDNPYGFDIVIEATGSVKILEDSINYCRRGGTLVVYGVYGDQDKVSWKPTKIFGDEIRIIGSFSEVFMFPQTIDYLDNGKVKTKGIVNKTFKLEQFGEALESIKNKSAIKAAIVFD

SEQ ID NO: 5975 - protein, 252 aa, Prunus caroliniana
AHYKSEADVGNALAEAFETGLVKREELFIISKASNHGHVVEACKDSLKKLQLDYLDLYLVHYPLATKHSGVGTTASLLDKNKVLDIDVTVSLESTWHDMEKTVSLGLVRSIGLSNYELFLTRDCLSYAKIKPQVSQFETHPYFQRETLVRFCRKHGVCPMAHTPLGGATANVKAFGSMSPLEDPVLHGLAKKYKKSVAQIALRWNIERDTPVIPKSSKVERLKENLEVLNFKLEKEDIELINTIDKKSRTTL

SEQ ID NO: 5976 - protein, 223 aa, Prunus caroliniana
  unsure (1)..(223): unsure at all Xaa locations
GLVKREELFITSKASNHGHVVEACKNSLKKLQLDYLDLYLVHYPLATKHSGVGTTASLLDXNKVLDIDVTVSLETTWHDMEKTVSLGLVRSIGLSNYELFLTRDCLSYAKIKPQVSQFETHPYFQRESLVKFCKKHGVTPMAHTPLGGATANVKSFGSISPLEDPVLLGLAKKYKKSVAQIALRWNIXRDTPVIPKSSKVERLKENLEVLNFKLGKEDIELIN

SEQ ID NO: 5977 - protein, 177 aa, Polytomella sp. Pringsheim 198.80
MSSRLYVGNLSWNAKEEDLRTYFGKFGEVEEASIALDRESGRSRGFGFVTLPADVAKDAIEKTNGAEFMGRNIKVNEASPPGERPPRTNNYGGGYGDFNGNGGGRDYGRGGYGRGNGGYGGRNAGYGGRGNFGGQGGYGDNRFGNDNFGGSYGGRGGYRGPRGPSAEENNSNNYGGY

SEQ ID NO: 5978 - protein, 661 aa, GIBBERELLA ZEAE PH-1
MPSNNAAWLVAAKTSPFEVKEAPLPEVTPGHILVKNSAVAINPVDIANQHVGIFIAESQYPVILGEDVAGTVESVGSDVTNFQTGDRVLGYATSLASKDNANSAFQEYTLIRADCASKIPEGLSFEQAAVLPLSVATAGWALFGDATLKMKFPSLNPEPTGETVLIWGGAASVGGTAIQLAKAAGYEVITTASTKNHEYVKSLGADHVFDYKSPHVTKDICSLLMSKKLAGALEASGSEEAMNSASQSIAHGDGLRKVICVRGPQSQLPDVKMQPIMSTSIIGTPVSKAVFGDYIPEALEQGKFKAVPEAEVVGEGLEAVQLGINTLAKGVSAKKIVVKIVLSVDLDYAPMSWGNLAMAKEQETIALIGLGTIGISFAALHLRYSNANIRLYDVRNDLQQHIESLLPVYLDSTKKEGNSDDLSVQKLISDGRIVICSSLEEACSNSTIVQEQGPDNVDFKKSTWAQVIEYAPSGAHLWSSTSGIQASKQVEDLQDKSRVLVVHPFNPNLGSGHRPVRINKETQGFVGNRLAFALFREACHLVADDVVSVQDLDTIVEASIAPRWAVAGPFNTYNSAGGTGGIAAFLHNLADTMEACWDDGAKVSLKGTSATRSGEERDESEDWTDKISKETEKVYGRPTTESLAKRDGNLQKIIAAQPNEA

SEQ ID NO: 5979 - protein, 222 aa, Picea mariana
MGRGKIEIKRIENTTNRQVTFCKRRNGLLKKAYELSVLCDAEVALIVFSSRGRLYEFANHSVKRTIERYKKTCVDNNHGGAISESNSQYWQQEAGKLRQQIEILQNANRHLMGDGLTALNIKELKQLEVRLEKGIGRVRSKKNEMLLEEIDIMQRREHILIQENEILRSKIAECQNSHNTNMLSAPEYDALPAFDSRNFLHANLIDAAHHYAHQEQTTLQLG

SEQ ID NO: 5980 - protein, 83 aa, Glycine max
  unsure (1)..(83): unsure at all Xaa locations
GSLFKRHSDYHTVVDEIGMKLDFMWAPYVTNLTSLVAGFKRNRVYPDLLVMGSGLWHMLHFTNASDYGFSLGVLRSSXNSLLP

SEQ ID NO: 5981 - protein, 714 aa, Synechocystis sp. PCC 6803
MDSPAILPTTRTLCPYCGVGCGLEAVASPQKSVVDAGHAHKIRGDRQHPSSQGMVCVKGATVMESMDKQRLLYPMFRSSLDQPWQQISWEAALEIVVDKIQQVKQTLGVSGLCMYASGQMQTEDYYVAQKLFKGCLGTNNFDTNSRLCMSSAVSAYSLSFGSDGPPCCYEDLEITDCAFLIGTNTADCHPIIFNRLRKHHKQNPHVKLIVVDPRCTATAEVADLHLAINPGSDITLLHGIAYLLKKWNLIDQKFIDNHTQDFEQYCQVIDHYPPEKVTQICGISLEQLETAAHYWGNAKTVLSLWSMGMNQSFQGTAKGRCLINLHLLTGQIGKPGSGPFSLTGQPNAMGGREAGGLSHLLPGYRSIKNPQHRQEVEQLWQISPGRINPEPGLSAWEMFMGLENQQVGFLWIVATNPVVSMPDLERVKKALQQSTFTIHQDAYSPTETAEYAHLLLPAAQWSEKTGTMTNSERRVTLSPAFRSPPGEARPDWEIFAEVGRRLGFENQFNFVDSAAVHREYVQLTAERLCDQSGVSYEKLQKLGPLQWPCRQSDQESQLLSTKRLYTDYKFCTENGRANFCLDHSRGLAEPVDPNYPFVLTNGRLYGHWHTQTRTGHIEKIKKMHPKPILEMHPKDAEKLGIKSQDLVAIKSRRGSAQLEVLVTRAIAPGTVFMPMHWGFLWDDNAEVNSLTHATACPISKQPELKACAVNITPV

SEQ ID NO: 5982 - protein, 251 aa, Prunus laurocerasus
AHYKSEADVGNAIAEAIQRGLVKREELFITSKASNHGHVVEACKNSLKKLRLDYLDLYLVHYPLATKHSGVGTTASLLDENKVLDIDVTVSLESTWHDMEKTVSLGLVRSIGLSNYELFLTRDCLSYAKIKPQVSQFETHPYFQRETLVRFCRKHGVCPMAHTPLGGATANVKAFGSISPLEDPVLRALAKKYKKSVAQIALRWNLDRNTPVIPKSSKIERLKENLEVLNFKLEKEDIELINSIDKNPGPL

SEQ ID NO: 5983 - protein, 222 aa, Picea mariana
MGRGKIEIKRIENTTNRQVTFCKRRNGLLKKAYELSVLCDAEVALIVFSSRGRLYEFANHSVKRTIERYKKTCVDNNHGGAISESNSQYWQQEAGKLRQQIEILQNANRHLMGDGLTALNIKELKQLEVRLEKGIGRVRSKKNEMLLEEIDIMQRREHILIQENEILRSKIAECQNSHNTSMLSAPEYDALPAFDSRNFLHANLIDAAHHYAHQEQTTLQLG

SEQ ID NO: 5984 - protein, 417 aa, Rhodopseudomonas palustris CGA009
MTEIRVPTLGESVTEATIGRWFKKPGEAVAVDEPLVELETDKVTIEVPAPSAGTLGEIVAKDGETVAVGALLGQITDGAAPAKPAAAAPAKAAAPAAAPAPAAPAPAAAPAAKAPPSDAPLAPSVRRLSTESGVDASTVPGSGKDGRVTKGDMLAAIEKAASAPTPVNQPAAAVQVRGPSPADDAAREERVKMTRLRQTIARRLKEVQNTAAMLTTFNEVDMTNVMALRAQYKDVFEKKHGAKLGFMGFFTKACVQALKDIPAVNAEMDGTDLIYKNYYHIGVAVGTDKGLVVPVVRDCDEKSIADIEKSIVDYGKRARDGQLKIEEMQGGTFTITNGGIYGSLMSTPILNAPQSGILGMHKIQERPVVIGGKIEVRPMMYLALSYDHRVIDGKEAVTFLVRVKESLEDPARLVLDL

SEQ ID NO: 5985 - protein, 218 aa, Picea mariana
KIEIKRIENTTNRQVTFCKRRNGLLKKAYELSVLCDAEVALIVFSSRGRLYEFANHSVKRTIERYKKTCVDNNHGGAISESNSQYWQQEAGKLRQQIEILQNANRHLMGDGLTALNIKELKQLEVRLEKGIGRVRSKKNEMLLEEIDIMQRREHILIQENEILRSKIAECQNSHNTNMLSAPEYDALPAFDSRNFLHANLIDAAHHYAHQEQTTLQLG

SEQ ID NO: 5986 - protein, 370 aa, Agrobacterium tumefaciens
MTVRSVFLLPGDGIGPEAMTEVRKLIEYMNSAHNAGFTVSEGLVGGSAYDAHGVAISDADMEKALAADAILFGAVGGPKWDGVPYEHRPEAGLLRLRKDLELFANLRPAICYPALAAASSLKPELVEGLDILIVRELTGGVYFGEPKQIIDLGNGQKRGIDTQIYDTFEIERIASVAFELARSRDNRVCSMEKRNVMKSGVLWNQVVTETHAAKYKDVQLEHMLADAGGMQLVRKPKQFDVIVTDNLFGDMLSDVAAMLTGSLGMLPSASLGAPDAKTGKRKAMYEPVHGSAPDIAGKSIANPIAMIASFAMCLRYSFNMVDEATKLEAAIANVLDKGIRTADIMADGCRQVGTSDMGDAVLAEFKALSA

SEQ ID NO: 5987 - protein, 235 aa, Triticum aestivum
  unsure (1)..(235): unsure at all Xaa locations
MSAAVGGAEFHGFGGAAQLSRSRMLGRPVRVAPPGATPAGGGGPSAASIRAVSTPLKKDAKEVKRSKVEIIKEKSNFLRYPLNEELVSEAPNVNETAVQLIKFHGSYQQSDREVRGQKNYSFMLRTKNPSGKVPNQTYLAMDTLADEFGIGTLRLTTRQTFQLHGVLKKNLKHVISTVIKNMGSTLGACGDLNRNVLAPAAPYARKDILFAQXTAENIAALLAPQSGAYYDLWVD

SEQ ID NO: 5988 - protein, 183 aa, Triticum aestivum
  unsure (1)..(183): unsure at all Xaa locations
MAPTVMASSATSVAPFQGLKSTAGLPVSRRSNGASLGSVSNGGRIRCMQVWPIEGIKKFETLSYLPPLSTEALLKQVDYLIRSKWVPCLEFXSKVGFIFREHNASPGXYYDGRYWXTMWKLPMFGCTDATQVINEVEEVKKEYLTRIPHIGFDNMXQVXCVSLTPNGLQDRAKQSHRHIKCNF

SEQ ID NO: 5989 - protein, 93 aa, Glycine max
  unsure (1)..(93): unsure at all Xaa locations
MALGRRSGLFALEKHFAFYGAYHSNKINIAIHVLFVWPIFFSALLILYFVPLPPLFNLQNLEFSMWENYVILVWNVGFLVALFFLXFFVRLVL

SEQ ID NO: 5990 - protein, 487 aa, Brucella suis 1330
MADIYDVIVIGSGPGGYVTAIRAAQLGLKTAIVEREHLGGICLNWGCIPTKALLRSAEILHFGEHAKDYGLKLDGTITPDVKAVVQRSRGVSARLNGGVAFLMKKNKIDVIWGEAKLVKAASGSNPAEISVGKTSKQPMQPQNPVPKGVLGEGSYKAKHIIVATGARPRALPGIEPDGKLIWTYFEAMVPQALPKSMLVMGSGAIGIEFASFYHDMGVDVTVVEVMSQIMPVEDAEISAIARKQLEKRGLKIITDAKVAKVEKGANSVTAHVETKDGKTQTLTVDRMISAVGVQGNIENLGLEALGVKTDRGCIVIDGYGKTNVAGIYAIGDVAGPPMLAHKAEHEGVICVEKIAGLPNVHPLDKGKIPGCTYCNPQVASVGLTEAKAKEQGYDIRVGRYSFSANGKAIALGEDQGLVKTIFDRKTGQLLGAHMVGAEVTELIQGFVIAMNLETTEEELMHSVFPHPTLSETMKESVLDAYGRVLNA

SEQ ID NO: 5991 - protein, 447 aa, Brucella suis 1330
MPINITMPALSPTMEEGNLSKWLVKEGDKVAPGDVIAEIETDKATMEVEAVDEGTVAKIVVPAGTEGVKVNALIAVLAEEGEDVAAAAKGAGAAPKAEAPKEEPKPAEAKKEAAAPAAAPAPARSEQPAVAPAVNKGERVFASPLARRIAKDAGVDISAVKGSGPHGRVIQRDVEAALASGGAKAVSAQAESAAAPKPMSDDAILKLFEDGSYEVVPHDGMRKTIARRLVESKQTVPHFYLTIDCELDALLALRSQINAAAPMLKTEKGEVPAYKLSVNDMVIKATALALRDVPEANVSWTEGGMIKHKCSDVGVAVSIPGGLITPIVRHAESKTLSVISNEMKDMARRARDRKLKPEEYQGGSTSVSNLGMFGVKDFAAIINPPHATIFAIGAGEERAVVKKGEIKVATVMSVTLSTDHRAVDGALAAELAQAFKRHIENPMGMLV

SEQ ID NO: 5992 - protein, 536 aa, Arabidopsis thaliana
MNAAVFSPSALSLPISFSKTRSSFLSRKKGVKGEFRVFAVFGDESGLVEKKSQWRPLFDVEDPRSKAPPYKGKFLDVNQAIEVARFDIQYLDWRARQDLLTIMILHDKVVDVLNPLAREYKSIGTVKKELAGLQEELSKAHQQVHISEARVSTALDKLAHMEELVNDRLLPGRVVTELDKPSSSTTASAVELDREKTNTGAKSLNVSGPVPPYSPHLKNFWYPVAFTADLKHDTMVPIECFEQPWVIFRGEDGKPGCVRNTCAHRACPLDLGTVNEGRIQCPYHGWEYSTDGECKKMPSTKLLKVKIKSLPCLEQEGMIWIWPGDEPPAPILPSLQPPSGFLIHAELVMDLPVEHGLLLDNLLDLAHAPFTHTSTFAKGWSVPSLVKFLTPTSGLQGYWDPYPIDMEFKPPCIVLSTIGISKPGKLEGKSTQQCATHLHQLHVCLPSSKNKTRLLYRMSLDFAPILKNLPFMEHLWRHFAEQVLNEDLRLVLGQQERMLNGANIWNLPVAYDKLGVRYRLWRNAVDRGDDKLPFSG

SEQ ID NO: 5993 - protein, 427 aa, Coxiella burnetii
MTELTGVSIVTYQHIKVPSQGEKITVNKAVLEVPDRPIIPFIEGDGIGIDIAPVMKNVVDAAVEKSYAGKRKIEWMEIYAGEKATKVYGKDNWLPDETLEAIKGYQVAIKGPLTTPVGGGIRSLNVALRQQLDLYVCLRPVRYFTGVPSPVKTPEKVNMVIFRENSEDIYAGIEWPAGSPEAVKLINFLQNEMGVKKIRFPETAGIGIKPVSKEGTSRLVRRAIQYAIDNDRDSVTLVHKGNIMKFTEGAFKDWGYEVAVKEFGAKPLDGGPWHVFENPKTGQKITIKDVIADAFLQQILLRPAEYSVIATLNLNGDYISDALAAEVGGIGIAPGANLSDTVGLFEATHGTAPKYAGQDKVNPGSLILSAEMMLRYLGWKEAADLVVQGIEGAIESKTVTYDFARLMTGAKEVSTSQFGKAIIKHIL

SEQ ID NO: 5994 - protein, 427 aa, Coxiella burnetii
MTELTGVSIVTYQHIKVPSQGEKITVNKAVLEVPDRPIIPFIEGDGIGIDIAPVMKNVVDAAVEKSYAGKRKIEWMEIYAGEKATKVYGKDNWLPDETLGAIKEYQVAIKGPLTTPVGGGIRSLNVALRQQLDLYVCLRPVRYFTGVPSPVKTPEKVNMVIFRENSEDIYAGIEWPAGSPEAVKLINFLQNEMGVKKIRFPETAGIGIKPVSKEGTSRLVRRAIQYAIDNDRDSVTLVHKGNIMKFTEGAFKDWGYEVAVKEFGAKPLDGGPWHVFENPKTGQKITIKDVIADAFLQQILLRPAEYSVIATLNLNGDYISDALAAEVGGIGIAPGANLSDTVGLFEATHGTAPKYAGQDKVNPGSLILSAEMMLRYLGWKEAADLVVQGIEGAIESKTVTYDFARLMTGAKEVSTSQFGKAIIKHIL

SEQ ID NO: 5995 - protein, 427 aa, Coxiella burnetii
MTELTGVSIVTYQHIKVPSQGEKITVNKAVLEVPDRPIIPFIEGDGIGIDIAPVMKNVVDAAVEKSYAGKRKIEWMEIYAGEKATKVYGKDNWLPDETLEAIKEYQVAIKGPLTTPVGGGIRSLNVALRQQLDLYVCLRPVRYFTGVPSPVKTPEKVNMVIFRENSEDIYAGIEWPAGSPEAVKLINFLQNEMGVKKIRFPETAGIGIKPVSKEGTSRLVRRAIQYAIDNDRDSVTLVHKGNIMKFTEGAFKDWGYEVAVKEFGAKPLDGRPWHVFENPKTGQKITIKDVIADAFLQQILLRPAECSVIATLNLNGDYISDALAAEVGGIGIAPGANLSDTVGLFEATHGTAPKYAGQDKVNPGSLILSAEMMLRYLGWKEAADLVVQGIEGAIESKTVTYDFARLMTGAKEVSTSQFGKAIIKHIL

SEQ ID NO: 5996 - protein, 254 aa, Oemleria cerasiformis
SEADVGQAFAEAFKTGLVKREELFITSKANHGHVVEACKNSLKKLQLDYLDLYLVHYPLATKHSGVGTTASLLDENKVLDIDVTVSLEETWRGMEKAVSLGLTRSIGLSNYELFLTRDCLSYAKIKPAVSQFETHPYFQRESLVRFCQKHGVVATAHTPLGGATANTKYFGSISPLGDPVLHDVAKKYQKSVAQICLRWNIERNTPVIPKSSKVERLKENLQVLEFKLEKEDIELINGIDKKSRSTLPSLSWGL

SEQ ID NO: 5997 - protein, 160 aa, Griffithsia japonica
PIVRLPIHPTPNSRRPQPLSTAPPSPASRLSFPPRRRRLCPPAIGAAASASVYDLSAFKNGRPYPFSPLSGKLTLFVNVASYCALTPQYEGLVALHTAYQPKGFEVVASPCNQFGRQEPQPDDEICAFVKERFGARFVLLDKLVVNERPADGRSPRSTVS

SEQ ID NO: 5998 - protein, 712 aa, Methylobacillus flagellatus KT
MKNKTEKVKSQLAGSTAPDKKNTTAKTRDLESYKSDATGQPLRTNQGVKIADNKNSLRAGSRGPSLLEDFILREKITHFDHERIPERIVHARGVGAHGYFESYADHSSLTKAGFLGEKGKQTPVFVRFSTVQGPRGSADTVRDVRGFAIKFYTEEGNFDLVGNNIPVFFIQDAIKFPDFVHAVKPEPHNEIPTGASAHDTFWDFVSLQPESAHAVIWAMSDRAIPRSLRAMQGFGVHTFRLINAKGVAKFVKFIWTPKQGVLSLVWDEAQKIAGKDPDFHRRDLGESIELGNYPEWEFGVQIIDEQDEHSFDFDILDPTKIVPEELVPITPLGKLVLNRNPDNFFAETEQIAFCPGHIVPGLDFSNDPLLQGRLFSYTDTQLSRLGGPNFHEIPINKPVCPFHNNQRDALHRTTIHKGQAAYEPNSIDGGWPQETPPAAKDGGFESYYERIDAHKVRERSASFKDHFSQPRLFYKSLSATEQLHIAEAYSFELGKVKRQHIRERVVNEILSNIDLGLAGTVAQKLGIPAPKKPTIKVPEPSLKQSSALSQMKLTPQDLQGKKIAALVFDGLSAKAIRPLLDWAQQHSIALQLLGPTSAPVKTSEGKSLAVDGSIKGEPSILFDAAIVPDIPTDHTALLDNGQAVHFILETFKHLKPLALTGPGASLIKALHLEEDAGLLQAKDFSAVREQFERALLAHRVWEREKKAERIPA

SEQ ID NO: 5999 - protein, 264 aa, Sorbus aucuparia
AHYKSEADVGEALTEAFKTGLVKREELFITTKIWNSDHGHVVEACKNSLEKLQLDYLDLYLVHYPMPTRHNAIGKTASLLGEDKVLDIDVTVSLQQTWEGMEKAVSLGLVRSIGLSNYDLFLTRDCLAYSKIKPAVSQFETHPYFQRDSLIKFCIKHGVLPTAHTPLGGAAANKDMFGSVSPLDDPVLNDVAKKYGKSVAQICLRWGIQRKTAVIPKSSKIQRLKENLEVLEFQLSDEDMQLIYSIDRKYRTSLPSKTWGLDVS

SEQ ID NO: 6000 - protein, 365 aa, Triticum aestivum
MNVPIVDPLQGDFPETIEEFLQHGNMKCIAFNRRGTLLAAGCANGSCVIWDFETRGLAREFRDKDCTAPITSVSWSKYGHRLLASATDKSLTLWNVVTGEKIARITLQQTPLHARLHPGSSIPSVCLACPLSSAPILVDLNTGSTIVLPVSASDSGNVPLPNSRKFSDGSPPFTPTAATFDKNGELIYVGNSKGEILIVDSKGIQVLGLIPIPGGTVVKDIVFSRDGQYLLTNSNDRVIRVYENILPINGSGKEIEKIITNNNNDYGSKYEKLKANGARCLVLSCEVSDAIAKVQWKAPCFSGDAEWIVGASASKGEHRLHIWDRAGRLIKILEGPKEALIDLAWHPFDPTIASVSVAGLTYIWA

SEQ ID NO: 6001 - protein, 515 aa, Ralstonia eutropha JMP134
MKIRAQVAMVLNLDKCIGCHTCSVTCKNVWTSRDGIEYAWFNNVETKPGIGYPKEWENQDKWQGGWKRNANGSLEPRQGGKLKILANLFANPNLPQIDDYYEPFTYDYEHLQKAPLVQTPPTARPVSVLTGRKMEKIEWGPNWEDDLGGEFSSRGRDKLFDDVQKEMYSTFENTFMMYLPRLCEHCLNPACVASCPSGSIYKREDDGIVLVDQDKCRGWRMCISGCPYKKIYFNWQSGKAEKCLFCYPRIEAGQPTVCSETCVGRIRYLGVMLYDADRIEQAASVADERDLYQSQLDVFLDPHDPIVQAEARRQGIPQSWLDAARKSPVYKMACEWKVAFPLHPEYRTLPMVWYIPPLSPIQSAAEAGHMGMNGVIPDVKSLRIPVKYLANLLTAGDVMPVLSALDRMLAMRAYKRSQVVDGLQDLAVLEQVGLTPAQVEDMYQTMAIANYEDRFVIPSSHKEMVEDSFGDKASCGFTFGNGCSGGTSEGTLFGKKPKPAIAYAALPRSRKAFAG

SEQ ID NO: 6002 - protein, 265 aa, Kageneckia oblonga
AHYKSEADVGEALAEAFKSGLVKREELFITTKIWNSDHRYVAEACKNSLEKLQLQYLDLYLVHYPLPTRHNAIGKTASLLGEDKVLDIDVTIPLQQTWEGMEKTVALGLVRSIGLSNYDLFLTRDCLAYSKIKPAVSQFETHPYFQRDSLVKFCMKHGVLPTAHTPLGGAAANKDMFGSVSPLDDPVLNDVAKKYGKSVAQICLRWGIQRKTAVIPKSSKIQRLKENLEVLEFQLSDEDMQLIYSIDKKYRTSLPSKTWGLDVYA

SEQ ID NO: 6003 - protein, 497 aa, Pseudomonas aeruginosa PAO1
MTTLTRADWEARAKDLKIEGRAFVNGEYSNAASGETFDCLSPVDGRFLAKVASCDLADAEQAVKVARNAFDSGAWSRLAPAKRKQTMIRFADLLLENAEELALLETLDMGKPISDSLHIDVASAANSLRWSAEAIDKIYDEVAATPHAELGLVTREPVGVVAAIVPWNFPLLMSCWKLGPALATGNSVILKPSEKSPLTAIRIAQLAVEAGIPKGVFNVLPGYGHTVGKALALHMDVDTLVFTGSTKIAKQLMVYAGESNMKRVWLEAGGKSPNIVFADAPDLKAAAEAAAGAIAFNQGEVCTAGSRLLVERSIKDKFLPLVIEALKGWKPGNPLDPETNVGALVDTQQMNTVLSYIEAGHNDGAKLVAGGKRTLEETGGTYVEPTIFDGVTNAMKIAREEIFGPVLSVIEFEDAEEAVRIANDTPYGLAAAVWTSNLSKAHLTAKALRAGSVWVNQYDGGDMTAPFGGFKQSGNGRDKSLHAFDKYTELKATWIKL

SEQ ID NO: 6004 - protein, 431 aa, Prochlorococcus marinus str. MIT 9313
MIDSLDLVIDTIVAREVLDSRGNPTVEAEVLLEAGAIGRAIVPSGASTGAHEAHELRDGDSRYLGKGVTKAVNHIEDRIAPALCGISSLDQASVDGTMQELDGSDNKSSLGANAILAVSMATARAAANGLGLPLYRYLGGPMASLLPVPLMNVINGGAHAANNLDFQEFMLVPHGASSFRESLRMGAEVFHTLKGLLSAQGLSTAVGDEGGFAPNLANNDAAGDLLIQAIEKAGYSPGKDISLALDVASTEFYQDGCYAFGGGRYTSTEMVNELEKLVDRYPIISIEDGLAEDDWQGWALLTKKLGKRIQLIGDDIFVTSTKRLQQGIDQNVANSILIKVNQIGSLTETLQAIDLAGRSGYTSVISHRSGETEDTTIADLAVATRAGQIKTGSLSRSERVAKYNQLLRIEDELGSQAVYAGATGQGPRGRS

SEQ ID NO: 6005 - protein, 265 aa, Vauquelinia californica
AHYKSEADVGEALAEAFKTGLVKREELFITTKIWNSDHGHVVEACKNSLEKLQLDYLDLYLVHYPMPTRHNAIGKTASLLGEDKVLDIDVTISLHTTWEGMKKAVSLGLVRSIGLSNYDLFLTRDCLAYSKIKPAVSQFETHPYFQRDSLVKFCMKHGVLPTAHTPLGGAAANKDMFGSVSPLDDPVLNDVAKKYGKSVAQICLRWGIQRKTAVIPKSSKIQRLKENLEVLKFQLSDEDMQLIHGIDRKYRTSLPSKTWGLDVYA

SEQ ID NO: 6006 - protein, 265 aa, Amelanchier alnifolia
AHYKSEADVGEALAEAFNTGLVKREELFITTKIWNSDHGHVVEACKNSLEKLQLDYLDLYLVHYPMPTRHNAIGKTASLLGEDKVLDIDVTISLQQTWEGMEKAVTLGLVRNMGLSNYDLFLTRDCLAYSKIKPAVSQFETHPYFQRDSLVKFCIKHGVLPTAHTPLGGAAANKDMFGSVSPLDDPVLNDVAKKYGKSVAQICLRWGIQRKTAVIPKSSKIQRLKENLEVLEFQLSNEDMQLINGIDRKYRTSLPSKTWGLDVYA

SEQ ID NO: 6007 - protein, 150 aa, Triticum aestivum
EEQPFLPKHILYRQKDQFSDGVGYSWIDGLKAHAESNVTDKMMSNAKFIYPHNTPTTKEAYCYRMIFERFFPQNSAILTVPGGPSVACSTAKAVEWDAQWSGNLDPSGRAALGVHLSAYEQEHLPATIMAGTSKKPRMIEVAAPGVAIES

SEQ ID NO: 6008 - protein, 552 aa, Actinobacillus pleuropneumoniae serovar 1 str. 4074
MSTIFTIAQNWLAQDTDQETRAELAQLIEMAQAGDEKALAELTARFDGRLQFGTAGLRGRLQAGSMGMNRVLVAQAAGGLADYLKGYDKEPSIVIGYDGRKNSDVFARDTAEIMAGAGIKAYLLPRKLPTPVLAYAIKYFDTTAGVMVTASHNPPEDNGYKVYLGKANGGGQIVSPADKDIAALIDKVAAGNIADLPRSQDFTVLDDEIVEAYIEKTAALAKEQAAEINYVYTAMHGVGYEVLSKTLEKAGLPQPHLVAEQIQPDGSFPTVNFPNPEEKGALDLAIKLAKEKNAEFIIANDPDADRLAVAMPDAQGNWKGLHGNVVGCLLGWYLAKQYHAQGKQGVLACSLVSSPALAEIAKKYGLQSEETLTGFKYIGKVNGLLFGFEEALGYLVDPDKVRDKDGISAAIVFLDFIRNLKAQGKTLQDAITDFNNEFGAYVSGQISIRVSDLSEIGKLMTALRNNPPSAIGSFNVVQLIDHTKTDRQSDILVFVLENGSRLITRPSGTEPKIKFYLDAKGKDAADADKVLSQFDESVRELLRQEQYGKQDC

SEQ ID NO: 6009 - protein, 315 aa, Actinobacillus pleuropneumoniae serovar 1 str. 4074
MSQLDALREMTVVVADTGDIEAIKQYQPQDATTNPSLILSASALPQYASLIDDAVAYAKARSDDKAQQLIDAEDKLAVNIGLEILKIVPGRISTEVDARLSYDTKATIEKARQIMKLYNDAGISNDRILIKIASTWQGIRAAEVLEKEGINCNLTLLFSQAQARACAEAGVYLISPFVGRILDWYKAAEKKEYAPAEDPGVISVTNIYNYYKQYGYQTVVMGASFRNVGEITEIAGCDRLTIAPPLLKELAESNAPLVRKLEYKGEVKTRPAPLTEAEFYWQHNQDPMAVEKLAEGIRKFAVDIEKLEAMLAAKL

SEQ ID NO: 6010 - protein, 425 aa, Brucella suis 1330 [sequence omitted]

SEQ ID NO: 6011 - protein, 283 aa, Solanum chacoense
MSKDVIEEGQAHHHGKDYVDPPPAPLLDMAELTKWSFYRAVIAEFIATLLFLYVTVATVIGHKKLNALDQCDGVGILGIAWAFGGMIFVLVYCTAGISGGHINPAVTFGLFLARKVSLIRAVAYIIAQSLGAICGVGFVKLFMKHYYNAEGGGANFVQPGYSKGTALGAEIIGTFVLVYTVFSATDPKRSARDSHVPVLAPLPIGFAVFMVHLATIPITGTGINPARSFGAAVIYGHEKIWDDQWIFWVGPMVGAMAAAIYHQFVLRAGAVKALGSFRSNQTN

SEQ ID NO: 6012 - protein, 427 aa, Coxiella burnetii
MTELTGVSIVTYQHIKVPSQGEKITVNKAVLEVPDRPIIPFIEGDGIGIDITPVMKNVVDAAAEKSYAGKRKIEWMEIYAGEKATKVYGKDNWLPDETLEAIKEYQVAIKGPLTTPVGGGIRSLNVALRQQLDLYVCLRPVRYFTGVPSPVKTPEKVNMVIFRENSEDIYAGIEWPAGSPEAVKLINFLQNEMGVKKIRFPETAGIGIKPVSKEGTSRLVRRAIQYAIDNDRDSVTLVHKGNIMKFTEGAFKDWGYEVAVKEFGAKPLDGGPWHVFENPKTGQKITIKDVIADAFLQQILLRPAEYSVIATLNLNGDYISDALAAEVGGIGIAPGANLSDTVGLFEATHGTAPKYAGQDKVNPGSLILSAEMMLRYLGWKEAADLVVQGIEGAIESKTVTYDFARLMTGAKEVSTSQFGKAIIKHIL

SEQ ID NO: 6013 - protein, 251 aa, Triticum aestivum
MASANALLLLFSAAFCFLARRAAGGYGSWQSAHATFYGGGDASGTMGGACGYGNLYSSGYGTNAAALSTALFNDGAACGSCYELKCQEVSSSCLPGSITITATNLCPPNYALPNDERGWCNPPRAHFDMAEPAYLQIGIYRAGIVAVAYRRVPCVKKGGIRFTINGHSYFNLVLVTNVAGAGDVQSVAIKGYSTGWQAMARIWGQNWQSNADLDGQSFSFRVTFSDGRTVTSNNAAPAGWSFGQTFEGAQF

SEQ ID NO: 6014 - protein, 140 aa, Triticum aestivum
  unsure (1)..(140): unsure at all Xaa locations
MAPTVMASSATSVAPFQGLKSTAGLPVSRRSNGASLGSVSNGGRIRCMQVWPIEGIKKFETLSYLPPLSTEALLKQVDYLIRSKWVPCLEFSKVGFIFREHNASPGYYDGRYWTMWKLPXFGCTDATXVXNEVEESRRST

SEQ ID NO: 6015 - protein, 427 aa, Coxiella burnetii
MTELTGVSIVTYQHIKVPSQGEKITVNKAVLEVPDRPIIPFIEGDGIGIDITPVMKNVVDAAVEKSYAGKRKIEWMEIYAGEKATKVYGKDNWLPDETLEAIKEYQVAIKGPLTTPVGGGIRSLNVALRQQLDLYVCLRPVRYFTGVPSPVKTPEKVNMVIFRENSEDIYAGIEWPAGSPEAVKLINFLQNEMGVKKIRFPETAGIGIKPVSKEGTSRLVRRAIQYAIDNDRDSVTLVHKGNIMKFTEGAFKDWGYEVAVKEFGAKPLDGGPWHVFENPKTGQKITIKDVIADAFLQQILLRPAEYSVIATLNLNGDYISDALAAEVGGIGIAPGANLSDTVGLFEATHGTAPKYAGQDKVNPGSLILSAEMMLRYLGWKEAADLVVQGIEGAIESKTVTYDFARLMTGAKEVSTSQFGKAIIKHIL

SEQ ID NO: 6016 - protein, 427 aa, Coxiella burnetii
MTELTGVSIVTYQHIKVPSQGEKITVNKAVLEVPDRPIIPFIEGDGIGIDITPVMKNVVDAAVEKSYAGKRKIEWMEIYAGEKATKVYGKDNWLPDETLEAIKEYQVAIKGPLTTPVGGGIRSLNVALRQQLDLYVCLRPVRYFTGVPSPVKTPEKVNMVIFRENSEDIYAGIEWPAGSPEAMKLINFLQNEMGVKKIRFPETAGIGIKPVSKEGTSRLVRRAIQYAIDNDRDSVTLVHKGNIMKFTEGAFKDWGYEVAVKEFGAKPLDGGPWHVFENPKTGQKITIKDVIADAFLQQILLRPAEYSVIATLNLNGDYISDALAAEVGGIGIAPGANLSDTVGLFEATHGTAPKYAGQDKVNPGSLILSAEMMLRYLGWKEAADLVVQGIEGAIESKTVTYDFARLMTGAKEVSTSQFGKAIIKHIL

SEQ ID NO: 6017 - protein, 251 aa, Triticum aestivum
MAVIKMLLLPALFALLLRAASAAQWTPAHATFYGGGDASGTMGGACGYGNLYGAGYGTQTTALSTALFNNGASCGACFTIACDTRKSRMCKPGTSITVTATNFCPPNYALAGDNGGWCNPPRQHFDMAQPAWETIAVYKAGIVPVNHRRVRCQRSGGIRFTINGHSYFELVLVTNVGGSGGVAQMWIKGSRTNWMEMSRNWGANWQSNAKLDGQSLSFRVKSDDGRVVTANDVAPPGWWFGGTYTSGAQLY

SEQ ID NO: 6018 - protein, 323 aa, Oryza sativa (japonica cultivar-group)
MGDQSPLSPNLHPLSPSPSAAAAAAATPTPAAAAASSRSSRSKKPPHSSDPNQSKKPRLTLTVPGRPLSADGEVAAAIQHLRAADPALATVIDAHDPPAFQCPHRPFHSLVRSILYQQLAFKAAASVYSRFLSLLGGEHNVLPEAVLALTTQDLRQIGVSPRKASYLHDLARKYASGILSDAAVVNMDDRSLAAMLTMVKGIGAWSVHMFMIFSLNRPDVLPAADLGVRKGVQHLYGLDAVPRPSQMEKLCEQWRPYRSVGAWYMWRLIESKAPPPPPAIPVGPPALTEHGDELMLQQQQHQQQQQQSVIQMIDPLQMLPGMG

SEQ ID NO: 6019 - protein, 427 aa, Coxiella burnetii
MTELTGVSIVTYQHIKVPSEGEKITVNKAVLEAPDRPIIPFIEGDGIGIDITPVMKNVVDAAVEKSYAGKRKIEWMEIYAGEKATKVYGKDNWLPDETLEAIKEYQVAIKGPLTTPVGGGIRSLNVALRQQLDLYVCLRPVRYFTGVPSPVKTPEKVNMVIFRENSEDIYAGIEWPAGSPEAVKLINFLQNEMGVKKIRFPETAGIGIKPVSKEGTSRLVRRAIQYAIDNDRDSVTLVHKGNIMKFTEGAFKDWGYEVAVKEFGAKPLDGGPWHVFENPKTGQKITIKDVIADAFLQQILLRPAEYSVIATLNLNGDYISDALAAEVGGIGIAPGANLSDTVGLFEATHGTAPKYAGQDKVNPGSLILSAEMMLRYLGWKEAADLVVQGIEGAIESKTVTYDFARLMTGAKEVSASQFAKAIIKHIL

SEQ ID NO: 6020 - protein, 427 aa, Coxiella burnetii
MTELTGVSIVTYQHIKVPSEGEKITVNKAVLEVPDRPIIPFIEGDGIGIDITPVMKNVVDAAVEKSYAGKRKIEWMEIYAGEKATKAYGKDNWLPDETLEAIKEYQVAIKGPLTTPVGGGIRSLNVALRQQLDLYVCLRPVRYFTGVPSPVKTPEKVNMVIFRENSEDIYAGIEWPAGSPEAVKLINFLQNEMGVKKIRFPETAGIGIKPVSKEGTSRLVRRAIQYAIDNDRDSVTLVHKGNIMKFTEGAFKDWGYEVAVKEFGAKPLDGGPWHVFENPKTGQKITIKDVIADAFLQQILLRPAEYSVIATLNLNGDYISDALAAEVGGIGIAPGANLSDTVGLFEATHGTAPKYAGQDKVNPGSLILSAEMMLRYLGWKEAADLVVQGIEGAIESKTVTYDFARLMTGAKEVSASQFAKAIIKHIL

SEQ ID NO: 6021 - protein, 93 aa, Oryza sativa
  unsure (1)..(93): unsure at all Xaa locations
MEAPPTPLSGRVFLXRREKATIRKPKRLKQPGERHRXSWDADRQDRFVRRLADXLGHPKDSQELRFLWIDLLAKCDASLGMKIATRLNMKPHM

SEQ ID NO: 6022 - protein, 519 aa, Oryza sativa (japonica cultivar-group)
MQFSSVFPLEGKACVSPIRRGGEGSASDRLKIGDSSSIKHDRAVRRMCLGYRGTKNGAQCVLTSDAGPDTLHVRTSFRRNFADPNEVAAVILGGGTGTQLFPLTSTRATPAVPIGGCYRLIDIPMSNCFNSGINKIFIMTQFNSASLNRHIHRTYLGGGINFTDGSVEVLAATQMPGEAAGWFQGTADAVRKFIWVLEDYYKHKAIEHILILSGDQLYRMDYMELVQKHVDDNADITLSCAPVGESRASDYGLVKFDSSGRVIQFSEKPKGTDLEAMKVDTSFLNFAIDDPTKFPYIASMGVYVFKRDVLLNLLKSRYAELHDFGSEILPRALHEHNVQAYVFADYWEDIGTIRSFFDANMALCEQPPKFEFYDPKTPFFTSPRYLPPTKSDKCRIKDAIISHGCFLRECTIEHSIVGVRSRLNSACELKNTMMMGADLYETEDEISRLLSEGKVPIGVGENTKINNCIIDMNARVGRNVVITNSEGVQESDRPEEGYYIRSGIVVILKNATIKDGKVI

SEQ ID NO: 6023 - protein, 128 aa, Glycine max
  unsure (1)..(128): unsure at all Xaa locations
TQKNXGDAKKDXHKXPGTEHPTAPREEXKDQEDGEHNAKHTAEAGTNAQXGGEDPPETNPKRVFFFIDTKACNDLLLKANQIGSVTDSIEAVRMSKKSGWGVKASHISGETEDTSIADISVGLDTGLI

SEQ ID NO: 6024 - protein, 260 aa, Camellia sinensis
TREGNFDLVGNNFPVFFVRDGMKFPDMVHALKPNPKSHIQENWRILDFFSHHPESLHMFTFLFDDAGVPQDYRHMEGSGVNTYTLINKAGKAHYVKFHWKPTCGVKCLLEEEAIKVGGANHSHATKDLYDSIAAGNYPEWKLFIQIIDPDHEDRFDFDPLDVTKTWPEDIIPLQPVGRLVLNKNMDNFFAENEQLAFCPAIIVPGVYYSDDKLLQTRIFSYADTQRHRLGPNYLQLPANAPKCAHHNNHHEGFMNFMHRR

SEQ ID NO: 6025 - protein, 265 aa, Amelanchier alnifolia
AHYKSEADVGEALAEAFNTGLVKREELFITTKIWNSDHGHVVEACKNSLEKLQLDYLDLYLVHYPMPTRHNAIGKTASLLGEDKVLDIDVTNFLQQTWEGMEKAATLGLIRNIGLSNYDLFLIRDCLAYSKIKPAVSQFETHPYFQRDSLVKFCIKHGVLPTAHTPLGGAAANKDMFGSVSPLDDPVLNDVAKKYGKSVAQICLRWGIQRKTAVIPKSSKIQRLKENLEVLEFQLSNEDMQLINGIDRKYRTSLPSKTWGLDVYA

SEQ ID NO: 6026 - protein, 452 aa, Bradyrhizobium japonicum USDA 110
MMSQEQNDLITRTGPKDPCGKLMRSYWQPTALVDELEGARPIRPVRLLGENLVLFRDERGRYGLIDRHCAHRGADLAFGRLEHGGLRCAFHGWLFDATGQCIETPAEPKDSKLCQNIRQRSYPVVEKSGILWAYLGEGEPPAFPEIDCFVAPDTHTFAFKGHMACNWLQALEVGIDPAHASYLHRFFEDEDTSTAYGKQFRGASAGSDLPMTKILREYDRPIINVEHTEYGLRLIALREIDEERTHVRVTNQLFPHGFVIPMSTEMTITQWHVPVDDENCYWYAIFTSYTNPVDKKKMRDQRLELYELPDYKSRKNSGNDYGFDPHEQQTATYTGMGNDINVHDQWAVESMGAIQDRTKEHLGQSDKAIVQYRRLLRQEIEKVGGGEKPMLFLDEANARSIQGPATMDGIGPTRGWETYWMEVDVKRRRGAPWTAPVPKEIDGKVHRLTAAE

SEQ ID NO: 6027 - protein, 595 aa, GIBBERELLA ZEAE PH-1
MFRVTTRSLRSSGLALKRVPFSTRFSSTQTSTSTSGNARYVWSATAILGAGSGAYIFSGKSTTVKASNNEVPQLSEYHTEEQIPVNSPVKSIILEDANAKLREDAHTFVFDGHAGVKGRVDFARLGSNNPIEDDWDLKIAKGVGGTKTLYAGVYDGHAGWATSQVLRNALVPYVSGALSSLTPTTSTELVDDAIQKAFVRLDNRIFDTALKAVESGLDQGTASVISAVAPAIAGSCALLTMYEPVTSTLRTAVAGDSRAVRGAWSSNANKYETDILSIDQTGFNQLEVERLDKEHPGQLHSMLNLDSGRLFGLAVTRAFGDHRLKWPAKVIRKVQDDYYGTPPRPNYTTPPYLTARPEVTTRKIQTEDFVILGSDGLWDMISNEDAVTCISRWLSAKKSGKPEPFKETKFEGKLEDGWQATPEHHVIEDLDNAAVCLVKNAFGGSRRGLFLGAMTTYAPMSRNVRDDITVQIIFFKDPYEKKPLSLSTYLPGTRTTWRRKDEIRLLTAPTSSSHATARSWLHPRAATLAHKIIFGNLETGNGQAAIRSPQATGPWRPNCGTWGTASYGCSGAAQQLWTARLCCRQILQLDASGSW

SEQ ID NO: 6028 - protein, 292 aa, Salmonella enterica
MKTRKGIILAGGSGTRLYPVTMAVSKQLLPIYDKPMIYYPLSTLMLAGIRDILIISTPQDTPRFQQLLGDGSQWGLNLQYKVQPSPDGLAQAFIIGEEFIGNDDCALVLGDNIFYGHDLPKLMEAAVNKESGATVFAYHVNDPERYGVVEFDQSGTAVSLEEKPLQPKSNYAVTGLYFYDNSVVEMAKNLKPSARGELEITDINRIYMEQGRLSVAMMGRGYAWLDTGTHQSLIEASNFIATIEERQGLKVSCPEEIAYRKGFIDAEQIKNLAKPLSKNAYGQYLLNMIKGY

SEQ ID NO: 6029 - protein, 523 aa, Polytomella sp. Pringsheim 198.80
MIRKALMNARAKLPFARFARSASTSAPVVDIASETIQFARNLPNKLFINNKWVDAKSGKTMGVEDPRNGEEILRVAEGDSADVDLAVKAARKAFDEGAWPRMTGKERGRLIYKLADALEANAEAFARLETLDNGKPLNISRIADVPLSVDHFRYYAGWADKIHGKTIPVDGPHMAYTLHEPLGVVGAIIPWNFPLLMAAWKLGPALAAGNTIVLKPAEQTPLSALLIAKLAAEVGFPEGVINVVTGFGPTVGGPLASHKLVDKTAFTGSTEVGKIVARLAAEQIKPCTLELGGKSPIIVCPDVDVDRAVADAHMALFFNHGQCCAAGSRVYVHEKIYDEFVEKATKAAANHSVGDPFSGQYDQGPQVDNAQFSKILSYVEHGKAEGAKLNVGGCRVGNKGYYVAPTVFSNVTDNMKIAREEIFGPVQSILKYSTFDEVIRRANASDYGLASGVFSKDLDTVNTLVRGLHAGTVWVNCYNLFDSAVPFGGFKTSGIGREKGEYALSNYTKVKAVYMPLVNPAWR

SEQ ID NO: 6030 - protein, 265 aa, Gillenia stipulata
AHYKSEADVGEVLAEAFKTGLVKREELFITTKIWNSDHGHVVEACKNSLEKLQLDYLDLYLVHYPMPTKHNGVGKTASLLGEDKVLDIDVTISLQQTWEGMEKTVSLGLVRSIGLSNYELFLTRDCLAYSKIKPAVSQFETHPYFQRDSLVKFCLKHGVLPTAHTPLGGAAANKDMFGSVSPLDDPVLNDVANKYGKSVAQICLRWGIQRKTAVIPKSSKIQRLKENLEVLEFQLSEEDMQLIYSIDRKYRISLPSKTWGLDVYA

SEQ ID NO: 6031 - protein, 165 aa, Triticum aestivum
  unsure (1)..(165): unsure at all Xaa locations
MAPTVMASSATSVAPFQGLKSTAGLPVSRRSNGASLGSVSNGGRIRCMQVWPIEGIKKFETLSYLPPLSTEALLKQVDYLIRSKWVPCLEFXSKVGFIFREHNASPGYYDGRYWXTMWKLPMFGCTDATQVINEVEEVKKEYPDAYVRIIGFDNMRQVQCVSSSP

SEQ ID NO: 6032 - protein, 227 aa, Spiraea cantoniensis
HGHEVEACKNSLQKLQLDYLDLYLVHYPLATRHRVGTTASLLDENKVLDIDVTVSLESTWRGMEKAVELGLVRSIGLSNYELFLTRDCLSYAKIKPAVSQFETHPYYQRESLVRFCQKHGICATAHTPLGGGTANTKYFGSTSPLGDPVLNEVAKKYKKSVAQICLRWNIDRCTAVIPKSSKVERLKENLQVLDFKLEKEDIELIBTIVRKRRTTLPSLSWGLDVYA

SEQ ID NO: 6033 - protein, 151 aa, Ralstonia metallidurans CH34
MILWRVALFFFLFTAPVWASDQAAEDRMLGIASELRCLVCQNESIAASQADLAADLRQQIREQIRAGKSDDDIRTYMVERYGDFVLYRPPLKPTTMLLWFGPFVVLALGIVVLVMNLRSRNRKPKHAALNEEERRHADALLAPPHNVLDET

SEQ ID NO: 6034 - protein, 103 aa, Zea mays
AKKATEGALSIDDMAGGTFTISNGGVYGSLLSTPIINPPQSSILGMHSIVQRPVVVNGDILARPMMYLALTYDHRLIDGREAVFFLRRIKDVVEDPRRLLLDI

SEQ ID NO: 6035 - protein, 219 aa, Holodiscus microphyllus
WNSDHGHVVEACKNSLKKLQLDYLDLYLVHYPLATKHSVGNTASLLDENKVLDIDVTVSLESTWHAMEKAVKLGLVRSIGLSNYELFLTRDCLSYAKIKPAVSQFETHPYYQRDSLVKFCQKHGVCATAHTPLGGATANTKYFGSVSPLGDPVLNEVAKKYQKSVAQICLRWGIERKTAVIPKSSKPERLKENLQVLEFKLEREDIELINSIDRKYRTS

SEQ ID NO: 6036 - protein, 389 aa, Lactobacillus plantarum
MTMQHVFPTYQRFPFAITDGQGVHLTDNHGKTYLDFTAGIGVCNFGYHQPQIQAAVTQQLTHIWHTSNLYENELQDAVAGLLANGEERLVYFANSGTEANEAALKLARKYTGKTGILAFQHSFHGRTYGAMSMTGNPHIQAGYAPLVPGITFATYNDDAALDKITPELAAVILEVVQGEGGVFAGQTAWLQAVNAKCQATGVLLIIDEVQTGIGRTGYRMAYEGYGLDPDIYTVAKGLANGLPVGAMVGRRQLATAFGPGSHGSTFAGNAVAMAAAKRVLTQLTPALLTTVRAHAKLVWQSLATQVEPIPVVKQITGKGLMIGIHLDEQIPVNQVITRLQVEGLLTLSAGDNTLRLLPPIVMQPADLLAGIALIAKVLTTLTTEVTTNE

SEQ ID NO: 6037 - protein, 121 aa, Arabidopsis thaliana
FNPLWNTLVLGGVKNGKSYLGMVSMIGVSFEDDHVATGFGNHLARPILRDEWHADLSFEDGVKLLEKCMRVLLYRDRSAINKLQIAKITEEGVTVSQPYSLKTYWEFSSFHNPTAGAAGSW

SEQ ID NO: 6038 - protein, 156 aa, Haemophilus influenzae
NRANTPVLVDGKDVMPEVNAVLAKMKDFCQRIISGEWKGYTGKAITDVVNIGIGGSDLGPYMVTEALRPYKNHLNMHFVSNVDGTHIAETLKKVNPETTLFLVASKTFTTQETMTNAQSARDWLLKAATDESAVAKHFAALSTNAKDVEEFGIDTN

SEQ ID NO: 6039 - protein, 427 aa, Coxiella burnetii
MTELTGVSIVTYQHIKVPSEGEKITVNKAVLEVPDRPIIPFIEGDGIGIDITPVMKNVVDAAVEKSYAGKRKIEWMEIYAGEKATKVYGKDNWLPDETLEAIKEYQVAIKGPLTTPVGGGIRSLNVALRQQLDLYVCLRPVRYFTGVPSPVKTPEKVNMVIFRENSEDIYAGIEWPAGSPEAVKLINFLQNEMGVKKIRFPETAGIGIKPVSKEGTSRLVRRAIQYAIDNDRDSVTLVHKGNIMKFTEGAFKDWGYEVAVKEFGAKPLDGGPWHVFENPKTGQKITIKDVIADAFLQQILLRPAEYSVIATLNLNGDYISDALAAEVGGIGIAPGANLSDTVGLFEATHGTAPKYAGQDKVNPGSLILSAEMMLRYLGWKEAADLVVQGIEGAIESKTVTYDFARLMTGAKEVSASQFAKAIIKHIL

SEQ ID NO: 6040 - protein, 246 aa, Triticum aestivum
MEFLGLLALAIAAMVGVVAGDDSTWSNGRATFYGGNDASGTMGGACGYGNMFSAGYGTNTAALSTALFNNGQSCGACFEIRCAGSGSCLPGSAVVTATNLCPANYALPNNEGGWCNPPQSHFDLAEPMFTKIAQARAGVVPVQYRRVVCVKTSGIRFTITGHSYFNLVLITNVAGAGDLTAVYVKSPSTGWLTMSHNWGANWQNGAMLNGQPLSFRVTTSDGRTTTSNNVAPSGWSFGQTYAGSQF

SEQ ID NO: 6041 - protein, 266 aa, Triticum aestivum
MAAAMPPSLPALLAALLLLVTLSPAAARVPGVYTGGDWQSAHATFYGGTDASGTMGGACGYGNLYSQGYGVNNAALSTALFNEGQRCGACFEIRCVNQPGWAWCLPGRPSIVVTATNFCPPNYALPSDDGGWCKPPRPHFDLAMPMFLHMAQYRAGIVPVSYRRVACRKSGGVRFTINGFRYFNLVLITNVAGAGDLVRASVKGSSTGWMPMSRNWGQNWQSNAILVGQALSFRVTASDRRTSTSWNAAPQNWRFGRTFEGKNLRV

SEQ ID NO: 6042 - protein, 824 aa, Agrobacterium tumefaciens str. C58
MKAHAAGIAAATAGIALPAAAQPVPGGVSALQIKWSKAPCRFCGTGCGVMVGVKEGKVVATHGDMQAEVNRGLNCIKGYFLSKIMYGKDRLETPLLRKKNGVYAKDGEFEPVSWDEAFDVMAQQCKRVLKEKGPTAVGMFGSGQWTIFEGYAATKLMRAGFRSNNLDPNARHCMASAAYAFMRTFGMDEPMGCYDDFEHADAFVLWGSNMAEMHPILWTRIADRRLGFDHVRVAVLSTFTHRSMDLADIPMVFKPGTDLVILNYIANHIIKTGRVNEDFVRNHTKFVRGVTDIGYGLRPDDPVEVNAANSADPTKTEAIDFETFKEFVSEYTLEKTAAMTGVEAGFLEELAELYADPKRKVMSLWTMGFNQHVRGVWANQMVYNIHLLTGKISEPGNSPFSLTGQPSACGTAREVGTFAHRLPADMTVTNPEHRKHAEEIWRIPHGIIPEKPGYHAVQQDRMLHDGKLNFYWVQVNNNVQAGPNTKNETYLGYRNPENFIVVSDAYPTITAMSADLILPAAMWVEKEGAYGNAERRTHVWHQLVEASGEARSDLWQLVEFSKRFTTDEVWPAEILDANPAYRGKTLYEVLYKDSDVGKFPLSEINADYKNQESSDFGFYLQKGLFEEYAAFGRGHGHDLAPYDAYHEVRGMRWPVVDGKETLWRYREGYDPYVKPGEGVKFYGNKDGRAVIIAVPYEPPAESPDQEFDTWLVTGRVLEHWHSGSMTMRVPELYKAFPGARCFMNADDARKRGLNQGAEIRIVSRRGEIRSRVETRGRNRMPPGVIFVPWFDASQLINKVTLDATDPISKQTDFKKCAVKIEPVA

SEQ ID NO: 6043 - protein, 496 aa, Zea mays
MQFALALDTNSGPHQIRSCEGDGIDRLEKLSIGGRKQEKALRNRCFGGRVAATTQCILTSDACPETLHSQTQSSRKNYADANRVSAIILGGGTGSQLFPLTSTRATPAVPVGGCYRLIDIPMSNCFNSGINKIFVMSQFNSTSLNRHIHRTYLEGGINFADGSVQVLAATQMPEEPAGWFQGTADSIRKFIWVLEDYYSHKSIDNIVILSGDQLYRMNYMELVQKHVEDDADITISCAPVDESRASKNGLVKIDHTGRVLQFFEKPKGADLNSMRVETNFLSYAIDDAQKYPYLASMGIYVFKKDALLDLLKSKYTQLHDFGSEILPRAVLDHSVQACIFTGYWEDVGTIKSFFDANLALTEQPSKFDFYDPKTPFFTAPRCLPPTQLDKCKMKYAFISDGCLLRECNIEHSVIGVCSRVSSGCELKDSVMMGADIYETEEEASKLLLAGKVPIGIGRNTKIRNCIIDMNARIGKNVVITNSKGIQEADHPEEGVI

SEQ ID NO: 6044 - protein, 154 aa, Sorbaria sorbifolia
SIGLSNYELFLTRDCLSYAKIKPAVSQFETHPYYQRETIVRFCQKHGVVPVAHTPLGGATANTKYFGSVSPLGDPVLNELAKKYQKSVAQICLRWNIERNTPVVPKSTKVERLKENFQALDFKLEKEDIDLINTIDRKSRTTLPSLSWGLDVYA

SEQ ID NO: 6045 - protein, 739 aa, Crocosphaera watsonii WH 8501
MTNSTKTICPYCGVGCGLEVLPPAQPGKAVNRDSEGNPIWQVRGDRSHPSSKGKICIKGGTVSESLVKDRLKYPMMRDSLTDEFRRVSWDEAMEAIVNRMQKVRLTQGPDALCMYGSGQFQTEDYYIAQKLFKGFLGSNNFDANSRLCMSSAVAGYIQSFGSDGPPCCYEDLELTDCAFLIGTNTAECHPIVFNRLRLYHKKNRKVKMVVVDPRRTQTAEAADLHLAIKPGTDIDLFNGIAYLLMRWGRIDSLFIDECTQNFPAYAEVIRHYSPELVARKCGIRIQDLEKAAKYWGESQRVLSLWSMGLNQSSEGTAKVRTLINLHLMTGDIGKPGAGPFSLTGQPNAMGGREAGGLCNILPGYRLVNNPQHRAEVEQFWGVRPGTIQPQRGRTAWEMIQGLETGEVGFLWIAATNPAVSMPDLKRTQAALKRSPFTVYQDAYYPTETATYAHILLPAAQWSEKTGVMTNSERVVNLCPQFRDPPGEARADWEIFAEVGRRLGFEKQFSFPNSAQVYAEFVKITEGRPCDSSGLSYEKLRRYGPLQWPYADTWPCLEGEELDRQNRTNKRLYTDFCFNTPDGRARFGAYHSRGLAEPSDQAYPFVLTTGRLYGHWHTQTRTGRIPKINKKHPEPFIEIHPRDAAKLNIKENSLLEVRSRRGKAYFPAKITKEIAPGTLFVPMHWGALWAENAEANALTHPTACPSSLQPELKTCAVQISIARVNEVRNQRSEVVFETRI

SEQ ID NO: 6046 - protein, 321 aa, Triticum aestivum
MAKRNLLLLLALMALATSMEAASATTSTRKLMFLVQPKPNLLTYHNGAVLHGDIPVSVLWYGRFTAAQKAIVSDFLLSLSSAPRASPAPSVSQWWSSIHQLYLSKAAAVGKHGAGATKAARVVLSGQVSDEACSLGKSLKLSQLPALAAKARPAKGGIALVLTAQDVGVEGFCMSRCGRHGTVDAKSGTAYVWAGNPATQCAGQCAWPFHQPAYGPQAPPLAAPNGDVGMDGLIINVASMVAGAVTNPFGDGFYQGEREAPLEAATACPGVYGKGAYPGYAGQLLVDGATGASYNAHGAHGRKYLLPALFDPATSACSTLV

SEQ ID NO: 6047 - protein, 445 aa, Triticum aestivum
MASRIASRLLRRSSPTLGLLRSYTHVRNYSSQLSGLIPVGPQSSKLTRRNNYFPNASPYQLWSRSFASDNGDKFEAVVPFMGESVTDGTLANFLKKPGDRVEADEAIAQIETDKVTIDVSSPEAGVIEKFIASEGDTVTPGTIVAIVSKSAAPAETHVAPSEEAPQKESPPVKAEEKSPKAEEKPTKVEPPKKQAPKPTPSKTSPTEPQLPPKERERRVPMPRLRKRIANRLKDSQNTFAMLTTFNEVDMTNLMKLRSDYKDEFVKKHGVKLGLMSCFVKAAVSGLQNQPIVNAVIDGDDIIYRDYVDVSVAVGTSKGLVVPVIRDADTMNFADIEKGINNLAKKATEGALSIDEMAGGTFTISNGGVYGSLISTPIINPPQSAILGMHSIVQRPVVVDGSILARPMMYLALTYDHRLIDGREAVYFLRRIKDVVEDPRRLLLDI

SEQ ID NO: 6048 - protein, 149 aa, Chamaebatiaria millefolium
NYELFLTRDCLSYAKIKPAVSQFETHPYYQRETIVRFCQKHGVCPVAHTPLGGATANTKYFGSVSPLGDPVLNEVAKKYQKSVAQICLRWNIERNTAVVPKSTKVERLKENFQVLDFKLEKEDIDLINTIDRKSRTTLPSLSWGLDVYA

SEQ ID NO: 6049 - protein, 140 aa, Glycine max
MSMRGIGGPLLCIGDLLNDVGEDEQQHGQGHSLLRETFPSSSNFNYNDPPPDLTKLFQEHYDHLNSALSGTDHSWTSLTLKLCTALETSNQLVQSTNTNVASLSKKVEDLQKIVKRGDSAIAAAKALYYVTPDNHSSASK

SEQ ID NO: 6050 - protein, 191 aa, Medicago sativa
HGGHGGGGYNGGGGHGGHGGGGYNGGGGHGGHGGAESVAVQTEEKTNEVNDAKYGGGSNYNDGRGGYNHGGGGHGGHGGHGGHGGGGYNGGGGHGGHGGAESVAVQTEEKTNEVNDAKYGGGSNYNDGRGGYNHGGGGYNHGGGGHGGHGGHGGHGGHGGHGADQTEDNTQNDHNDIIMHHAHFLSNICHE

SEQ ID NO: 6051 - protein, 149 aa, Exochorda racemosa
NYELFLTRDCLSYAKIKPAVSQFETHPYYQRESLVRFCQKHGVVAAAHTPLGGATANTKYFGSTSPLGDPVLHDVAKKYQKSVAQICLRWNIERNTPVIPKSSKVERMKENLQVLDFNLEKEDIELINGIDRKSRTTLPSLSWGLDVYA

SEQ ID NO: 6052 - protein, 447 aa, Arabidopsis thaliana
MALQRQLLKRATSDIYHRRAISLLRTDFSTSPSIADAPPHIPPFVHQPRPYKGPSADEVLQKRKKFLGPSLFHYYQKPLNIVEGKMQYLYDESGRRYLDAFAGIVTVSCGHCHPDILNAITEQSKLLQHATTIYLHHAIGDFAEALAAKMPGNLKVVYFVNSGSEANELAMMMARLYTGSLEMISLRNAYHGGSSNTIGLTALNTWKYPLPQYGTSGKVAGFIAETIQGVGGAVELAPGYLKSVYEIVRNAGGVCIADEVQTGFGRTGSHYWGFQTQDVVPDIVTMAKGIGNGLPLGAVVTTPEIASVLASKILFNTFGGNPVCSAGGLAVLNVIDKEKRQEHCAEVGSHLIQRLKDVQKRHDIIGDVRGRGLMVGIELVSDRKDKTPAKAETSVLFEQLRELGILVGKGGLHGNVFRIKPPMCFTKDDAGKFLMHWTIPSPGCEQG

SEQ ID NO: 6053 - protein, 517 aa, Trichodesmium erythraeum IMS101
MQTIKVERVTGVNDILPSTYQIDQQIKSILSSNFESYGYRPIDVPLIEYTELYLKKSGEDIISRLYDFIYRNRRLCLRPEFTASVVRAYLDNLQELPLPVRLYYMGPVFRYEQPQKEKYGQFTQMGIELIGATGAIADGEIISMACQGLDRLGLTEYQTFIGHVGVLNNFLDHLQLDTRLRSFLLTQMETLRIEGKEIVESRLSEIYPAFKKNNFLAEQLDTNTTTKKITDILQNLEENEARTAIFKLLESMNIELTSTRTPEEIVDRLLIKIKHQDQTKELNQALEFMTELSQLKGEPQAIFKEIKKLLSAYGIDDYGLAELQDILKSLEAFNIDKNRISLDLGISRGLQYYTGMVFEIYDSKLGVERKLCGGGRYDDLVVSLGGKQETPATGFSYLMEELRKELTEKAHLSFNNYQFVEALVVGLTREDYSDSVRVAEKLRSLGLRIETDVIGRDIQSNIEYGNQQKISFLIIVNSTEKKGGKVLLQNLDSGEQKKLELHEVVHQVRNIKDNTNC

SEQ ID NO: 6054 - protein, 181 aa, Oryza sativa
MEILVSALLLLLVPPLSALLAVAAPSLAWPSGSSSVRKLIAKKVAPEQAARDELLRVARYSSASAAAAASAVQQPGGGESSRPAAAAADDGGRPDQCAVCLSDIEEGDEVRELRCRHLFHRGCLDRWWLSARPPATCPLCRCRLLQSPSAAADDDDGDGEEDSDSDMVMFMAYLRSSSTWL

SEQ ID NO: 6055 - protein, 246 aa, Methanothermobacter thermautotrophicus
MVSLTKRCIAEFIGTFILVFFGAGSAAVTLMIASGGTSPNPFNIGIGLLGELGDWVAIGLAFGFAIAASIYALGNISGCHINPAVTIGLWSVKKFPGREVVPYIIAQLLGAAFGSFIFLQCAGIGAATVGGLGATAPFPGISYWQAMLAEVVGTFLLMITIMGIAVDERAPKGFAGIIIGLTVAGIITTLGNISGSSLNPARTFGPYLNDMIFAGTNLWNYYPIYVIGPIVGAVLAALTYQYLTSE

SEQ ID NO: 6056 - protein, 286 aa, Deinococcus radiodurans R1
MGWPEGRAPVAPEQGAPGPFFSDRGGVCWRHPAQVRQGKSGAGPAVPLRRTHMEFFIDTAIVDEIREINAWGVLSGVTTNPSLIVASGRDFKEVIGEIAELVPGGAISAEVTALDAEGMIKEGKDVAAWHKQVVVKLPLTPAGLQACKALTSEGIKTNVTLCFSVPQALLAARAGATYVSPFVGRVDDTGWDGSELIRQIKEAFVLGDIQTKVLAASIRHPQHVVQAALAGADVATIPYKVFTQMVKHPLTQAGLDSFMADWAKRQGASPETPPSEAGTNPVKKEG

SEQ ID NO: 6057 - protein, 356 aa, Neisseria meningitidis Z2491
MTKHIAILRGDGIGPEIVAETVRVLDKLIAQGLDVGYEYAPLGGEAYDEYGHPYPEFTQNLCRKADAVLLGAVGSPQYDNLDRPLRPERGLLAIRKDLNLFANLRPAILYPELANASTLKSEIVAGLDILIVRELTGDIYFGEPRGIRVLENGEREGYNTMKYSESEIRRIAHVAFQSAQKRSKKVCSVGKANVLETTELWREIFEEIGKEYPDVELSHMYVDNAAMQLVRAPKQFDVIATGNIFGDILSDEASMLTGSIGMLPSASLDENGKGLYEPSHGSAPDIAGQNKANPLATVLSLAMLLRYSLNDEARAQQVENAVQKVLQQGLRTGDIYEEGTKLVSCSEMGDAVLATL

SEQ ID NO: 6058 - protein, 411 aa, Deinococcus radiodurans R1
MTGLCPLHQPSPLDHPHSGGTPMQNLSQLDVKGKRVLVRVDYNVPVGDGVVQDDTRITASVPTIKKLLDGGASVVLMSHFGRPKNGPEDKYSLKPVAEAVSRALGQDVKFIPSLPGSDETLQAVQALRPGEVALLENVRFEAGEEKNDAALNDKLAKLGDAFVLDAFGSAHRAHSSVSGVAGKLPHAAGGLLQSEVDALGKLLHAPEHPYVVIIGGAKVSDKIKVIENLLPKVDRMLIGGGMMFTFIKARGGQIGNSLVEDDQLDLAKGLLEKYGDKLLLPTDAVAADKFAADAQSKVVPADQIPDGWMGLDIGPDTQRAYADALQGAKTVFWNGPMGVFEFDQFAAGTNAVAAAVGSLKDQAYTVVGGGDSVSAINKSGKADQIDHISTGGGASLELLEGKELPGVVAMA

SEQ ID NO: 6059 - protein, 701 aa, Ralstonia metallidurans CH34
MATRIVRAACPHDCPDTCALLVTVEDGRAIKVAGDPEHPGTQGVLCTKVSRYTERTYHPDRLLTPLRRVGKKGEGRFEPISWDEALDEIAERLSSIAARNPEAIVPYSYAGTMGLVQGESMAARFFHKLGASLLDRTICASAGATALRHTYGASVGMDMEQVVDAKLIIIWGSNPITSNLHFWTRAQEAKRRGATLVAIDPYRSLTAEKCHRHIAPMPGTDAALALAMMHVLIRDDLIDHDYVARNTVGFDALRERAMQFSPETAARICGIPVDDIEWLAGLYGKLAVRERQPVAIRLNYGMQRVHGGGQAVRAVACLPSLVGAWREAAGGLLLSTSGFFPVDNAALQRPDLLPGWPNLPRTINMSTIGDALLDDGTTGNGPKIEAVVVYNSNPVAVAPESGKVAAGFGRDDLFTVVLEHFRTDTADYADIVLPATTQLEHIDVHKAYGHTYFLANNQAVEPLGQALPNTEIFRRLAARMGFTESCFADSDEAIASQAVLREDKRAAGISWDSLKARGWQKLNIAKAPFAEGGFPSASGKCEFYSETMAREGLDPVPAYVPPYEAPSSAPELFARYPLAMISPPARNFLNSTFVNVDSLRATEGEPHLDIHPLDAAARGIANGVQVRAFNDRGSMLARARVTDRARQGLVVGLSIWWKKLAPDGKNANELTSQRLTDLGRAPVFYDCLVEVEPVPAEALAS

SEQ ID NO: 6060 - protein, 400 aa, Agrobacterium tumefaciens str. C58
MPAFKTIDDLNDIAGKRVLVRVDLNVPVADGKVTDATRIERVAPTILELSSKGAKVILLAHFGRPKGEPVAEMSLSQIVPTVEDVLDHAISFATDCIGAPAADAVAKMNDGDILLLENTRFHKGEEKNDPAFVEELAANGDIYVNDAFSAAHRAHASTEGLARHLPAYAGRTMQAELEALEKGLGQPVRPVVAIVGGAKVSSKIDLLMNLVKKVDALVIGGGMANTFLAARGTNVGKSLCEHDLAETAKQIMIEAATSGCAIVLPEDGVVAREFTAGAANEIVDINAIPADAMVLDVGPKSVESIKAWISRAETLVWNGPLGAFEIEPFDAATVAAAKHAAECTKAGKLVSVAGGGDTVAALNHAGVSDDFTYISTAGGAFLEWMEGKELPGVAILTTAK

SEQ ID NO: 6061 - protein, 156 aa, Haemophilus influenzae
NRANTPVLVDGKDVMPEINAVLAKMKDFCQRIISGEWKGYTGKAITDVVNIGIGGSDLGPYMVTEALRPYKNHLNMHFVSNVDGTHIAETLKKVNPETTLFLVASKTFTTQETMTNAQSARDWLLKAAKDESAVAKHFAALSTNAKDVEKFGIDTN

SEQ ID NO: 6062 - protein, 476 aa, Azotobacter vinelandii
SQKFDVIVIGAGPGGYVAAIKSAQLGLKTALIEKYKGKEGKTALGGTCLNVGCIPSKALLDSSYKFHEAHESFKLHGISTGEVAIDVPTMIARKDQIVRNLTGGVASLIKANGVTLFEGHGKLLAGKKVEVTAADGSSQVLDTENVILASGSKPVEIPPAPVDQDVIVDSTGALDFQNVPGKLGVIGAGVIGLELGSVWARLGAEVTVLEAMDKFLPAVDEQVAKEAQKILTKQGLKILLGARVTGTEVKNKQVTVKFVDAEGEKSQAFDKLIVAVGRRPVTTDLLAADSGVTLDERGFIYVDDYCATSVPGVYAIGDVVRGAMLAHKASEEGVVVAERIAGHKAQMNYDLIPAVIYTHPEIAGVGKTEQALKAEGVAINVGVFPFAASGRAMAANDTAGFVKVIADAKTDRVLGVHVIGPSAAELVQQGAIAMEFGTSAEDLGMMVFAHPALSEALHEAALAVSGHAIHVANRKK

SEQ ID NO: 6063 - protein, 540 aa, Prochlorococcus marinus str. MIT 9313
MPSSSSGNSRHFSRVAPVVLAILDGWGHREEVEHNSIRSAETPIMDALWHAYPHTLIEASGAAVGLPDNQMGNSEVGHLTIGAGRVIRQELVRISETVQAGRLGQTPALIALAERLRKSDGTLHLLGLCSDGGVHSHINHLCGLLHWAAAAGLNKVAVHLITDGRDTPIQSASKYLHQIEDAINASGVGELASLCGRYWAMDRDHRWERTIRAYEVLTDPNQSISRVTAEDVLSASYANGTTDEFLEPTRLSNNYFKDGDGLVMFNFRPDRARQLVQALTLPDFDGFPRANQPSLDVVTFTQYEHDLPVGVAFPAESLDDLLGQVVSEHGLRQYRTAETEKYPHVTYFMNGGIEQPLAGEERHLVPSPRVATYDLAPAMAADTLTESCVNAIESGVYSLVVINYANPDMVGHTGVMGAAQEAISTVDRCIGRLLDSTGRMGGTLLITADHGNAELMQGSDGQAWTAHTTNPVPVILVEGEKRKLAGYGNDIQLREGGGLADIAPTLLQLLDLPKPDAMSGLSLIQAIDSPTPSARLPQPV

SEQ ID NO: 6064 - protein, 469 aa, Streptococcus pyogenes MGAS8232
MAFEIIMPKLGVDMQEGEIIEWKKQEGDTVNEGDILLEIMSDKTNMELEAEDSGVLLKIVRPAGDTVPVTEVIGYIGAEGESVDTIASSEKTTEIPVPASADAGPTVAPKENVASPAPQVAATAIPQGNGGKVRATPAARKAAAEMGIDLGQVPGTGPKGRVHKEDVENFKGAQPKASPLARKIAADKGIDLATVSGTGFNGKVMKEDIMAILEAAKPAEAKAPAAKEEKVVDLPEGVEHKPMSAMRKAISKGMTNSYLTAPTFTLNYDIDMTEMIALRKKLIDPIMAKTGLKVSFTDLIGMAVVKTLMKPEHEYMNASLINDANDIELHRFVNLGIAVGLDDGLIVPVIHGADKMSLSDFVLASKDVIKKAQTGKLKAAEMSGSTFSITNLGMFGTKTFNPIINQPNSAILGVGATIPTPTVVDGEIVARPIMAMCLTIDHRLVDGMNGAKFMVDLKKLMENPFELLI

SEQ ID NO: 6065 - protein, 587 aa, Streptococcus pyogenes MGAS8232
MAVEIIMPKLGVDMQEGEIIEWKKQEGDTVNEGDILLEIMSDKTNMELEAEDSGVLFKITRQAGETVPVTEVIGYIGAEGESVEVSSPAASDVNVARTTEDLEAAGLEVPKAPAQAASAAPKAALADDEYDIIVVGGGPAGYYAAIRGAQLGGKIAIVEKSEFGGTCLNVGCIPTKTYLKNAEILDGIKIAAGRGINLASTNYTIDMDKTVDFKNTVVKTLTGGVQGLLKANKVTIFNGLGQVNPDKTVTIGSQTIKGRNVILATGSKVSRINIPGIDSKLVLTSDDILDLREMPKSLAVMGGGVVGIELGLVWASYGVDVTVIEMADRIIPAMDKEVSLELQKILSKKGMKIKTSVGVSEIVEANNQLTLKLNNGEEVVAEKALLSIGRVPQMNGLENLNLEMDRNRIKVNDYQETSIPGIYAPGDVNGTKMLAHAAYRMGEVAAENAIHGNTTRKANLKYTPAAVYTHPEVAMVGLTEEQAREQYGDVLIGKNSFTGNGRAIASNEAHGFVKVIADAKYHEILGVHIIGPAAAEMINEAATIMESELTVDELLLSIHGHPTFSEVMYEAFADVLGEAIHNPPKRK

SEQ ID NO: 6066 - protein, 401 aa, Prochlorococcus marinus str. MIT 9313
MAKRSLSNLSAADLRSKRVLVRVDFNVPLNENGAITDDTRIRAALPTINDLIDKGARVILSAHFGRPKGQINEGMRLTPVAKRLSELLGKNVTKTESCVGSDAEAKVNAMADGDVVLLENVRFFSEEEKNDANFAQKLAALADAYVNDAFGAAHRAHASTEGVTKFLNPSVAGHLMEKELQYLQGAIDDPKRPLAAIVGGSKVSSKIGVLEALIDKCDKVLIGGGMIFTFYKARGLSVGKSLVEEDKLELAKELEAKAKAKGVQLLLPTDVVLADDFAPAANSQTVSIDAIPDGWMGLDIGPDSINLFQDALADCQTVIWNGPMGVFEFDKFAAGTNAIATTLADLSGKGCCTIIGGGDSVAAVEKAGLAEKMSHISTGGGASLELLEGKVLPGVAALDDA

SEQ ID NO: 6067 - protein, 314 aa, Arabidopsis thaliana
MERYKCRFCFKSFINGRALGGHMRSHMLTLSAERCVITGEAEEEVEERPSQLCDDDDDTESDASSSSGEFDNQKMNRLDDELEFDFAEDDDVESETESSRINPTRRRSKRTRKLGSFDFDFEKLTTSQPSELVAEPEHHSSASDTTTEEDLAFCLIMLSRDKWKQQKKKKQRVEEDETDHDSEDYKSSKSRGRFKCETCGKVFKSYQALGGHRASHKKNKACMTKTEQVETEYVLGVKEKKVHECPICFRVFTSGQALGGHKRSHGSNIGAGRGLSVSQIVQIEEEVSVKQRMIDLNLPAPNEEDETSLVFDEW

SEQ ID NO: 6068 - protein, 74 aa, Populus x canescens
CMPGMTGYELLKKIKESSSFREIPVVIMSSENVMARIDRCLEEGAEEFIAKPVKLSDVKRLRDYYMASREVRSV

SEQ ID NO: 6069 - protein, 799 aa, Mesorhizobium sp. BNC1
MEQIRDIMRRMEYGPAPEANEDVVAWLKARASGIGHFIGGKFTFPKGAESFVSINPATEAELARVAQGTAADVDAAVKAARAAFPKWSALSGHERARYLYAIARHIQKRERFFSVLESTDNGKPIRETRDIDIPLVTRHFYHHAGWAEMVESEFEGFSPVGVCGQIIPWNFPLLMLAWKIAPALAAGNTVVLKPAELTPLTAAAFAEICLEVGLPAGVVNIVHGDGSTGAAICDHEGIDKIAFTGSTEVGRIIRERTAGSGKKLSLELGGKSPFIVFEDADLDGAVEGVVDAIWFNQGQVCCAGSRLIVQEGIAERFYDKLRRRMETLRVGSPLDKGIDVGAIVSAEQLQRITALVKKGEEEGGTLWRAKGQLPEKGYYFPPAFFTDVDPASTVCGVEIFGPVAVAMTFRTPAEAVALANNTRYGLAASIWSENINVALDAAAKVKAGVVWVNCTNMLDAGAGFGGYRESGFGREGAREGLYEYLVSDVEKALKPGKEPAPLKPRGAAEAKRRFASIAGIDRTAKMYIGGKQARPDGGYSYDVLGKGEAVIGQAPLGNRKDIRNAVEAAVKAASWGGVTAHNRAQVLYYVGENLEARREEFVKLLSESTGRNGKAAAAEFDVALRRIFYYAAQADKYDGAVHATKSRHVTLAMNEPWGVMGIVAPEEAPLAAFISLVLPAIAMGNRVVAIPSTRHPLIATNLYQVLDTSDVPGGVVNIVTGEKDVLAKTLAEHDEVAAMWYFGSKEGSAMIERTSCGNLKATWVSGGKVRDWLDDRQAKGREFLRRATQVKNIWVPYGE

SEQ ID NO: 6070 - protein, 178 aa, Rhodobacter sphaeroides
KPAVYFGGKARIIDFALSNAMNSGIRKMAIATQYKAHSLIRHIQRGWNFFREERNEYLDILPASQRVDENRWYLGTADAVTQNIDIVDSYDIKYVIILAGDHVYKMDYEIMLRQHCETGADVTIGCLTVPRAEATAFGVMHVDANLRITDFLEKPADPPGITGDEANALASMGIYVFK

SEQ ID NO: 6071 - protein, 330 aa, Magnaporthe grisea 70-15
MVKAVVAGAAGGIGQPLSLLLKLCPLVDELALYDVVNTPGVAADLSHISSNAKIAGYLPKDDGGKKALKDADLIVIPAGVPRKPGMTRDDLFNINAGIVKGLIEIAAEVAPKAFILVISNPVNSTVPISAEVLKAKGVFNPQRLFGVTTLDIVRAETFVAEIAGKSNPQELTVPVIGGHSGETIVPLFSQVKPAVTIPDDKYDALVNRVQFGGDEVVKAKDGAGSATLSMAYAGYRFAEKLLKAIKGAKGLVEPSYVYLPGVPGGEAIAKKTGCDFFSVPIELGPNGAEKAHDVLGELTSKEQTLLEAAVNGLKGNIQKGVQFVNSPPQK

SEQ ID NO: 6072 - protein, 175 aa, Triticum aestivum
MAPAVMASSATTVAPFQGLKSTAGLPVSRRSGSAGLSSVSNGGRIRCMQVWPIEGIKKFETLSYLPPLSTEALLKQVDYLIRSKWVPCLEFSKVGFVFREHNSSPGYYDGRYWTMWKLPMFGCTDATQVLNEVEEVKKEYPDAYVRVIGFDNMRQVQCVSFIAFRPPGCEESGKA

SEQ ID NO: 6073 - protein, 316 aa, Vibrio parahaemolyticus RIMD 2210633
MSNKLEQLRKLTTVVADTGEIDAIKKYQPEDATTNPSLILKAAQIAEYAPLIDASIEYAKAQSNDKAQQVQDTCDMLAVNIGKEILKTIPGRISTEVDARLSYDMEGSVAKARQLVKMYNDAGITNDRILIKLASTWEGIRAAEILEKEGINCNLTLLFSFAQARACAEAGVFLISPFVGRIMDWYKAKEGRDFEASEDPGVLSVTKIYNYYKEYGYKTVVMGASFRNIGEILELAGCDRLTIAPALLAELEAAEGEVVEKLVDSKGAAERPAPMTHAEFLWEHNQDPMAVEKLAEGIRNFAVDQGKLEAMIEAKL

SEQ ID NO: 6074 - protein, 427 aa, Deinococcus radiodurans R1
MAIQRPKGTNDLLPSGSPKTEAFQRAAAHEWLIAQAREVLERAGAQRIDTPMFEEAELVKRGVGGSTDIVRKEMFTVYYFGDHGGYVLRPEGTASIVRAYLENGLKQLPAPLKLWTSGPMFRAERHQKGRYRQFTQVDYEVLGSADALVDAEAIALMVAVVQKLGLRGVRVKLGSIGDPEDRERYNAYLRDLFSPHLGRLSDDSKDRLERNPMRILDSKSASDQELLAELSVRPMLDFLGEGAAADFRQVQAYLSDWGVPFDLDPSIVRGLDYYRRTAWELHYEGIGAKSALGGGGRYDGLSEQLGGGSVPGIGWAFGVERLLLALEQEGIEIPGSGGPQLYVAALDEENVPLAARVALAARASCRAEFAYRAMKPGSAFKDAERRGAVWVGLIGSEEAAAGTLSLKNLHTGEQKTVPVGELGQALA

SEQ ID NO: 6075 - protein, 269 aa, Medicago truncatula
MAENSASNATNEIVLNVNKDVSNKSEDSTSHATASFLQKSVAEVIGTYFLIFAGCASVLVNKNNENVVTLPGISIVWGLAVMVLVYSLGHISGAHFNPAVTIAFASTKRFPLKQVPAYVAAQVFGSTLASGTLRLIFTGKHNQFVGTLPAGSDLQAFVIEFIITFYPMFIISGVATDNRAIGELAGIAVGSTVLLNVMFAGPITGASMNPARSIGPALLHSEYRGIWIYLVSPILGAVAGAWVYNVIRYTDKPVREITKSSSFLKAAKP

SEQ ID NO: 6076 - protein, 101 aa, Triticum aestivum
  unsure (1)..(101): unsure at all Xaa locations
MAPTVMASSATSVAPFQGLKSTAGLPVSRRSNGASLGSVSNGGRIRCMQVWPIEGIKKFETLSYLPPLSTXALLKQVDYLIXRXKWVPCLEVQAKVGFIFR

SEQ ID NO: 6077 - protein, 194 aa, Triticum aestivum
  unsure (1)..(194): unsure at all Xaa locations
VIGMDVTASEFFRAGKYDLDFKSPDDPSRYISPDQLADLYKSFIKDYPVVSIEDPFDQDDWGAWQKFTASAGIQVVGDDLTVTNPKRIAKAVNEKSCNCLLLKVNQIGSVTESLQACKLAQANGWGVMVSHRSGETEDTFIADLVVGLCTGQIKNGAPCRFERLAKYNQLLRIXEELGSKAKFAGRNFRNPLAK

SEQ ID NO: 6078 - protein, 375 aa, Zea mays
  unsure (1)..(375): unsure at all Xaa locations
MLEHHKKKHRSLESRGADFDAERRLYSHAFKKSSSLLSRLMKHKFGWVFNKPVDPTLGLHDYFTIXKHPMDLGXTIRGRLSRGQYRNPKEFAEDVRLTFHNAMTYNPKGQDVHFMAEQLSGIFEAQWPEIEAEVNYLASCPPLPKKFPPPPIDLHFLERSDSMRHHMALDTNSRPISHTPTYTRTPSMKKPRAKDPNKRDMTIDEKRKLSENLQNLPPVKLDAVVQVIKNKNLSVKQHDDEIEVEIDSMDAETLWELDRFVSNYKKNLSKQKRKAERAMLARQDAELRAQHPIQQPQPTPVPQEPFGEKSPKQVVKDSLEGEQLPASAPEQNGENRQNASSSSNSSSSSSGSGSSSSGSDSDSSSSDGSDAGNSS

SEQ ID NO: 6079 - protein, 459 aa, Wolbachia endosymbiont of Drosophila melanogaster
MTDYDLIVIGGGPGGYKCAIAAAKLGLKVACIDKNSIFGGTCLRVGCIPSKALLHSSYQYAHTKNDLSKLGIKIKDASFDLKEMLGYKDARVQELGKGIEYLFNLHKITKINGLASFDQGNLEVSVEGKVLKTKNIVIATGSDVISLPGINIDEKSIISSTGALSLTEVPKKLVVIGAGAIGLEMSSVWRRLGSEVTVVEFFDRIAAAMDGELSKSLLSSLQKQGIKFLLSTKVEEIKQSSNSLSVKVCSVKDNQTNTIEADKVLVAAGRKPCTENLGIDEKIEKDNRGFVQVNNRYETNVKGIFAIGDVIGGAMLAHKAEEEGVAVAEIIAGQSPHVDYGIIPSVIYTHPAVSSIGKTEEELKNAGRKYKVGKCQFAANGRAKITDDAEGFVKVLTCSRADTILGVHIIGAYADTLINEAAVAMAYSAAAEDIYRICHSHPDINEAFRDACIDAFFKK

SEQ ID NO: 6080 - protein, 563 aa, Uncultured crenarchaeote
MCGIVGILSKKERNVAPLIGKMLSCMKNRGPDGMGLSTENQIVYSDTFDNPLFSQVEGHDVLGHSRLAIVGGSCGQQPFVSCDKKLILEHNGEIYNYKEIRKNLSAHHTFTTSTDSEVIVHLLEDHYQNTKGDLIEAIRRTVTQLDGIYVLAIREQSTGDIVLVRDGIGVRQIYYGESSDFIAFASERKALWKIAMSDQIKRLLPGYALVISRKEGSSNFKTTLFPISVNTKKSICEKYSILYTDIDSAVNAYGDTLVESMRKRVSDFKKIGIVFSGGIDSVIVAYLAKQMAPEVICYTSGIKGSSDILNSLEIAEKLDLKLEIEQMTESDVESTIPKIISIIEDDNMGQVEVAIPIYGAVKLAHEQGIRVMLTGQGADELFGGYSWYSKIVKKHGYEKIQGYLIEDIKLLYKETLEREDKITMSQSIELREPFLDTNLIDTVLRIDPRLNIQNNGNNYDNLGKRVHRKLAEKLGIPKEIAYRIKEAAQHGSGIHNTLNTLAMKNGFTESKVNSSYLDKLKKRELIGSSQRYGHLFEKEQIWSLEPHIQMYLENISKNILPRN

SEQ ID NO: 6081 - protein, 453 aa, Glycine max
KKPTLGGVSDERKSESTSSVVNASELPPHLLLEMPALSPTMNQGNIAKWRKQEGDKIEVGDILCEIETDKATLEFESLEEGYLAKILAPEGSKEVAVGHSIAITVEDASDIEAIKNSVSSSTNQQKAPQRGTKSEVKAQKNNITRISPAAKLLIAEYGLDAPTLNATGPYGTLLKGDVLSAIKSGKLSPKPASSKEKALSSQSHQQVAASQESKSDLKKSDAYEDFPNSQIRKVIAKRLLDSKQNTLHLYLSSDVILDPLLSLRKGLKEQYDVKVSVNDIIIKVVAAALRNVPEANAYWNVEKDEVILNDSIDISIAVATEKGLMTPIIKNADQKTISAISSEVKELAAKARAGKLKPHEFQGGTFSISNLGMFPVDKFCAIINPPQACILAVGRGNKVVEPVIGTDGIEKPSIATKLSLTLSADHRVFDGKVGGAFLSALQSNFSDIRRLLL

SEQ ID NO: 6082 - protein, 121 aa, Zea mays
  unsure (1)..(121): unsure at all Xaa locations
RTRGLRDRQLAAQFHEMPLDLKMIRAEKAGFEILKSTTVDKLPNDLEGIAYXMEKLYILIDEIYRYLDDAGQRRAAPDHKIERLLSQSCASMPRFAPGADDQLLNDKIQDNLALVYLSSIT

SEQ ID NO: 6083 - protein, 409 aa, Nostoc sp. PCC 7120
MKAVVFHGIGDIRLDNVPEPKIKEPTDAIIRLTSSAICGTDLHMIRGTFTGMKPGTILGHEGVGIVEELGSNVRNLQVGDRVVVPSTIACGYCSYCRSGYHAQCDNANPHGHNAGTAFFGGPEAAGPFDGLQAEYARIPYANAGLVKLPKEVTDDQAILLSDIFPTAYFGADIAEITPGDTVAIFGCGPVGQFAIVSARLFGAGRIIAVDTIPSRLEMARDLGAEVIDYNAEDPIEAIRELTGGIGVDRVIEAVGVDANAPDSGPAAKKARQEAQQFQQQLQQIAPETNPQNGNWHPGNAPSQALEWSIQALAKAGTLSIIGVYPPTHNFFPIGTAMNKNLTINMGNCNHRKYIPLLVDLVRNGTVDPTKVLTQVEPLMSVIDAYKAFDQRQPGWVKVELVPGAALANV

SEQ ID NO: 6084 - protein, 91 aa, Bacillus anthracis str. A2012
MVLDRNPVDYHSEIEQAAFGTGVLVDGMDFSDDKMLQGRTFSYSDTQRYRVGANYLQLPVNAPKAPVRTNQHRGQMDMRNPKESGEIRILL

SEQ ID NO: 6085 - protein, 310 aa, Bacillus anthracis str. A2012
MAENQDKNSLEEQDVKRETLTTRQGHPVKDNQNIRTIGNRGPATLENYHFIEKISHFDREEVPERVVHARGAGAFGYFETYGKVGDEPAEKYTRAKVFSGAGKKTPLMVRFSTVAGAKDSPETARDPRGFAVKMYTEDGNWDLVGNNLKIFFIRDAMKFPDMIHAFKVDPVSNVSNPQRMFDFVSRTPEATHMITFLFSPWGIPATYRHMQGSGVNTYKWVNEKGEAVLVKYHWEPKQGIRNLTQEDANSIQAMNVSHATQDLYEAIERKDYPEWELFVQIMEDGYHPELDFDPLMIRSFGQRSSSHGYQ

SEQ ID NO: 6086 - protein, 296 aa, uncultured bacterium
MSRTRNVLAIVMAGGEGSRLHPLTDERCKPAVPFNGKHRIVDFVLSNLVNSEIYSIYLLVQYKSQSLIEHIRSSWTMTRFIPQHFVTVVPPQMRNGPEWFQGTADSVYQNIHLIESFQPDIVAVFGADHIYRMDVRQMVDFHRASEAHVSVATLPVPLSQCNQFGIVEVDAHHRIANFVEKPKNTRPMPGSSTHALASMGNYLFNADVLLDALKKAHATGHSDFGRDILPTMLQSHRLMAYDFTQNEIPGTASYEEHAYWRDVGTIDAYFDAHFDTLGATPRFRMTNRDWPIYASP

SEQ ID NO: 6087 - protein, 387 aa, Lactobacillus gasseri
MKVGIDQIGYFTPNKYVDMVDLAHARNQDPNKFLIGIGQKKMSVADPTQDAVSMGINATLRYIDKIDQSKVGLLIFGTESSVDQSKSGSLFVKSALKLDPAVRAFEVKEACFGLTAGLMIAQDFVRLHPDQTAIVIGSDIARYGINTAGEVTQGAGSVSLLVSSNPRILELNEGHSAYSEDINDFWRPNYSKTAKVDGKYSTQVYLDFFKHTFSDYKRQKGLETKDFAAIAYHLPFTKMGLKANRLAIEGVDEETNARLMDSFTASKELNANVGNIYTGSLYLSLLSLLENGGLKAGDLIGLFSYGSGAMAEFYSANVVEGYENELDKAADEALLDKRRKLSVPEYEKIFSASLVDPQNNVELTSDEKKGRYYFAGICDDIRQYRVK

SEQ ID NO: 6088 - protein, 316 aa, Glycine max
MALPYPFSYLLFLLLILLSSLPNISQATSRAPNRMLALVQNQPLVLKYHKGPLLKGNITLHLLWYGTFTPTQRSIVIDFLESLTSTSAPGAPSVSTWWQTTESYRGGPCTLVVGNQILDETYSLGKSLKNDHLVALASNPKLNSAPGDRVIHVILTAADVAVEDFCMNQCGTHGRGKNGNSEKIAYAWVGNSVTQCPGQCAWPFHQPLYGPQTAPLVAPNGDVGVDGMVINLATVLAGAVTNPFEDGYYQGPASAPLEAVSACTGIFGKGAYPGYAGNVLAENATGASYNAVGVRGRKFLLPAMWDPLTSTCKTLV

SEQ ID NO: 6089 - protein, 233 aa, Magnaporthe grisea 70-15
MADVDMTDAPGGAGPVAKKKGGDGAAGEGKKRFEVKKWNAVALWAWDIVVDNCAICRNHIMDLCIECQANQASATSEECTVAWGICNHAFHFHCISRWLKARQIPPPKSHDHHRSAFSSITMFCDVCSGFDPPPTGSHLTGWRLKNGQGGRTRANAEPLISLAYNNVAAQSPSLRQLNAIVGSKTGPDPTLGLSGLRSLPHKTSGCINSPLSLDSSRRKSCSIKIYKDLRRVW

SEQ ID NO: 6090 - protein, 520 aa, Oryza sativa
MAVGVVAGVESQERRGGGAGTGRVTAFVVLSCVTAGMGGVIFGYDIGIAGGVSSMEPFLRKFFPEVHRRMEGDVRVSNYCKFDSQLLTAFTSSLYVAGLLTTFAASRVTAGRGRRPSMLLGGAAFLAGAAVGGASVDIYMVILGRVLLGVGLGFANQAVPLYLSEMAPSRWRGAFSNGFQLSVGVGALAANVINYGTEKIRGGWGWRVSLALAAVPAGLLTLGALFLPETPNSLIQQGKVERCDVEQLLKKIRGADDVADELDTIVAANSATAGVGGGGLLMLLTQRRYRPQLAMAVMIPFFQQVTGINAIAFYAPVLLRTIGMGESASLLSAVVTGVVGVGATLLSMFAVDRFGRRTLFLAGGAQMLASQVLIGGIMAAKLGDDGGVSRAWAAALILLIAAYVAGFGWSWGPLGWLVPSEVFPLEVRSAGQSVTVATSFVFTVFVAQAFLAMLCRMRAGIFFFFAAWLAAMTAFVYLLLPETKGVPIEEVAGVWRGHWFWSRVVGGDGEEEERNNGGKL

SEQ ID NO: 6091 - protein, 169 aa, Oryza sativa
MASSATTVAPFQGLKSTAGMPVARRSNSSFGNVSNGGRIRCMQVWPIEGIKKFETLSYLPPLTVEDLLKQIEYLLRSKWVPCLEFSKVGFVYRENHKSPGYYDGRYWTMWKLPMFGCTDATQVLKELEEAKKAYPDAFVRIIGFDNVRQVQLISFIAYKPPGCEESGGN

SEQ ID NO: 6092 - protein, 773 aa, Burkholderia fungorum LB400
MGVKNGKVVATQGDPQAEVNRGLNCVKGYFLSKIMYGQDRLTTPLLRMKDGKYAKDGEFAPVSWDQAFDVMADHFKRTLKEKGPTAVGMFGSGQWTVWEGYAAVKLMKAGFRSNNLDPNARHCMASAVTGFMRTFGMDEPMGCYDDIEQADTFVLWGSNMSEMHPILWTRITDRRLSTPTTRVVVLSTFEHRSFDLADQTIIFTPQSDLAILNYIANYIIRNGNVNRDFVNRHTVFKQGNADIGYGLRPDNPLQKTARNAGDPNGSQPITFDEFAKFVSKYDAAYVTKLSGVPQNKLDQLARLYADPKVKVMSFWTMGFNQHTRGTWANNMVYNLHLLTGKIATPGNSPFSLTGQPSACGTAREVGTFSHRLPADMVVTNPKHREEAEHIWKLPAGTIPDKPGYHAVLQNRMLRDGKLNAYWVQVNNNVQAAANINGEALPGYRNPQAFVVVSDVYPTVTAVAADLILPSAMWVEKEGAYGNAERRTQFWHQLVDAPAGARSDLWQLVEFSKRFKVEEVWPADLLAKKPEYRGKTLYDVLYRNGQVDRFALTETDSHYRNDEAKAFGFYIQKGLFEEYASFGRGHGHDLAPFDAYHKARGLRWPVVNGKETRWRYKEGSDPYVKTGTGWQFYGNPDGRAVIYALPYEPPPEVPDKEYPFWLATGRVLEHWHSGSMTRRVPELYRAFPNAVCFMHPDDAKAMGVRRGVEVKVMSRRGYILTRVETRGRDKPPRGLVFVPWFDSSQLINKVTLDATDPISLQTDYKKCAVKIVKV

SEQ ID NO: 6093 - protein, 458 aa, Eremothecium gossypii
MNISEAGRLLGHSRLRHIPGRRYNSMGKIRGNNYFAETTRDVWTIINEAAAKAAAESVANGGSGAGKGMKVLNLGQGFFSYSPPDFAIAGAQRALENAMNNQYAPTRGRPALVEALLKLYRPMYGDLAAENVQVTTGANEGIFACLAGLVNPGDEVIVFEPFFDQYIPNIELLGGVVRYVPIRPPAELSKRVTEGTEWVIDYDMLRQTINEKTKAVIINSPHNPIGKVFTREELLKLGNICVEKGIYIISDEVYEHLYFTDEFTRIATLSEEISQHTLTVGSAGKSFAATGWRIGWVISRNKELLALASKAHVRICFSSPAPLQEACAVAIEHALKTTYYADTRAAYQKKYERFQKPFDDLGLPYTRAEGSYFLLVDFSRLPLPADYHFPEELADKGRDFRVAYWLINELGLVAIPCSSFFIPDHREASENMLRFAICKDDTYLDEAIERLMVLKNYL

SEQ ID NO: 6094 - protein, 493 aa, Zea mays
  unsure (1)..(493): unsure at all Xaa locations
MDPYKHRPSSGSNSSFWTTNSGAPVWNNNSALTVGQRGPILLEDYHLIEKLAQFDRERIPERVVHARGASAKGFFEVTHDVSHLTCADFLRAPGVQTPVIVRFSTVVHERGSPETLRDPRGFAVKFYTREGNFDLVGNNMPVFFIRDGMKFPDMVHAFKPNPKTNLQENWRIVDFFSHHPESLHMFTFLFDDVGIPLNYRHMXRGFGVNTYTLINRDGKPHLVKFHWKPTCGVKCLLDDEAVTVGGTCHSHATKDLYDSIAAENYPEWKLYIQTIDLDHEDKFDFDPLDVTKTWPEDIIPLQPVGRMVLNKNVDNFFAENEQIAFCPAIIVPGIHYSDVKLLQTRIFSYADTQRHRLGPNYLMLPVNAPKCAHHNNHHDGFMNFMHRDEEVNYFPSRFDPARHAEKVPIPPRVLTGCREKCIIQKENNFKQAGERYRSFDPARQDRFIQRWVDALTDPRVTHEHHTIWISYWSQCDAALGQKLASRLNLKPNM

SEQ ID NO: 6095 - protein, 146 aa, Triticum aestivum
  unsure (1)..(146): unsure at all Xaa locations
MAPTVMASSATSVAPFQGLKSTAGLPVSRRSNGASLGSVSNGGRIRCMQVWPIEGIKKFETLSYLPPLSTEALLKQVDYLIRSKWVPCLEXSSKVGFIFREHNASPGVLRWPGTGTMWECLLFGIAPDANASDTRWEGGPETLDAL

SEQ ID NO: 6096 - protein, 711 aa, Cytophaga hutchinsonii
MKKPTSKTEGTDPKFQDLQKNTSDATDQFMTTDQGLKINDDNNSLKAGERGPSLLEDFILREKITHFDHERIPERIVHARGSAAHGYFQVHESMAQYTKAGFLQDPSIKTPVFVRFSTVAGSRGSTDLARDVRGFSVKFYTAEGNYDLVGNNMPVFFIQDAAKFPDLIHAVKPEPHHEMPQAASAHDTFWDFISLMPESMHMIMWVMSDRAIPRSLRMMEGFGVHTFRFINKNNESHFVKFHWKPKQGTHSVVWDEAQKISGKNCDFHRQDLWEAIESGNFPEWELGVQLIPEADEHKFAFDLLDPTKLVPEEEVPVTIIGTMVLNRNPDNFFAETEQVAFHPGHLVPGIDFTNDPLLQGRLFSYTDTQLSRLGSPNFHEIPINRSVAPTHNNQRDGHMRQEINTGRVSYHPNSLGGGCPFQAKMAEGGFTSFNERIDAKKVRERSESFSDHFSQATLFFNSQTEVEKGHIIKALRFELGKVETEAIRVRMVGLLSQIDKTLATKVAAGLGIAVPAPAFPMNHGVGADDDFEKHEPKKAEQVTKSSDALTILRNPTVTPSIATKQIAFLCADEVSGASVVSYKNALERKGAVVKIIAPHLGFIKTEEGKKIKVDQSLLIAASVLFDAVFIPAGKGIKQLKGIKEVAEFITDTYKHCKVIGGEDEGALVIQSVQAIMEAGKNADEGIVLNKDTTAFVKALGKHRFWEREEAV

SEQ ID NO: 6097 - protein, 375 aa, Oryza sativa (japonica cultivar-group)
MAITVSIYLVKMPIYLETRGTSRISLVVHHIRRRTHSSSSSRLRFQRGGGAEQRRGMAAAQGSGVPAALALSSGHTMPSVGLGVWRMDSPAIRDLIHSALRIGYRHFDCAADYQNEAEVGDALAEAFQTGLVKREDLFITTKLWNSDHGHVVEACKDSLKKLRLDYLDLYLIHFPVATRHTGVGTTASALGDDGVLDIDTTISLETTWHAMEDLVSMGLVRSIGISNYDIFLTRDCLAYAKIKPAVNQIETHPYFQRDCLVKFCQKHGILVTAHTPLGGSTANTEWFGSVSCLDDPVIKSLAEKYGKTPAQLVLRWGLQRNTVVIPKTSKEERLQENFAVFDFAISDEDMEKMRSIDRKYRTNQPAKFWGIDLFA

SEQ ID NO: 6098 - protein, 466 aa, Bradyrhizobium japonicum USDA 110
MATYDLVVIGTGPGGYVCAVRAAQLGMKVAVVEKNATLGGTCLNVGCMPSKALLHASEMFEEAAHSFAKMGVSVSEPKLELPAMMNFKQQGIDGNVKGVEFLMKKNKIDVLKGTGKILGTGKVEVSADGKSQVVETKSIVIATGSDIARLKGIEIDEKRIVSSTGALSLDKVPGKLLVVGAGVIGLELGSVWKRLGAEVVVVEFLDRIMPGMDGEIAKQFQRILEKQGFAFKLGAKVTAVDTSGKTLKATIEPAAGGAAETLEADVVLVCIGRVPYTDGLGLKEAGVALDNRGRVQIDPHFATSLKGVYAIGDVVAGPMLAHKAEDEGVAVAEIIAGQAGHVNYDVIPGVVYTTPEVSSVGKTEEELKQAGVAYTVGKFPFTANGRSKVNQTTDGFVKILADAKTDRVLGVHIIGREAGEMIHEACVLMEFGGSAEDLARTCHAHPTRSEAIKEAALAVGKRAIHM

SEQ ID NO: 6099 - protein, 414 aa, Bradyrhizobium japonicum USDA 110
MTEIRVPTLGESVTEATIGRWFKKAGDPVAVDEPLVELETDKVTIEVPAPSAGTLSEIIAADGATVAVGALLGQITEGAAGAAKPAAAPAKPAAAPAAAAAAAAPAPAAKAPPADAPLAPSVRKLSAETGIDASTVPGSGKDGRVTKGDMLAAIERAASAPTPVNQPAAAVQVRALSPADDAAREERVKMTRLRQTIARRLKDVQNTAAMLTTFNEVDMTNVMALRAHYKDAFEKKHGSKLGFMGFFTKAVVQALKDIPAVNAEIDGTDLIYKNYYHIGVAVGTDKGLVVPVVRDCDHKSIADIEKGIADFGRRARDGQLKIDEMQGGTFTITNGGIYGSLMSTPILNAPQSGILGMHKIQERPMVVAGKIEVRPMMYLALSYDHRVIDGKEAVTFLVRVKESLEDPARLVLDL

SEQ ID NO: 6100 - protein, 439 aa, Deinococcus radiodurans R1
MKRAPYTAAATTAALLLLPLLSTAFAADAKPHLDTGDTAWMLMSAALVFLMTPGLAFFYGGLTRAQSVLNTMMMSMVSIGLVGVLWMLAGYSLAFGDGGAWLGDFAHLGLNGLAGQLTGTIPTYVFASFQAMFAIIAVALISGAVVERMRFGAFILFAALWTLIIYSPLAHWVWGANGWLFKDGALDFAGGTVIHISAGVSALVAAWLLGPRLGYPRNAHVPHNVPLVLLGAGLLWFGWMGFNAGSALGANQTAALAFITTLIAPAAAMLTWLGWESLSSKPTAVGAATGLVVGLVAITPACAFVSPWAAVLLGILGATASYWTVQAKHRLMADDALDVFACHGVAGIVGALLTGLLAWTTGSGKPIGAQFMTQLISVVASLLYAGVGSFILLKLVSLVIPLRVPAGQEIAGIDLSAHQEQGYSENELGIGAPVFLGGD

SEQ ID NO: 6101 - protein, 392 aa, Synechocystis sp. WH 8501
MHFAQRIQALEKNVFADMDRAKSQAISKGKKIIDLSLGSSDLPADPEAIATISASLEDPSTYGYLLHHGTLNFRETVGQWYSNRFGVEVDPQREVLTLIGSQEGTAHLPLALLDPGDFALLLDPGYPSHAGGVYLAGGQIYPMPLLAENDFLPVFEDIPSQVLGQAKLMVLSYPHNPTTATASLSFFQEAVNFCRNHGLVLVHDFPYVDIVFEGMTQPPSILQADTQKSLSIEFFTLSKSYNMGGFRIGYAIGNAEIIQALRQVKAVVDFNQYQGILNGAIAALTGEQTTVKKTLARFQSRRDAFIKALNNIGWQVTPPQATMYVWAKLPQTWENKSVEFSTELVAATGVAVSPGAGFGKQGEGYVRFALVHDPHVLELAVEKIAQFLATRT

SEQ ID NO: 6102 - protein, 567 aa, Oryza sativa (japonica cultivar-group)
MASSALICDTEQWKGLQAHVGAIQKTHLRDLMDDAERCKAMTAEYEGIFLDYSRQRATGETMEKLFKLAEAAKLKEKIEKMFSGDKINSTENRSVLHVALRAPRDEVIKSDGVNVVPEVWGVKDKIKQFSETFRSGSWVGATGKALTNVVSVGIGGSFLGPLFVHAALQTDPEAAESAKGRQLRFLANVDPVDVARSIKDLDPETTLVVVVSKTFTTAETMLNARTLKEWIVSSLGPDAVAKHMIAVSTNLELVEKFGIDPKNAFAFWDWVGGRYSVCSAVGVLPLSLQYGFPIVQKFLEGAASIDKHFRSSSFEKNIPVLLGLLSVWNVSFLGYPARAILPYSQALEKFAPHIQQLSMESNGKGVSIDGVQLSFETGEIDFGEPGTNGQHSFYQLIHQGRVIPCDFIGVVKSQQPVYLKGEIVSNHDELMSNFFAQPDALAYGKTPEQLHSEKVPEHLISHKTFQGNRPSLSLLLPSLSAYEIGQLLSIYEHRIAVQGFLWGINSFDQWGVELGKSLASQVRKSLHASRMEGKPVQGFNSSTASLLTRYLAVEPSTPYNTTTMPKV

SEQ ID NO: 6103 - protein, 829 aa, Vibrio parahaemolyticus RIMD 2210633
MKMTRRAFVKANAAASAAAVAGITLPASAANLIASSDQTKITWDKAPCRFCGTGCSVLVGTQNGKVVATQGDPEAPVNKGLNCIKGYFLSKIMYGQDRLTQPLLRMKDGKYHKDGEFTPVSWDVAFDTMAEKWKASLEKKGPTSVGMFGSGQWTVMEGYAAAKMMKAGFRSNNIDPNARHCMASAVVGFMRAFGIDEPMGCYDDFENADAFVLWGSNMAEMHPVLWTRITDRRLSHPHVRVNVLSTYYHRSFELADHGYIFNPQSDLAIANFIANYIIENDAVNWDFVNKHTNFTQADTDIGYGLRDDDPLQKAAKNPNSGKLTSISFEEYKKSVAPYTVEKASEISGVEKEKLIELAKQYADPNTKVMSLWTMGMNQHTRGVWMNNLVYNIHLLTGKIATPGNSPFSLTGQPSACGTAREVGTFAHRLPADMVVANPKHRQIAEKIWKLPEGTIPPKPGFHAVLQDRMLNDGVLNCYWVQCNNNMQAGPNINTERLPGYRNPENFIVVSDPYPTATAQAADLILPTAMWIEKEGAYGNAERRTQAWYQQVGTVGDAKSDLWQVMEFSKRFKMEEVWPEELLAKAPQYRGKTMYDMLFKNGQVDKFPLEEARELNDDSHHFGFYVQKGLFEEYATFGRGHGHDLAPYDVYHTVRGLRWPVVDGKETQWRFKEGSDPYAKAGSGWDFYGNADGKAKIISAPYEAPPEVPDSEFDLWLCTGRVLEHWHTGTMTRRVPELYKAVPDAVCYMHPEDAKARNVRRGEEVVIANKRGEVRVRVETRGRNRPPKGLVFVPFFDARILINKLILDATDPLSKQTDFKKCPVKITKVA

SEQ ID NO: 6104 - protein, 386 aa, GIBBERELLA ZEAE PH-1
MATQTMKAVNYQGPYKVTVEDVELPKLEHPDDVIVKVTTAAICGSDLHMYEGRTAAQPGITFGHENMGIVEQLGEGVTLLKKGDRVVMPFNVADGRCRNCEEGKTAFCTGVNPGFAGGAYGYVAMGPYRGGQAQYIRVPYADFNALKLPAGKEHEADFILLADIFPTGWHGVEISGFRSGESVAVFGAGPVGLMAAYSAVLRGASRVFVVDRVPERLQAAEKIGCTPIDFSKGDAVDLIIKANGGEEVDRSVDAVGYQAVGNSGDTEQPNIVLENMIRVTRPCGGLGIPGLYVPSDPGASDEASAKGMISLSFGKLFEKGLTIGTGQCNVKSYNRYLRDLIISGRAKPSFVVSHEINIDEAEVAYEKFDKRIDGYTKVLIHPNGGF

SEQ ID NO: 6105 - protein, 557 aa, Schizosaccharomyces pombe
MDFNNIPLATIKSSDDKGKDFIVEMTTRPSETKKKVPFSEDMREIPSLPNEEEANATDPQANEVADENGEGFEAEKISSWIWVLSAVAGISGLLFGYDTGVISGALAVLGSDLGHVLSSGQKELITSATSFAALISATTSGWLADWVGRKRLLLCADAIFVIGSVIMAASRNVAMMVVGRFIVGYGIGLTSLIVPMYITELAPARLRGRLVIIYVVFITGGQLIAYSLNAAFEHVHQGWRIMFGIGAAPALGQLISLFWTPESPRYLLRHNHVEKVYKILSRIHPEAKPAEIAYKVSLIQEGVKVDFPEGNKFQHFFHSLKVLFTVPSNRRSLFIGCFLQWFQQFSGTNAIQYFSAIIFQSVGFKNSISVSIVVGATNFVFTIVAFMFIDRIGRRRILLCTSAVMIAGLALCAIAYHFLPADTTQNTNSGWQYVVLASIIIFLASYASGIGNIPWQQAELFPMEVRALGAGFSTAINWVGNLIISASFLTMMESITPTGTFALFAGFCFVGLVTSYFTYPELAGMSIENIHKLLEKGFWQAVKESTKRVRKGRIDEA

SEQ ID NO: 6106 - protein, 396 aa, Ralstonia metallidurans CH34
MNVLRFADLVAQGRVCGQRVFIRADLNVPQDDAGNITEDTRIRASVLCIRMALDAGAAVMVTSHLGRPTEGEFKPEDSLAPVAARLAALLGRPVPLKSNWVGGVDVQPGEVVLLENCRLNKGEKKNSEALARQMAALTDIFMHDAFGTAQRAEASTYGIAQFAPVACAGPLLAAEIDAIGKALAAPKRPLVAIVAGSKVSTKLTILQSLAKNVDGLIVGGGIANTFLLAQGLPIGKSLAEPDLVDEARAVIDAMKARGAEVPIPVDVVCAKAFKADAPATVKAVAEVDDDDLILDIGPQTATLLAHKLAAAGTIVWNGPVGVFEFDAFANGTKTIARAIAASDAFSIAGGGDTLAAIAKYGIDKDVGYISTGGGAFLEVLEGKTLPAFEILARRAQ

SEQ ID NO: 6107 - protein, 89 aa, Zea mays
EAFLGSRSGLWAGGPAPGQFYRIPSTPDSFMDPASALYRGPITRTQNPMVTGTSVLGVKFEGGVVIAADMLGSYGSLARFRNISRIMRV

SEQ ID NO: 6108 - protein, 149 aa, Triticum aestivum
  unsure (1)..(149): unsure at all Xaa locations
MGPARCASGRLWLLLLALAVADFTAAQQNQNPPPPGGQYYTNFSPSMAIVIVVLIAAFFFLGFFSVYIRHCYGDSPYSATTLPLGAAAARSRRQQRGLDXAVLETFPTMAYADVKEHKAVKGALECAVCISEFDDDETLRLLAKGLPRF

SEQ ID NO: 6109 - protein, 475 aa, Rubrobacter xylanophilus DSM 9941
MGDPKGFLKIGRKPVPKRPVEERVRDYRWVYEPMPEGELRRQASRCMDCGVPFCNTGCPLANLIPDWNDLVYRDHWREAIDRLHATNNFPEFTGILCPAPCEAACVLSINDRPVTIKEIERSIIERAFEEGWVVPKPPPPERRTGKRVAVVGSGPAGLAAAQQLNRAGHSVVVFEKDDRPGGLLRYGIPDFKMEKWVIDRRLRQLEEEGIEFRTGAYVGYDPTAEELRRGFDAVVLAVGALQGRDLPVPGRELRGIHLAMEYLVQQNRRVAGLPVEGEEITARGKHVIILGGGDTSADCLGNVHREGCASVRVLTHGPKPPESPDPLEWPDWPFVLHTYPAHEEGGERGWNVAVTGFSGEGGRVRRMHCVRTRRDPDGRTHHLPGTEFELEADLVLLAIGFTGPVRDRLLEELGVEFGPRGAIATREGFDTGIPGVFVAGDARRGADLIVTAIAEGRKAARQVDAYLMGRSLLPG

SEQ ID NO: 6110 - protein, 465 aa, Oryza sativa (japonica cultivar-group)
MNSLQSFLALNPPAAAAALGGARLRPSRVTACLATPTPTPPPPTSAPLAPAAAAARRELSAASRAVVEDEARYIVGTYNRSRVVLVAGRGCKLYDADGREYLDMAAGIAVNALGHADPDWVAAVSAQAATLVHASNVQYTVPQVALAKRLVEASFADRVFFANTGTEANEAAIKFARKFQRVARPDGDAPTEFMSFTNCFHGRTMGSLALTSKVQYREPFAPVMPGATFAEYGNLEEAKKVIQSGKIAAVFVEPVQGEGGIHSATKEFLQGLRDACDEAGALLVFDEVQCGLGRTGYLWAYEAYGVLPDIMTLAKPLAGGLPIGVVLVTEKVASAINFGDHGTTFGGGPLVCQAALTTLDKIQKPGFLAEVAKKGENFKQLLSTKLSGNAHVKEIRGIGLIVGIELDVPAGPLVDACLDRGVIVLTAGKGNVVRLVPPLIISEKELEQAAEVIRDCLPALDASTS

SEQ ID NO: 6111 - protein, 341 aa, Brassica napus
MFRSALVRSSASAKQSLLRRSFSSGSVPERKVAILGAAGGIGQPLALLMKLNPLVSSLSLYDIANTPGVAADVGHINTRSQVVGYMGDDNLAKALEGADLVIIPAGVPRKPGMTRDDLFNINAGIVKNLWSAIAKYCPHALVNMISNPVNSTVPIAAEIFKKAGMYDEKKLFGVTTLDVVRVKTSYAGKANVPVAEVNVPAIVGHAGVTILPLFSQATPQAILSGDALTVTTKRTQDGGTEVEEAKAGKGSATLSMAYAGALFADACLKGLNGVPDVVECSYVQSTITELPFFASKVRLGKNGVEEVLDLGPLSDFEKEGLEALRPGIKSTIEKGVKFANQ

SEQ ID NO: 6112 - protein, 490 aa, Pseudomonas aeruginosa PAO1
MARFEEQKLYIGGRYVEASSGATFETINPANGEVLAKVQRASREDVERAVQSAVEGQKVWAAMTAMQRSRILRRAVDILRERNDELAALETLDTGKPLAETRSVDIVTGADVLEYYAGLVPAIEGEQIPLRETSFVYTRREPLGVVAGIGAWNYPVQIALWKSAPALAAGNAMIFKPSEVTPLTALKLAEIYTEAGVPDGVFNVLTGSGREVGQWLTEHPLIEKISFTGGTSTGKKVMASASSSSLKEVTMELGGKSPLIIFPDADLDRAADIAVMANFFSSGQVCTNGTRVFIHRSQQARFEAKVLERVQRIRLGDPQDENTNFGPLVSFPHMESVLGYIESGKAQKARLLCGGERVTDGAFGKGAYVAPTVFTDCRDDMTIVREEIFGPVMSILVYDDEDEAIRRANDTEYGLAAGVVTQDLARAHRAIHRLEAGICWINTWGESPAEMPVGGYKQSGVGRENGLTTLAHYTRIKSVQVELGDYASVF

SEQ ID NO: 6113 - protein, 176 aa, Deinococcus radiodurans R1
MSLPPGNGPVQISAEQIKARIQELAAQIRSDYAGQRPHLICVLNGAFMFHTDLVRALDMPATIDFMQASSYGTAKQSSGEVRLVKDLAFPISDRHVIMVDDIVDTGITMSYLLHYLQGRGPASLKVAALLSKPSRRKVEVPVDYLGFTIPDAFVYGYGLDRAQLDRNLPFITSQEE

SEQ ID NO: 6114 - protein, 282 aa, Deinococcus radiodurans R1
MVHRRWQPRPLPGGPVHHLSPLPPLVTFLRFEGGPMHAVILAGGQGTRLRPYTTRVPKPLVPIGGELSILEIVLHQLKSFGFTRVTLAVGHLSHLIRAFVGNGRQYGLDIDYTEEETPLGTIGPVLNVLPWLPEHFLIMNGDVLTDLNYGAFLRGHMASGDPLTVSTYHREIRSEFGVLDVDDSGEHIVAFREKPAVPFQVSMGVYGMTKSTLGRYQPGQVLGFDTLMLDLLAAGERPRSDLFGGYWLDIGRPEDYDTANEQWNEMQKVLLPGGIPPRPPQL

SEQ ID NO: 6115 - protein, 428 aa, Neisseria meningitidis Z2491 [sequence omitted]

SEQ ID NO: 6116 - protein, 194 aa, Magnaporthe grisea
MVVATIKCVVVGDGAVGKTCLLISYTTNKFPSEYVPTVFDNYAVTVMIGDEPYTLGLFDTAGQEDYDRLRPLSYPQTDVFLVCFSVTSPASFENVREKWFPEVHHHCPGVPCLIVGTQVDLRDDPSVREKLSKQKMQPVRREDGERMAKELGAVKYVECSALTQYKLKDVFDEAIVAALEPPTPKRKSKKCLIL

SEQ ID NO: 6117 - protein, 454 aa, Mesorhizobium loti MAFF303099
MPTEVILPKVDMDMATGQISRWFAEEGARVKKGDVLFEIETDKAAMEIDAPASGVLRDVSGKEGVDIPVGAPVAWIYADDEAYGAKQDAAPISPLVGEMSAKSTEGDVVPPTSHSVMPPSALPGISPTRGEIGQSPPGERATPLARRLAREAGLALAGIIGTGPHGRVVKADVDAAIAGGGAKAAPAAKAPAGAPAAAPAPAVKPMSDDQVLKLFEQGSYELVPHDNMRKTIARRLVEAKSTIPHFYLTLDCELDALLALRTQINAAAPMKKTEKGDVPAYKLSVNDMVIKAMAMALKAVPDANASWTETAMVKHKHADVGVAVSIPGGLITPIIRHADEKTLSTISNEMKDLASRARSRKLKPEEYQGGTTAVSNLGMFGIKDFAAVINPPHATILAVGAGEERAVVKNGEIKIATVMSVTLSTDHRAVDGALGAELLVAFKRLIENPMGMLV

SEQ ID NO: 6118 - protein, 295 aa, Agrobacterium tumefaciens str. C58
MVEQKKIRKAVFPVAGLGTRFLPATKAVPKEMLTVVDKPVIQYVVDEAAEAGIEHFVFVTGRGKAVIEDYFDIQFELEQMLRERNKNAELTLLAGLLPKAGTASFTRQQVPLGLGHAVWCARDIVGDEPFAVLLPDMIMHSQKSCLKGMVELYDQTQGNVIAVQECAPDQTHKYGIVGVGNAVGEGFKITEMVEKPAKGTAPSNFYINGRYILQPEIFDILENQERGAGNEIQLTDGMLTLAKSQEFSGYHFRGQTFDCGAKDGFILANVAFALERGDIRPAIEEPIKALIEGLK

SEQ ID NO: 6119 - protein, 423 aa, Haemophilus influenzae Rd KW20
MAKTIQAIRGMNDCAPTESPLWQWIEAQVRNVLNSYGYSEVRMPIVESTPLFARAIGEVTDVVSKEMYTFWDNDEQLTLRPEGTAGCVRAAIEHGWIYNNEQRLWYIGPMFRHERPQKGRYRQFHQVGVEVFGIANPEIDAELIMLTYRLWKALGIDQHVTLQLNSIGSLEARANYRSALVGFLENHQDLMSDEEKERLVRNPLRILDTKNPELQKVLDNAPKLLDYLDDESRTHFEQLCSLLDAVGIQYEINPKLVRGLDYYNKTVFEWVTSALGAQGTVCGGGRYDGLVEQLGGHATPSIGFAMGLERLVLLVQEVNPNVPAKSAVDIYVVYQGEGATLAAFELAEKVRSELPHLNTMLHCSSGNFKKQFKRADKSGATLALVIGESEVQNKQVVVKHLQGGTDQQTLDLVNIIDYLQTQF

SEQ ID NO: 6120 - protein, 484 aa, Agrobacterium tumefaciens str. C58
MGKVTGFLEIDRQVGKYQPASDRIRHFREFTIPMSDAEVQKQAARCMDCGIPYCHGPTGCPVHNQIPDWNDLVYNNNWEEAIRNLHSTNNFPEFTGRVCPAPCEEACTLNLEDAPVAIKTVEQAIADKAYELGFIVPKPATIHTGKKVAIIGSGPSGMAAAQQLGRAGHEVHVYERESKAGGLLRYGIPDFKMEKNFIDRRVEQIKGEGVTFHCGVNVGVDVTVEALLADHDAVLYCGGSETPRPAGIGGADFNGVYDAMPYLVQQNRRVGRENIDSVGWPADPILAGGKHVVVVGGGDTASDCVGTAFRQGAVKVTQLDIRPMPPEKEDKLAVWPFWATKMRTSSSQAEGAIREFQVATLEFVGEDGVLTGVKCCQVDDRRKPIAGTEFIIKADLAFIAIGFSGPFTDSVLKEMEGKLTLNTDRRGSTNVVANETDYRTSVDKLWTAGDVRRGQSLVVWAIREGRQAARAIDEALMGATVLPR

SEQ ID NO: 6121 - protein, 546 aa, Saccharomyces cerevisiae
MLSRSLNKVVTSIKSSSIIRMSSATAAATSAPTANAANALKASKAPKKGKLQVSLKTPKGTKDWADSDMVIREAIFSTLSGLFKKHGGVTIDTPVFELREILAGKYGEDSKLIYNLEDQGGELCSLRYDLTVPFARYVAMNNIQSIKRYHIAKVYRRDQPAMTKGRMREFYQCDFDVAGTFESMVPDSECLSILVEGLTSLGIKDFKIKLNHRKILDGIFQIAGVKDEDVRKISSAVDKLDKSPWEAVKKEMTEEKGQSEETADKIGEYVKLNGSLKEIHAVLSADANITSNEKAKQGLDDIATLMKYTEAFDIDSFISFDLSLARGLDYYTGLIYEVVTSASAPPENASELKKKAKSAEDASEFVGVGSIAAGGRYDNLVNMFSEASGKKSTQIPCVGISFGVERIFSLIKQRINSSTTIKPTATQVFVMAFGGGKDWTGYLPERMKVTKQLWDAGIEAEYVYKAKANPRKQFDTTKKAGCHIAVILGKEEYLEGKLRVKRLGQEFADDDGELVSAADIVPIVQEKLSQIHEDGLNEVTRLIKGL

SEQ ID NO: 6122 - protein, 526 aa, Saccharomyces cerevisiae
MSSATAAATSAPTANAANALKASKAPKKGKLQVSLKTPKGTKDWADSDMVIREAIFSTLSGLFKKHGGVTIDTPVFELREILAGKYGEDSKLIYNLEDQGGELCSLRYDLTVPFARYVAMNNIQSIKRYHIAKVYRRDQPAMTKGRMREFYQCDFDVAGTFESMVPDSECLSILVEGLTSLGIKDFKIKLNHRKILDGIFQIAGVKDEDVRKISSAVDKLDKSPWEAVKKEMTEEKGQSEETADKIGEYVKLNGSLKEIHAVLSADANITSNEKAKQGLDDIATLMKYTEAFDIDSFISFDLSLARGLDYYTGLIYEVVTSASAPPENASELKKKAKSAEDASEFVGVGSIAAGGRYDNLVNMFSEASGKKSTQIPCVGISFGVERIFSLIKQRINSSTTIKPTATQVFVMAFGGGKDWTGYLPERMKVTKQLWDAGIEAEYVYKAKANPRKQFDTTKKAGCHIAVILGKEEYLEGKLRVKRLGQEFADDDGELVSAADIVPIVQEKLSQIHEDGLNEVTRLIKGL

SEQ ID NO: 6123 - protein, 257 aa, Rubrobacter xylanophilus DSM 9941
MEGLAPVIGVTATLKEDTERVAERPLGRFVRADADYVEGVVEAGGVPVVLAPVAGPGAAETLVSGLDGLLLSGGSDLEPSHYGEEALPELGVTLPERDEFEIALARGALRRGIPIFGICRGMQLLNVVLGGTLYQDIPSQLGRGVLGHRQRTPKWQPAHEVEVLPGSLLGGIVGRGVVKVNSYHHQAVKELAPGLVVGARSPDGVIEAIESREPGERWVLGIQWHAEAMRAAGPEHRALFEAHVSAARRYAGRRAAA

SEQ ID NO: 6124 - protein, 261 aa, Zea mays
  unsure (1)..(261): unsure at all Xaa locations
MQLLIANFTEFQLATDITFLLHETVFFLSGLPSLLFERFGLFAKYKIQKRSNTSAYQNRCVLRLILYHVSVNLPVMILSYPAFKFMGLRSSLPLPHWTVVVSQVLFYFVLEDFIFYWGHRALHTKWLYKHVHSVHHEYATPFGLTSEYAHPAEILFLGFATDDGPALTGPHLFTLWXLWMVLRVLETVEAHSGYHFPLSPSNFLPLYGGSDFHDYHHRVLYTKSGNYASTFVYMDWLFGTDKDYRKAKTIEEKEGKKKKNL

SEQ ID NO: 6125 - protein, 358 aa, Acinetobacter sp. ADP1
MFIKNAWYVACRPEEIQDKPLGRTICGEKIVFYRGKENKVAAVEDFCPHRGAPLSLGYVEDGHLVCGYHGLVMGCEGKTIAMPAQRVGGFPCNKAYAVVEKYGFIWVWPGEKSLANEADLPTLEWADHPEWSYGGGLFHIQCDYRLMIDNLMDLTHETYVHSSSIGQKEIDEALPVTKVDGDHVVTERYMENIIAPPFWQMALRGNHLADDVPVDRWQRCHFFAPSNVHIEVGVAHAGHGGYNAPKTRKSLQWLSIVVTPETETSHWYFWGMARNFQPENQQLTDQIREGQGKIFTEDLEMLEQQQQNIVRNPQRQLLMLNIDAGGVQSRKIIDRLLAKENSPSPQDTQRKFPNIRVI

SEQ ID NO: 6126 - protein, 358 aa, Glycine max
MSRTLVQPIGQKRLTNVAVVRLKKHGMRFEIACYPNTVLSWRSGVEKDLDEVLQSHTVYTNVSKGVLAKSKDLIAAFGTDDHSKICLDILKKGELQVAGKERESLLSSQFKDIATIVMHKTYNPETQRPYTISMIERLMREIHFAVDPHSTSKKQALELIQELQKHFPIKRCPLRIRATAPDDQVPELLGKLNEWNAIVISKEGSSAQLSVIFELEPGLYKDCHDFVMNKMHGRFEVLAHSLYVEGDTQVEQYNDYEDIPEALPKEPYDSVLQLNEKLQKQTISSTSRPTEGQQKQNKCSTCNVSFDDSKLYREHHKSEWHKHNIKRKTRQLPPLTEEECMADMELGDSKSDLKDYSF

SEQ ID NO: 6127 - protein, 1018 aa, Mycobacterium bovis AF2122/97
MSFLLVEPDLVTAAAANLAGIRSALSEAAAAASTPTTALASAGADEVSAAVSRLFGAYGQQFQALNARAATFHAEFVSLLNGGAAAYTGAEAASVSSMQALLDAVNAPTQTLLGRPLIGNGADGVAGTGSNAGGNGGPGGILYGNGGNGGAGGPDGGAGGNGGAAGLIGNGGAGGAGGVGGAGGAGGAGGTGGLLYGNGGAGGNGGSAAAAGGAGGNALLFGNGGNGGSGASGGAAGHAGTIFGNGGNAGAGSGLAGADGGLFGNGGDGGSSTSKAGGAGGNALFGNGGDGGSSTVAAGGAGGNTLVGNGGAGGAGGTSGLTGSGVAGGAGGSVGLWGSGGAGGDGGAATSLLGVGMNAGAGGAGGNAGLLYGNGGAGGAGGNGGDTTVPLFDSGVGGAGGAGGNASLFGNGGTGGVGGKGGTSSDLASATSGAGGAGGAGGVGGLLYGNGGNGGAGGIGGAAINILANAGAGGAGGAAGSSFIGNGGNGGAGGAGGAAALFSSGVGGAGGSGGTALLLGSGGAGGNGGTGGANSGSLFASPGGTGGAGGHGGAGGLIWGNGGAGGNGGNGGTTADGALEGGTGGIGGTGGSAIAFGNGGQGGAGGTGGDHSGGNGIGGKGGASGNGGNAGQVFGDGGTGGTGGAGGAGSGTKAGGTGSDGGHGGNATLIGNGGDGGAGGAGGAGSPAGAPGNGGTGGTGGVLFGQSGSSGPPGAAALAFPSLSSSVPILGPYEDLIANTVANLASIGNTWLADPAPFLQQYLANQFGYGQLTLTALTDATRDFAIGLAGIPPSLQSALQALAAGDVSGAVTDVLGAVVKVFVSGVDASDLSNILLLGPVGDLFPILSIPGAMSQNFTNVVMTVTDTTIAFSIDTTNLTGVMTFGLPLAMTLNAVGSPITTAIAFAESTTAFVSAVQAGNLQAAAAALVGAPANVANGFLNGEARLPLALPTSATGGIPVTVEVPVGGILAPLQPFQATAVIPVIGPVTVTLEGTPAGGIVPALVNYAPTQLAQAIAP

SEQ ID NO: 6128 - protein, 261 aa, Cucumis sativus
MAISKTLSFGFLLLVSLGLASAARSLLSYDIPPHRSGYDNYDHPVVNPKVGYEHDRRDGYYHDRDHHDAPYGGGAGGGYGAGAGAGSSLGGSGYGSGGGGGSGYGGVGNHEVGYGSGGGGGYGAGVGSDLGGSGYGSGGGGGTGGGYGDLGGRGKGYGSGGGGGSGYGGRGDHGVGYGSGGGGGYGSGVGGGAGVVDHGVGYGSGGGGGAGSGYGGSKGYGGGSGGGGGAGYGGGAHGSGYGSGGGAGSGEEGGYDGGYAP

SEQ ID NO: 6129 - protein, 541 aa, Rubrobacter xylanophilus DSM 9941
MKVGGMTCGHCEVAVGRALEGAGARDVEADFRRGEAVFALPEGAGVEALRRAVREAGYEPGAVERVGGERVRGGGRHDYDLAIIGSGGGAFAAAIRAVERGARVAMIERGTVGGTCVNVGCVPSKTLLRGAEIYHRAGHHPFEGVRTKALAADYGAMVAQKDRLVGRMRQEKYLDLVEEYGWELIRGEAAFEDEGTLRVEGRRISAAAYLIATGARPAVPPIPGLEEAGYLTSTTNMELEEAPESVLVIGAGYVAIEQGQLLSRLGSRVTLMQRGPRLLREQEPEVSEAMMEALRREGIEVLTGVRIERAGKTEKGKKRLHLAVGGEERVLEGEEILVAAGRRPNVEELGLERAGVELDERGAVRVDGRLGTTNPRVWAAGDVTLGPQYVYVAAYEGALAADNALGGAGREVDLSALPGVIFSDPQVASVGLTERRARERGLEVQSSVLPLEAVPRALVNHDTLGVIKLVAEAGTGRLLGAHMVAENAGDVIYAATLAVRFGLTVSDLAENFAPYLTMSEGLKLAAQAFGRDVSRLSCCAA

SEQ ID NO: 6130 - protein, 466 aa, Exiguobacterium sp. 255-15
MVVGELTQERDLVILGGGPAGYTAAIRASQLGRTVTLIEQAQIGGLCLNKGCIPSKVVAHAAEVKLQTKHMTALGFSFHPTHDFSQLVEYRERTIRQLRTGVEALCQANAIEVVHGTASFLADDRIGVELGHQFDTYRFNDVVIATGSHSIKQDAPSVLNAEQLYQLTELPERLVIIGQDYIAIEAAMSFQALGTSVTLIADAFDFDPSLDKELRRLFKKQKIQLVTGTVTAIEAQEDVTVTVVKQGQETTWSAPFLFHSLPRVPHTLELGLERIGVTLAEDGTIPVDPFGQTNRPHIYAIGDVTPGPAIATRAIHEAKRTAEHLSGQSADTTVPYYPTIIRSLPPIVSIGLTEQTATDAGHSFRTAQFALNANGATTIEGGSGFIKVISDATTSLILGIHMIGEGAIELAGVFAQTLELHAKEEDVRFPVMPHPSRNEAFTEAIEALLGQAIHLPPRQQDVLAKS

SEQ ID NO: 6131 - protein, 268 aa, Chlorobium tepidum TLS
MVSGNDNNHHAAQRARMLLTQIAPNFLDPKHEWQRIFAELWGTFLLVLVAAGGPVAATSSGNHAGDALLPVAPGLMVMAIIYFMGTVSGAHLNPAVTLAFAMRRNFPWVRVPGYILAQVAGGWLAALFLGFMFGNAAVAPGMTLPGHEVTPLKALVMEMVLTAALVNTILGTSSGARNIGTNGAIAVGGYIALAGMWAAPVSGASMNPVRSLAPALVCGDTTLAWVYVAGPIAGALIGVVFEWILKGPPTTAGTVAAQGTLDIDDREG

SEQ ID NO: 6132 - protein, 316 aa, Acinetobacter sp. ADP1
MTTMNAIYQHASSTEQYLDLGLRDQWYPVLASWEVSANPVGITRLGENIVVWRDEAGQLYALEDRCPHRGARLSLGWNLGDRVACWYHGVRSGGRMVLVADVPAVHECPLKGAACVKSYPIIEKHDAIFIWFGIDANEPPAELVFPEQLASEAWSSCLCQADWKVNHQYAIDNVMDPMHGTYLHCTSHSMAEGERTAEMKHRSTEHGFIFEKEGQTGVNFDWVEYGNTGASWLRLSIPYRKDFGPGGVFWIVGFATPIDADNTRVFFWRCRKVNGWQRNVWRFLYRNHLEKLHWDVLEQDRIILENLAPNARSKEF

SEQ ID NO: 6133 - protein, 448 aa, Rubrobacter xylanophilus DSM 9941
MAERFDAVVLGMGPGGEVAASRLISGGKRVAVVEKELIGGECAYWACIPSKTLLRPPEVRGEARRAFGTGVPELEMEAIFDYRDYMIRNLDDAAQVEGYERQGATVVKGAGKIVGPGKVEADGETIEAGHIVVATGSAPNVPPVEGLDEITVWTNREVTTSREVPRRALIVGGGPNGIEAAQWLSRFGSEVTIVQSADRLIDREDPRVGELIRGALEGEGIRVLTGRKAARARRDGEGAVVELDDGAEVGTDVVVIAAGRRPRTEGLGLETVGIEPDGGAIPVDDRCRAAEGVWAIGDATGVALFTHVAKYQGRVAADNILGRERRADYRGIPRVVFSDPEIAACGLTEEQARREGMATATATLDLSRAIARPYTYEEDPRGTLSLVADRKRGVLVGAWAVAPLAGEWIHEAALAIRAEVPIEKLLDSVAQFPTYSEAYLYCLERLDL

SEQ ID NO: 6134 - protein, 404 aa, Exiguobacterium sp. 255-15
MIEVKLHDVGEGMTEGEIANYLVRVGDRVTIDQPVVEVSTDKMVAELPAPVSGVVTDLIIPVGQTVSVGTVLLLIEALETETAVTAEQPIQQTTEQIKVRPPVVTPAVPSNNRRVLATPYTRKIAREHGIDLEQVPPSDPSGRVTEEDVRRFLDADTSVEKTDVVEQTSTLSANPVETIPFRGIRKQIAKKMTQSLFTIPHVTHFEEVDMTRLLALREELKTAGKPISVNAFFIKALIFALQDFPVFNAKLDEANEQIILEQQFHIGVATETADGLIVPVVRDADKLTMQQLHTRVAELSARAKTGDLRAADLKPSTFTMSNVGPLGSTGATPIINYPETALIAFHKTKKRVCVDDHDQIVIRSMMNLSMSFDHRVADGATAVAFTNRFAGLIEHPTTLLMELI

SEQ ID NO: 6135 - protein, 243 aa, Candida glabrata
MSGGAAAASAAGYDRHITIFSPEGRLYQVEYAFKATNQTNLNSLAVRGKNCSVIINQKKVPDKLLDPSTVSYIFKISKTIGMVANGPIPDARNAAARAKGEAAEFRYKYGYDMPCDVLAKRMANLSQIYTQRAYMRPLGVILTFISVDEELGPSIYKCDPAGYYVGYKATATGPKQQELTTSLENYYKKKNVGSHLDMEEWEKVVEFGITQMIDSLGTEFSKKDLEIGVATENKFIILTPDEI

SEQ ID NO: 6136 - protein, 594 aa, Xylella fastidiosa Ann-1
MSFSKHFGKLMLATCLSLSAAPAFSYSISHGKVVDDKGNQIQLRGVNWFGFETGDHVVNGLWARNWKEFITQLQGMGFNAIRLPFCPANLNSNTSPSSIDYSRNPDLQGLSSLQILDKVVKELSDRRMYVLLDHHRPDCSAISELWHTDSYSEKQWIDDLRFVAHRYANVPGVIGLDVKNEPHGRATWGTGDFQTDWNTAVEHAAAAILEAAPKWVIGIEGIGENPICSSTIGHFWGENLEPMDCTPLKVPADHLLLMPHVYGPDVYVQPYFNSPDFPNNMAAIWDKHFGHFAKAGYAMAIGEFGGKYGEGDPRDIAWQNAFVDYLISIGVTDAFYWAANQNSGDTGGMVGNDWTTPRDDKVKLLNKLWNAGGGASGGSGSGAGGGSGGGAGAGSGSGAGGGSGGGAGAGSGSGAGGGSGSGAGAGSGSGAGGGSGSGAGGGSGGGAGAGSGSGAGGGSGSGAGVGSGSGAGGGSGSGAGAGSGSGAGGGSGSGAGAGSGSGAGGGSDPTKSKISVNTIVDSDWHTGYCERIQVTNTSDSPNTWTVTIPIKGKIQTLWSARWSVKDNALTAFGMDWNKTLDPKGRTEFGFCSNY

SEQ ID NO: 6137 - protein, 173 aa, Marchantia polymorpha
AHATFYGGDSGAATMGGACGYGNLWWRGYGLATAALSDTLLNNGLTCGACFEIKCNITGGESGKWCIQSNPSIKITATNQCPPNFDRPTDNGGWCNPPRTHFDLSLNMFRRLAQTQAGIIPISYRRTRCIKTGGIRFYLGGNAHFNLVLVYNVGGWGDVMKMQIRGTKTGWIT

SEQ ID NO: 6138 - protein, 500 aa, Xylella fastidiosa Ann-1
MDGLVVVAVALMVPQARCMMSFACVGLGGEDRRGIARDAGIFWCVVRGITGIGGVSDACLPVLAGVGTAWRCSQAVAVIGGRLVGWTLGVYLLPDEPGQWPFVSIKEIEMSIVRMTDLALSGKRVLIRQDLNVPIDQGRITSEQRIIASLPTIRVALERGAAVMVTSHLGRPKEGVWSEEDSLAPVAKRLSQLLGIEVPLRRDWVDGVQVAPGQLVLLENCRMNVGEAQNDEALARKYAALCDVFVMDAFGTAHRAQASTHGVICCAAIAAGGPLLMAELDALSRGLKHPVKPLLAIVGGSKVSTKLELLSNLVNNVEQLITGGGIANTFLAAAGYSIGKSLYEADLIETAREIIIVAKARGAEIPLPTDVVVAKQFLPGVTATVKTVDAIVADDLILDIGPQTARHYAALIETAATVVWNGPVGVFEFDAFSKGTEVLARAVAASSAFSIAGGGDTLAAIDKYGVADQISYISTGGGAFLEFLEGKTLPAVAALQARSG

SEQ ID NO: 6139 - protein, 258 aa, Triticum aestivum
LANVGAELAHQVPGRVSTEIDARLAYDTQGIIHRVHELLNLYNQHDVSTDRLLFKIPATWQGIEASRLLESEGVQTHLTFVYSFAQAAAAAQAGASVVQIFVGRLRDWARNHSGDPEIDEALKKGEDAGLALAKKVYAYIHRNGYKTKLMVAAIRNKQDVFSLLGIDYIIAPLKILQSLEESVTDPDVKYGYVPKLTPAIGKTYNFTEEELVKWDQLSLSAAMGPAAEELLASGLEGYVNQARRVEELFGKIWPPPNV

SEQ ID NO: 6140 - protein, 253 aa, Physcomitrella patens
MAIPWSSVVLVTLVSLMACAEAKGSSFMGSDWGRAHATFYGGADASGTQGGACGYGNLYSTGYGTNTAALSSSLFNSGLSCGACYELTCDPSGSQYCLPGGSAIITATNFCPTGSNGGWCNPPKQHFDLAQPVFSKIARTVGGVIPINYRRVPCSKSGGMRFTVNGNPYFLLVLVTNVGGAGDVQQLYIKGASTGWLPLKRNWGQMWQFTGNSGMHGQAISFKAVTSDGAEAISPNVAPANWGFGQTFEGSNF

SEQ ID NO: 6141 - protein, 272 aa, Physcomitrella patens
  unsure (1)..(272): unsure at all Xaa locations
MPSISSFEKNADFKGSSFSTETTLSTDDQPDEVFARKAGYAPVPRSYGGVWRNARSTFYGGMDAAGTMSGACGYGNLYASGYGVHTTALSSALFKNGMACGACFEVQCGGKGKPCKPGSVVVTATNFCPPNPGQSANNGGWCSPXNEHFDLSYPAFVKIADPKAGAVPLQYRRVPCQKQGGIRFTINGNCNFILVTITNVGGSGVVTAAYLKGDKTEWSPLSRNWGANWQCRRNYCGQGISIKIVTSDNKVSVTKLAKSDWCFGKTFIGKQV

SEQ ID NO: 6142 - protein, 253 aa, Physcomitrella patens
MAIPWSSVVLVTLVSLMACAEAKGSSFMGSDWGRAHATFYGGADASGTQGGACGYGNLYSTGYGTNTAALSSSLFNSGLSCGACYELTCDPSCSQYCLPGGSAIITATNFCPTGSNGGWCNPPKQHFDLAQPVFSKIARTVGGVIPINYRRVPCSKSGGMRFTVNGNPYFLLVLVTNVGGAGDVQQLYIKGASTGWLPLKRNWGQMWQFTGNSGMHGQAISFKAVTSDGAEAISPNVAPANWGFGQTFEGSNF

SEQ ID NO: 6143 - protein, 496 aa, Actinobacillus pleuropneumoniae serovar 1 str. 4074
MNNGAPVVDNQNSMTAGPRGPLLAQDLWLNEKLANFVREVIPERRMHAKGSGAFGKFTVTHDITQYTKAAIFSEVGKETELFARFTTVAGERGAADAERDIRGFAVKFYTEQGNWDFVGNNTPVFFLRDPRKFPDLNKAVKRDPRTNMRSATNNWDFWTLLPEAFHQVTIVMSERGIPASYRHMHGYGSHTYSLINANNERFWVKFHFRTEQGIKNLTNEEAAAIIANDRESHQRDLYESIEKGDFPKWKLYIQVMPEAEAEQVDFHPFDLTKIWSKKDYPLIEVGVMELNRNPANFFADVEQSAFAPSNLVPGISVSPDRMLQARLFNYADAQRYRLGVNHHQIPVNAPRCPVHSNARDGQSRVDGNYGSTLHYEPNSFGQWQEQAQFAEPPLKINGDAAFWDYRQDDSDYFSQPRALFNLMTEKEKQSLFKNTAEGMGDALDFIKYRHIRNCYFCDPAYGEGVAKALGMTVADAMEAYNTDPAMGQPGLIKPNF

SEQ ID NO: 6144 - protein, 645 aa, Sinorhizobium meliloti 1021
MCGFGGYLGSIRDGKPLLERMTAAIGHRGPDERGIFTAPGAGLGHVRLSIVGLGDGQQPMSNPSGELTIAFNGEIFNYVELRDELRARGRQFRTSSDTEVILHLYEEMGEDCLSLLNGDFAFAIWDARRRRMMLARDRMGVRPLFHTLKGGTLYFASEVKALLEVPGVSAEIDPIALDQIFTLWAPIAPRTPFRDIHELEPGHLMIADQNGTTTRPYWQLDYPDRDERPAYAEESRAAEELRALLTDATRIRMRADVPVGAYLSGGLDSSIISALAAGMTSQGLRTFSVTFDSAEHDESAFQEEMAAALGTEHRAVACRAGDIARDFPDVIRFTEKPIIRTAPAPLYKLSGLVREAGLKVVLTGEGADEVFAGYDIFKEARVRRFCGRQPGSRIRPHLFRKLYPYLPGLQQQSAEYLAAFFGAGDVALDDPLFSHRPRLKGTAATKMFFSSDLRAELTGYDAAEELVSRLPAAFGRWHPLHQAQYLESRFLLPGYILSSQGDRMAMAHGIEGRFPFLDHRLVEFAAKLPPEMKLRGLVEKHILREATKDLLPPAIGRRTKQPYRAPDSHSFSGAGELDYVRSAMSEDAVAAGGLFNAKAVTKLYEKCQSRPASGFRDNAAFVGVLSTQLWLQTFTGTSLRKAEAA

SEQ ID NO: 6145 - protein, 308 aa, Chlamydophila pneumoniae J138
MKKRYAFLFPGQGSQYVGMGQDLYMEYPEVRELVDFANERLGFSLTSIMFEGPEDLLMETVHSQLAIYLHSMAVVKVLSQRSSIQPSLVSGLSLGEYTALVASDRISVLDGLELVRKRGQLMNEACNQSPGAMAALLGLPSEVIEENITSLGQGIWIANYNAPKQLVVAGIAEKVDQAIELFRDLGCKKAVRLKVSGAFHTPLMQVAQDGLAPDIYALCMKDSSLPLVSHVVGKSLVNTEEMRECLARQMTSPTLWYQSCYHIESEVDEFLELGPGKVLAGLNRSIGISKPITSLGTFAQIEKFLSEV

SEQ ID NO: 6146 - protein, 850 aa, Agrobacterium tumefaciens str. C58 (Cereon); identical to SEQ ID NO: 336

SEQ ID NO: 6147 - protein, 569 aa, Saccharomyces cerevisiae
MNSTPDLISPQKSNSSNSYELESGRSKAMNTPEGKNESFHDNLSESQVQPAVAPPNTGKGVYVTVSICCMVAFGGFIFGWDTGTISGFVAQTDFLRRFGMKHHDGSHYLSKVRTGLIVSIFNIGCAIGGIVLAKLGDMYGRRIGLIVVVVIYTIGIIIQIASINKWYQYFIGRIISGLGVGGITVLSPMLISEVAPSEMRGTLVSCYQVMITLGIFLGYCTNFGTKNYSNSVQWRVPLGLCFAWALFMIGGMMFVPESPRYLVEAGRIDEARASLAKVNKCPPDHPYIQYELETIEASVEEMRAAGTASWGELFTGKPAMFQRTMMGIMIQSLQQLTGDNYFFYYGTIVFQAVGLSDSFETSIVFGVVNFFSTCCSLYTVDRFGRRNCLMWGAVGMVCCYVVYASVGVTRLWPNGQDQPSSKGAGNCMIVFACFYIFCFATTWAPIAYVVISECFPLRVKSKCMSIATAANWIWGFLISFFTPFITGAINFYYGYVFMGCMVFAYFYVFFFVPETKGLSLEEVNDMYAEGVLPWKSASWVPVSKRGADYNADDLMHDDQPFYKSLFSRK

SEQ ID NO: 6148 - protein, 275 aa, Zea mays
  unsure (1)..(275): unsure at all Xaa locations
MAPRQAVLAVVVXAALLPLALSRGLRLGHHRXPHPRPHGHAPLGGGAWSSAHATFYGGGDASGTMGGACGYGNLYSQGYGTNTAALSTALFNNGLSCGACFEVRCDAAGGGGRSCLPGSVVVTATNFCPPNNALPSDDGGWCNPPRAHFDMSQPVFQRIALYRAGIVPVSYRRVACNKKGGIRFTINGHSYFNLVLVTNVGGAGDVHAVAVKGDRSAGWQALSRNWGQNWQSNTLLDGQALSFRVTTSDGRSVVSSNAAPRGWGFGQTFSGAQFN

SEQ ID NO: 6149 - protein, 245 aa, Rubrobacter xylanophilus DSM 9941
MSGARGGRLPAGEERARLVREMFDRIAGRYELLNALMTAGLYRRWNAAAVRASAVRPGDRVIDLACGTGSLTRALARRVGPQGYVLGVDFSPGMLRRARGGPNIEYRIGDATDLGWVETASFDAATIAYGARNIPDLDALFSEMARVVRPGGAVVCLEIARPQGRLFAAFYGLWFDRIVPRLGAAVSGDPGAYSYLPESVREFVAPGVLAGIMERNGLQDVTWRRLAGGIITLHRGIRGFVEGGG

SEQ ID NO: 6150 - protein, 209 aa, Nostoc sp. PCC 7120
MKIMGFYSQVILPRLLDWSLSDPTLATYRQELLTDVTGEVLEIGFGTGLNLAYYPSHIHKITTVDVNPGMNTIAQKRIDDSGIKVQQLLLSGENLPMADNTFDSVVSTWTLCSIANVEQALQEVYRVLKPGGKFFFLEHGLSNKPNVQVWQNRLTPIQKVLADGCHLNRNIQQLVEQSFDHVELKRFTPENFPDLMAHFYKGCATKKSI

SEQ ID NO: 6151 - protein, 165 aa, Triticum aestivum
  unsure (1)..(165): unsure at all Xaa locations
KKKKLEPLETYVPAVLLXQDQFRDLEKSLEFEKPRFDESRSLLRSGPASXSLRINIRAVAQYASSNGQGKTASDAVDECLRALEDLDSLLLKASRKDSSASVEVMRSKIAVALGALDNLLQTVPSAVMDKGKAIADAYRTPSDGYYEEGNGAELDPSLKQLQDIL

SEQ ID NO: 6152 - protein, 842 aa, Anabaena variabilis ATCC 29413
MRAVLMAGGSGTRLRPLTCDLPKPMVPILNRPIAEHIINLLKRHHITEVIATLHYLPDVLRDYFQDGGDFGVQMTYAVEEDQPLGTAGCVKNIAELLDETFLVISGDSITDFDLGEAIAFHKQKQSKATLILTRVPNPIEFGVVITDEAGKIKRFLEKPSTSEIFSDTVNTGTYILEPEVLEYLPLNTECDFSKDLFPLLLAKDEPMYGYVAEGYWCDVGHLDAYREAQYDALERKVKLDFAYRENSPGLWIGQNTYIDPSAHIEAPVVIGNNCRIGARVQIEAGTVIGDNVTIGADANLKRPIVWNGAIIGEEAQLSACVISRGTRVDRRAHVLEASVVGSLSTVGEEAQISPGVRVWPSKKIESGAILNINLIWGNTAQRNLFGQRGVQGLANIDISPEFAVKLGAAYGSTLKPGAKVTVSRDQRNVSRMVTRSLIAGLMSVGVDIQNLDATAIPIARTVIPTMGVAGGIHVRVHPDRADYILIEFMDHKGINISKAQEKKIEGAYFKEDMRRALTHEIGDVAYPSQVIDLYCTAFEKLLNVSTLHNSRAKVVIDYVYAVSGAVLPQMLDKFGADAVVLNASLNKNAVTTTDREGLLTQLGHVVEALKANFGVQVSANGEQLILVDESGYPIRGELLTALMVDMILTSNPRGTVVVPVHASSAVEQVARRHDGRIIRTKANATALMEACQKNPNVVLGGSGETGFIFPQLHPGFDSMFCIAKIIEMLTIQERSLATVRSELPRVIYRTHTIRCPWSAKGALMRYLVETHPAQNLELIDGVKIRQPFDDSWLLVLPDASEPLVHLYANSHERDWVDETVRDYRSRVQSFVERQQEYHPAEV

SEQ ID NO: 6153 - protein, 414 aa, Saccharomyces cerevisiae
  unsure (1)..(414): unsure at all Xaa locations
SATLFNNIELLPPDALFGIKQRYGQDQRATKVDLGIGAYRDDNGKPWVLPSVKAAEKLIHNDSSYNHEYLGITGLPSLTSNAAKIIFGTQSDALQEDRVISVQSLSGTGALHISAKFFSKFFPDKLVYLSKPTWANHMAIFENQGLKTATYPYWANETKSLDLNGFLNAIQKAPEGSIFVLHSCAHNPTGLDPTSEQWVQIVDAIASKNHIALFDTAYQGFATGDLDKDAYAVRXXLSTVSPVFVCQSFAKNAGMYGERVGCFHLALTKQAQNKTIKPAVTSQLAKIIRSEVSNPPAYGAKIVAKLLETPELTEQWHKDMVTMSSRITKMRHALRDHLVKLGTPGNWDHIVNQCGMFSFTGLTPQMVKRLEETHAVYLVASGRASIAGLNQGNVEYVAKAIDEVVRFYATEAKL

SEQ ID NO: 6154 - protein, 230 aa, Klebsiella variicola
DIAPVTPGVAVDLSHIPTDVKIKGFSGEDATPALEGADVVLISAGVARKPGMDRSDLFNVNAGIVKNLVQQIAKTCPQACIGVITNPVNTTVAIAAEVLKKAGVYDKNKLFGVTTLDIIRSNTFVAELKGKSATEVEVPVIGGHSGVTILPLLSQIPGVSFSDQEVADLTKRIQNAGTEVVEAKAGGGSATLSMGQAAARFGLSLVRAMQGEKGVVECAYVEGDGHYARF

SEQ ID NO: 6155 - protein, 197 aa, Medicago sativa
  unsure (1)..(197): unsure at all Xaa locations
MSASRFIKCVTVGDGAVGKTCLLISYTSNTFPTDYVPTVFDNFSANVVVNGSIVNLGLWDTAGQEDYNRLRPLSYRGXDVFILAFSLISKASYENVSKKWIPELKHYAPXVPIILVGTKLDLRDDKQFCIDHPGAVPITTAQGEELRKLINAPAYIECSSKSQENVKAVFDAAIRVVLQPPKQKKKKNKAQKACSIL

SEQ ID NO: 6156 - protein, 361 aa, Streptococcus mutans UA159
MKPSIYSLTRNDLIAWTIEHGEKKFRATQIWDWLYRKRVQSFEEMTNLSKDFIALLNENFLVNPLKQRIVQESADGTVKYLFELPDGMLIETVLMRQHYGLSVCVTTQVGCNIGCTFCASGLIKKQRDLNNGEITAQIMLVQKYFDERGQGERISHVVVMGIGEPFDNYDNVLKFLRTINDDNGLAIGARHITVSTSGLAHKIRDFANEGVQVNLAVSLHAPNNELRSSIMRINRSFPLEKLFAAIEYYIETTNRRVTFEYIMLNGVNDSPENAQELADLTKKIRKLSYVNLIPYNPVTEHDQYSRSPKERVDAFYDVLKKNGVNCVVRQEHGTDIDAACGQLRSNTMKRDREKATAGTAQ

SEQ ID NO: 6157 - protein, 312 aa, Salmonella paratyphi
MKVAVLGAAGGIGQALALLLKNQLPSGSELSLYDIAPVTPGVAVDLSHIPTAVKIKGFSGEDATPALEGADVVLISAGVARKPGMDRSDLFNVNAGIVKNLVQQIAKTCPKACVGIITNPVNTTVAIAAEVLKKAGVYDKNKLFGVTTLDIIRSNTFVAELKGKLPTEVEVPVIGGHSGVKILPLLLQIPGVSFTEQEAAELTKRIQNAGTEVVEAKAGGGSATLSMGQAAARFGLSLVRALQGEKGVVECAYVEGDGQYARFFSQPLLLGKNGVEERKSIGTLSAFEQHSLDAMLDTLKKDIQLGEDFINK

SEQ ID NO: 6158 - protein, 349 aa, Streptococcus pyogenes MGAS8232
MKAATYLSTGNLQLIDKPKPVIIKPTDAIVQLVKTTICGTDLHILGGDVPACKEGTILGHEGIGIVKEIGDAVTNFKIGDKVIISCVTSCHTCYYCKRGLSSHCEDGGWILGHLINGTQAEYVHIPHADGSLYHAPDTIDDEALVMLSDILPTSYEIGVLPSHVKPGDNVCIVGAGPVGLAALLTAQFFSPANIIMVDLSQNRLEAAKTFGATHTICSGSSEEVKTIIDDITNGRGVDISMECVGYPATFDICQKIISVGGHIANVGVHGKPVDFNLDELWIKNITLNTGLVNANTTEMLLNVLKTGKIDATRLITHHFKLSEVEKAYETFKHAGANNALKVIIDNDIS

SEQ ID NO: 6159 - protein, 232 aa, Klebsiella variicola
SLYDIAPVTPGVAVDLSHIPTDVKIKGFSGEDATPALEGADVVLISAGVARKPGMDRSDLFNVNAGIVKNLVQQIAKTCPQACIGVITNPVNTTVAIAAEVLKKAGVYDKNKLFGVTTLDIIRSNTFVAELKGKSATEVEVPVIGGHSGVTILPLLSQIPGVSFSDQEVADLTKRIQNAGTEVVEAKAGGGSATLSMGQAAARFGLSLVRAMQGEKGVVECAYVEGDGHYAR

SEQ ID NO: 6160 - protein, 228 aa, Klebsiella variicola
DIAPVTPGVAVDLSHIPTDVKIKGFSGEDATPALEGADVVLISAGVARKPGMDRSDLFNVNAGIVKNLVQQIAKTCPQACIGVITNPVNTTVAIAAEVLKKAGVYDKNKLFGVTTLDIIRSNTFVAELKGKSATEVEVPVIGGHSGVTILPLLSQIPGVSFSDQEVADLTKRIQNAGTEVVEAKAGGGSATLSMGQAAARFGLSLVRAMQGEKGVVECAYVEGDGHYA

SEQ ID NO: 6161 - protein, 368 aa, Nostoc punctiforme PCC 73102
MPLAAVMTAPNQPVEVQQLPEPILEKGGIIIETLYSEVCGTDVHLLHGRLEGVPYPIIPGHFSVGRVVETGGAVSDVNGKLIQPGAIATFLDVHETCYNCWYCLVAKASTRCPKRKVYGVTYSAKDGLLGGWSELIYLKPGVKVLTLPEEVSPKQFIAGGCALPTALHAIDRAQIQIGDVVVVQGCGPVGLSAAILALLSGAGKVIVIDKFESRLVVAKSFGVDETLAIRADDPRQHIERVLELTNGHGADVTIEATGIPIAVKEGLNMTRNGGRYVIVGHYTNTGEILINPHLEINLKHIDIRGTWGIDFSHFYRMIELLKRHSDSSKNIAWSSIISRSYTLKEINQALVDVEQGSVLKAVIQPNLS

SEQ ID NO: 6162 - protein, 273 aa, Nostoc punctiforme PCC 73102
MLEDLQIAFIGGGTMGEMIISRLLLTKIVPKADLIIVSDPVSARCLHLEREYGVRTTTSNIEAVLGASIVILAVKPQVLAEVLGMLKDKIPPNALVISIVSGANISSLCQGLNHPAVVRTMPNIAVQVGHGTTVWSASSSVTEIQRSHTQVILQALGKEFTTQNEHYLDMATALSSAGTGFVFLYIEAMIDAGVQMGLTRTQAQELTLHTIAGSVELMFQTHEHPAVLRNKVTSPGGVTAAGLYELEKGGMRTVISNAVLAALSRNQQLGNIS

SEQ ID NO: 6163 - protein, 272 aa, Physcomitrella patens
MPSISSFEKNADFKGSSFSTETTLSTDDQPDEVFARKAGYAPVPRSYGGVWRNARSTFYGGMDAAGTMSGACGYGNLYASGYGVHTTALSSALFKNGMACGACFEVQCGGKGKPCKPGSVVVTATNFCPPNPGQSANNGGWCNPPNEHFDLSYPAFVKIADPKAGAVPLQYRRVPCQKQGGIRFTINGNCNFILVTITNVGGSGVVTAAYLKGDKTEWSPLSRNWGANWQCRRNYCGQGISIKIVTSDNKVSVTKLAKSDWCFGKTFIGKQV

SEQ ID NO: 6164 - protein, 465 aa, Oryza sativa (japonica cultivar-group)
MDDDGETPMPSLELHKLPTLAGAAIPNPIARHPLYHPSPSFFISPTDVVLRDILFDASPASAAGERRRRHVAAYHRAGPRREVAFDPATVRAAIFTCGGLCPGTNTVVRELVVGLSELYGVRGGVFGVRNGYRGFYSDEVVPLDPAAVEHWHKAGGAALGTSRGGFDLARIVDAIERHGFNQVYAVGGDGTMRGAARIHREVRRRGRLAVAVAGIPKTVDNDVGVVDRSFGFHTAVEAAQQAIAAGHVEAESAANGVGLVKLMGRSAGHIALHATLSSRDVDCCLIPEEDFYLRGAGGLFDFLYRRIKDNGHAVVVVAEGAGQRLIPRTTTTSASGACAGADESGNETFLDVGAWLKAEMRAWWEEEHAGEVFTVKYIDPTYMIRAVPANAGDNLYCTLLAHAAIHGAMAGYTGFVSGTINGNYAYIPMDEVAEAKNPVDTKDHKWAWVRSITNQPDFIRAGPTS

SEQ ID NO: 6165 - protein, 649 aa, Lactobacillus gasseri
MCGICAFFDPELKDKDCAIQGMMDTIKHRGPSSDGKYTNDQVALGFRRLSIIDLRGGSQPIFNEDKSRAIIFNGEIYNFKPLRKELIDAGHTFTTKADTEVLLHGYEEWGMDGLLKRVRGMFAFVIWDDNTKTLYGARDFFGIKPMYYSDQNGKLIVGSELKSFLAYPGFKKELNTEAVKPYLMNQYNDLKETFFKGVYRFPAGHWFEYKDGKMKTHQYWDAKYVENSLSFEETLDKINEDLKETVDLYRNADVPVGAFLSEGIDSSYLTSLLDPEDVFSVSFDDSTYNEASKAKALSDLHGWKFFADKVDADEAMRDFPEMQYHMDEPDANPSIIPLWYLCKLARKHVTVALSGEGADELFAGYVNYGMHTHNDVIKVFTAGLKKLPKKSRVRLAHKIKKMPNFPGKVHMYTNLAEPSEFYVGQSVIYDMDYPTIFTSKDANNILRDKYKNDLTVNGIYQEDFKKVKNIDEVKQMQYIDLHHFMLNDIEQKADKISMAHSLELRVPYLDKKIAELANSIPTKYLVNRHDTKYALRKASEKVLPEEWAQRPKLGFPTPIKQWLKEPRFYKQVRELFTEDFVNDIFDQKKIVKLLDDNYKGDGSARRQIWAIYTFLVWYKLFFVDYDETVKKYQHVQPEVAELIESGRLV

SEQ ID NO: 6166 - protein, 231 aa, Streptococcus pyogenes MGAS8232
MTKPIIGITANQRLNMALDNLPWSYAPTGFVQAVTQSGGLPLLLPIGDEAAAKTYVSMVDKIILIGGQNVDPKYYQEEKAAFDDDFSPERDTFELAIIKEAITLKKTILGICRGTQLMNVALGGNLNQHIDSHWQEAPSDFLSHEMIIEPDSILYPIYGHKTLINSFHRQSLKTVAKDLKVIARDPRDGTIEAVISTNDAIPFLGVQWHPELLQGVRDEDLQLFRLFVNDF

SEQ ID NO: 6167 - protein, 385 aa, Phaeodactylum tricornutum
MKVATTLTLAFICCASAFGLNGQTTSVMKKVGFGAGSKPMVQAIDVQGNRLGSNMQPLKSAVANEDAPRGGATKSPVDIGLLLYFGLWYLGNYYYNITNKLALNAAGGKVGFPMTISSLQLGVGSIYALFLWLAPDARSRPKISMDDIVKMLPVALCFMGAHSASVFAMGMGAVQFAQIVKASEPAFAAVLSQFVYGKKSRRHKWLCLPIVIGGVILASVKELDFAWSALIAACIANMFAAVRGNENKKLMETPGLKDRIGTVGNQFAITTVLGFILSLPVLFLREGSRFGEFVQLAKTTPAIWMNLVASGLWFYGYNECATMTLKKTGAVTQSVANTAKRVIVIVGVALVLGESLSPIKLIGCSIGIGGVFLYSIIDNLVKPKK

SEQ ID NO: 6168 - protein, 263 aa, Lolium perenne
MASSSSVLLVVALFAVFLGSAHGIAKVPPGPNITAEYGDKWLDAKSTWYGKPTGAGPKDNGGACGYKDVDKAPFNGMTGCGNTPIFKDGRGCGSCFEIKCTKPESCSGEAVTVTITDDNEEPIAPYHFDLSGHAFGSMAKKGEEQKLRSAGELELQFRRVKCKYPDGTKPTFHVEKASNPNYLAILVKYVDGDGDVVAVDIKEKGKDKWIELKESWGAVWRIDTPDKLTGPFTVRYTTEGGTKSEVEDVIPEGWKADTSYSAK

SEQ ID NO: 6169 - protein, 401 aa, Triticum aestivum
MATKRSVGTLGEADLKGKKVFVRADLNVPLDDAQKITDDTRIRASIPTIKYLLEKGAKVILASHLGRPKGVTPKFSLKPLVARLSELLGLEVVMAPDCIGEEVEKLAAALPDGGVLLLENVRFYKEEEKNDPEFAKKLASVADLYVNDAFGTAHRAHASTEGVTKFLRPSVAGFLMQKELDYLVGAVANPKKPFAAIVGGSKVSSKIGVIESLLAKVDILILGGGMIFTFYKAQGLAVGKSLVEEDKLELATSLIETAKSKGVKLLLPTDVVVADKFAADAESKIVPATAIPDGWMGLDVGPDSIKTFAEALDTTKTVIWNGPMGVFEFEKFAAGTDAIAKQLAELTGKGVTTIIGGGDSVAAVEKAGLADKMSHISTGGGASLELLEGKPLPGVLALDEA

SEQ ID NO: 6170 - protein, 151 aa, Rhodobacter sphaeroides
MRLAALLLAALLATPAFAVQPDEILPDPALEARARDISQGLRCLVCRNENIDDSNAQLARDLRLLVRERLAAGDSDAEVVEFVVDRYGEYVLLNPTTGGANLILWIAGPAMLAGGLGLAALYLRRRRTAPDAASAALSDEEQARLPEILKD

SEQ ID NO: 6171 - protein, 160 aa, Azotobacter vinelandii
MSAFHDLTLRGLDGQDLPLAQFRDKVVLVVNVASKCGLTPQYAGLEKLHLQYRERGFSVLGLPCNQFAGQEPDNEAQIREFCSLNYGVTFPLAAKLEVNGSGRHSLYRLLAGEGAEFPGDITWNFEKFLVGRDGRVLARFSPRTAPDDPALLQAIEKALG

SEQ ID NO: 6172 - protein, 684 aa, Eremothecium gossypii
MSRSSSPSVSLPLPSSATLFLDREDKTEEALGTFIELEQCTYTHKRLGDSRSNEFMECDCFEDYKDEQNHACDENSDCINRLTLIECVNDLCTSCGDDCQNQRFQKKEYADIAVFQTEKKGYGVRAERDIEANEFIYEYIGEVISEADFRDRMVDYDMRGFKHFYFMMLQAGEFIDATERGCLARFCNHSCNPNAYVSKWDVAGKLKMGIFAHRKILKGEEITFDYNVDRYGATAQPCYCDEPNCIGFLGGKTQTDAASLLPQNYADALGVRPSVEKKWVKMRKALGEEIDKSGSSNINIEFVESLELEPCVQYSDVNKVMSVLLQIDDKFICSKLLERILLTSDETMRYQIIKLHGYKCFSKLLGLFETDENTQHRILQYLSDLPKTTKNGIVSSQIDKKVESLLQKEALKEDASALLERWNTYETYQRIAKKDFTKTSNGLNKVTDFRRVRLPLGWEIIHENGRPMYYNAQRQIKRVDPPSDTHLQRPARTTPPQRYNGGFYDRTTKRPLDPESFEKRKRQRLEWEQQKLAKKKQEEVRHLKEKLEVEKQKKSELEQIIEDANKQQEQQRLERLQKEKETAERRERRRQTHSASRIEHKWNKFFAQIVPNLIKSYATSMDRARIKECARDIVKILSSKELKKDATKVPPAEVTKEKRKKVNEFCKSYMDKLLAKMHEKAVSK

SEQ ID NO: 6173 - protein, 250 aa, Cynodon dactylon
MERVEVLGGGSSAGQVRKKRMRRKSTGPDSIAETIKRWKEHNQKIHEDRKAPAKGSKKGCMAGKGGPENGNCAYRGVRQRTWGKWVAEIREPNRGRRLWLGSFPTALEAAHAYDEAARAMYGPTARVNFSESSADANSGCTSALSLLASNIPPASQRSDDKDEVESVETEVHEVKMEVNDDMRSVHVERKTLEVFQSEESVLRKEGDVSYDYFHVEDVLEMIIVELNAAKKIEVHEEYQDGDDGFSLFSY

SEQ ID NO: 6174 - protein, 250 aa, Cynodon dactylon
MERVEVQGGASSAGQVRKKRMRRKSTGPDSIAETIKRWKEHNQKIHEDRKAPAKGSKKGCMAGKGGPENGNCAYRGVRQRTWGKWVAEIREPNRGNRLWLGSFPTALEAAHAYDEAARAMYGPTARVNFSESSADANSGCTSALSLLASNIPPASQRSDDKDEVESVETEVHEVKMEVNDDMRSVHVERKTLEVFQSEESVLRKEGDVSYDYFHVEDVLEMIIVELNAAKKIEVHEEYQDGDDGFSLFTY

SEQ ID NO: 6175 - protein, 589 aa, Neisseria meningitidis MC58
MTVQTKTKGLAWQEKPLSDNERLKTESNFLRGTILDDLKDPLTGGFKGDNFQLIRFHGMYEQDDRDIRAERAEAKLEPLKFMLLRCRLPGGIIKPSQWIELDKFARENSHYRSIRLTNRQTFQFHGVPKAKLQTMHRLLHKLGLDSIATAADMNRNVLCTSNPIESELHRQAYEYAKKISEHLLPRTRGYLDVWVDGKKVQSSDDFLQEDEPILGKTYLPRKFKTAVVIPPLNDVDCYGNDLDFVAVSDGNGQLAGFNVLAGGGLSMEHGNTKTYPNISLELGFVPPEHALKAAEAVVTTQRDFGNRSDRKNARTRYTIQNMGLDNFRAEVERRMGMPFEPVRPFKFTGRGDRIGWVKGIDGNWHLTLFIESGRLVDEGGKQLLTGVLEIAKIHKGDFRITANQNLIVANVAEADKAKIEEFARTYGLIRNDVSKLRENAMSCVSFPTCPLAMAEAERVLPDFIGELDKIMAKHGTSDDYIVTRITGCPNGCGRAMLAEIGLVGKAVGRYNLHIGGDREGVRIPRLYKENITLPEILAELDDLIGKWAAERNIGEGFGDFAIRTGIVKPVLNAPVDFWDASKAVAIARA

SEQ ID NO: 6176 - protein, 465 aa, Agrobacterium tumefaciens str. C58 (Cereon)
MSSSVVAETVPSGSGSWFSHFKATLVLGIPLIGAQLAQLGIHTTDMVIVGQLGAEKLAAMVLAGQFFFVVFIFGSGFSVAVVPMVAQAYGQGDATSARRSLRMGMWVAIAYWLLALPIFFNAERILVYLGQNPNVAALTGHYLAIAKFGLLPALLFYVLRGLVSAIGRAGIILYVTIIMLVMNGLMAYVLVFGHFGLPAMGMNGAAVVAVIVNAFSFIFIVAYVQTREETKKYELFVRFWRPDWHALFEVLRLGLPISITILAEVTLFAAASILMGQIGTVQLAAHGIALQLASIAFMIPLGLSQAATVRVGVARGQGDFKNLIRASIMIYAIACGIALCGGILFAAVPEFLAKWFLDPKLPEAAEVLAYASSLVVIAGIFQLVDGIQAVTAGLLRGLKDARIPAMLALISYWPIGLALAWTMAFPLGFGGRGVWFGFVIGLSTAAVLLTVRFVLLVKREMKTAR

SEQ ID NO: 6177 - protein, 429 aa, Chlamydophila pneumoniae J138
MISLLKMPKLSPTMEVGTIVKWHKKSNDQVSFGDVIVEISTDKAILEHTANEDGWIREILRHEGEKIVIGTPIAVLSTEANEPFNLEELLPKTEPSNLEASPKGSSEEVSPATTPQAASATFTAVTFKPEPPLSSPLVFKHVGTTNNLSPLARQLAKEKNIDVSSIQGSGPGGRIVKKDLEKAPPKSIAGFGYPESPEVPPGSYHEENLSPIREVIAARLQAAKISIPHFYVRQQVYASPLLNLLKELQAQGIKLSINDCIVRACALALKEFPSINSGFNSVDNKIVRFDTIDISIAVAIPDGIITPIIRCADRKNLGMISAEIKSLALKARNQSLQDTEYKGGSFCVSNLGMTGITEFTAIVNPPQAAILAVGSVTEQALVLDGEITIGSTCNLTLSVDHRVIDGYPAAMFMKRLQKILEAPAVLLLN

SEQ ID NO: 6178 - protein, 268 aa, Triticum aestivum
  unsure (1)..(268): unsure at all Xaa locations
GSGTRDRPGRRRRPWXPYKHRPTSGANSGYWTTNSGAPVWNNNNALTVGQRGPILLEDYHLIEKLAQFDRERIPERVVHARGASAKGFFEVTHDVSQLTCADFLRAPGVQTPVIVRFSTVVHERGSPETLRDPRGFAVKFYTREGNFDLVGNNMPVFFIRDGMKFPDMVHAFKPSPKTNMQENWRIVDFFSHHPESLHMFTFLFDDVGIPLNYRHMDGFGVNTYTLXSXDGKAHLVKFHWKPTXGVKCLLXDETXTVGGTCXTMPQXT

SEQ ID NO: 6179 - protein, 223 aa, Klebsiella oxytoca
APVTPGVAVDLSHIPTDVKIKGFSGEDATPALEGADVVLISAGVARKPGMDRSDLFNVNAGIVKNLVQQIAKTCPQACVGIITNPVNTTVAIAAEVLKKAGVYDKNKLFGVTTLDIIRSNTFVAELKGKSSSDVEVPVIGGHSGVTILPLLSQIPGVSFSEQEVADLTKRIQNAGTEVVEAKAGGGSATLSMGQAAARFGLSLVRAMQGEKGVVECAYVEGDG

SEQ ID NO: 6180 - protein, 492 aa, Prunus persica
MDPYKYRPSSAFDSPFWTTNSGAPVWNNNSSLTVGSRGPILLEDYHLVEKLANFDRERIPERVVHARGASAKGFFEVTHDISQLTCADFLRAPGVQTPVIVRFSTVIHERGSPETLRDPRGFAVKFYTREGNFDLVGNNFPVFFVRDGMKFPDMVHALKPNPKSHIQEPWRILDFFSHHPESLHMFTFLFDDLGVPQDYRHMEGSGVNTYTLINKAGKAQYVKFHWKPTCGVKCLLEDEAIKVGGANHSHATKDLYDSIAAGNYPEWKLYIQTIDPDHEDRFDFDPLDVTKTWPEDILPLQPVGRLVLNKNIDNFFAENEQLAFCPAIVVPGVYYSDDKLLQTRIFSYSDTQRHRLGPNYLQLPVNAPKCSHHNNHHEGFMNFMHRDEEVNYFPSRYDPVRHAERFPIPPNILSGKREKCIIEKENNFKQPGERYRSWAPDRQERFIHRWVDALSDPRVTHEIRSVWISYWSQADKSLGQKLASRLNVRPSI

SEQ ID NO: 6181 - protein, 268 aa, Pisum sativum
MAESSSTKTGLRLAGKVAIVTGGASGIGKETAHLFANQAARMVVIADIQDELGIQVAESIGTDRCTFIHCDIRIEDDVKNLVQSTVDTYGQIDIIHCNAGIISPSDQTLLELDVSQANGVFATNAIGTALCVKHAARAMVDGKVRGSIVCTASISASYGVTTGTDYSMSKHAVLGLMRSASVQLAKYGIRVNSVSPNGLATPLTEKLLDADAKTVEEIFSKFSMLKGVVLRTNHVADAVLFLASNDSDFVTGFDLRVDGNYITSHAVI

SEQ ID NO: 6182 - protein, 225 aa, Raoultella terrigena
DIAPVTPGVAVDLSHIPTDVKIKGFSGEDATPALEGADVVLISAGVARKPGMDRSDLFNVNAGIVKNLVQQIAKTSPQACIGIITNPVNTTVAIAAEVLKKAGVYDKNKLFGVTTLDIIRSNTFVAELKGKSSSDVEVPVIGGHSGVTILPLLSQIAGVSFSEQEVADLTKRIQNAGTEVVEAKAGGGSATLSMGQAAARFGLSLVRAMQGEKGVVECAYVEGDG

SEQ ID NO: 6183 - protein, 492 aa, Prunus persica
MDPYKHRPSSAFDSPYWTTNAGAPVWNNDSSLTVGPRGPVLLEDYHLVEKLATFDRERIPERVVHARGASAKGFFEVTHDISQLTCADFLRAPGVQTPVIVRFSTVIHERGSPETLRDPRGFAVKFYTREGNFDLVGNNFPVFFVRDAMKFPDAIRAFKPNPKSHIQETWRILDFFSHLPESLHTFAFFYDDLGVPQDYRHMEGSSVHAYTLISKAGKVHYVKFHWKPTCGVKCLLEDEAIKVGGANHSHATKDLYDSIAAGNYPEWKLYIQTMDPDHEDRFDFDPLDLTKTWPEDILPLQPVGRLVLNKNIDNFFAENEQLAFNPAHVVPGIYYSDDKVLQTRIFAYSDTQRHRLGPNYLQLPVNAPKCPHHNNHHEGFMNFMHRDEEVNYFPSRHDPVRHAERYPIPSNILSGKREKCVIEKENNFKQPGERYRSWAPDRQERFIRRWVDALSDPRVTHEIRSIWISYWSQADKSLGQKLLSRLNVRPSI

SEQ ID NO: 6184 - protein, 274 aa, Triticum aestivum
  unsure (1)..(274): unsure at all Xaa locations
GAXSTVVYCVSSSYXALLFIYIPVLRRAPATYRRGMAATATKLSXGHEMPAVGLGVWRMDSAAVRGLIHSALRAGYRHFDCAADYKNEAEVGDALAEAFETGLVKREDLFITTKLWNSDHGHVVEACKDSLKKLRLDYLDLYLIHXPVATKHTGVGTTGSALGDDGVLDIDTTITLETTWHAMEDLVSMGLVRSIGISNYDIFLTRDCLAYAXIXXAVNQIETHPYXQRDSFVKFCQKHGISVTAHTPLGGXTXNTEWVXLGLMPRRYCIQVPG

SEQ ID NO: 6185 - protein, 256 aa, Pisum sativum
MAESSSTKSSLRLAGKVAIVTGGPKQGARIVVIADIQDKLGIQVAESIGTDKCRFIHCDIRIEDDVKNLVQLTVDCYGQIDIIHCNAGIVSPSDQTLLELDVSQTNGVFATNAIGTALCVKHAARAMVDGKVRGSIVCTASISASYGVTTGTDYSMSKHAVLGLMRSASVQLAKYGIRVNSVSPNGLATPLTEKLLDADAKTVEEIFSKFSMLKGVVLRTNHVADAVLFLASNESDFVTGLDLRVDGNYITSHAVI

SEQ ID NO: 6186 - protein, 97 aa, Oryza sativa (japonica cultivar-group)
METDINAPPPPAPAPAGAGEGSSSAAGPSSRKPNKRFEIKKWNAVALWAWDIVVDNCAICRNHIMDLCIECQANQASATSEECTVAWGQSRYDPVTG

SEQ ID NO: 6187 - protein, 356 aa, Prochlorococcus marinus str. MIT 9313
MSSTHLPGGNQALLGCSATELEGWAVAEGQPAFRGRQLHEWLYAKGARSFEAITVLPKSWRLSLQQRGITIGRLLEVNRAVAVDDTTKLLLATVDGETIESVGIPTQQRLTVCLSSQVGCPMACRFCASGKGGLQRSLATHEIVDQVLSLREAMDRRPSHVVFMGMGEPLLNIEAVLAAIRCLNIDLGIAQRRITVSTVGVPHTLPHLAELAMKRLGRAQFTLAVSLHAPNQELRERLIPTACAYPFETLLQDCRHYLAVTGRRVTFEYILLGALNDQPQHAEELADRVRGFQSHVNLIAYNPIDDEGFQRPNPETIEAFRRVLEQRGVAVSLRASRGLDQNAACGQLRRQHAATG

SEQ ID NO: 6188 - protein, 398 aa, Clostridium tetani E88
MDIKNMGFGTKAIHGGNKKDTQYGALSTPIYQTSTFIFDSAEQGGKRFAGEESGHIYTRLGNPTTGQLEDKMAILEGGEAVIATASGMGAISSALWTALKAGDHVVAGETLYGCTFALLCHGLPRFGVEVTFVDTTNLEEVEKAIKENTKVVYLETPANPNLKVADIKAISEIAHKKEDCMVFVDNTFCTPCIQRPLELGADVVVHSATKYLNGHGDVLAGFVVGKQEFINNVRGFGVKDMTGSVLSPFDAFLVLRGLKTLEIRMERHCANAQKVAEFLQGHEAVSKVYYPGLNDSEYYDIAKKQMRMPGAMISFEVNGGLEEGKKIMDSVKLANLAVSLGDAETLIQHPASMTHSPYTKEEREAAGISDNLVRLSVGLENVEDIIEDLRQALDTIKK

SEQ ID NO: 6189 - protein, 457 aa, Neurospora crassa
MSTPNSDSPAAQAAKKVFSRLDLDGHNLPPSPAPSSPHNGRRYALATELVYTETKDQYGASSIPIYQSATFKQSSSNGGSEYDYTRSGNPTRTHLERHLAKIMNANRCLSVSSGMGALDVITRLLKPGDEVITGDDLYGGTNRLLTYLKNNQGVIVHHVDTTNVESVRQIISPKTTMVLLETPTNPLIKICDIPTIARITHEANEKAVVVVDNTMLSPMLFNPLDVGADIVYESGTKYLSGHHDIMAGVIAVNDTELGDKLYFTINATGCGLSPNDSFLLMRGVKTLAIRMEKQQANAQRIAEFLESHGFKVRYPGLKSHPQYDLHWSMARGAGAVLSFETGDVALSERIVEAARLWGISVSFGCVNSLISMPCRMSHASIDAKTRAERQMPEDIIRLCVGIEDADDLIDDLSRALVQAGAVTLTVDGFHANTAEGAAAAAAGSEAAETTTTAAPSL

SEQ ID NO: 6190 - protein, 378 aa, Schizosaccharomyces pombe
MSFEGKTITCKAAVAWGAKEPLSIEDIQVAPPKAHEVRVKVDWSAVCHTDAYTLSGVDPEGAFPIVLGHEGAGIVESIGEGVINVRPGDHVILLYTPECKECKFCRSGKTNLCSKIRETQGRGLMPDGTSRFSCRDKTLLHYMGCSSFSQYTVVADISLVAISHSAPLRSICLLGCGVTTGFGAVTHSAKVESGSTVAVVGCGCVGLAAMQGAVAAGASRIIAIDINADKEVYAKKFGATDFIDSSKVKDLVQYVIDVTDGGVDYAFDCTGNVTVMQQELQFCHKGWGKLCVIGVAAAGKTLDFRPFLVVTGRQVLGSAFGGVKGRSELPNFVDEYMQGHFKVDEYITNEEPLKNINKAFDHMHEGKCIRCVVDMNKP

SEQ ID NO: 6191 - protein, 356 aa, Tropheryma whipplei TW08/27
MRMKALVYHGPGKRSLDTVDDPTIKLGTDVILEMETTTICGSDLHILKGDVAAVKPGTVLGHEGIGKIVEVGKDVKSHSVGDRVIVSPMSSCGVCRFCRANNNGHCLGDSEGPGGWRLGGLINGVQAQFARIPLADNSLHKLPSGLDPKVGILVSDVLPTGHEVGAQAGQVTLGSVVAVIGCGPVGLGAIVTSLLYSPSKVIAVDADSNRLELARKLGATDTVRVNRERPLDAIEDVKKLTEGGFGVDVAIEAVGVPVTFSMALGIAAPGGRVANIGVHGAPVDFPLQDLWDKNIAVTLGIVSTHTIPLLLAALSEGKIDASQFVTHEFDLSDLERAYDVFSAAAQHNVVKVAIRA

SEQ ID NO: 6192 - protein, 346 aa, Kitasatospora griseola
MSVPAADEDIVTLAATAAAPIVARHGSDRIRTVVLATESSIDQAKSAGVYVHSLLGLPSATRVVELKQACYGATAGLQFAIGLVQRDPAQQVLVIASDVSKYDLDSPGEATQGAAAVAMLVGADPGLVRIEDPSGLFTVDVMDFWRPNYRTTALVDGQESIGAYLQAVEGAWKDYSERGGHSLEQFAAFCYHQPFTKMAHKAHRHLLNYCSHDIHHDDVTRAVGRTTAYNRVIGNSYTASVYLGLAALLDQADDLTGERIGFLSYGSGSVAEFFGGIVVAGYRDRLRTAANIEAVSRRRPIDYAGYRELHEWAFPARRGAHSTPQQTTGPFRLSGISGHKRLYRAC

SEQ ID NO: 6193 - protein, 1465 aa, Adiantum capillus-veneris
MATPGGPKTKHSVSVAQTRADARLHAAFEGSGDAGAGGSRAPFDYSKSGMDASSVTSVAPEAITAYLQRMQRGGLTQAFGCMLVVAGQKIVAFSENAPEMLEVAAGLGTDLRMLFTQGSTAALDQAVKEEDLSSVNPLVLQSCGGSAKQFYAMLHRIEDVAGVVIDLEPIENGVVEKKSSAEMAVKPIARVQSLPGGEIGRLCQVVVEEVQEMTGYDRVMAYKFHEDGHGEVVAEVRRPDLEPYLGLHYPSTDVPQASRMMFMKNGVRMIGDCTLPPVRVVQAKELAQPISLAGSTLRAPHGCHAQYMSNMGSAASLTMAVAIDDYDDDSSLSCGSRKLWGLVVCHHPSPRTVSYPLRCACEKLMVAFGVQLNIELDLAAQLRENHILTTQALLCDMLRRIRGAPIGIVSRSPSIMDLVKCDGAALYYGGRFWPLGTTPSEFQIRDLAEWLLGASEEIASTGVTCTDSLAEMGYPGAALLGDAVCGMAAAMITPNSDFLFWFRSHTAKEVYWGGAEHDPQSRDDDSWMQLPRSSFKAFLEIVKRRSLPWEEVEVDAIRSLQLILREDLEQFCAAVGAVKASDGDDEDSLVPSAKKLSLKETEENGGADNSKKLERMHSAAAGGGGGGGRWEKMRLPSSLAQEWMEAIRGTGDGGASGGGGGGPFDWDLISAFQHNSFIVVDALKPDFPIIYASTGFFNLTGYTSREVIGGNCRFLQGPDTNPADVASIREALAQGTGTFCGRLLNYRKDGSSFWNLLTIAPIKDDLGSIVKLIGVQLEVSKYTEGIRANNRRPNGMPQSLIRYDVRHQDKVSAFIAQLVAALTKPDKVETPRLSSAMRFSLTGQTIESLPQPTAIPREGGGRTRRPRSSSFLSLLGMEKEKDIPEEDELQELEVIMLEDASVGRPGSLDDPERTRRGIDLATTLERIGKSFVITDPRLPDNPIIFASDRFLELTEYTREEVLGNNCRFLQGRGTDRKAVQLIRDAVKEQRDVTVQVLNYTKGGRAFWNLFHLQVMRDENGDVQYFIGVQQEMVAPRPVHQPPELPDILPDRVEQEKAEVVRATAQRVDAAARELPDANLVPDHLFAPHSKVVTPLPHSKTNSSSWFAIRRVQRRLRRGERLGLKHFRPIKPLGSGDTGSVHLVELRGTGQVFALKAMDKSMMLQRNKVHRARAEREILAIMDHPFLPTLYASFQTKTHVCLITDYCPGGDLFLLQDKQPTQTLSERTASFYAAEVVVALEYLHCMGVIYRDLKPENVLLQKNGHILLTDFDLSFLTSCRPQLILQGGKGRSRRSKRRRRVTFCAEPRVSSNSFVGTEEYIAPEIISGEPHSSAVDWWALGILLYEMLYGRTPFVGRNRQKTFYNVLNKELIFPTSIPVSLAGRQLIAGLLQRDPTIRLGTLRGASELKKHPFFREINWPLIRWRKFSANQAHNANNVSSLDEGESDSGNAWEANGGSTQSFQDTF

SEQ ID NO: 6194 - protein, 277 aa, Corynebacterium sp.
MPNIPTISLNDGRPFAEPGLGTYNLRGDEGVAAMVAAIDSGYRLLDTAVNYENESEVGRAVRASSVDRDELIVASKIPGRQHGRAEAVDSIRGSLDRLGLDVIDLQLIHWPNPSVGRWLDTWRGMIDAREAGLVRSIGVSNFTEPMLKTLIDETGVTPAVNQVELHPYFPQAALRAFHDEHGIRTESWSPLARRSELLTEQLLQELAVVYGVTPTQVVLRWHVQLGSTPIPKSADPDRQRENADVFGFALTADQVDAISGLERGRLWDGDPDTHEEM

SEQ ID NO: 6195 - protein, 255 aa, Pseudomonas aeruginosa PAO1
MSKTHLFDLDGKIAFVSGASRGIGEAIAKLLAQQGAHVIVSSRKIDGCQAVADAITAEGGKATAIACHIGEMEQIQNVFAQIREQFGRLDILVNNAATNPQFCNVLETDLGAFQKTVDVNIRGYYFMSIEGGKLMKEHGGGSIINVASINGVSPGEFQGIYSVTKAAVISMTKVFAKECAQFGIRCNALLPGLTDTKFASALVKNDAIRNLALQRIPLKRVAEPSEMAGAVLYLASEASSYTTGVALNVDGGFLS

SEQ ID NO: 6196 - protein, 487 aa, Brucella suis 1330
MKAQPKASHFIGGAFVEDKAGKPLPVIYPATDEEIASLYSATPGIIEAAYAAALKAQGEWAALKPVERGRILRRTAEILREKNRKLSKLETLDTGKALQETLVADAASAADALEFFGGIISGFNGEFVELGGSFAYTRREALGICVGIGAWNYPIQIAAWKSAPALAMGNAFIFKPSENTPLSALALAEAYKEAGLPDGLFNVVQGYGDVGAALVNHRLTAKVSLTGSVPTGRRIMAQAGEQLKHVTMELGGKSPLIVFDDADLESAIGGAMLGNFYSTGQVCSNGTRVFVHKNIRERFIERLVERTRKIRIGDPFDEATQMGPLISAAQRDKVLSYIKKGKAEGATLACGGGVPKLQGFDKGFFIEPTVFADVTDTMTIAREEIFGPVMSVLEFSDEDEVIARANDSEFGLAAGVFTADLSRGHHVIGQIKAGTCWINAYNLTPVEVPFGGYKQSGIGRENGIAALAHYSQIKTVYVEMGKVDSPY

SEQ ID NO: 6197 - protein, 158 aa, Brucella melitensis biovar Abortus
MKKNNLFRALLISATFALQATAALAVNPDEVLSDPKLEKRAREISAELRCMVCQNESIDDSNADLARDLRILVRERLTKGDTDGQVIDFVVDRYGEFVLLKPRFNAQTALLWGFPVIILLIGGGALLVAFRRAARCWHSPTAPSESEKAELSRLLDGK

SEQ ID NO: 6198 - protein, 229 aa, Oryza sativa
MAMSSRAGGTPQKPDHPPTRCRSQAKDSDVTHAASHGPARARVWHSDPHLNWPHGKMVMGLSVVAWLDGGGEWRVVDDACPHRLAPLSEGRVDGKGRLQCAYHGWCFDGHGSCQFIPQAPALGPPVHKNSKACVASYPSVVQNNILWFYPRSEPEYCDVLKRKRPPYVPEIDDDDPSHFMVYGVRDLLYGYELLVENLMDPAHVPYAHKGLFGELPKREDPARYVPHLS

SEQ ID NO: 6199 - protein, 231 aa, Arabidopsis thaliana
MAAAAAKAAVVLPRPVTFVTGNAKKLEEVKAIIGNSIPFKSLKLDCALIVYFLAVPELQGEPEDISKEKAHILLELITKVIIFVFMCKLASYVDGPVLVEDTCLCFNALKGLPGPYIKWFLEKLGHEGLNNLLMAYEDKSAYALCAFSFSRGPGAEPLTFLGKTPGKIVPARGPTDFGWDPVFQPDGYDQTYAEMAKEEKNKISHRYKSLALVKSHFKEAGYVFQTDDGTI

SEQ ID NO: 6200 - protein, 184 aa, Oryza sativa
IKALHLYDCLRANKSTSAWGVEARVPFLDKNFINVAMDIDPEWKMIKRDLGRIEKWVLRNAFDDEEKPYLPKHILYRQKEQFSDGVGYSWIDGLKDHANEHNAARLTVPGGPSVACSTAKAVEWDAAWSKNLDPSGRAALGVHDAAYEDTLQKSPASANPVLDNGFGPALGESMVKTVASATAV

SEQ ID NO: 6201 - protein, 431 aa, Anabaena variabilis ATCC 29413
MLSIPINQHLPHTPHLVTSLPGPRAKAIVERDRAVTSPSYTRDYPLVVNRGEGCMVEDVDGNVFLDMTAGIAVTATGHAHPEVVRAIQEQSARLIHMSGTDFYYEPMVELAENLASQAPFVHDTKVFFTNSGAESNEGAIKLARYYTKRSLIIAFLGAFHGRTYGAMSLTGSKTVQRANFGPLVPGVTHIPYGTHASLDYLENNLLTTIIPAHEVAAIVVEPIQGEGGYIVPEDGFLQRIRNICDRYGILMVVDEVQSGMGRTGRLFAIEHWNVTPDIITTAKGIASGMPLGAILARAELMTWPPGSHATTFGGNPVACAAGIVTLKLLESGLMDNATQMGELLQTGLTQLHQQFPRMSLPRGKGLMVAVDLLDEDGNFDSKLRDRIIQEAFYHGLLLLGCGKAAIRFCPPLVINREQIQTTLDILAEILR

SEQ ID NO: 6202 - protein, 244 aa, Zea mays
  unsure (1)..(244): unsure at all Xaa locations
MLLRPPRLPRLSPRRLRSDSPMASTLALLRPSAPSPATNLRAPFRSRVSTRVSVGSAVAAGADTLFADYKPTTAFLFPGQGAQAVGMGKEALNVRAAAELFDKANDILGYDLLNLCIDGPKEKLNSTVISQPAIYVTSLAAVEVLRAREEGQSVINSVDVTCGLSLGEYTALAFAGAFSFEDGLKLVKLRGEAMQDASDAANSAMVSVIGLDSXKVQQLCDAANEDVDEKERVQIANFLCPGNY

SEQ ID NO: 6203 - protein, 449 aa, Agrobacterium tumefaciens str. C58
MQLNKFLTLGKLGAAATALMAPAIAFAQDAAPAVAAAAPVPEKADTAFMYIATILVLFMIIPGLALFYGGLVRTKNMLSVLMQCTVIGAVMMLVWVIYGYSFAFGGGTGPYFGGFGKLFLSGVSLDSTSATFSQGVVIYEYTFIAFQMTFAAITPALIIGAFAERVKFSAVILFTILWATFVYFPIAHMVWDANGLIFGMGALDFAGGTVVHINAGIAGLIGAIMVGKRTGFGKDMMAPHSMTLTLVGAAMLWFGWFGFNAGSNLEASGGAVLATMNTFLATAAAIVSWSLVESFTRGKASMLGAASGMIAGLVAVTPAAGSVGPMGAIVLGLIVSPICYFFVSVVKNKFGYDDTADVFGVHGIGGIIGALGTGIFTSPLLGGTGKADFSISSQLWTQFVAVAITIVWCAVVSAILYKIVDVIVGLRVPVEAEREGLDLATHGEAAYHS

SEQ ID NO: 6204 - protein, 404 aa, Candida albicans SC5314
MSTTVIKTQERTRKRLRTNTSGIVFKESYQEKSTNDEQEDVAIVPPTEISFDKKHQSILSITHFKDPLKVQSRYPIPELQPYEILVNNKAIGLNPIDWKGKKYGFGIYHFPWINGRESSGDVVKLGDQVDKFSIGDKVIVSSTSYRDNRTSTFQQYTAIDSRLVWKLPESFSYEDGATIGVGLVTAGIILYNSFEFELSATPTKQTTTASNNNTILIWGGATVVGLYVAQLAKIYGLNVIAVASTKHETYLKQLGVDHLIDRHLSEDEIINEINSIDGIESIEYGVDCVGKETSKTVLKILDLKSQPQQKSKDEQIVKPKFSGIVGVPKEYPESVDVRNVVIKRFHEDVSFGEKFIDVTSELLNKKVIEPVRFKQYKGGLHIIDNALKDLEKIGANGEKYVVSV

SEQ ID NO: 6205 - protein, 170 aa, Rhodospirillum rubrum
MIRRLFAIAALAWLLAPGAALAVLPDEQLADPALEGRARTLSQGLRCVVCQSENIDESNAELARDMRIRLRELLVAGKSDDEAVGYMVERYGDYVLMKPPFKATTLALWLGPFALLLVGALGIGLYYRRRGPIGAESAPAALSAAERQRLDHLLADDEPPTPPGDREAGR

SEQ ID NO: 6206 - protein, 232 aa, Pyrobaculum aerophilum str. IM2
MTKKVAVAKLDKGGEHFEILIDPDAALELKMGKPLGIDKVLVHEEIYKDAKKGLRASEQALKKVFGTTDVRKIAEIIIKEGEIPLTAEQRRKLIEDKKRQIVEWISRNCIDVRTKTPVPPQRVENALEQARVSIDPFKSVEEQVQEVLKEIQRIIPIKVATARVALAVSSTYAQRVKGLVAKMAKIVNERYKSDGSWEALLELPAGLQDVLIARVNDVTHGDADIRILEIVY

SEQ ID NO: 6207 - protein, 386 aa, Eremothecium gossypii
MVETADVTHFVQPRVATEEIVPQQDASSTMPGLSMESRSLCKNIMRAEWAQESGRQLRGRKLEGRTTKGKYTLYDFQILRTLGTGSFGRVHLVRSNHNGRFYAMKVLKKHVVVKLKQVEHTNDERKMLSVVSHPFIIRMWGTFQDAHQVFMIMDYIEGGELFSLLRKSQRFPNPVAKFYAAEVCLALEYLHSKDIIYRDLKPENILLDKNGHIKLTDFGFAKYVPDVTYTLCGTPDYIAPEVVSTKPYNKSVDWWSFGILIYEMLAGYTPFYDQNTMGTYENILNAEVKFPPFFNAKVRDLLSQLITRDLSKRLGNLQNGSQDVKAHPWFSEVIWDKLLCRNIETPYEPPIHAGQGDTSQYDRYPEEDANYGALGEDQYQALFSDF

SEQ ID NO: 6208 - protein, 233 aa, Triticum aestivum
  unsure (1)..(233): unsure at all Xaa locations
MGDRKMASLLLLLCLFSLLFAAAPRCAAYSPRTLFLVKPDPIVLRDHGGALLTGNLTVKVNVLYYGRFAPAQRAVVADFVRSVSAPAPGGGAEPSVASWWRTVSLYRGGGARLRLGRELLDERMSLGRSLSLENVTALXRGAGHHRGAITAVLTAPDVLVAPFCMSRCGVHDHATAGAHGRARYAYLWVGNPAQQCPGQCAWPFHRPSYGPQVPPLVPPSGDVGTDGMVISLA

SEQ ID NO: 6209 - protein, 276 aa, Zea mays
IFAYPFRCPIPAALLALCWYWASEGIGKKDMVVLPYKDSLLLLSRYLQQLVMESLGKEFDLDGNRVNQGLTVYGNKGSTDQHAYIQQLREGVHNFFVTFIEVLRDRPAGHDWELEPGVTCGDYLFGMLQGTRSALYANDRESISVTVQEVTPRAVGALIALYERAVGIYASLVNINAYHQPGVEAGKKAAGEVLALQKRVLTVLKEAICENPTEPLTLDEIADRCHCPEDIEMIYKIIQHMAANDRALIAEGSCGSPRSVKVYLGECSVDEDMQAA

SEQ ID NO: 6210 - protein, 384 aa, Mycobacterium tuberculosis H37Rv
MRAVVIDGAGSVRVNTQPDPALPGPDGVVVAVTAAGICGSDLHFYEGEYPFTEPVALGHEAVGTIVEAGPQVRTVGVGDLVMVSSVAGCGVCPGCETHDPVMCFSGPMIFGAGVLGGAQADLLAVPAADFQVLKIPEGITTEQALLLTDNLATGWAAAQRADISFGSAVAVIGLGAVGLCALRSAFIHGAATVFAVDRVKGRLQRAATWGATPIPSPAAETILAATRGRGADSVIDAVGTDASMSDALNAVRPGGTVSVVGVHDLQPFPVPALTCLLRSITLRMTMAPVQRTWPELIPLLQSGRLDVDGIFTTTLPLDEAAKGYATARARSGEELRFCLRPDSRDVLGAHETVDLYVHVRRCQSVADLQLEGAADGVDGPSMLN

SEQ ID NO: 6211 - protein, 484 aa, Xylella fastidiosa Temecula1
MHSNSCHFSDMKNGFFAICIFIALALLAGGNAIGRAEAQVQTNPLPSEQVTTELLMSEATPSDAVAIPKTTSPPVVDKGDVAWMLTSTLLVLLMVLPGLALFYGGMLRSKNVLSMMVQIGVVFSLIAILWVLYGYSLAFADGDMFIGTFNKAFLYGVDTATLVDTFSKGFKLPEYVYVAFQLTFAGITAALIVGAFAERVKFAAVLLFIFIWFSFGYLPLAHMVWSTPGFLLSKGALDFAGGTVVHINAGIAGLIGAYFVGKRIGFGQVAVKPHNVPMTFTGAALLWVGWFGFNAGSALEANSIAALAFINTMLATAAAILVWSLLEKMTKGKFSALGVASGMIAGLVGVTPAAGTVGPFGAIAIGAVAAVCCIWGITGLKRLLKVDDTLDVFGVHGIGGIVGAILTGVFTDKALGGQGYAEGMTMSNQVMIQAMSVGISIVWIGIVSLVGFLIVKLLFGLRVSEEAEREGLDITSHGESAYES

SEQ ID NO: 6212 - protein, 372 aa, Schizosaccharomyces pombe
MSYYQIIVCILASISYIILLEVIALDLGVLDNIFIPKRFAASTDVAIQLPDRNVTLWSRQAVFGKHFTNASATTVINLYLPSNFQEDMSGCPNRNDTDASYFYENDIIDYDIEYIEQKSYSSKPSARVQKDDGGESKDEAILDFLLVQRGKCTYFDKALEAQRLGFKGVIVGDNRSPSSFRLHYMVAPDKVDESKVHIPSLFVSTSSYNLLWSDLLHSYRQPLKLYAKPEELGDMFWPFLLCFSPSIIMLITVQALAIRKFIRTYRTKSKTRRFIEDLPSRTISREGFYSEEEEIENSTQNGELVPLMDESTRRATFGVECVICLESFTKGDKVVALPCKHEFHRPCIAKWIVDYRHACPTCNTEVPPPKPF

SEQ ID NO: 6213 - protein, 114 aa, Desulfovibrio desulfuricans G20
MNIYVGNLSYQMSEDDLRGAFEEFGAVDKVRIITDHDTGRSKGFGFVEMAEDSEANAAIEALNGREMGGRSITVNEARPRPERSGGGGGGFRRSGGGGGYGNRGGQGGGYGRRY

SEQ ID NO: 6214 - protein, 676 aa, Methanococcus maripaludis S2
  unsure (1)..(676): unsure at all Xaa locations
MTEFKVVHTICPYCGTGCGIDLVVKDGKVVDSHPFKRHPVNEGKVCIKGNYCYEFVHSEDRLTKPLIKKNGEFIEATWDEALDLIAGKLKQYSPDEVAFFSCARGTNEESYALQKFARTVLKTNNVDHCARIXHAPTVVGLGECFGSGAMTNSITDLAQADVLLIYGSNTFEAHPLIARSIVKAKENGTKIIAIDPRTTHTAKMADLHLKLIPGSNIDLINTITNIIIQEGMADEEFIKNRTEGYDELKDVVSKYTLEKTAELSGIPAETILEAARMYGSAENASIMYCLGVTEYTFGVDNVKSCCNLAMVTGNLGRPGTGVNPLRGQNNVQGACDMGALPNVFPGYQKVGEAYERLENLWETADLNREIGLTSPEVLHKAGEQVKFLHIVGEDPMVADADINHVEKALKSLDFFVVQDIFLTETAKLADVVLPAACWAEKDGTFTNSERRVQRIRKAVDAPGDALPDWLIVRKLAEKMGAGEKLNFESASEIFDEMAKVIPQYAGMSFERLGIDGLQWPCKTPEDPGTPILHKEKFLRPNGLGKFTPVEHKDADELIDEEYPLILTTGRIIFHYNSGTMTRRCDSITNEIDENFIEINTEDAKELGIKPGEKVRVSSRRGTVNADARVTENVIKGVVYMSFHFLEEATNKLTNSAYDPVSKTAELKICAVKVEKI

SEQ ID NO: 6215 - protein, 328 aa, Arabidopsis thaliana
MSSSRNTHWCHRCQRAVRLHGQEPVCFYCGGGFVEELDMAQASPFDMFRSHRGVVERDQTFDLMDAFSVFMRNRLAERSHDREIRGRTISSGPENFPGLAPLLIFGGQVPYRLTGDNAVEALFNGGSPGIGITRGNTGDYFFGPGLEELFEQLSAGTTRRGPPPAPRSAIDALPTIKIAQRHLRSSDSNCPVCKDEFELGSEAKQMPCNHIYHSDCIVPWLVQHNSCPVCRQELPSASGPSSSQNRTTPTRNYRSSSSSSSSNSRENGNERRNPFSSFWPFRSSGSSSSSTQNRGGTRNSDTSDENHNYHQQQHQQSYMGYSGWPFDY

SEQ ID NO: 6216 - protein, 400 aa, Agrobacterium tumefaciens str. C58
MAFLADILSRVKPSATIAVTQKARELKAKGRDVISLGAGEPDFDTPDNIKEAAIDAIKRGETKYTPVSGIPELRKAIADKFKRENGLDYKPEQTIVGTGGKQILFNAFMATLNPGDEVVIPAPYWVSYPEMVAICGGTPVFVNATLEDNFKLKPEALEKAITPKTKWFVFNSPSNPSGAAYSHDELKALTDVLVKHPHVWVLTDDMYEHLTYGDFKFVTPVEVEPSLYDRTLTMNGVSKAYAMTGWRIGYAAGPLPLIKAMDMIQGQQTSGASSIAQWAAVEALNGTQDFIPENKKIFEGRRDLVVSMLNQAKGISCPSPEGAFYVYPSCAGLIGKTAPSGKVIETDTDFVSELLEAEGVAVVQGSAFGLGPNFRISYATSETLLEEACKRIQRFCADCR

SEQ ID NO: 6217 - protein, 142 aa, Glycine max
  unsure (1)..(142): unsure at all Xaa locations
FSFGIDAIEDVLYHIETYDVTTIXACTPICLMSRLIKSLGVKWVIPREGSSEIFGGYLYLHKAPYKEEFLREPCLWIKALDHYDRLRANRSTFGWGLEARVPFWDKACINAAXEFSPEWNMMKRDXGRIEKWVLRRAFDDEE

SEQ ID NO: 6218 - protein, 358 aa, Glycine max
MSRTLVQPIGQKRLTNVAVVRLKKHGMRFEIACYPNTVLSWRSGVEKDPDEVLQSHTVYTNVSKGVLAKSKDLISAFGTDDHSKICLDILKKGELQVAGKERESLLSSQFRDIATIVMHKTYNPETQRPYTISMIERLMREIHFAVDPHSTSKKQALELIQELQKHFPIKRCPLRIRATAPDDQVPELLGKLNEWNAIVISKEGSSAQLSVIFELEPGLYKDCHDFVMNKMHGRFEVLAHSLYVEGDTQVEQYNDYEDIPEALPKEPYDSVLQLNEKLQKQTISSTSRPTEGQQKQNKCSTCNVSFDDSKLYREHHKSEWHKHNIKRKTRQLPPLTEEECMADMELGDSKSDLKDYSF

SEQ ID NO: 6219 - protein, 433 aa, Oryza sativa
  unsure (1)..(433): unsure at all Xaa locations
ICLCATFCLMTQLGAANVVLMGTNLTLSFDDVEASFAPGVKGSGFEGVVYTAEPLDACSPLTSKAEKGPPSPFALIIRGGCTFDEKVKNAQDAGFKAAIVYDNENSGVLISMAGSSGGIHIYAVFISKASGEVLKKFSGHTDVEVWILPAFENSAWSIMAISFISLLAMSAVLATCFFVRRHHIRRDRPRIPEAREFHGMSSQLVKAMPSLIFTKVQEDNCTSSMCAICLEDYNVGEKLRVLPCRHKFHAACVDLWLTTWRTFCPVCKRDASTGIPDPPASETTPLLSSAVRLPSQSSSFRSSVAASPPRPISRRPSSQSISRXYAASGTPNSPNPIRSFTNSTAMSISRSNVDLSNMSSRPRASHLASAHSLVGSHLSPPINIRYASPHMSHSGYASPSPHVSSSYVSNSGHCADSDASLSAMASAQSLPGC

SEQ ID NO: 6220 - protein, 536 aa, Arabidopsis thaliana
MEAALAACALPSLRILNTKPRFRCSFSNPSLPISPNSLITRKSSRFTTAVSSPPSSSAATSTNSPPEPEALFEPGSDKFDWYANWYPVMPICDLDKKVPHGKKVMGIDLVVWWDRNEKQWKVMDDTCPHRLAPLSDGRIDQWGRLQCVYHGWCFNGSGDCKLIPQAPPDGPPVHTFKQACVAVYPSTVQHEIIWFWPNSDPKYKNIIETNKPPYIPELEDPSFTKLMGNRDIPYGYDVLVENLMDPAHVPYAHYGLMRFPKPKEKIDREGGKPLEINVKKLDNKGFFSKQEWGYSNFIAPCVYRSSTDPLPEQEHEYPAPAASDKAALSKRRLSLIFICIPVSPGRSRLIWTFPRNFGVFIDKIVPRWVFHIGQNTILDSDLHLLHVEERKILERGPENWQKACFIPTKSDANVVTFRRWFNKYSEARVDWRGKFDPFLLPPTPPREQLFDRYWSHVENCSSCKKAHKYLNALEVILQIASVAMIGVMAVLKQTTMSNVARIAVLVAAVLSFAASKWLSHFIYKTFHYHDYNHAVV

SEQ ID NO: 6221 - protein, 168 aa, Rhodospirillum rubrum
MSPLYDIEVTTLDGAPQTLADYAGKVLLIVNVASKCGFTPQYKGLEALQRRYRDRGFCVLGFPCNQFGHQEPGDAGEIKSFCTLTYDVSFPMFAKIDVNGPDAHPLYRLLKAEAKGLLGSEAIKWNFTKFLVSADGETISRFAPTDTPESLRARIEALLPAAQGPLGA

SEQ ID NO: 6222 - protein, 485 aa, Rhodospirillum rubrum
MARKMLQFTRLDQRTPDKRSAGTRRVDFDEIYGRFTPDAAGDQASRCEQCGIPFCQIHCPLQNNIPDWLMLTAAGRLEEAYALSSATNSMPEICGRICPQDRLCEGSCVLEQSRHGAVTIGAVEKFITDTAWERGWVKPILPLREREQSVGIIGGGPAGMAAAEQLRAQGYQVTLYDRYDRIGGLLVYGIPGFKLEKSVVERRVDLLARSGVIFKTNFEVGRDASLPELRKTHDAVLIATGVYKARGLSIPGAGLRGVTKALDYLIASNRTGLGDRVPAFEDGTLDAKDKAVVVIGGGDTAMDCLRTAIRQGARSVKCLYRRDRANMPGSQREVINAVEEGVDFVWLTAPEAVLGDERATGVRAHRMHLGVADATGRQSPQPIAGSEFTLEADLVIEALGFEPEDLPAVFGEPRLPITRWGTIQIDPVSKMSGLDGVFAAGDIVRGASLVVWAVRDGRDAAEGIRRYLVAKAAAAPAKAAPLVNA

SEQ ID NO: 6223 - protein, 325 aa, Schizosaccharomyces pombe
MSIKEFAKNAREAYFTLPNGDKIPSIGLGTWRSGKDETKNAVCAALKAGYRHIDTAHIYGNEKEIGEGIRESGVPRTDIWVTSKLWCNAHRAGLVPLALEKTLQDLNLEYIDAYLIHWPFALLSGPEELPRNEKGELIYEDVPIEETWQAMEELLETGKVRYIGISNFNNEYLDRVLKIAKVKPTIHQMELHPYLPQTEYLEKHKKLQIHVSAYSPLANQNDAYNSDISKLIEHKTLVDIANARGEGITPANIAISWAVKRGTSVLPKSVNESRIVSNFLYIPLTDKEMEAINNIGVVRRFSHGKFAPKPMFVGLQDGTPKQTHA

SEQ ID NO: 6224 - protein, 510 aa, Mesorhizobium loti MAFF303099
MDSKAEIGASLPAEVALAVNAEDRLAVLHGLEMLDTAADPDFDRITSLAAAVMQAPTALVTLVDIERQWFKSCFGLDETETATGISFCAHAIAAGDEPMVVTDATTDPRFRTNPLVTGKHHVRFYAGAPMVVAGARIGTLCVLDRKPHAYPSGAKLDQLKTLAGLAASLFTLKDATRSGAIAEAALAREEKRRAIALDAASLASWAWDIRTDMIECDVRLSELFNLPRSTRLRARDILTAIDPRDVYQTETRFRDALSGSDDYFGEYRVKDFHPPRWVATRGRVIERNGDGKPTLIFGVNYDISERKLGDERQRLLLRELNHRVKNTLATVQALATQTVRHARQPSEFLEAFSARLQALGIAHNLLSDREWRGIGIRELVQIEIRPFDTADQPRITISGADLLLSPDQAVGLGLILHELASNALQHGSLSIASGKVDLDWKTQGRKGHRRLVVTWRESGGPEVAPPERHGFGSILIRRSLAKVISSQVTHEFRREGVFAEIAMPLEDLSK

SEQ ID NO: 6225 - protein, 147 aa, Methanocaldococcus jannaschii DSM 2661 [sequence omitted]

SEQ ID NO: 6226 - protein, 274 aa, Agrobacterium tumefaciens str. C58
MSMVYKASGPLVLVGAGNMGGAMLSGWLKKGVPGSKVIVIDPRPSDAMRTTIAEAGATHSESVPEGVKAGILFVAVKPQMMDAILPSLKPLLGPETVVVSIAAGTTIATFVSHFGAVAAVRAMPNTPAMVGRGVTGAYANDLVTAELKTVVDGLLKVSGPVEWVEAESDIDAVTAVSGSGPAYVFYLVECMAEAGRKAGLPADVAMRLARETVAGAGELLHQSPEEAARLRQNVTSPGGTTAAALSVLMAEDGMQPLFDRAVAAAKTRAEELAG

SEQ ID NO: 6227 - protein, 475 aa, Saccharomyces cerevisiae
MLSRATRTAAAKSLVKSKVARNVMAASFVKRHASTSLFKQANKVESLGSIYLSGKKISVAANPFSITSNRFKSTSIEVPPMAESLTEGSLKEYTKNVGDFIKEDELLATIETDKIDIEVNSPVSGTVTKLNFKPEDTVTVGEELAQVEPGEAPAEGSGESKPEPTEQAEHRKVSPQGKTQVRKRLQRKKLLQRKKPLQRKKLQNQKRTDQPKKTVSKAQEPPVASNSFTPFPRTETRVKMNRMRLRIAERLKESQNTAASLTTFNEVDMSALMEMRKLYKDEIIKKTGTKFGFMGLFSKACTLAAKDIPAVNGAIEGDQIVYRDYTDISVAVATPKGLVTPVVRNAESLSVLDIENEIVRLSHKARDGKLTLEDMTGGTFTISNGGVFGSLYGTPIINSPQTAVLGLHGVKERPVTVNGQIVSRPMMYLALTYDHRLLDGEKLLSFLKTVKELIEDPRKCCYGDLKFAAHTNLIS

SEQ ID NO: 6228 - protein, 279 aa, Zea mays
  unsure (1)..(279): unsure at all Xaa locations
MATTTDLGFEATELRLGLPGGGGGGEPALGGEGRSSSSASGKRGFAETIDLKLKLEPAAVVEAEEEEEEDHGVAVALEKEEEAGKMKRSPSQSSVAXPPPPPCVADPAEKPRAAKAQVVXGWPPXRSFRKNIMSVQSDKGRRQRRRRRQRRQVLGGGRRAVPAFVKVSLDGAPYLRKVDLKMYRSYQQLSKALENMFSSFTIGSCGSQGMNGMNESKLVDLLNGSEYVPTYEDKDGDWMLVGDVPWEMFVESCKRLRIMKGSEAIGLAPRAMEKCKNRS

SEQ ID NO: 6229 - protein, 292 aa, Campylobacter jejuni
MKGIILAGGSGTRLYPSTLTLCKQLLPIYDKPMIYYPMSVLMLAKIKEVLIISTPKDIDRFKELFKDGSFLGMQIQYKIQERPEGLAQGLILAQDFIQNDDIALILGDNIFYGQGFSDILENAKDDLKKGFASIFSYHVKDPERFGVVEMDQNGNVLSLEEKPKNPKSNYVATGLYFYNNDAIDIAKNIKPSARGELEITDVNIEYLRLNKLKSQHLGRGFAWIDTGTHDSLIEASSFVQTIELRQGYKIACLEEIAYNNNWIDNETLEKRALLLSKSNYGQYLYKILSQGK

SEQ ID NO: 6230 - protein, 321 aa, Leptospirillum ferrooxidans
LEEGEKTRSFASGMGAISAILIHLAKKHPEIAFPKVLYGGTRAFIEQYLIPSGCLIHWFDPREEGWDEELSRRLSPDTGAIFAETPSNPVMTVIDLEKLSSAAKKVGAPLVVDNTFATPILQKPLVLGADIVVHSATKYLGGHGDLLGGTVTGKASLIDRLSFEEGSYLGATLSPFNAWLLLRGMKTLPLRMDAHCRGAMMVAEFLSGHPGVKSVHYPGLSKDPGHKIASSQMKGFGGMLSFSLGDDQRARRVASGLELFKIAVSLGDPESLIEHPASLSHRQMTAEERMTLGIDPGFLRVSVGLEDPEDLVMDLKRALER

SEQ ID NO: 6231 - protein, 375 aa, Paracoccus denitrificans
MRTRAAVALEAGKPLEVMEVNLEGPKAGEVMVEIKATGICHTDEFTLSGADPEGLFPSILGHEGAGVVVEVGPGVTSVKPGNHVIPLYTPECRQCASCLSGKTNLCTAIRATQGQGLMPDGTSRFSMLDGTPIFHYMGCSTFSNYTVLPEIAVAKVREDAPFDKICYIGCGVTTGIGAVINTAKVEIGAKAVVFGLGGIGLNVLQGLRLAGADMIIGVDLNDDKKPMAEHFGMTHFINPKNCENVVQEIVNLTKTPFDQIGGADYSFDCTGNVKVMRDALECTHRGWGQSIIIGVAPAGAEISTRPFQLVTGRVWKGTAFGGARGRTDVPQIVDWYMDGKIEIDPMITHTLSLDDINKGFDLMHAGESIRSVVLY

SEQ ID NO: 6232 - protein, 434 aa, Neisseria meningitidis Z2491
MKKHIWAASLLPASLSAEPLNWWKPYSAVNSGDTAWVMTAAALVLLMTLPGLALFYGGMVRKKNLLSTMMHSFSIATLVGILWVAVGYSLAFTPGNAFIGGLGRVFLSGMQIDAAAQMLTVSPNAPTVPEPVFMFFQMTFAIISTAIITGAFAERMKYSAMMLFSGIWFLLVYVPGAHWVWGGGFMSKGGVLDYAGGTVVHINAGIAGLVAALVLGRRIGYGREAMPPHNMAMTLIGAAMLWFGWFGFNAGSALAADAAAGMAMAVTQVSAVFGAAGWLACEKIAGHKPSALGLASGAVSGLVGITPAAGFTGPSGAAAIGILTAAACFVSVTVVKHKLRYDDSLDAFGIHGFGGLVGGILTGIFFDNRIFGGDAAVWQQLWIQVKDGFVMAAYSGLMSWAILKVVGKICGGLRVGKDVEREGLDLNIHGERVE

SEQ ID NO: 6233 - protein, 199 aa, Mesorhizobium loti MAFF303099
MAARDNSRKDTVGWIKRARSGLAFQPLFESLPVSRYVENVLPGSEFRGRGMSFLNDSAPNCDHDSRRFKERLPVPHLLDGLRILVLEDEFLIAMDVEQLCRDHGAGEVVVARDLAEIDGRKVATQFDAAIVDLMLGGTSTLEFAAGLRETGVPFVFASGYSDPDEIKASFPGVRLVTKPYSGEDLVEAVALAYGRGFPG

SEQ ID NO: 6234 - protein, 556 aa, Streptomyces avermitilis MA-4680
MQHERAGTSAGPEDLIDVAKLVTAYYALHPDPAEPGQRVAFGTSGHRGSSLATAFNEDHIAATSQAICEYRDSQGTNGPLFLGADTHALSEPARVTALEVFAANGVTVLIDSDDGYTPTPAVSHAILTYNRGRASGLADGVVVTPSHNPPADGGFKYNPPSGGPAGSEATSWIQDRANEIITGGLKDVRRVPYTQALAAPGTGRYDFLGTYVADLPSVLDLDAIRAAGVRIGADPLGGASVAYWGRIAEQHGLDLTVVNPLTDPTWRFMTLDWDGKIRMDCSSPYAMASLIEQRDRYRIATGNDADADRHGIVTPDAGLMNPNHYLATAISYLYSHRERWPAGAGVGKTLVSSGMIDRVAADLGRRLVEVPVGFKWFVDGLADGSLGFGGEESAGASFLRRDGSVWTTDKDGILLALLASEITAVTDKTPSEHYAALTARFGEPAYARIDAPASREEKALLAKLSPAQVGADTLAGEPVTAVLTRAPGNDAPIGGIKVTTDNAWFAARPSGTEDVYKIYAESFLGPDHLSQVQQEAKLVVDAALGADAPGAGSDMA

SEQ ID NO: 6235 - protein, 237 aa, Schizosaccharomyces pombe
MPYVEAIIKAGGCPIVIYPGLQRNSIPPNIDGIILAGGESVHPNRYGEDFDPNAPKSVDVIRDSTEWGMIDFALKKKIPILGICRGCQVLNVYFGGSLYQNVSSCGFRDIHRPSKPRHYLAHKVMAKPGKLKNILGSNVIDVNSIHDQGIKTLGMGLQSTVISDDGLCEGIESKDGLIIGVQWHPEAIIDKQPHSLKLFQYFINRSKWHMKQSNIFSNVPHESSFYRNSIISIPIAP

SEQ ID NO: 6236 - protein, 744 aa, Candida albicans SC5314
MSYERIETIDNPFNDGNIIDNDTSTLFVTENNDDDDDNTITTTTTTMQKNNDDNQSSGFQESSNQDVTTVSSSSPSNSNNNITNNNNNNNRFSNQRNNNKDNFQKPTTNHNEFKDEDEEEEEEEDDDDMFEPIQFKNSDDDDEEEGDGLSSSSLSSDINSFTDNFGNSYHNIDFDNKRYTLKLNFKGKRLVYFTSGFVSLFVSLFGYSQGVVSSLLAFDTFNKYFNQPSAATIGIVISIQEIGAMISSIMVAKLSDKFGRKRTLLLGTFIFMIGGSLQAFCPNIFILAIGRVFSGMGVGILSTIVPSYQCEISPSEERGKLVCGEFTGNITGYALSVWVGYLSYFIQDIGDSRNQPHSFTANLSWRLPLFIQVVIAFVLFLGGFFIVESPRWLLDNDMDQQGFHVLALLYDSHVESTKPKSEFFMIKNSILQERITTPKSQRTWKHLLTHYKIRVFVACSSLIFAQFNGINIISYYAPLVFEQAGFDNANALLMTGINGIIYLLSTIPTWFLVDSWGRRPILITSGIAMAICLFLVAAFMHINKSYTPSVVAVFVIIYNASFGFGFGPIPFLLSSESYPLSVRSKGASLAVSCNWFSNFVVGLMTPILKQEIKWAMYLFPASSCVLSVIVVLLFYPETKGVELEDITRIFDEFYATSPTKRVKIRGLRTKRKDKGKRSGEKYKAKYNPLSGGGGTGTGTSSSTTTTGDFIDDQEAFEMRALNEFDFESDNDDDINVSHTRRQML

SEQ ID NO: 6237 - protein, 344 aa, Mesorhizobium loti MAFF303099
MRSRTADKTEGARSDEVIALHPAESGMQLGRALLHALHNAGISVLYQDREMKTVWARNMRAPWISDNSDGNGILPMAQADRISTAKRDVVATGNPERLEISVPVENGVRWFQVWVDADRGDAGDVQGVVTTMVETTEQKRREQTLTTLLREVSHRSKNLLAIIQSIATQTGRYSDGIGDFLTRFRGRLQSLSSSQDLVTSSNWRGAALHELVTSQVGRYGTNTSHSLRLRGANPYLNPNAALHIGLAMHELAVNSVSYGALSRQDGFVEVTANLNIIAPGEVALSLTWAEAIGTNDGRGGQKRFGSVALERVVPASLSGTASLDIADGRLEYRLVVPHSNFETQ

SEQ ID NO: 6238 - protein, 77 aa, Glycine max
MGLWTLLEGFLLLANALAILNEDRFLTPRGWGLSDFSAGQTKSFKGQLIGLIYATQYLRFPLLLLNSVFIIVKLVSG

SEQ ID NO: 6239 - protein, 257 aa, Synechococcus sp. WH 8020
MTNQRFKSTDPVNIEGWSWQPFLEDAIKRLEGLNVEPYPVPDRFLQREDQTGSKSKSIPVTTATWACKTEKFRQVRAACVSAGSAASVLNFVINPKSTYDLPFFGGDLVTLPAGHLLALDLQPAIKTDEVHTTHVWDRLIPIFERWRDQLPYGGPIPEEAQPFFSPGFLWTRLPLGEEGDELIQSIVRPAFNDYLDLYLELAASAERVTDERSEVLLQGQRKYTDYRAEKDPARGMLTRFHGSEWTEAYIHTVLFDL

SEQ ID NO: 6240 - protein, 397 aa, Neisseria meningitidis MC58
MFFKHIEAAPADPILGLGEAFKAETRPEKVNLGIGVYKDASGATPLVKAVKEAEKRLLESETTKNYLTIDGVADYNAQTQILLFGKDHEIIASRRAKTAQSLGGTGALRIAAEFAKRQLNAQTIWISNPTWPNHNAIAKAVGIQDKPYRYYDAAKHGLDWDGMIEDLSQAQKGDIVLLHGCCHNPTGIDPTPEQWETLAKLSAEKGWLPLFDFAYQGFGNGLEEDAYGLRVFLKHNTELLIASSYSKNFGMYNERVGAFTLVAEDEETAARAHSQVKTIIRTLYSNPASHGANTIALVLKNDDLKAQWIAELDEMRGRIKAMRQKFVGLLKAKGASQNFDFIIKQNGMFSFSGLTPEQVDRLKNEFAIYAVRSGRINVAGITDNNIDYLCESIVKVL

SEQ ID NO: 6241 - protein, 390 aa, Agrobacterium tumefaciens str. C58
MNQGNDLFDPASLIVAHDETHAFEAVVPPLVQTSLFTFSSYDEMVSTYRGEKVRPVYTRGLNPTVRMFEEMLARLEGAEDALGFASGMSAISSTVLSFVSPGDRIVAVRHVYPDAFRLFGTFMQRMNVEVVYVDGRDEAAVEKAMPGAKLFYMESPTSWVMEAHDVGALAAIGKRHGAVTVIDNSWASPVFQQPISLGVDLVVHSASKYLGGHSDVVSGVVAGSKAMIDRIREETYPYLGGKMSPFDAWLLIRGLRTLPLRMKAHQASALDIATRLQALDVVEKVCHPGLANRLPPGLHGTSGLFSFIFKEGVDVRAFADRLQLFKLGVSWGGHESLIVPGEVVLEQKAQPNSAHTFGISARSVRLHVGLEGTEALWNDLEPAIKAASAV

SEQ ID NO: 6242 - protein, 77 aa, Glycine max
MASLMLSSPAVTTDNRAGAGMVAPFTGLKSMAGFPTRKTINDITSIASTGGRVLCMQVRPPLGKKTFETLSYLPDLD

SEQ ID NO: 6243 - protein, 333 aa, Glycine max
FQVHNMMQLLIRSENDGILCPIPQYPLYSASIALHGGCLVPYYLDEATGWGLEIPELKKQLEAAKSKGINVRALVVINPGNPTGQVLGEANQRDIVEFCKQEGLVLLADEVYQENVYVPEKKFHSFKKVSRSMGYGENDITLVSFQSVSKGYHGECGKRGGYMEVTGFSAEVREQIYKVASVNLCSNISGQILASLVMSPPKVGDESYDSFMAEKENILASLARRAKTLEDAFNKLEGVTCNKAEGAMYLFPQIRLSEKAIKAAEAANATPDNFYCKRLLNATGVVVVPGSGFGQVPGTWHFRCTILPPEEKIPAIVTRLTEFHEKFMDEFRD

SEQ ID NO: 6244 - protein, 472 aa, Azorhizobium caulinodans
MAETSYDVIVIGGGPGGYVAAIRAAQLGFKTAVVEKKHLGGICLNWGCIPTKALLRSAEIYHYMEHAKDYGLSAEKIGFDIGAVVKRSRGVSQQLNTGVGFLMKKNKIDVIWGSATLTAPGKIKVEAAPDAPKGALGGGDYLAKHIIVATGARPRALPGIEPDKKLIWTYFEAMVPDRMPKSLLVMGSGAIGIEFASFYKTMGADVTVVEVMPQILPVEDAEIAALARKRFEKQGMKILSGAKVTKLEKKADSLTVHVVNSKGAKQDFQVERMISAVGVVGNVDGLGLENLGVKIERGIIVTDGYGRTNVPGVYAIGDVAGAPMLAHKAEHEGVICVETIKGLHTHPMDKAKIPGCTYCQPQVASVGLTEAKAKEDGRDIRVGRFRFGGNGKAIALGEDQGLVKTIFDKKTGQLLGAHMVGAEVTELIQGFVVAMNLETTEEELMHTVFPHPTLSEMMKEAVLDAYGRVLNA

SEQ ID NO: 6245 - protein, 202 aa, Nicotiana tabacum
MERTATYEKDLNLEATELRLGLPGINEPEKQSSSASTSAKYSKKRTSSEMDNSSSGKENEQDSAPAPKAQVVGWPPVRSYRKNVLQVKKSESDNSSGMYLKVSMDGGTYLRKIDLKVYKSYPELLKALQNMFKCTIGVYTEREGYNGSEYAPTYEDKDRDWMLVGDVPWDMFINSCRRLRIMKGSEAKGLHAYRLWTYRPSN

SEQ ID NO: 6246 - protein, 195 aa, Nicotiana tabacum
MERTATYEKDLNLKATELRLGLPGIDEPEKQSSSASTSAKYSKKRTSSEMDNSSSGKENEQDSAPAPKAQVVGWPPVRSYRKNVLQIKKSESDNSSGMYLKVSMDGGTYLRKIDLKVYNSYPELLKALQNMFKCTIGVYTEREGYNGSDYAPTYEDKDGDWMLVGDVPWDMFLNSCRRLRIMKGSEAKGLHAYRL

SEQ ID NO: 6247 - protein, 77 aa, Glycine max
  unsure (1)..(77): unsure at all Xaa locations
MGKQVVPVKSVIYALSPFQQKIMPGLWKDLPTKIHHKVSENWISATLLLXGPLVGTYAYVQNYLEKENLGSQVLSSW

SEQ ID NO: 6248 - protein, 457 aa, Zea mays
  unsure (1)..(457): unsure at all Xaa locations
MAGLLHLQSTLLPSASALRRRAGVPVPSSSRRRCRIEAKIREIFMPALSSTMTEGKIVSWTAAEGDRLAKGDPVVVVESDKADMDVETFYDGFLAAVLVPAGDSAPVGSAIALLAESEEDIPVAQSQAASFSSTSPLPSPPQETAAQEASPSPPPPPPPGPVSVSAPTPPLPATQGGRVVASPYAKKLAKDLGVDLFSVTGSGPGGRIVAKDVEAALAAPKKAAPVTAARPDVPLGSTVPFTSMQGAVSKNMVESLAVPTFRVGYTITTDALDQLYKKIKSKGVTMTTLLAAATAMALVQHPVVNCSCRDGKSFTYNKSINIAVAVAIDGGLITPVLQDADKLDIYSLSRKWKELVDKARAKQLQPXEYNSGTFTLSNLGMFGVDRFDAILPPGTGAIMAVGASEPTVVGTKDGRIGIKSQMQVNVTADHRVIYGADLAAFLQTLAKIIEDPKDLTF

SEQ ID NO: 6249 - protein, 226 aa, Xylella fastidiosa Ann-1
MAWYPRGFDVMAAYDYLYHCDPGLSGWMQRLGPLPALRRWRQPFNVVDALARAILFQQLSGKAASTIVARIEAVIGSTCLYAETLACIDDACLRACGVSSNKILALRDLTRREVAGELPSVWQMGSMHHNTIVEKLIPIRGIGRWTVEMMLIFRLGRPDVLPVDDLGVRKGIQRVDSLAFVPTPKALCTRGECWAPYRTYAGLYLWRIADFHEGEGEVISDRSQDE

SEQ ID NO: 6250 - protein, 370 aa, Agrobacterium tumefaciens str. C58 (Cereon)
MTVRSLFLLPGDGIGPEAMTEVRKLIEYMNSAHNAGFTVSEGLVGGSAYDAHGVAISDADMEKALAADAILFGAVGGPKWDGVPYEHRPEAGLLRLRKDLELFANLRPAICYPALAAASSLKPELVEGLDILIVRELTGGVYFGEPKQIIDLGNGQKRGIDTQIYDTFEIERIASVAFELARSRDNRVCSMEKRNVMKSGVLWNQVVTETHAAKYKDVQLEHMLADAGGMQLVRKPKQFDVIVTDNLFGDMLSDVAAMLTGSLGMLPSASLGAPDAKTGKRKAMYEPVHGSAPDIAGKSIANPIAMIASFAMCLRYSFNMVDEATKLEAAIANVLDKGIRTADIMADGCRQVGTSDMGDAVLAEFKALSA

SEQ ID NO: 6251 - protein, 202 aa, Zea mays
  unsure (1)..(202): unsure at all Xaa locations
MDPNTRHRLTHDDSPVINEGLQPTKTSRRTHLLRKLMLIFNKFPNHAPSFNHKPNPVXELKLVRXTYYDHAVAFSGKLHHPDRPXQDFCHLKPYHLHTXGIIPPSPEEHPILELKLLRLVNQTRIPEVHNDLEILPGKGLQHPYNKDAVQLEQSLIXGGYDRESSARQDVTHESYGYLMDLLAKTAKDEIAGCTQQGYDSLS

SEQ ID NO: 6252 - protein, 545 aa, Oryza sativa
  unsure (1)..(545): unsure at all Xaa locations
MSAAHLLRHSRKLRSLHNALDCERSGLVRYFSTASGSFPTKGNGAEKRIGGARFPQRKQPXKELETSKLSLGLNGSYTCRRSPNNFIPNTITGLNGSLSCGQIASARSFSSSADLPPHQEIGMPSLSPTMTEGNIARWLKKEGDKVSPGEVLCEVETDKATVEMECMEEGYLAKIIHGDGSKEIKVGEIIAVTVEEEGDIKKFKDYKPSTLAAPVAPSELKAQSEPTEPKVEEREPSKASELKAPRTEEPSRSGDRIFSSPLARKLAEDNNVPLSSVKGTGPDGRILKADIEDYLASVAKGCRKEALAAPGLSYTDVPNAQIRKVTXANRLLSSKQTIPHYYLTVDTRVDNLIKLRGELNPLQESSGGKKISINPRVIKAAALALRKVPQCNSSWMNDFIRQYHNVNINVAVQTEHGLFVPVIRDADKKGLGMIAEEVKQLAQRARDNSLKPDDYEGGTFTISNLGGPFGIKQFCAIINPPQSAILAIGSAERRVIPGSANGQYEFGSFMSATMSCDHRVIDGAIGAEFLKAFKGYIENPTSMLL

SEQ ID NO: 6253 - protein, 424 aa, Escherichia coli CFT073
MLNLYAKKFRCPDVLTSINTMFTLVPDISPTKPRELHHMTRKQATIAVRSGLNDDEQYGCVVPPIHLSSTYNFTGFNEPRAHDYSRRGNPTRDVVQRALAELEGGAGAVLTNTGMSAIHLVTTVFLKPGDLLVAPHDCYGGSYRLFDSLAKRGCYRVLFVDQSDEQALRAALAENPKLVLVESPSNPLLRVVDIAKICHLAREVGAVSVVDNTFLSPALQNPLALGADLVLHSCTKYLNGHSDVVAGVVIAKDPDVVTELAWWANNIGVTGGAFDSYLLLRGLRTLVPRMELAQRNAQAIVKYLQTQPLVKKLYHPSLPENQGHEIAARQQKGFGAMLSFELDGDEQTLRRFLGGLSLFTLAESLGGVESLISHAATMTHAGMAPEARAAAGISETLLRISTGIEDGEDLIADLENGFRAANKG

SEQ ID NO: 6254 - protein, 972 aa, Mesorhizobium loti MAFF303099
MRTTCPYCGVGCGVLAKVAADGQVSVRGDPDHLANFGRLCSKGSALAETIGLDGRLLHPEIHGRRTGWNEALDIVASTFSQTIAEHGSDAVAFYVSGQLLTEDYYLANKLMKGFVGSANIDTNSRLCMASSVAGHRRAFGSDTVPGTYEDLERADLIVLVGSNVAWCHPVLYQRIAAAREKRPEMKIVLVDPRRTMTSDIADMHLAIAPDGDVALFTGLLAWLGQHNALDRAYITAHTTGFGQALFAASALDLAGVAAATGLSEDELGGFYSLFAATAKTVTVYSQGVNQSSSGTDKVNAIINCHLATGRIGKPGAGPFSVTGQPNAMGGREVGGMANMLAAHMEIENPEHRDRVQRFWNAPGIAQKPGLKAVEMFQGVADGRIKALWVMATNPVDSMPDADAVEAAIKACPFVVVSDVLASTDTVRHAHVRLPAAAWGEKDGTVTNSERRISRQRSFLSAPGEARPDWWIIAEVARRMGFGEAFAHETPAEIFGEHAALSGFENDGGRDFDIGAYAGIDSVSYASLEPFQWPAPSQGTPLWPAGHIPRKGGDQPSLLPSPIVNVSERVAGPKLPISPLEGGEEWSAQRTESQLLGFPNDERPERQRRAGTGRTEGGDQARHLQQANGTTERDPTRFFANGHFYTADRKARFIAIRPTTETRTTPDFPLILNTGRIRDHWHTMTRTGKSPRLSQHIAEPFVEIHPLDAQHHGIGDADIVRISSPRGDVLVRALITPRQRQGSVFAPMHWTDQFAAKGRLDALTAPLIDPVSGQPALKHVAARIEKFAAKAFAFAVMRRRPEAIAADYWAVARCRGGWRVELAFANDDADWTAFAGSLFEAPSTEMLAYHDRDAGQHRIAAFDGEHLTGALFVARGPVAVSRGWAAEQLEEVQASQRERFRIVAGRAGAERPDAGATVCSCFSVGANQIVAAVAAGCTTVEAIGGALKAGTNCGSCRSEIRALIQASRVQAAE

SEQ ID NO: 6255 - protein, 546 aa, Mesorhizobium loti MAFF303099
MKKLFPIVAFIAVALISMTMAGFAYFATQEASRIKFEAAADDALNRIESRIDLHLSLLRSTQALFDARNGDISQTEFKAFFNALDVDNNFAGLRGIGFLGLVKTGDEAALERDILHNFGVSHPIYPETTQPWRAPIMLFEPLDPSNQASIGYDMFSEPMRRAAIEKAMADDQQHASGLVQLGQGTGATQTFPGFLVVVRLNVETAPEVINASRSSTAGFLYAAFRARDLFQIALSRAPLLPVNTEIYDGEVNSDNLLFRSETPPASAFGDRLLVTRKITVAGRPWTVLFRPTSAFSQPSSRAIPVMLGLFGLLAAGAIALVARYQERAYEAASRLHETTEKSLLEKDLMLQEMKHRIKNSITRVLAIARQTASRATDVNEFSASFSARLQAMAASQDMLTRSRWQKADLADLLRIELGQVFGKDLPEGLLSGPEVLLDETTTQALGLTFHELATNALKYGEAGNSANSLRSDWALKVEWSVEGRGRERTLALNWREAGKKKVEAPAETGFGTKLIDLNVTRELRGTIKRDYQADGLKVEIRIPLTG

SEQ ID NO: 6256 - protein, 469 aa, Neurospora crassa
MVLIKLNPTVGATDAVASSKHSAVLHRHLDTTFLNMTRSEGNFLILEDDRKIFDASGGAAVGCLGWGDQRVAQAVTNQVLAAPYCATIFYTTRVQEELCRDLVQSTNGAMARAYIVNSGSEAMEAAVKLARQYFLEIDQPQRTRFISRKQSYHGITLGALSVGGHEVRRAKFEPLLIKNVSRVSPCNAFRGKAPGESDEEYAERLAKELDDEFQQVGPENVCAFVAEPIVGAALGCVPAVKGYFKAVRDVCDKYGALLILDEVMCGMGRSGTLHAWEQEGIVPDIQTIGKALGGGYQPVAGLLAGHRVVNALEKGSSVFVHGHTYQGHPAACAAALEVQRIVREENLLSNVRAMGDLLSSRLREILASHPNVGDIRGRGLFWGIEFVADKENMAPFPSEDHVCMEICQLGLTDKYGINVYPGGGSVDGITGDHIIISPAFNISREDVEWIAATVGRLVSDYFAAKAGTQ

SEQ ID NO: 6257 - protein, 432 aa, Saccharomyces cerevisiae
MNKRTQEYKNTRAIMSATLFNNIELLPPDALFGIKQRYGQDQRATKVDLGIGAYRDDNGKPWVLPSVKAAEKLIHNDSSYNHEYLGITGLPSLTSNAAKIIFGTQSDAFQEDRVISVQSLSGTGALHISAKFFSKFFPDKLVYLSKPTWANHMAIFENQGLKTATYPYWANETKSLDLNGFLNAIQKAPEGSIFVLHSCAHNPTGLDPTSEQWVQIVDAIASKNHIALFDTAYQGFATGDLDKDAYAVRLGVEKLSTVSPVFVCQSFAKNAGMYGERVGCFHLALTKQAQNKTIKPAVTSQLAKIIRSEVSNPPAYGAKIVAKLLETPELTEQWHKDMVTMSSRITKMRHALRDHLVKLGTPGNWDHIVNQCGMFSFTGLTPQMVKRLEETHAVYLVASGRASIAGLNQGNVEYVAKAIDEVVRFYTIEAKL

SEQ ID NO: 6258 - protein, 445 aa, Bacillus pseudofirmus
MSADWSYLREKSASRLAPSMAKDHPNLPVVKEEGCYYYGVDGVKYLDFTSGIAVTNVGHRHPKIVQAIKEAADHLTHGPIGVIQYESILKLADELADILPGDLDCFFFANSGTEAIEGALKLAKFVTKRPYVVSFTGCFHGRTQGSLGVSTSKSKYRKFLQPNGLTYQVPYFKPSDPRILDEEGEVVESLACELLEEEFTNLFKYHVSSEEVAAVILEPVLGEGGYIIPPASWLAKVREICNRHDILLIFDEVQTGFGRTGEWFAAQTFGVTPDIMAIAKGIASGLPLSATVANHTLMQQWPLGSHGTTFGGNPIACSAALATLDVLKEENLLDNAREVGAYARERLNLLKEKYEMIGSIRSVGLMIGIEIIDPQTKKPDGAAVLRILDLALQEGVLFYLCGNEGEVIRMIPPLSVTKEQIDDGLDMLQRALVKYKEETHQPASL

SEQ ID NO: 6259 - protein, 278 aa, Triticum aestivum
MAGGGDNSQTNGGSQEPRAMEEGRKDDYDQGCGLAISLPFVQKIIAEIFGTYFLIFAGCGAVTINKSKGQITFPGVAIVWGLTVMVMVYSVGHISGAHFNPAVTFAFATVRRFPWRQVPAYVLAQMLGATLASGTLRLMFGGRHEHFPGTLPTGSDVQSLVLVFIITFYLMFVVSGASTHNGAIGELAGLAVGATILLNVLIAGPVSGASMNPARTVGPALIGSEYRSIWVYVVGPVAGAVAGAWAYNLIRFTNKPLRELTKSTSFLRSMSRMNSVSV

SEQ ID NO: 6260 - protein, 348 aa, Neisseria meningitidis MC58
MKMQAVVVNKNVAGDVEVIEREVRPLEYGEALVEVEYCGVCHTDLHVAAGDYGEKPGRVLGHEGIGLVKEVADGVKNLKVGDRVSIAWLFQSCGSCEYCNTGRETLCRSVLNAGYTADGGMATHCIVSADYAVKVPEGLDPAQASSITCAGVTTYKAIKVSGVRPGQWIAIYGAGGLGNLGVQYAKKVFGAHVVAIDINDDKLAFAKETGADLVVNAAKEDAAKVIQEKTGGAHAAVVTAVSAAAFNSAVNCVRAGGRVVAIGLPPESMDLSIPRLVLDGIEVVGSLVGTRKDLEEAFQFGAEGLVVPKVQLRALDEAPAIFQEMREGKITGRMVIDMKKECGCGHHH

SEQ ID NO: 6261 - protein, 177 aa, Zea mays
  unsure (1)..(177): unsure at all Xaa locations
MGNYLSCTLAKAPGPRPGGKRARVILPDDGGVRQVALPATAAELMMDAPGHFLVHVHARGAGLGLGARLAALPADEELQLGAVYATFPMKRLGTPLAAPDLARLAAAAAREAHRSAKVASAAXVAAPPPEDAPRLRLEEMVDDAAAAEIAVTKXWASGARSRRPTLETIDEESYLSR

SEQ ID NO: 6262 - protein, 432 aa, Myxococcus xanthus
  unsure (1)..(432): unsure at all Xaa locations
MAPPSSGEKISLQSGKLSVPDNPIIPFIEGDGTGRDIWRASQAVFDAAVEKAYKGKKKIAWYEVLAGEKSFKAVNNWLPEETVEAFRTYLVGIKGPLTTPVGGGIRSLNVALRQMLDLYVCLRPVRYFKGVPSPVKMPDKVDMTIFRENTEDIYAGIEFEAGTAAAEKFLGLLKQEFPKEFGKIRFPSDVGLGIKPVSHEGSDRLIRAAIQYAVDHKRKSVTLVHKGNIMKFTEGAFRKWGYELAAREFGDKVYTWDQWEATKAXKGEDAANAEQKAALAAGKILIKDSIADITLQQVLTRPDEFDVIATLNLNGDYLSDALXAQVGGIGIAPGGNINYVTGHAVFEATHGTAPKYADQDKVNPGSVILSGEMMFRHLGWYEAADLMIQGMDRAIASKTVTYDFARLMKQEGQSGVSEVKCSEFGQAIIKNM

SEQ ID NO: 6263 - protein, 474 aa, Rhizobium etli
MSISKFSSTFARVGAALAALLAPAVAFAQETAAPAARPRLPRFTMDKGDNTWMLVSSALVLLMTIPGLALFYGGLVRAKNMLSVLMQVFMITAVVSLIWVTYGYSLAFTDGGSLNSFIGGFSKAFLAGVNTSSLAETFSKGVAIPEYTFIVFQMTLPCITPGLIVGAFAERVKFSAVMLFVVLWVTFIYFPMAHMVWFWGGPSSYSAPAGLIFSYGAIDFPGATVVHINAGNRGLVAAIMLGKRTGYKKEIMRPHSMTLTMVGASLLWVGWFGFNAGSNLEANGYASLAMINTFVAAAAAVSWCIVESLARGKASMLGGASGAVAGLVAITAAAGFAARWASIVLGLVVSPICYFFVDVVKNKFNYDDSLDVFGVHCIGGIIGALGTGILVNPALGGAGIVDYSTADFAATYRGTATQVLNQAKGVLTTLLWSGIGSAILYKIVDVVIGLRVSVEAEREGLDLSTHGEPAYHAS

SEQ ID NO: 6264 - protein, 461 aa, Mesembryanthemum crystallinum
MQSQSNDEDNNAHYDFDLFVIGAGSGGVRAARFSAKFGAKVGICELPFHPISSEVIGGVGGTCVIRGCVPKKILVYGASFSGELQDARNYGWELNENIDFNWKKLLQKKTDEILRLNNIYKRLLSNAGVKLYEGEGKIVSPNEVQVTQLDGTKLSYSAKHILIATGSRAQRPDIRGQELAITSDEALSLEELPKRAVILGGGYIAVEFASIWRGMGATVDLFFRRELPLRGFDDEMRAVAARNLEGRGVNMHPRTNLTELVKTDGGIKVRTDHGEELMADVVLFATGRSPNTKRLNLDAVGVNVDKTGAIKVDDYSQTSVPSIWAIGDVTNRMNLTPVALMEGTCFAKSLFGGQPTKPDYKDIPCAVFSIPPLSVVGLSEEQAIEQSNGDVLVFTSSFNPMRNTISQRQEKSVMKLVVDAETDRVLGASMCGPDAPEIMQGIAVALKCGATKAQFDSTVSR

SEQ ID NO: 6265 - protein, 117 aa, Zea mays
EFGTRAVQRVAKAINFKTCNALLLKVNQIGSVTESIEAVRMSKRAGWGVMASHRSGETEDTFIADLSVGLSTGQIKTGAPCRSERLAKYNQLLRIEEELGDAAVYAGAKFRAPVEPY

SEQ ID NO: 6266 - protein, 514 aa, Triticum aestivum
  unsure (1)..(514): unsure at all Xaa locations
MANLVQELMLETPPRAWFLFLLPLLLLSLHHWFTRKTGSTGQRLPPSPPALPIIGHLHLVGALPHVSLRDLARKHGPDVMLLRLGAVPTLVVSSPRAAEAVLRTHDHVLASRPRSVVSDVIMYGSSDIAFAPYGEYWRQARKLVTTHMLSVKKVQSFRSAAAEEVSMSMAKINEAATASGTVDMSELLNSFSNDMACRIVSGKFFLKDGRSKLFGELINDTSRLLGGFNLEEYFPALGRVGVLKRAVCAKAERVRNRWADLLDKVIDDRVSKRKSASDHKDGDFVDILLSVQQEYDLTREHMKALLTDVFFGATDTSANALEFTLAELMRKPHLMLKLQDEVRSIIPRGQEIVSEADMNNMXYLRAVIKESLRLYPVAPLLAPHLAMADCTIHGYMVPAGTRVVVNAWAIGRDSSSWEDAEEFIPERFTDEGNATNVNFKGNDFQFLPFGAGRRICPGINLGIANVELMLANLVCHFDWELPVGVERKDIDMTEVFGLTVRRKEKLLLIPKSRM

SEQ ID NO: 6267 - protein, 233 aa, Glycine max
MKLSVFHHQHHPMILNCPLTLTRTHKRLNNKGSYRWLPCHCSHSSTNKIAAEPVTVSLSIEGRRALLSCLLTTVAGVYACDVAGAVSTSRRALRGAKIPESDYTTLPNGLKYYDLKVGNGAEAKMGSRVAIHYVAKWKGITFMTSRQGMGVGGGTPYGFDVGQSERGTVLKGLDLGVQGMRVGGQRLLIVPPELAYGSKGVQEIPPNSTIELDIELLSIKQSPFGTPVKIVEG

SEQ ID NO: 6268 - protein, 117 aa, Zea mays
LQAVIKRLMTDVPFGVLLSGGLDSSLVASVASRHLNETKVDRQWGNKLHTFCIGLKGSPDLKAAREVADYLSTVHHEFHFTVQMVISGEGSDEIFGGYLYFHKAPNKKEFHEETCRK

SEQ ID NO: 6269 - protein, 347 aa, Eucalyptus gunnii
MRASMLRLIRSRSSSAAPRPHLLRRAYGSESVPERKVAVLGAAGGIGQPLALLMKLNPLVSQLALYDIAGTPGVAADVGHINTRSEVAGYVGEEQLGQALEGSDVVIIPAGVPRKPGMTRDDLFNINAGIVKSLCTAIAKYCPNAVVNMISNPVNSTVPIAAEIFKKAGTYNEKKLLGVTTLDVVRAKTFYAGKAKVPVEEVNVPVVGGHAGITILPLFSQAVPKANLADEDIKALTKRTQDGGTEVVEAKAGKGSATLSMAYAGALFADACLKGLNGVPDVVECSFVQSSIITELPFFASKVKLGKNGVEEVLELGPMSDYEKQGLEILIPELKASIEKGIKFANQ

SEQ ID NO: 6270 - protein, 391 aa, Gloeobacter violaceus PCC 7421
MRLATRLEKLQSNVFSLMDEAKARARRAGLEVVDLSLGSSDLSPPAHALERIRESILDPTSHGYLLFQGTRSFREACAAWYERRYGLALDPETEILPLIGSQEGTAHIPLAVLDPGDVALLTDPGYPSHEGGVHLAGGQIYPLALRPETGYLPQLEQIPEEVLERSRLLVLSYPHNPTAATATLAYFERAVAFCRAHDIVLVHDFPYADFHLSGEQPPSILQADRERAVAIEFFSLSKSFHMGGFRIGFAVGNRDLVAALRQVKASIDFNQYRGILDGAEAALRGPQDYVREAVAVFRARRDRAVAALAQAGWQVPAPEATMYLWAALPECWRGSSAEFCIRLVEQTGVALAPGSGFGSSGEGYVRFALVRSEDMLERAIAQIAGFLQRSC

SEQ ID NO: 6271 - protein, 64 aa, Pectobacterium carotovorum subsp. carotovorum
MSIVNKKVKKAVIPVAGLGTRMLPATKAIPKEMLPLVDKPLIQYVVNECIAAGINEIILVTHSS

SEQ ID NO: 6272 - protein, 299 aa, Geobacillus stearothermophilus
MKGIVLAGGSGTRLYPLTKAISKQLLPIYDKPMIYYPLSVLMLAGIRDILIISTPEDTPRFEQLLGDGSDLGISLSYAVQPSPDGLAQAFIIGEEFIGNDHVALILGDNIFYGHGFTAMLERAASRKSGATIFGYNVKDPERFGVVEFDKNGKVISIEEKPENPRSTYAVTGLYFYDNRVIDIAKSLQPSARGELEITDVNKAYLELGELHVELLGRGFAWLDTGTHESLLEASLFIETIEKRQSLKVACLEEIAYRKGYISREQLLKLAELLKKNGYGQYLLDIANRVSKEGELIENY

SEQ ID NO: 6273 - protein, 223 aa, Zea mays
  unsure (1)..(223): unsure at all Xaa locations
MCGGAIIFDYIPARRXVSTADFWPGSEADAEDIHASHSPDPQRAPRAKAKPGRRKNQYRGIRQRPWGKWAAEIRDPVKGVRVWLGTYPTAEAAARAYDRAARRIRGAKAKVNFPSDTSSSVTVPTAVSRSAAAAAQAPAVLPQPSVEAQTQVSDEVKELLEELIYYGFYMNSLIEGYNAAATTAPATTAAAVPEKAQVPVPAPTGLWSFEDYYYPPSLSLFPE

SEQ ID NO: 6274 - protein, 406 aa, Glycine max
MQSAAFTFSPSLPLRNPSPNSWRRPSLSLRLHAKHSNNNNNSNSTEGVNSNGVSSTSFTRRSWTLLPSSSFKFRPLPSSPPRAAENAVPESAAAPVENPLFKTLELGALFGLWYLFNIYFNIYNKQVLKAFHYPVTVTVVQFAVGTVLVAFMWGLNLYKRPKLSGAMLGAILPLAAVHTLGNLFTNMSLGKVAVSFTHTIKAMEPFFSVILSAMFLGEFPTPWVVGSLVPIVGGVALASVTEASFNWAGFWSAMASNVTNQSRNVLSKKAMVKKEDSMDNITLFSIITVMSFFLLAPVAIFMEGVKFTPAYLQSAGVNVRQLYIRSLLAALCFHAYQQVSYMILQRVSPVTHSVGNCVKRVVVIVSSVIFFQTPVSPVNAFGTAIALAGVFLYSRVKRIKAKPKTA

SEQ ID NO: 6275 - protein, 201 aa, Oryza sativa
MAVAIEAPFHVLAVDDSLPDRKLIERLLKTSSFQVTTVDSGSKALEFLGLHDHEDSPISTQSDQQEVGVNLIITDYCMPGMTGYDLLKKIKESSYLRDIPVVIMSSDNIPSRINRCLEEGADEFFLKPVRLSDMSKLKPHILKSRCKEHYQQEQHLQSNSESNNSSNPTSENSSSSTSTNSHKRKAVDEEILPHTIRPRHS

SEQ ID NO: 6276 - protein, 143 aa, Triticum aestivum
PVETFNPIRQGIHHDILLSNFFAQTEALMVGKNEEQVRAEMGTNVVENIVPHKIFKGNKPTNSFLFQKLTPATLGSLIAMYEHKIFVQGAIWDINSYDQWGVELGKQLAKAILPELSASGEVASHDASTNGLINHYKKNKKQY

SEQ ID NO: 6277 - protein, 486 aa, Oryza sativa
MAAAGAYSASLPAVPDWLNKGDNAWQLTASTLVGIQSMPGLVVLYGSIVKKKWAVNSAFMALYAYASSLLVWVLVGFRMAFGDQLLPFWGKAGVALTQSYLVGRATLPATAHGAIPRTEPFYPEATLVLFQFEFAAITLVLLAGSVLGRMNIKAWMAFTPLWLLLSYTVGAFSLWGGGFLYRWGVIDYSGGYVIHLSSGIAGFTAAYWVGPRLKSDRERFSPNNILLMIAGGGLLWMGWAGFNGGAPYAANIAASVAVLNTNVCAATSLLMWTCLDVIFFRKPSVIGAVQGMMTGLVCITPGAGLVQTWAAVVMGIFAGSVPWFTMMILHKKSALLMKVDDTLAVFHTHAVAGLLGGILTGLLATPELFSLESTVPGLRGAFYGGGIKQIGKQLGGAAFVIAWNLVVTTAILLGIGLFIPLRMPDEQLMIGDDAAHGEEAYALWGDGEKFDATRHDLSRGGGGGDRDGPAGERLSALGARGVTIQL

SEQ ID NO: 6278 - protein, 443 aa, Lactobacillus gasseri
MKTIKNIIIGFGKGGKTLAKFLAQKSEEVLVIEKSNKMYGGTCINIACLPSKRLIIEAANGVSYVDAVSGKNEMTAQLRNKNYHMLADEQTVTVLDGEAHFIADHEIEVVLTNGKKEQFKGERIFINTGAVPVMLPIPGLKESKYILDSTQAMDEKKMPENLTIIGAGYIGLEFASMFAKYGSKVTVLDHSREFLSREDDDISQLVKKDLEDAGVHFELGADIEEIIDEENEAKVRYQINGQEKEISANRILAATGRKPNIENLGLENTSIEITDRGAIKVDDFLRTTVDNVWAIGDVKGGLQFTYISLDDFRIIKDQLFGTGARMISDRKVVPYSVFISPALSQVGLNEKQARNQNKEYKLFKLPVAAIPKAKVAKDSRGLFKALVDPETEEILGATLYGIESYELINLISLAMKAHLSYTVLRDQIYTHPTMSEAFNDLFK

SEQ ID NO: 6279 - protein, 285 aa, Lactobacillus gasseri
MNFHSIEDTYTLNNGVEIPIIGFGTWQTPDGDIAKHAVEVALNAGYRHIDTAAAYGNEKSVGQAIKKSGINRHDLFITTKLWNADHGYQSTKAAIDRSLQNLKVDYLDLYLIHWPNPVAMRDHWAEANAESWRAMEEAVQAGKIRAIGVSNFRKRHLDELLKTAEIKPVVNQIMLNPSDLQSDVVKVNNKLGLLSEAYSPLGTGGLLGNETVKEIASEVGKSPAQVLIRWSLEHGFLPLPKSVHDKYIQANVEVFDFNLNSEQMNKLDSLHGVSGLATDPDTANF

SEQ ID NO: 6280 - protein, 348 aa, Helicobacter pylori 26695
MRVQSKGFAIFSKDGHFKPHDFSRHAVGPKDVLIDILYAGICHSDIHSAYSEWKEGIYPMVPGHEIAGAIKEVGKEVKKFKVGDVVGVGCFVNSCKACKPCKEHQEQFCAKVVFTYDCLDYFHDNEPHMGGYSNNIVVDENYVISVDKNAPLEKVAPLLCAGITTYSPLKFSKVTKGTKVGVAGFGGLGSMAVKYAVAMGAEVSVFARNEHKKQDALSMGVKHFYTDPKQCKEELDFIISTIPTHYDLKDYLKLLTYNGDLALVGLPPVEIAPALSVFDFIHLGNRKVYGSLIGGIKETQEMMDFSIKHNIYPEIDLILGKDIDTAYHNLTHGKAKFRYVIDMKKSFD

SEQ ID NO: 6281 - protein, 622 aa, Oryza sativa (japonica cultivar-group)
MGAELRRDDMEVAEEDISDSQAFRFVEHVLQSVRMDPFQVDLRDKEEYDSLLSIVDSSKKRSYDDEALLVTTLKALSEAVSKIDIMYHHALLNNIFTMSIWYLNSDTRDALLSLITRLAAVADQFLRECLQMLVNNFTPPGSLTAFIGQPRWLARKKEIYSQLHESLRMISDTVPLAPRMLKDIIDRSMPKLFDNKAKMVSFVECMLGLDNDRMGDLIGALLLAKVVDLLTELDVNITWEDILQDEHNKGIFDMELEDLGEDEDSLGQEGTKALFGGNACAEKLDGLMVVFCEHLKSCKEHGRLPQEFDILKTIFRASVLRVHKSKFAQFIMFYACSLDPEICGLEFALFLSDIFIKKEEDSISRMSAVSYVGSYLSRARFISADTVVGILKRLVDWCVDYCDLQNNIRITTKPINHQIFYASCQAVMYILCFRLRSIMDYPNLKAQLFNMPFGYILTHPLEPLKVCLPSIVDEFLRQAKAARLFNASVHSEFEDALESDLSKTFGGMNRLDMFFPFDPYLLKESDRYMRPNFEYWSMVKTTYNNYNSDVDDELVDLDAPEMNVGSLDDHVEIDLNSDDDLEYSMNKMSITPNRSFFHQIMANSDTGLTMPARIRPSISPPS

SEQ ID NO: 6282 - protein, 267 aa, Leifsonia aquatica
MTATSSPTTRFTDRVVLITGGGSGLGRATAVRLAAEGAKLSLVDVSSEGLEASKAAVLETAPDAEVLTTVADVSDEAQVEAYVTATTERFGRIDGFFNNAGIEGKQNPTESFTAAEFDKVVSINLRGVFLGLEKVLKIMREQGSGMVVNTASVGGIRGIGNQSGYAAAKHGVVGLTRNSAVEYGRYGIRINAIAPGAIWTPMVENSMKQLDPENPRKAAEEFIQVNPSKRYGEAPEIAAVVAFLLSDDASYVNATVVPIDGGQSAAY

SEQ ID NO: 6283 - protein, 481 aa, Arabidopsis thaliana
MASAAASSAFSLLKSTGAVASSAGTRARASLLPIPSTSVSARPLGFSATLDSRRFSLHVASKVESVRGKGSRGVVSMAKKSVGDLTSADLKGKKVFVRADLNVPLDDNQTITDDTRIRAAIPTIKYLIENGAKVILSTHLGRPKGVTPKFSLAPLVPRLSELLGIEVTKADDCIGPEVESLVASLPEGGVLLLENVRFYKEEEKNDPEFAKKLASLADLYVNDAFGTAHRAHASTEGVTKFLKPSVAGFLLQKELDYLVGAVSNPKRPFAAIVGGSKVSSKIGVIESLLEKCDILLLGGGMIFTFYKAQGLSVGSSLVEEDKLELATELLAKAKAKGVSLLLPTDVVVADKFAPDANSKIVPASGIEDGWMGLDIGPDSIKTFNEALDTTQTVIWNGPMGVFEMEKFAAGTEAIANKLAELSEKGVTTIIGGGDSVAAVEKVGVAGVMSHISTGGGASLELLEGKVLPGVIALDEAIPVTV

SEQ ID NO: 6284 - protein, 445 aa, Oryza sativa
MAATIQSVKARQIFDSRGNPTVEVDICCSDGTFARAAVPSGASTGVYEALELRDGGSDYLGKGVLKAVDNVNSIIGPALIGKDPTEQTVIDNFMVQQLDGTKNEWGWCKQKLGANAILAVSLALCKAGAIIKKIPLYQHIANLAGNKQLVLPVPAFNVINGGSHAGNKLAMQEFMILPTGASSFKEAMKMGVEVYHNLKSVIKKKYGQDATNVGDEGGFAPNIQENKEGLELLKTAIEKAGYTGKVVIGMDVAASEFYTEDQTYDLNFKEENNDGSQKISGDSLKNVYKSFVSEYPIVSIEDPFDQDDWVHYAKMTEEIGDQVQIVGDDLLVTNPTRVAKAIKDKACNALLLKVNQIGSVTESIEAVKMSKRAGWGVMTSHRSGETEDTFIADLAVGLSTGQIKTGAPCRSERLAKYNQLLRIEEELGAAAVYAGAKFRAPVEPY

SEQ ID NO: 6285 - protein, 135 aa, Eremothecium gossypii
MCTPSHLPHTASAMSNTEEQPKDVDMLADEQEDELDRDKIRLLPQATSEDGTCAFFQITDEDHTLGNALRYIIMKNPEVEFCGYSIPHPSENFLNIRIQTYGKVTAVDALHKGLQDLMDMCDVVEDKFTQRIREL

SEQ ID NO: 6286 - protein, 229 aa, uncultured Pseudomonas sp.
HFNRENIPERRVHAKGSGAFGTFTVTKDITQYTSAKLFESVGKQTPTFLRFSTVGGERGSADTERDPRGFALKFYTEEGNWDIVGNNTPVFFIRDPLKFPDFIHTQKRLPQSNLKSAQMMWDFWSHSPEALHQVTILFSDRGIPDGYRHMHGFGSHTYSLINAQGERHWVKWHYKTKQGIKNLAPAEAARLAGTDPDYAQRDLFGAIERGDFPKWRVCIQIMTEAQANA

SEQ ID NO: 6287 - protein, 401 aa, Magnetococcus sp. MC-1
MGILSNRVAKVKPSATLAVTAKAKELKAAGRDVIGLGSGEPDFDTPDHIKQAAIDALNAGYTKYVAVAGTPELRQAIADKYKRETGLDYSAEQTVVTVGGKQAFFNLAQATLNSGDEVIIPAPYWVSYPDMTLLADGTPVIVDTQESHGFKITPAELEAAITPRTKFVVLNSPSNPTGNAYSIAELHALAEVLRKHPHVWVISDDIYEKIIYDGFEFATMVKVAPDLQDRTVILNGVAKAYSMTGWRIGYAVGPLDVIKAMTKIQGQSTSNATSFAMKGALEAITGPQDCVEPMVKAFKERRDYVVARLNAMPGISCLTPEGAFYVYPNVAGLVGKKAPDGSDLKDSVDLASYMLEAEGVAVVPGVAFGLDPYLRLSYATSMEDLIKAMDRIEKIAQQLAG

SEQ ID NO: 6288 - protein, 190 aa, Anthoceros punctatus
DEHGEVVAEIRRSDLEPYLGLHYPATDIPQASRFLFMKNRVRMIADCFSPPVKVIQSKDLPQPVSLAGSTLRAPHGCHAQYMGNMGSIASLVMAVVINDNDEDFNGRGYQQKGRKLWGLVVCHHTTPRAVPFPLRSACEFLMQVFGLQLNMEVELAAQMREKHILRTQTLLCDMLLRDAPIGIVTQSPNI

SEQ ID NO: 6289 - protein, 516 aa, Methanocaldococcus jannaschii DSM 2661
MMCGINGIIRFGKEVIKEEINKMNKAIKHRGPDDEGIFIYNFKNYSIGLGHVRLAILDLSEKGHQPMGYNVDEDKIIYRDDELDRADIIIVYNGEIYNYLELKEKFNLETETGTDTEVILKLYNKLGFDCVKEFNGMWAFCIFDKKKGLIFCSRDRLGVKPFYYYWDGNEFIFSSELKGILAVKEINKKENINKDAVELYFALGFIPSPYSIYKNTFKLEARQNLIFDLDKREIRKYYYWELPDYKPIYDKKKLIEEGKKLLYDAVKIRMRSDVPVGAFLSGGLDSSTVVGVMREFTDLSKLHTFSIGFEGKYDETPYIKIVVDYFKTQHHHYYFKERDFEELIDKYSWIYDEPFGDYSGFPTYKVSEMARKFVTVVLSGDGGDEVFGGYMTHLNGYRMDFIRKLPKFLRVVGSKLPVKKDLNGIANLYLLKEAFRLSLINPEEFYAESIKEDAIRPEIYKKWTIEKLRYCLNKGDNKLGEALRIFDLLFNTLCDNFLVKVDRASMLTLWKLEVHF

SEQ ID NO: 6290 - protein, 404 aa, Burkholderia fungorum LB400
MGIGCAPTLDLTQMMAYKASTVEKMSNSIHKLLRKQGVTLIHGDALLAAAGQVIVRKTGGVQQTLSGTALVIATGSVPIPLPFAAFDHMRILDSADALSLGKVPRHLAIIGAGAVGVELGSIWQRLGSRITLIERCDRICHWLDRDVTATLERSLRQRGIDIRVSSDVVGLDKHSDSVSVQLRAAASGKITHIDADRVLVAIGRRPSTAGMNLASVGMQTGYKSTLSQQGPATPVTSMTNGSGIWVIGDAGPGPMLMSKAEEEAIACAERIAGLPGFVSYPSIPYVLHTSPEVAMIGRTEDELRGTGAAYRVGYYPLAANPRAAICGTSEGFVKLLVDADTNLIAGAHLIGPGAADLISQVAIAMEASMICEDFARICHPYPVWSEALRQAAMAAGGWMMHVAI

SEQ ID NO: 6291 - protein, 243 aa, Triticum aestivum
MDATAAAAGGGDGTQRTLNPYVTGNSVIAMKYKDGVIMACDTGASYGSTLRYKSVERIKEVGKHSLIGGSGEFSDFQEILRYLDELTLNDHMWDDGNSLGPKEIHAYLTRVMYNRRNKFDPLWNSLVLGGVKKGPKGDEKYLGMVNMIGTHFEENHIATGFGNHMAIPILRGEWREDMTFEEAVKLIEKCLLVLLYRDRSSINKFQIAKITTEGSTIYPPYALKTNWGFAAFENPSKGAVGTW

SEQ ID NO: 6292 - protein, 424 aa, Salmonella typhimurium
MAKNIQAIRGMNDYLPGETAIWQRIEGTLKNVLGSYGYSEIRLPIVEQTPLFKRAIGEVTDVVEKEMYTFEDRNGDSLTLRPEGTAGCVRAGIEHGLLYNQEQRLWYIGPMFRHERPQKGRYRQFHQLGAEVFGLQGPDIDAELIMLTARWWRALGIAEHVSLELNSIGSLEARANYRDALVAFLEQHQETLDEDCKRRMYTNPLRVLDSKNPDVQALLNDAPALGDYLDDDSREHFAGLCKLLDAAGIAYTVNQRLVRGLDYYNRTVFEWVTNSLGSQGTVCAGGRYDGLVEQLGGRATPAVGFAMGLERLVLLVQAVNPEFIASPVVDIYLVAAGAQTQSAAMTLAERLRDEMPGVKLMTNHGGGNFKKQFARADKWGARIALVLGESEVADGTVVVKDLRSGEQTAVAQDSVAAHLRTYLG

SEQ ID NO: 6293 - protein, 171 aa, Glycine max
PVCHLEEVLSAVRLRSSYRKMSDMLTTFTKKKEVDTIIRDTFDKVVVLRFGRASDLVCLQQDHILSKAARDVSKFATVALVDVDSEEIQVYLKYFDITLIPSTVFFFNAHHMKMDYGTADHTKWIGAFYAKQDFVDVVEAIFRGAMKGKLIVNCPLPPESIPKFQILYKDV

SEQ ID NO: 6294 - protein, 158 aa, Brucella suis 1330
MKKNNLFRALLISATFALQATAALAVNPDEVLSDPKLEKRAREISAELRCMVCQNESIDDSNAELARDLRILVRERLTKGDTDGQVIDFVVDRYGEFVLLKPRFNAQTALLWGFPVIILLIGVGALLVAFRRRRAAGTAPQPLSESEKAELSRLLDGK

SEQ ID NO: 6295 - protein, 313 aa, Gloeobacter violaceus PCC 7421
MQAVIVAGGKGTRLRPLTYRTPKPMLPIFERPFLCLLVERCRAAGIVDILMNVHYQAGQIQDYFGDGGAFGVRIRYSVEQNPLDTAGAVKLAEPYFTGAPLVVFNADILTDLDLTALVAAHRQAGAAATLALTRVLDPTAFGLVQLTDHNQVAAFREKPTAEEAARLGIDTINAGTYVLDPRIFADVPAQTPWSFERQLFPNLLAQRQKVLGFVSDTYWLDIGNPAKYWQAHLDILSGRMPLPLPAQQIAPGIWVAEGAAVDAAARLEAPCYIGGCCCVGPEAAIAPGTVLGSASLVNRPLSPGIYPPGTMVP

SEQ ID NO: 6296 - protein, 389 aa, Rubrobacter xylanophilus DSM 9941
MKAVVWHGRQDVRVESVPDPELREPTDAIVRVTSTAICGSDLHLYGKLAPIMREGDILGHEPMGVVEEVGSGVEHIKPGDRVVVPFNISCGSCYFCNMQLYSQCERTRDRGRLAEAASLLGRGKGASLFGYTHVYGAVPGGQAEYLRVPQAHFGPIKVPEGPPDERFLYLSDVLPTSWQAVAYADVPEGGTLAVWGLGPIGQMCCRIALHRGAGRVIGVDAVPERLDLASRYGVETLDYSAVDRAGLAVVEMTGGRGVDAAIDAVGMEAGGSLVDAVLQATRVQLDRARALRECAASVRRGGTLSIVGVYAGPIQMFPLGDLFDMQVQLRMGQANVRRWTDEILPLLADEDPLGVEELATHRLPLEEAPRAYETFQRKQDGCIKCVLRP

SEQ ID NO: 6297 - protein, 250 aa, Mesorhizobium loti
MLLKGKAAVISGAASPRGIGRSTATLMAEQGARIAILDLDEGQARDAAASLGPEHIGLACNVADLDACKKAAAEVTEVFGKVDVLCNIAGITQPVKTLDIGPADWDRILDVNLRGVLYLSQAFIPHMRENGGGSIICMSSVSAQRGGGIFGGPHYSAAKAGVLGLAKAMAREFGPDGIRINCVTPGLIQTDITGDKLTDAMRADIIKGIPLSRLGDARDVAGAYLFLASDLASYITGAVIDVNGGMLIHG

SEQ ID NO: 6298 - protein, 516 aa, Candida albicans
MFTNSIISKSTTRLTQLSRQLSTTTMAPTSTKNSIKHFDYLVIGGGSGGVASARRAAKYGAKVLLIESNFKKFGGTCVNVGCVPKKVMWYTADLAHKKHDLYAYGLDKEPDSIKYGDFDWAKLKHKRDAYVTRLNGIYENNLKREKVDYAYGFAKFINSEGEVEVTLSGDQELPFLDEGKTYKKGEKLVFSADKNFDCHWWYSNCSSSVPGAELGTTSDGFFALEKQHKKVAIVGAGYIGVELSGVFSSLGSETHFFIRGDTVLRSFDEVIQNTVTDYYIDNLGINIHKQSTITKIEGSKDGKKVVHLKDGTSVEVDELIWTVGRKSLIDIGLDKVGVKINDKQQIVADEYQVTNNPKIFSLGDVVGKVELTPVAIAAGRRLSNRLFGGPEFAKDKLDYNNIPSVIFSHPEAGSIGLSTKEASEKYGEENLKIYQSKFTAMYYAMMDDQKDKSPTVYKIICAGPEEKVVGLHIVGDSSAEILQGFGVAIKMGATKKDFDNCVAIHPTSAEELVTMT

SEQ ID NO: 6299 - protein, 227 aa, Momordica charantia
MGRGKIEIKRIENTTNRQVTFCKRRNGLLKKAYELSVLCDAEVALIVFSSRGRLYEYSNNSIKTTIGRYKKACSDSSATSSVTELNTQYYQQESAKLRQQIQMLQNSNSNLVRHLMGDSLSALTVKELKQLENRLERGITRIRSKKHEMLLAEIEYLQKREIELENENVCIRTKIAEVERLQQANMVSGQELNAIQALASRNFFTPNMMEGGAVTFSHQDKKMLHLG

SEQ ID NO: 6300 - protein, 342 aa, Pseudomonas aeruginosa
MTLPQTMKAAVVHAYGAPLRIEEVKVPLPGPGQVLVKIEASGVCHTDLHAAEGDWPVKPPLPFIPGHEGVGYVAAVGSGVTRVKEGDRVGIPWLYTACGCCEHCLTGWETLCESQQNTGYSVNGGYAEYVLADPNYVGILPKNVEFAEIAPILCAGVTVYKGLKQTNARPGQWVAISGIGGLGHVAVQYARAMGLHVAAIDIDDAKLELARKLGASLTVNARQEDPVEAIQRDIGGAHGVLVTAVSNSAFGQAIGMARRGGTIALVGLPPGDFPTPIFDVVLKGLHIAGSIVGTRADLQEALDFAGEGLVKATIHPGKLDDINQILDQMRAGQIEGRIVLEM

SEQ ID NO: 6301 - protein, 180 aa, Streptococcus pneumoniae R6
MLENDIKKVLVSHDEITEAAKKLGAQLTKDYAGKNPILVGILKGSIPFMAELVKHIDTHIEMDFMMVSSYHGGTASSGVINIKQDVTQDIKGRHVLFVEDIIDTGQTLKNLRDMFKEREAASVKIATLLDKPEGRVVEIEADYTCFTIPNEFVVGYGLDYKENYRNLPYIGVLKEEVYSN

SEQ ID NO: 6302 - protein, 399 aa, Chlamydomonas reinhardtii
MSSLLKTRVVPSLAARDVAFCHPLVFTTSSQRVARASGQSSAFPLRSAVSGVSSRRPFTCLAVAASAGDVSDGSSHTEMMQTLVLGSMFAGWYAANIAFNIYNKQLLKAFAFPLTITEAQFLVGSCVTLVAWGSGLQRAPKITWSTIKNVLPLAVVHTLGNLLTNMSLGAVAVSFTHTIKAMEPIFSVALSALFLGDQPSPLVLATLLPIIGGVAMASMTEATFNWFGFLSAMGSNLTFQSRNVLSKKLMLKKKDKDGNAEAPLDNMALFSVITLLSAALLLPATLLFEGWKLSPVGLAEMGVRSPNGVLAHAAMAGLCFHLYQQVSYMILSRVSPVTHSIGNCVKRVVVIAASVLFFRNPVSLQNALGTALALAGVFLYGTVKRQQAIAAGKKIAASE

SEQ ID NO: 6303 - protein, 270 aa, Anabaena variabilis ATCC 29413
MTIKFGLIGGGVMGEALLSRLIARGIYQPSEVIVSEPQTARQAFLQQKYHVGVTTDNSLVFTQAQDVVFLAVKPQVFSAIAQELADTVFTDHSPLVVSILAGVSLSQLEAAFPQSPVIRAMPNTPATVGAGMTAICSGAYTYAQHQKLAQQIFSAVGEVVEVSESLMDAVTGLSGSGPAYVALLVEALADGGVASGLPRGIANQLALQTVLGTAQLLHESKLHPAELKDRVTSPGGTTIAGIAQLEKAGFRSALIEAVKAATWRSQELGK

SEQ ID NO: 6304 - protein, 393 aa, Oryza sativa (japonica cultivar-group)
MQRAAAASRATAWSTARHGAARVTASASFSGGGGIVAGAALPLRVRGGQLMSLPLLSGGRAVTARVAAAEAPLPADDADAAAGRERGALAETAQLGAMIVAWYLLNIYFNIYNKQVLQPLPFPYTITAFQLAFGSFVIFLMWALKLHPAPRISISQLAKIAPLAAGHMLGTVFTNMSLSKVAVSFTHTIKASEPFFTVLLSAFFLGETPSLLVLGSLVPIVGGVALASLTELSFNWIGFWSAMASNLLYQSRNVLSKKLLGGEEEALDDINLFSILTILSFLLSLPLMLFSEGVKFSPGYLRSTGLNLQELCVRAALAGFCFHGYQKLSYLILARVSPVTHSVANCVKRVVVIVASVLFFRTPISPVNALGTGVALGGVFLYSRLKRTKPKNA

SEQ ID NO: 6305 - protein, 378 aa, Zea mays
SESEAASGRQGEMGKGAQGSDAAAAGGEVEENMAAWLVAKNTLKIMPFKLPPVGPYDVRVRMKAVGICGSDVHYLREMRIAHFVVKEPMVIGHECAGVVEEVGAGVTHLSVGDRVALEPGVSCWRCRHCKGGRYNLCEDMKFFATPPVHGSLANQVVHPADLCFKLPDGVSLEEGAMCEPLSVGVHACRRAGVGPETGVLVVGAGPIGLVSLLAARAFGAPRVVVVDVDDHRLAVARSLGADAAVRVSPRAEDLADEVERIRAAMGSDIDVSLDCAGFSKTMSTALEATRPGGKVCLVGMGHNEMTLPLTAAAAREVDVVGVFRYKDTWPLCIDFLRSGKVDVKPLITHRFGFSQRDVEEAFEVSARGRDAIKVMFNL

SEQ ID NO: 6306 - protein, 348 aa, Chloroflexus aurantiacus
MRAVYYEAFGQMPWIATLPDPAPTPDGVVLAVRATGLCRSDWHGWMGHDPDIKLPHVPGHELAGEIVAVGSQVRRWRIGDRVTVPFVCACGFCPQCQAGQQQVCDNQFQPGFTHWGSFAEYVAIDRADLNLVRLPADMSFTTAASLGCRFATAFRAVVDLGQVRGGEWVAVYGCGGVGLSAIMLASALGGQVIGIDINLERLALARAVGATAVIDATTEPDVVSVVRDLSRGGVHLAIDALGSPMTCANAIASLRKRGRHVQVGLLLADQRMPPLPMDIVVARELTIMGSHGMQAYRYDAMLDLIQSGKVQPQRLIGRTISLSEAPAALVDLDSFRGSGVTVITEFQG

SEQ ID NO: 6307 - protein, 198 aa, Streptococcus pneumoniae
GIEDILVVTGKSKRSIEDHFDSNFELEYNLKEKGKTDLLKLVDEATGMRLHFIRQTHPRGLGDAVLQAKAFVGNEPFVVMLGDDLMDITDENAVPLTKQLMNDYERTHASTIAVMPVPHEDVSSYGVIAPQGEGINGLYSVETFVEKPAPEDAPSDLAIIGRYLLTPEIFDILENQAPGAGNEIQLTDAIDTLNKTQR

SEQ ID NO: 6308 - protein, 181 aa, Methanococcoides burtonii DSM 6242
MREMVFVTGNKGKFGEAKEILAAKDIELIQNKDGYPELQEDELEPIAAYGAKYCAEKLKHPVMVDDSGLFINALNGFPGPYSAFVEEYLGNQKVLKLMGDESDRAAVFKSVIGYCEPGGEPVTFTGTVEGEIAHEERGSGGFGYDPIFEYNGNTFGELGAEEKNKMSHRKRALDKFFDWLD

SEQ ID NO: 6309 - protein, 299 aa, Aeromonas hydrophila
MTLGDKMKAVIPVAGLGTRMLPATKAIPKEMLPIVDKPLIQYVVNECIAAGIKEIILVTHSSKNAIENHFDKSFELEATLESRVKRQLLEEIQSICPKDVTIMHVRQGEAKGLGHAVLSAYPLVGDNPFVVVLPDVIIDDAASDLKKDNLAKMVRNYIESGHSQIMVEPVDAKDVSKYGIVDCHSIDVNAGESATIFDVVEKPEQDDAPSNLAIVGRYVLTPEIWSHLRTTKPGAGDEIQLTDAISELLKNGQVDAFCMQGKSHDCGDKLGYMKAFVEYGLRHKEYQHSFKEFIGSLAL

SEQ ID NO: 6310 - protein, 210 aa, Eucalyptus occidentalis
MVRGKIQLRRIENTTSRQVTFSKRRNGLLKKAYELSVLCDAEVAVIIFSQKGRPYEFSSNSEIQKTIDRYRRSTYDMDTYKTNLDQCILHLKQETTDMERKIELLEVSLRKLSGECLGSCSIDEIQMIGDQLERSLSSIRARKAQLFDDQIQHLQAKERSLKEENAKLLAKCLANPGQSTAHPRAAALHSRSSRSTDVETRLFIGLPELN

SEQ ID NO: 6311 - protein, 681 aa, Methanothermobacter thermautotrophicus
MKLEYIPTVCPYCGCGCGLNVVTIDGKVEGVEPWKRHPLNEGKLCPKGNFSYQFVGRDDRLTKPLIKENGEFREASWDEATSLIASKLEEYRGEDPDSLAFLASARCTNEENYLLQKFARAVIGTQNVDHCARLCHGPSVAGLAKTFGSGAMTNSISDIEESSCIFIIGSNTAEQHPLIWRRVLRAKANGAKLIVADPRVSPTAKMADIYLPFKPGTDVPLMNAMMNVIIEEGLEDREFIEKRTKDFEKLKETVKNYKPEEAEKITLTPADKIREAAIEYAKADSAAILFAMGITQHITGTDNVVSTANLAMLTGNVGKRGAGVNPLRGQNNVQGACDMGALPAFYPGYQKVIEEDATEKMSCAWGCSDLKCTPGLTVVEMMNAAAEGKLKAMYIMGENPMVSDPDIQHVKESLENLEFLVVQDIFLTETAELADVVLPASAWSEKNGTYTSTERRVQYIRKAADAPGEAKDDWQIICEIANKMGADGFKFSSAEDIFEEIREVTPQYAGMNPERLVKPEGLHWPCPDETHPGTPILHTEQFATPDGLGIFFPVEYREPAETPDSEYPFILTTGRIIFHYHTGTMTRRSETLDREVPTGFVEINDEDALELGIKNGDMVKVKTRRGEIEITARVTPEIMKGVLFIPFHFAECAANMLTSADELDPEAKMPELKVSAASISK

SEQ ID NO: 6312 - protein, 213 aa, Glycine max
MTSFFSLHTQNPFYSLFHKRTISLFSKLHTSFRTMSFSTKLPLVLLFSSLFIHASLAEMVCEDLPKEVCAFSVASSGKRCLLETEKAADGGVEYQCRTSEVVVERMADYIETDQCVEACGVDRNSVGISSDAFFEPQFTGKLCSPAWEAKSARAYLFFNLAAGEGVFLPELCEKHKTNPRRAMVELVSSGAAPGPVSDVSEAIIASAPAPSAL

SEQ ID NO: 6313 - protein, 297 aa, Zea mays
QSVPGLVILYGSIVKKKWAVNSAFMALYAFAAVWLCWVMWGYQMSFGQKLLPFWGKAGHTLGQGFLLSQAGLPATTHFFHGSGVVETGEITPLYPMASMVYFQCVFAAITLILLAGSLLGRMNFKAWMLFVPLWLTFSYTIGAFSIWGGGFLFHWGVIDYSGGYVIHLSSGVAGFTAAYWVGPRLTKDRERFPPNNVLLMLTGAGILWMGWAGFNGGDPYAANIDSSIAVVNTNICAATSLLVWTCLDVIFFKKPSVIGAVQGMITGLVCITPGAGTVHIHDSVYNHYSTLLLPVPA

SEQ ID NO: 6314 - protein, 452 aa, Zea mays
  unsure (1)..(452): unsure at all Xaa locations
MASALLAGQGGARHHGWGETRAPLAPIPPNPNPSQPHPRADGSKSKPRAAASSPAAGYVTFRPASLGPREARALRDRLAGELTQVRALLSRIDTWQQQGPPPAGLRGEVRKRCGQILTRLRKDKRSVWFNAPVEVERLGLHDYHAVIKRPMDLGTVKEGLAAGRYASHGDFAXADVRLTFTNALRYNPVGHEVHTFAGALLAYFERMYKEALACFEEDCKRPEPPRPVPPELTPPPAAEPVEAKVKPRAGNVRMRKPKAREPNKREMSLEEKNMLRVGLESLPEEKMHNVLQIVRKRNNNPEMLGDEIELDIDEMDVETQWELDRFVTNFNKALKKSQRAAMMNGGVADVTSTAVAEDDTAPVGHVPTLVDNDDAESEEPVKSTTVAEQVDEYVDIGDEMPAATYQSMEIEKDAEGTTGSGGSGSGSSSSSGSESRSSGDSASGAGNAHSLT

SEQ ID NO: 6315 - protein, 275 aa, Bacillus cereus ATCC 14579
MNIGIIGTGNMGNILIDAFLETRAVKPSCLTIINRTPAKAYHIKEKYPSVHIAKTIPEVIEQSQLIFICVKPIDIYPILKKYAEHFSDETCLVSITSPISPSQLETLVPCHVARIIPSITNRALSGASLFTFGDNCSEEWQQKLLRLFKNISTPLVIEEDITRVSSDIASCGPAFFSYLLQCFINAAVDKTNITHEEATTLVSEMVVGMGKLLEKEIFTLPTLQEKVCVKGGVTGEGIRVLEEHVGDMFHKLIERTHEKFDEDLECVDQQFNKHT

SEQ ID NO: 6316 - protein, 359 aa, ASPERGILLUS NIDULANS FGSC A4
MSTDYKFEGWLGLDAGSVDGKMQWKEFEPKPWEETDVDIKISHCGICGSDLHTLRSGWGPTNYPCCVGHEIVGTAVRVGSQVKHIKVGDRVGVGAQSESCVGRKGECNECATSNEPYCTKHFAGTYNGVFMNGGKSYGGYALYNRSPAHFAIKIPDAIPSAHAAPMMCGGVTVYSPLKHYGCGPGKTVGIIGIGGLGHFGVLFAKALGADRVVAISRKSDKRADALKLGADEYVATAEDTEWMANNKRSLDLIVCTVSSSKMPINDYVSLLKVDGTMIQVGAPEDGALTIPAFTLIANRVKLGGSLIGSPDTIREMLELAAEKGVKPWVEERPMKDANQAIKDMDAGDARYRYVLVNDH

SEQ ID NO: 6317 - protein, 482 aa, Glycine max
  unsure (1)..(482): unsure at all Xaa locations
IPVDAPLGTAALAQVPSEHVKSTSTVGLPRTVEDLATIVSIKARXQIFDSRXGNPTVEVDLTCSDGTXARAAVPSGASTGIYEALELRDGGSDYLGKGVSKAVDNVNTIIAPALVGKDPTQQTAIDNLMVQQLDGTVNEWGWCKQKLGANAILAVSLAVCKAGAAVLKVPLYKHIANIAGNKKLVLPVPAFNVINGGSHAGNKLAMQEFMVLPVGASSFKEAMKMGVEVYHNLKSVIKKKYGQDAVNVGDEGGFAPNIQENKEGLELLKTAIAKAGYTGKVVIGMDVAAFXNSTRRDKTYDLNFKEDNNDGSQKISGDALKDLYKSFVTEYPIVSIEDPFDQDDWXHYAKLTAEVGTNVQIVGDDLLVTNPXRVQKAIDTKACNALLLKVNQXIGSVTESIEAVRMSKXAGWGVMASHRSGETEDTFIADLSVGLATGQIKTGAPCRSERLAKYNQLLRIEEELGAEAVYAGANFRXPVEPY

SEQ ID NO: 6318 - protein, 466 aa, Escherichia coli CFT073
MPHSYDYDAIVIGSGPGGEGAAMGLVKQGARVAVIERYQNVGGGCTHWGTIPSKALRHAVSRIIEFNQNPLYSDHSRLLRSSFADILNHADNVINQQTRMRQGFYERNHCEILQGNARFVDEHTLALDCPDGSVETLTAEKFVIACGSRPYHPTDVDFTHPRIYDSDSILSMHHEPRHVLIYGAGVIGCEYASIFRGMDVKVDLINTRDRLLAFLDQEMSDSLSYHFWNSGVVIRHNEEYEKIEGCDDGVIMHLKSGKKLKADCLLYANGRTGNTDSLALQNIGLETDSRGQLKVNSMYQTAQPHVYAVGDVIGYPSLASAAYDQGRIAAQALVKGEANAHLIEDIPTGIYTIPEISSVGKTEQQLTAMKVPYEVGRAQFKHLARAQIVGMNVGTLKILFHRETKEILGIHCFGERAAEIIHIGQAIMEQKGGGNTIEYFVNTTFNYPTMAEAYRVAALNGLNRLF

SEQ ID NO: 6319 - protein, 317 aa, Zea mays
MDNHIHSQPAANLYYQFGMGTEQQYPPPFASPPSTNIPHMDWNPATMLDNLTFIEEKIQQVKDVIRTMVDNAGQVQVQCHHQAGELLAQKQKQQVVNADLTCLIVQLISTAGSLLPSLKNSSFLSHPHPAGHVDMANHVGPSSSLVPNAMTVSEDYEELFKGWTDGGIEVDDDGVLVEEQEITKDGDSLSYELLQLEEDEILAPHTHFCTICGKGFKRDANLRMHMRGHGDEYKSPAALAKPPRDPGAEQEPAKRRYSCPFAGCKRTKLHKSFQPLKTILCVKNHYRRSHCEKSHTCGRCHAKKFSIVADLRTHEKH

SEQ ID NO: 6320 - protein, 900 aa, Pirellula sp. 1
MDTVRRATNMVLNVDSEASLSLSQISGVEGGSFQDDWLILCAVIVLLMQAGFMCLESGLVREKNSINVAVKNLADLMISVASFWTIGFSVMFGATIFGLFGVGQLMPDFGVSDSLAAFFVFQAVFCGTATTIVSGAVAERMRFHGYLVSCVCVSALIYPVVGHWVWASGANGMSIGWLEGLGFRDFAGSTVVHSVGGWAALAGCIVLGPRLGRFRKDGRVRDIQPSNLTLAYLGAFILFFGWFGFNCGSTFKATGEIALIAINTLLGGCFGGLSSILVSSLRTGIPDPRSIANGLLGGLVGITASGSMIDPRAAALVGAIAGVVAVYSDEWLVRLRIDDAVGAISVHGFCGAWGTIAFALFIRTDELAPGMSRWEFLAVQVFGVVVTFGFVFGGVFVLLRGLGRFIQLRVDPETERLGLNVAEHNASSRLLDLAVSMDAAARMRKLEPSCKVRSEYGTAIGDLIDSYNQMIDHICEDQTALAEATKRAEALTAILDDSPNEIAIVHADTGQVLSLNRGARVNLQRDEDEFSELTFDCLFNTEFGELQKFRLSAFDDEAGFTQQLATAVRKDGTTYPASISVQHAEFLGYQVLVVLTVDMTSQVELKERLHAAEKMEAVGQLAAGIAHEINTPLQCMSGNVEFLQSVQQNLQDTLRLVAEGVSDEQALHEITEKLSSDRWSRLLGESDAAIEDTQKSIGRVVQIIGAMRVLSHPGPAGKTNTSINGILRDSAAISRGRWKYAAQMDFDLCDSEPTVACRANELSQVFCNLFVNAADSIEEKNEKVPEAGLGNIFVSSSIEQDGVLIKVRDSGVGMSESVRRRCFEQFYTTKPVGKGTGQGLSIAYQIIVGRHGGNIEITSEEGVGTEFQIWIPMHASDDACDGATKTNAGQTNDATSLAAV

SEQ ID NO: 6321 - protein, 247 aa, Acinetobacter sp. NCIMB9871
MSNKFNNKVALITGAGSGIGKSTALLLAQQGVSVVVSDINLEAAQKVVDEIVALGGKAAANKANTAEPEDMKAAVEFAVSTFGALHLAFNNAGILGEVNSTEELSIEGWRRVIDVNLNAVFYSMHYEVPAILAAGGGAIVNTASIAGLIGIQNISGYVAAKHGVTGLTKAAALEYADKGIRINSVHPGYIKTPLIAEFEEAEMVKLHPIGRLGQPEEVAQVVAFLLSDDASFVTGSQYVVDGAYTSK

SEQ ID NO: 6322 - protein, 255 aa, Pseudomonas aeruginosa PAO1
MIYYLIGVALFIFMLEQLVPGWKLPKVSTWVARVIFLNIVQVSIALLAGITWNKWMMGHSLLHTSDALPPLLAGFAAYFVNTFVTYWWHRARHANDTLWRLFHQLHHAPQRIEVFTSFYKHPTEMVFNSLLGSFVAYVVMGISIEAGAYYIMFAALGEMFYHSNLRTPHVLGYLFQRPEMHRIHHQRDRHECNYSDFPIWDMLFGTYENPRRIDEPQGFAGDKEQQFVDMLLFRDVHSLPGKTQPAPVLVKPDVR

SEQ ID NO: 6323 - protein, 330 aa, Gloeobacter violaceus PCC 7421
MKAAVVPNLHGRWEIRDLPIPEPGINQVLIRIKASGLCYTDIHITEGAWPADSFPRTLGHEPVGEIVALGAGVRTRRLGDRVGVPWLQLACGRCEWCRRGKALFCKDQQGTGVQTQGGHAEYMLAQAEATVLLPDALAYEQAASLFCAGYTVWAGLRFADPKPHERVAVLGIGGLGHLAVQYGKAAGFETFAITHSPSKEKLVRSLGADGVFPSGAALREAGGADVILACSNSYRATGEALQGLRPDGRLVLMGLPSDNQTLAVSGDLLVNRWRIIGSQQNGPEHLFEALDYAAKGKVKVVAETYSLDEINLAFDRVFSGDVRFRAVIIP

SEQ ID NO: 6324 - protein, 249 aa, Gloeobacter violaceus PCC 7421
MARFAGKVAVITGGSVGIGRATAVAFAREGAAVVVASRRADESEKTVQLVKDAGSDSFFVQTDVTQAAQIEAMVEKTMAVYGRLDFAFNNAGVEQQPSALPDQSEALFDWISDINYKGTWLCMKYEIPQMLKNGGGAIVNMSSIAGEIGFPGVPIYTASKHAVLGLTKAVALEYAKSNIRVNAVSPGAIHTDMYERFEPEVRETLINLHPLGRPGKPEEVAQTVLFLCSEGAGYITGHSLMIDGGYVAQ

SEQ ID NO: 6325 - protein, 464 aa, Oryza sativa
MSPSPDLARILPRVLIVSRRTVRKNKFVDFVGEYHLDLIVGYGAVPVIVPRVAGVHTLLDSFEPIHGVLLCEGEDVDPSLYGGGGAGSGGLSAEQLDAVRSLHPSDAAIDHEKDSIELRLARRCLERNIPFLGICRGSQVLNVACGGTLYQDVDHELPAAAAAVRHINYDNYDGHRHPVRVLPGTPLHEWFAESLDGEDSRLTVNSYHHQGVRRLAERFVPMAFAPDGLVEGFYDPDAYNPGEGKFIMGLQFHPERMRKAGSDEFDYPGCPMAYQAFVRAVVAYQEKLAAAAAAMPASPKLNQEMEKQRKVLVRSFSLAKNLYVSGAEAGTPRPAEQRDLDAGAEFLEVKTQPNHRTSTGAHGCQPPDFKANRRGVVCVVQQSNTAALSVQQEKRLKQMGATVRNASGYINRLKLNEEREAAARALMAKMSIDQLSDLASFYHIMGTICSEVLDRKLHSAAPAP

SEQ ID NO: 6326 - protein, 368 aa, Mesorhizobium loti MAFF303099
MEIVDLTAGEIWSELARMIRQGAIEAINKGVNRYTDPVGTTELREALARKVSLETRQIWKAEEIAVTCGAKQALFNAAMVLLDPGDEVIIPVPYWTTFPAQVLIAGGKPIFVDTRSNGYVPRIEDIEAAITERSRAIVINTPNNPTGSVYDTQTLTGIAQLAIARDLWIIFDECYADFVHGDEAHRPIVFLVPEVRSRTLIVNAFSKSLALTGWRIGYLAGPKEVIDAVKALQSHTTSNPNVVAQHAVLAHLQRSDGSYEAGLRAQLASARQVGLSMLSSLTQVPIPRAQGGFYFYLDISKLVWSARRENVTRAPDEIVSALLTDAGVGVVSGSVFGDPAGLRLSYGIPTDQLVSGLARLTRLLNSWN

SEQ ID NO: 6327 - protein, 368 aa, Agrobacterium tumefaciens str. C58
MFDASITIRGGTTMFTTSAYACDDGSSPMKLATIRRRDPGPRDVEIEIEFCGVCHSDIHTARSEWPGSLYPCVPGHEIVGRVGRVGAQVTRFKTGDRVGVGCIVDSCRECASCAEGLEQYCENGMTGTYNSPDKAMGGGAHTLGGYSAHVVVDDRYVLNIPEGLDPAAAAPLLCAGITTYSPLRHWNAGPGKRVGVVGLGGLGHMAVKLANAMGATVVMITTSPGKAEDAKKLGAHEVIISRDAEQMKKATSSLDLIIDAVAADHDIDAYLALLKRDGALVQVGAPEKPLSVMAFSLIPGRKTFAGSMIGGIPETQEMLDFCAEKGIAGEIEMIDIDQINDAYERMIKSDVRYRFVIDMKSLPRQKAA

SEQ ID NO: 6328 - protein, 822 aa, Rhodobacter sphaeroides f. sp. denitrificans
MTKLSGQELHAELSRRAFLSYTAAVGALGLCGTSLLAQGARAEGLANGEVMSGCHWGVFKARVENGRAVAFEPWDKDPAPSHQLPGVLDSIYSPTRIKYPMVRREFLEKGVNADRSTRGNGDFVRVTWDEALDLVARELKRVQESYGPTGTFGGSYGWKSPGRLHNCQVLMRRALNLAGGFVNSSGDYSTAAAQIIMPHVMGTLEVYEQQTAWPVVVENTDLMVFWAADPMKTNEIGWVIPDHGAYAGMKALKEKGTRVICINPVRTETADYFGADVVSPRPQTDVALMLGMAHTLYSEDLHDKDFLENCTTGFDLFAAYLTGESDGTPKTAEWAAEICGLPAEQIRELARSFVAGRTMLAAGWSIQRMHHGEQAHWMLVTLASMIGQIGLPGGGFGLSYHYSNGGSPTSDGPALGGISDGGKAVEGAAWLSESGATSIPCARVVDMLLNPGGEFQFNGATATYPDVKLAYWAGGNPFAHHQDRNRMLKAWEKLETFIVQDFQWTATARHADIVLPATTSYERNDIESVGDYSNRAILAMKKVVDPLYEARSDYDIFAALAERLGKGAEFTEGRDEMGWISSFYEAAVKQAEFKNVAMPSFEDFWSEGIVEFPITEGANFVRYADFREDPLFNPLGTPSGLIEIYSKNIEKMGYDDCPAHPTWMEPAERLGGAGAKYPLHVVASHPKSRLHSQLNGTSLRDLYAVAGHEPCLINPADAAARGIADGDVLRVFNDRGQILVGAKVSDAVMPGAIQIYEGGWYDPLDPSEEGTLDKYGDVNVLSLDVGTSKLAQGNCGQTILADVEKYAGAPVTVTVFDTPKGA

SEQ ID NO: 6329 - protein, 303 aa, Erwinia carotovora subsp. atroseptica SCRI1043
MSIVNKKVKKAVIPVAGLGTRMLPATKAIPKEMLPLVDKPLIQYVVNECIAAGINEIILVTHSSKNSIENHFDTSFELEAILEKRVKRQLLEEIQSICPKHVTIMQVRQGLAKGLGHAVLCAHPLVGDEPVAVILPDVIIDEYESDLKKDNLSEMLQRFSTTGHSQIMVEPVENVSSYGVVDCKGVELKAGDSAPMVGVVEKPKASEAPSNLAVVGRYVLSADIWSLLEKTPPGAGNEIQLTDAIAMLMEKETVEAYHLKGVSHDCGNKLGYMQAFVEYGLRHDGLGEEFAQWLQEAIDAEEK

SEQ ID NO: 6330 - protein, 257 aa, Hevea brasiliensis
MAFAHFVLIHTICHGAWIWHKLKPLLEALGHKVTALDLAASGVDPRQIEEIGSFDEYSEPLLTFLEALPPGEKVILVGESCGGLNIAIAADKYCEKIAAAVFHNSVLPDTEHCPSYVVDKLMEVFPDWKDTTYFTYTKDGKEITGLKLGFTLLRENLYTLCGPEEYELAKMLTRKGSLFQNILAKRPFFTKEGYGSIKKIYVWTDQDEIFLPEFQLWQIENYKPDKVYKVEGGDHKLQLTKTKEIAEILQEVADTYN

SEQ ID NO: 6331 - protein, 438 aa, Psychrobacter sp. 273-4
MYAEETNNVTAIKDIRAREILDSRGNPTIEADVILADGTIGRAAAPSGASTGSREALELRDGDKSRYMGKGVKKAVANVNSQIRSALMDKNVTAQQAIDDAMIALDGTDNKDNLGANAILAVSLAVAKAAAKSQSLPLHQYIADLRNQTSLTMPVPMMNIINGGEHADNTVDIQEFMIEPVGFSSFSEALRAGTEIFHSLKSVLKSQGLNTAVGDEGGFAPNLRSNEEAITVIMQAIEQVGYTAGKDIHLALDCAATEFYKDGKYILAGEGNKSFDSQGFSDYLVGLARQYPIISIEDGLDESDWDGWKYLTEQIGDKVQLVGDDLFVTNPAILQEGIDKHIANAILIKFNQIGTLSETLDAIYLAKKNGYATIISHRSGETEDSTIADLAVGTAAGQIKTGSLCRSDRVAKYNQLLRIEQQVRASYRGREEFIGLRG

SEQ ID NO: 6332 - protein, 379 aa, Neurospora crassa
MLALRSIAAPAQRQAFRAAPRAVSVSFQNRFYSSRVAQFTGQKDASGKYTVSLIEGDGIGPEIAVAVKDIFAAAQTPINWEPINVDPILKDGKTAIPDAAIESIRRNKIALKGPLATPIGKGHVSLNLTLRRTFNLFANLRPCRSVAGFKTPYDGVDTVLIRENTEGEYSGIEHVVVDGVVQSIKLITREASERVLRYAFEQARAINRKKVRVVHKATIMKMSDGLFLNTAREVAQDFPDIEFDAELLDNTCLKMTTDPTPYNDKVLVMPNLYGDILSDMCAGLIGGLGLTPSGNIGDECSIFEAVHGSAPDIAGKGLANPTALLLSSMMMLRHMGLNEYADKIEKAAFDTLAEGKVLTGDLGGKASTKDFTSAIIDRL

SEQ ID NO: 6333 - protein, 372 aa, Chlamydomonas reinhardtii [sequence omitted]

SEQ ID NO: 6334 - protein, 165 aa, Escherichia coli
PALEGADVVLISAGVARKPGMDRSDLFNVNAGIVKNLVQQVAKTCPKACIGIITNPVNTTVAIAAEVLKKAGVYDKNKLFGVTTLDIIRSNTFVAELKGKQPGEVEVPVIGGHSGVTILPLLSQVPGVSFTEQEVADLTKRIQNAGTEVVEAKAGGGSATLSMGQ

SEQ ID NO: 6335 - protein, 144 aa, Chenopodium rubrum
MGSKIFLLLGLSIAFAILISSEVAARELAETAAKTEGYNNGGGYHNGGGGYNNGGGYHNGGGGYNNGGGYHNGGGGYNNGGGYHNGGGGYNNGGGHHNGGGGYNNGGGYHGGGGSCYHYCHGRCCSAAEAKALEATTAQVKPQN

SEQ ID NO: 6336 - protein, 474 aa, Leptospirillum ferrooxidans
RSGYDAFPPEVLNLRLRWWGVYPQGDGAGKAGGSVPFFMLRTRIAGGILKAAALRQMAYISERYAKSTADITVRQNIQFHWVTPSDLPEIFRLLGEVGIDSMGACGDVTRNITGCPVSDLSGDPLAQRHRNLLEEANAALKGHPDFWNLPRKFKITIASCKSQCSLPEINDVGIVPVTHPVHGDGYAIRVAGGLSTRPHFSVPLHFFFRYEEVIPVLRGVASLFRDRSELRENRDRARLKFLFLEHGWDRSRFEEALLPYLSFSPVVWEPSGIEVEGFKSARDHIGVHQVPDGSGRYYIGLSINQGALSPEVMRGLADLSESLGNGEIRLTSMQNLILTGVEEKNLSLVLEKIALLGLNASDGSFLSRTVSCTGNVFCRLALVETKEFSRDLASTLHERFGELSNPINLHVTACPNDCGQQRISEIGLQGVSIKNEEGAPVDGYELFLGGQTGSRKSFNQRTGVRLSGEQVAPV

SEQ ID NO: 6337 - protein, 568 aa, Clarkia gracilis
MASPALISETEAWKDLKAHLEGIKRTHLRELMGDTERCQSMMVEFDNIFLDYSRQQASPDTINKLYNLADAAHLKQKIDRMYNGDHINITENRSVLHVALRAPRNSAICSDGKNVVPDVWNVLDKIKDFSDRVRNGSWIGATGKELKDVIAVGIGGSFLGPLFVHTALQTDPEASKNARGRELRFLANVDPIDVARNISGLNPETTLVVVVSKTFTTAETMLNARTLREWISSALGPSAVAKHMVAVSTNLPLVEKFGIDTINAFAFWDWVGGRYSVCSAVGVLPLSLQYGFAVVEKFLQGAHSIDQHFSSAPFEKNIPVLLGLLSVWNVSFLGYPARAILPYSQALEKLAPHIQQVSMESNGKGVSIDGLPLPFESGEIDFGEPGTNGQHSFYQLIHQGRVIPCDFIGVVKSQQPVYLKGEVVNNHDELMSNFFAQPDALAYGKTPEQLKKENVSEHLIPHKTFTGNRPSLSILLPTLDAYRIGQLLAIYEHRVAVQGFVWGINSFDQWGVELGKSLATQVRKQLHASRVKGEPVEGFNFSTKTLLTRYLEATSDVPADPSTLLPNI

SEQ ID NO: 6338 - protein, 302 aa, Bordetella pertussis Tohama I
MIARGGKKFAASTNFPALPPGVFMQVVRKAVFPVAGMGTRFLPATKAMPKEMLPVVDKPLIQYAVEEAVAAGITDLIFVTGRNKRAIEDHFDAAPELETDLEAKGKHELLALVRDILPAHVNCLYIRQSAPLGLGHAVLTAAPAVGNEPFAVLLADDLIDADTPVLKQLIDVAVARQGSVLGVQEVPREDTRKYGIVASQPVDARTERVTHIVEKPAPEQAPTTLAVVGRYVLEAAIFDHLRATTVGAGNEIQLTDGIAALLRERDVYAHRYDGKRYDCGSKAGMFQATVALGRKYHGLIPE

SEQ ID NO: 6339 - protein, 477 aa, Arabidopsis thaliana
MALTTKPHHLQRSFLSPSRVSGERYLESAPSCLRFRRSGVQCSVVAKECRVKGVKARQIIDSRGNPTVEVDLITDDLYRSAVPSGASTGIYEALELRDGDKSVYGGKGVLQAIKNINELVAPKLIGVDVRNQADVDALMLELDGTPNKSKLGANAILGVSLSVCRAGAGAKGVPLYKHIQETSGTKELVMPVPAFNVINGGSHAGNSLAMQEFMILPVGATSFSEAFQMGSEVYHTLKGIIKTKYGQDACNVGDEGGFAPNVQDNREGLVLLIDAIEKAGYTGKIKIGMDVAASEFFMKDGRYDLNFKKQPNDGAHVLSAESLADLYREFIKDFPIVSIEDPFDQDDWSSWASLQSSVDIQLVGDDLLVTNPKRIAEAIKKQSCNALLLKVNQIGTVTESIQAALDSKAAGWGVMVSHRSGETEDNFIADLSVGLASGQIKTGAPCRSERLSKYNQLLRIEEELGNVRYAGEAFRSP

SEQ ID NO: 6340 - protein, 198 aa, Gossypium barbadense
GQNPLFPRILGHEAGGVVESVGEGVIDVQPGDHVLPIFTGECKECPHCLSEASNMCDLLRINTERGGMLHDGHTRFSKDGKPIYHFLGTSTFSEYTVVHVGQVAKINPEAPLDKVCVLSCGMSTGFGATVNVAKPKKGGSVAIFGLGAVGLAAAEGARVCEASRIIGIDLNPNRFEEAKKFGCTEFVNPKDHNKPVQE

SEQ ID NO: 6341 - protein, 1230 aa, Candida albicans
MSILSENNPTPTSITDPNKSSHLHNPELNSGTRVASGPGPGPEAESTPLAPPTEVMNTTSANTSSLSLGSPMHEKIKQFDQDEVDTGETNDRTIESGSGDIDDSQQSHNNNNNNNNNNNESNPESSEGDDEKTQGMPPRMPGTFNVKGLHQGDDSDNEKQYTELTKSINKRTSKDSYSPGTLESPGTLNALETNNVSPAVIEEEQHTSSLEDLSLSLQHQNENARLSAPRSAPPQVPTSKTSSFHDMSSVISSSTSVHKIPSNPTSTRGSHLSSYKSTLDPGKPAQAAAPPPPEIDIDNLLTKSELDSETDTLSSATNSPNLLRNDTLQGIPTRDDENIDDSPRQLSQNTSATSRNTSGTSTSTVVKNSRSGTSKSTSTSTAHNQTAAITPIIPSHNKFHQQVINTNATNSLSSLEPLGVGINSNSSPKSGKKRKSGSKVRGVFSSMFGKNKSTSSSSSSNSGSNSHSQEVNIKISTPFNAKHLAHVGIDDNGSYTGLPIEWERLLSASGITKKEQQQHPQAVMDIVAFYQDTSENPDDAAFKKFHFDNNKSSSSGWSNENTPPATPGGSNSGSGSGGGGAPSSPHRTPPSSIIEKNNVEQKVITPSQSMPTKTESKQSENQHPHEDNATQYTPRTPTSHVQEGQFIPSRPAPKPPSTPLSSMSVSHKTPSSQSLPRSDSQSDIRSSTPKSHQDVSPSKIKIRSISSKSLKSMRSRKSGDKFTHIAPAPPPPSLPSIPKSKSHSASLSSQLRPATNGSTTAPIPASAAFGGENNALPKQRINEFKAHRAPPPPPSAPPAPPVPPAPPANLLSEQTSEIPQQRTAPSQALADVTAPTNIYEIQQTKYQEAQQKLREKKARELEEIQRLREKNERQNRQQETGQNNADTASGGSNIAPPVPVPNKKPPSGSGGGRDAKQAALIAQKKREEKKRKNLQIIAKLKTICNPGDPNELYVDLVKIGQGASGGVFLAHDVRDKSNIVAIKQMNLEQQPKKELIINEILVMKGSSHPNIVNFIDSYLLKGDLWVIMEYMEGGSLTDIVTHSVMTEGQIGVVCRETLKGLKFLHSKGVIHRDIKSDNILLNMDGNIKITDFGFCAQINEINSKRITMVGTPYWMAPEIVSRKEYGPKVDVWSLGIMIIEMLEGEPPYLNETPLRALYLIATNGTPKLKDPESLSYDIRKFLAWCLQVDFNKRADADELLHDNFITECDDVSSLSPLVKIARLKKMSESD

SEQ ID NO: 6342 - protein, 1028 aa, Haemophilus influenzae
MQVSRRKFFKICAGGMAGTSAAMLGFAPANVLAAPREYKLLRAFESRNTCTYCAVSCGMLLYSTGKPYNSLSSHTGTNTRSKLFHIEGDPDHPVSRGALCPKGAGSLDYVNSESRSLYPQYRAPGSDKWERISWKDAIKRIARLMKDDRDANFVEKDSNGKTVNRWATTGIMTASAMSNEAALLTQKWIRMLGMVPVCNQANTCHGPTVASLAPSFGRGAMTNNWVDIKNANLIIVQGGNPAEAHPVGFRWAIEAKKNGAKIIVIDPRFNRTASVADLHAPIRSGSDITFLMGVIRYLLETNQIQHEYVKHYTNASFLIDEGFKFEDGLFVGYNEEKRNYDKSKWNYQFDENGHAKRDMTLQHPRCVINILKEHVSRYTPEMVERITGVKQKLFLQICEEIGKTSVPNKTMTHLYALGFTEHSIGTQNIRSMAIIQLLLGNMGMPGGGINALRGHSNVQGTTDMGLLPMSLPGYMRLPNDKDTSYDQYINAITPKDIVPNQVNYYRHTSKFFVSMMKTFYGDNATKENGWGFDFLPKADRLYDPITHVKLMNEGKLHGWILQGFNVLNSLPNKNKTLSGMSKLKYLVVMDPLQTESSEFWRNFGESNNVNPAEIQTEVFRLPTTCFAEEEGSIVNSGRWTQWHWKGCDQPGEALPDVDILSMLREEMHELYKKEGGQGIESFEAMTWNYAQPHSPSAVELAKELNGYALEDLYDPNGNLMYKKGQLLNGFAHLRDDGTTTSGNWLYVGQWTEKGNQTANRDNSDPSGLGCTIGWGFAWPANRRVLYSRASLDINGNPWDKNRQLIKWNGKNWNWFDIADYGTQPPGSDTGPFIMSAEGVGRLFAVDKIANGPMPEHYEPVESPIDTNPFHPNVVTDPTLRIYKEDREFIGSNKEYPFVATTYRLTEHFHSWTAQSALNIIAQPQQFVEIGEKLAAEKGIQKGDMVKITSRRGYIKAVAVVTKRLKDLEIDGRVVHHIGLPIHWNMKALNGKGNRGFSTNTLTPSWGEAITQTPEYKTFLVNIEKVGEA

SEQ ID NO: 6343 - protein, 198 aa, Gossypium barbadense
GQNPLFPRILGHEAGGVVESVGEGVIDVQPGDHVLPIFTGECRECPHCLSEASNMCDLLRINTERGGMLHDGHTRFSKDGKPIYHFLGTSTFSEYTVVHVGQVAKINPEAPLDKVCVLSCGMSTGFGATVNVAKPKKGGSVAIFGLGAVGLAAAEGARVCEASRIIGIDLNPNRFEEAKKFGCTEFVNPKDHNKPVQE

SEQ ID NO: 6344 - protein, 958 aa, Eremothecium gossypii
MTMEVPLINGTNSVVVTAYSREQYAQCMQFYSAMLRLETLTKGENETVLTNKAVSVRVKYEEDKSRDQEARERREALAAAATTHDWRGEASTVVFSTVDVAKVRQTLGLCQAYPSELAPLEVYTLDPQGNVVGFTQTKNAISTFTNVPSVVGPRHARDSMTVSSAGSSTDLRSFGLDTTAHYPSLPKKSVAGDRKAIAVMTSGGDAPGMNANVRAIVRSVIFKGCRAFTVMEGYEGLVRGGPEYIKECKWEDVRGWSTEGGTNIGTARCMAFRERSGRLLGAQHLIEAGVDALIVCGGDGSLTGADLFRSEWPSLIQELLETGKITQAQYDRYRHLNICGTVGSIDNDMSTTDATIGAYSSLDRICQAIDYLEATAKSHSRAFVVEVMGRNCGWLALMAGIATSADYILIPEKPASSREWQDQMCDIVSTHRSRGKRTTIVIVAEGAIAADLTPITPKNVHQVLVDRLGLDTRITTLGHVQRGGSAVAFDRILATLQGVEAVNAVLESTPDTPSPLIVLNENKIMRKPLMESVALTKSVADAIQAKDFKKAMGLRDPEFVEHLNNFMAINSADHDEPKLRGEKRLNIAIVNIGAPAGGINSAVYSMANYCLSQGHKPFAIYNGWTGLARHESVRTLNWKDMLGWQSRGGSELGTNRTVPEDADIGMIAYYFQKYKFDGLVIVGGFEAFVSLHQLERARENYPAFRIPMVLIPATLSNNVPGTEYSLGSDTALNALMEYCDVVKQSAASTRARVFVVDVQGGNSGYLATHAALAVGAQVSYVPEEGISLEQLSQDIETLRESFEKAHGKGKHGKLILKSTNASKVFTTAVLADVITAEAKGDFDAKSAVPGHVQQGGLPSPIDRTRGTRLAVRAIGFIEAKQDVIREARENEEAFDCADKAVSHTAAVLGITGSQLKFTSIRQLYDLETEFSKRMPKVIHWEPTRAIADHLEGRKRVTV

SEQ ID NO: 6345 - protein, 234 aa, Thermus thermophilus HB27
MKLKGKKALVIAAGQGIGRAIAEAFQREGAEVLGATLHPEKLQGVVPAVRLDARDKEAVFRLIQGLDRLDVLVNAQGVVPVGGLLEATDQDWEEAFLLNAKSVFWAMQAALPKMAAQGGGSVINIASVAAFKTVPGRFIYSATKAALVAMTKAAALEFAPKGVRVNAICPGTVDTPSLRERAGGEEGLRAFAERQLLKRLGRPEEIAALAVYLASDEGAFATGSAFVVDGGMSL

SEQ ID NO: 6346 - protein, 401 aa, Kluyvera ascorbata
MADSSPERRFTRIDRLPPYVFNITAELKMAARRRGEDIIDFSMGNPDGATPPHIVEKLCTVAQRPDTHGYSTSRGIPRLRRAISRWYQERYDVEIDPEDEAIVTIGSKEGLAHLMLATLDHGDTVLVPNPSYPIHIYGAVIAGAQVRSVPLVEGVDFFNELERAIRESYPKPKMMILGFPSNPTAQCVELEFFEKVVALAKRYDVLVVHDLAYADIVFDGWKAPSIMQVPGARDVAVEFFTLSKSYNMAGWRIGFMVGNKTLVNALARIKSYHDYGTFTPLQVAAIAALEGDQQCVLDIAAQYKRRRDVLVKGLHEAGWMVDMPKASMYVWAKIPEQYAHMGSLEFAKKMLQDAKVCVSPGIGFGDYGDTHVRFALIENRDRIRQAIRGIKAMFRADGLLP

SEQ ID NO: 6347 - protein, 350 aa, Xanthomonas axonopodis pv. citri str. 306
MDVAVPTLPLHCTFDAADWQRLAQHWHAVALSSEVSEAPFKATLLDEPLVLYRLGSELVAARDVCPHRGVPLSMGTADGGGVVCAYHGLRFGAGGRCNHIPASPSQNIPAKMRLHTYAVAERYGLIWVCLAKPAGVSDADIQIPPMPGWDEDGFQQIVCPAFDIGGSAARQLEGFIDVAHFAFVRTATFAQPDKREVPAYTTTETPTGFNADYLSTVANYSVDMPLPDVDPNFQWLRHFEVHLPFTATLTIHFPVPGKRLVIMNAASPVSKHTTRLLVPIARNFDTHLPVEDVHAFNLRVFEEDRAMVEAQRPEYLPLDPLLEVHIPADRSSIAYRRGLRSQGYSDFFLR

SEQ ID NO: 6348 - protein, 420 aa, Agrobacterium tumefaciens str. C58
MHFDKIMPAEERAGIDVQTTEEMDMSRNRGVVYLKPGQVEVRDIDDPKLEAPDGRRIEHGVILKVISTNICGSDQHMVRGRTTAMPGLVLGHEITGEVIEKGIDVEMLQVGDIVSVPFNVACGRCRCCKSQDTGVCLTVNPSRAGGAYGYVDMGGWIGGQARYVTIPYADFNLLKFPDRDKAMSKIRDLTMLSDILPTGFHGAVKAGVGVGSTVYVAGAGPVGLAAAASARILGAAVVMVGDFNKDRLAHAARVGFEPVDLSKGDRLGDMIAEIVGTNEVDSAIDAVGFEARGHSGGEQPAIVLNQMMEITRAAGSIGIPGLYVTEDPGAVDNAAKQGALSLRFGLGWAKAQSFHTGQTPVLKYNRQLMQAILHDRLPIADIVNAKIIALDDAVQGYESFDQGAATKFVLDPHGDLLKAA

SEQ ID NO: 6349 - protein, 548 aa, Vibrio fischeri
MAIHPRAGQKAQQEDLHNIPSLVANYFLLEPNPTNVDQQVQFGTSGHRGTADKATFNQHHIWAIAQAVADVRKENGVTGPLFLGKDTHALSEPAFTSAIEVLVANGVEVIIQENNGYTPTPGISHAILTHNVKCEDKADGIVITPSHNPPQDGGIKYNPVHGGPAEGELTTAIENRANQLIANELKDVKRVSITEAMSSDLVKQMDLVQPYIDDLKNVINIEAIQKANLKLGVDPLGGSGIEYWRQIGQAFDLDLTLVSEAIDPSFQFMSLDKDGVVRMDCSSPYAMAGLLSLKDEYDLAFGNDPDYDRHGIVTPSGLMNPNHYLAVCIDYLYRHRPEWKPEVAVGKTLVSSAIIDKVVADLGRDLCEVPVGFKWFVDGLYAGSLGFGGEESAGASFLRFDGTPWSTDKDGILLCLLAAEITAVTGMNPQEYYNKLAAQHGESSYNRIQAVANKAQKAVLSKLSPEMVSATMLAGDEITARLTHAPGNGAAIGGLKVTTENGWFAARPSGTEEIYKIYCESFKGADHLALIEQEAQEIVSNVFKEAGL

SEQ ID NO: 6350 - protein, 464 aa, Agrobacterium tumefaciens str. C58
MTEIGFRTPSTDTTGAQPVSKLATARLALSLIRNPLKALPPEIFSEPAVFTRLGGVMRVHLADPVLIHEALVKNAALLGKGEDVRRALGPALGQGLLTADGDHWKWQRQSVAAAFRHEKLLELLPVMIETARRTQKRWRSSSTADIDIGHEMMRTTFDIIVETMMSGGYGIDIARVEQSITDYLKPTGWTFALAMLGAPEWLPHPGRRKSRAAVDYLRASLATVITGRRKNPTDRPDLVSMLLEAKDPETGRMMSDEEIIDNLLTFITAGHETTALGLAWTFHLLSQNPETERKAVEEIEAVTGGEPVAAEHIANLAYVRQVFSEAMRLYPPAPVITRTALQDFRLGEHDIPAGTVLYVPIYAVHRHTALWDEPERFDPSRFEPEKVKARHRYAYMPFGAGPRVCIGNAFAMMEAVAILAVILQKNHLENRTMASAEPLMRVTLRPQERLMMKITQRQNKSPAV

SEQ ID NO: 6351 - protein, 183 aa, Methanococcus maripaludis S2
MKIYFATGNQNKVDEAEIILKEANCEIEQIEIPYAEVQGRLEEVSAFGVLEVFEKFNRPVIVEDSGFFIEKLNDFPGTYSRFVQETIGNEGILKLLENETNRNAYFKTVIGYYDGDNIKLFTGIVKGTISTEIKDGGFGFAYDSIFIPEGKTKTFAEMTTEEKSEISHRKRAFYELKNYLENL

SEQ ID NO: 6352 - protein, 376 aa, Vibrio vulnificus CMCP6
MTQDKFIKSRAAVAWGPKQPLSIEEVDVMLPRKGEVLVRIVATGVCHTDAFTLSGDDPEGVFPAILGHEGGGIVEMVGEGVTSVSVGDHVIPLYTAECGQCKFCLSGKTNLCQAVRETQGKGLMPDGTTRFYKDGKPIFHYMGCSTFSEYTVLPEISLAKVNKEAPLEEICLLGCGVTTGMGAVINTAKVKQGDTVAIFGLGGIGLSAIIGARMAGASRIIAVDINDRKFELAKQLGATDCINPKEHAQPIQEVIIEMTDGGVDFSFECIGNVNVMRQALECCHKGWGESVIIGVAGAGQEISTRPFQLVTGRVWRGSAFGGVKGRSQLPAIVEQYLAGEFGLQEFITHTMPLEGINDAFELMHSGESIRSVVHFE

SEQ ID NO: 6353 - protein, 1273 aa, Botryotinia fuckeliana
MLPDTEDIAQLPKDNEVKSMEAASRSSSRTRTSTGGSTPVPVSPITKPRLWPSDIPKGYTASSAHATSSWSASSDKQLGSPSSTTNDRVFPIRSVVSVDPTQTPSSFSARNSASGEMNDYFPRPPSLSSRDGGGRGVRYSDSDGKTTPRQRGQTNFPASDIRKQARELYKVNKVRLLYDRDLETARLVCRGVEELENPLDLSYAYLRAMSPIHIKYLANMAVRSSMSISINAFGELWGLLACHTYGPKGMRVSFPIRKMCRLVGDTASRNIERLSYASRLQARKLINTVPTQANPSGYIIASSDDLLKLFDADFGLLSIKGETKILGKIDQSHEALAMLEYMRMRKIKTVVTSQDIKQDFPDLRYPPGFNVIAGLLLVPLNSEGDDFIVFFRAGQITNVKWAGNPYEKFIKEGTEGYLEPRKSFKTWNETVIGKCREWTEEQVETAAVLCLVYGKFIEVWRQKEAALQSSQLTRLLLANSAHEVRTPLNAIINYLEIALEGALDQETRENLAKSHSASKSLIYVINDLLDLTKTEEGMDLVKDEIFDLPAAIREATDLFKGDVKRKGIEYTVVEHPGVPQFVHGDQRRVRQAVANITANAVQHTSSGFVRIEIWLQEIIDNRVNVEIVVEDSGAGMSNQKLDTIFRDLEQVDGDPLFEDESNEKALVDGNRTIGLGLAMVARIVRNMDGQLRLKSEVGKGSRFVIQLPFFLPEDDSQNSGNQEKAAFLSSSSVSPPLATPPPAGTPGEVTLVKSSSHLRQSAPDSSSLARKHSTEEIASLHSFRSNNSSKASGKSDVDRFIDAISGPVGNTQGEPLKRVNSRDRQSLNSMPETALSSRSGQSAKLKRSASYTTPDCLKLEELRTVGSETVAGSKTPVRAVRMPNEFSEGTNDKSTPPVSAKVKFNLHIPSTSSQGGAHEDAPREISPKTESNPLNIDNLKVLVAEDDPVNSRIINKRLDKGGHDVYHTINGEECASAYGDNVKKSSATASLADKRFDVILMDMQMPIVDGLTSTKMIRSFEKTYLDLSPRAKLNGRVPIFAVSASLVERERQTYIDAGFDGWVLKPIDFKRLNVLLKGIVDSKVRDSCLYQPGQWERGGWFHKMQPSALQSSTAPSNKSPVQNPPQKGPEPLQPDKDSLDSDTGSTTPMGDKKRPLIYDERLNATNEALNATADVDVGPHYNLPTADERPVMDVSTENDTSAVDKSLEDNTGENTKPETASDASAGVNSDPTTKNDLEEIDVSGAAEPSPDSTKVEESTAETTNNSEVPESTE

SEQ ID NO: 6354 - protein, 1221 aa, Botryotinia fuckeliana
MSNIDTVPSKSVVYPSVEEFQVERIFPIRNLVNGKGVDTESTSPNTDDVSSSNSSCRGPTSAREPYDKDDILNDSHSDGSSETNFLPPPYPPIPPDDQIRRLPKSPKHDYSTEVGGGEGSSEYEARKISQRSQLIPSKSGPPGIAPGEPVSTEERTFFKCEDEPIHIPGAIQQYGALIALRYNDQGDLMVRIASENAFKILKYTPEQLFSLNSFLDLLGVDVREDFIARVDHALRAVTKNPSADTKLDIFSMSVVAHTGLVNLWCAIHISKGTDDLIICEFEPFSDEMFFPDEPHNTKNDLPKFPTRTIDNDTVLEERLKSISSGSQPLRVLQIAKRKGRHAVGSLEVFNAMTQAQEQLAACTSVQKLQDVLVGLIFDLTGFHRVMFYRFDSAKNGCVEAELLNPKASDDIFRGLHFPASDIPKQALDLYKINRIRMLHDRDEKTARLVCRHQSDFEKPLDLTHAYLRAMSPLHLKYLSNMGVRSTMSVSIVINGDLWGLIACHGYGSHGTRVTLPMRELARNIGECASTNIERLLMRQRIEARRAPRQNPGKTPSGFIAASSDDLLKVFDADFGLLNIQDEARAIGRLRPYREALSILAYLQSRHFTEIFSTHNITKDLPKLKDSPAINSVAGILVIPLSTGGNDFLVFFRRGQLREVRWAGNPYEKIKPAKGQYLEPRSSFSRWTQTIKGTSKIWNADDFETASVLSLLYGRFIEIWRQKESTGLNRMTRLLLKNTSHEVRTPLNAVVNYLEMALEDKIESPTRELLEKAHRASRSLVYVIDDLLKLTKAETGPVTSVKDVFDLSATVSEVMSAFQKEAVRKNLDLTVTIQQGIPEMVRGDATRLRQVISNITSNAFQNSVVGGVKIDIKPIQIWPASTVISLTVQDVGIGMSESQLDELFQEFEQILDETDHSTIKKPAQPLIDVKETLGIGLAVVARYVRNSNGQIRVHSEVGKGTIFGIELPFEHAPAASNTQEIPIISTGRQIRPFSDSGSNYDESDKMNSTYTMSNFGSTPLATPIEEGSSATTSFFDLAMHSKEEYVEPPSVRRRSSLPFLNMIDLMSSKKSLSILIAEDNPINSKLLHKRLSKLSHKPEITAEGQSCYDYYTSGNNKVDVILMDLQMPLVDGTKATRMIRKFERDNLELHQIRRRVPIIAASASLLEEHRFDYIEAGFDGWIMKPINFSRLEFLLQGLNNPQLKQRSLYTPGMWELGGWFFA

SEQ ID NO: 6355 - protein, 184 aa, Lilium hybrid division I
MDRKVGTNEDVEVRKGPWTMEEDLILINYIANHGDGVWNTLARSAGLKRTGKSCRLRWLNYLRPDVRRGNITPEEQLLIMELHDRWGNRWSKIAKELPGRTDNEIKNFWRTRVQKKSKNGESSEGQISMLSDETSAMQMEDVDVGVSQTSYDQGQTSNNLDAFEIPFEPGDNLLSVEELWAMQY

SEQ ID NO: 6356 - protein, 224 aa, Populus tomentosa
IMHAMWKPQKFKYIYLMATLYVFTLTIPSATAVYWAFGDDLLNHSNAFALLPKNGFRDAAVILMLIHQFITFGFACTPLYFVWEKVIGMHDTKSICLRALARLPVVIPIWFLAIIFPFFGPINSAVGALLVSFTVYIIPSLAHMLTYRKSSARQNAAEKPPFFLPSWTAMYVVNTFVVVWVLVVGFGFGGWASMTNFVRQVDTFGLFAKCYQCKPAGAAPPRPH

SEQ ID NO: 6357 - protein, 560 aa, Candida albicans SC5314
MSELSIKTIETKPFQDQKPGTSGLRKKVTVFQQPHYTENFIQSILDAIPEGSQGSTLVIGGDGRFYNDVVIQLIIKIAAANGVKKLILGQNGILSTPATSHVIRIKQATGGIILTASHNPGGPQNDLGIKYNLGNGGPAPESVTNKIYEISKQINQYKLIELPNVDLSKIGTIVEGPIEIEIIDSTKDYVDMLKSIFDFPLIKSFIDKATKEQDFKVLFDALNGVTGPYGYEIFVNELGLPESSIQNYKPLPDFGGLHPDPNLTYAHTLVERVDKENIAFGAASDGDGDRNMIYGAGTFVSPGDSVAIISEYADSIPYFQKQGVYGLARSMPTSGAIDLVAANKNLQCYEVPTGWKFFCSLFDAKKLSICGEESFGTGSNHIREKDGLWAIVAWLNVLAGYNKQNPQSKTSIEIVQNSFWEKYGRTFFTRYDYENVSSEGAQKLIDLLQSIVNEKSVGDELAPGYIIKQADNFSYTDLDGSVSSNQGLFIKFDNGLRFIVRLSGTGSSGATVRLYLEKHCDDKSKYHLKVDEYLTNEIQFVLELLKFTQFLNKEDPDVRT

SEQ ID NO: 6358 - protein, 128 aa, Triticum aestivum
AYIKHGVELEQSFMEGAYNRVLSARQTAPHETYIYFMDLLVKTVRDELAGCSEKGYDYLSINDAKQMFKFSSDKELQQYIAEEHPEWDVKDGRVLFQKAKESQPCKEIPAAPVINQTLGYARELERIV

SEQ ID NO: 6359 - protein, 126 aa, Oryza sativa
MSAMETDINAPPPPAPAPAGAGEGSSSAAGPSSRKPNKRFEIKKWNAVALWAWDIVVDNCAICRNHIMDLCIECQANQASATSEECTVAWGVCNHAFHFHCISRWLKTRQVCPLDNSEWEFQKYGH

SEQ ID NO: 6360 - protein, 1168 aa, Arabidopsis thaliana
MVSGVGGSGGGRGGKEEPSSSHTPNNRRGGEQAQSSGTKSLRPRSNTESMSKAIQQYTVDARLHAVFEQSGESGKSFDYSQSLKTTTYGSSVPEQQITAYLSRIQRGGYIQPFGCMIAVDESSFRIIGYSENAREMLGLMPQSVPTLEKPEILAMGTDVRSLFTSSSSILLERAFVAREITLLNPVWIHSKNTGKPFYAILHRIDVGVVIDLEPARTEDPALSIAGAVQSQKLAVRAISQLQALPGGDIKLLCDTVVESVRDLTGYDRVMVYKFHEDEHGEVVAESKRDDLEPYIGLHYPATDIPQASRFLFKQNRVRMIVDCNATPVLVVQDDRLTQSMCLVGSTLRAPHGCHSQYMANMGSIASLAMAVIINGNEDDGSNVASGRSSMRLWGLVVCHHTSSRCIPFPLRYACEFLMQAFGLQLNMELQLALQMSEKRVLRTQTLLCDMLLRDSPAGIVTQSPSIMDLVKCDGAAFLYHGKYYPLGVAPSEVQIKDVVEWLLANHADSTGLSTDSLGDAGYPGAAALGDAVCGMAVAYITKRDFLFWFRSHTAKEIKWGGAKHHPEDKDDGQRMHPRSSFQAFLEVVKSRSQPWETAEMDAIHSLQLILRDSFKESEAAMNSKVVDGVVQPCRDMAGEQGIDELGAVAREMVRLIETATVPIFAVDAGGCINGWNAKIAELTGLSVEEAMGKSLVSDLIYKENEATVNKLLSRALRGDEEKNVEVKLKTFSPELQGKAVFVVVNACSSKDYLNNIVGVCFVGQDVTSQKIVMDKFINIQGDYKAIVHSPNPLIPPIFAADENTCCLEWNMAMEKLTGWSRSEVIGKMIVGEVFGSCCMLKGPDALTKFMIVLHNAIGGQDTDKFPFPFFDRNGKFVQALLTANKRVSLEGKVIGAFCFLQIPSPELQQALAVQRRQDTECFTKAKELAYICQVIKNPLSGMRFANSLLEATDLNEDQKQLLETSVSCEKQISRIIGDMDLESIEDGSFVLKREEFFLGSVINAIVSQAMFLLRDRGLQLIRDIPEEIKSIEVFGDQIRIQQLLAEFLLSIIRYAPSQEWVEIHLSQVSKQMADGFAAIRTEFRMACPGEGLPPELVRDMFHSSRWTSPEGLGLSVCRKILKLMNGEVQYIRESERSYFLIILELPVPRKRPLSTASGSGDMMLMMPY

SEQ ID NO: 6361 - protein, 562 aa, Sinorhizobium meliloti
MPPPLPERRHLICACVGTYCGCGSNPPSGSSPFVPASFFVPAEGTAEPRCGGVSSPRSRAGFSPRIRALISSPVSVSYSSKPSARATNSLTAGPRGGIMLQDYQLIEKLAHQNRERIPERVVHAKGWGAFGSLKITGDISQYTRAKCLQPGAETPMLARFSTVAGEQGAADHERDVRGFALKFYTDEGNWDLVGNNTPVFFIRDPYKFPDFIHTQKRHPKTNLRSATAMWDYWSLSPESLHQVTILMSDRGLPQTPMHMNGYGSHTYSFWNDAGERYWVKFHFKTQQGHKFFTNEEGEAVIGKTREGYQESLFYAIENGEFPRWTVQVQIMPELDVEKTPYNPFDLTKVWPHADYPPVEIGVLELNRNPENYFAEIENAAFSPSNIVPGIGFSPDKVLQARIFSYADAHRYRLGTHYEHIPVNQPRCPVHHYHRDGQMNTYGGIRTGNPDAYYEPNSFNGPAEQPLAKEPPLRIDGDMSRYDHRVGNDDYVQVRALFGLFDEGQKSRLFSNIAAAMGGVPGEIIERQLIHFARVHPEYEAGVRQALKTAHGYEADTISTAAE

SEQ ID NO: 6362 - protein, 292 aa, Shigella boydii
MKTRKGIILAGGSGTRLYPVTMAVSKQLLPIYDKPMIYYPLSTLMLAGIRDILIISTPQDTPRFQQLLGDGSQWGLNLQYKVQPSPDGLAQAFIIGEEFIGGDDCALVLGDNIFYGHDLPKLMDVAVNKESGATVFAYHVNDPERYGVVEFDKNGTAISLEEKPLQPKSNYAVTGLYFYDNDVVEMAKNLKPSARGELEITDINRIYMEQGRLSVAMMGRGYAWLDTGTHQSLIEASNFIATIEERQGLKVSCPEEIAYRKGFIDSEQVKVLAEPLKKNAYGQYLLKMIEGY

SEQ ID NO: 6363 - protein, 313 aa, Escherichia coli
MKVAVLGAAGGIGQALALLLKTQLPSGSELSLYDIAPVTPGVAVDLSHIPTAVKIKGFSGEDATPALEGRDVVLISAGVRRKPGMDRSDLFNVNAGIVKNLVQQVAKTCPKACIGNITNPVNTTVAIAAEVLKKAGVYDKNKLFGVTTLDIIRSNTFVAELKGKQPGEVEVPVIGGHSGVTILPLLSQVPGVSFTEQEVADLTKRIQNAGTEVVEAKAGGGSATLSMGQAAARFGLSLVRALQGEQGVVECAYVEGDGQYARFFSQPLLLGKNGVEERKSIGTLSAFEQNALEGMLDTLKKDIAWAKSSLISN

SEQ ID NO: 6364 - protein, 581 aa, Desulfovibrio desulfuricans G20
MAGLAAAFGSGAMTNSIDELESMGAGDVIFAVGTNTTECHPVIGANMLQAVRQGARLVVADPRAVTLAAHAAVWLRLRPGTDVALLNGIAHVIISEGLADEAFIAQRTEGYAAFRETVLRCTPQKASAITGVPADDIRSAARILGCAANVSTYYTMGITQHTSGVDNVRAVANIALLTGNAGRPGTGVNPLRGQNNVQGACDMGALPDVLPAYQRVTDPAVRERFAAAWGREVPGKPGLRIPDVLHGLEHGTVRALYVFGENPMRSDPDVGHVEHCLDAAEFLVVQDIFLTETAAKAHVVLPGASFAEKDGTFSSTERRVQRIRRAVPPAGGSRPDWQILSELLTRMGAGPEYGSPEEIFDEMRALTPSYAGITYARLEKGGLQWPCPDVDHPGTPVLHRNAFMRGRGAFLAVEHREPAELPDDAYPLMLTTGRVVAHYHTGTMTRRCWGLNGVAPEEQVELHPDDAAPLGIADGDMVRLTSRRGSMTARVHVTEKTMRGLVFVTFHYSESCGNVLTNSAADPETGTAELKICSVRVEKADRQGPCPADTAGRRPEAAAQKHYSEPAVHPAGTPEKICNPS

SEQ ID NO: 6365 - protein, 443 aa, Leuconostoc mesenteroides subsp. mesenteroides ATCC 8293
MTQQYDYDVLYLGSGHGTFDGAVPLAQSGVKVGIIEKDLIGGTCPNYGCNAKITLDAPVTLLRESERFSGVVAGNLKINWKESVAHKQEVIDELPGMIGGLIKSSGIDIIQGSGVFQDNHTILVDGQPKTADKIVISTGLRPHRLDIPGSELAHDSREFMDLTELPDKIVIIGSGYISMEFVTIANAAGSDVTVLMHGDKALKEFYQPYVNKVIDDLKERGVKFVKNAKVSSFEKSGDQVIVNYGDDQSLSVGWVLDATGRIPNTDNLGLSEIGVNYNEKGVIVNEYLQTNVDNIYASGDVIDKTQPKLTPTAIFESTYLFKRFSGQSREPITYPVIPSVVFTSPRIAKVGVAVEEAKENNYQIEENNLVGDWYRKVNKETISENTLIFDDEHRLLGATEVSEQAENVINTLLPAVEFKFNKEEIARLIHLFPSISASTWDLL

SEQ ID NO: 6366 - protein, 299 aa, Streptococcus pyogenes M1 GAS
MAKIVECIPNFSEGQNQAVIDGLVATAKSIPGVTLLDYSSDASHNRSVFTLVGDDQSIQEAAFQLVKYASENIDMTKHHGEHPRMGATDVCPFVPIKDITTQECVEISKQVAERINRELGIPIFLYEDSATRPERQNLAKVRKGQFEGMPEKLLEEDWAPDYGDRKIHPTAGVTAVGARMPLVAFNVNLDTDNIDIAHKIAKIIRGSGGGYKYCKAIGVMLEDRHIAQVSMNMVNFEKCSLYRTFETIKFEARRYGVNVIGSEVIGLAPAKALIDVAEYYLQVEDFDYHKQILENHLLG

SEQ ID NO: 6367 - protein, 198 aa, Gossypium hirsutum
GQNPLFPRILGHEAGGVVESVGEGVTDVEPGDHVLPIFTGECKECPHCLSEASNMCDLLRINTERGGMLHDGQTRFSKDGKPIYHFLGTSTFSEYTVVHVGQVAKINPEAPLDKVCVLSCGMSTGFGATVNVAKPKKGGSVAVFGLGAVGLAAAEGARVCEASRIIGIDLNPNRFEEAKKFGCTEFVNPKDHNKAVQE

SEQ ID NO: 6368 - protein, 357 aa, Moorella thermoacetica ATCC 39073
MVNLTIDGQRVTAPEGMTILEVARENGIHIPTLCHHPKLRPLGYCRLCLVDIEGAAKPMTACNTPVAEGMVIRTSTPVIEEMRKGIIEMLLSLHPEDCLTCEKAGNCQLQDCAYTYGVKHGELPVKREELPVLKENPFIVRDYNKCIVCGRCVRACQEVQVQRVVDLVGKGSAARVGATKAGAEVSLEEGGCVFCGNCVQVCPVGALTEKAGLGQGREWEFKKVRSICSYCGVGCNLTLYVKDGKVVKVRGYENPEVNNGWLCVKGRFGFDYIHNPDRITRPLIREGDREKGYFREASWEEALALVSQKLTQIKGSYGSEALGFLCSAKCTNEENYLLQKLARGVLGTNNVDHCARL

SEQ ID NO: 6369 - protein, 526 aa, Moorella thermoacetica ATCC 39073
MTNSIADIASADCIFVIGSNTTENHPVIALKVKEAVRRGARLIVADPRRIELVNFSYLWLRQKPGTDLALLNGLLHVIIKEELYDKEFIAQRTEGFEALKLAVEEYTPAKVSEVTGVPAGDIIEAARTYARGPSSTILYAMGITQHITGTANVMALANLAMACGQVGKEGSGVNPLRGQSNVQGACDMGGLPNVLPGYQPVTDPGVRHKFSEAWGVPDLPGEPGLTLMEMMAAAQEGKLKGMYILGENPVLTDPDVSHVKEALKNLEFLVVQDIFLTETARMADVVLPGASFAEKEGTFTSTERRVQLLHKAIEPPGEARPDWLILNDLLLLMGYPRKYSSPGEIMQEIAGLTPSYAGITYERLEDKGLQWPVLSLEHPGTPVLHREKFSRGYGQFQVVHYRPPAEEPDEEYPFLFTTGRNLYHYHTVISRKSRGLEEMCPAPVVEINDNDAARLGIREGEMIEIVSRRGKVRVKALVTDRIPRGQVFMNFHFHEAAANLLTIAALDPVAKIPEYKTCAVAIKVKK

SEQ ID NO: 6370 - protein, 458 aa, Leptospira interrogans serovar lai str. 56601
MAKIAEMTQLSPTMAEGKIVRWLKQKGDPVSPGEIIAEVETDKAVMEMEAFETGILLEILAPEGTLLPVGAPVAIIGKQGEDVSALVETAKKSIPAKKESSITQGQAPTSTQNATSQSSTTSGANTVKNLTTKASDASSQNTESNGLTTHEERSLKTQIPFDSEDSPIRSARGGRSIKASPLAKNLALQKGVDLGEVIGSGPGGRIIKRDLLAYQESGSVKKSTFVKRQDRKLEITGMRKTIASRLAHSTSTIPHFYLTLELDATPLDTLRNSYNKDLKLEGSSKISLNDLIIKACSLSLKEVPEVNSSWREDHILEHGRIDIGVAVSIEGGLITPYIRNADQKSVSEIGREIKELASRARERKLKPAEYTDGTFTVSNLGMFGISSFTAVINEPEAAILAVGALVEKPVLKEGSIVVGKTLNVTLSCDHRVVDGATGARFLSSFRDYTEYPLRLLTG

SEQ ID NO: 6371 - protein, 260 aa, Mycobacterium tuberculosis
MSGRLTGKVALVSGGARGMGASHVRAMVAEGAKVVFGDILDEEGKAMAAELADAARYVHLDVTQPAQWKAAVDTAVTAFGGLHVLVNNAGILNIGTIEDYALTEWQRILDVNLTGVFLGIRAVVKPMKEAGRGSIINISSIEGLAGTVACHGYTATKFAVRGLTKSTALELGPSGIRVNSIHPGLVKTPMTDWVPEDIFQTALGRAAEPVEVSNLVVYLASDESSYSTGAEFVVDGGTVAGLAHNDFGAVEVSSQPEWVT

SEQ ID NO: 6372 - protein, 518 aa, Zea mays
  unsure (1)..(518): unsure at all Xaa locations
MEGGMSSLEAAMKASSSMASSMARNADPNQQTLRPNLVEQFYFPRPGQSLPGIPPFFGPPSSLYLPNDNEAKFGNNFESNPSQNTDWNPQAIVSNLTFLEQKIKQVKDIVQSMSNRENQVAGGSCEVAAKQQLITADLTSIIIQLISTAGSLLPSMKNPLLSSNPAVRQLGNTLGSPMXFGMNANQRPSVDSKTDIPDTGKTSDYDELMNSLNPTQDERDEMIKCPNPCGGEGSEPTPMEDHDVKESDDGGEGENLPPGSYVVLQLEKEEILAPHTHFCLICGKGFKRDANLRMHMRGHGDEYKTPAALAKPTKDSGADHAPVTRYSCPFVGCKRNKEHKKFQPLKTILCVKNHYKRSHCDKSYTCSRCNTKKFSVIADLKTHEKHCGRDKWLCSCGTTFSRKDKLFGHVALFQGHTPALPMEDVKVSEASEQPQDSEPMNEMARSNVYSFPCSSSDGISNLDMKMADDVRGYFSPLNFDPCFGALDDFTRPGFDISENPFSFLPSGSCSYGQQNGDS

SEQ ID NO: 6373 - protein, 473 aa, Sinorhizobium meliloti 1021
MWTTLPPGASISPEVVMNKHFDAVIIGAGQAGPSLAGRLSGVGKTVALIERKLFGGTCVNTGCMPTKAMVASAYAIHTARRGAEYGMTTGPVSVDFGRVMARKEKVRLDARSGVEKWLKGMKNCTVFEGHARFEGPREVRIGDELISGERIFVNVGGRAAVADLPGVNDVPYLTNSSIMDLAELPEHLVVVGGSYIGLEFAQMFRRFGSDVTVIEKGARLIGREDPEVSDAIREILENEGVRIRTNAECIRFSNHADSVAVGVDCTSGEPEVSGSHVLLATGRHPNTDDLGLDKAGVKTDERGYIEVDDSLRTNVPHIFAMGDCNGRGAFTHTSYNDFEIVAANLIDNDPRRVSDRIQTYALYIDPPLGRAGMTETEARKKGHKLLVGTRPMTRVGRAVEKGETQGFMKVIVDAETDEILGASILGTGGDEAVQSILDVMYAKKPYTMIARAVHIHPTVSELIPTVFGDLSSA

SEQ ID NO: 6374 - protein, 504 aa, Brucella suis 1330
MSKLDDNVAKAKTYLARFEKGVLNRIGGEDVAAADGATFETISPVDLKPLATVALGKAADIDRAARAAKAAFPEWAAMSGDARKKLLHKIADAIVARAEEIAFVECMDTGQSLKFMAKAALRGAENFRFFADRAPEARDGKTLRGPGQVNMTTRVPIGPVGVITPWNTPFMLSTWKIAPALAAGCTVVHKPAEFSPLTARLLVEIAEEAGLPKGVWNLVNGFGEDAGKALTEHPDIKAIGFVGESRTGSLIMKQGADTLKRVHFELGGKNPVVVFADADLERAVDAAVFMIYSLNGERCTSSSRLLVEASIYEKFTALVAEKAKRIKVGHPLDPETVVGPLIHPVHEKKVLEYIEIGRSEGATVAAGGAKFAGPGGGCYVSPTLFTAAHNGMRIAQEEIFGPVLTAIPFKDEAEALALANDVKYGLTGYLWTNDVTRAFRFTDALEAGMIWVNSENVRHLPTPFGGVKNSGIGRDGGDWSFDFYMETKNIAFANAAHAIAKLGG

SEQ ID NO: 6375 - protein, 260 aa, Mycobacterium tuberculosis
  unsure (1)..(260): unsure at all Xaa locations
MSGRLTGKVALVSGGARGXGASHVRAXVAEGAKVVFGDILDEEGKAXAAELADAARYVHLDVTQPAQWKAAVDTAVTAFGGLHVLVNNAGILNIGTIEDYALTEWQRILDVNLTGVFLGIRAVVKPXKEAGRGSIINISSIEGLAGTVACHGYTATKFAVRGLTKSTALELGPSGIRVNSIHPGLVKTPXTDWVPEDIFQTALGRAAEPVEVSNLVVYLASDESSYSTGAEFVVDGGTVAGLAHNDFGAVEVSSQPEWVT

SEQ ID NO: 6376 - protein, 512 aa, Eremothecium gossypii
MSVSSCDVPLGLIVNAKQTYYPIELSNAELLAHYETIQDYHQEISENVLQHSCRVKPDPKLIDQQPEMNPQHTRTAIVNFAFELAQKTRVTNGIFFHAVRLYDRYCSKRVVLRDQAKLVIATCLWLAAKTWGGCNHIINNVTVPTGGRFYGPNPRARIPRLSELVHYCGGSNVFDESMFTQMERHILDTLSWDVYEPMVNDYVLNVDENCLIQYELYKRQLEHNRQYANKRNSQDSNATEEDVSEEDEDLDNKIQLINIKKFLIDLAVWQYDLLKYEVFELAHGIFSIINKFTNQDLGPLLLSPIPSTNNESLVLNVFINGVIKCPAALLESYHEKFGVLQFVDQVKEYHESLQKKLQLAAAMDLSRRNNAKFYEAPSMPSPTYSQHSSYTPLRNTSNSESSVFSSVSNQQSPITPQMYSFSVQKPGSACGSSVSVNSISQKRNRDEETNYSIMGNDKENYDPTSTYTVPPRAKFAGHTYIFTGAAKEEQTSSTSNRSSLISLAIGNANSLV

SEQ ID NO: 6377 - protein, 159 aa, Triticum aestivum
  unsure (1)..(159): unsure at all Xaa locations
SSATTAAPFQGLKSTAGLPVSRRSCSAGLSSVSNGGRIXRCMQVWPIEGIKKFETLSYLPPLSKEALXKXVDYXIRSSXVPASNXTKXGXSSGEQXXPPGNXNGXKXTIWKLPXFGXNRXXKXAQQGXEVKKXYLIVSPVNRFKKSEWAQCFRHKELEG

SEQ ID NO: 6378 - protein, 429 aa, Caldococcus noboribetus
MVSHPCTADEAKPPSEGQLARFENGKLIVPDNLIVAYFKGDGIGPEIVESAKKVLDAAVDKAYGGTRRIVWWEVTAGEEAQKECGSLLPDGTLQAFKLARVNLKGPLTTPVGGGFRSLNVTLRMVLDLYSNVRPVKWYGQPTPHCHPENIDWVIFRENTEDVYAGIEWPFDSPEAQKIRDFLKKEFGIELTPDTGIGIKPISKWRTQRHVRRAMEWAIRNGYKHVTIMHKGNIMKYTEGAFRQWAYDLILSEFRDYVVTEEEVNTKYGGKAPEGKIIVNDRIADNMLQQIITRPGEYNVIVTPNLNGDYISDEANALVGGIGMAAGLDMGDGIAVAEPVHGSAPKYAGKNVINPTAEILSGMYLLSDFVGWPEVKLLVEYAVKQAIAHKQVTYDLAREMGGVTPISTTEYTDVLVDYIRHADLKALKGQ

SEQ ID NO: 6379 - protein, 408 aa, Methanocaldococcus jannaschii DSM 2661
MDAIILCAGKGERLRPLTENRPKPMIPIAGKPILQHIIEKVEDLVDNIYLIVKYKKEKIVDYFKNHPKIKFLEQGEIDGTGQAVLTAKDYVDDEFLVINGDIIFEDDLEEFLKYKYAVAVKEVKNPENFGVVVLDDENNIIELQEKPENPKSNLINAGIYKFDKKIFELIEKTKISERGERELTDAIKHLIKEEKVKGIKLNGYWNDVGRPWDILEANKYLLDKINTDIKGKIEENVVIKGEVIIEEGAIVKANSVIEGPAIIKKGAVVGPLAYIRPYTVLMENTFVGNSSEVKASIIMKNTKIPHLSYVGDSIIGENCNFGCNTITANLRFDDKPVKVNIKSKRVESVRKLGVIMGDNVKTGIQVSFMPGVKVGSNCWIGASCLIDRDIESNTFVYKRDELIFRKLK

SEQ ID NO: 6380 - protein, 268 aa, Gloeobacter violaceus PCC 7421
MNRIANTAQIQSAPPVFARPLENKVAIVTGASSGIGRATALELARRGAKVVASARRVGPTLELVEAIRAEGHEATFVQADVTDEAYVERLVAEAIATYGKLDIAFNNAGTEGVFAPLLEQTKETYDLVFDANVRSVFYSMKHQAQAMLCAGGGVIVNNASMGGVIGFENAALYIATKHAVLGMTKSAALEWYRRGVRVNAICPGIIDTPFQDRIWPSTEAKNSFANATVAGRAGTAEEMAKVVAFLVSEDASFVSGHGLLADGGYSIA

SEQ ID NO: 6381 - protein, 395 aa, Agrobacterium tumefaciens str. C58
MTKTNDLRSAAGVNTRLTHGGNDPADCFGFVNPPIVRGSTVLFPDAETLSTEDQKYTYGTHGTPTTDALCNLVNELEGSFGTILVPSGLAAITVPFLAYLGAGDHALIVDSVYFPTRRFCNTMLKKLGVEVEYYDPAIGAGIEALIRPNTKLVHLEAPGSNTFEIQDVRLITDIAHRHDCVVTMDNTWATPLYFKPLDFGVDVSIHAATKYPSGHSDVLMGFVSANEKYWKALYQANTNLGICVTPDDAYQILRGMRTMGIRLEHHQKSALDIAQWLEGRDDVVRVLHPALPSFAGHELWKRDFKGASGVFSFVLKAEEGKYKQTASAFLDALTFFGLGYSWGGYESLAVSVSLVDRTIAKGPSEGPVIRLQIGLEDVADLKKDLEAGFSAAAGV

SEQ ID NO: 6382 - protein, 427 aa, Brucella suis 1330
MSGNQELIARRERLLGRNMSLFYQDPVHLVKGEGVWLWDADGRKYLDCYNNVPHVGHCHPRAVEAICRQASTLNTHTRYLHEGILDYVERLTATFDKSLDAAILTCTGSEANDVALRMAQAVTGKTGIIATDFTYHGNTTAVSQLSTRMPPVGGYGGHVRHVPAPDSYRPLGGKGGEAFAQAWAAEVEKAIASLQESPFGFSGLIIDPFFANEGFPDLPENFLAPAVAAVRKAGGVVIADEVQPGFGRTGGHMWGHQKAGIVPDIVTLGKPMGNGHPVGAVVAGADTLNAFRKAFRYFNTFGGNPVSCAAAMAVLDVLEEEKLQANALEVGAYARQGLEKLAQKHGMIGNVRGSGLFFGAELVLDRAEKTPAAEMATRVVNEMRERGVLMNKLGIHQNATKIRPPMPFSRENADLMLSTLDDVLGGL

SEQ ID NO: 6383 - protein, 203 aa, Mycobacterium avium
MGVAQISSAITPAQPAELYPGDIKSVLLTAEQIQARIAELGREIGDNYRDAAAETGQDLLLITVLKGAVIFVTDLARAIPLPTQFEFMAVSSYGSSTSSSGVVRILKDLDRDIQGRDVLIVEDVVDSGLTLSWLLRNLSTRHPRSLRVCTLLRKPDARGAHVDIAYVGFDIPNDFVVGYGLDYDERYRDLSYIGTLDPRVYQQ

SEQ ID NO: 6384 - protein, 423 aa, Moorella thermoacetica ATCC 39073
MLTSRPRGTEDILPEEVGRWYLLENTAREVSRLYGYREIRTPIFEHTELFNRGVGDTSDIVEKEMYTFIDRGDRSLTLRPEGTAPVVRAFVEHSLEARGLPVKLFYLGPMFRYGRPQAGRLRQFHQFGVEAFGSRDPALDAEVIALAMDFYTRLGLKDLELHLNSVGCPACRPAHREKLKAYLRPRLEELCPTCQGRFERNPLRIFDCKSPACQEIVREAPTVTASLCPDCAGHFHRVQEYLKALGIEFILDEHLVRGLDYYTKTAFEIMVKGIGAQSSIGGGGRYDGLVAALGGKQVPGIGFGLGLERVLLALEIQGQEPPPEGGVDVLVVTAGTGVDLAAFRLLAGLRAAGIRADKDYLERSLKGQMKYANRYPARMAVILGEEELARGRVSVRRLDAGSQEEVPLAAVVDYCRKMKESGW

SEQ ID NO: 6385 - protein, 452 aa, Brucella suis 1330
MRDSNFLIENNARHLWHPMAHPAEMQANPPRIVNGGEGVEVIDIHGKKVLDAVGGLWNVNLGYSCEPVKKAIRDQLDSLPYYSTFRGTTNSPLIELSYELAEFFKEDGLTRAFFTSGGSDSVETALRLARQFHKINGQPERTKFVSLKKGYHGTHFGGASVNGNANFRRNYEPLLPGVFHLAAPYPYRNPFNMDDPAAIAAAIARQFEDEIAFQGADTIAAFIMEPVLGAGGVIVPHESFMLLMREICDRHGILLIADEVITAFGRTGAWTGSRGWGVKPDMMTTAKAITNGYFPFGAVMISDKVASVFEANKNSLGAIGHGYTYSGHPVGAAAALATLKETARANTAANAGARGVELMAGLNQLKEKHELVGDVRGKGLMAALELVSDREKKSAAAKTVVQKVYDVAYEEGVMVRTSGANVIISPPLVITSADVNRIVSALDAGLSAAKGQ

SEQ ID NO: 6386 - protein, 579 aa, Phaseolus vulgaris
MCGILAVLGCSDSSQAKRVRVLELSRRLKHRGPDWSGLHQYGDCYLAHQRLAIVDPASGDQPLFNEDKTIAVTVNGEIYNHEELRKQLPNHTFRTGSDCDVIAHLYEEHGENFVDMLDGIFSFVLLDTRDNSFIVARDAIGVTSLYIGWGLDGSVWISSELKGLNGDCEHFESFPPGHLYSSKEREFRRWYNPPWFSEAIPSAPYDPLALRHAFEKAVIKRLMTDVPFGVLLSGGLDSSLVAAVTARYLEGTNAAKHWGTKLHSFCVGLEGAPDLKAAREVADYIGTVHHEFHYSVQDGIDAIEDVIYHIETYDVTTIRASIPMFLMSRKIKSLGVKWDICGEGSDEIYGGYLYFHKAPNKEEFHQETCRKIKALHKYDCLRANKSTFAWGLEARVPFLDKEFIEVAMNVNPEYKMIKKEEGRIEKWVLRRAFDDGEHPYLPKHILYRQKEQFSDGVGYGWIDGLKGHAEKHVTDRMMLNAANIFPFNTPTTKEAYYYRMIFERFFPQDSARLSVPGGPSVACSTAKAVEWDAAWSNNLDPSGRAALGVHASAYGNQVKAVEPEKTIPKMEVSPLGVAI

SEQ ID NO: 6387 - protein, 244 aa, Gentiana triflora
MGRGKVELKRIENKINRQVTFAKRRNGLLKKAYELSVLCDAEVALIIFSNRGKLYEFCSGSSTTETVERYQRYTYGLQDAGHPSDDPQNSYQEYVKLKARVEVLQGYHRNFLGEDLGSLSCKELEHLEHQVETSLKQVRSTKTSFMLDQVADLQRKEEMLAEENKALRGKLDERANQVPLRLSWEGRQQAPTGYNNVPAHTQGFFQPLGLNSTLQMGYNQGGAEGNYNVHAGNNINGFMPGFMN

SEQ ID NO: 6388 - protein, 358 aa, Haemophilus influenzae R2866
MQSYNIAVLAGDGIGPEVIAEAIKVLNKVQEKFGFKLNFNEFFVGGAAIDHCGYPLPAETLKGCDEADAILFGSVGGPKWTNLPPDQQPERGALLPLRKYFKLFCNLRPATLYKGLEKFCPLRADIAAKGFDMVVVRELTGGIYFGQPKGREGEGAQTKAFDTEVYYKYEIERIARAAFDAAMKRNKKVTSVDKANVLQSSILWRETVTEVAKEYPEVTLEHIYIDNATMQLIKAPESFDVLLCSNIFGDIISDEAAMITGSMGMLPSASLNEEGFGLYEPAGGSAPDIAGKGIANPIAQILSAAMMLRYSFNLNEAADAIENAVQKVLASGHRTADLADDSTPVSTAEMGILIAQAI

SEQ ID NO: 6389 - protein, 236 aa, Streptomyces coelicolor
MKAVQVVGYGKNLEMAEVPAPEVTGPYDVIVRIGGAGVCRTDLHILEGQWAEKSGVELPYTIGHENAGWVHAVGSAVTNVSEGDKVIVHPLITCGLCRACRAGDDVHCENNRFPGIDTAGGYAEYLKTSARSVVRLDDSLEPADVAALADAGLTAYHAAAKAARRLRPGDRCVVIGAGGLGHIGIQVLGALTAAEIVVVDRNPDAVDLAVSVGADHGVLADGGHVDRVRELTGGHG

SEQ ID NO: 6390 - protein, 438 aa, Streptococcus pneumoniae TIGR4
MLTYDLIVIGFGKAGKTLAGKLASAGKKVALVERSKAMYGGTCINIGCIPTKTLLVAAEKDLSFEEVIATKNTITGRLNGKNYATVAGTGVDIFDAEAHFLSNKVIEIQAGDEKKELTAETIVINTGAVSNVLPIPGLATSKNIFDSTGIQSLDKLPEKLGILGGGNIGLEFAGLYNKLGSKVTVLDALDTFLPRAEPSIAALAKQYMEEDGIELLQNIHTTEIKNDGDQVLVVTEDETYRFDALLYATGRKPNVEPLQLENTDIELTERGAIKVDKHCQTNVPGVFAVGDVNGGLQFTYISLDDFRVVYSYLAGDGSYTLEDRLNVPNTMFITPALSQVGLTESQAADLKLPYAVKEIPVAAMPRGHVNGDLRGAFKAVVNTETKEILGASIFSEGSQEIINIITVAMDNKIPYTYFTKQIFTHPTLAENLNDLFAI

SEQ ID NO: 6391 - protein, 346 aa, Oryza sativa
MAAAADAAPKTMRAVQYDKYGGGPEGLKHVEVPIPAPKEGELLIKMEAASINPIDWKIQKGMLRLFLPKKFPFIPVGDLSGEVVELGGGVSGFKPGDKVVSMSFPNCGGLAEYAVAPASLTVARPPEVSAADGATLPAAAGSALQQLKAAGVRFDADADAAAAAGGPKNVLVTAASGGVGHYAVQLAKLAGLHVTATCGARNLAFVRDGLGADEALDYRTPDGAALRSPSGRRYDAVAHCAPPAPWPVFRDALADAGGVVVDLTPGVAATVRSFLHRVTFSKKRLVPLILMPKKEEMEWLVDMAKQGKLKTTIDSKYPLSRAQEAWAKSMEGHATGKIVVEMGGTE

SEQ ID NO: 6392 - protein, 540 aa, Prochlorococcus marinus subsp. marinus str. CCMP1375
MPNKSSATSMRSGHIAPVVLTILDGWGHREENINNAINNADTPVMDALWQAYPHTLIEASGADVGLPDNQMGNSEVGHLTIGAGRIIQQELVRISNTIRSKKLDQITNLSNLANKLIETDKTLHLVGLCSDGGVHSHINHLCGLLEWAKNKGIQKVAVHAFTDGRDTPAKSSLQYLKIIKEKFEVLGIGELATLCGRYWSMDRDNRWERIEKAYELLTNPNYPLSELSSDEIITNSYDSSITDEFLEPIRLTPSYLKDGDGLIMFNFRPDRARQLIKSITLPSFSEFKRKYQPQLNVVTLTQYEMDLPVSVVFPPESLDNLLGQVISEHGLLQYRTAETEKYPHVTYFFNGGIEQPLPGEKRHLVPSPRVATYDLSPEMSAEKLTKSCQEAIESGIYSLIVINYANPDMVGHTGIHAATKKAISTVDKCIGKILDSTGKMSGTLLITADHGNAELMKGPDGEPWTAHTTNPVPVILIEGEKRKISGQGNQIRLREGGGLADIAPTLLEVLSLPKPDAMTGSSLIETIQTNSKTNLVQQHV

SEQ ID NO: 6393 - protein, 376 aa, Psychrobacter sp. 273-4
MSDKFIKSKAAIAWGPNQPLSIEEVDVMLPRKGEVLVKIIASGVCHTDAFTLSGEDPEGVFPAILGHEGGGIVEQIGEGVTSVQVGDHVIPLYTAECGECKFCTSGKTNLCSAVRETQGKGLMPDGTTRFYKDGQPIYHYMGCSTFSEYTVLPEISLAKVSKEAPLEKVCLLGCGVTTGMGAVMNTAKVEEGATVAVFGLGGIGLAAVIGAKMAKASRIIGVDINEDKFELAKKLGATDCINSKDYDKPIQEVIVEMTDGGVDYSFECIGNVDVMRSALECCHKGWGESVIIGVAGAGKEISTRPFQLVTGRVWKGSAFGGVKGRTELPGYVERYLEGEIPLNDFITHTMPLENINEAFDLMHKGESIRTVIHFDM

SEQ ID NO: 6394 - protein, 407 aa, Triticum aestivum
  unsure (1)..(407): unsure at all Xaa locations
ANFTAESFRCPQHGCMVCKQKMFFWRCGRCTVAAHTKCAPWPLIHLKDDQGSAICWRHPSNWLLQNENADLTNNIEEVFCRLPLPYVNEEFNIDSTIRNFTAIVCKPPSYTHIRRNVYLVKKKRADSSAETGCTNCKSDSVCKDDCECRGLSMSCSKSCHCSDLCSNXPFRKDKKIKIVKSEGCGWGAVALEPLEKGDFIIEYVGEVINDATCEQRLWDMKRRGDKNFYMCEISKDFTIDATFKGNTSRFLNHSCDPNCKLEKWQVEGETRVGVFASRFIEVGEPLTYDYRFVHFGEKVKCHCGAKSCQGYLGSQLKNPTQNALAAAALENNKLLVQQGGCSPSRVKTETRLLPWTNCIEVPFNLRSKTKIDRICWGHKRQRTSLLDPSSSSASVQPSDIEAGAFIL

SEQ ID NO: 6395 - protein, 636 aa, Vibrio vulnificus CMCP6
MAIEINVPDIGADEVEVTEILVSVGDKVEEEQSLITVEGDKASMEVPASQAGIVKEIKVVAGDKVTTGSLIMVFEVEAAGAPGAAAAAPVPAVAPVAAPAAASELKEVCVPDIGGDEVEVTEILVAVGDSIAEEQSLLTVEGDKASMEVPAPFAGTLKEIKVAAGDKVSTGSLVMVFEVAGSGAAAPAPVAAAAPAAAPAAVSGVKEVNVPDIGGDEVEVTEIMVTVGDTVSEEQSLITVEGDKASMEVPAPFAGTVKEIKVAAGDKVSTGSLIMVFEVAGAAPVAAAAPAQAAAPAQAAAPAPAVAPVAKAEAQATTSDFKENDEYAHASPVVRRLAREFGVNLSKVKGSGRKSRILKEDVQAYVKDALKRLESGAVAAASGKGDGAALGLLPWPKVDFSKFGETEVQPLSRIKKISGANLHRNWVMIPHVTQWDNADITELENFRKEQNAIEAKKDSGMKITPLVFIMKAAAKALEAFPAFNSSLSDDGESLILKKYVNIGIAVDTPNGLVVPVFKDVNKKGIYELSEELMVVSKKARAGKLTAADMQGGCFTISSLGGIGGTAFTPIVNAPEVGILGVSKSEIKPVWNGKEFAPRLQLPLSLSYDHRVIDGAEGARFITYLNECLSDIRRLVL

SEQ ID NO: 6396 - protein, 793 aa, Neurospora crassa
MSSAPIKMAPRKKIAIMTSGGDSPGMNAVVRSCVRMAIHMGCDAYCVYEGYEGLVRGGDFIKQMDWFDVRGWLSEGGTLIGTARCMAFYERAGRLTAAKNMILNGIDALIICGGDGSLTGADRFRAEWPSLLEELVSTGELTAEQIQAYKHLNIVGIVGSIDNDLSGTDATVGCYSALARICLCIDMIEATASSHSRAFVVEVMGRHCGWLALMAAVATGADFLFIPEKPREDNWREEMRSVIQQHRRLGKRKTIVLIAEGALDKFGNKITPEEVRDLLADKNGLALDTRITTLGHVQRGGTAVAYDRMLATLQGVEAVKAVLEATPETKTCFIAITENKIVRKPLMEAVLDTKQVAKAIESQDFDGAMALRDAEFSEQYKSFMMTTAGQIDHETLLPEKERMKIGFINVGAPAGGMNAAVRAGVSYCLSRGHEPIAIHNGFAGFARHHADSPGSVRPFDWLEVDGWASKGGSEIGTNRELPSESGMETIANLIEQYQFDALFLIGGFEAFHAVSQLRKAREQYPSLCIPMTLLPATISNNVPGTEYSLGSDTCLNELVDYCDKIKQSASATRRRVFVIETQGGRSGYIATLAGLGVGASAVYLPEEGLSLEMLSEDVRHLKEVFAQDKGQSRAGRLILINEKASKVYNAKLIADILRDEAHGRFESREGIPGHMQQGGVPSGMDRCRAVRLAIKCIQQLEKYGRNVHNRVKMDPMSASVIGIKGASVIFTPVQKLEEEETDWPNRRPKAAFWLSMKEIVDILGGRPRHTLPEPDLTGVKAKDVKRGLEPVAN

SEQ ID NO: 6397 - protein, 441 aa, Zea mays
  unsure (1)..(441): unsure at all Xaa locations
VAHFAPEXIPERVVHARGASAKASSXCTHDVTXLTSPLPPPRSSEALIMRFSTVIHERGSPETIRDPRGFAVKIYTREGNWDLLGNNFPVFXIRDGIKFPDVIHAFKPNPRSHVQEYWRVFDFLSHLPESLHTFFFLFDDVGVPSDYRHMEGFGVNTYTFVSAAGKAQYVKFHWKPTCGVRCILTDEEAALVGGRNHSHATQDLYDSIAAGSFPEWTLYVQVMDPDTEEQYDFDPLDDTKTWPEDLLPLRPVGRLVLDRNVDNFFNENEQLAFGPGLVVPGIYYSDDKMLQCRVFAYADTQRYRLGPNYLMLPVNAPRCAHHNNHYDGAMNFMHRDEEVDYYPSRHAPLRQAPPVPIPARPVVGKRQKETIQKPNDFKQPGERYRSWDANRQERFVRRFADSLGHPKVSQELRSIWIDLLSKCDASLGMKIATRLNMKPNM

SEQ ID NO: 6398 - protein, 487 aa, Vibrio vulnificus CMCP6
MSKEIKAQVVVLGAGPAGYSAAFRCADLGLDTVLIERYNTLGGVCLNVGCIPSKALLHVAKVIEEAKALAEHGIVFGEPQTDIDKIRLWKEKVINQLTGGLGGMAKMRKVNVVNGFGKFTGPNTIEVEGEDGKTVVNFDNAIVAAGSRPIKLPFIPHEDPRIWDSTDALELKEVPGKLLIMGGGIIGLEMGTVYHSLGSQIDVVEMFDQVIPAADKDIVKVYTKRISKKFNLMLETKVTAVEAKEDGIYVSMEGKKAPAEAERYDAVLVAIGRVPNGKLIDGEKAGLEIDERGFINVDKQMRTNVPHIFAIGDIVGQPMLAHKGVHEGHVAAEVISGKKHYFDPKVIPSIAYTEPEVAWVGKTEKEAKAEGINYEVATFPWAASGRAIASDCADGMTKLIFDKETHRVIGGAIVGTNGGELLGEIGLAIEMGCDAEDIALTIHAHPTLHESVGLAAEVFEGTITYLPNAKAKKKKIIFLASRQNKNR

SEQ ID NO: 6399 - protein, 217 aa, Arabidopsis thaliana
MSSNNKTDDSDDRSFWQNSTSYDASSKIFLVTTVSFSIIIIIVFVYYLYAKFVLHRRSAFQDLSFSVVSQPPKRGLDSLVIASLPTFVVGIKNDVAGTECAVCLSLLEEKDNARMLPNCKHVFHVSCVDTWLTTQSTCPVCRTEAEPSHPRLEPEPREGPVGDFAPPLDFAGVDNKTGGSSVSRLDSFRRILTRERSSNRRDHSRVDQDRELDIERQ

SEQ ID NO: 6400 - protein, 545 aa, Caulobacter crescentus CB15
MHDRAGLRALPEDLVDLDALIGAYFEIKPDVSNPAQKVVFGTSGHRGSSLDGAFNEAHILAVTQAIVEYRAAQGVTGPLFVGRDTHGLSEPAWRSVLEVLAANGVEALVDSRDGFTPTPAVSHAILTHNRQGGRQADGLLLTPSHNPPRDGGIKYNPPSGGPAGSDATSAIAARANELLAQGLAGVKRVPFETARKAVGDYDFLGRYVDDLPAVIDIAAIRAAKVRIGADPLGGAAVAYWGAIAERHALDLTVVNDAVDPRWAFMPLDTDGKIRMDCSSSSAMANLIGIMKGGAAYDVATGNDADADRHGIVTPDGGLMNPNHYLAAAISYLFSHRPGWGADTAVGKTLVSSSMIDRVVSGLGRRLLEVPVGFKYFVPGLLDGSVGFGGEESAGAAFLRHDGGVWTTDKDGIQLALLAAEIQAVTGKSASQLYAGLTDQYGAPAYARVDAPASREEKARLSKLSPSDVSAKTLAGEAITDILTAAPGNGEAIGGLKVCTQNAWFAARPSGTEDVYKVYAESFLGADHLKQVQAEAREVVAGALKG

SEQ ID NO: 6401 - protein, 183 aa, Hevea brasiliensis
MASSMLSTAAVACINRASPAQASMVAPFTGLKSTSAFPTTRKTTTDITSIASNGGRVQCMQVWPPRGKKFYETLSYLPPLTREQLAKEVEYLLRKGWVPCLEFELEHGTVYREYHRSPGYYDGRYWTMWKLPMFGCTDAVQVLQELDEMIKAYPDCYGRIIGFDNVRQVQCISFLAYKPKGAE

SEQ ID NO: 6402 - protein, 104 aa, Vibrio vulnificus CMCP6
MESSRDVRILKDLDDDIKGKDVLIVEDIIDTGNTLNKIKEILSLREPKSIEICTLLDKPSRREVPVPVKWIGFEIPDEFVVGVGIDYAQKYRHLPFIGKVVPQE

SEQ ID NO: 6403 - protein, 198 aa, Gossypium hirsutum
GQNPLFPRILGHEAGGVVESVGEGVTDVEPGDHVLPIFTGECKECPHCLSEASNMCDLLRINTERGGMLHDGQTRFSKDGKPIYHFLGTSTFSEYTVVHVGQVAKINPEAPLDKVCVLSCGMSTGFGATVNVAKPKKGGSVAVFGLGAVGLAAGEGARVCEASRIIGIDLNPNRFEEAKKFGCTEFVNPKDHNKPVQE

SEQ ID NO: 6404 - protein, 379 aa, Avena sativa
MKLLPCILSILLLASVDPAISSVRRFDSIFSFGDTFADTGNGRVVYAENSVPDPTAHPPYGQTFFGHPTGRSTDGRLIIDFIAHELWLPLVPPSLSRNASFSHGASFAVSAATALDVGFFKDIPIAGMLALDTSLRVQLQWFESLKTSLCGPAKACPPGFFDKSLFFMGEFGVNDYSFSLLGKTLAQVRSIVPDVVKAIAEATEGLIHHGAKTVVVPGIPPLGCTPPNLVFFPSADPAGYEPRTGCLKGFNELSVHHNTLLQEALETVQTNNPGALVVYADFYTPVIKMVKSPWKYGLTTKVLSCCCGGGGKYNFNMSAGCGMPGASVCEDPSQYLYWDGHFTEAAHRKIARGWLRKLNMHDLMMEPAYPYFDMAKDSA

SEQ ID NO: 6405 - protein, 603 aa, Mycobacterium tuberculosis H37Rv
MSFVIAAPETLVRAASDLANIGSTLGAANAAALGPTTELLAAGADEVSAAIASLFAAHGQAYQAVSAQMSAFHAQFVQTFTAGAGAYASAEAAAAAPLEGLLNIVNTPTQLLLGRPLIGNGANGAPGTGQAGGAGGLLYGNGGAGGSGAPGQAGGPGGAAGLFGNGGAGGAGGDGPGNGAAGGAGGAGGLLFGSGGAGGPGGVGNTGTGGLGGDGGAAGLFGAGGIGGAGGPGFNGGAGGAGGRSGLFEVLAAGGAGGTGGLSVNGGTGGTGGTGGGGGLFSNGGAGGAGGFGVSGSAGGNGGTGGDGGIFTGNGGTGGTGGTGTGNQLVGGEGGAGGAGGNAGILFGAGGIGGTGGTGLGAPDPGGTGGKGGVGGIGGAGALFGPGGAGGTGGFGASSADQMAGGIGGSGGSGGAAKLIGDGGAGGTGGDSVRGAAGSGGTGGTGGLIGDGGAGGAGGTGIEFGSVGGAGGAGGNAAGLSGAGGAGGAGGFGETAGDGGAGGNAGLLNGDGGAGGAGGLGIAGDGGNGGKGGKAGMVGNGGDGGAGGASVVANGGVGGSGGNATLIGNGGNGGNGGVGSAPGKGGAGGTAGLLGLNGSPGLS

SEQ ID NO: 6406 - protein, 296 aa, Caulobacter crescentus CB15
MVGRLNGKVAVITGGCSGIGLGTVELFVAEGACVVAADLQDEKGRMLEQRFPDQVRFARCDVTADDDLAKTMALAESSFGGLDILFNNAGHGGTPASVPELTAEAWDKTFALLVRGPAMGMTHALPLMQKRGGGSIINTASIAGLQAGFGPLAYSSAKAAVIHMSRCAAAELSPQKIRVNAICPGLIATSIFGASMGLPREVADQMAAQIASIGPKIQPIPKSGLPEDIAAAALYLASDDSRFVTGTHIVVDGGITVGPRSAWDINTPSPILAAMGITPEQAEQMRAQLLAAGGTG

SEQ ID NO: 6407 - protein, 492 aa, Brucella suis 1330
MQDKIDRLRQQAVPPQSLFINGRWQPAADGNVMAVISPIDGTQLTTIAAATAIDVDRAAAAARHSFEKGTWAKAAPAERRKVLLKIAELIERNALELAVLGVRDNGTEISMALKAEPGSAANSFRYYAEAIDKVYGEIAPTAENILGLVHRAPVGVVGAIVPWNFPMMIGAWKIAPALAAGNSIVLKPAEGASLSLLRLAELCAEAGLPEGVLNVVTGAGPVTGEALGLHPDIDVLAFTGSGFVGRKLLEYSARSNLKRVHLELGGKSPNIVFADAPDLAQAAKVSAYGIFRNSGQVCVAGSRLLVERSIAGEVAEKVSTIAAAIKGGDPLGLTTEAGAISSEAQLRKNLDFAEQALSEGAGLRTGGKRILEETGGFYMQPTVFNVEPGMTLAREEVFGPILSIIPFDNEEDALKIANDSDYGFASAVWTSNLSRAHRMVRGIRAGVVHVNTYGGADNTVPLGGVKQSGNGHDKSLHALDKYIDLKTAWIQL

SEQ ID NO: 6408 - protein, 283 aa, Gloeobacter violaceus PCC 7421
MTANVVSGAGGVAGWRALNWPTLGFLVLMHGLALLAPWFFNWQALAVALGLHWLIGSLGICLGYHRLLTHRSFRVPRGLECVFAMLGALALQGGPIFWVAAHRLHHAHADDDARDPHSSGRGFWWSHVLWLLYRHPELSDGQTHRKYAPDLARQPFYRWLNRYHLLLQIPLAVLLFALGGWPFVVYGVFVRAVVLWHTTWLINSAAHLAGYRTSEVPDSSRNLWWAALLTYGEGWHNNHHAQPNAARAGLRWWEVDMTWWVIRALEMAGLATQVVPPRPNPVR

SEQ ID NO: 6409 - protein, 326 aa, Erwinia carotovora subsp. atroseptica SCRI1043
MKIGLVISGGDVSGINNFIFQVNRMTASDIVIFDGGINGLIDNCCKVLTRRDLVDYSLSSMPLVTSGRKTGKCRKTDYEKIVKNIQKQKLDALIMAGGDGSFQFLKKLSCYGIHCYGIGMTIDNDISGNSYTIGFSTACEQVMSEVEKLRNTGRGLQGRVFMIELLGGYCGELTLQAALKSNADIALIPESPWDIDALSQCILDKIAEQNSVIILCSEGYTHEYTPGFQGAIDTIIKKLEHKIGIRIRKTILGYGLRNGAPTGEEIIQGTLLAEEVVRCINAGLTNKIIIINNNNKAIPIDLEDSERRLVDIESHFYKLAKSHHLI

SEQ ID NO: 6410 - protein, 275 aa, Prochlorococcus marinus subsp. marinus str. CCMP1375
MACSLGVIGLGRMAQVILQSLFEAGQFNPEEVFGVVGKKNSVERVLHQFKSPFTVVDVNDKNAIDVWNTPVKILAVKPQQLNQVQEKCSKEFLAKLPAKPLLISILAGVKLKRLQSLFPDHVCVRAVPNTPALVSAGLTGLSWGEEVTEDQKSLVESIFKPISQVFELPEDQLDAFLALTSSGPAYLALISEALADGAVAAGLPRALAQSLTNFTLEGTAILLKKKELHPGQLKDMVASPAGTTISALRHLEKEGVRSALIEAVILAAKKSREMA

SEQ ID NO: 6411 - protein, 210 aa, Sophora affinis
YDRVMAYKFHEDDHGEVIAEITKPGLEPYLGLHYPATDIPQAARFLFMKNKVRMIVDCHAKHVKVLQDEKLPFDLTLCGSTLRAPHSCHLQYMANMDSIASLVMAVVVNDSDEDGDSSDAVQPQKRKRLWGLVVCHNTTPRFVPFPLRYACEFLAQVFAIHVNKEIELEYQLIEKNILRTQTLLCDMLMRDAPLGIVSQSPNIMDLVKCD

SEQ ID NO: 6412 - protein, 170 aa, Sophora affinis
YDRVMAYKFHEDDHGEVISEVTKPGLEPYLGLHYPATDIPQASRFLFMKNKVRMIVDCRAKHVKVLQDKKIPFDLTLCGSTLRAPHSCHLQYMENMNSIASLVMAVVINDNDEDGDSSDAVQPQKRKRLWGLVVCHNTTPRFVPFPLRYACEFLAQVFAIHVNKELELEY

SEQ ID NO: 6413 - protein, 122 aa, Nostoc punctiforme PCC 73102
MLSPVVTVSIFQKQPDPKPFSAGEVIFEEGQPGDNMYGILEGTVDILVNGKVVETIDTGEVFGVGVLVGVKNRTYTAIAKVDSKLAFVDEKGFLFAVQETPMFALKVMKSYSERLSRLQHMV

SEQ ID NO: 6414 - protein, 488 aa, Escherichia coli
MKKVNHWINGKNVAGNDYFQTTNPATGEVLADVASGGEAEINQAVAAAKEAFPKWANLPMKERARLMRRLGDLIDQNVPEIAAMETADTGLPIHQTKNVLIPRASHNFEFFAEVCQQMNGKTYPVVDKMLNYTLVQPVGVCALVSPWNVPFMTATWKVAPCLALGNTAVLKMSELSPLTADRLGELALEAGIPAGVLNVVQGYGATAGDALVRHHDVRAVSFTGGTATGRNIMKNAGLKKYSMELGGKSPVLIFEDADIERALDAALFTIFSINGERCTAGSRIFIQQSIYPEFVKRFAERANRLRVGDPNDPNTQVGALISQQHWEKVSGYIRLGIEEGATLLAGGPDKPSDLPAHLKGGNFLRPTVLADVDNRMRVAQEEIFGPVACLLPFKDEAEGLRLANDVEYGLASYIWTQDVSKVLRLARGIEAGMVFVNTQNVRDLRQPFGGVKASGTGREGGEYSFEVFAEMKNVCISMGDHPIPKWGV

SEQ ID NO: 6415 - protein, 143 aa, Gibberella moniliformis
MSPTEEKSDDVDFGDNIDMTTFEQILEMDEPGDCEFSSSIVFGFFDQAEETFDQIKEALEEEDLDKLSSLGHFLKGSSATLGLIKIRDGCEKIQRYGKHEKLDGSPEDDSEVCLKHIKDAFDAVKTDYAEVEKLLRQYYDSRE

SEQ ID NO: 6416 - protein, 257 aa, Helicobacter pylori 26695
MEILQFIGYGNMAQAILEGAHEILSKRFILEITGRNPEKIAPFLQEKNIQAQIVPYKDAIDIHQKFVFLLFKPYNLKDFNYQGQAKSVLSALAGVGFKALSDAIDSLHYLKCMPNIASKFALSSTAVCEKSPMPLISQKALSVIESFGNCVRVGHEELVDASVATNGSALAFLSLVANSLKDAGIREGLNARGSLELVKMSFKGFAKLLEKERPEMIIEQICTPKGATIEGLSVLEKKGVRGAFIEACHKSVKKMRL

SEQ ID NO: 6417 - protein, 155 aa, Triticum aestivum
  unsure (1)..(155): unsure at all Xaa locations
MAATIQSVKARQIFDSRGNPTVEVDVCCSDGTFARAAVPSGASTGCXYKLWELRDGGSDYLGQGCXSKAVNNVNSIIAPALXGKDPTAQTELXDNFKGQPLDGTKNEWGWXCKQNFGANASCCTTTVCKLDHVKKXPLYQHIPTCWEQLVFPFRL

SEQ ID NO: 6418 - protein, 419 aa, Zea mays
TSPQFVAEALAPDNPPLKIRFIDNTDPAGIDHQIAQLGPELATTLVIVISKSGGTPETRNGLLEVQKAFRDAGLQFSKQGVAITQENSLLDNTARIEGWLARFPMFDWVGGRTSEMSAVGLLPAALQGIDIKEMLVGAALMDEETRNTVVKANPAALLALCWYWASEGIGKKDMVVLPYKDSLLLLSRYLQQLVMESLGKEFDLDGNRVNQGLTVYGNKGSTDQHAYIQQLREGVHNFFVTFIEVLRDRPAGHDWELEPGVTCGDYLFGMLQGTRSALYANDRESISVTVQEVTPRAVGALIALYERAVGIYASLVNINAYHQPGVEAGKKAAGEVLALQKRVLTVLKEAICENPTEPLTLDEIADRCHCPEDIEMIYKIIQHMAANDRALIAEGSCGSPRSVKVYLGECSVDEDMQAA

SEQ ID NO: 6419 - protein, 359 aa, ASPERGILLUS NIDULANS FGSC A4
MSSQTPTAQNLSFVLEGIHRVKFEDRPIPKLKSPHDVIVNVKYTGICGSDVHYWDHGAIGQFVVKEPMVLGHESSGIVTQIGSAVTSLKVGDHVAMEPGIPCRRCEPCKAGKYNLCEKMAFAATPPYDGTLAKYYTLPEDFCYKLPESISLPEGALMEPLGVAVHIVRQANVTPGQTVVVFGAGPVGLLCCAVAKAFGAIRIIAVDIQKPRLDFAKKFAATATFEPSKAPATENATRMIAENDLGRGADVAIDASGVEPSVHTGIHVLRPGGTYVQGGMGRSEMNFPIMAACTKELNIKGSFRYGSGDYKLAVQLVASGQINVKELITGIVKFEDAEQAFKDVKTGKGIKTLIAGPGAA

SEQ ID NO: 6420 - protein, 334 aa, Phytophthora infestans
MAASPNKKLREASQLDQLKQFTTVVADTGDFEQINKYKPQDATTNPSLLFKAAQMEQYSALVDDAVSYGKGLSADLSEKERLGYVIDKLSVNFGLEILKVVPGYVSTEVDARLSFDTESTIARAHRIIDLYEKAGIKKDRILIKIASTWEGIQACKHLQKEGISCNMTLLFGFAQAVGCAEAGATLISPFVGRILDWHKAKTGKSSYESHEDPGVVSVTKIYQYYKKYDYKTIVMGASFRNTGEITELAGCDRLTISPALLEELTKSTATLAKKLDAETAGKAYTGEKLSYDEKDFRLSMNEDAMATEKLAEGIRGFSADIVKLEQILKTKLGA

SEQ ID NO: 6421 - protein, 377 aa, Bacillus cereus ATCC 14579
MRAKTKLIHGIRIGEPSTGSVNVPIYQTSTYKQEAVGKHQGYEYSRTGNPTRAALEEMIAVLENGHAGFAFGSGMAAITATIMLFSKGDHVILTDDVYGGTYRVITKVLNRFGIEHTFVDTTNLEEVEEAIRPNTKAIYVETPTNPLLKITDIKKISTLAKEKDLLTIIDNTFMTPYWQSPISLGADIVLHSATKYLGGHSDVVAGLVVVNSPQLAEDLHFVQNSTGGILGPQDSFLLLRGLKTLGIRMEEHETNSRAIAEFLNNHPKVNKVYYPGLESHQNHELATEQANGFGAIISFDVDSEETLNKVLEKLQYFTLAESLGAVESLISIPSQMTHASIPADRRKELGITDTLIRISVGIEDGEDLIEDLAQALA

SEQ ID NO: 6422 - protein, 195 aa, Zea mays
  unsure (1)..(195): unsure at all Xaa locations
APLDKVCVLSCGISTGLGASINVAKPPKXSTVAIFGLGAVGLAAAEGARIAGASRIIGVDLNPSRFEEARKFGCTEFVNPKDHNKPVQEVLAEMTNGGVDRSVECTGNINAMIQAFECVHDGWGVAVLVGVPHKDAEFKTHPMNFLNERTLKGTFFGNYKPRTDLPNVVELYMKKELEVEKFITHSVPFAEINKA

SEQ ID NO: 6423 - protein, 450 aa, Gloeobacter violaceus PCC 7421
MEKADVIVIGSGQGGVPLAVDQARSGRRVVLFERGALGGSCINYGCTPSKALLAAAHAAGRARLAAPLGIHAEVTVDFARVMERVRGIRASFRQGIEQRLADAGVQIVHAEASFAGSSTVVGGGVEVQAPLVVINTGTGPTIPELPGLAGLPLLTNLNIFDLETLPRCTLILGGGYIGLELGQGLARLGSEVHIVHNHERLLNHEEPEVGEVLAEALRRDGIHLHLQSEVSQAVYQDGICALTLEDGQILRGEAALLAAAGRTPNTAALGAPAAGIALDKQGYVAIDEHFRTTAAGVYAIGDVARQPAFTHVSWEDYRRLQAILGGEERTRSDRVLGYAVYTEPQVGRVGLTLDQALAKGHRARSVTLPMAHIARAIEWGHDLGFYRLVVDEDTDKILGATLVGYEAAEIVHVLLAHMQADSTWKVLEQSVHIHPTYCEALPSLARLLKQ

SEQ ID NO: 6424 - protein, 612 aa, Lycopersicon esculentum
MAAHVLIVLFVFFSITSCVSIGDDQVLVEFKELLLNTSLLDSSWKKGTNPCDNNNKWFGVQCDNNNNNVIQALLLGGIGLSGNLDVDVLISLQGLRVVNLSNNSFSGSIPEFFRLGALKSLFIDGNQFSGDIPPDFFSKMASLWKIWFSRNKFSGKIPESLASLKYLLELHLENNEFTGTIPSLSQPNLATINLSNNKLQGLIPQSLSKFGSNPFQGNPDLCGNQIGRECKAVIYGEKSESSGSTKWIIVGLVVVLLLVAILFKSKRKDDQFEKLEKENLDEAVKVHLNKRSMSTRTSMRSSRKGRSRSGSDMGDLVVVNDEKGIFGMPDLMKAAAEVLGNGGLGSAYKALLGNGVLSVVVKRLRETNKFNKECFDAEIRRLARIRHKNILQPLAYHYGKEEKLVVSEYIPKGSLLYLFHGDRGTAHAQLNWCIRVKIILGVANGMKFLHSEFGSYDVPHGNLKSSNILLSANNEPLLTDYAFYPLVNNSQAVQSLFAYKSPEAILNQQVTPKSDVYCLGIIILEILTGKFPSQYLSNQKFTGTDVAQWVQSAIEENRVSELIDPEIETEKDSLEMMEKFLYIGAACTESDHDHRIDMKEAIRRIEEITDLM

SEQ ID NO: 6425 - protein, 375 aa, Sinorhizobium meliloti
MRTRAALAVQAGKPLVVTEVELEGPRAGEVLVEVKATGICHTDDFTLSGADPEGLFPAILGHEGAGIVVDVGPGVTSVKKGDHVIPLYTPECRSCPSCLSRKTNLCTAIRATQGQGLMPDGSSRFSINGDKIHHYMGCSTFSNFTVLPEIALAKVNPDAPFDKICYIGCGVTTGIGAVINTAKVEIGATAIVFGLGGIGLNVIQGLRLAGADMIIGVDLNNDKKPWGEKFGMTHFVNPKEVGDDIVPYLVNLTKRGADQIGGADYTFDCTGNTKVMRQALEASHRGWGKSVIIGVAGAGQEISTRPFQLVTGRTWMGTAFGGARGRTDVPKIVDWYMEGKIEIDPMITHTMPLEDINKGFELMHSGESIRSVVLY

SEQ ID NO: 6426 - protein, 443 aa, Trichodesmium erythraeum IMS101
MQTEFNFFQHWYPLSPVEDLDPEIPVSITLLGMGLVIWKPRYSQNYQVFLDVCPHRLAPLSEGRVDEKTGNLMCSYHGWQFNSEGICTDIPQAENQEIIEKNRQNFCVTSLPVRQENDLLWVWPDRKTADLAASTPLPLSPQIDAEKGFVWSSYVRDLEYDWETLVENVADPSHVPFSHHGVQGNRNKARPIVMEILQSTINVIKVSISRGLPTIITFEPPCRLEYEISIGKDGKKIGLVTYCLPVSPGKSRIVAQFPRNFAKIIHRLTPRWWDHIQNRNLVLDGDMVLLNQQEYLLQQKQSSKSWKTAYQLPTSADRLVIEFRNWFDKYSHGQLPWSEVGVSDSNNSLVNNNHGSLLNRYQQHTQHCSSCRQALKNLKRLQIFLITYFVVTVSGVAILPDNLRIKIGLPLIITAVLGMGIYAGLQFWLIPQFYFVDYIHARK

SEQ ID NO: 6427 - protein, 198 aa, Sophora affinis
YDRVMAYSFHEDDHGEVVSEIRRSDLEPLLPVLHYPATDIPQAARFLFQQNRVRMICDCHAKPVNVIQSEELRQPLCLVNSTLRSPLGCHTQYMANMGSIASLVMAVIVNGNDTTRLWGLLVCHHTSPRYVPFPVRYACEFLMQAFGLQLYMEIQLASQMAEKRLLKTQTLLCDMLLRDAPFGIVTQSPNIMDLVKCD

SEQ ID NO: 6428 - protein, 460 aa, Prochlorococcus marinus subsp. marinus str. CCMP1375
MASHDIFMPALSSTMTEGKIVEWLKQPGEKVSRGESVLVVESDKADMDVESFQDGFLAAVLMPSGSTVPVGETIGLIVETEAEIPAVQAANPTKSNVSPPENLSVSKDSKQTSDDSKQTPEDKPSTAEPFTSPKASSASLPAKAIINQGRIVATPRAKKLSTQLGVDLATVSGTGPHGRIQAEDVQKAQGQPITVPWIAESNAPASIPTAPSVVVTESSRNRSQPVEVPKGNSFGNPGETIPFNTLQQAVNRNMEMSLSVPCFRVGYAITTDKLDAFYKQVKPKGVTMTALLAKAVGKTLARHPQLNAAWSNEGMTYPKQINVAVAVAMEEGGLITPVLQNADLTDLFELSRQWADLVKRSRTKQLQPNEYNSGTFTLSNLGMFGVDRFDAILPPNTGGILAVAASLPKVIAGRDGSISVKRQMQVNLTADHRVVYGADGASFLKDLANLIENNPESLSS

SEQ ID NO: 6429 - protein, 195 aa, Zea mays subsp. parviglumis
APLDKVCVLSCGISTGLGASINVAKPPKGSTVAVFGLGAVGLAAAEGARIAGASRIIGVDLNPSRFEEARKFGCTEFVNPKDHNKPVQEVLAEMTNGGVDRSVECTGNINAMIQAFECVHDGWGVAVLVGVPHKDAEFKTHPMNFLNERTLKGTFFGNYKPRTDLPNVVELYMKKELEVEKFITHSVPFAEINKA

SEQ ID NO: 6430 - protein, 267 aa, Zea mays
MDPKMTEVTQMFARFKAAYARNDLNTCVTLLSQLKVHLTQFPSLPPLFQQTPNIVEELKLARDIYEHAVVLSVKLEDQDAFERDFCQLKPYYMDTCGIIPASPEEYPILGLNLLRLLVQNRIAEFHTELELLPAKALEHPCIKHAVELEQSFMEGAYNRVLSARQAVPHETYVYFIDLLAKTVRDEIAGCSEKGYDSLSVSDAKQMLMFSSDQDLHEYITEEHPEWEIKNGAVFFQKAKESQPCKEIPSLQLINQTLSYARELERIV

SEQ ID NO: 6431 - protein, 389 aa, Prochlorococcus marinus subsp. marinus str. CCMP1375
MESTELKEGSHPGINTRVIHHGESFAKTTGTVMPPIFQSSTFRQGNEEGFDYTRSGNPNFRILESVLASLEDCKYSTVFGSGVSAITAIASSLKSGDLVLCEENLYGCTVRLFEKVFSKFGLRTKWLDFSNPSCFDEIKKLSPAMIWLESPTNPLLKVLDLKTICTKAKENQIPVVVDNTFSTAILQKPLDLGASLSLTSTTKYINGHSDALGGAVCTQDSYWHEQMRFAQKALGLQASPFDCWLITRGVKTLPLRLQRQVSNATSLANQLAKNEYVQWISYPFRSDHPQYEIAKKQMAAGGAIITIRLKANLDQTYAFCERLKYFTMAESLGGVESLVCHPATMTHASVSSQTKEKLGISESLVRFSIGCEDVLDLDQDLKQSLEKLK

SEQ ID NO: 6432 - protein, 195 aa, Zea mays subsp. parviglumis
APLDKVCVLSCGISTGLGASINVAKPPKGSTVAIFGLGAVGLAAAEGARIAGASRIIGVDLNPSRFEEARKFGCTEFVNPKDHNKPVQEVLAEMTNGGVDRSVECTGNINAMIQAFECVHDGWGVAVLVGVPHKDAEFKTHPMNFLNERTLKGTFFGNYKPRTDLPNVVELYMKKELEVEKFITHSVPFAEINKA

SEQ ID NO: 6433 - protein, 287 aa, Craterostigma plantagineum
MEAKEEDVRLGANKFSERNPIGTAAQTHDDKDYTEPPPAPLFEPGELSSWSFYRAGIAEFMATFLFLYITILTVMGVNRAPNKCASVGIQGIAWAFGGMIFALVYCTAGISGGHINPAVTFGLFLARKLSLTRAVFYMVMQCLGAICGAGVVKGFYKPTYNLEGGGANVVANGYTKGDGLGAEILGTFVLVYTVFSATDAKRSARDSHVPILAPLPIGFAVFLVHLATIPITGTGINPARSLGAAIIYNHDRAWHDHWVFWVGPFIGAALAALYHVVVIRAIPFKSK

SEQ ID NO: 6434 - protein, 216 aa, Zea mays
MAHRVDNEYDYLFKIVLIGDSGVGKSNILSRFTRNEFCLESKSTIGVEFATRTLQVEGKTIKAQIWDTAGQERYRAITSAYYRGAVGALLVYDITKKLSFENINRWLSELRNHADSNIVIMMVGNKSDLNHLRSVPEEDGRAFAEKEGLSFLETSALEALNVEKAFHTILSDIHQTVSKKALAAQESASTNGRSMHGTTINVAESSTVTKGSCCSS

SEQ ID NO: 6435 - protein, 1469 aa, Gibberella moniliformis
MGQDLPNLRTSPSDATPTRTTRAASSAAPSEQNSIANSDPPFSPWSVGSDKQLGYHSAASDISGDRVFPIRSVISVDPNSSKIASEDYFPTLPERDGRSIPVHIPGAPRADTGSDLRRSDTVPANYHSRAHSERIDTLMRRKNTMSGPMSSIQLDANRHGSSTTPLQLDISTSDNETETEESGPTGHSVPAAAPSGHEADVSSAGQSNADVPLVTSRFTHVVTDDGHAVITGRDGVLQRCEDEPIHTPGAIQTFGALVALREENDGCFVARYISENSERMLGYTPKQLFQLKNFLDILTEEQQDNLLDHIDFIRDEDADPAINGPEVFSLSIRSPKRKSTKLWCAIHINPAHPDLIICEFELDEDAEYPLRPVDELTPDTPHDTLQSNPTLEEIEDSTEVLSKPLRILRSARKRRGEQGAMQVFDIMSQVQEQLSSAPNLEAFLKILVGIVKELTGFHRVMIYQFDSSFNGKVVTELVDTSMTRDLYKGLHFPASDIPRQARDLYKLNKVRLLYDRDQDTSRIVCRTKEDLDVPLDMSHSYLRAMSPIHIKYLKNMAVRSSMSISINAFNELWGLISCHSYGNHGMRVSFPIRKMCRLVGDTASRNIERLSYASRLQARKLINTAPTDKNPSGYIIASSEDLLKLFDADFGLLSIKGETKIMGLVEQSQEALAMLEYLRMRQLTSVVASQDVKEDFPDLRYPPGFQVVAGLLYVPLSVGGNDFIVFFRKGQIKEVKWAGNPYEKFVREGTAGYLEPRKSFKTWNETVVGKCREWNEEQVETAAVLCLVYGKFIEVWRQKEMALQNSKLTRLLLANSAHEVRTPLNAIINYLEIALEGSLDQETRENLARSHSASKSLIYVINDLLDLTKTEEGQNLVKDEVFDLASCIREATGPFLNDAKRKGIHYTVVQHPGLPQFVHGDERRIRQALSNVTANAVAHTHSGYVKVEVFVSEVKDRQAVVDFVIEDSGIGMSASQLDTLFRDLEQVSSEEAPMSGTKLEEMPREMRTLGLGLAVVARIVRNMDGQLRLKSEVGQGSRFVVQLPFLLSNECPSSHGNENLPTSVPTNKSTNSAESANTATSAPLSLTAAPEGEITLVDRVSSMTSAVEGGDASMKGSRASQRSMSSHGSHQSDADRLIDAISTPLSLNDREGSEYPLPASVRSGGSSMRPTSRGAVSLSGRSVSPPQSPVATKPHSEPGSTGVVDSKTPIRAVKIPDEYSDVPQRPQPSEHSRVLFEMKGNDRPVTKAATESITSGGTQMTESQHLEVLVAEDDPINMKILRKRLERVGHGVHHTANGEDCAAAYRERSKEFDVVLMDMQMPIVDGLTSTKMIRSMEASGEHQGHSSLANSNYRIPIFAVSASLVEREKQTYVDAGFDGWILKPIDFKRLNTLLAGISDEEVRKSCLYEPGQWERGGWFLSRAVLGGSVTSDETTPKAVPDAKDKDIGNTVAAEEAKAESDASEPAPST

SEQ ID NO: 6436 - protein, 545 aa, Helicobacter pylori 26695
MLTQLKTYPKLLKHYEEIKEVHMRDWFFKDKERASRYFLQFESLSLDYSKNRLNDTTLKLLFELANDCSLKEKIEAMFKGEKINTTEKRAVLHTALRSLNDTEILLDNMEVLKSIRSVLKRMRAFSDSVRSGKRLGYTNQVITDIVNIGIGGSDLGALMVCTALKRYAHPRLKMHFVSNVDGTQILDVLEKLNPASTLFIVASKTFSTQETLTNALTARKWFVERSGDEKHIAKHFVAVSTNKEAVQQFGIDEHNMFEFWDFVGGRYSLWSAIGLSIMIYLGKKNFNALLKGAYLMDEHFRNAPFESNLPVLMGLIGVWYINFFQSKSHLIAPYDQYLRHFPKFIQQLDMESNGKRISKKGEIIPYDTCPVVWGDMGINAQHAFFQLLHQGTHLIPIDFIASLDKKPNAKGHHEILFSNVLAQAQAFMKGKSYEEALGELLFKGLDKDEAKDLAHHRVFFGNRPSNILLLEKISPSNIGALVALYEHKVFVQGVIWDINSFDQWGVELGKELAVPILQELEGHKSNAYFDSSTKHLIELYKNYNQ

SEQ ID NO: 6437 - protein, 342 aa, Oryza sativa
MAPSFDFAASILLCAEDNTAILDLGEESEEISWVVGVDASLGDLSMDFPLQSDDCIEALLGREEQQHIPMEGYLQRLLLQPDGLDLVAVRSDAIDWIWKVHELYKFGPLTAVLSVNYLDRFLSVFDLPQEEACMTQLLAVASLSLAAKMEETVVPHPLDLQVCDAKYVFETRTIKRMELAVLNALKWRMQAVTACSFIDYYLHKFNDDDTPSTSALSRSVDLILSTCKVAEFLVFRPSEIAASVALVALEEHETSMFERVATCYKNLKKERVLRCYEMIQDKIIMRNIMRQSAGSVFSIPKSPIGVLDAAACISQQSEDTFVGSPATNYESSASSKRRRICR

SEQ ID NO: 6438 - protein, 165 aa, Zea mays
  unsure (1)..(165): unsure at all Xaa locations
MAGTIQSVKARQIFDSRGNRTVEVDVLRSHGTLAWAAAPRGAXTGVYEALEXRDGGSDYLWKGVCKDENNAYTDIVPAMIGMDPTAHTEIDNLMDXHLDGTNNEWGXSKQKLDAHAILAVXIAVEGGCSIITRNASYQLNVNLADNEHHELPVHAFNVINGGTHA

SEQ ID NO: 6439 - protein, 418 aa, Triticum aestivum
  unsure (1)..(418): unsure at all Xaa locations
MADQSPAPIRCKAAVSRAKGAPLVIEDIVVDPPKAYEIRMKVICTSLCHTDITFWRGKEDFPLPPVFPRILGHEAYGVVESVGERVEGFAVGDTVVPTFLGQCDSCAGCASAGSNMCSALPFVVGPGMRRDGTTRFRDSQGEPLHDFLAVSSFSQYTVVDVXQVVKVDPAVPPKLACLLGCGAGTGVGAAWRLAKVQPGSSVVIFGLVLXTIKXXXXXXQGAKMCGAAKIIGVDLNPDKEELGKSSFLRGTRHGENIWLISKCYLLVLQAXKFGVTDFVNPSKLGESPLSQVIIEMTGGGADYCFECIGVASVMTEAFRSAKQGNGKTVILGLEKDGKPISLPSIEFLFGKCVMGSLFGGIKPKTDIPILAKKFMIKELELEKLITHEVGLQEINTAFDLLLQGKSLRCIIWMDKLAA

SEQ ID NO: 6440 - protein, 328 aa, Magnaporthe grisea 70-15
MAKTSIKLNSGYEMPLVGFGIWKVPVDKTAQAVYDAIKLGYRQIDGAYDYTNSKEAGEGVRRAIEEGIVKREDLFITSKLWNNYHKHEHAIEMAKHEVDTWGIGYLDLFLIHFPISLEYISHSKMPYPCFWPDREKSRSTPLQYTPVAETWAALESLVKTDSNPDGILRSIGVANFRAQLLTDLWGSAKIKPAVNQIEHHPYLVQPQLLAFLKDHGIAITAYSSFGPQSFVELDHPRVSKVEPLFTHPTIKAIADKHGRTGAQVLLRWATQRDIVVIPKSNNVDRLKQNLDCVSFDLSDDEVKQISDLDCGVRFNDPADLSPPIYIFD

SEQ ID NO: 6441 - protein, 724 aa, Neurospora crassa
MSSYQAIPPKKRSGAGLDFASSFRSASPLAQEVLARDLAEFSDDAVDEVDNEALSVSDNEDETSGPTLYRRPSGVAFGAIRPALAGPGGLEEAPILTRAERTRSRDEERSLLRDNHILPPKHDRPPQKPTLFRALYTRIFSTKVPRRISDEEVAASPIQIVIAPPTPTVTETEPLLGERSLRHRGAIGHGDEPSSHDHDHEHEHLNEQWEAAVAAGQIKTTWQREAKTIAVYSRSLIVTFLLQYSLNVTSIFAVGRLGTLELGAVSLATMTASITCYAPIQGLATSLDTLCAQAYGSGHKTLVGLQLQRMVYFLLLLLIPVAAIWLNAESILAAMIEKDSAKLAAQYLRVILLGTPAYAMFESGKRFVQAQGLFHATTYVLLIAAPANVLLNWLFVWKLGWGFIGAPLAVAVTQNMLPLLLLLYVWKVDGRQAWGGFRKAALKNWGPMVQLALPGMVMVVAEWFAFEILTLASGRIGVAHLAAQSVLVTVTSTTFQIPFPLSIAGSTRVANLIGAKLVDAAKTSAKVTIVGGVIVGLFNVTLLSVFRNQIALLFTQDPEVIELVAQTLPVCAIMQLFDGMAAVSHGLLRGIGRQEIGGYVNLIAYYVVALPLSFGLGFSLGWGLVGLWMGVTFGLLLFVYPSSFPPRRPPPFEQNTDLELIPYAGCLWLSIGSSGTPIGNWLPGRQKTEMPLVSSTRVSFNIQAFRAVPHAAIRTGAYHCVPRQ

SEQ ID NO: 6442 - protein, 562 aa, Acidithiobacillus ferrooxidans
MADTITFQIEGMTCDSCAVHTRQALERVPGVRSASVSYPQQRAEIEVDTGVGLDPLVAAVAALGYRARLPDTPNKPSGLLNKALGWQDGETSVACDDEALHIAVIGSGGAAMAAALKAVEQGARVTLIERGTIGGTCVNVGCVPSKIMIRAAHIAHMRRESPFDGGIAAAVPVIDRGKLLAQQQARADELRHVKYEGILDGNPAITVLHGEARFKSGHSLNVQLNDGGEREVAFDRCLIATGASPAIPPIPGLKDTPYWTSTEALVSDTIPERLAVIGSSVVALELAQAFARLGSQVTILARGTLFFREDSAIGEAITAAFRADGIEVLEHTQASHVAYAVGEFVLATGNGELRADKLLIATGRAPNTRSLALEAAGVAVNAQGAIVIDQGMRTNSPNIYAAGDCTDQPQFVYVAAAAGTRAAINMMGGSAALDLTAMPAVVFTDPQVATVGYSEAEAHHDGIETDSRTLTLDNVPRALANFDTRGFIKLIAEKGSGRLLGAQVVAPEGGEVIQVAALAIRNRMTVQELADQLFPYLTMVEGLKLAAQTFNKDVKQLSCCAG

SEQ ID NO: 6443 - protein, 409 aa, Vibrio vulnificus CMCP6
MELTTTVSELRYALDTFFFLISGALVMWMAAGFAMLEAGLVRSKNTTEILTKNFCLYAIACTTYLVVGYNIMYVDNSEGGWLPSIGALIGSQAEGADHSLESDFFFQVVFVATAMSVVSGAVAERMKLWSFLLFSAILTAFIYPVEGYWTWGGGFLSAAGFSDFAGSGIVHMAGAAAALAGVLLLGARKGKYGKNGEVYPIPGSNMPLATLGTFILWFGWFGFNGGSQLMVSDFENATAVGQIFLNTNAAAAAGAITALLVCKTTWGKADLTMILNGALAGLVAITADPLSPSPLYAVAIGAVAGALVVFSIVGLDKLKIDDPVGAISVHGVCGFFGLMVVPISNGDASFLSQLFGAAVIFAWVFGASLAVWAVLKATIGIRVSEDEEMEGMDMHDCGVGAYPEFVTVK

SEQ ID NO: 6444 - protein, 507 aa, Staphylococcus aureus subsp. aureus Mu50
MTMSQQDKKLTGVFGHPVSDRENSMTAGPRGPLLMQDIYFLEQMSQFDREVIPERRMHAKGSGAFGTFTVTKDITKYTNAKIFSEIGKQTEMFARFSTVAGERGAADAERDIRGFALKFYTEEGNWDLVGNNTPVFFFRDPKLFVSLNRAVKRDPRTNMRDAQNNWDFWTGLPEALHQVTILMSDRGIPKDLRHMHGFGSHTYSMYNDSGERVWVKFHFRTQQGIENLTDEEAAEIIATDRDSSQRDLFEAIEKGDYPKWTMYIQVMTEEQAKNHKDNPFDLTKVWYHDEYPLIEVGEFELNRNPDNYFMDVEQAAFAPTNIIPGLDFSPDKMLQGRLFSYGDAQRYRLGVNHWQIPVNQPKGVGIENICPFSRDGQMRVVDNNQGGGTHYYPNNHGKFDSQPEYKKPPFPTDGYGYEYNQRQDDDNYFEQPGKLFRLQSEDAKERIFTNTANAMEGVTDDVKRRHIRHCYKADPEYGKGVAKALGIDINSIDLETENDETYENFEK

SEQ ID NO: 6445 - protein, 184 aa, Pseudomonas aeruginosa PAO1
MKPRVLLSVLALAGLPLSGWAADCPELLQGQLTKLRSKESIDLCQRYAGKPLVVVNTASHCGFTPQFKGLEALYQRYKGQGLEVLGVPSDDFKQEAADTAETAKICYGNYGVTFAMTQPQHVRGDEAIPLFRQLAEQSGQAPRWNFYKYVVDRQGRVVAQFSSKTTPDDPQLQAAIEKAIASQP

SEQ ID NO: 6446 - protein, 191 aa, Zea mays
  unsure (1)..(191): unsure at all Xaa locations
ITMDPTKFRPSSSHDTTVTTTNAGAPVWNDNXALTVGPRGPIPAGDYHLIEKVAHFARERIPXRVXHARGASAKVFFECTHDVTSLTCADFLRAPGVRDPRDRGLLDVIHXRGSPEKIPDPPGFPGNLTPRREIGPGGKKFPRFFIREGIKFPEXPAFKPNRGSNGKKWGGLKFLXHLPENGKLFFLLLRG

SEQ ID NO: 6447 - protein, 349 aa, Clostridium tetani E88
MFNMINLLDLSLEDLKKWMIENKEKEFRAKQVLDWVYKGVYNFEAMKNIPKVITNKLQENFYLSVPSVVQKYVSKDESTVKFLFKYNDGNIIESVVMKYKHGNTICVSTQVGCKMGCTFCASTIGGIVRSLSHGEILGQVLKAQEETGERISNIVMMGSGEPLDNYDNSLNFIRMVNAENGLNIGQRHITLSTCGIVPKIRQLAEENLQITLAISLHAPNDNIRRKTMPIASVYSVEELIEACNYYINKTNRRITFEYALVSNLNDKEVHAEELATLLKGMLCHVNLIPVNKIDEKDFKSSSTNRIKNFSNILLKSGIQTTIRREMGSDINAACGQLRRRYVKNNSKEV

SEQ ID NO: 6448 - protein, 252 aa, Prunus microcarpa
AHYKSEADVGNAIAEAIQSGLVKREELFITSKASNHGHVVEACKNSLKKLQLDYLDLYLVHYPLATKHSGVGTTASLLDENKVLDIDVTVSLETTWHDMEKTVDLGLVRSIGLSNYELFLTRDCLSYAKIKPQVSQFETHPYFQRESLVRFCKKHGVIPMAHTPLGGATANVKAFGSISPLEDPVLIGLAKKYQKSVAQIALRWNLERGTPVIPKSSKVERLKENLEVLNFKLEKEDIELINTIDKKSRTTL

SEQ ID NO: 6449 - protein, 252 aa, Prunus lusitanica
AHYRSEADVGNALAEAFETGLVKREELFITSKASNHGHVVEACKNSLKKLQLDYLDLYLVHYPLATKHSGVGTTASLLDENKVLDIDVTVSLESTWHDMEKTVSLGLVRSIGLSNYELFLTRDCLSYAKIKPQVSQFETHPYFQRETLVRFCRKHGVCPMAHTPLGGATANVKAFGSISPLEDPVLRALAKKYKKSVAQIALRWNLDRNTPVIPKSSKIERLKENLEVLNFKLEKEDIELINTIDKKSRTTL

SEQ ID NO: 6450 - protein, 212 aa, Oryza sativa (japonica cultivar-group)
MGFPVCCYSELLLPKQLLHLLLLLGYIRRFLLWAFHAVGLGDLLDLGDEQQAVLQDHAREHRAPAQALPPQQQHRRAEFRTVPAMVIEEVLPVVRFDELVAAAPAVCGGGDCAVCLSGIGGGDEVRRLSNCRHVFHRGCLDRWMEHDDQRTCPLCRAPLIPDEMASALWAAAGVPDASDFDFSYFGAPLTPMPTPTLLRPHELLLTGLGGYQ

SEQ ID NO: 6451 - protein, 252 aa, Prunus virginiana
AHYKSEADVGNALAEAFDTGLVKREELFITSKASNHGHVVEACRNSLKKLQLDYLDLYLVHYPLATKHSGVGTTASLLDENKVLDIDVTVSLESTWHDMEKTVSLGLVRSIGLSNYELFLTRDCLSYAKIKPQVSQFETHPYFQRETLVRFCRKHGVCPMAHTPLGGSTANVKSFGSISPLEDPVLHGLAKKYKKSVAQIALRWNLDRNTPVIPKSSKIERLKENLEVLNFKLEKGDIELINTIDKKSRTTL

SEQ ID NO: 6452 - protein, 106 aa, Zea mays
IKRRGGYGKMVLRELEAQRELVDYGGSFQPNAPPPYERSERKRGHGDSHRNDRGDYQRKRYRNDDRSAPEESKRAPDSDPAEKNPRFREKGDSDEEEDDYDGKRRR

SEQ ID NO: 6453 - protein, 280 aa, Glycine max
EIVGPKGIYVLISRFLQLYFNPATVKMLSNLKVLVIALLLKVIMKRRFSIIQWEALALLLIGISVNQLRSLPEGTTALGLPVTMGAYIYTLIFVTVPSLASVYNEYALKSQYDTSIYLQNLFLYGYGAIFNFLGILGTVVVKGPSSFDILQGHSKATMLLIANNAAQGILSSFFFKYADTILKKYSSTVATIFTGIASAVLFGHTLTMNFVIGISIVFISMHQFFSPLSKVKDEQNGVLELHDVHDKQRSKESFINMAAGANEEATHRVGHDERQPLLPS

SEQ ID NO: 6454 - protein, 702 aa, Mesorhizobium loti MAFF303099
MAKQASKLAGTAATIHDQKLQRGEGGELHQTASGSTAVLTTAQGGPVSDDQNSLRIGARGPTVLEDFHFREKIFHFDHERIPERVVHARGYGAHGYFETYESLAKYTRADIFQRAGEKTPAFVRFSTVAGNKGSADLARDVRGFAVKLYTQEGNWDIVGNNMPVFFIQDAIKFPDLIHAAKAEPNSDFPQAQTAHDNFWDFISLTPESMHMIMWAMSDRAIPRSLRFMEGFGVHTFRLLNAKDESTFVKFLWKPKLGLQSVAWNEAVKINGADPDFHRRDLWDAIHAGNFPEWELQLQLFDQAFADSFDFDILDPTKLIPEEVLPPIAVGRLVLDRMPDNFFAETEQVAFMTQNVPPGVDFSNDPLLQGRNFSYLDTQIKRLGSTNFTHLPINAPKCPFHTFQQDGHMAMRNPVGRANYQPNSWDEGPRESPQKGFRSFAEAEAGPKARLRAESFADHYSQARQFYISQHPVEQGHIASALTFELSKVHTPVIRERIVSHLLNIDDALARKVADALGLKAMPKPADAGAPTRTDLPASDALSILKNGPGRFEGRKLGILVTDGTDAALLNALKQALTKAGAKFEIIAPKVGGAKASDGSWMDAQQMIAGAPSVLYDAIALLAAKPAMAGLLRESTARDFVADAFAHCKFIGFVEAAAPLLDKAGVVEDEAVIPLASAKDVAGFITRLGDLRLWAREPKVKLG

SEQ ID NO: 6455 - protein, 361 aa, Nicotiana tabacum
MKALILVGGFGTRLRPLTLSVPKPLVEFANKPMILHQIEALKAVGVTEVVLAINYQPEEMLNFLKEFEANLGIKITCSQETEPLGTAGPLALARDKLIDDSGEPFFVLNSDVISEYPFKEMIAFHKSHGGEASLMVTKVDEPSKYGVVVMEESTGQVERFVEKPKLFVGNKINAGFYLLNPSVLDRIQLRPTSIEKEVFPKIAAEEKLYAMVLPGFWMDIGQPRDYIPGLRLYLDSLKKNSSPKLASGSHIVGNVIVDESAKIGEGCLIGPDVAIGSGCVIESGVRLSRCTVMRGVRIKKHACISSSIIGWHSTVGQWARVENMTILGEDVHVCDEIYSNGGVVLPHKEIKSSILKPEIVM

SEQ ID NO: 6456 - protein, 482 aa, Vibrio vulnificus CMCP6
MAYGPFPKGDRIMIKFGTGGWRAFIGEEFTKDNVRLVAQAVANIINNEQVAERGFVIGYDRRFLSDKAGAWFAEVLAANGIVVSFINKFVPTPIVMFKAKEMGCAYSACITASHNPADYNGVKVFIEGGRDADEVITQKIEAQIAHLTLDQVQSVDFEQAVEDKQIVIINPMNEFVDSIINFIDIEAIKKANLRVLIDPMFGVAKNALQTVLINGRCDVDVINDGKNPDFGGLMPSPSAATLYRLKHLVAAQGYDIGIGTDGDADRLGIIDEKGNFIHPNEVLILLYYYLLKYKGWTGSVVRNIATTHLLDKIAADHGEKCFEVPVGFKHISSQMEADDSLIGGESSGGLTIRGHIKGKDGVFASSLLVEMISVTGKKLSELLEEIYSKYGYAYMAEGDCKFKPAAKQSLYDKIYIEKQLPEFGFEIEKVSYDDGAKVYFKNGGWVIARFSGTEPLLRIFAEMQDKETAELVVHQFKEFLAL

SEQ ID NO: 6457 - protein, 356 aa, Medicago sativa subsp. X varia
MKKGNLGLGLKLSVPQTDQVAFAKFLTESGTFKDGDLLVNRDGVRIVSETEVEAPPPIKATDNQLSLADIDIVKVVGKGNGGVVQLVQHKWTNQFFALKIIQMNIEESVRKRIAKELKINQAAQCPYVVVCYQSFYDNGVISIILEYMDGGSMADLLKKVKTIPEPYLSAICKQVLKGLIYLHHERHIIHRDLKPSNLLINHTGEVKITDFGVSAIMESTSGQANTFIGTYNYMSPERINGSQRGYNYKSDIWSLGLILLECAMGRFPYTPPDQSERWESIFELIETIVDKPPPSAPSEQFSSEFCSFISACLQKDPGSRLSAQELMELPFISMYDDLHVDLSAYFSDAGSPLATL

SEQ ID NO: 6458 - protein, 442 aa, Synechocystis sp. PCC 6803
MKPKNFPLARYVLGAMLAFLFVGVAQAQTETTSIAEVTYAINNLFLLAAAVLVLFMQAGFAMLEAGLSSHKNTVNVLFKNTFDVCVGVLLYFLFGYSLMYGENPVLGGFFGWGGFGITNNLDNVEGLSPQVDWLFQAAFAATAATIVSGAVMGRMYFKAYLIYSAVITGLVYPISGHWKWGGGWLDKLGFHDFAGSLLVHSVGGFAALAAVVVMGPRIGRFEGNKINSLGYQGITSSSLGVFILWVGWYGFNPGSQLAFVGALNTNTTMLIAVNTTLSAAAGGLAALAFDWITENKRKPNLLVTLNGILGGLVGITAGCDTVSNWSAIAIGVVAGILSVLGTKLLDRLRIDDGVGAWPVHGLCGIWGGIAVGIFSTNVEHKLSAQIVGSLVIPFWAFITMFFLFYVMDLWGILRVKPSQEKVGLDIVEHGQTEKGVEIAFED

SEQ ID NO: 6459 - protein, 488 aa, Listeria monocytogenes EGD-e
MTDRKNLTTNQGVPVGDNQNSMTAGRKGPTLIEDYVLIEKLAHFDRERVPERVVHARGAGAHGKFVTKKSMKKYTMAKFLQEEGTETEVFARFSTVIHGQHSPETLRDPRGFSVKFYTEEGNYDFVGNNLPVFFIRDAIKFPDVIHSLKPDPRTNIQDGNRYWDFFSLTPEATTMIMYLFSDEGTPASYREVRGSSVHAFKWINEEGKTVYVKLRWVPKAGIVNLSTEQASQIQAKEFNHASRDLYEAIENGDYPEWDLYVQVLDPKDLDSFDFNPLDATKDWFEDVFPYEHVGTMTLDRNPDNIFAETESVGFNPGVLVRGMLPSEDRLLQGRLFSYSDTQRHRVGPNYLQLPINSPKAPVANNQRDGHMPFKQQTSSINYEPNSYDTEPKENPAFIEPEQEIRGDISGRLIAEKPNNFGHAKEVWDRYSNAERAALVKNIVDDWSQVREDIKIRNLRNFYQVDPEFASRVAAGTGINLEEHVTDLK

SEQ ID NO: 6460 - protein, 159 aa, Streptococcus pyogenes SSI-1
MPNLYDFTVKAQDGSDISLVNYKEKVVLVVNTATKCGLTPQYQALQALYDTYHDKGFEVLDFPCNQFLNQTPGEAEEINRFCSLTYHTTFPRFAKIKVNGKDADPLFTWLKEEKSGPLGKRIEWNFTKFLIDQNGQVIKRYSSKTDPKLIEEDLKALLG

SEQ ID NO: 6461 - protein, 209 aa, Orchis italica
MGRGNTEIKRIENSTNRQVTFSKRRSGIIKKAREISVLCDAQVSLVIFSSLGKLSEYCSPSTTLSKMLERYQQNSGKKLWDATHENLSAEIDRIKKENDTMQIELRLKGEDLNSLTPKELIPIEEGLQNGLTSVREKQMDFLKMLKKNERMLEEENKRLKYLLQHQQLAIEGSMRELEISYHQKDPEYADQMPMTFRVQPFQPNLHGNN

SEQ ID NO: 6462 - protein, 252 aa, Prunus emarginata
AHYKSEADVGNALAEAFETGLVKREELFITSKASNHGHVVEACKNSLKKLRLDYLDLYLVHYPLATKHSGVGTTASLLDENKVLDIDVTVSLETTWHTMEKTVYLGLVRSIGLSNYEFFLTRDCLSYAKIKPQVSQFETHPYFQRESLVRFCKKHGVTPMAHTPLGGATANVKAFGSISPLEDPVLLGLAKKYKKSVAQIALRWNIERDTAVIPKSSKVERLKENLEVLNFKLEKEDIELINTIDKKSRTTL

SEQ ID NO: 6463 - protein, 161 aa, Triticum aestivum
MAKNTCKLCFRRFASPRALAGHMRSHSVRNLAAKQQISSASSASASFTAAADDDVSFKKPLPIYALRENPKRSLRVTDVAFSDRESEAESTPAHPKRAHAVAAGAETEPLSSVSDAATPEEDVALSLMMLSRDSWASMGRGDSDGDYFDDRSDWGYTAPAS

SEQ ID NO: 6464 - protein, 517 aa, Zea mays
MAMAAIASPSSRTLIPPRHHGAAPSPSTSGDSSLRLLCAHPRHGRRGRAMSVSTPAARSRPFVFSPRAVSDSKSSQTCLDPDASTSVLGIILGGGAGTRLYPLTKKRAKPAVPLGANYRLIDIPVSNCLNSNISKIYVLTQFNSASLNRHLSRAYGNNIGGYKNDGFVEVLAAQQSPDNPNWFQGTADAVRQYLWLFEEHNVMEFLILAGDHLYRMDYEKFIQAHRETDADITVAALPMDEKRATAFGLMKIDEEGRIIEFAEKPKGDQLKAMMVDTTILGLDDERAKEMPYIASMGIYVFSKDVMLQLLREQFPGANDFGSEVIPGATSIGKRVQAYLYDGYWEDIGTIEAFYNANLGITKKPIPDFSFYDRSAPIYTQPRHLPPSKVLDADVTDSVIGEGCVIKNCKIHHSVVGLRSCISEGAIIEDTLLMGADYYETEADKKLLAENGGIPIGIGKNSHIRKAIIDKNARIGDNVKILNADNVQEAARETDGYFIKGGIVTVIKDALLPSGTVI

SEQ ID NO: 6465 - protein, 630 aa, Magnetococcus sp. MC-1
MCGLSAILDLTGQRLPEAEQLTAMTRALAHRGPDGEGMHREPGVGLGHRRLSIIDLAGGAQPLWNEDRSVAVVFNGEIYNFPDLMQRLQGLGHQFHSRSDTEVIVHAWEQWGEQCVEALQGMFAFALWDRCQGVLFVARDRLGIKPLYYGFSEDGWLLVGSELKALTAHPGLSRSLDPKGVMDYFAYGYIPDPHSIYRQVKKLEPGYCARFTLGSGDWRLRCYWDLSFAAQPLTEAAALQQLQELLGQTVQSHTLADVPLGAFLSGGVDSSLITALLAKQSQTPLQALTVAFTGSREDEAPHARAVAQHLGVQQQLLTVDPLDFERLERLPGLYDEPFADSSAWPTFLLCEAAASRMKVVLSGDGGDELCAGYSRYRLFMAEQQVRQRVPSWLRRGLFGPMGMLYPKLDNAPRWLRAKSTLQALGEGPLEGLFRGASMMDPAMGQGLLAPDLMLLDYHPIEHFYRLNARLPEQVAFHDRMLYLDFKTFLAGRVLTKVDRASMAVGLEVRVPLLDHRLVEWAGRLPWCLKMQGGQGKYLLKKLAAQQVPATAVYRSKQGFIPPLAAWLRGPLQERLQDRLSSRVITESGLFHPRWIHWMLEQHRKKKQDLSMPLWSLLMFEGMLRKAQNKG

SEQ ID NO: 6466 - protein, 252 aa, Prunus emarginata
AHYKSEADVGNAIAEAIQRGLVKREELFITSNASNHGHVVEACKNSLKKLRLDYLDLYLVHYPFATKHSGVGTTASLLDENKVLDIDVTVSLETTWHTMETTVYLGLVRSIGLSNYEFFLTRDCLSYAKIKPQVSQFETHPYFQRESLVRFCKKHGVTPMARTPLGGATANVKAFGSISPLEDPVLLGLAKKYKKSVAQIALRWNIERDTAVIPKSSKVERLKENLEVLNFKLEKEDIELINTIDKKSRTTL

SEQ ID NO: 6467 - protein, 252 aa, Prunus emarginata
  unsure (1)..(252): unsure at all Xaa locations
AHYKSEADVGNALAEAFETGLVKREELFITSKARHHGHVVEACKNSLKKLQLDYLDLYLVHYPLATKHSGVGTTASLLDENKVLDIDVTVSLESTWHDMEKTVSLGLVRSIGLSNYELFLTRDCLSYAKIKPQVSQFETHPYFQRETLVRFCRKHGVCPMAHTPLGGATANVKAFGSISPLEDPVLRALAKKXKKSVAQIALRWNLDRNTPVIPKSSKIERLKENLEVLNFKLEKEDIELINTIDKKSRTTL

SEQ ID NO: 6468 - protein, 523 aa, Medicago truncatula
MLVELAVTLLVIALFIHLRPTPTAKSKALRHLPNPPSPKPRLPFIGHLHLLDNPLLHHTLIKLGKRYGPLYTLYFGSMPTVVASTPDLFKLFLQTHEATSFNTRFQTSAISRLTYDNSVAMVPFAPYWKFIRKLIMNDLLNATTVNKLRPLRSREILKVLKVMANSAETQQPLDVTEELLKWTNSTISTMMLGEAEEVRDIARDVLKIFGEYSVTNFIWPLNKFKFGNYDKRTEEIFNKYDPIIEKVIKKRQEIVNKRKNGEIVEGEQNVVFLDTLLEFAQDETMEIKITKEQIKGLVVDFFSAGTDSTAVATEWTLAELINNPRVWKKAQEEIDSVVGKDRLVDESDVQNLPYIRAMVKEVFRLHPPLPVVKRKCTEECEINGYVIPEGALILFNVWQVGRDPKYWEKPLEFRPERFLENASQGEGEAASIDLRGQHFTLLPFGSGRRMCPGVNLATAGMATLLSSIIQCFDLQVPGPHGQILKGDDVKVSMDERPGLTVPRAHNLMCVPLARAGVAAKLLS

SEQ ID NO: 6469 - protein, 265 aa, Streptococcus pneumoniae TIGR4
MKIGFIGLGNMGASLAKSVLQTRTSDEILLANRSQAKVDAFIADFGGQASSNEEMFAEADVIFLGVKPAQFSELLSQYQTILEKRESLLLISMAAGLTLEKLASLIPSQHRIIRMMPNTPASIGQGVISYALSPNCRAEDSELFYQLLAKAGLLVELGESLIDAATGLAGCGPAFVYLFIEALADAGVQTGLPREIALKMAAQTVVGAGQLVLESQQHPGVLKDQVCSPGGSTIAGVASLEAHAFRGTVMDAVHQAYKRTQELGK

SEQ ID NO: 6470 - protein, 251 aa, Prunus emarginata
AHYKSEADVGNAIAEAIQRGLVKREELFITSKANHGHVVEACKNSLKKLRLDYLDLYLVHYPLATKHSRVSTTASLLDENKVLDIDVTVSLETTWHTMEKTVYLGLVRSIGLSNYEFFLTRDCLSYAKIKPQVSQFETHPYFQRESLVRFCKKHGVTPMAHTPSGGATANVKAFGSNSPLEDPVLLGLAKKYKKSVAQIALRWNIERDTAVIPKSSKVERLKENLEVLNFKLEKEDIELINTIDKKSRTTL

SEQ ID NO: 6471 - protein, 252 aa, Prunus emarginata
SSLQSEADVGNAIAEAIQSGLVKREELFITSKASNHGHVVEACKNSLKKLRLDYLDLYLVHYPLATKHSGVGTTASLLDENKVLDIDVTVSLETTWHDMEKTVSLGLVRSIGLSNYELFLTRDCLSYAKIKPQVSQFETHPYFQRESLVRFCKKHGVTPMAHTPLGGATANVKAFGSISPLEDPVLLGLAKKYKKGVAQIALRWNIERDTAVIPKSSKVERLKENLEVLNFKLEKEDIELINTIDKKSRTTL

SEQ ID NO: 6472 - protein, 499 aa, Cytophaga hutchinsonii
MILDGWGLGTNPKVSAIAAAKTPFVDSLFVNYPHSKLEASGLAVGLPVGQMGNSEVGHMNIGAGRIVYQDLVKINLAVENNTLADEPAIKDAFNYAKTNNKKVHFIGLVSDGGVHSHVNHVKGLCNIANQYGLKDVYVHAFTDGRDCDPKSGLGFVKELQESMAKSTGKIASLVGRYYAMDRDNRWERVKLAYDVMVNGEGTHAADALKAIEESYAAGVTDEFIKPVVLVDANDKPIAKIEPGDVVICFNFRTDRGREITVALTQKDFHEQNMFKLDLYYVTMTNYDDTFNNVKVIFDKDNLSNTLGEVLQGASKKQIRIAETEKYPHVTFFFSGGREEPFKGEKRLMAASPKVATYDLAPEMSANEIKEKIVVELKSKDPDFVVLNFANPDMVGHTGVFEAAVKACEVVDSCTEAVVTTALENGYTAIVIADHGNADYMINEDGTPNTAHTTNLVPCILIDNEYKKPLKDGKLGDLAPTILALMGIEKPKEMTGESLL

SEQ ID NO: 6473 - protein, 389 aa, Anabaena variabilis ATCC 29413
MKAMILAAGKGTRVRPITYTIPKPMIPILQKPVMEFLLELLRQHGFDQIMVNVSHLAEEIENYFRDGQRFGVQIAYSFEGKIDDEGKLVGEAIGSAGGMRRIQDFSPFFDDTFVVLCGDALIDLDLTAAVKWHKSKGSIATIITKTVPEEEVSSYGVVVTDENSRVKAFQEKPSIEEALSTNINTGIYIFEPEVFNYIPSGVEYDIGGQLFPKLVEIGAPFYAIAMDFEWVDIGKVPDYWRAIRGVLQGEIKNVQIPGHEVAPGIYTGLNVAVNWDKVDITGPVYIGGMTRIEDGAKIVGPAMIGPNCWICGEATVDNSVIFEWSRLGHGARLVDKLVFGRYCVDKTGAAIDVQAAALDWLITDARQTPPEHTPVERQAIAELLGTNAI

SEQ ID NO: 6474 - protein, 560 aa, Candida albicans SC5314
MSELSIKTIETKPFQDQKPGTSGLRKKVTVFQQPHYTENFIQSILDAIPEGSQGSTLVIGGDGRFYNDVVIQLIIKIAAANGVKKLILGQNGILSTPATSHVIRIKQATGGIILTASHNPGGPQNDLGIKYNLGNGGPAPESVTNKIYEISKQINQYKLIELPNVDLSKIGTIVEGPIEIEIIDSTKDYVDMLKSIFDFPLIKSFIDKATKEQDFKVLFDALNGVTGPYGYEIFVNELGLPESSIQNYKPLPDFGGLHPDPNLTYAHTLVERVDKENIAFGAASDGDGDRNMIYGAGTFVSPGDSVAIISEYADSIPYFQKQGVYGLARSMPTSGAIDLVAANKNLQCYEVPTGWKFFCSLFDAKKLSICGEESFGTGSNHIREKDGLWAIVAWLNVLAGYNKQNPQSKTSIEIVQNSFWEKYGRTFFTRYDYENVSSEGAQKLIDLLQSIVNEKSVGDELAPGYIIKQADNFSYTDLDGSVSSNQGLFIKFDNGLRFIVRLSGTGSSGATVRLYLEKHCDDKSKYHLKVDEYLTNEIQFVLELLKFKQFLNKEEPDVRT

SEQ ID NO: 6475 - protein, 176 aa, Pseudomonas aeruginosa UCBPP-PA14
MAMLVTQIATAAAALAWMFAEWITHGKPSALGIASGVVAGLVAITPAAGTAGPMGALVIGLASGVICFFAATSLKRALKYDDSLDAFGVHAVGGIVGALLTGIFAAPSLGGFGSVEDIGAQFFVQFKGVAFTVVYTAVVTFVILKVLDLVMGLRVTEEEEAVGLDLALHNERGYNL

SEQ ID NO: 6476 - protein, 198 aa, Candida albicans SC5314
MVNGPAELRRKLVIVGDGACGKTCLLIVFSKGTFPEVYVPTVFENYVADVEVDGRKVELALWDTAGQEDYDRLRPLSYPDSNVILICFSVDSPDSLDNVLEKWISEVLHFCQGVPIILVGCKSDLRDDPHTIEALRQQQQQPVSTSEGQQVAQRIGAADYLECSAKTGRGVREVFEAATRASLRVKEKKEKKKKCVVL

SEQ ID NO: 6477 - protein, 445 aa, Leuconostoc mesenteroides subsp. mesenteroides ATCC 8293
MIEAFEKSQEPWADVEKYVGRYAGMDFSPDIVDHAKGTYLFTESGEKILDFTSGQMSSTLGHSNPEIVTTLQQTVQRLDHLYSGMLSRPNINLSKNIASKTGENLKKVIPLSTGSEVNEAALRMAKLVTGKFEVVSFNKSWHGVTQASAGATYASARKSGAPTSPGQLSIPTPYTYRPNFFNSEGEYDWHKELDYGFEMVDAQSVGSLAACIVEPIVSGGGILVPPKGYLAALKEKCRERGMLLIFDEAQTSLGRTGEWFAYQYDDVEPDILTLSKTLGSGLPLAALVTTDKIEKKAHEKGFLFYTSHVNDPLVAAVGCTVMNIIERDNLCQVTKEKGNYLHDGLQKLVDEYDIVGDARGRGLLQGLEIIKSKSNKERSEFIGDEITKRCYKLGLHMNIVNLPGMGGVFRIAPPLTVSYEELDSGLAILEQSIKSVQNDINLGNL

SEQ ID NO: 6478 - protein, 568 aa, Xanthomonas campestris pv. campestris str. ATCC 33913
MTHSVEDIKSTSRRLRGSLEQSLADPVTGALREDDQTLIKYHGSYQQDDRDIRDERRRQKLEPAYQFMIRTRTPGGVISPSQWLALDGIATRYANHSLRITTRQAFQFHGVIKRELKATMQAINATLIDTLAACGDVNRNVQVAANPLRSQAHATLYADAARVSEHLLPNTRAYYEIWLDEERVSGSGAEDEPIYGDRYLPRKFKIGFAAPPHNDVDVFANDLGFIAILREGQLLGYNVSIGGGMGASHGDAETWPRVANVIGFVTGDQLLDIATAVVTTQRDLGNRAVRKRARFKYTIDDHGLDTIVAEIERRAGFSLQPAQPFAFAHNGDRYGWVEGEQGDWHLTLSLPAGRIADTDTAAHLSGLRAIAQLQMGEFRMTPNQNLVIAGVPAEQRAQIDQLVAQYGLDAGNLAPTALARGAMACVALPTCGLAMAEAERYLPDFSAALQPLLERHGLAQTPIVLRLSGCPNGCSRPYLAEIALVGKAPGRYNLMLGGDRRGQRLNTLYRENINEADILAALEPLLARYAAERDRHTDEGFGDFLHRSGLIALPPYPTHRHLDLELLA

SEQ ID NO: 6479 - protein, 350 aa, Moorella thermoacetica ATCC 39073
MKALVLFGPNDVRLVEKPVPKPGPGEVLVRVAACGICGTDVKIITKGMPKMPPYGEFTFGHEWAGTIVALGETVDEFQVGDRVAIEAHKGCGRCENCIDGKYTACLNYGRLDKGHRAAGMTVDGGFAEYAVQHVNSVYKIPDNITFNEATYVTTAGCALYAIDKSGGYIAGDTVLVIGPGPIGLSVVQGARSLGAEKIILMGTREDRLVKGRELGATHTINIREVADPVAEVMAITGGKGCKRVFECAGNSQSFEYGIKAAKKGGVMVLVSFYKEPVMANLDYVVLNQISLLTVRGEGNQNCKRALSLMAQGKIDAKPIMTHAFPLEEFQKGLDYFVNRKDGAMKVVINP

SEQ ID NO: 6480 - protein, 352 aa, Thermoanaerobacter ethanolicus
MKGFAMLSIGKVGWIEKEKPAPGPFDAIVRPLAVAPCTSDIHTVFEGAIGERHNMILGHEAVGEVVEVGSEVKDFKPGDRVVVPAITPDWWTSEVQRGYHQHSGGMLAGWKFSNVKDGVFGEFFHVNDADMNLAHLPKEIPLEAAVMIPDMMTTGFHGAELADIELGATVAVLGIGPVGLMAVAGAKLRGAGRIIAVGSRPVCVDAAKYYGATDIVNYKDGPIESQIMNLTEGKGVDAAIIAGGNADIMATAVKIVKPGGTIANVNYFGEGEVLPVPRLEWGCGMAHKTIKGGLCPGGRLRMERLIDLVFYKPVDPSKLVTHVFQGFDNIEKAFMLMKDKPKDLIKPVVILA

SEQ ID NO: 6481 - protein, 449 aa, Oryza sativa
MAVTIQSVKARQIFDSRGNPTVEVDVGLSDGSFARGAVPSGASTGIYEALELRDGGSDYLGKGVLKAVSNVNTIIGPALIGKDPTEQVDIDNFMVQQLDGTSNNWGWCKQKLGANAILAVSLAVCKAGAMVKKIPLYQKLQHIANLAGNKTLVLPVPAFNVINGGSHAGNKLAMQEFMILPTGASSFKEAMKMGVEVYHHLKSIIKKKYGQDATNVGDEGGFAPNIQENKEGLELLKAAIAKAGYTGKVVIGMDVAASEFYSEKDKTYDLNFKEDNNDGSHKISGDSLKDVYKSFVSEYPIVSIEDPFDQDDWATYAKLTDEIGQQVQIVGDDLLVTNPTRVAKAISEKTCNALLLKVNQIGSVTESIEAVRMSKRAGWGVMASHRSGETEDTFIADLSVGLSTGQIKTGAPCRSERLAKYNQLLRIEEELGDAAVYAGEKFRAPVEPY

SEQ ID NO: 6482 - protein, 644 aa, Xanthomonas axonopodis pv. glycines
MSTCPIDPPALRAAFAGPLDPQHAEVLLSRYDQHASRLLDALHALYGQRADYASWLAQWLGEVGDIARQRPQALQTLDSTRHAGWFGQPHMLGYSAYADRFAGTLQGVAERVPYLQELGVRYLHLLPFLRARAGDNDGGFAVSDYGQVEPSLGSNDDLVALTSRLREAGISLCADFVLNHTADDHAWAQAARAGDARYLDYYHHFADRTVPDRYEATLGQVFPHTAPGNFTWVDDTAQWMWTTFYPYQWDLNWSNPAVFGDMALAMLRLANLGVEAFRLDSTAYLWKRIGTDCMNQSEAHTLLVALRAVTDIVAPAVVMKAEAIVPMTQLPPYFGSGVDEGHECHLAYHSTLMAAGWSALALQRGDILHNVIAHSPPLPRHCAWLSYVRCHDDIGWNVLQHEACGNAAQPPFSLRDVARFYANAVPGSYARGESFQSSGDGVHGTNGMAAALAGIQAAQEAGDAAALAVAVDRLVLLYAIALAMPGVPLIYMGDELAMVNDPGYRDDPHRQHEGRWLHRPAMDWQLAAQRHDAKSLSGTVYRRLRGLIRQRAALGALAADQALASIALNDPRVFALTRGDSFIALHNFSDQLLDVELAAIGVDGWTLLAIDDAIGGAAARGDGSIVLPPYGVRWLQRGTEHAPE

SEQ ID NO: 6483 - protein, 1909 aa, Trichodesmium erythraeum IMS101
MNQPEEPQQYNDNEIAIIGMSGRFPGAKNVEDFWDNLKNGVESISLLSDKQLSKSGVAPEILNNPNYVKVNSMVSDIDMFDANFFNYSPREAEEIDPQQRLFLECAWEAIESSGYNPENYEGSIGVYAGGGLPTYLMYNLEDQDFILLGNRYFTQMVGNDKDYLATRTAYKLNLTGPALNIQTACSTSLVAVHLACQSLLNGECDMALAGGVSIQIPQNVGYLHQEGLIGSHDGHCRAFDARSSGTVFGNGVGVVLLKPLQDAIADGDCIHAVIKGSAINNDGSLKLGYTAPSVDGQAAVISEAQAVASVTPETITYIEAHGTGTELGDPIEIEALTKAFSEHTDKKQFCAIGSLKTNVGHMNTAAGIGALIKTVLTLKHNLIPPSLHYEKPNPQINFSDSPFYVNSTLSEWKRNGTPLRAGVSSFGIGGTNSHVVLEEAPSQVKEEDDLQRPVHILTLSAKTPTALADLVDSYHHYLETNLDLDLGDVCYTANTGRVHFNHRLAVVAEKQTELTEKLRQFKLEDKVEGICSGKLLINATAPKVAFLFTGQGSQYVNMGKELYEQAPVFRAALDECEEILEELGVNSILEIIYPEGGETSPLDQTAYTQPAIFAIEYALAKLWESWGIKPDVVMGHSVGEYIAATVAGIFSLEDGLKLIAARGRLMQQLPAGGEMVAVMASEAKVKKLLRPYAEKVAIAAINGPKSVVISGEATAVREIVSSLESEKIKTKQLQVSHAFHSPLMEPMLAEWEAVAKELTYHQPEIPVISNVTGTIADKSITTAKYWVDHVRLPVRFAEGMDALQKQGVEIFLEVGPKPILLGMGRRCLPKDVGVWLPSLRPEHIPLQSSLESARSEDFSQMLSSLGELYVRGVKVDWVEYDGEYSRQKVILPTYPFQRQRYWIDNYSRGRNSVSVSSNNGFVTEEGTSNPLLGRKLLLPFAQQFRFQTKLTPEFPSYVKDHRYYGKIVVAGASHIVLGLLAGKEALNSDSCVVENIEFLQILGADETSSRTVQILLDQEKETEYTYQLISCEAGTEYDPSTVWTVHAKAKVRSVNNSELPKENIDIAAVKNRCIQSLSSDEYYSTALEPMKGDFHLGPTFQWTEQAWISSTEGLVKVKAGENNEEMQEYWPHPGMVDSGIVPVALLSILRELSQNTENNGNGKKNAIDSEMEIPTYAFAGAKSFKFFDNFDIDDDLWYYTKIDESSSYDRGELLGETYLLNGDGKVLAEYSGIDFRQLSRKLLLRSFGLDFSQWYYQTEWQPAALMPGETQETGTYLLFCPTGESNSKLKEWSDSLNSQLLDQGHQCIVVYPADSYKKLSSEGKKQIIQLSPTQPEHFQKLLDEVNELTEELPLKGVIHLWSLDTDVEELTKTEEIICGSIINFLQGMRSLEKLPPLLLVTQGASLEVRSKESGVSINAQPQQALLWGVGKVITMEYPQLDCRCLDLDPNADEQETLKVLLDEVANHQTSTSVENQIRYCQGKRQVARLTQPRLDTDAKLAIQTEASYLITGGLGALGLEVAQLLVQQGVKSIALVGRNSPSETAQESIQELEAAGTQVSVFLGDVSVEKDMVNIFQKIQTSLPPLKGVIHAAGVLDDGFIQQMTWQQFTKVTAPKVTGTWNLHKLTKDIPLDFFVCFSSLASVLGSPGQSNYAAANAFMDAVAQYRQNLGLPGLSINWGPWANVGIAARMGAQQQGRLQSQGLQGIQTEQGLQALEEVLATDEAQIAIFNIDWPHLLSQFGQMTPAFLSEIASQHPLQGKANQGPKQRELLEQMKVATTDQRQRLMVDYLIGVVAKVLRRGKNDLPDPEEGFFNLGMDSLMALDFGQMIQVDLGITLSSTSTFEYPNIQALAEYLEEIIPKVDEKEAEYETDDTAIDAESLITEISQLSEDKMDEAIDEALTQLYQFI

SEQ ID NO: 6484 - protein, 501 aa, Sphingomonas chungbukensis
MATQLKSTENDYGIKSEYGHYIGGEWIAGDSGKTIDLLNPSTGKVLTKIQAGNAKDIERAIAAAKAAFPKWSQSLPGERQEILIEIARRLKARQSHYATLETLNNGKPMRESMFFDMTQTIGQFELFAGAAYGLHGQTLDYPDAIGIVHREPLGVCAQIIPWNVPMLMMACKIAPALASGNTVVLKPAETVCLSVIEFFVEMADLLPPGVINVVTGYGADVGEALVTSPDVAKVAFTGSIATARRIIQYASANIIPQTLELGGKSAHIVCGDADIDAAVESATMSTVLNKGEVCLAGSRLFLHQSIQDEFLAKFKTALEGIRQGDPLDMATQLGAQASKMQFDKVESYLQLATEEGAEVLTGGTRADAANLAGGNFIKPTVFTNVKNTMRIAQEEIFRPVTTVISWNDQTHMMQQANATTYGLAGGVWTKDLARAHRIARQLETGTVWINRYYNLKANMPLGGYKQNGFGREFSHEVLNHYTQTKSVVVNLQEGRVGMFDQ

SEQ ID NO: 6485 - protein, 96 aa, Zea mays
LGVSLAVCKAGAAEKGVPLYRHIADLAGNPDLILPVPAFNVINGGSHAGNKLAMQEFMILPVGASSFKEAMRIGAEVYHHLKGVIKAKYGKDATMW

SEQ ID NO: 6486 - protein, 1268 aa, Magnetococcus sp. MC-1
MVGIMLDKSLLDLLWVTLCIGLVLLMQAGFLCLESGLTRSKNSINVAMKNLVDFSVSVTAFLALGYPLMFGTSMEGWLGWGTPFSIGSEEPLQMVFFLFQAMFCSTSVTIVSGAVAERLGFRAYLFLAAGMALLIYPIVGHWAWNGLDRGLSLGWLGQAGFVDWAGSTVVHAVGGWFSLALLLVIGPRTGRFNPDGSVNPITASNLPLTTLGALILWFGWIGFNGGSTLSLDARIGPVVLATCLGAVGGSMGALLWSWWREGRPSVLSAINGTLAGLVAVTAGAHALSPLAALGAGLLAAPVALLMENWMLRHGIDDAVGAVPVHLGAGVWGTLAVALLGDLHKLGTGLSRLEQLWAQLQGVLAAALVAFVIPWLVLRVINRRFPMRVTPEQEWQGLNISEHGTQTELSSFLGVLRAQAEGGDLSLRAEVDPFSEVGLIADRYNHVMDAMEAAVAKTRAVFQTAGDAILIIDPHSGQITAHNPMAEAVFGRSSAAFAHLTLSDLVVGVTPQRFWLGLHEEGEGRLPDGHTFPLELAITRASHGDGEMLIGTFRDIRARKQAELAIKASEARFRTLFASAALGMALIDAKQRVVDANPALMQMLELSHHRDALPPLAQLAHPQDQQEVAARLDAVIEGRSPQENCEVRCLCEARHLTIWTRMVISPIVLESNLTPMVVVIVEDVTQRRRSEEALRLAATVYESTNESVVIFNGEGRVEQVNQAFCRLSGYTAREVRGLELRHLLSARYEKSQFDEMAQALALTGHWSGEVMGQRKQGALASERLSLSLVRRPDGSTQNTIAVFTDLTEQKAQEELIWRQANFDPLTSLPNRRLFQDRLHQALAQADRSAGRVALFFLDLDRFKPINDTMGHQAGDELLQKCAERINAAVRSSDTVARLGGDEFTVILPNIQNGQDLSRIAEGIIKTLTEPFYLKAGEANISTSVGVAVYPDDSQDDEGLMRAADAALYQAKDHGRNNVQFFTESLNQQILERIALEKGLRRGLGAGELFLVYQPQVEVSSGRLSGAEALVRWRLPTGEVVMPDRFIPMAEESGLIVQVGEVVVSLAVQQIRAWLDAGFEPPRISINASPKQFHLDGGGLTSILMSTCDAYQISPSRLAVEIVESGLMANPERSGEILAGLAKLGVEVELDDFGTGYSSLARLSRLQIQALKLDRRFLVGIPEDPQNRILVTAMVQMARGMGIEVIAEGVEDLRQMGFLQDLGCHRAQGFGIARPMEPEAFVVFCQTPKLEHPPYGNCIVGWAAPEPVRT

SEQ ID NO: 6487 - protein, 612 aa, Glycine max
MSSSFSVRFLAPPSSCFPSSRPKTWLCAATTPTVAPATASSEVEASRLEPRVEERDGFWVLKEEYRGGISPQEKVKLEKDPMKLFMEGGIEDLAKMSLEEIESSKHTKDDIDVRLKWLGLFHRRKQHYGRFMMRLKLPNGVTTSAQTRYLASVIRKYGKDGCADVTTRQNWQIRGVVLPDVPEILKGLDEVGLTSLQSGMDNVRNPVGNPLAGIDPDEIVDTRPYNNLLSQFITANSRGNPAMSNLPRKWNVCVVGSHDLFEHPHINDLAYMPANKDGRFGFNLLVGGFFSAKRCAEAIPLDAWVSADDVIPLCKAVLEAYRDLGFRGNRQKTRMMWLIDELHGLFPLSLSVSAWQVSDKSVWQMKGIEVFRSEVEKRMPGKQLERASEEELVKKKWERRDYLGVHPQKQDGLSYVGIHIPVGRVQADDMDELARLVDKYGTGELRLTVEQNIIIPNVDSNKIDALLNEPLLKERFSPEPSLLMKTLVACTGNQFCGQAIIETKERALKVTEEVERQVAVTRPVRMHWTGCPNTCGQVQVADIGFMGCMARDENGKATEGVDIFLGGRIGSDSHLAEVYKKGVPCKNLVPIVVDILVKHFGAVQRNREEGED

SEQ ID NO: 6488 - protein, 476 aa, Ajellomyces capsulatus
MALNEAPTASPVAETAAGGKDVVTDAARRPNSEPKKVHITDTPITLANWHKHISWLNVTLIIAIPIYGLVQAYWVPLHLKTALWAVVYYFMTGLGITAGYHRLWAHCSYSATLPLKIYLAAVGGGAVEGSIRWWARGHRAHHRYTDTDKDPYSVRKGLLYSHIGWMVMKQNPKRIGRTEITDLNEDPVVVWQHRNYLKVVIFMGIVFPMLVSGLGWGDWFGGFIYAGILRIFFVQQATFCVNSLAHWLGDQPFDDRNSPRDHIVTALVTLGEGYHNFHHEFPSDYRNAIEWHQYDPTKWTIWIWKQLGLAYDLKQFRANEIEKGRVQQLQKKIDQRRAKLDWGIPLEQLPVIEWDDYVDQAKNGRGLIAIAGVVHDVTDFIKDHPGGKAMINSGIGKDATAMFNGGVYNHSNAAHNQLSTMRVGVIRGGCEVEIWKRAQKENKEVESVRDEYGNRIVRAGAQVTKIPEPITTADAA

SEQ ID NO: 6489 - protein, 473 aa, Triticum aestivum
MDVPLASKTFPSPSPSKREQCNVDGHKSSSKHADLNPHANDSVLGIILGGGAGTRLYPLTKKRAKPAVPLGANYRLIDIPVSNCLNSNISKIYVLTQFNSASLNRHLSRAYGSNIGGYKNEGFVEVLAAQQSPDNPDWFQGTADAVRQYLWLFEEHNVMEYLILAGDHLYRMDYEKFIQAHRETDADITVAALPMDEERATAFGLMKIDEEGRIIEFAEKPKGEQLKAMMVDTTILGLDDARAKEMPYIASMGIYVISKHVMLQLLREQFPGANDFGSEVIPGATSTGMRVQAYLYDGYWEDIGTIEAFYNANLGITKKPIPDFSFYDRSAPIYTQPRHLPPSKVLDADVTDSVIGEGCVIKNCKIHHSVVGLRSCISEGAIIEDTLLMGADYYETEADKKLLAEKGGIPIGIGKNSHIKRAIIDKNARIGDNVMIINVDNVQEAARETDGYFIKSGIVTVIKDALLPSGTVI

SEQ ID NO: 6490 - protein, 426 aa, Streptococcus pyogenes M1 GAS
MKLQKPKGTQDILPGDAAKWQYVESVARDTFSQYNYGEIRTPMFEHYEVISRSVGDTTDIVTKEMYDFYDKGDRHITLRPEGTAPVVRSYVENKLFAPEVQKPVKLYYIGSMFRYERPQAGRLREFHQIGVECFGAANPATDVETIAMAYHLFEKLGIKDVTLHLNSLGSPESRAAYRQALIDYLTPMRDQLSKDSQRRLDENPLRVLDSKEKEDKLAVEKAPSILDYLDEESQAHFEAVKDMLEALDIPYVIDTNMVRGLDYYSHTIFEFITSVEGSDLTICAGGRYDSLVGYFGGPETPGFGFGLGLERLLMIIEKQGITLPIETEMDIYLAVLGDGANSKALELVQAIRRQGFTAERDYLGRKIKAQFKSADTFKAKLVMTLGESEVEAGKAVIKNNRSRQEVEVSFEDMMTNFANISEQLLS

SEQ ID NO: 6491 - protein, 476 aa, Ajellomyces capsulatus
MALNEAPTATPAAETAAGGKAVTTDTARRPNPEPKKVHITDTPITLANWHKHVSWLNVTLIIVIPIYGLVQAYWVPLHLKTALWAVVYYFMTGLGITAGYHRLWAHCSYSATLPLKIYLAAVGGGAVEGSIRWWARGHRAHHRYTDTDKDPYSAHKGLLYSHIGWMVMKQNPKRIGRTDITDLNEDPVVVWQHRNYLKVVIFMGIVFPMLVSGLGWGDWLGGFIYAGILRIFFVQQATFCVNSLAHWLGDQPFDDRNSPRDHIVTALVTLGEGYHNFHHEFPSDYRNAIEWHQYDPTKWSIWIWKQLGLAYDLKQFRANEIEKGRVQQLQKKIDQRRVKLDWGIPLDQLPVIEWDDYVDQAKNGRGLIAIAGVVHDVTDFIKDHPGGKAMINTGIGKDATAMFNGGVYNHSNAAHNLLSTMRVGVIRGGCEVEIWKRAQKEKKEVESVRDEYGNRIVRAGAQVTKIPEPITTADAA

SEQ ID NO: 6492 - protein, 426 aa, Pseudomonas aeruginosa UCBPP-PA14
MSKTNESLLKRRQAAVPRGVGQIHPVVAERAENSTVWDVEGREYIDFAGGIAVLNTGHLHPKVIAAVQEQLGKLSHTCFQVLAYEPYIELAEEIAKRVPGDFPKKTLLVTSGSEAVENAVKIARAATGRAGVIAFTGAYHGRTMMTLGLTGKVVPYSAGMGLMPGGIFRALAPCELHGVSEDDSIASIERIFKNDAQPQDIAAIIIEPVQGEGGFYVNSKSFMQRLRALCDQHGILLIADEVQTGAGRTGTFFATEQLGIVPDLTTFAKSVGGGFPISGVAGKAEIMDAIAPGGLGGTYAGSPIACAAALAVLKVFEEEKLLERSQALGERLKAGLREIQAKHKVIGDVRGLGSMVAIELFEGGDTHKPAAELVSKIVVRAREKGLILLSCGTYYNVIRFLMPVTIPDAQLEKGLAILAECFDELA

SEQ ID NO: 6493 - protein, 194 aa, Hordeum vulgare subsp. vulgare
MMLSSAYSTPAADELGGPPPLPPPPGADVSVIVGALTGVLLGLFLFLIYAKHCRQRGRGGARGAAGGLGLGFRASSTCDRCRSGVSLSVVDALPVVRFGDMGGAAAAAQPECAVCLGTFDPAADELLRVLPKCRHAFHADCVDTWLEAHSTCPVCRRRVGKEDAFAVIPELEAADADWYPAREAEMQIVVRRPA

SEQ ID NO: 6494 - protein, 348 aa, Prochlorococcus marinus subsp. marinus str. CCMP1375
MESHKIQLLGLDLSQLERLALDHGESLYRGRQLHQWLYQKGVDNLDDITVLPKAWRNSLIQKGISVGGLVEVNRFIAGDRTIKLLLSTGDGEIIETVGIPSGNRLTICVSSQIGCPMGCQFCATGKDGLKRSLKVNEIVAQVFAVKKAFNRSPSNVVFMGMGEPLLNIEEVLSSICCLNKDLGIGQRRITVSTVGVKNTLPQLAELALQFLGSVQFTLALSLHAPNQKLRESLIPSAQNYPIKLLLEDCRHYLDLTGRRVSFEYILLGHLNDHIEHAEELADLVGGFQSHVNLIAYNPIDGESFQRPSNQRVNIFIKTLQKRGIVVSLRASRGLDKNAACGQLRSMNM

SEQ ID NO: 6495 - protein, 321 aa, Candida albicans SC5314
MEVLHQLTTNHTSSLSNLINNHPTSFSSILKEVDITNHSLTYIEKLWASYYIYMNNDILATGLLFFITHELMYFGRCLPWFIIDKTPWFNRYKIQPTKIPTNQEQWECFKTVLKQHFLVEALPIWLFHPVCAKLGITYDVPFPNWKIQAIQIAIFFICEDFWHFVFHSLFHQGWFYKNIHKVHHKYAAPFGLAAEYAHPVEVMALGVGTVGFPILYAYLATVYTNMPPLHLFTLTTWIVLRLFQAVDSHSGYDFPWSLNKFFPLWAGAAHHDEHHHYFIGNYASSFTLWDWLFQTECGTYARKRRERNSRASAESKHKKTL

SEQ ID NO: 6496 - protein, 429 aa, Glycine max
  unsure (1)..(429): unsure at all Xaa locations
MALNLTHQPAIKAPSSSSFAASRPLRAPQSVPLRSPQRSLAVRAAATESPAPAVTAVRECKVKSVKARQIVDSRGNPTVEVDLVANGLFRSAVPSGASTGIYEALELRDGDKSVYGGKGVLNAVRNINEVLAPKLVGVDVRNQADVDAIMLEIDGTPNKSKLGANAILGVSLSVCRAGAGAKGVPLYKHIQEIAGTKELVMPVPAFNVINGGSHAGNNLAMQEFMILPVGATSFAEAFRMGSEVYHVLKGIIKAKYGQDACNVGDEGGFAPNVQDNREGLVLLMDAIEKAGYTGKIKIGMDVAASEFYTKDGKYDLNFKKQPNDGAHVHSAQSLGQLYKDFVKEFPIVSIEDPFDQDDWGSWASLLSSVDIQLVRDDLLVTNPKRIAEAIQKKACNGLLLKXNQIGTVTESIXAALDSXLXSWXVMVSH

SEQ ID NO: 6497 - protein, 434 aa, Leptospira interrogans serovar lai str. 56601
MPRNYKPETIALHGGQSPDPSTLSRAVPIYQTTSYVFKNTEHAAKLFGLQEFGNIYTRIMNPTTDVLEQRIAALEGGVAALATASGQAAETLALLNIVEAGQEIVASSSLYGGTYNLLHYTFPKLGIKVHFVDPSDPENFRKAVNDKTRAFYAETLGNPKLNTLNLEAIAKVAHDSEVPLIIDNTLPSPYLVNPIEHGADIVVHSLTKFLGGHGTSIGGIIVDSGKFNWGNGKFKNFTEPDPSYHGLKFWEVFGKFEPFGGVNIAYIIKAKVQGLRDMGASISPFNAWQILQGVETLPLRMRKHSENALAVAEYLTKHPKVSWVNYPGLKMDKNYSLAKKYHKKDLYGAILGFGIKGGAVEAKKFIDGLELFSLLANVGDAKSLVIHPASTTHQQLTPEEQLSAGVTPDFVRLSVGLENIEDILFDLEEALKKV

SEQ ID NO: 6498 - protein, 412 aa, Rhodobacter capsulatus
MTDVMVPALGESVAEATVSTWFKKPGDAVAQDEILCELETDKVSVEVPAPAAGVLSEILAPEGASVAAGGRLAILAAGSARLQPPAAAAAAPAPAPAAPAKDVEHAPAAKKAMAEAGLTPDQVTGTGRDGRIMKEDVAAAAAAPAAAPAPAAPAPVATAQVSIAPPPATVPRAPVPAEDAAREERVKMTRLRATIARRLKDAQNTAAMLTTYNEVDMSGVMDLRNVYKDQFEKKHGVKLGFMGFFVKACCHALKEIPEVNAEIDGGDIIYKNYVHMGVAVGTPSGLVVPVVRDADQKGFAHIEREIAELGKRGRDGKLTMQEMQGGSFTISNGGVYGSLMSSPILNPPQSGILGMHKIQDRPVVVNGQIVIRPMMYLALSYDHRIVDGKGAVTFLVRVKEALEDPRRLLMDL

SEQ ID NO: 6499 - protein, 391 aa, Xanthomonas campestris pv. campestris str. ATCC 33913
MSIVRMTDLDLSGKRVLIRQDLNVPIDNGQITSEQRITASVPTIKLALEKGAAVMVTSHLGRPKEGTWSEEDSLAPVAARLTTLLGLDVPLVRDWVDGVDVAPGQVVLLENCRMNVGEGKDDEALARKYAALCDVFVMDAFGTAHRAQASTHGVIRFAPVAAGGPLLMAELDALAKALDNPAKPLLAIVAGSKVSTKLELLSNLVNKVDQLIVGGGIANTFIAAAGHDVGKSLSEPDLIPTANQIVADAKARGAEIPLPTDVVVAKQFLPDAEASVKSLDQVDADDLILDIGPQTAAHYAELIANAGTVVWNGPVGVFEFEPFSHGTETLARAIAASKAFSIAGGGDTLAAVDKYAIAKDVTYISTGGGAFLEFLEGKTLPAVAALEARGQ

SEQ ID NO: 6500 - protein, 337 aa, Gloeobacter violaceus PCC 7421
MKAVGYRQPLPVDDPNALLDVDLPEPAVAGRDLLVEVKAISVNPVDTKVRRGTAPPEGQIKVLGWDASGVVRAVGPEVSLFRPGDAVWYAGSIVRPGTNSELHTVDERIVGRKPASLDFARAAALPLTTITAWELLFDRLQVARDRTGRGETLLIVGAAGGVGSILTQLARQLTGITVIGTASRPETRKWVQDLGAHHVIDHSRPLVEQLQRLGIPQVSYVASLTQTDTHYAQLVEALAPQGRLALIDDPGPLDVTLLKRKSLSLHWELMFTRSLFTTADLIEQHRLLDEVAQMVEAGVIQTTVGEHFGRICAENLRKAHALIESGQAKGKIVLEGF

SEQ ID NO: 6501 - protein, 523 aa, Zea mays
MAWARLASRSRLRPAASAAGRSRHASTPAPPPPPSPPTTRTVPAATSAPPLRRLLLLPRHRFADATPSASTAWLLGARWRQGHGRRCFASAAYPAQATPGEASELVDVPLAQTGEGIAECELLRWFVAEGDQVDEFQPLCEVQSDKATIEITSRFKGKVHKIHFVPGDIVKVGETLLKMVVGDSQIVSPDNIVPSAGKSLGVESAVFSSEGNVPGGNLSTPAVRHLAKQYGISINEIVGTGKDGRVLKEDVLNYAVSKGVCKQQSLASEGNIGQVELLEEGKALLDEDFYEDKKILLRGYQRSMVKSMSLAAKVPHFHYLEEINCDSLVQLKTTFQNENKDQTIKHTFLPFLIKSLSMALSKYPMLNSSFIEETNEVVFKGPHNIGVAMATTHGLVVPNIKKVQSLSILEITKELARLHEMASQNRLSAADIEGGTITLSNIGAIGGKFGSPLLNLPEVAIIALGRIQKLPRFDDDENVYPSSIINVTVGADHRVVDGATVARFCNEWKSLVEKPELLLLHMR

SEQ ID NO: 6502 - protein, 384 aa, Triticum aestivum
  unsure (1)..(384): unsure at all Xaa locations
MAAAASSPSPPAVITCRAAVAWGPGQALVMEDVEVAPPGPLEIRVKVVSTSICRSDVTQWQSTAQPDLFPRIFGHEASGVVESVGEGVTEFQVGDHALTVFIGECMSCKHCVSGKSNMCQTLGLERKGVMHSDQTTRFSIGGKPVYHYCAVSSFSEYAVVHSGCAVKVSPTMPMDRICLLSCGASAGLGAAWNVADVSKGSSVVIFGLGTVGLSVAQGAKLRGASKIIGVDTNPAKQEKGKAFGVTDFINPAELNEPLQQVVKRLTDGGADYSFECVGDTGGLCLXGWRPKSDIPLLVXSTQTRKSKLMALSHMICHSVTSTKRSLFGGWRPKCDIPXYVEKYANKEIQVDGLVTHDMPFSDINKALELMLQNRCLRCVIHMPK

SEQ ID NO: 6503 - protein, 107 aa, Triticum aestivum
  unsure (1)..(107): unsure at all Xaa locations
QGLDCGEQSTKLFREEILKSKPIVWNGPSGVFEFEAFSNGTKAVLDAVIEATKXGATTIIGGGDPATAALKWGAEGQVFHISTGGGAPLELLEGKELPGVTALSRKN

SEQ ID NO: 6504 - protein, 716 aa, Kluyveromyces lactis
MESEIFLAPPAKQSKKISILVGMFVAVGGFLFGYDTGLINNISEMPYVNQKFAPNKNHFTTPQISILVSFLSLGTFIGALLAPLISDSYGRKTTMIFSTFVVFMIGNSLQVAAGSMTILVVGRVLSGMSVGLISAAVPLYQSEAAQKSVRGAIISCYQWAITWGLLVASAVSQGTYKRMDASSYQIPIGLQYIWSFLLGVGILFLPESPRYYVFKDRLDKAAKSLSFLRGVPEDDSGLLEELVEIKATYDYEMSFGKISYLDCFRSTRSRTKQRLRMLTGIALQAFQQVSGINFIFYYGVDFFNKSGVSESYLVSFVTYAVNVAFNIPGLFLVEYIGRRKLLLMGGILMTISNFIIAIVGLATDSMVANKVMIAFICLFIASFSATWGGGVWVISAELYPLGVRAKCTAICAASNWLINFICALITPYIMHIDSSVRQTSIGTKIFFVWGSLNAVGVLVVYFTVYETNGLSLEEIDELYKKSSSGINSIEWNKKIKAFPDLFQRTRPNNEGDGEADDNIHTDENYNHTISSYNGTQNNEKYPIQVQMPQFGVRNIEFLNTTGSSPQSDMTEPNFVDLGNGLGITTYQRGPPSVLTDSSEEEEEGQQQETDETEEGKSFKHQYTDARNKNRGERGSFNSNSSTSGTTRSSSHKASVQRMEEINLYMAQLMHRGGTEDLSRNTTDNTHQPISHDIMSQWNSSSQNKGPSTQTDINSNT

SEQ ID NO: 6505 - protein, 431 aa, Mycoplasma conjunctivae
MNKFDIAVIGAGPGGYSLALILAKAGNKVVIFEESFFGGNCVNRGCIPTKTLMKSARIANTLARSKDFGIDSENYYDLQTMFKNVANNSAKLQNAIKGGLTTSNVTIIEASATVIDENTIEANGSQYSFDKLVIASGSRPNFFKIEGAEATNVYTSDDLLTKNPKFDELTIIGGGAISLEFAYFYASFGKKVTIIEAAPQLFANLDESISRAAKAVIAEKGITLYEATKVLRYEDGALILENHDGHIYHKTNNILLAVGRRANNEAFASLNLKFNEKNFIEVNEFFQTSIDHIYAIGDVTGKLMLSTVAYKHGDIVAKHIITGSSDEKFNARFIPWTIYATPEIASVGSSEQQLQAQGIDYEVAEIAASSLPRAHAENAFKLGFIKLIFNKKTFEILGATIFLDEASLLINQIALAIKSKLTILDQYLLVI

SEQ ID NO: 6506 - protein, 557 aa, Escherichia coli
MILLSIEGMTCPSCVAHVKEALDAIEGVNKVEISYENARATITTNGGVSVTVLIGAIEALGYIAKESTGTAKEITSPNDCCDNENASNTESNQTQHVAIIGTGSGAFACAIKAAEGGAKVTLIEGADVIGGCCVNVGCVPSKILIRAAQLAQQQRNNPFTGLENHAPQLSRALLTQQQTARVEELRAAKYQNILETNPALSLLKGWAQFKNANTLIVRKNDGTEQAVHADKILIATGSTPTIPPIDGLTETPYWTSTEALFAQELPQHLVVIGSSVVALEIAQAYRRLGSEVTILARHTLLYREDPLLGEKLTGCFEKEGIRVLNSTQATKVTHDGSQFTELTNAGDLRCDRLLVSTGRHANTCQLNLGAVGVTTNKKGEIVVNERMETNVPGIYAAGDCCNMPQFVYVAAAAGSRSGINMTGGYAKLDLSTMPAVIFTDPQVATVGLTEEQANAQDIETDSRVLEMENVPRALANFETDGFIKLVTEKATGRLIGAQILAHEGGELIQSAALAIRNRMTVTLEADQLFPYLTMVEGLKLCAQTFNKDVKELSCCAG

SEQ ID NO: 6507 - protein, 490 aa, Erwinia carotovora subsp. atroseptica SCRI1043
MSRYGLQQLYINGAYVDSTGNDTFDAVNPANGDIIACIQSATAADVDRAVSAATAGQKVWAAMTAMERSRILRRAVDILRERNDELALLETHDTGKPLSETRTVDIVTGADVLEYYAGLIPMLEGQQIPLRDTSFVYTRREPLGVVAGIGAWNYPIQIALWKSAPALAAGNAMIFKPSEVTSLTALKLAEIYTEAGLPAGVFNVLTGTGKSVGQALTTHPGIAKVSFTGGIASGKTVMANAAGSTLKDVTMELGGKSPLIIFDDADLDKAADIAMMANFFSSGQVCTNGTRVFVPKALQAQFEEKILACVQRIRAGDPTDESVNFGPLVSFPHRESVLRYIESGKREGARVLVGGEPMTDGDYAQGAYVAPTVFTDCRDDMKIVRKEIFGPVMSILTYQDEDEVIRRANDSEYGLAAGIVTRDLNRAHRVIHQLEAGICWINTWGESPAEMPVGGYKHSGVGRENGVTTLEHYTQIKSIQVELGEFRSVF

SEQ ID NO: 6508 - protein, 171 aa, Pseudomonas aeruginosa UCBPP-PA14
MKTLVDHLAQYAAYHRDRRNIFSHFIGIPMIVLSIAVLLARPALGFGLSPALLLALAAALFYLRLDLRFGAAMTALLALTVWGAAQLAAGTTAAWLGWGVGLFVVGWIIQFVGHYYEGRKPAFVDDLSGLIVGPLFVLAELAFLLGLRGDVQREVEERAGPTCIREHKRAA

SEQ ID NO: 6509 - protein, 497 aa, Pseudomonas aeruginosa UCBPP-PA14
MTTLTRADWEARAKDLKIEGRAFVNGEYSNAASGETFDCLSPVDGRFLAKVASCDLADAEQAVKVARNAFDSGAWSRLAPAKRKQAMIRFADLLLENAEELALLETLDMGKPISDSLHIDVASAANSLRWSAEAIDKIYDEVAATPHAELGLVTREPVGVVAAIVPWNFPLLMSCWKLGPALATGNSVILKPSEKSPLTAIRIAQLAVEAGIPKGVFNVLPGYGHTVGKALALHMDVDTLVFTGSTKIAKQLMVYAGESNMKRVWLEAGGKSPNIVFADAPDLKAAAEAAAGAIAFNQGEVCTAGSRLLVERSIKDKFLPLVIEALKGWKPGNPLDPETNVGALVDTQQMNTVLSYIEAGHNDGAKLVAGGKRTLEETGGTYVEPTIFDGVTNAMKIAREEIFGPVLSVIEFEDAEEAVRIANDTPYGLAAAVWTSNLSKAHLTAKALRAGSVWVNQYDGGDMTAPFGGFKQSGNGRDKSLHAFDKYTELKATWIKL

SEQ ID NO: 6510 - protein, 303 aa, Bacillus cereus ATCC 14579
MTAEYNSALSIAVPKEFCFQENLRYLSRSNNECMFHIEDNKIYKVIPVQDVNPLVEISVNTDGNIQIRCLEEPYTSEKSIREAVVNYVKEWFDLTTDLAPFYTLAKHDLLLQGPIEQYYGLRTLGIPDLFEALSWGIIGQQINLTYAYTLKRRLVEQFGSYVEWDDRKHWIFPSPETIANLHVENLQQLKMTTRKCEYLIGIAKLITERKLSKEDLLQTQDVKVAEKQLTAIHGIGPWTANYVLMRCLRFPSAFPIDDVGLHNAIKFITGSENKPTKNEIKDFAANWANWESYATFYLWRVLY

SEQ ID NO: 6511 - protein, 917 aa, ASPERGILLUS NIDULANS FGSC A4
MEQQGDLQAASNYINNVLLARGLVKSGRPIDFANPENEEGGVATTMARIINLVNDLVLRRDREAEHRENLATTIRTLRAEESHKAVEMSELSRSLALAEAQERALKTSMSSAEATIRGLKDQVQRMKTTVQQVRSQCANDIRKRDLELQKLKAHLADRQRGKRDGLGVTTININPAASQSSRRYLSGGEGVHDPGYSLKQETNEFLTQLLQNLSDENDSLISLARNTVFTLKELQGLSSTEEPAVDNGYLQGSASTAQRSTYGGAAVTSLPASCEELSGEMDQVLEHLRTLLTNPSFVPLEEVEVRDEEIKRLREGWEKMESRWRQAVTMMDGWHKRIAHGGGSVRAEELRMGLKLNDHVDPRYSQVRDNDVAMPSPIFEDQEDEEDEYFGVEATETEPNDDAEPAPDEPQETSSRALKERTDNTASAKHPPRKEVSFTEKDRKSPSKKQQEDDTMPIKAHQSDAVTRRPSRKRVEPKGPRPAPTRMSVPQKLAAAESEARAAEKARQEQESRKRSRGSKVARKKTGDRRRSTLTSDELGELLGMKPSDSLGTMPDTFTGWVAHGPKSPLTYGAFTPKPFEETDIEVQITHCGICGSDIHTIRSGWAPADYPCVVGHEIIGTATRIGRAVNNKQNIQPGDRVGIGAQCSSCLRPDCEACADGEESYCPKMVGTYNSRFPDGSKAYGGYANRWRGPGHFVFRIPEQLSSAEAAPLLCGGVTVFAPLRRFGAGPGKRVGIVGIGGLGHMGLLFARALGSDAVVAISRSSSKKSDAIGPLPNKLGADAFIATGEDKNWAKTHARSLDIIICTVSGENMPLSGYLRLLKRNGVFVQVGAPEEPLPPLRAFSLIQKGVKVTGSSIGSPEDIRQMLNLAAEKGVRPWVQTRPMEEVNLALQEMHEGKARYRFVLENGAKAGKL

SEQ ID NO: 6512 - protein, 400 aa, ASPERGILLUS NIDULANS FGSC A4
MAPRTMKALNYVGPFNVKVQEVEMPCLEHPDDIIVKITSAAICGSDLHMYEGRTAAEAGITFGHENLGIVEELGDGVTLLKKGDRVVMPFNVADGRCRNCEDGKTAFCTGVNPGFAGGAYGYVAMGPYRGGQAQYLRVPYADFNALKLPPGTEHEADFILLADIFPTGWHGIEISGFQPGDSVAVFGAGPVGLMAAYSAQIRGASRVYVVDRVPERLRAAEKIGAVPIDFTAGDAVDQIIAANGGEMVDRSVDAVGYQAVSGTKDNATEVPNIVLENMIRVTRACGGLGIPGLYVPSDPGAGDTATAKGMISLSFGKLFEKGLTLGTGQCNVKAYNRQLRDLIIAGKARPSFVVSHEISLDEAEIAYDKFDKRIEGYTKVIIHPNGGFQDKRPPVVNSPL

SEQ ID NO: 6513 - protein, 518 aa, Phytophthora infestans
MMLGDNSPLTRLAVAATAAVAFSAFVVSAQESTVTCEVSQYLDSATNECVDYSSRGAKAGNAYDTTIDSGNTAWMLMSSALVMLMTPGVAFFYAGLAGEDMASNTMMMSFVSMAMVSIQFFAFGYSACFSSDGIFAWAGYNNVGAVASGTYGGSIPHILFAFFQTQFATITPALISGGIVGRMKFGSYLLFILLWTSIVYDPLARWMWSLKLDEIWEITAMGWEGKMGALDFAGGTVIHVSSGFGALVAAIVVGKRYNHGEPVKPHNVPLVMIGATLLWFGWFGFNAGSQGAADGVAAIAAINTHLAPCAGFLTWSALEFAFHKNFDPCGAISGAVAGLVAITPGCAFVYPWAAVIFGVVGSATGFGAVHLKNVLRYDDTLDSFGIHGCGGFMGGLLTGLFATSEINPSIEGGAFYGHGMQFVHQLVSQCVAAAYSAVVTFLILMALKYTVGLRVSEEKEVNGMDISYHGGQAYDYSAHGGLSSPTVKAANPPVGDFMSMMTSGQPSGNGANHIANEL

SEQ ID NO: 6514 - protein, 579 aa, Chlamydomonas reinhardtii
MGCNPLQLAQVTALLGGDTATAATICAGTDVAQLGPNGAVTKWTVAELRGAQNALDQVEYGLNVSFVLASAYQVFVMQLGFALFAAGVVRPKNTVSIFIKNFFDTCIAGIAFYLVGYAFAFGAKDGYTNGFIGNWDFALSQTDGSPGSEPPNPWHLFIWNWSFCSASTTILSGSIAERATFASYTIYAAFMPAWVYPVVAHWLWAPDGWLSARNANDRILGIGAIDYAGSGVVHLVGGMAALIGSIAVGPRVGRFDAPGSTGEVSAQLYRATAAPQLYLMGTLLLWFGWYGFNPGSKLAISDYLQATIVSRTAVTTTLAACSGALSNLLLNYGRHRVWDLLSTCIGALAGLVAVTSGCSVIEPWAAIICGAISALFYEAGEQLLEKLKVDDPVSAFPLHAMCGVWGLLFTGLLANEGYITQVYNVPPGGHRMGLFYGGHAQLLLCQVIAIAVIAGWSAFNMCILFFGMKAAGLLRVGADKEATGMDMAACGQYNAAGAVNVHSSKVPTKSDAVLAAMSLNMERRMNGGPGMDYSVRNSSANPSAHNSSLHNTATATTVTTAAATPAAAGGIMLTSAVGG

SEQ ID NO: 6515 - protein, 411 aa, Chlamydomonas reinhardtii
MQIGFVSAESGQGRAKNVRNILLKNSVNIMLCAICWWAVGYAFAYGNSGGGFIGTSRFFSDGESFGSKPWFFTWTFCLSCVTIASGCLAERTHLFVYPVYTAVVSIAVHPVIAHWVWAPDSWLNSMTGSPCRFLDFAGGAVVHTVGGLTGLIGAMLCGPRLGRFEDGVGKDIPGHDVSSVSLGSLMLWFGWYGFNCGSTYIYMAQGGSEASAAVSRVALNMTLCASVAGMTSLVVSSIQTGTFDLAVCCNGLMAGLSASTSNVGFLTPWAACITGALAGLLYVGISRLLVRMGVDDPLDSSAIHCGSGILGVLVSGFLARPSYVMQMVGCNCGGVVYATNGGMQLGMQLLGLSCSMVWTAMWALLTFGILKKLQLLRVDQQTELAGIDNMEHGGPAYPEFLQRVQSTRPGY

SEQ ID NO: 6516 - protein, 254 aa, Glycine max
  unsure (1)..(254): unsure at all Xaa locations
MESGRIFFGASASSGNNMLFLGNTELAFRGRSMMSMEEASKRRPFFTSPDELYDEEYYEKQSPEKKHRLSSEQVHLLEKSFEDQNKLEPERKTQLAKKLGLQPRQVAVWFQNRRARWKTKQLERDYDVLKSSYDTLLSSYDSIMKENEKLKSEVVSLNEKLQVQAKEVPEEPLCDKKVDPIPVDEDMAPIFGTRVEDHLSSGSVGSAVVDEGXPXVVINNMYSYILSNNYYKYINPYREIQSDENDSSNDYQTC

SEQ ID NO: 6517 - protein, 417 aa, Streptomyces coelicolor A3(2)
MTVSVTLPALGESVTEGTVTRWLKQVGDRVEADEPLLEVSTDKVDTEIPSPAAGVLLEILAAEDETVEVGAGLGIIGAPDTAPAAPAAPAAPAPAPAPTPTPTPTPTPTASAPAPTPAPAPAPAPAPAPAEPFVPPAASAVPAPPAPAPAPTTPQAPAPAPAPVRAAPAEDASSLRGRTVAMTRIRRAIGNNLKKALLEQAQLTSTVEADVTRLMRLRNRAKDGFLAREGLKLSPMPFFVKAAAQALKAHPVVNARINEDEGTITYFDSENIGIAVDTEAGLMTPVVKAAGDLTVAGLARAVHDLADRARGGHLTPDDVSGATFTISNTGSRGALFDTVIVPPNQAAILGVGATVRRPGVVRVGDEEVIGVRDLVHLSLSYDHRLVDGADAARYLTAVKALLESAAFEDDLYPDAAA

SEQ ID NO: 6518 - protein, 98 aa, Zea mays
  unsure (1)..(98): unsure at all Xaa locations
MNVPVVDPYQGEFPETIEEYLHHGTMKCIAFNRKGTLLAAGCSNXSCIXWXFETRXXAXXFXDXDXXXXYXXVLPPLSFLFIFLPFFLSHPFPPFFPL

SEQ ID NO: 6519 - protein, 182 aa, Escherichia coli
MVRDMKHTVEVMIPEAEIKARIAELGRQITERYKDSGSDMVLVGLLRGSFMFMADLCREVQVSHEVDFMTASSYGSGMSTTRDLKILKDLDEDIRGKDVLIVEDIIDSGNTLSKVREILSLREPKSLAICTLLDKPSRREVNVPVEFIGFSIPDEFVVGYGIDYAQRYRHLPYIGKVILLDE

SEQ ID NO: 6520 - protein, 190 aa, Triticum aestivum
  unsure (1)..(190): unsure at all Xaa locations
MAPTVMASSATSVAPFQGLKSTAGLPVSRRSNGASLGSVSNGGRIRCMQVWPIEGIKKFETLSXYLPPLSTXEALLKQVDYLIRSKWVPCLEFSKVGFIFREHNAXSPGYYDGRYWTMWKLPMFGCTDATQVINEVEEVKKEYPXDAYVRIIGFDNMRQVQCVSFIAFKPPGXCEESGKALNSSLTTGHI

SEQ ID NO: 6521 - protein, 351 aa, Xylella fastidiosa Dixon
MNAGALYRGMVWGAVRWAGVWWMLRSMGRYSDAHSVDFAFFYVLTRDKSFMQVTSKLPQVGSTIFSVMSQLADVYGAVNLGQGFPDFPVPLRLQEALAGAVREGHNQYPPMIGVAGLRQGIAAKVLRCYGAQVDVDVEITVTSGATEAIFNAIHAVVGAGDEVIVLDPAYDCYEPGIVLAGARAVHVPLDAVSFTVDWERVGAAITSRTRLLIVNSPHNPSGALFSADDMRALAALLDGTDILLISDEVYEHIVFDGCGHESVLRWPQLRARAFVISSFGKTYHCTGWKIGYAIAPPALSAEFRKVHQYNTFTSFGPAQYAFAAMLREEPEYVEQVGLFYQARRDCLREQL

SEQ ID NO: 6522 - protein, 217 aa, Zea mays
FQLGTPGGEQNILEADVVLVSAGRTPFTSGIGLETLGVETDKAGRILVDKRFMTNVKGVYAIGDAIPGPMLAHKAEKDGVACVEFIAGKEGHVDYDTVPGVVYTHPEVASVGKTEEQVTALGIPYRVGKFPLLANSRAKAIDDAEGVVKVIAEKETDKILGVHIMAPNAGEIIHEAVIALQYGASSEDVARTCHAHPTVSEALKEACLQTFDKAIHI

SEQ ID NO: 6523 - protein, 392 aa, Pseudomonas aeruginosa UCBPP-PA14
MWFNGFLDLSPWQLVAVTLVLTHITIVSVTVYLHRYSAHRALDLHPALQHFFRFWLWLTTGMNTREWTAIHRKHHAKCETVEDPHSPVHKGLFTVLRAGAELYKAEAKNQDTLRIYGKNCPDDWIERNLYSRFPIGGVVLMALIDLALFGALGLTVWAVQMAWIPFWAAGVVNGLGHAVGYRNFECRDAATNLVPWGILIGGEELHNNHHTYPNSAKLSVKKWEFDLGWAWIKLFSFLRLARVARVAPIAHRVEGKHSLDMDTAMAILNNRFQIMAQYRKLVIAPLVKQEVAKADESVRHLFRRAKRLLSRETSLLQDRHHVRIDSMLAHSQALKVIYEKRLALQQIWAKTSANGHDMLAAIKDWVHEAEASGIQSLKEFAAQLKTYSLRPA

SEQ ID NO: 6524 - protein, 506 aa, Petroselinum crispum
MMDFVLLEKALLGLFIATIVAITISKLRGKKLKLPPGPIPVPVFGNWLQVGDDLNQRNLVDYAKKFGDLFMLRMGQRNLVVVSSPELAKDVLHTQGVEFGSRTRNVVFDIFTGKGQDMVFTVYSEHWRKMRRIMTVPFFTNKVVQQYRFGWEDEAARVVEDVKANPEAATNGIVLRNRLQLLMYNNMYRIMFDRRFESVDDPLFLKLKALNGERSRLAQSFEYHFGDFIPILRPFLRGYLKLCQEIKDKRLKLFKDYFVDERKKLESIKSVDNNSLKCAIDHIIEAQQKGEINEDNVLYIVENINVAAIETTLWSIEWGIAELVNNPEIQKKLRHELDTVLGAGVQICEPDVQKLPYLQAVIKETLRYRMAIPLLVPHMNLHDAKLAGYDIPAESKILVNAWWLANNPAHWNKPDEFRPERFLEEESKVEANGNDFKYIPFGVGRRSCPGIILALPILGIVIGRLVQNFELLPPPGQSKIDTAEKGGQFSLQILKHSTIVCKPRSL

SEQ ID NO: 6525 - protein, 181 aa, Zea mays
  unsure (1)..(181): unsure at all Xaa locations
MASSMLSNAAVATTVVNRNAGAQASMVGLKSVAAFPLTKXKSTNDLSSLPTNGGRVQCMKVWPTQNMKRYETLSYLPPLTTDQLARQVDYLLNNKWVPCLEFETEHGFVYREHHNSPGYYDGRYWTMWKLPMFGCTDPAQVLNELEECKKEYPNAFIRIIGFDSNRQVQCVSFIAYKPEGY

SEQ ID NO: 6526 - protein, 454 aa, Haemophilus somnus 129PT
MTIKTPVQATLASNQYFLDRQDIMESNVRSYPRKLPFAYQKAQGVWVTDVEGNEYLDFLAGAGTLALGHNHPKLIQAIKDVLDSGLPLHSLDITTPLKDAFTEELLSFFPKDKYILQFTGPSGADANEAAIKLAKTYTGRGNVIAFSGGFHGMTHGALSLTGNLGAKNAVQGLMPGVQFMPYPHEYRCPFGIGGKAGVKAVEDYFENFIEDVESGVVKPAAVILEAIQGEGGVVPAPISFLQKVREVTQKHGILMIVDEVQAGFCRSGKMFAFEHANIEPDIVVMSKAIGGSLPLAVLAIKKEFDAWQPAGHTGTFRGNQLAMATGYVSLKIMREENLAQNAKERGEYLTKALTELSQEFPCIGNVRGKGLMMGIDIVDEHQAKDATGAYPRDCDLAVAIQKYCFKNKLLLERGGRGGNVVRILCAVNITQAECEEFIKRFKQSVAEAVKAVRG

SEQ ID NO: 6527 - protein, 524 aa, Lycopersicon esculentum
MDTCCAAMKSTVHLGRVSTGGFNNGEKEIFGEKIRGSLNNNLRINQLSKSLKLEKKIKFGEAYSVITIENDTETVFVDMPRLERRRANPKDVAAVILGGGEGTKLFPLTSRTATPAVPVGGCYRLIDIPMSNCINSAINKIFVLTQYNSAALNRHIARTYFGNGVSFGDGFVEVLAATQTPGEAGKKWFQGTADAVRKFIWVFEDAKNKNIENILVLSGDHLYRMDYMELVQNHIDRNADITLSCAPAEDSRASDFGLVKIDSRGRVVQFAEKPKGFDLKAMQVDTTLVGLSPQDAKKSPYIASMGVYVFKTDVLLKLLKWSYPTSNDFGSEIIPAAIDDYNVQAYIFKDYWEDIGTIKSFYNASLALTQEFPEFQFYDPKTPFYTSPRFLPPTKIDNCKIKDAIISHGCFLRDCTVEHSIVGERSRLDCGVELKDTFMMGADYYQTESEIASLLAEGKVPIGIGENTKIRKCIIDKNAKIGKNVSIINKDGVQEADRPEEGFYIRSGIIIIAEKATIRDGTVI

SEQ ID NO: 6528 - protein, 405 aa, Bradyrhizobium japonicum USDA 110
MIVMTNSAAPHLLPVFARSDLGFERGEGCWLIATNGDRYLDFTSGVAVNALGHAHPALVKALQEQATKLWHMSNLFQSPDGEKLATRLCNESFADFVFFCNSGAEALEGVIKLVRHHHFSKGHPERYRIITFEGAFHGRTLATLAATGSAKYLEGFGPPMDGFDQVPHGDIEAVKKAIGPQTAGILIEPIQGEGGVRSATPAFLKALRQLCDEKGLLLAFDEVQTGMGRTGDLFAHRRTGVTPDVMSLAKALGGGFPIGAILATADAAAGMGPGSHGSTFGGNPLAIAAANAVLDVMLKPGFFDHVQKMSLLLKQKLASVIDRHGDVVSEVRGEGLLIGIKAVVPSGDLVAALRNEKLLTVGAGDNVVRFLPPLIVTEAEIEDSVGRLERACAAISSSQTKRAAS

SEQ ID NO: 6529 - protein, 97 aa, Moraxella sp.
KDRLTTPLLRMKDGKYHKEGEFTPVSWDVALDTMAAKWKHSIATKGPTSVGMFGSGQWTIWEGYAASKLHKAGFLTNNIDPNARHCMASAVVGFMRT

SEQ ID NO: 6530 - protein, 547 aa, Neisseria meningitidis Z2491
MNAFTRAWYALERHYQDTRHVLLRDRFACEPDRFERMHERLDGMLFDYSKNRLGEDTLQLLCRLAETADLEGKMRALRTGAKVNNSEGRAALHTALRLPDGAGAVYADGRDVLPEIRRELNRALKFAHSLDDGSYQGTTGKRITDFVHIGIGGSDLGPAMCVQALEPFRRHIAVHFAANADPACLDEVLCRLNPETTVFCVASKSFKTPETLLNAEAVKAWYRGAGFSESETGCHFCAVSADTEAAQSFGIAAERVFAMYDWVGGRYSVWSPVGLPVMVAVGGARFRELLAGAHAMDSHFFHTPPRRNIPVLMALIAVWYNNFQHADGQTAVPYSHNLRLLPAWLNQLDMESLGKSRASDGSPAACKTGGIVFGGEGVNCQHAYFQLLHQGTRLIPCDFIVPMTAQGVEDGRSRFTVANAFAQAEALMKGKTLDEARAELADLPEAERERLAPHKEFPGNRPSNSILLERLTPYNLGMLMAAYEHKTFVQGVIWDINPFDQWGVEYGKQLAKTIIGELEGGTSVHDASTEGLMAFYRECRLKGGGAA

SEQ ID NO: 6531 - protein, 594 aa, Cytophaga hutchinsonii
MNQAILYRGPDHSDFVSFQFKQQQIFIGNNRLKIIDRNTLSNQPYNSIDKRYSLTFNGAIYNYKELKQQLPAMEWQTESDTEVLLNWMIVHGLSGLPELNGMFAFAFYDRQQHALIIARDPSGIKPLYYYNDDDYFIASSEIKGILASGLVKKEFNSNQVSHYLQFKYVPKPFTFYKNIFELNEATFIKIDEYDFKIKRFESPSVIKPNTLTNQQLIETCDQLIENAVKHHLVADVPVGLYLSGGIDSTLLLSKIRKLGHLNFPTFTIANSSREQAFGTRDFEFARLASKLYNSDHHEVSVHAEMLQDLPAFVSMIDQPIGDSALFLTHILSKEAGQHVRVALNGAGADELFAGYNRHSAYKSYLNNLLHKNLAITLIKSTYNILPDGGNHSLKKVFRLWNKFTGMMDVDPIKTCHNFSSSEYFIEKNTSIEVDDKSYEDLSYYLYYCLRNDRTKYLISDILALTDKMTMRSSIEARVPYLDQELRRFVESLDPSVLLKNGRKWILKEVLLRNGGETFLNRPKEGFGMPFGYWLKLPVNKNFVEKLTNKNHPIYEWVPYQTIKNLVDWHLGSKRDCSSELWSVLLLMHWYEKEF

SEQ ID NO: 6532 - protein, 736 aa, Podospora anserina
MASYLPSMEKVQHAVLGPRGGDKVADLQKETKEMSDKARLTTDYGVKQTSADDWLKIVNNDKTGPMLLEDPFARERIHRFDHERIPERVVHARGSGAFGKFKLFESAEDVTFAPILTDTSRETPIFIRFSTVLGSRGSADTVRDVRGFAIKFYTQEGNWDIVANNIPVFFIQDAIKFPDVIHAGKPEPHNEVPQAQTAHNNFWDFQYNHTEATHMFMWAMSDRGIPRSYRMMQGFGVNTFTLINAKGERHFVKFIFTPELGVHSLIWDEALKLAGQDPDFHRKDLWEAIENGVFPKWKFGIQVIPEADEHKFDFDILDATKIWPEDLVPVRYIGEFELNRNPDEFFPQTEQVAFCTSHIVPGIGFSDDPLLQGRNFSYFDTQLSRLGINWQELPINRPVCPVMNFNRDGAMRHTITKGTVNYWPNRFEKVKPATHEEGGYVEYAEKVAGIKARARSAKFKEHFAQAQLFWNSMSAVEKNHIINALGFELDHCEDPVVYERMVTRLADIDLGLAQTVAEMVGGEPPKEASRPNHGRKAPGLSQTEFPGSKPTIASRRIAILVADGYDQVAYSAAYAAISAGLAIPLVIGTKRSKIVAAGGAGSTTPHHHLEGFRSTMVDAIFIPGGVDSIRALSKNGRALHWIREAFGHLKAIGATGEAVDLVNKAIGLPAVSVSESAEVQDSYGVVTMRETKPGSLSEAVDIVKAGAGFMEKFFHNIAQHRCWARELDGLHSQVAY

SEQ ID NO: 6533 - protein, 139 aa, Tolypothrix sp. PCC 7601
IYRFDENWHGTVIAEDKSAHLSPYLSLRYPASDIPKQARQLYRDNWLRLIPDVDYQPVALLPHHNPVTNQPTDLSHSVLRSVSPLHIEYLHNMGVKASMSISLLKNQKLWGLIACHHESPKYVPYEIRSACEFLGQMTS

SEQ ID NO: 6534 - protein, 133 aa, Triticum aestivum
MAALREASRCLASRGSPAAARSMLLAQSRGITYKLFVGGLSQFATEESLAEAFSRYGQVIEATVVRDKVTDIPKGFGFVKFASPEEANNAREEMNGKALNGRVIYVDIAKAKPDRATDALPIARGPPKPISNG

SEQ ID NO: 6535 - protein, 139 aa, Tolypothrix sp. PCC 7601
LYKFDDDGHGSVIAEEKLDSMEPYLGLHYPESDIPKPARKLFASNFIRLIPDAHAEPVQILPINHPQSQQPIDLTNSILRTAANCHLEYLHNMGVGASLTISLIKDGKLWGLIACHHQTPKYVSYEFRKACEFLGRVIF

SEQ ID NO: 6536 - protein, 236 aa, Oryza sativa
MASPEGSTWVFDCPLMDDLAAAAGFDAAPAGGFYWTTPAPPQAALQPPPPQQQPVAPATAAPNACPRSESGTRPSSKACREKVRRDKLNERFLELGAVLEPGKTPKMDKSSILNDAIRVMAELRSEAQKLKESNESLQEKIKELKAEKNELRDEKQKLKAEKESLEQQIKFLNARPSFVPHPPVIPASAFTAPQGQAAGQKLMMPVIGYPGFPMWQFMPPSDVDTTDDTKSCPPVA

SEQ ID NO: 6537 - protein, 145 aa, Pseudanabaena sp. PCC 6903
VYRFNEHGDGTVIAETKQPHLESFLGLHYPDSDIPKQAKHLYTLNWLRLIPDVNYQPTALVSHKQSPEAKSSSEKVPLDMSYCALRSVSPIHIEYLQNMGVTASMSVSLIQNKKLWGLIACHHYTPKFIPYETRTICEFLGQLMS

SEQ ID NO: 6538 - protein, 519 aa, Saccharomyces cerevisiae
MFSRSTLCLKTSASSIGRLQLRYFSHLPMTVPIKLPNGLEYEQPTGLFINNKFVPSKQNKTFEVINPSTEEEICHIYEGREDDVEEAVQAADRAFSNGSWNGIDPIDRGKALYRLAELIEQDKDVIASIETLDNGKAISSSRGDVDLVINYLKSSAGFADKIDGRMIDTGRTHFSYTKRQPLGVCGQIIPWNFPLLMWAWKIAPALVTGNTVVLKTAESTPLSALYVSKYIPQAGIPPGVINIVSGFGKIVGEAITNHPKIKKVAFTGSTATGRHIYQSAAAGLKKVTLELGGKSPNIVFADAELKKAVQNIILGIYYNSGEVCCAGSRVYVEESIYDKFIEEFKAASESIKVGDPFDESTFQGAQTSQMQLNKILKYVDIGKNEGATLITGGERLGSKGYFIKPTVFGDVKEDMRIVKEEIFGPVVTVTKFKSADEVINMANDSEYGLAAGIHTSNINTALKVADRVNAGTVWINTYNDFHHAVPFGGFNASGLGREMSVDALQNYLQVKAVRAKLDE

SEQ ID NO: 6539 - protein, 139 aa, Nostoc sp. PCC 7120
LYKFDDDGHGSVIAEEKLDSLEPYLGLHYPESDIPKPARKLFISNSIRVIPNAQAQAIQMIPALNPVSDRPVDLTNSILRSAANCHLEYLHNMGVGASLTISLIKDNKLWGLIACHHLSAKYVSYELRKACEFLGRVIF

SEQ ID NO: 6540 - protein, 168 aa, Arabidopsis thaliana
MEVTNGLNLKDTELRLGLPGAQEEQQLELSCVRSNNKRKNNDSTEESAPPPAKTQIVGWPPVRSNRKNNNNKNVSYVKVSMDGAPYLRKIDLKMYKNYPELLKALENMFKFTVGEYSEREGYKGSGFVPTYEDKDGDWMLVGDVPWDMFSSSCQKLRIMKGSEAPTAL

SEQ ID NO: 6541 - protein, 573 aa, Zea mays
PGLTGAPPRPPTCTGRPRSSPRTPSSRAPPTESRSHPQLRHRASPRPAWAHPCTGRAALLLLIPTDRKTPPLSSAASSQVSKLVKYIASAGSLQGGHSLSEPSARHYSSEPSLQATEENGFKGHSMLAPFTAGWQSTDVHPLVIERSEGSYVYDSNGKKYIDALAGLWCTALGGNEPRLVKAATEQLNKLPFYHSFWNRTTKPSLDLANDILSMFTAREMGKVFFTNSGSEANDSQVKLVWYYNNALGRPDKKKFIARSKSYHGSTLIAASLSGLPALHQKFDLPAPFVLHTDCPHYWRFRLPDETEEEFSTRLANNLENLVLKEGPETIAAFIAEPVMGAGGVILPPKTYFEKIQAVLKKYDILLIADEVITAFGRLGTMFGCDMYNIKPDLVSIAKALSSAYMPIGAILVSPEITDVIYSQSNKLGSFAHGFTYSGHPVSCAVAVETLKIYKERNIVEHVNKIAPRFQEGIKAFSGSPIVGEIRGLGLILGTEFVDNKSPNDPFPAEWGVGSIFGAECEKRGMLIRVAGDSIMLSPPLIMTPNEVEEIISKFGDALKATEERIVELKSRKN

SEQ ID NO: 6542 - protein, 103 aa, Oryza sativa
  unsure (1)..(103): unsure at all Xaa locations
TRVAGKHVVVVEDIVDTGNTVACLIAYLEKKGASSISVCTFLDXKPARRTANFQLVGDGKFYRGFECPDSFVVGYGMDYAELYRNLPYVGVLKAEMYKKDTSN

SEQ ID NO: 6543 - protein, 139 aa, Nostoc punctiforme
VYQFDESEAGSVVAEVKREDLSPYLGLHYPATDIPAQARELYTRCFLRFLPDLTAEPVKLVPTENPTTHQHLDLSYCLPRSFDWCCAEYHQNMGVKALLVISLIEEQKLWGLISCHHQTPKYISYEVRKMCEFLGQIVS

SEQ ID NO: 6544 - protein, 263 aa, Oryza sativa
MEDGGKHFVFVHGLGHGAWCWYRVVAALRAAGHRATALDMAAAGAHPARADEVGSLEEYSRPLLDAVAAAAPGERLVLVGHSLGGLSLALAMERFPDKVAAAVFLAACMPAAGKHMGITLEEFMRRIKPDFFMDSKTIVLNTNQEPRTAVLLGPKLLAEKLYNRSPPEDLTLATMLVRPGTNYIDDPIMKDETLLTEGNYGSVKRVFLVAMDDASSDEEMQRWTIDLSPGVEVEELAGADHMAMCSKPRELCDLLLRIAAKYD

SEQ ID NO: 6545 - protein, 489 aa, Exiguobacterium sp. 255-15
MKRRDQFMNVPRQAGKERDSSERIGDFNEYKERFSETEASEQASRCMDCGTPFCHVGETYSQVKIGCPVYNLIPEWNVLVEQGNFQEALERLQETNNFPEFTGRVCPAPCEGSCTLSINEPAVTIKQIERTIIDIGFENGWVQPRIPSVRSQHRIAIVGSGPAGLAAADQLNQAGHHVTVFEREDQVGGLLTYGIPAMKLSKDIVARRVRLLETEGITFKTGVTIGLDVSLDQLEADYDAVILCVGATEPRKIPDAPGQGVGYAMDYLTSVTRQLLTGQSLIDLHDTRGKDVLVIGGGDTGADCVATALRQGCRSVVQFGKHQMPGSTRTADNMWPDTPNLFTLDYGYEEAHVQFGRDPREYLIAIERYTTDEAGRLTGVWTIYNDKIRHADGRVEFQKLPGTEKYYPVDTMLIAIGFSGVEQDVLRHLPVASQNGKIKTMAYATDRPGVFAAGDARRGQSLIVWAIREGREVAEKVEQHLLTVHKQTG

SEQ ID NO: 6546 - protein, 217 aa, Triticum aestivum
MAHRVDNEYDYLFKIVLIGDSGVGKSNILSRFTRNEFCLESKSNNRVQFPNRDPPKLKGKTVKAQLWHTAGQERYRAITSAYYRGAVGALLVFDITKRQTFDNVQRWLRELRDHADANIVVMMVGNKSDLNHLRSVPEEDSQAFSEKEGLSFLETSALEAINVEKAFHTVLSEIHQIVSKKALAAQESAAANGRSMQGTTINVAEPSVNAKGSCCSS

SEQ ID NO: 6547 - protein, 783 aa, Mycobacterium tuberculosis H37Rv
MSFVLAMPEVLGSAATDLAALGSVLGAADAAAAATTTGIVAAAQDEVSAAIAALFSAHGRAYQVASAQAAAVHAQFVEALSAGAGAYASAEAAGAAVLANPAQSVQQDLLAAVNAQSVALTGRPLIGNGANGAPGTGANGAPGGWLLGNGGAGGSAAAGSGLPGGAGGAAGLFGTGGAGGAGGSSTVGDGEAGGAGGSGGWLLGTGGVGGVGGLGAGAGGAGGVGGAGGLLGAGGHGGAGGLGAVTGGVGGTGGAGGLLAGLLAGPGGAGGTGGRGFLNNGGVGGAGGNAGLLFGAGGTGGSGGAGLGGDGGAGGAGGNTGVLFGNAGSGGTGGFGDTDGGAGGAGGDAGWLGSGGVGGAGGFGETGDGGVGGAGGKAGLLIGNGGAGGAGGQGAVTGGTGGAGGDGVLIGNGGNAGIGGTGPTAGDTGAGGISGLLLGADGFNTPASASPLHTLKQQALAAINAPTQTLTGRPLIGNGTPGAVGSGATGAPGGWLLGDGGAGGSGAAGSGAPGGAGGAAGLWGTGGAGGAGGSSAGGGGAGGAGGAGGWLLGDGGAGGIGGASTVLGGTGGGGGVGGLWGAGGAGGAGGTGLVGGDGGAGGAGGTGGLLAGLIGAGGGHGGTGGLSTNGDGGVGGAGGNAGMLAGPGGAGGAGGDGENLDTGGDGGAGGSAGLLFGSGGAGGAGGFGFLGGDGGAGGNAGLLLSSGGAGGFGGFGTAGGVGGAGGNAGWLGFGGAGGVGGSAGLIGTGGNGGNGGTGANAGSPGTGGAGGLLLGQNGLNGLP

SEQ ID NO: 6548 - protein, 801 aa, Mycobacterium tuberculosis H37Rv
MSWVMVSPELVVAAAADLAGIGSAISSANAAAAVNTTGLLTAGADEVSTAIAALFGAQGQAYQAASAQAAAFYAQFVQALSAGGGAYAAAEAAAVSPLLAPINAQFVAATGRPLIGNGANGAPGTGANGGPGGWLIGNGGAGGSGAPGAGAGGNGGAGGLFGSGGAGGASTDVAGGAGGAGGAGGNAGMLFGAAGVGGVGGFSNGGATGGAGGAGGAGGLFGAGRERGSGGSGNLTGGAGGAGGNAGTLATGDGGAGGTGGASRSGGFGGAGGAGGDAGMFFGSGGSGGAGGISKSVGDSAAGGAGGAPGLIGNGGNGGNGGASTGGGDGGPGGAGGTGVLIGNGGNGGSGGTGATLGKAGIGGTGGVLLGLDGFTAPASTSPLHTLQQDVINMVNDPFQTLTGRPLIGNGANGTPGTGADGGAGGWLFGNGGNGGQGTIGGVNGGAGGAGGAGGILFGTGGTGGSGGPGATGLGGIGGAGGAALLFGSGGAGGSGGAGAVGGNGGAGGNAGALLGAAGAGGAGGAGAVGGNGGAGGNGGLFANGGAGGPGGFGSPAGAGGIGGAGGNGGLFGAGGTGGAGGGSTLAGGAGGAGGNGGLFGAGGTGGAGSHSTAAGVSGGAGGAGGDAGLLSLGASGGAGGSGGSSLTAAGVVGGIGGAGGLLFGSGGAGGSGGFSNSGNGGAGGAGGDAGLLVGSGGAGGAGASATGAATGGDGGAGGKSGAFGLGGDGGAGGATGLSGAFHIGGKGGVGGSAVLIGNGGNGGNGGNSGNAGKSGGAPGPSGAGGAGGLLLGENGLNGLM

SEQ ID NO: 6549 - protein, 417 aa, Bradyrhizobium japonicum USDA 110
MDISRPVFFVTVFDETVMSEVPMSKSPATYRPETRLVHSGTLRSQFGETSEALFLTQGYVYNSAEECEARFKGEDPGFIYSRYSNPTISMFERRMIELEGAEAARSAATGMAAVTTAILAPLKTGDHVVASRALFGSCLYVIQDLLPRYGIETTLVDGLDLDQWQRALRPNTKTFFLESPTNPTLDVLDIPGIAEIAHKGGARLVVDNVFATPIWQSPLALGADVVVYSATKHIDGQGRCLGGIILSSEAFVAEHLHNFMRQTGPSISPFNAWVLLKGLETLAVRVRAQTDTAASVAEVLAGHPKISRLIYPGRADHPQAALVKKQMRGGSTLVGFEVKGGKAAAFRVLNELKLAKISNNLGDAKSLVTHPATTTHQRLKPEDRAALGISEGFIRFSAGLEHADDLIEDLTAALEKA

SEQ ID NO: 6550 - protein, 413 aa, Listeria monocytogenes EGD-e
MEMDPNTDLSSVTRPRATPVLTTFQFDSGKVGHIWTTFSEDQIDLNFACPEVLYKMIDVLMFYLEEGAEYVRLDAVGFMWKVPGTSSIHLEETHEIVKLFRDLVDIAAPGTIIITETNVPHVDNISYFGNGEKEAHMVYQFPLPPLVLHAIHHGNAKFLRNWAKNLELPEGKRTFFNFLASHDGIGLNPVRGIIPEAEILALVNDLEEEGALVSYKQNPDGSKSPYEINVTYMDALSKQADTDDLRLARFLVAHAVLMSIPGVPAVYVQSILGSRNDYLGVEATSHNRSINRKKYDLAEITAELEQRGSLRKATYDALTKLISTRKAESLFHPEIPMEVLESTAELFVVKRSSDAESIILIHNLSEKEVSYSLDSGVYTNLYKGSTVTGSDSIKLSGYEFCWLKTKNYREEQK

SEQ ID NO: 6551 - protein, 270 aa, Magnetococcus sp. MC-1
MSSQPPIAFLGGGNMASAIIAGLHKVGYPAAKLRVGEPNATQREALIRQFAIQGHAHNPDAVAEAAFVVVAVKPNLVAQVLRDVAPQLAPTAVVLSIAAGVDLTTMAAALPAGQPIIRAMPNTPALVGQGMTVLCPNGHVDAEQLAQAQRLLESVGQVAVVKQESLMDGVTALSGSGPAYLFLIAEALSDGGVACGLPRALADQLAVQTLLGSATLLRESGEHPGVLKNRVTSPGGTTIAGLGVLERQGVRGALMAAVEAAWNRSKALGQ

SEQ ID NO: 6552 - protein, 140 aa, Listeria monocytogenes EGD-e
MTNLRKRLSRLYAEDVVDSLAARIEARVQQTQQRKLTRKDQWDEKDIVLITYGDQFKEESQKTLTTFKKMYDSYLKSAFEIVHFLPFYPYSSDDGFSVIDYKAVNPELGDWKDIKEMEKSARLMFDFVCNHMSAKSDWFK

SEQ ID NO: 6553 - protein, 726 aa, Podospora anserina
MKRLLTWATLVGSMSAVTKAACPFADPNYHLAKRDEGASQQTENILEEYEVDDSNAYMSSDVGGPMEDQNSLKAGYRGSTLMEDWIFRQKIQHFDHERIPERAVHARGAGAHGTFTSYADWSNITAASFLGGAGKKTPVFVRFSTVAGSRGSADTARDVHGFATRFYTDEGNFDIVGNNIPVFFIQDAIRFPDLIHSVKPSPDNEVPQAATAHDSAWDFFSQQPSTMHTLFWAMSGNGIPRSYRHMDGFGVHTFRFVTDDGNSKLIKWHFKTKQGKASLVWEEAQVLAGKNADFHRQDLWDAIESGNGPEWELSVQIVDEEKALAFGFDLLDPTKIIPEELAPLVPLGIMKLDRNPTNYFAETEQVMYQPGHIVRGVDFTEDPLLQGRLFSYLDTQLNRNQGGPNFEQIPINRPVSPVHNNNRDGAGQMLIHKNVYPYTPNTLNGGYPLQANQTHGKGFFTAPNRIVDGKLVRALSPTFDDHWSQPRLFYNSLTRVEQQFLINAIRFEASHLKNEQVKKNVLEQINRVSNDVAKRVAVALGLEAPAPDPAFYHNNVTAGLSIFNGTLPTIATLRVGVLASSFNDGSLAQARELKEQLSKEGVVVTVVGEVLKEGVDQTYSAADATGYDAVVVTDGAEGLLTGGKNSPLFPAGRPGQILVDSYRWGKPVAAVGENSGQALEQTVGVSRGQDEGVVVGEGVEQVVKGVEEGLRVFRYLGRFPVDEGAE

SEQ ID NO: 6554 - protein, 636 aa, Neisseria polysaccharea
MLTPTQQVGLILQYLKTRILDIYTPEQRAGIEKSEDWRQFSRRMDTHFPKLMNELDSVYGNNEALLPMLEMLLAQAWQSYSQRNSSLKDIDIARENNPDWILSNKQVGGVCYVDLFAGDLKGLKDKIPYFQELGLTYLHLMPLFKCPEGKSDGGYAVSSYRDVNPALGTIGDLREVIAALHEAGISAVVDFIFNHTSNEHEWAQRCAAGDPLFDNFYYIFPDRRMPDQYDRTLREIFPDQHPGGFSQLEDGRWVWTTFNSFQWDLNYSNPWVFRAMAGEMLFLANLGVDILRMDAVAFIWKQMGTSCENLPQAHALIRAFNAVMRIAAPAVFFKSEAIVHPDQVVQYIGQDECQIGYNPLQMALLWNTLATREVNLLHQALTYRHNLPEHTAWVNYVRSHDDIGWTFADEDAAYLGISGYDHRQFLNRFFVNRFDGSFARGVPFQYNPSTGDCRVSGTAAALVGLAQDDPHAVDRIKLLYSIALSTGGLPLIYLGDEVGTLNDDDWSQDSNKSDDSRWAHRPRYNEALYAQRNDPSTAAGQIYQGLRHMIAVRQSNPRFDGGRLVTFNTNNKHIIGYIRNNALLAFGNFSEYPQTVTAHTLQAMPFKAHDLIGGKTVSLNQDLTLQPYQVMWLEIA

SEQ ID NO: 6555 - protein, 139 aa, Leptolyngbya sp. PCC 7375
LYRFDDDGHGEVVAEEKCEEMEPYLGLHYPESDIPKTARQMFLSNWIRVIPDAAATAVDLYPMDNPVTQQPTDLTHSILRSAYSCHLEYLHNMGVGASLTISLMKDNKLWGLIACHHRTAKYVPYELRKACEFLGRVIF

SEQ ID NO: 6556 - protein, 397 aa, Clostridium tetani E88
MLSKKGKEISPSVTLAITAKANEMKKDGIDVVGFGAGEPDFNTPENIQNAAIKAMREGYTKYTPVSGVVELKDAIVNKFKKENNLIYKSSQIIVSTGAKQCIANLFMAILNPGDEVLISAPYWVSYPELVKLADGVPVFVDCKKENDYKYSIDELEKRVSSKTKAIIISSPNNPTGSIYYEEELRDIAEFCKKHNLIILSDEIYEKLIYGHNKHISIASLNEDTYNRTVVINGVSKTYAMTGWRIGYAAGPGNVIKLMNNIQSHMTSNPNSIAQYAALEALTGEQESINSMVSEFEKRRNYMVERINSINGIECIEPKGAFYMFADINKVIGKKINGEEIKNSVDFCEKLLELYKVAVVPGAAFGLENHIRLSYAISMENIEKGLDRISNCVSELQS

SEQ ID NO: 6557 - protein, 136 aa, Leptolyngbya sp. PCC 7376
VYRFDRDGVGIIEAESKAEHMTSYLGLHFPNVDIPVSARELFQMNALRLISDVEDEPIPLLALNDSELLDLSYAILRPPSPCHVQYLQNMDVAASMVMPLIKDGQLWGLINCHHSSPKHIPCDIRTACVFLGKLMC

SEQ ID NO: 6558 - protein, 393 aa, Prochlorococcus marinus subsp. marinus str. CCMP1375
MSNLDVISERALSLKPSLTLEISSLAQSLKQKGRDICSLSAGEPDFDTPNFIVEAAKKALDDGITKYGPAGGDPSLREEVAKKLTEINDVPTSPENVLITNGGKQAIFNLLQVIINPGDEVLIPSPYWLSYPEITKIAGGIPITINSSKGNSFSLDIEEIEKNINHKTKLLILNSPCNPTGRIIQESELQSIANLLRKHPNIYVMSDEIYEFLITDKEVHISLASIAPDLKDKIFIVNGFAKAWAMTGWRVGYLQGSSKIIKKAIALQSQSTSNVCSFAQRGALAAIKGAPKGIDYMIQSYNERRKLLTEELRQISSLSLEAQSGAFYAFPKLSDELPDSLSFCKIALEKEGLAIVPGIAFGNDRCIRLSCSVNTETLNDGITRLNRIIKDIT

SEQ ID NO: 6559 - protein, 264 aa, Candida albicans
PGAGEMRDGMEYLQSSEILKSNDSAQKGIEEMQILADYVDAFDITQYLSFDLSLARGLDYYTGLIYEAVTAASAPPENATELKAKSKDDDASAYVGVGSIAAGGRYDNLVGMFSNGKSIPCVGVSFGVERLFSIIKNRANLNNISANHTDVFVMAFGGGEGWNGFLKERMEITNKLWKAGINAEYLYKSKANIRKQFDAAEKAGAKLAVILGKEEYPQGQLRIKVLGQGEENEGELVTKDELLAAVQAKLSSDIDDISRIIKGL

SEQ ID NO: 6560 - protein, 144 aa, Pseudanabaena sp. PCC 7409
IYRFSEQGDGTVISEVKQPDLEPFLGLRYPDSDIPKQAKHLYTLNWLRLIPDVNYQPTGLVSHGLPEAASPLQNASLDMSYCTLRSVSPIHIKYLQNMGVTASMSVSLIQNKKLWGLIACHHYTPKFVPYETRTICEFLGQLMS

SEQ ID NO: 6561 - protein, 171 aa, Triticum aestivum
  unsure (1)..(171): unsure at all Xaa locations
KCSENPFALLTTFNEVDMTNLXVSPQLGVKLGLMSCFVKAAVSALQNQPIVNAVIDGDDIIYRDYIDVSVAVGTSKGLVVPVIRDTEGMNFADIEKGINSLAKKATEGALSIDEMAGGXFTISNXGGVLWXVLISTPINQTPPXVSKFLGMQFLLSKRPWWLLDGLQSKAN

SEQ ID NO: 6562 - protein, 139 aa, Stanieria cyanosphaera str. PCC 7437
LYKFDEDDHGSVIAEEKRSDLVSYLGLHYPESDIPRPARKLFSYNWIRLIPDAQTQPVEMIPAINPISDRPLDLTHSILRSAFPCHLEYLHNMGVGASLTISLIKDQKLWGLIACHHQTPKHVPYELRKACEFLGRVVF

SEQ ID NO: 6563 - protein, 244 aa, Oryza sativa
MASSHIILPPDDDDEEQRRLEEEEDEDPWARSGPPPAAPEHAMKAALPFSATCVRISRDSYPNLRALRNASSVSLADAAYVKISEGDFGYVLDDVPHLVDHLPDAPVVVQKNSRRGVHFRRAGPRQKVYFESDEVKACIVTCGGLCPGLNTVIRELVCGLAHMYNVSKIYGIQNGYKGFYSSNYLTLTPKSVDDIHKRGGTVLGTSRGGHDTKKIVDNIQDRGINQVYIIGGDGTQKGAYEIFK

SEQ ID NO: 6564 - protein, 1565 aa, ASPERGILLUS NIDULANS FGSC A4
MSADDPSSFVDAEPKPTPKRPHWREKLFSREKPKNTADQQVEAFLAPVRSKSVSHGGHAVSTTEREIPAPPRLDVSQRWPSAHETQTVSPVSSTSPPTDSKLSAASTLPPLKIRKNKGLRVKFADGAPVCIGEGGDESEEPTIEISLNRSRSHSQSSNQPNDVGQPQAGGPQLRLDTSFRDRDGLRPREGGSPAGRAPLLIKNTQDADFLMALNLGESGSRLSFRASPGADSLAQRVRAKMELEEGRALQQKYEDPTSPNERTPDSPSSLYETPPNTEPEPASPPSPLRTPPSPEKTRSMNPTDFTSSASLAPGGGMKSLSPPKPELVRNAASEELRPSSRESRTKSASPQPPKYSLRSVANQFGEVAYVEFKEYAGRYQDVIKLSAESVKPLMETSLTEWVRAAVWWFMRGKKRLEAYARSRSRPDSRPSPEMAQQAVIDLAKALWINEAIVPQHQEVARYGAMGVDALIAVANTTGDKQLSDLLGVHQSVLSHLRSLAVSIKRNNILSAIPPETESDTSVWVRYPFFAPDVSAVLSGATSRSMLLDNSGKGPTFVQMMPLGDSSRHFSYGSMFVEVSVSSSEDDSQQFSMPCALSIIRDRADWYVLAAITSQSDLVNVMIQPDKKKGPTWDDVNWQVRTHSMTVKLPRGFELDVMFKEDDFKMLWNIVNYTLKTEASLQPEAGESVIFECTLKLFQYMDPGTPKAFPAESIERCRVRLFERSVTVTEGTGTRRAHRGFRITVLTTPKVKTLSSVRHILGHGAPILFGLLRGEDGAPALVLKVNEDGRSRSMLMTFQETRERTNLHSLLLAMLPKQRELKVADVPLRAYTIEQPADRFNGQPAKQHLQFPAGTVCVIDQEHDYVEHGYGPTVLSEHLRAFIASEWGSVTDRFNLGPGELKISLDINNRTGLSLYRPAQQDLTVSAAENLIPPDMQDKLADFLQIAMAKPMIRKFDFMTVKGLHEFEKAVTGFTVLFDSVASSFMISRRRMVVPITKKWESSMARIQIVRQDKVVQLLAFLNDFSHGKCLNFVLKSTDTFEAFNRSGKYGVRIVDAKFALPKTDDDPSSAFLNLDMPEYPSEHDDITIAFDTEADRFNFQSAAPASVREPSRMASLRRLAVFEARWLVGHAISTGPAGHVYLSPHYEPSCGSRPLPLFNPQSNAMLPEGQDVGASTRSLHADDVLNVVTDVAPPIHVATTFRYSDDPAKLMPAADLNGRLTAQTLEEQSSYIYSRLTAPTTTRFEAILSSLLNGQTISYSSGLSAFHAALTLLNPRRISIGKGYHGCHGVIDIFNRLNGLQKLDLDCPAEQLEAGDVIHLETPVNPEGTSFNIEQYAKKAHSRGAYLIVDGTFAPPPLQDPFKFGADLVLHSGSKYFGGHSDVLCGVLATQNKDWAQQLLRDRVFLGGVMGNLEGWLGVRSLRTLEVRVQRLSQNATNLVLWLHNALQTPSPAPGSDEEATQKVLEQVFHSSLQKDDESWLLKQMPNGFGPVFSITMREEDYARHLPSKLALFQHATSLGGVESLIEWRTMSDKTVDRRLLRVSIGLENWEDLKRDLVNAFRALV

SEQ ID NO: 6565 - protein, 142 aa, Oscillatoria sp. PCC 7821
IYRFNEGGDGNIIAEIKQPEQKAFLGLRYPDSDIPKQAKHLYTLNWLRLIPDMDYQPCQLVTSPTANPEVEIQPLDMSYCGLRSISPLHIEYLKNMEVAASLTISLIQQQKLWGLIACHHNSPKFIPYEVRTVCEFLGQLMS

SEQ ID NO: 6566 - protein, 490 aa, Pseudomonas aeruginosa UCBPP-PA14
MARFEEQKLYIGGRYVEASSGATFETINPANGEVLAKVQRASREDVERAVQSAVEGQKVWAAMTAMQRSRILRRAVDILRERNDELAALETLDTGKPLAETRSVDIVTGADVLEYYAGLVPAIEGEQIPLRETSFVYTRREPLGVVAGIGAWNYPVQIALWKSAPALAAGNAMIFKPSEVTPLTTLKLAEIYTEAGVPDGVFNVLTGSGREVGQWLTEHPLIEKISFTGGTSTGKKVMASASSSSLKEVTMELGGKSPLIIFPDADLDRAADIAVMANFFSSGQVCTNGTRVFIHRSQQARFEAKVLERVQRIRLGDPQDENTNFGPLVSFPHMESVLGYIESGKAQKARLLCGGERVTDGAFGNGAYVAPTVFTDCSDDMTIVREEIFGPVMSILVYDDEDEAIRRANDTEYGLAAGVVTQDLARAHRAIHRLEAGICWINTWGESPAEMPVGGYKQSGVGRENGLTTLAHYTRIKSVQVELGDYASVF

SEQ ID NO: 6567 - protein, 472 aa, Streptomyces coelicolor A3(2)
MASTSQAPSPGAGTAHPDHLGHVIFIAAAAAMGGFLFGYDSSVINGAVEAIRDRYDVGSAVLAQVIAVALIGCAIGAATAGRIADRIGRIRCMQIAAVLFTVSAVGSALPFALWDLAMWRIIGGFAIGMASVIGPAYIAEVSPPAYRGRLGSFQQAAIVIGIAVSQLVNWGLLNAAGGDQRGELMGLEAWQVMLGVMVIPAVLYGLLSFAIPESPRFLISVGKRERAKKILEEVEGKDVDFDARVTEIEHAMHREEKSSFKDLLGGSFFFKPIVWIGIGLSVFQQFVGINVAFYYSSTLWQSVGVDPADSFFYSFTTSIINIVGTVIAMIFVDRVGRKPLALIGSVGMVIGLALEAWAFSFDLVDGKLPATQGWVALIAAHVFVLFFALSWGVVVWVFLGEMFPNRIRAAALGVAASAQWIANWAITASFPSLADWNLSGTYVIYTIFAALSIPFVLKFVKETKGKALEEMG

SEQ ID NO: 6568 - protein, 165 aa, Zea mays
  unsure (1)..(165): unsure at all Xaa locations
MCQDRCIRVMPNTXTAAVESASVMSXXTGAANEYGAIAAMLWDAEEKLLKRDEKTFDAVTRLSRSGPAYISLTSEALADGGVAAGISRELALSLASQTVPGSATMFSKSGKHAGVLKDDVTSPGDTTISGVHEXEKASSRATPINAVVDAVTRNRELSQNSMIHM

SEQ ID NO: 6569 - protein, 506 aa, Exiguobacterium sp. 255-15
MIYEIPNTQGSKVQYKDRYENFINGKWTAPVGGEYFDNVTPITGKVLCQVARSGKEDVELALDAAHAAKDAWGKTSVAERSNILNKIANRMEENLEMLAYAETLENGKAVRETLNADLPLAIDHFRYFAGVIRAQEGSIGELDNDTVAYHFHEPLGVVGQIIPWNFPILMAVWKLAPALAAGNCVVLKPAEQTPASILLMTELIEDLLPPGVLNIVNGFGLEAGKPLASSKRIAKIAFTGETTTGRLIMQYASQNIIPVTLELGGKSPNIFFADIMDADDAFFDKAIEGLLMFALNQGEVCTCPSRALIEESIYEPFMERVLERVKAIKLGNPLDADVMMGAQASSEQMEKILSYLEIGKSEGAECLIGGERNHLDGDLADGYYIQPTIFKGNNKMRIFQEEIFGPVLSVTTFKTEEEALQIANDTLYGLGAGVWTRDMNRAYRFGRAIEAGRVWTNCYHQYPAHAAFGGYKMSGIGRENHKMMLNHYQRTKNLLVSYSPDKLGFF

SEQ ID NO: 6570 - protein, 584 aa, Mycobacterium tuberculosis H37Rv
MSFVIVARDALAAAAADLAQIGSAVNAGNLAAANPTTAVAAAAADEVSAALAALFGAHAREYQAAAAQAAAYHEQFVHRLSAAATSYAVTEVTIATSLRGALGSAPASVSDGFQAFVYGPIHATGQQWINSPVGEALAPIVNAPTNVLLGRDLIGNGVTGTAAAPNGGPGGLLFGDGGAGYTGGNGGSAGLIGNGGTGGAGFAGGVGGMGGTGGWLMGNGGMGGAGGVGGNGGAGGQALLFGNGGLGGAGGAGGVDGAIGRGGWFIGTGGMATIGGGGNGQSIVIDFVRHGQTPGNAAMLIDTAVPGPGLTALGQQQAQAIANALAAKGPYAGIFDSQLIRTQQTAAPLANLLGMAPQVLPGLNEIHAGIFEDLPQISPAGLLYLVGPIAWTLGFPIVPMLAPGSTDVNGIVFNRAFTGAVQTIYDASLANPVVAADGNITSVAYSSAFTIGVGTMMNVDNPHPLLLLTHPVPNTGAVVVQGNPEGGWTLVSWDGIPVGPASLPTALFVDVRELITAPQYAAYDIWESLFTGDPAAVINAVRDGADEVGAAVVQFPHAVADDVIDATGHPYLSGLPIGLPSLIP

SEQ ID NO: 6571 - protein, 543 aa, SYNECHOCOCCUS SP. WH 8102
MDQSSGKGSGRDVGVAPVVLTILDGWGHRNDSEHNAIRQGDTPVMEALWHAYPHALIQASGSHVGLPDHQMGNSEVGHLTIGAGRIIRQELVRISDTVRDDQLNNTPALVELAEHLQNDTGTLHLLGLCSDGGVHSHVNHLCGLIHWAAAAGIKKVAVHAITDGRDTPTQSAMGSITLVQRAMEEAGVGHLASLCGRYWAMDRDKRWDRTEKAYDLYTDPTRSISDQSPQQLLAESYAAGITDEFLKPVRLSDDVMQDGDSVLVFNFRPDRARQIVQTLCLDDFDGFERRTTPKLDVVTFTQVEQDLPVSVAFPPEPLDDLLGQVVAEAGLRQYRTAETEKYPHVTYFMNGGIEQPLPGEERHLVPSPRVATYDLSPAMSADQLTDSCIDAIDQGTYSLIVINYANPDMVGHTGVMDAATEAIATVDRCIGRLLDAVGRRGGTMLITADHGNAELMQGPDGQAWTAHTTNPVPCILVEGEQRKLPGHGNDISLREDGGLADIAPTLLQILNLEQPAAMTGRSLIEPVSNVDPSPLSARLPLPV

SEQ ID NO: 6572 - protein, 560 aa, Arabidopsis thaliana
MASSTALICDTEAWKDLKGHVEDIKKTHLRDLMSDANRCQSMMMEFDGLLLDYSRQRATVETMDKLLNLAKAAQLTEKISRMFNGEHINSTENRAVLHVALRAPKDAVIKADGKNVVPEVWNVLDKIKEFSDKIRSGSWVGATGKPLKDVIAIGIGGSFLGPLFVHTALQTDPEALESAKGRQLRFLANIDPVDVARNISGLNPETTLVVVVSKTFTTAETMLNARTLREWITAALGASAVAKHMVAVSTNLALVEKFGIDPNNAFAFWDWVGGRYSVCSAVGVLPLSLQYGFSMVEKFLKGASSIDQHFQSTPFEKNIPVLLGLLSVWNVSFLGYPARAILPYSQALEKFAPHIQQVSMESNGKGVSIDGLPLPFETGEIDFGEPGTNGQHSFYQLIHQGRVIPCDFIGIVKSQQPVYLKGEVVSNHDELMSNFFAQPDALAYGKTPEQLQKENVSENLIPHKTFSGNRPSLSLLLPELTAYNVGQLLAIYEHRVAVQGFVWGINSFDQWGVELGKVLATQVRKQLHSSRTQGTAPEGFNYSTTTLLKRYLETSSEPQM

SEQ ID NO: 6573 - protein, 560 aa, Arabidopsis thaliana
MAPSPALICDTEAWKDLKGHVEDIKKTHLRDLMSDVNRCQSMMMEFDGLLLDYSRQRATVETMDKLLNLAKASQLTEKISRMFNGEHINSTENRSVLHIALRAPKDAVIKADGMNVVPEVWNVLDKIKEFSDKIRSGSWVGATGKPLKDVIAIGIGGSFLGPLFVHTALQTDPEALESAKGRQLRFLANIDPVDVARSISGLNPETTLVVVVSKTFTTAETMLNARTLREWITAALGASAVAKHMVAVSTNLALVEKFGIDPNNAFAFWDWVGGRYSVCSAVGVLPLSLQYGFSMVEKFLKGASSIDQHFQSTPFEKNIPVLLGLLSVWNVSFLGYPARAILPYSQALEKFAPHIQQVSMESNGKGVSIDGLPLPFETGEIDFGEPGTNGQHSFYQLIHQGRVIPCDFIGIVKSQQPVYLKGEVVSNHDELMSNFFAQPDALAYGKTPEQLQKENVSENLIPHKTFSGNRPSLSLLLPELTAYNVGQLLAIYEHRVAVQGFVWGINSFDQWGVELGKVLATQVRKQLHSSRTQGTAPEGFNYSTTTLLKRYLETSSEPQM

SEQ ID NO: 6574 - protein, 351 aa, Saccharomyces kluyveri
MSASQIPETQKAVIFYENGGELQYKDIPVPKPKSNEILINVKYSGVCHTDLHAWKGDWPLPTKLPLVGGHEGAGVVVAIGENVKGWKIGDYAGIKWLNGSCMACEYCELSNESNCPEADLSGYTHDGSFQQYATADAVQAARIPAGTDLAEVAPVLCAGITVYKALKSANLRAGEWVAISGACGGLGSLAIQYAKAMGYRVLGIDGGDEKAALFNELGGEVFIDFTKTKDVTKAVIDATNGGAHGVINVSVSEAAIEASTVYCRANGTVVLVGLPGGAKCKSDVFNQVVKSTTIVGSYVGNRADTREALDFFARGLVKSPIKVVGLSELPSIYEKMQKGAIVGRYVVDTSK

SEQ ID NO: 6575 - protein, 284 aa, Solanum tuberosum
QIDNTLFEGMHWLKKLHLANNQLSGKIPSVLGQLPKLTELRVENNKFEGQIPDFVQERLMDMNFANNSLEGPIPHGLTSLKPSAFEGNDLCDGPLSKCTSEPKVALWTVILVVIAVAAAVAAIVVVIIILRRGKQTPETETRPTPTPSGAAWGATNQTGAPLAADLNKMEQGSNQAMAAPAPDQSPEGTGGLNNNKRPEVQAIQNLLFLKDDVDKFDLPDLLKASAEILGSGVFGSTYKAALSLRPVMVVKRPRQMNNVGKEDFHEHMRWLGRLSHRNLLPVVA

SEQ ID NO: 6576 - protein, 373 aa, Saccharomyces kluyveri
MLRLSTRASLTARPFFQGSFRTMATASIPEKQKGIIFYENGGELKYEDIPVPKPKPNELLINVKYSGVCHTDLHAWKGDWPLPTKLPLVGGHEGAGVVVAMGENVKGWKIGDLAGIKWLNGSCLSCEYCEKSNESNCPHADLSGYTHDGSFQQYATADYVQAARIPEGTDLAEVSPILCAGVTVYKALKSANLKAGDWVAISGAAGGLGSLAVQYAKAMGYRVLGIDGGAEKGELVKKLGGEVFIDFTKHKNLVEAVQEATNGGPHGVINVSVSEAAMTASTQFVRPTGTVVLVGLPAGAVIKSEVFSHVVKSINIKGSYVGNRADTREAVDFFVRGMVKSPIHVVGLSELPKVYELMEKGKILGRYVVDTAK

SEQ ID NO: 6577 - protein, 377 aa, Saccharomyces kluyveri
MFRLARLQNTATSARSLASSFIRFNSTVAPAIPTTQKGVIFYESGGKLEYKDIPVPKPKPNEILINVKYSGVCHTDLHAWKGDWPLPTKLPLVGGHEGAGVVVAKGENVMNFEIGDLAGIKWLNGSCMACELCEQGHESNCLHADLSGYTHDGSFQQYATADAVQAAQIPKGTDLAEVAPILCAGVTVYKALKTADLRPGQWVAISGAAGGLGSLAVQYAKAMGLRILGIDGGPGKEELFKSLGGEVFIDFTKTKDIVSAIQEATKGGPHGVINVSVSEAAISTSTQYVRPTGTVVLVGLPANAYVKSEVFSHVVKSINIKGSYVGNRADTREALDFFTRGLVKSPIKIVGLSELPEVYGLMEKGKILGRYVVDTAK

SEQ ID NO: 6578 - protein, 506 aa, Vibrio cholerae
MIYPIPNSETSTVHFKDVYDNYIGGQWMKPHSGEYFSNTSPVNGLVFCRVARSSSQDVELALDAAHNALESWSTTSAVERSNILLRIADRIESNLETLAIVESWDNGKPIRETLAADLPLTIDHFRYFAACIRSQEGAASELDSRTLTYHLPEPIGVVGQIIPWNFPLLMAAWKLAPALAAGCTVVLKPAEQTPVSILFLMEIIGDLIPAGVINVVNGFGSEAGNALATSQRIDKLAFTGSTEIGNHILKCAADNLIPSTIELGGKSPNIYFPDIFSHEDQYLDKCIEGALLAFFNQGEVCTCPSRILVHESIYEKFIAKIIERVALIKQGNPLDTETQIGAQVSKEQYDKILGYIQIGKDEGAELIFGGHPNNQENYLSGGYYIKPTLFFGHNQMHIFQEEIFGPVIAITKFKDEIEALHLANDTVYGLGAGVWTRDINIAHRMAKNIKAGRVWVNCYHAYPAHAAFGGYKKSGIGRETHKLTLSHYQNIKNVLISHEIHPLGLF

SEQ ID NO: 6579 - protein, 514 aa, Oryza sativa
MQFMMPLDTNACAQPMRRAGEGAGTERLMERLNIGGMTQEKALRKRCFGDGVTGTARRVFTSDADRDTPHLRTQFSRKNYADASHVSAVILGGGTGVQLFPLTRTRATPAVPVGGCYRLIDIPMSNCFNSGINKNIFVMTQFNLTSLNRNIHHTYLVGGINLTDGSVQVLAATQMPDEPAGWFQGTADAIRKFMWILEDHIHKSIDNIVILCGDQLYRMNYMELVQKHVDTNADITISCAPIDGSRASDYGLVKFDHSGRVIQFLEKPEGADLESMVDTSFLSYAIDDKQKYPYIASMGIYVLKKDVLLDILKSKYAHLQDFGSEILPRALLEHNVKVACVFTEYWEDIGTIKSFFDANLALTEQPPKFEFYDPKTPFFTSPRYLPPARLDKCKCKIKDAIISDGCSFSECTIEHSVIGISSRVSSGCELKIYETEEETSKLLFEGKVPIGIGQNTKIRNCIIDMNARIGRNAIIANTQGVQESDHPEEGYIRSGIVVILKNATNATIKHGTVI

SEQ ID NO: 6580 - protein, 170 aa, Zea mays
MAPTVMMASSATAVAPFQGLKSAASLPVARRSTRSLGNVSNGGRIRCMQVWPAYGNKKFETLSYLPPLSTDDLLKQVDYLLRNGWIPCLEFSKLGFVYRENSTSPCYYDGRYWTMWKLPMFGCTDATQVYKELQEAIAAYPDAFHRVIGFDNVRQTQCVSFIAYKPPGSD

SEQ ID NO: 6581 - protein, 347 aa, Triticum aestivum
HEITNLPRKWNVCVIGTHDLYEHPHINDEAGTRAEKDGKFGFNLLVGGFISPKRWGEALPLDAWVPGDDIIPVCKAVLEAFRDLGTRGNRQKTRMMWLIDELGMEAFRSEIEKRMPNGVLERAAAEDLIDKKWERRDYLGVHPQKQEGLSFVGLHVPVGRLQAADMFELARLADEYGSGELRLTVEQNIVLPNVKNEKVEALLAEPLLQKFSAHPSLLMKGLVACTGNQFCGQAIIETKARALQVTRDVEARVSVPRAVRMHWTGCPNSCAQVQVADIGFMGCLTKNSSGKIVEAADIFVGGRVGSDSHLTGVYKKAVPCEDLVPLVADLLVERFGAVPREREEDEE

SEQ ID NO: 6582 - protein, 139 aa, Nostoc sp. PCC 8009
VYRFDENWNGIVIAEEKLEHLTAYLGLHYPASDIPQQARKLYSQNWLRIIPDATYQPVAIVPTNNPLTEQPLDLSNSVLRSVSPLHVEYMHNMGVAASMSISLKKNQKLWGLIACHHQTPKYIPYELRNTCEFLAQITS

SEQ ID NO: 6583 - protein, 174 aa, Triticum aestivum
  unsure (1)..(174): unsure at all Xaa locations
YTYIVHPWAPTVMASSATSVAPFQGLKSTAGLPVSRRSTALASAASASVXRIRCMQVWGGEGIKKFETLSYLPPVSTEALLKQVDYLIRSKWVPCLEFSKVGFIFREHNASPGYYDGRYWTMWKLPMFGCTDATQVINEVEEVKKEYPDAFVRFIGFDNLRQVQGRRFLAFKPP

SEQ ID NO: 6584 - protein, 277 aa, Burkholderia fungorum LB400
MSERLKDRVALVTGAASGIGAATARLMAQEGAFVVLADVDEHAGQALARELRDATFAYTDVSVEAQVAAAVDEALRLHGRLDCMVNNAGFVGAYGSILETSAAAWHATLGVLLDGVFYGIKHAARAMVKQGSGCILSVASTAGVMGGLGPHAYTSAKHAVIGLTRSAASELAPRGVRVNAVAPGTTVTEMMVQGRGSRQAAIDAATRASPLGTPLMPQEIAAALVYLASDDARHVNAHTLVVDSGVTVAGASGGAVFHNRPAGFMGRMPGGANADAR

SEQ ID NO: 6585 - protein, 176 aa, Triticum aestivum
  unsure (1)..(176): unsure at all Xaa locations
MAPTVMASSATSVAPFQGLKSTAGLPVSRRSNGASLGSVSNGGRIRRMQVWPIEGIKKFETLSYLPPLSTEALLKQVDYLIRSKWVPCLEFSKVGFIFREHNASPGXYYDGRYWTMWKLPMFGCTDATQVINEVEEVKKEYPDAYVRIIGFDNMRQVQCVSFIAFKPPGCEESGKA

SEQ ID NO: 6586 - protein, 314 aa, Burkholderia fungorum LB400
MTTGSWWAAALAESVDASRPLAVVCNGEALVLFRDASGAACALEDRCPHRRVPLALGKVTPKGLQCGYHGWTFDGKTGACTAIPNLSADERVPPRYGARSYRVAEASGFIHVWLGDGEPDDARLPGSLYHPQGEEHTGASIVNVAAHEYLDAMLDGPDCLVSFDGVRITDFFLGDARTGDGWLTVDRGAVWKTRMLPPAFVTDHPLIVRTSVSLAGGAALVGLLDADETPLVTVFVASSANRRGTTSLCWRGFRHDARVASAPLRWQIARATGRAPFTVREQIDGAALAALLVAPSRDLAAARTAIRAPIASIA

SEQ ID NO: 6587 - protein, 503 aa, Oryza sativa
MKNVAKCDTWCELQNPVNHRVFERKLRPRPSGRGHACLGVTHTRSRRLGFPPLNPSHLLLTPHLPPLSSDRARMAMSRAAAAAAGTPVARRRLMGAVAARSMASWFGHVEPAAKDPILGVTEAFLADPSPDKVNVGVGAYRDDSGKPVVLECVREAGRRIAGSMNMEYLPMGGSIKMIEESLKLAYGENCEFIKDKRIAAVQALSGTGACRLFADFQKRFLPDSQIYIPTPTWANHHNIWRDAQVPQKTFTYYHPESRGLDFAGLMDDIKNAPDGSFFLLHACAHNPTGVDPSEEQWREISHQFKVKKHFPFFDMAYQGFASGDPERDAKAIRIFLEDGHQIGCAQSYAKNMGLYGQRAGCLSILCDDEMQAVAVKSQLQQIARPLYSNPPVHGALIVSTILGDPELKSLWLKEVKGMADRIIGMRTALKENLEKLGSPMSWEHITNQIGMFCYSGMTPEQVDRLTKEFHIYMTRNGRISMAGVTTGNVAYLANAIHEVTKTK

SEQ ID NO: 6588 - protein, 437 aa, Saccharomyces cerevisiae
MSITKVHARTVYDSRGNPTVEVEITTENGLFRAIVPSGASTGIHEAVELRDGNKSEWMGKGVTKAVSNVNSIIGPALIKSELCVTNQKGIDELMISLDGTSNKSRLGANAILGVSLCVARAAAAQKGITLYKYIAELADARQDPFVIPVPFFNVLNGGAHAGGSLAMQEFKIAPVGAQSFAEAMRMGSEVYHHLKILAKEQYGPSAGNVGDEGGVAPDIDTAEDALDMIVEAINICGYEGRVKVGIDSAPSVFYKDGKYDLNFKEPNSDPSHWLSPAQLAEYYHSLLKKYPIISLEDPYAEDDWSSWSAFLKTVNVQIIADDLTCTNKTRIARAIEEKCANTLLLKLNQIGTLTESIEAANQAFDAGWGVMISHRSGETEDPFIADLVVGLRCGQIKSGALSRSERLAKYNELLRIEEELGDDCIYAGHRFHDGNKL

SEQ ID NO: 6589 - protein, 282 aa, Mycobacterium bovis AF2122/97
MTGESGAAAAPSITLNDEHTMPVLGLGVAELSDDETERAVSAALEIGCRLIDTAYAYGNEAAVGRAIAASGVAREELFVTTKLATPDQGFTRSQEACRASLDRLGLDYVDLYLIHWPAPPVGKYVDAWGGMIQSRGEGHARSIGVSNFTAEHIENLIDLTFVTPAVNQIELHPLLNQDELRKANAQHTVVTQSYCPLALGRLLDNPTVTSIASEYVKTPAQVLLRWNLQLGNAVVVRSARPERIASNFDVFDFELAAEHMDALGGLNDGTRVREDPLTYAGT

SEQ ID NO: 6590 - protein, 416 aa, Exiguobacterium sp. 255-15
MEIKVPELAESITEGTVASWLKQPGDQVEKGEAIVELETDKVNIEVPSDEAGILSEVMAAEGDTVRVGETIAIITAGGEAAQQAATTPAPEQKEAPVAQEAKKEQPAPVAATEATSVADRPIASPAARKMAREKGIDLAQVATQDPLGRIRVQDVATFEVAPREQAKAPQAPAPQATPSAAPGKPEERIKMSRRRKTIANRLVEVQQTAAMLTTFNEIDMSAVMSLRKRRQEKFVKDNEVKLGFMSFFTKAAVAALKKMPYLNAEIQGDEIVLKKFYDIGIAVSAPDGLVVPVVRDADKKNFGEIEKDIINLAVKARDNKLGLSDLTGGTFTITNGGTFGSLMSTPILNGPQVAILGMHAINLRPVAIDAERMENRPMMYVALSYDHRIVDGKEAVTFLKHIKDLLEDPESLIFEA

SEQ ID NO: 6591 - protein, 559 aa, Arabidopsis thaliana
MASSTALICDTEAWKDLKGHVEDIKKTHLRDLMSDANRCQSMMMEFDGLLLDYSRQRATVETMDKLLNLAKASQLTEKISRMFNGEHINSTENRSVLHVALRAPKDAVIKADGMNVVPEVWNVLDKIKEFSDKIRSGSWVGATGKPLKDVIAIGIGGSFLGPLFVHTALQTDPEALESAKGRQLRFLANIDPVDVARNISGLNPETTLVVVVSKTFTTAETMLNARTLREWITAALGASAVAKHMVAVSTNLALVEKFGIDPNNAFAFWDWVGGRYSVCSAVGVLPLSLQYGFSTVEKFLKGASSIDQHFQSTPFEKNIPVLLGLLSVWNVSFLGYPARAILPYSQALEKFAPHIQQVSMESNGKGVSIDGLPLPFETGEIDFGEPGTNGQHSFYQLIHQGRVIPCDFIGIVKSQQPVYLKGEVSNHDELMSNFFAQPDALAYGKTPEQLQKENVSENLIPHKTFSGNRPSLSLLLPELTAYNVGQLLAIYEHRVAVQGFVWGINSFDQWGVELGKVLATQVRKQLHSSRTQGTAPEGFNYSTTTLLKRYLETSSEPQM

SEQ ID NO: 6592 - protein, 560 aa, Arabidopsis thaliana
MASSPALICDTEAWKDLKGHVEDIKKTHLRDLMSDANRCQSMMMEFDGLLLDYSRQRATVETMDKLLNLAKASQLTEKISRMFNGEHINSTENRSVLHVALRAPKDAVIKADGMNVVPEVWNVLDKIKEFSDKIRSGSWVGATGKPLKDVIAIGIGGSFLGPLFVHTALQTDPEALESAKGRQLRFLANIDPVDVARNISGLNPETTLVVVVSKTFTTAETMLNARTLREWITAALGASAVAKHMVAVSTNLALVEKFGIDPNNAFAFWDWVGGRYSVCSAVGVLPLSLQYGFSMVEKFLKGASSIDQHFQSTPFEKNIPVLLGLLSVWNVSFLGYPARAILPYSQALEKFAPHIQQVSMESNGKGVSIDGLPLPFETGEIDFGEPGTNGQHSFYQLIHQGRVIPCDFIGIVKSQQPVYLKGEVVSNHDELMSNFFAQPDALAYGKTPEQLQKENVSENLIPHKTFSGNRPSLSLLLPELTAYNVGQLLAIYEHRVAVQGFVWGINSFDQWGVELGKVLATQVRKQLHSSRTQGTAPEGFNYSTTTLLKRYLETSSEPQM

SEQ ID NO: 6593 - protein, 348 aa, Saccharomyces pastorianus
MSIPKTQKGVIFYESHGKLEYKDIPVPKPKANELLINVKYSGVCHTDLHAWHGDWPLPTKLPLVGGHEGAGVVVAMGENVKGWNIGDFAGIKWLNGSCMACEYCELGNESNCPHADLSGYTHDGSFQQYATADAVQAAHVAPGTDLAEVAPVLCAGITVYKALKSANLMAGHWVAISGAAGGLGSLAVQYAKAMGYRVIGIDGGEGKEELFRSIGGEVFVDFTKEKDIVGAVLKATNGGAHGVINVSVSEAAIEASTRYVRANGTTVLVGMPANAKCCSDVFNQVVKSISIVGSYVGNRADTREALDFFSRGLVKSPIKVVGLSTLPEIYEKMEKGQIVGRYVVDTSK

SEQ ID NO: 6594 - protein, 367 aa, Magnaporthe grisea 70-15
MANSTVMSDLPPLPSYSLSPLPDLLPFISDFWLPIILPHVAYWMLSLFFHIIDVYDLFPQYRLHTPDEITSRNHATRTEVLRDVLIQQVIQTITAAVLSATDEPQMVGGEDYAIAVWATRIRLAQRALPTILGVLGLNAAALSKNMASTGHTWLAGALAGGHYPAMSNEFVTGATTDAAFAAWELGLAKAIYWFMLPALQFWFAVAFLDTWQYFWHRLMHVNKWMYTNWHSRHHRLYVPYAYGALYNHPIEGFLLDTAGAGLAYKLSTMSPRMGMIFFCFSTIKTVDDHCGYKLPWDPLQRITSNNAAYHDIHHQSWGIKTNFSQPFFTIWDRWLNTMYKGDVTDKYERAKNAAANKAAKTASAKAQ

SEQ ID NO: 6595 - protein, 332 aa, GIBBERELLA ZEAE PH-1
MSFGRTVTLNSGWKIPQIGYGTWQAAPGEVGNGVYEALKAGYRHLDLAKIYQNQREVGEGIKKALSEVPGLKREDIFITGKLWNNKHRPEEVAGALDDTLEELGLEYIDLWLIHWPVAFKNGNQLFPLKEGDDGKTALDQEVTLSQTWEAVTKLPKEKVRSIGVSNFNKEMLEQIIKDTGVTPAMNQIERHPRLPQPELVKYLQEKGIFLTAYSAFGNNSWGEPLLINTPEVKAIAERLSKSKGKEVTPAQVILAWSTLDNHVVIPKSVTPARIRSNFEEVELDEEAVKELSKFGEKPQRFNIPKTYKPDWDINVFDDEKEKSATHQVVLKL

SEQ ID NO: 6596 - protein, 249 aa, Triticum aestivum
  unsure (1)..(249): unsure at all Xaa locations
EFIAEVASIGRLRHRNLVPLLGYXRRKGELLLVYDYMSNGSLNQYLYFKDGKPSLNWEERLHIIKGVAFGSFYLHEKWEKVVIHRDVKPSNVLLDSEMNARLGDFGLSRLYDHGTDPQTTHMVGTMGYLAPEFLRTGKASPLTDVFAFGIFLLEVTSGQRPIKQNPFGNKHTLVDWVIERWHNGSLMETVDPRLRGDYNIDDASLVLKLGLLCSHPFTSARPTMRHVMQYLEGDTPLPELTPAHFSFTM

SEQ ID NO: 6597 - protein, 338 aa, Saccharomyces cerevisiae
MSLQHEKVTIAPLVLLSALDHYERTQTKENKRCVGVILGDANSSTIRVTNSFALPFEEDEKNSDVWFLDHNYIENMNEMCKKINAKEKLIGWYHSGPKLRASDLKINELFKKYTQNNPLLLIVDVEQQGVGLPTDAYVAIEQVKDDGTSTEKTFLHLPCTIEAEEAEEIGVEHLLRDVRDQAAGGLSIRLTNQLKSLKGLQSKLKDVVEYLDKVINKELPINHTILGKLQDVFNLLPNLGTPDDDEIDVENHDRINISNNLQKALTVKTNDELMVIYISNLVRSIIAFDDLIENKIQNKKIQEQRVKDKQSKVSDDSESESGDKEATAPLIQRKNKKN

SEQ ID NO: 6598 - protein, 348 aa, Saccharomyces pastorianus
MSIPETQKAIIFYESNGKLEYKDIPVPKPKANELLINVKYSGVCHTDLHAWHGDWPLPVKLPLVGGHEGAGVVVGMGENVKGWKIGDYAGIKWLNGSCMACEYCELGNESNCPHADLSGYTHDGSFQEYATADAVQAAHIPQGTDLAEVAPVLCAGITVYKALKSANLRAGHWVAISGAAGGLGSLAVQYAKAMGYRVLGIDGGPGKEELFTSLGGEVFIDFTKEKDIVSAVVKATNGGAHGIINVSVSEAAIEASTRYCRANGTVVLVGLPAGAKCSSDVFNHVVKSISIVGSYVGNRADTREALDFFARGLVKSPIKVVGLSSLPEIYEKMEKGQIAGRYVVDTSK

SEQ ID NO: 6599 - protein, 583 aa, Ralstonia metallidurans CH34
MSVIEVKVPDIGDFDAVEVIEVLVKAGDTVEEEQSLIVLESDKASMEVPSSAAGKVVDVKVKVGDKVAKGTLICTVEGGAAAAPAPAPAAAPKPAAAPAPAPAAAPAAATHAGGADIQCEMLVLGAGPGGYSAAFRSADLGMNTVLVERYGTLGGVCLNVGCIPSKALLHNAAVIDEAKALAAHGILFGEAKIDLDGLRHYKESVVGKLTGGLSGMAKARKVQVVRGIGTFLDPHHLEVQETEGDSKATNGKKTVIRFEKAIIAAGSQAVKLPFVPEDPRIFDSTGALELRDIPNKMLVIGGGIIGLEMATVYSTLGARLDVVEMLDGLMQGADRDLVKVWDKVNKHRFDNVMLKTKTVGVEAKPDGIYVKFEGESAPAEPQRYDAVLVSVGRSPNGKKIGAEKAGVAVTDRGFIDVDKQMRTNVPHIYAIGDIVGQPMLAHKAVHEAHVAAEAAHGEKAYFDAKQIPSVAFTDPEVAWAGKTEDQCKAEGIKYSKGVFPWAASGRAIANGRDEGFTKLIFDEETHRIIGGGIVGTHAGDLISEVCLAIEMGADAVDIGKTIHPHPTLGESIGMAAEIYEGVC

SEQ ID NO: 6600 - protein, 554 aa, Ralstonia metallidurans CH34
MSQAIEIKVPDIGDYDAVPVIEVHVKPGDTINAEDALVTLESDKATMDVPSPQAGTVKEVRIKVGDSVSEGSVLVMLEPAGAAAAAPAPAAAAAPAAPAPAAAAPAPAAPAAPAPAAAPAGGGTVEVKVPDIGDYDAVPVIEIHVKVGDQINAEDALVTLESDKATMDVPSPQAGTVKEIKVKVGDNVAQGTLILILEAAGGAAAAAPAPAAAPAPAAAAPAPAPAAAAPAPVAAPAVAPAVQGTTGKAAHASPTVRKFARELGVDVSRVPGTAPKGRITQEDVQNYVKSVMSGQTATPSAPAAAAGTGVGLDLLPWPKVDFTRFGEVESKPLSRIKKISGANLHRNWVMIPHVTNCDEADITELEAFRVQLNKENEKAGIKVTMLAFMIKATVAALKKFPNFNASLDGDNLVLKKYFNIGFAADTPNGLVVPVIKDADKKGVLEISQEMSDLAKLARDGKLKPDQMQGGCFSISSLGGLGGTYFTPIINAPEVAIMGVCKSYMKPVWDGKQFAPRLTLPLSLSWDHRVIDGAEAARFNTYFAALLADFRRILL

SEQ ID NO: 6601 - protein, 375 aa, Saccharomyces pastorianus
MLRTSTLLTRRVHPSLFSRNILRLQSTAAIPKTQKGVIFYENNGKLHYKDIPVPQPKPNEILINVKYSGVCHTDLHAWHGDWPLAVKLPLVGGHEGAGVVVKLGSNVKGWKVGDLAGIKWLNGSCMTCEFCESGHESNCPEADLSGYTHDGSFQQFATADAIQAAKIQPGTDLAEVAPILCAGVTVYKALKEANLKAGDWVAISGAAGGLGSLAVQYATAMGYRVLGIDAGEEKEKLFKRLGGEVFIDFTKTKDMVSDIQEATKGGPHGVINVSVSEAAISLSTEYVRPTGTVVLVGLPANSYVKSEVFSHVVKSINIKGSYVGNRADTREALDFFTRGLIKSPIKIVGLSELPKVYDLMEQGKILGRYVVDTNK

SEQ ID NO: 6602 - protein, 399 aa, Clostridium tetani E88
MLGVSKRVEELRFSEIRKFIPYSDGAKAKGVQVHHLNIGQPDIKTPEEFISAIKNFDEEIVKYEDSQGNKDLIDAFVKYYESINIDIDKEDVYITNGGSEAILYALLTICDLGDSVIVPEPYYTNYNTMAKMAGVDIISFRTYREDGFRIKSKEDIINSIKDNTKAIMITNPSNPTGVVYTKEEIRMISDIAKEKDLFIISDEVYREFVYDDLKFTSFMDMKDILDRVIIIDSISKRYSACGARIGALICKNRNVTENFMKMCQARLSVSSLDQVGAANLINVPKSYIEEVRIEYEKRRNILYEGLCDIPGVHCEKPSGAFYIIAKLPIDNSDDFTKWMLKDFQYNNKTVMVTPAEGFYTTEGLGKDEVRLSYCINSQDLKESMLILKKALEEYNKLRK

SEQ ID NO: 6603 - protein, 81 aa, Triticum aestivum
  unsure (1)..(81): unsure at all Xaa locations
MVVTIHSVKAGQIFDSRGNPTVEVDVCCSDGTFARAAVPSGASTGVYEALDLRDGGSDYLGXVLLKAVAIVNLIIGPVLIG

SEQ ID NO: 6604 - protein, 247 aa, Pisum sativum
MGRGRVELKRVENKINRQVTFAKRRNGLLKKAYELSVLCDAEVALIVFSNRGKLYEFCSTSSMLKTLERYQKCNYGAPEGNVTSKEALVLELSSQQEYLKLKARYESLQRSQRNLMGEDLGPLSSKDLETLERQLDSSLKQIRSTRTQFMLDQLGDLQRKEHLLCEANRALRQRMEGYQINSLQLNLSAEDMGYGRHHQGHTHGDELFQVQPIECEPTLQIGYHQGDPGSVVTAGPSMNNYMGGWLP

SEQ ID NO: 6605 - protein, 428 aa, Acinetobacter sp. ADP1
MDTKHSALNQRKQQATPRGVGVMCQWYADKAENATIWDAEGNTYIDFAGGIAVLNTGHRHPKVLAAVKAQLERFTHTAYQVTPYESYVALAERINELAPIAGPAKTTFFTTGAEAVENAVKIARCYTGRQGIITFGNGFHGRSFMTMAMTGKTAPYKRDFGLMPGGVFHARYPVESRGISVDDALESIENIFSEDVAPHDVAAIVLEPVQGEGGFNVVPADFLKRLRALCDKHGILLVADEVQTGFARTGKLYAMDHYETKADLITMAKSLGGGFPISGVVGRAEVMDAPNPGGLGGTYAGNPVAVAAAHAVIDAIQEEKLCERANELGAELVHVLKGLQQSTDQVITDIRALGSMVAAEFETAEQAKAVQNYAMQNGLLLLTCGKYGNVIRFLYPLTIPVEQFRSGLDILKQGVASLATDHTTQAIG

SEQ ID NO: 6606 - protein, 567 aa, Vibrio cholerae O1 biovar eltor str. N16961
  unsure (1)..(567): unsure at all Xaa locations
MISKNMRSHLKLSFKSIFSIKFIVISHLVKRVIYPYILAGQKRAFDFFILRNVGQNGRSHWRATMHMSKSFLIISMGFVAVSVQAQTLTRDNGAPVGDNQNSITAGEHGSVLLQDVHLIQKLQRFARERIPERVVHARGTGAHGEFVASGDFSDLTLSAPFTSKGKITPVFVRFSTVIHSKGSPETLRDPRGFATKFYTEQGNWDLVGNNLPVFFIRDSIKFPDMVHSLKPSPVTNLQDPNRFFDFFSHEPGSTHMLTWVYTNLGTPASYRTMDGFGVHAYKWINQKGDVNYVKFHWKSLQGIESLRPDEVVKVQGQDFNHLTNDLYTQINAGNHPKWDLYVQVLTPEQLSKLDYNGLDATKVWLDVPEKKVGTMTLNKVPDNFFLETEQSAFAPSNLIPGIEPSEDRLLQGRLFAYADTQLYRLGANLFQLPINRPLVEVNSHNQEGASNSAQTASDINYQPSRKLELKEDPQFKAVQTQLVGSVQQKAISNPRNFYQAGVLYRSLNEQDKQDLITNLXGBLNKVTDKEIKATMVSHFYRADKDYGTRLARATNTDLKQVAKLAAM

SEQ ID NO: 6607 - protein, 106 aa, Triticum aestivum
  unsure (1)..(106): unsure at all Xaa locations
MAPTVMASXAXFVXPXQGLKSTXXXPXSRXSNXASLXSXSNGGRIRCMQVWPIEGIKKFETLXYLPPLXNGGXFLKHVDYLIRSKWPXCLXFIPGSXFXFPLPFLL

SEQ ID NO: 6608 - protein, 560 aa, Arabidopsis thaliana
MASSPALICDTEAWKDLKGHVEDIKKTHLRDLMSDANRCQSMMMEFDGLLLDYSRQRATVETMDKLLNLAKASQLTEKISRMFNGEHINSTENRSVLHVALRAPEDAVIKADGMNVVPEVWNVLDKIKEFSDKIRSGSWVGATGKPLKDVIAIGIGGSFLGPLFVHTALQTDPEALESAKGRQLRFLANIDPVDVARNISGLNPETTLVVVVSKTFTTAETMLNARTLREWITAALGASAVAKHMVAVSTNLALVEKFGIDPNNAFAFWDWVGGRYSVCSAVGVLPLSLQYGFSMVEKFLKGASSIDQHFQSTPFEKNIPVLLGLLSVWNVSFLGYPARAILPYSQALEKFAPHIQQVSMESNGKGVSIDGLPLPFETGEIDFGEPGTNGQHSFYQLIHQGRVIPCDFIGIVKSQQPVYLKGEVVSNHDELMSNFFAQPDALAYGKTPEQLQKENVSENLIPHKTFSGNRPSLSLLLPELTAYNVGQLLAIYEHRVAVQGFVWGINSFDQWGVELGKVLATQVRKQLHSSRTQGTAPEGFNYSTTTLLKRYLETSSEPQM

SEQ ID NO: 6609 - protein, 375 aa, Methanosarcina acetivorans C2A
MRKLRIRIEVKSYKVNKRCINMAENIQSKGYAGKDESGKLVPWSFERRPVGNNDILIDIKYCGVCHSDIHQIKGHWGPQQYPQVPGHEIVGVVAAVGKNVTNFKVGDRAGVGCMVSSCMECESCKNGEEHHCDNNATIMTYGYLEESSPTGISQGGYSQNIVVAEHFAIKIPDSIDLQEAAPLLCAGITIYSPLMKANIKKGDKVGVAGIGGLGHMAIKLAVSKGAEVYAFTTTESKKEDCLAFGATEVIVVNSPSDLQPWKGKMDYMISTIPYAYEMSSYIDCVKPYGYFTQVGQPIGGELTINNFNMIFNRVNFNGSLIGGIPETQEVVDYCAENKIYPQIRMIEPEMINETWDKVVNKEARYRYVIDMSSLK

SEQ ID NO: 6610 - protein, 185 aa, Methylobacillus flagellatus KT
MVVLEGNPDLILQRSTLVSSEEEVKQAVTRVAQEITATLRQDQPLVLCVMGGGVVFTGQLLPQLVFPLEFGYVQATRYHNRTHGDAQLVWKMKPGEEVRGRTVLLLDDILDEGVTLAEIKAQCLALGASKVVVAVLVEKMLGRVKPIRADFVGLEVPDQYVFGCGMDAYGWWRNLPAIYAMQGEA

SEQ ID NO: 6611 - protein, 262 aa, Methylobacillus flagellatus KT
MLPIVDKPLIQYAAEEAVAAGATELIFIIGRNKRTIPDHFDKSFELEATLEASKKTKVLEEIRNILPKNVSCIYIRQAEALGLGHAVLLAKSVVGSEPFSVILADDLIDADKPAMQQMTELFDQEGVSILGVEDVEPSETASYGIVDATEVSGPNVLQLNGIVEKPQPEEAPSNLAVVGRYILTPEIFECLENVKPGKGGEIQLTDGIAALMEKQKILAYRFDGKRYDCGSKLGYVKANVEYSLKHEEFGKEFAQYLRDLTK

SEQ ID NO: 6612 - protein, 291 aa, Triticum aestivum
  unsure (1)..(291): unsure at all Xaa locations
MAPVRAALLAFLVAALLPLALSRGQGRGPHLPGHGLVHRHGPGIGHHAHAPLGGGAWASAHATFYGGGDASGTMGGACGYGNLYSTGYGSNTAALSTALFNNGLSCGACFEVRCDPGGTEAGAPHACLPGSTVVTANPFXSNFCPPNFAESSDAGGWCNPPRAHFDMSQPVFQRIALYRAGIVPVSYRRVACPKKGGIRFTINGHSYFNLVLVTNVGGPGDVHAVSVKSTRSGAWQSLSRNWGQNWQSNALLAAQRRSFRVTAGNGQSVVSNNAVPRGWSFGQTFSGAQFH

SEQ ID NO: 6613 - protein, 407 aa, Gloeobacter violaceus PCC 7421
MAKKTVEALGAADLKGKRALVRVDFNVPLDESGQITDDTRIRAALPTIGMLTGGGARVILVSHLGRPKGFDDQLRLTPVAKRLGELLGQTVYKADDVIGPEVEEAVKKLEDGDVLLLENVRFYPEEEKNNPEFAQKLAGLAELYVNDAFGTAHRAHASTEGVARYLRPAVAGLLLQKELEYLGKALESPERPVLAIMGGAKVSDKIQLIQNMLTKVDSILIGGAMAYTFLKAQGVDVGASRCETSTTKKDGTTVDLLQLALDLLAEAKERGVTFLLPVDHRTNDKFGDLADPPVTPDANIPEGQMALDIGPKTEELYVAEVQKSGTVIWNGPMGVFELPGFSKGTFAVAHALAESDNLSIVGGGDSASAAEKAGVVDKLSHVSTGGGASLEFLEGKTLPGVAALDEA

SEQ ID NO: 6614 - protein, 294 aa, GIBBERELLA ZEAE PH-1
MGKKRRGHPDIEEVLHRPWCYYCERDFEDLKLLISHQKAKHFKCDRCGRRLNTAGGLSVHMNQVHKENLTQVENALPNRQGLEVEIFGMEGIPQEMLDQHRNRILQNFQQAQKDRQIATGNPLPGQGHQQKKIKTETPDDLKKRLAEFRQKKKEIAANGGVDPDAAPEAVEPQAAFNAPPTYASQNPYEQPPFPQAPAAVPPYTFAANNLPARPSSGAALPTATGLPQRPTQGGAWNGAPAAGDDIDNLIRMAEAGIKPAAPAEEEGEKKKKEKKVRMFYDDAETRWLQDRLLV

SEQ ID NO: 6615 - protein, 560 aa, Arabidopsis thaliana
MASSTALICDTEAWKDLKGHVEDIKKTHLRDLMSDANRCQSMMMEFDGLLLDYSRQRATVETMDKLLNLAKAAQLTEKISRMFNGEHINSTENRAVLHVALRAPKDAVIKADGKNVVPEVWNVLDKIKEFSDKIRSGSWVGATGKPLKDVIAIGIGGSFLGPLFVHTALQTDPEALESAKGRQLRFLANIDPVDVARNISGLNPETTLVVVVSKTFTTAETMLNARTLREWITAALGASAVAKHMVAVSTNLALVEKFGIDPNNAFAFWDWVGGRYSVCSAVGVLPLSLQYGFSMVEKFLKGASSIDQHFQSTPFEKNIPVLLGLLSVWNVSFLGYPARAILPYSQALEKFAPHIQQVSMESNGKGVSIDGLPLPFETGEIDFGEPGTNGQHSFYQLIHQGRVIPCDFIGIVKSQQPVYLKGEVVSNHDELISNFFAQPDALAYGKTPEQLQKENVSENLIPHKTFSGNRPSLSLLLPELTAYNVGQLLAIYEHRVAVQGFVWGINSFDQWGVELGKVLATQVRKQLHSSRTQGTAPEGFNYSTTTLLKRYLETSSEPQM

SEQ ID NO: 6616 - protein, 443 aa, Rhodopseudomonas palustris CGA009
MTLLLRRAASAATGYILATFGLAAVGVTPALAQGMATAAPGISPADTAWMTVATAFVLMMTIPGLALFYSGMVRKKNVLATMAQSLAAVALISILWVAFGYSLAFTGSGSLIGSFDRIFLAGMTMDSVNPAAKTIPEALFMLYQMTFAVITVALVAGSVADRMRFSAYLLFSIGWFIFVYVPLAHWIWGGGFLGAMGVLDFAGGLVVHLSAGTGGLVAAIVIGRRHGYGMENLSPFDLSLAVIGTGLLWVGWFGFNGGSALAADSRAVFAITATHLAACSGALTWGAIEWMARRKPSVLGMISGAVAGLGTITPASGYVEPWHGVVIGIVAGLICYWACTWLKHRLRYDDSLDVFGVHGIGGLTGTFLAGIFATASIGGVSGALEGSWMQPLTQLAGILVTFVWSAVATYVLLKAVSLFVALRVSREHEIEGLDISQHGEALQ

SEQ ID NO: 6617 - protein, 87 aa, Zea mays
VNQIGTVPESIQAALDSKAAGWGVMVSHRSGETEDNFIADLSVGLASGQIKTGAPCRSERLSKYNQLFRIEEELGNVRYAGEAFRSP

SEQ ID NO: 6618 - protein, 480 aa, Rhodopseudomonas palustris CGA009
MTFKRPYGAGLAVLAAGMFAATAAYAEPTVNKGDNAWMLTSTVLVLLMTIPGLALFYGGLVRSKNMLSVLAQVFYTVCIACIIWALYGYSLAFTGGSDFIGGFSKAFLAGVTTDSKAATFSVDANISELVYVCFQMTFCAITPALIVGAFAERTRFAAVALFIPLWITLIYLPMAHMVWYWAGPDAINDAAKALAAAADEAAKTAAQAKLDEVNADSGFLFKKGAIDFAGGTVVHINAGIAGLVGALLVGRRTGYGKELMAPHSLTMTMIGASLLWVGWFGFNAGSNLEASGGAALAMTNSFVATAAAALSWMFAEWIFKGHPSVLGALSGAVAGLVAVTPAAGFSGPMGAIVLGLVVGVVCLFFCTVVKNALKYDDSLDVFGVHAVGGIVGAIGTGILVNPALGGTGVYDYVAGKVGDYDMTTQLISQCWGVGTTVLLSGIGSAILYKVVDVIVGLRAPVEVEREGLDLVEHTERAYNM

SEQ ID NO: 6619 - protein, 346 aa, Solanum tuberosum
MRTSMLKSIVRRSSTAGESYVSRRGFASGSAPERKVAVLGAAGGIGQPLSLLMKLNPLVSSLSLYDIAGTPGVAADVSHINTRSEVVGFAGEEQLGKALEGADIVIIPAGVPRKPGMTRDDLFNINAGIVKSLCTAIAKYCPNALVNMISNPVNSTVPIAAEVFKKAGTYDEKKLFGVTMLDVVRAKTFYAGKAKVNVAEVNLPVVGGHAGITILPLFSQATPKANLSNEEIVALTKRTQDGGTEVVEAKAGKGSATLSMAYAGAIFADACLKGLNGVPDVVECAFVQSNVTELPFFASKVRLGKNGVEEVLGLGPLNEYEKQGLEALKPELLSSIEKGIKFAKEN

SEQ ID NO: 6620 - protein, 321 aa, Agrobacterium tumefaciens str. C58
MTSKLEQLRAITTVVADTGDIEAVARLKPVDCTTNPTIVLKALGTPAFADAVKEAVAWGRKQGGQSDAVVAAVADRLAISVGAALAGLVPGRVSTEVDADLSFDTQASITKARHIIASYKERGIERERILIKLASTWEGIKAAEVLQSEGIDCNLTLLFSQAQAIACAEAKAFLISPFVGRILDWYKKSTGETYTAETDPGVVSVRSIYNYYKANGIGTVVMGASFRNVGEIEALAGCDRLTISPALLEELDKDNGKLERKLSPDNVKAEALQSLDEKAFRWAMNEDAMATEKLSEGIRLFAKDLVTLREMVRKELTAAAA

SEQ ID NO: 6621 - protein, 337 aa, Oryza sativa
  unsure (1)..(337): unsure at all Xaa locations
EGGLTALAHKRGRLVGWVLLLLLAVAIAGAAAATPRQLFLVTQAPVTLTNHHGQLLTGNYSVNLLWYGRFTPAQRATVADFLLSMSSPSAAAEAAAVSGGPAAPSVAXWWATTXRYHPGAARLTLGRQVLDASLSLGRRLSETSLAALAARLSPHRGSIAVVITAPDVLVDGFCLSHCGLHASATSGRRRRRHRLAXGTRGRGRFAYAWVGNAAEQCPGECAWPFHQPAYGPQAPPLVSPNADVGMDGIIINLATLLAGAVTNPYGGGYFQGPTEAPLEAVTACTGMFGAGAYPGYPGQLPVDAATGASYNAVGVAGRRFLLPAMWDPKTSQCSTLV

SEQ ID NO: 6622 - protein, 185 aa, Brassica napus
MSCTATDLAVLLGPNATAAADYICGQLGTVNSKFTDVAFAVDNTYLLFSAYLVFSMQLGFAMLCAGSVRAKTTMNIMLTMTNVLDAAAGGLFYYLFGYAFAFGSPSNGFIGKHNFGLKDFPSASADYSNFLYQWAFAIAAAGITSGSIAERTQFVAYLIYSSFLTGFVYPVVSHWFWSVDGWASP

SEQ ID NO: 6623 - protein, 342 aa, Solanum tuberosum
MLKSIVRRSSTAGASYVSRRGFASGSAPERKVAVLGAAGGIGQPLSLLMKLNPLVSSLSLYDIAGTPGVAADVSHINTRSEVVGFAGEEQLGKALEGADIVIIPAGVPRKPGMTRDDLFNINAGIVKSLCTAIAKYCPNALVNMISNPVNSTVPIAAEVFKKAGTYDEKKLFGVTMLDVVRAKTFYAGKAKVNVAEVNLPVVGGHAGITILPLFSQATPKANLSNEEIVALTKRTQDGGTEVVEAKAGKGSATLSMAYAGAIFADACLKGLNGVPDVVECAFVQSNVTELPFFASKVRLGKNGVEEVLGLGPLNEYEKQGLEALKPELLSSIEKGIKFAKEN

SEQ ID NO: 6624 - protein, 427 aa, Mycobacterium leprae
MTESCTVFSFSGPKGIPDYFPPDSAQFVAVRDGLLTAARRRGYGDIELPVFEDTALFARGVGESTDVVAKEMYTFADRGDRSVTLRPEGTAGVVRAVIEHGLDRGALPVKLCYAGPFFRYERPQAGRCRQLQQVGVEAIGVDDPALDAEVITIADAGFRSLGLDGFQLEITSLGDGTCRPQYRKLLQEFLLQLDLDEDTRRRAELNPLRVLDDKRPQVQAMTAAAPVLLDHLSDGAKQHFDTVLAHLDALRVPYVINPRMVRGLDYYTKTTFEFVHPGLGAQSGIGGGGRYDGLMRQLGGQDLSGIGFGLGVDRTLLALHAEGKTVGETTRCDVFGVSLGEAAKLKVAMLAGQLRAAGVRVDLIYGDRGIRGAMRAAGRSGARIALIVDDCAIKADGVGVRDLATGEQISVAVDSVVAEVISRIAPS

SEQ ID NO: 6625 - protein, 831 aa, Wautersia eutropha
MKISRRDFIKQTAITATASVAGVTLPAGAANFVTDSEVTKLKWSKAPCRFCGTGCGVTVAVKDNKVVATQGDPQAEVNKGLNCVKGYFLSKIMYGQDRLTRPLMRMKNGKYDKNGDFAPVTWDQAFDEMERQFKRVLKEKGPTAVGMFGSGQWTVWEGYAAAKLYKAGFRSNNIDPNARHCMASAAAGFMRTFGMDEPMGCYDDFEAADAFVLWGSNMAEMHPILWTRVTDRRLSHPKTRVVVLSTFTHRCFDLADIGIIFKPQTDLAMLNYIANYIIRNNKVNKDFVNKHTVFKEGVTDIGYGLRPDHPLQKAAKNASDPGAAKVITFDEFAKFVSKYDADYVSKLSAVPKAKLDQLAELYADPNIKVMSLWTMGFNQHTRGTWANNMVYNLHLLTGKIATPGNSPFSLTGQPSACGTAREVGTFSHRLPADMVVTNPKHREEAERIWKLPPGTIPDKPGYDAVLQNRMLKDGKLNAYWVQVNNNMQAAANLMEEGLPGYRNPANFIVVSDAYPTVTALAADLVLPSAMWVEKEGAYGNAERRTQFWHQLVDAPGEARSDLWQLVEFAKRFKVEEVWPPELIAKKPEYKGKTLYDVLYRNGQVDKFPLKDVNAEYHNAEAKAFGFYLQKGLFEEYATFGRGHGHDLAPFDAYHEARGLRWPVVNGKETRWRYREGSDPYVKAGTGFQFYGNPDGKAVIFALPYEPPAESPDKEYPYWLVTGRVLEHWHSGSMTRRVPELYRSFPNAVVFMHPEDAKALGLRRGVEVEVVSRRGRMRSRIETRGRDAPPRGLVFVPWFDASQLINKVTLDATCPISLQTDFKKCAVKIVKV

SEQ ID NO: 6626 - protein, 179 aa, Bacillus firmus
MRDEIKEVLISEEEIQEKVKELGKAITEEYDGRFPLVVGVLKGAMPFMGDLTKRIDTHLEMDFMDVSSYGAGMVSSGEVKILKDLDTSVEGRDVLILEDIIDSGLTLSYLIKLFHYRKAKSVKVVTLLDKPDGRKVDLVPDMAGFTVPDAFVVGYGLDYAERYRNLPYIGVLKPEIYES

SEQ ID NO: 6627 - protein, 524 aa, Glycine max
  unsure (1)..(524): unsure at all Xaa locations
MAMANLARRKGYAVVLSSRSSLCLTRWRGFASGSDENDVVVIGGGPGGYVAAIKAAQLGLKTTCIEKRGTLGGTCLNVGCIPSKALLHSSHMYHEAKHAFANHGVKFSSVEVDLPAMMAQKDKAVSNLTKGIEGLFKKNKVNYVKGYGKLVSPSEVSVDTTEGVNXVVNGKHIIISTGSXVESQPCVITIDENNVVSSTGALTLTDIPKRLIVIVACNIELESGSLWGRLGSEITAVEFASEIVPTMDAEVRKQFQRSLEKQGMKFKLKTKVVGVDTSGDGVKLTLEPAAGGDQTTLEADVVLVSAGRTPFTAELGLDKIGVETDKIGRILVNERFATNVSGVYAIGDVIPGPMLAHKAEEDGVACVEYIAGKVGHVDYDKVPGVVYTMPEVASVGKTEEQVKELGVEYRVGKFPFMANSRAKAIDNAEGLVKILAEKETDKILGVHIMAPNAGELIHEAAIALQYDASSEDIARVCHAHPTMSEAVKEAAMATYDKPXTFKRSRLLLSSLFSFLSKNFTMTWR

SEQ ID NO: 6628 - protein, 270 aa, Magnaporthe grisea 70-15
MYWALGRAYVHDIRGRAFDTHKIPLVCLADKKKQQHRDHFVRTLNPGLSADPLKPSPQHILDVAGGTGDIAFRMLHNAHVLNANPNVRVTISDINASMLAVGRSRAESTLPPAQLSALSFLEADATDFLSANSSATPRHNVPAPGSLDLYTVAFGIRNFTDIPAALREAYRALRPGGVFACLEFSKADRHPLFNAVYKRWSFGAIPLIGQLVAGDRDSYQYLVESIERFPSQEEFRDMIVEAGFEVSGDGYEDLTGGVAAIHKGVKPLDG

SEQ ID NO: 6629 - protein, 505 aa, Staphylococcus aureus subsp. aureus Mu50
MAKKPTALIILDGFANRESEHGNAVKLANKPNFDRYYNKYPTTQIEASGLDVGLPEGQMGNSEVGHMNIGAGRIVYQSLTRINKSIEDGDFFENDVLNNAIAHVNSHDSALHIFGLLSDGGVHSHYKHLFALLELAKKQGVEKVYVHAFLDGRDVDQKSALKYIEETEAKFNELGIGQFASVSGRYYAMDRDKRWEREEKAYNAIRNFDAPTYATAKEGVEASYNEGLTDEFVVPFIVENQNDGVNDGDTVIFYNFRPDRAAQLSEIFANRAFEGFKVEQVKDLFYATFTKYNDNIDAAIVFEKVDLNNTIGEIAQNNNLTQLRIAETEKYPHVTYFMSGGRNEEFKGERRRLIDSPKVATYDLKPEMSAYEVKDALLEELNKGDLDLIILNFANPDMVGHSGMLEPTIKAIEAVDECLGEVVDKILDMDGYAIITADHGNSDQVLTDDDQPMTTHTTNPVPVIVTKEGVTLRETGRLGDLAPTLLDLLNVEQPEDMTGESLIKH

SEQ ID NO: 6630 - protein, 207 aa, Xanthomonas campestris pv. campestris str. ATCC 33913
MGSTGAQAMKHLVLASGNAGKLEELRAMLADLPLQIVAQGELGVDDVPETGLTFVENALIKARHASTVTGLPALADDSGLIVDALGGAPGLYSARYAGSPTDANANNAKLLEAMREIPAERRSARFYAVIVLLRHPEDPQPLIAEGSWEGVITTAPRGTGGFGYNPVFLDPVHGLTAAEMDTALKNRLSHRAVALATLQHKLHALSL

SEQ ID NO: 6631 - protein, 560 aa, Arabidopsis thaliana
MASSPALICDTEAWKDLKGHVEDIKKTHLRDLMSDANRCQSMMMEFDGLLLDYSRQRATVETMDKLLNLAKASQLTEKISRMFNGEHINSTENRSVLHIALRAPKDAVIKADGMNVVPEVWNVLDKIKEFSDKIRSGSWVGATGKPLKDVIAIGIGGSFLGPLFVHTALQTDPEALESAKGRQLRFLANIDPVDVARNISGLNPETTLVVVVSKTFTTAETMLNARTLREWITAALGASAVAKHMVAVSTNLALVEKFGIDPNNAFAFWDWVGGRYSVCSAVGVLPLSLQYGFSMVEKFLKGASSIDQHFQSTPFEKNIPVLLGLLSVWNVSFLGYPARAILPYSQALEKFAPHIQQVSMESNGKGVSIDGLPLPFETGEIDFGEPGTNGQHSFYQLIHQGRVIPCDFIGIVKSQQPVYLKGEVVSNHDELMSNFFAQPDALAYGKTPEQLQKENVSENLIPHKTFSGNRPSLSLLLPELTAYNVGQLLAIYEHRVAVQGFVWGINSFDQWGVELGKVLATQVRKQLHSSRTQGTAPEGFNYSTTTLLKRYLETSSEPQM

SEQ ID NO: 6632 - protein, 662 aa, Hypocrea jecorina
MSWKLTKSMSLLFPLSPTFRPPTSPSPSPFDWQNETDWPCAELKDTHLGPLSAFSRSPSTSTITDKDEKGTSPGATTPTSENAIAASEALSQAPVVKKPGILVVTIHEGQGFSLPEQHRSAFASSHQSSRSSGGALAGSVRPDGQRVAGSYTNGARPHSSGGGFGSLPTNHGRISGKYMPYALIDFDKVQVFVNSVEGSPENPLWAGGNTQYKFDVSRVTELVIHLYMRNPAAPPGSGRSQDIFLGVARINPRFEERQPTTDDAKSSKKDREKAADAQRQKGEGHSGVEWVDVQYGTGRIKVGVEFVETRAGKLKIEDFELLKVVGKGSFGKVMQVRKKDTNRIYALKTIRKAHIISRSEVAHTLAERSVLAQINNPFIVPLKFSFQSPEKLYFVLAFVNGGELFHHLQKEHRFDVNRSRFYTAELLCALECSHGFSVIYRDLKPENILLDYQGHIALCDFGLCKLDMKDEDRTNTFCGTPEYLAPELLLGQGYNKTVDWWTLGVLLYEMLTGLPPFYDENTNEMYRKILSEPLHFSDVVPPAAKDLLTKLLNRDPKKRLGANGSAEIKAHPFFHDIDWRNVLQRKYEPTFKPSVTDAMDTANFDPEFTSEAPQDSYVEGPMLSQTMQDQFQGFSYNRPIAGLGDAGGSVRDPSFVGSLQDN

SEQ ID NO: 6633 - protein, 560 aa, Arabidopsis thaliana
MASSTALICDTEAWKDLKGHVEDIKKTHLRDLMSDANRCQSMMMEFDGLLLDYSRQRATVETMDKLLNLAKASQLTEKISRMFNGEHINSTENRSVLHVALRAPKDAVIKADGMNVVPDVWNVLDKIKEFSDKIRSGSWVGATGKPLKDVIAIGIGGSFLGPLFVHTALQTDPEALESAKGRQLRFLANIDPVDVARNISGLNPETTLVVVVSKTFTTAETMLNARTLREWITAALGASAVAKHMVAVSTNLALVEKFGIDPNNAFAFWDWVGGRYSVCSAVGVLPLSLQYGFSMVEKFLKGASSIDQHFQSTPFEKNIPVLLGLLSVWNVSFLGYPARAILPYSQALEKFAPHIQQVSMESNGKGVSIDGLPLPFETGEIDFGEPGTNGQHSFYQLIHQGRVIPCDFIGIVKSQQPVYLKGEVVSNHDELMSNFFAQPDALAYGKTPEQLQKENVSENLIPHKTFSGNRPSLSLLLPELTAYNVGQLLAIYEHRVAVQGFVWGINSFDQWGVELGKVLATQVRKQLHSSRTQGTAPEGFNYSTTTLLKRYLETSSEPQM

SEQ ID NO: 6634 - protein, 378 aa, Neisseria meningitidis Z2491
MEMKQADSTIKSRAAVAFAPNQPLQIVEIDVEMPRKGEVLIRNTHTGVCHTDAFTLSGSDPEGVFPVVLGHEGAGVVVAVGEGVSSVKPGDHVIPLYTAECGECEFCCSGKTNLCVSVRDTQGKGLMPDGTTRFSYQGQPIYHYMGCSTFSEYSVVAEVSLAKINPEANHEQVCLLGCGVTTGIGAVHNTAKVQEGDSVAVFGLGAIGLAVVQGARQAKAGRIIAIDTNPSKFELAKQFGATDCLNPNDYDKPIKDVLLDINKWGIDHTFECIGNVNVMRQALESAHRGWGQSIIIGVAGAGQEISTRPFQLVTGRVWKGSAFGGVKGRSELPKMVEDSMKGDIELEPFVTHTMTLDQINKAFDLMHEGKSIRAVIHY

SEQ ID NO: 6635 - protein, 560 aa, Arabidopsis thaliana
MASSTALICDTEAWKDLKGHVEDIKKTHLRDLMSDANRCQSMMMEFDGLLLDYSRQRATVETMDKLLNLAKASQLTEKISRMFNGEHINSTENRSVLHVALRAPKDAVIKADGMNVVPEVWNVLDKIKEFSDKIRSGSWVGATGKPLKDVIAIGIGGSFLGPLFVHTALQTDPEALESAKGRQLRFLANIDPVDVARNISGLNPETTLVVVVSKTFTTAETMLNARTLREWITAALGASAVAKHMVAVSTNLALVEKFGIDPNNAFAFWDWVGGRYSVCSAVGVLPLSLQYGFSMVEKFLKGASSIDQHFQSTPFEKNIPVLLGLLSVWNVSFLGYPARAILPYSQALEKFAPHIQQVSMESNGKGVSIDGLPLPFETGEIDFGEPGTNGQHSFYQLIHQGRVIPCDFIGIVKSQQPVYLKGEVVSNHDELMSNFFAQPDALAYGKTPEQLQKENVSENLIPHKTFSGNRPSLSLLLPELTAYNVGQLLAIYEHRVAVQGFVWGINSFDQWGVELGKVLATQVRKQLQSSRTQGTAPEGFNYSTTTLLKRYLETSSEPQM

SEQ ID NO: 6636 - protein, 402 aa, Magnetococcus sp. MC-1
MNGPSMEEFHRIKRLPPYVFAVVNELKYKARNRGEDIIDFGMGNPDQPTPKHITDKLIEAVQDGRNHRYSLSRGIGGLRRAVCAYYKRRFGVDLDPESEAIVTIGSKEGLSSLAMAITEPGMNVIVPSPTYPIHEYSFLIAGAHIQRVKISRDNDFIEDMKVAVRNHWPRAQVLVVNFPSNPTAQVVELDFYQKVIDFAKEHNIWVISDVAYAEICFDGYKAPSILQIPGAKDIAVEFYSLSKTYNMPGWRVGFCVGNPHLIKALSRIKSYLDYGMFQPIQIAATVALNGPQDCVAEINEIYRQRRNVLIDGLARAGWAIERPKASMFVWAEIPDEFKAMGSLEFSKLLLKEAKVAVSPGVGFGVYGDDHVRIALIENEHRTRQALRSMRRFLSAGSDVAGD

SEQ ID NO: 6637 - protein, 101 aa, Gloeobacter violaceus PCC 7421
MTIFVGNLPFSATEQEIAEAFAEYGEVKSVKIPTDRESGRPRGFAFVDMDEAAEAKAIEELDGATWNNRELRVNKAEPRPDRGGGGGGNRGGGGGGRDRRY

SEQ ID NO: 6638 - protein, 560 aa, Arabidopsis thaliana
MASSTALICDTEAWKDLKGHVEDIKKTHLRDLMSDANRCQSMMMEFDGLLLDYSRQRATVETMDKLLNLAKASQLTEKISRMFNGEHINSTENRSVLHVALRAPKDAVIKADGMNVVPEVWNVLDKIKEFSDKIRSGSWVGATGKPLKDVIAIGIGGSFLGPLFVHTALQTDPEALESAKGRQLRFLANIDPVDVARNISGLNPETTLVVVVSKTFTTAETMLNARTLREWITAALGASAVAKHMVAVSTNLALVEKFGIDPNNAFAFWDWVGGRYSVCSAVGVLPLSLQYGFSMVEKFLKGASSIDQHFQSTPFEKNIPVLLGLLSVWNVSFLGYPARAILPYSQALEKFAPHIQQVSMESNGKGVSIDGLPLPFETGEIDFGEPGTNGQHSFYQLIHQGRVIPCDFIGIVKSQQPVYLKGEVVSNHDEFMSNFFAQPDALAYGKTPEQLQKENVSENLIPHKTFSGNRPSLSLLLPELTAYNVGQLLAIYEHRVAVQGFVWGINSFDQWGVELGKVLATQVRKQLHSSRTQGTAPEGFNYSTTTLLKRYLETSSEPQM

SEQ ID NO: 6639 - protein, 345 aa, Bradyrhizobium japonicum USDA 110
MQHLGLGVLLAIKGEPGLQREALVNEPALDRAERLANLLASIVESSDDVIVSKNLDGIITSWNKGAERIFGYSAAEAIGQPITLVIPEDRQSEEREILTRIRRGERLDHFETVRRRRDGSSIVVSLTVSPVKDAHGNIIGASKIARDITEHKRAQEQIRILAREAEHRSKNILANVQAIINLSQSDTSERLKEVISGRIQAMANVHSLFVETRWIGAEVSAIAKQELAPYLQEGQDKRIVMEGLQIVLEPTAAQAIAVVLHELATNAAKYGALSNAKGWIGLDWSRAEDGQLMLRWTELGGPRVNAPERKGFGSRLIEGTITPLGGKVHFDWRAEGLVCEIAVPT

SEQ ID NO: 6640 - protein, 480 aa, Azotobacter vinelandii
MLSKERYKAAYVYWLCCIATLGGVMFGFSTGVISGSVELIQQYFHLSPAETGWIVSSIFVGCVLGALAAGKLADRIGRKSTLLLSTLAFAISAYGTTFADSFAIFSSARIVAGIGIGLASTVVPLYMGEIAPRDIRGKASGIWDLSLLGSQTLVFLVNFLIGKGMTEAWLVEVGWRWMMGAQFVPVALMLVCTLILPESPTWCIDTRRVERAIKVLSKIYPDLNHEEARQFFSARETAGGSLGLGVILRTPVLRYGLIVGCAIGVLQQFTGAAIVMYYAPVILQTGDMSKDALLFQTIFIGLFTGIASFVGMTLFDRFGRRPVMKFGTIGSIVGLLLISYSMYTHHSGYLSIFAALFFMAMFGISWSAGCWVLLSEIFPPRIRSHATGLAVTLMWAFNFLVTQFFPMINEIPVLQESFNGAFTMWIFVAFNLFCLFFLIRYLPETRGVALDDMEALIESHRRKLSRKTGETRTSIAVSDI

SEQ ID NO: 6641 - protein, 442 aa, GIBBERELLA ZEAE PH-1
MASLLRMKAVTGLSGLSRVAASRVALSHSATLCQRGAIDPQRRLFSNSGFLNGSYIVSVPPMAESITEGTLSSLSKKVGEAVEQDEEIASIETDKIDVLVNASEPGAIAEYFAEEGDTVVVGQDLARIVTGEDAGSAKKSEGGEQKPAKEEPKKEESKPSEQPAKTEEKKSSPAQDAPKPSKPAESKPASKESKSAAPAQSSGAPNRGERVNLQEKMSRMRRTIAGRLKQSQNTCASLTTIQEVDMSNLIAWRAKYKEEVAEEHGVRLGYMGAFTKATTIAAQKVPQINAQIDTEKEIITYHDYVDVSIAVSAPKGLVTPVLRNTESLSIVELERAVAAAAKKARDGKLTMEDMEGGSFSISNPGIFGSMFGTPVINYPQAAVFNMNGIRQEVVAINGEAVIRPMMYISLTYDHRLIDGREASMFLNTVKKYIEDPSRMLLA

SEQ ID NO: 6642 - protein, 344 aa, Solanum tuberosum
MRTSMLRTLARRTSTAGTRRGFASESAPDRKVAILGAAGGIGQPLSLLMKLNPLVSRLALYDIAGTPGVAADVSHINTRSEILGYAGEEQLGKALEGADVVIIPAGVPRKPGMTRDDLFNINAGIVKSLCTAIAKYCPHALVNVISNPVNSTVPIASEVFKKAGTYDEKRLFGVTTLDVVRAKTFYAGKAKVNVADVIVPVVGGHAGVTILPLFSQATPSANLSSEEIEALTKRTQDGGTEVVEAKAGKGSATLSMAYAGAIFADCLLEWDLNGVPGCLYSCHSYSQLVTEPAISLHPRLRFGKNGVEEVLGLGALSDYEKEGLEALKPELKSSIEKGIKFANA

SEQ ID NO: 6643 - protein, 197 aa, Zea mays
MSASRFIKCVTVGDGAVGKTCLLISYTSNTFPTDYVPTVFDNFSANVVVNGATVNLGLWDTAGQEDYNRLRPLSYRGADVFILAFSLISKASYENVSKKWIPELKHYAPGVPIVLVGTKLDLRDDKQFFIDHPGAVPITTAQGEELKKLIEAPAYIECSSKSQENVKGVFDAAIRVVLQPPKQKKKKSKAQKACSIL

SEQ ID NO: 6644 - protein, 239 aa, Phalaenopsis equestris
MDSSSMEPKEKMGRGKIEIKRIENTTNRQVTFCKRRNGLLKKAYELSVLCDAEVALIIFSTRGRLYEYANNSVKGTIERYKKASTDNSNTGSISEANSQYYQQEATKLRQQITNLQNSNRNLLGDALTTMSLRDLKQLETRLEKGINKIRAKKNELLHAEIDYMQKREMELQTDNMFLRNKISDNERAQQQHQHMSILPSTSTEYEVMPPFDSRSFLHVNLMDPNDRYSHQQQTALQLG

SEQ ID NO: 6645 - protein, 311 aa, Burkholderia fungorum LB400
MKFAFVFPGQGSQSVGMLNAFADQAVVRETVQEASDALNQDLGKLIAEGPAEDLNLTTNTQPVMLTASYAMYRAWLQAGGPKPAIVAGHSLGEYTALVAAGAIAFRDAVPLVRFRAQAMQTAVPVGEGAMAAILGLDDDTVRAVCAEASVAGVVEAVNFNAPAQVVIAGNKAAVEKACEVAKAKGAKRALPLPVSAPFHSSLLKPASDQLREYLASVDVQVPAIPVINNVDVAVVNEPAAIKDALVRQAAGAVRWVESVQAMSAQGVTHVIECGPGKVLAGLTKRIDGNLVGASIFDPASLEETLKLVKAG

SEQ ID NO: 6646 - protein, 405 aa, Oryza sativa
  unsure (1)..(405): unsure at all Xaa locations
MASAAMSTLNLSSSPLTKQQLRFGASTLSAEHVSGFSSARPAPSLCCSSSHWRAVKLRPRRRPWRRAGNRVVAQAGGYKVAILGAAGGIGQPLSLLVKMSPLVSALHLYDIANVDGVTADLGHCNTPAKVAGFTGKEELAGCLAGVDVVVIPAGVPRKPGMTRDDLFGINAGIVRELVEAVAARAPAALVHVISNPVNSTVPIAAEVLKRKGVYDPRKLFGVTTLDVVRANTFVAEMKGLPLADVDVPVVGGHAAATILPLLSKARPKTAFTDEEVEALTRRIQNAGTEVVEAKAKAGGGSATLSMAYAAARFLEASLRGLDGDADVYECSYVQCQAVPELPFFACRVKLGRDGVEEVAAAGAELRGLTEFEARALEALKPQLKKSIDKGVAXYAQQQPATVAMG

SEQ ID NO: 6647 - protein, 183 aa, Glycine max
  unsure (1)..(183): unsure at all Xaa locations
SGNCFERNKNPIEERRRCGFRIIDVSSLHVCGLYFSLQFTTGHADSNAGRTLNQEGGDHQIHCSRERSRTAWKIIQEYLMPFVEKEKYHISKRCRLHPDNDIYRDQEQHKFHTDINEWQCGFCKKSFYEEKHLDQHFDNRHSNLLNLSESQCIADVXGALXCDHEMNSGSKQFLFQWKMASSG

SEQ ID NO: 6648 - protein, 240 aa, Glycine max
MYLILEIIFHWGSWSRVVSGVGSMAYKVVHGYDYLFKIVLIGDSGVGKSNILSRFTRNEFCLESKSTIGVEFATRTLQVEGKTVKAQIWDTAGQERYRAITSAYYRGAVGALLVYDITKRQTFENVQRWLRELRDHADSNIVIMMAGNKSDLNHLRAVSTDDAQNLAEREALSFLETSALEAFNVEKAFQTILFDIYQIMSKKALAAQGAASTTSLPHGTTINVSNMSGSVEKKSACCSN

SEQ ID NO: 6649 - protein, 346 aa, Solanum tuberosum
MRTSMLKSIVRRSSTAGASYVSRRGFASGSAPERKVAVLGAAGGIGQPLSLPMKLNPLVSSLSLYDIAGTPGVAADVSHINTRSEVVGFAGEEQLGKALEGADIVIIPAGVPRKPGMTRDDLFNINAGIVKSLCTAIAKYCPNALVNMISNPVNSTVPIAAEVFKKAGTYDEKKLFGVTMLDVVRAKTFYAGKAKVNVAEVNLPVVGGHAGITILPLFSQATPKANLSNEEIVALTKRTQDGGTEVVEAKAGKGSATLSMAYAGAIFADACLKGLNGVPDVVECAFVQSNVTELPFFASKVRLGKNGVEEVLGLGPLNEYEKQGLEALKPELLSSIEKGIKFAKEN

SEQ ID NO: 6650 - protein, 453 aa, Pseudomonas fluorescens
MTRNNPQTREWQALSNDHHLAPFSDFKQLKEKGPRIITHAKGVYLWDSEGNKILDGMAGLWCVAVGYGREELADAASQQMRELPYYNLFFQTAHPPVLELSKAIADIAPEGMNHVFFTGSGSEGNDTMLRMVRHYWAIKGQPNKKVIISRKNGYHGSTVAGASLGGMTYMHEQGDLPIPGIVHIAQPYWFGEGGDMSPEEFGVWAANQLEEKILELGVDNVGAFIAEPIQGAGGVIVPPDSYWPRMKEILAKYDILFVADEVICGFGRTGEWFGTDYYGLKPHMMTIAKGLTSGYIPMGGLIVRDDVVAVLNEGGDFNHGFTYSGHPVAAAVALENIRILRDEKIIERVHAETAPYLQKRLRELNDHPLVGEVRGVGLLGAIELVQDKATKRYEGKGVGMICRQFCFDNGLIMRAVGDTMIIAPPLVISKAEIDELVTKARQCLDLTLSALQG

SEQ ID NO: 6651 - protein, 162 aa, Wautersia eutropha
MRRRFGSLLSAVICGLALHAGAATLSDTELDARVHALSGQLRCLVCQNQTLADSNADLAVDLRRQIRERLRGGASDEAVKDYLVQRYGDFVLYKPPLRPLTWLLWFGPLLLVAGVTIAIIRARSRSVAAGLPLDAEAQRQLAALLDETSGQPASPPAEARQP

SEQ ID NO: 6652 - protein, 394 aa, Paracoccus denitrificans
MLGNLKPQAPDKILALMGEFRADPRQGKIDLGVGVYKDATGHTPIMRAVHAAEQRMLETETTKTYAGLSGEPEFQKAMGELILGDGLKSETTATLATVGGTGALRQALELARMANPDLRVFVSDPTWPNHVSIMNFMGLPVQTYRYFDAETRGVDFEGMKADLAAAKKGDMVLLHGCCHNPTGANLTLDQWAEIASILEKTGALPLIDLAYQGFGDGLEEDAAGTRLIASRIPEVLIAASCSKNFGIYRERTGCLLALCADAATRELAQGAMAFLNRQTYSFPPFHGAKIVSTVLTTPELRADWMAELEAVRSGMLRLREQLAGELRDLSGSDRFGFVAEHRGMFSRLGATPEQVKRIKEEFGIYMVGDSRINIAGLNDNTIPILARAIIEVGV

SEQ ID NO: 6653 - protein, 336 aa, Mycobacterium bovis AF2122/97
MKLAIIAGDGIGPEVTAEAVKVLDAVVPGVQKTSYDLGARRFHATGEVLPDSVVAELRNHDAILLGAIGDPSVPSGVLERGLLLRLRFELDHHINLRPARLYPGVASPLSGNPGIDFVVVREGTEGPYTGNGGAIRVGTPNEVATEVSVNTAFGVRRVVADAFERARRRRKHLTLVHKTNVLTLAGGLWLRTVDEVGECYPDVEVAYQHVDAATIHMITDPGRFDVIVTDNLFGDIITDLAAAVCGGIGLAASGNIDATRANPSMFEPVHGSAPDIAGQGIADPTAAIMSVALLLSHLGEHDAAARVDRAVEAHLATRGSERLATSDVGERIAAAL

SEQ ID NO: 6654 - protein, 285 aa, Glycine max
  unsure (1)..(285): unsure at all Xaa locations
HTTPHYTTLHCTYPVSESSCESRTPGIFGYLKLLHSIFSSPCPRVITPPPTTTSTTRLGNEVVPHLPLPLWSEDTVSREPYTGKAVIGMDVGSSEFYXEYNTYDLNFKEDNNDGSHRICGDALKDLYKSFVSEYPIVSIEDPFDQDDWEHYAKITGEVGANVQIVGDDLLATNPNRVQKAIDTKACNALLLKANQIGSATEXVKLARSSKSCWKKAGWGVMASHRSEETEDTFIADLSVGLATGXQTKTGAPCKTDXVAKYNQLLRIEEELDAEVRPVDPRVRTK

SEQ ID NO: 6655 - protein, 219 aa, Oryza sativa
MGHPHPHPYAPAELHLPGFVPLQLSQAQILVPYLATSLFLLLAVWLISGRCSRRLSDTDRWLMCWWAFTGLTHIIIEGTFVFAPNFFSNQNPSYFDEVWKEYSKGDSRYVARDPATVTVEGITAVLEGPASLLAVYAIASGKSYSHILQFTVCLGQLYGCLVYFITAYLDGFNFWTSPFYFWAYFIGANSSWVVIPTMIAIRSWKKICAAFQGEKVKTK

SEQ ID NO: 6656 - protein, 709 aa, Magnaporthe grisea 70-15
MCGASVIVSLRRKHEETNGAAAAKTSDKESRLAKSLDALAHRGPDARGVWIDPTGEVGLAHTRLAIIDLSAEGNQPLHDDQDHIHAVITGEIYDHDRLRRECVEAGYRFKGHSDSEVVVALYQRYGAPGFLEHCRGEFSMVVYDDRSGEVFACRDRSGIKPLFYTIVQNELWFSSEVKGFLGMGWKPEWALESIAMGVTQVGSSTIFQGVNRIEPGFYMKVTADGDITHSKYWDFDYPDKTVVDNRSMEDMVQELREALVDAVRLRLRADVPVGIYLSGGLDSSMIAGIAKKLIDEEGATAGSQKASERMTTFTLAVNSDQDNSVYNEASIASRTAKFLGVKEKTLNADEQLLASTFEDACWHIEQPISTLSMCAKVALSKLARDSGVTVILTGEGADETFAGYPWMLPDLTAEADHSRPDAPINRDIDNLRGPIRKQLFDMWANLGSTEMPKLLQQVKPETWAKMNFVSTPVVSDGSSGVGLIHPKLRAKYNLDDRISKTQDCIGEDVLKKVREKWHPLNSSLYLNHKTLLANTIIPSNGDRTEMANSVEGRPPILDHKVLELASKLPPSVQVGYFPDGANLNSGKTVFRSNNADGELMARFREKFLLREAARPFVTDEIYSRPKHSFMASSNYHAGGPIHQVLKRLLTKENVEAVGFLDWPKIEAHLASAFDPQLAHVAGQNFAPCLQAASFVTISQKFGVARASVE

SEQ ID NO: 6657 - protein, 499 aa, Candida albicans SC5314
MFKKALPLVSKLTTPKGITYNQPLGLFINNEYVHPKQQKTFEVISPSTEEKITDVYEALEEDIDTAVEAAQAAYHNGWAQGPPEQRSKVLFKLADLIEENAELLAQIETWDNGKSLQNARGDVALTAAYFRSCGGWADKILGSQINTGNTHFNYTQRVPLVCGQIIPWNFPLLMASWKLGPVLATGSTTVLKTAESTPLSALYLSQLLVEAGMPKGVINIVSGFGATAGAAIAKHPKIEKVAFTGSTATGKIIMKLAAESNLKKVTLELGGKSPNIVFNDADLDKTIQNLIVSIFYNSGEVCCAGSRLLIQSGVYDQVVEKFKEAAESVKVGNPFDEDTFMGAQVSDVQLSKILKYVESGKSQGATVVTGGARADGKGYFVKPTIFADVKKDMDIVREEIFGPVVTLIKFDTVDEAVELANDSDYGLAAGIHSADVNKCIDVANRVKAGTVWVNTYNDFHPMVPFGGFSASGIGREMGEEVLHEYTQVRAVRMKINPPN

SEQ ID NO: 6658 - protein, 418 aa, Neurospora crassa
MSLSNKLSIEDVDLKGKRVLIRVDFNVPLDAEKKVTNPQRIAGAIPTIKYALDHGAKAVVLMSHLGRPDRKPNPKYSLKPVVPELEKLLGKKVTFAPDCVGPEVEEIVNKADNGEVILLENLRFHIEEEGKGTDAEGNKVKADKAKVEEFRKNLTKLGDVYINDAFGTAHRAHSSMVGIDLPVKAAGFLMKKELQYFAKVLESPQRPFLSILGGAKVSDKIQLIDNLLDKVNTLIVCGGMAFTFKKTLQNMPIGNSLFDEAGAKIVPDLVKKAEKNNVKLVLPVDFTIADKFDKDANTGYATDKDGIPDGWMGLDCGEESVKLFTQAINESQTILWNGPAGVFEFDKFAKGTKATLDACVKAAEEGRTVIIGGGDTATVAAKYGVEDKLSHVSTGGGASLELLEGKALPGVVALSERQ

SEQ ID NO: 6659 - protein, 306 aa, Prochlorococcus marinus str. MIT 9313
MVSPLPVSSATNRQQRLWAAVKAHREPLPAKQRRFKWGTTSFMLAMHVAATFALLPRFWSWQGLVAFAVLYWTTVLGVTLGLHRLVAHRSFVVPVWLERILVIMATLACQSGPIEWVALHRHHHRYSDQTNDHHDAGRGLWWAHSEWMLHEIPALDHMDRFAGDLLADPFFRWLDRWFLLLQIPLGLGLYWYGEVAQVHGGGLGLVLWAIPLRLVVVYHVTWFVNSATHAFGYRNFDSPDLSRNCWWVAVLSFGEGWHNNHHAYPSSARHGLRWFEFDITWQHVKALRRLGLARRVQQARYVSGAS

SEQ ID NO: 6660 - protein, 467 aa, Saccharomyces cerevisiae
MSTNTKHYDYLVIGGGSGGVASARRAASYGAKTLLVEAKALGGTCVNVGCVPKKVMWYASDLATRVSHANEYGLYQNLPLDKEHLTFNWPEFKQKRDAYVHRLNGIYQKNLEKEKVDVVFGWARFNKDGNVEVQKRDNTTEVYSANHILVATGGKAIFPENIPGFELGTDSDGFFRLEEQPKKVVVVGAGYIGIELAGVFHGLGSETHLVIRGETVLRKFDECIQNTITDHYVKEGINVHKLSKIVKVEKNVETDKLKIHMNDSKSIDDVDELIWTIGRKSHLGMGSENVGIKLNSHDQIIADEYQNTNVPNIYSLGDVVGKVELTPVAIAAGRKLSNRLFGPEKFRNDKLDYENVPSVIFSHPEAGSIGISEKEAIEKYGKENIKVYNSKFTAMYYAMLSEKSPTRYKIVCAGPNEKVVGLHIVGDSSAEILQGFGVAIKMGATKADFDNCVAIHPTSAEELVTMR

SEQ ID NO: 6661 - protein, 259 aa, Prochlorococcus marinus str. MIT 9313
MIAIHALSILALLPRFWSWQAITTLLVLYWVTACLGVTIGYHRLLSHRSFRVPHWLERFFATCGTLSCQHGPIDWVGLHRHHHKFSDTDPDHHNSHKGFWWSHMGWMFEPIPAMRVVPRLTVDLAADPYYRWLNKYFLLLQLPLAGLLFWIGSVSGAGGLALVLWGIPLRLTIVYHITWLVNSASHCWGTVAFDSGDNSRNNPWVAALTFGEGWHNNHHAFPHSAIHGLQRGQIDLTWQHIRLMRALGLARKIRLPITS

SEQ ID NO: 6662 - protein, 560 aa, Arabidopsis thaliana
MASSTALICDTEAWKDLKGHVEDIKKTHLRDLMSDANRCQSMMMEFDGLLLDYSRQRATVETMDKLLNLAKASQLTEKISRMFNGEHINSTENRSVLHVALRAPKDAVIKADGMNVVPEVWNVLDKIKEFSDKIRSGSWVGATGKPLKDVIAIGIGGSFLGPLFVHTALQTDPEALESAKGRQLRFLANIDPVDVARNISGLNPETTLVVVVSKTFTTAETMLNARTLREWITAALGASAVAKHMVAVSTNLALVEKFGIDPNNAFAFWDWVGGRYSVCSAVGVLPLSLQYGFSMVEKFLKGASSIDQHFQSTPFEKNIPVLLGLLSVWNVSFLGYPARAILPYSQALEKFAPHTQQVSMESNGKGVSIDGLPLPFETGEIDFGEPGTNGQHSFYQLIHQGRVIPCDFIGIVKSQQPVYLKGEVVSNHDELMSNFFAQPDALAYGKTPEQLQKENVSENLIPHKTFSGNRPSLSLLLPELTAYNVGQLLAIYEHRVAVQGFVWGINSFDQWGVELGKVLATQVRKQLHSSRTQGTAPEGFNYSTTTLLKRYLETSSEPQM

SEQ ID NO: 6663 - protein, 552 aa, Arabis gemmifera
MASSTALFCDTEAWKDLKGHVEDIKKTHLRDLMSDANRCQSMMMEFDGLLLDYSRQRAPVETMDKLLNLAKAAQLTEKISRMFNGEHINSTENRSVLHVALRAPKDAVIKADGKNVVPEVWNVLDKIKEFSEKIRSGSWVGATGKPLKDVIAIGIGGSFLGPLFVHTALQTDPEALESAKGRQLRFLANIDPVDVARNIKGLNPETTLVVVVSKTFTTAETMLNARTLREWITAALGASAVAKHMVAVSTNLALVEKFGIDPNNAFAFWDWVGGRYSVCSAVGVLPLSLQYGFSVVEKFLKGASSIDQHFQSTPFEKNIPVLLGLLSVWNVSFLGYPARAILPYSQALEKFAPHIQQVSMESNGKGVSIDGLPLPFETGEVDFGEPGTNGQHSFYQLIHQGRVIPCDFIGIVKREVVSNHDELMSNFFAQPDALAYGKTPEQLQKENVSENLIPHKTFSGNRPSLSLLLPELTAYNVGQLLAIYEHRVAVQGFVWGINSFDQWGVELGKVLATQVRKQLHSSRTQGTALEGFNYSTTTLLKRYLETSSEPQM

SEQ ID NO: 6664 - protein, 215 aa, Populus balsamifera subsp. trichocarpa
IVHRVTGSLIIDFEPVKPYEVPMTAAGALQSYKLAAKAITRLQSLPSGSMERLCDTMVQEVFELTGYDRAMAYKFHDDDHGEVVSEVTKPGMEPYLGLHYPATDIPQASRFLFMKNKVRMIVDCHAKHVKVLQDEKLPFDLTLCGSTLRAPHSCHLQYMENMNSIASLVMAVVVNDGDEDGDTPDSVNPQKRKRLWGLVVCHNTSPRFVPFPLRY

SEQ ID NO: 6665 - protein, 134 aa, Populus balsamifera subsp. trichocarpa
DEHGEVVAENKRADLEPYIGLHYPSTDIPQASRFLFKQNRVRMIVDCHATPVRVIQDEALMQPLCLVGSTLRAPHGCHAQYMANMGSIASLAMAVIINGNEEEAIGGRNSTRLWGLVVCHHTSARCIPFPLRYA

SEQ ID NO: 6666 - protein, 134 aa, Populus balsamifera subsp. trichocarpa
DEHGEVVAENKRVDLEPYIGLHYPSTDIPQASRFLFKQNRVRMIVDCHAIPVRVIQDEALMQPLCLVGSTLRAPHGCHAQYMENMGSIASLAMAVIIYGNDEEAIGGRNSMRLWGLVVCHHTSARCIPFPLRYA

SEQ ID NO: 6667 - protein, 438 aa, Actinobacillus pleuropneumoniae serovar 1 str. 4074
MLTQEKNDLNKSGLDITNDTLVLILAGGRGSRLYELTDRRAKPAVYFGGCRRIIDFALSNCINSNLLKIGVITQYAAHSLLRHLQRGWSFLPYERNQYIDMLPARQQLDENTWYRGTADAVYQNMSMMKSHYRPKYVVILAGDHIYKMDYTQMLRDHVESGAKCTVGCIEVPREQAVEFGVMAVNDKLKVKEFVEKPADPPAMPGRPDSSLASMGIYVFDADYLYKMLEQEAAVPGTSHDFGKDIIPKAVEEGVLYAHPFERSCKGRNATGAIYWRDVGTIDSYWAAHMDLVSEEPQLDLYDESWPIHGRPQQTAPARFYYNKQRQRTLDNSLIAGGCVITDAEISNSVLFNRVHVAEETIIEHTVILPQVSIGKNCVIKRAVIDRHCVIPDGLQIGVNPEEDAKHFRVSKGGIVLVTQGMLDKLQGITSNIKLHHTI

SEQ ID NO: 6668 - protein, 427 aa, Agrobacterium tumefaciens str. C58
MTAPHPSKTHIGNHALHPETQMLNYGYDPELSEGAVKPPVFLTSTFVFKSAEDGRDFFDYVSGRKEPPAGKGAGLVYSRFNHPNSEIVEDRLAVYERTESCALFSSGMSAISTTLFAFVRPGDTVLHSQPLYGGTETLLAKTFHNFGVSAVGFADGVSEASVMAAAETAMAKGRVSVILIETPANPTNSIVDVAMMRRVADVIGEKQGHRPIIACDNTLLGPVFQQPIEHGADISLYSLTKYVGGHSDLIAGAALGRKDVMKQVKALRGAIGTQLDPHSCWMLGRSLETLQIRMERANSNAKIVAEFLKAHPKVEKIHYLPFSDPASAVGKVFAAQCSGAGSTFSFDIVGGQPASFKFLNALTIFKLAVSLGGTESLASHPATMTHSGVPADVRQRIGVLDSTIRLSIGIEHPDDLIADLTLALDMS

SEQ ID NO: 6669 - protein, 271 aa, Haemophilus somnus 2336
MQHKLISFIGGGNMAQAIVLGLLKQGYPAHYIRVCDPNQSRRDLFIAQGTQVSSNNVEAIQDADVVLLAVKPQIMAEVCVPLSAVDFSDKLVISIAAGISTVRLTALLPSAKNIIRVMPNTPALVSAGMAGLFATPQVSVNLKQFAQDLLSAMGEICWLEQEQDMHAVTAGSGSSPAYFFLFMEAMQQALIEMNLDPKTARLLVQQSALGAAKMVIENPQIALSELREDVTSKGGTTASALAVFNEQNVTQIIKQAMLACVKRSQEMESLF

SEQ ID NO: 6670 - protein, 749 aa, Aspergillus fumigatus
MATKIAGGLHRAQEVLQNTSSKSKKLVDLERDTADAHTQQPLTTDHGVRVSNTDQWLRVTNDRRTGPSLLEDQIAREKIHRFDHERIPERVVHARGTGAFGNFKLKESIEDLTYAGVLTDTSRNTPVFVRFSTVQGSRGSADTVRDVRGFAVKFYTDEGNWDIVGNNIPVFFIQDAVKFPDFVHAVKPEPHNEVPQAQTAHNNFWDFVYLHPEATHMFMWAMSDRAIPRSYRMMQGFGVNTFALVNKEGKRHFVKFHWIPHLGVHSLVWDEALKLGGQDPDFHRKDLMEAIDNKAYPKWDFAIQVIPEEKQDDFEFDILDATKIWPENLVPLRVIGELELNRNVDEFFPQTEQVAFCTSHIVPGIDFTDDPLLQGRNFSYFDTQISRLGINWEELPINRPVCPVLNHNRDGQMRHRITQGTVNYWPNRFEAVPPTGTKGSGVGGGFTTYPQRVEGIKNRALNDKFREHHNQAQLFYNSMSEHEKLHMKKAFSFELDHCDDPTVYERLAGHRLAEIDLELAQKVAEMVGAPIPAKALKQNHGRRAPHLSQTEFIPKNPTIASRRIAIIIGDGYDPVASTGLKTAIKAASALPFIIGTKRSAIYATEDKTSSKGIIPDHHYDGQRSTMFDATFIPGGPHVATLRQNGQIKYWISETFGHLKALGATGEAVDLVKETLSGTLHVQVASSQSPEPVEWYGVVTAGGKQKPESFKESVQILKGATDFVGKFFYQISQHRNYQRELDGLASTIAF

SEQ ID NO: 6671 - protein, 334 aa, Microbulbifer degradans 2-40
MIKAYAAMEPGAALVPFEYEPGPLANNEVELKVESCGICHSDLSMLDNEWGFTQYPFVGGHEVIGIVEAVGSSVNNVAVGQRVGLGWHSGYCNTCASCQSGDQNLCNSAQPTIAGHHGGFADKVRADANAVVALPEGVNPDSAGPLFCGGITVFNPLVQFGIKPTSKVGVIGIGGLGHIALQFLNAWGCEVTAFTSSESKKEEALKLGAHHVLNSSDAAQLEAAAGRFDFIISTVNVKLDWNEYLATLAPKGRLHFVGATLAPLDINVFQLIGSQREISGSPVGSPGTISQMLDFAALHNIQPVTEYFRFDQINEALTKLREGKAHYRIVLTNK

SEQ ID NO: 6672 - protein, 242 aa, Zea mays
MASLFKDPSKLSAYRDRRFKGTQEEYEAALLASTTLYIGNMSFYTTEEQAYELFSRAGEIKKIIMGLDKNSKTPCGFCFVLYYSREDAEDAVKYISGTMLDDRPIRVDFDWGFEEGRQWGRGRSGGQVRDEYRTDYDPGRGGYGKMVLRELEAQRELVDYGGSFQPNAPPPYERSERKRGHGDSHRNDRGDYQRKRYRNDDRSAPEESKRAPDSDPAEKNPRFREKGDSDEEEDDYDGKRRR

SEQ ID NO: 6673 - protein, 524 aa, Oryza sativa
  unsure (1)..(524): unsure at all Xaa locations
MASISGAAAPPSSSAACRLRLRRQLLLRPSHLRLRAPHSIADLSRSSSSSSEQQPSSTPAAPLASRPGQNGSTRGAVEKDPIKLWERYVEWLYQHKELGLFVDVSRMGFTEEFLRRMEPRMQRAFAAMRELEKGAIANPDEGRMVGHYWLRDPGLAPNSFLRTKIETTLDRILAFSQDVVSGKIKPPSSPAGRFTQILSIGIGGSALGPQFVSEALAPDNPPLKIRFIDNTDPAGIDHQIAQLGPELASTLVIVISKSGGTPETRNGLLEVQKAFRDAGLDFSKQGVAVTQENSLLDNTARIEGWLARFPMFDWVGGRTSEMSAVGLLPAALQDMVVLPYKDSLLLLSRYLQQLVMESLGKEFDLDGNRVNQGLTVYGNKGSTDQHAYIQQLREGVHNFFVTFIEVLRDRPPGHDWELEPGVTCGDYLFGMLQGTRSALYSNDRESISVTVQEVTPRAVGALVALYERAVGIYASLVNINAYHQPGVEAGKKAAGEVLALQKRXCKDPAEPLTLDQIAERCHCP

SEQ ID NO: 6674 - protein, 468 aa, Bacillus cereus ATCC 10987
MKRENNVKKRMGYVMNTKKFAKVNEQIPGPKAASLLERRQNIVPKGVSNGIPTFVQSANGALVTDVDGNQYIDFAGAIGTINVGHCHPAVKEALHKQVDQYIHTGFNVMMYEPYIELAEKLAALAPGSFDKQVLFLNSGAEAVENAVKIARKYTKRPGIIAFSKGFHGRTLMTMTMTSKVKPYKFGFGPFAPEVYKAPFPYEYRRPEGLTEEQYDNFMIEEFKNFFISEVAPETIAAVVMEPVQGEGGFIVPSKKFVQEVRNICSEHGILFVADEIQTGFSRTGKYFAIDHYDVVPDLITVSKSLGAGVPISGVIGRKEIMNESAPGELGGTYAGSPLGCAAALAVLDVIEKENLNDRAIELGKVVINRFEEMKNKYNCIGDVRGLGAMCAFELVQDRKTKAPDKTLTANLCAEANKRGLLLLSAGTYGNVIRVLMPLVITDEQLEEGLTIIEESLQVCYEKANIARV

SEQ ID NO: 6675 - protein, 341 aa, Wautersia eutropha
MAQTMRAMIFEGAGLPLRLQDVPVPDPGPGEVCIAAAACEVCHTDLHIADGDLSHPKPALIPGHEAVGQVESCGTGVTAFSPGERVGVPWLGNTCGDCRYCMHLHGNLCDAPQLTGYTRDGGYAEYVVADSSYYFRIPPAYDDEHAEPLLCAGLIDYRTLRMAGEAQRIGIYGFGAAAHLVTQIAAAQGREVYGFTRAGDTGAQQLAYETGACWAGSSDLQSPVALDAALIFAPVGALVPCALRAVDKGERCRLRRHPHERHPAHALPAAMGRASPVFGRQPHARRRNCVDADRRPDAAADAHDRLPARAGQCGTGRSARGASVRCRRPENPSLRLRQISP

SEQ ID NO: 6676 - protein, 740 aa, Zea mays
MASEILGNVTEKAKDLAGSKSTKMAQLAEVTKDVHDDKWRITSDYGVKQNNTDDWLRVATDDQTGPLLLEDQFAREKIHRFDHERIPERVVHARGSGAFGKFTLFESASDVTSAGILTDTSRETPVFLRFSTVLGSRGSADTVRDVRGFAVKFYTEEGNWDIVGNNIPVFFIQDSMKFPDVIHAGKPEPDCEVPQAQSAHNNFWDFQYMHPEATHMFMWAMSDRTIPRSYRMMQGFGVNTYTLINAKGERHFVKFHFTPELGVHSFVWDEALKIAGQDPDFHRKDLWMAIDSGAYPKWKFGIQVIPEAKEHDFEFDILDATKVWPEELVPVRYIGELELNKNPDEFFTQTEQVAFCTSHIVPGIGFSNDPLLQGRNFSYQDTQLSRLGINWEELPINKPVCPVMNFNRDGAMRHTITKGKVNYWPNRFQTVPPATEKEGAYVEFPEKTAGMKVRMQSKKFREHKSQAELFYNSMSENEKMHMKAAFAFELDHCDDPVVYERLCERLCEIDLELAQSVAEMVGGEQPTKQTRPKHNKKAKGLSQMDFQPEKPTIATRMVAILIADGYDKAAYTGMKAALTAAGALPFTISPRRNKIFADGEDKSGSGVVADHHLEGQRSTMYDSVFVPGGAKSIETLSKNGRAVHWVREAFGHLKAIGGTGEAVSFIKQAVDLPGMEFSTSGDVVNSYGVVTATAVQPESFKEAVNMAKEAKDFVSAYMYAISQHKNFERETAGLNAMVAY

SEQ ID NO: 6677 - protein, 523 aa, Glycine max
MAMANLARRKGYAVVLSSRSSLCLTRWRGFASGSDENDVVVIGGGPGGYVAAIKAAQLGLKTTCIEKRGTLGGTCLNVGCIPSKALLHSSHMYHEAKHAFANHGVKFSSVEVALPAMMGQKDKAVSNLTQGIDGLFQKNKVTYVKGYGKLVSPSEISVDTTEGENTVVKGKHIIIATGSDVKSLPGVTIDEKKIVSSTGALALSEIPKKLVVIGAGYIGLEMGSVWGRIGSEVTVVEFASEIVPTMDADIRKQFQRSLEKQGMKFKLKTKVVGVDTSGDGVKLTVEPSAGGEQTIIEADVVLVSAGRTPFTSGLNLDKIGVETDKLGRILVNERFSTNVSGVYAIGDVIPGPMLAHKAEEDGVACVEYLTGKVGHVDYDKVPGVVYTNPEVASVGKTEEQVKETGVEYRVGKFPFLANSRAKAIDNAEGLVKIIAEKETDKILGVHIMAPNAGELIHEAAIALQYDASSEDIARVCHAHPTMSEAVKEAAMATYDKPHSHLKSWLLLSSLVFIFVQEFTMTWR

SEQ ID NO: 6678 - protein, 636 aa, Vibrio cholerae
MCGVAGFISKRLSPVDCLTSMVESIMHRGPNDSGLWVDDDFGVCLAHARLSIQDLSSAGHQPMHSKSERYVMIFNGEIYNHLTLREELIEIVPSYWNGHSDTETLLAGFEVWGIEQTIQKCVGMFAIVLWDKVLKQLILIRDRFGEKPLYYGWQRDTFLFASELKALKAHPSFEGSINRQALSHFFRLNYIPTPLSIYEGIFKLEPGVIAVFSHEGQLLSKQTFWDASHAVSLQNFSDHDAVDKLDDLIKQSIQDQALSDVPLGAFLSGGVDSSTVVGILQSLSTRPVKTFTIGFDHADFNEASEASDVAKHLGTDHVELIVSAEDALAIINQLPVMYDEPFADASQVPTFLVSKLAKKEVTVCLSGDGGDELFCGYNRYHYTAKVWSYLEKIPFPIRKMLSVFLLTLSPSSWDVLSKTLGLNTRLPNLGNKIQKGAQALKARDIEDLYTRVVSNWDLDEPLVKNTAVEKLPFLSDLTELSHLNDLEKMMLWDKQSYLMDDVLVKTDRATMACSLEGRVPLLDHRIAEFAASLPIHLKYRGGKGKWLLREVLYRYVPKKLIERPKKGFSLPIAEWLRGPLKDWANVLLDSDRIDKEGFLSSELVQKKWREHLAGKRDWSSQLWSVLMFQLWLEKNK

SEQ ID NO: 6679 - protein, 197 aa, Raphanus sativus
MPRSRSRVLILLLPLAFVFYLYRYLPSPAIVDQSSYSSIYHISVKDIDGNDVSLSKFTGKVLLIVNVASKCGLTQGNYKELNILYAKYKTKGLEILAFPCNQFGSQEPGSNKEIKDNICTTFKGEFPIFDKIEVNGENASPLYKFLKEQKGGLFGDSIKWNFAKFLVDKQGNVVDRFAPTTSPLEIEKDIEKLLAST

SEQ ID NO: 6680 - protein, 309 aa, Glycine max
MAEKHNIKNPAVKRILQEVKEMQSNPSDDYMSLPLEENIFEWQFAIRGPRDTEFEGGIYHGRIQLPSEYPFKPPSFMLLTPSGRFETQTKICLSISNHHPEHWQPSWSVRTALVALIAFMPTNPNGALGSLNYKKEDRCALATKSQEAPPKFGTPERQRLIDEIHEYMLSKSSPLPQLAPSQASEEQSKTEEAKAQVNLENPEALPVGAEIPDQAGDRIVEEQELPVNANPNPAGVEASMESSSSVSSNQLLQKSDARVQNLKPDTRVQKPDDRLFTLAAIGLAIAIVVLLLKKFIKSTEYGAVFMDES

SEQ ID NO: 6681 - protein, 309 aa, Apium graveolens
MAITLNSGFKMPVLGLGVWRMDRNEIKNLLLSAINLGYRHFDCAADYKNELEVGEAFKEAFDTDLVKREDLFITTKLWNSDHGHVIEACKNSLKKLQLEYLDLYLIHFPMASKHSGIGTTRSILDDEGVWEVDATISLEATWHEMEKLVEMGLVRSIGISNYDVYLTRDILSYSKIKPAVNQIETHPYFQRDSLIKFCQKYGIAITAHTPLGGALANTERFGSVSCLDDPVLKKLSDKHNKSPAQIVLRWGVQRNTIVIPKSSKTKRLEENINIFDFELSKEDMELIKTMERNQRSNTPAKAWGIDVYA

SEQ ID NO: 6682 - protein, 537 aa, Neurospora crassa
MTLLALKEDRPTPKAVYNWRVYTCAAIASFASCMIGYDSAFIGTTLALPSFTKEFDFASYTPGALALLQSNIVSVYQAGAFFGCLFAYATSYFLGRRKSLIAFSVVFIIGAAIMLAADGQGRGIDPIIAGRVLAGIGVGGASNMVPIYISELAPPAVRGRLVGIYELGWQIGGLVGFWINYGVNTTMAPTRSQWLIPFAVQLIPAGLLFLGSFWIPESPRWLYANGKREEAMKVLCWIRNLEPTDRYIVQEVSFIDADLERYTRQVGNGFWKPFLSLKQRKVQWRFFLGGMLFFWQNGSGINAINYYSPTVFRSIGITGTDTGFLTTGIFGVVKMVLTIIWLLWLVDLVGRRRILFIGAAGGSLCMWFIGAYIKIADPGSNKAEDAKLTSGGIAAIFFFYLWTAFYTPSWNGTPWVINSEMFDQNTRSLGQASAAANNWFWNFIISRFTPQMFIKMEYGVYFFFASLMLLSIVFIYFFLPVTKSIPLEAMDRLFEIKPVQNANKNLMAELNFDRNPEREESSSLDDKDRVTQTENAV

SEQ ID NO: 6683 - protein, 431 aa, Exiguobacterium sp. 255-15
MKLEEMLVSVDTFYVLFATLLVFTMQIGFLLLETGMLRAKNAGHVAVKQLISFSVAALAFWAIGFGLTFGDGPGLIGTEGFFLHGGFSSLDWSNVTIDVKFLFQLSFVAVSLAIAWGGFAERAKLSVYLLFGTFFVAVIYPIIARSVWAGGFLGSLGMQDFAGSTVVHLQGGIAALVAALILKKRIGAEKTPLLGHNVIYSVVGAFILWLCWFGFNAGSTLTIADGFFSYVALTTLLATAAGALGALAISFWHRRVADIPSIINGVLAALVAITAACAFVEPWGAVVIGFLAGVITYATSILLARRVDDPLCAFSVHGVAGIWGTLATGFFASPRLVEITGIGQAGLFYGGGFTQLGVQALGVVFAVVVVSVLSYVFLKLLDVTIGLRITREDELRGLDVAEHGQASYDLPAPVSKESHPTYEEESTEKVN

SEQ ID NO: 6684 - protein, 181 aa, Vibrio parahaemolyticus RIMD 2210633
MKGLLKLAAYLGFISMSSFVLASECPDILQGKQRMLNSTEEIELCEVFKGKTLLVVNTASQCGFTPQYEQLETLYQTYKDKNFAVIGFPSNDFRQDKGSEENTAKICYLDYGVTFPMMARSSVLGNDANPVFSEISTQAGVTPKWNFYKFLISKEGKVIATFPSSTSPTSTTLTNMIEQQL

SEQ ID NO: 6685 - protein, 484 aa, Agrobacterium tumefaciens
MIKLKNAALLRDACLVNGRWLKAADGKTIAVENPANSMIIGHVPSLSADEVKAAVESAGKAFSEWSRRSAKDRAAILRRWFDLMVANADDLGALMTAEQGKPFAEAKGEALYAASFVEWFAEEAKRVYGDTIPSPTTDKRITILKQPIGVCAAITPWNFPAAMITRKAAPALAAGCAMIVKPAEQTPLTALALGVLAEEAGVPAGVFQVVTGAARDIGKVFTESDTVRKISFTGSTEVGRLLMAQSAPTIKKLSLELGGNAPFIVFDDADLDAAVEGAIVSKYRNAGQTCVCSNRIYVQDGVYDAFAEKLVKRVESLSVGEGTEPVVLIGPLIDQEAVPKVEDHVADALGKGAKIVIGGKRHALGGTFYEPTVLTGATQAMKVAREETFGPVAPLFRFGTEDEAVAMANDTEFGLAAYFYTENVRRTWRVAEALEYGMVGHNTGLISNEVAPFGGVKQSDLGREGSHYGIDEYLEIKYLCSAIG

SEQ ID NO: 6686 - protein, 263 aa, Triticum aestivum
  unsure (1)..(263): unsure at all Xaa locations
RGKIIRLHILTDGRDVLDGSSVGFVETIENDLAQLREQGVDARIASGGGRMYVTMDRYENDWSVVKRGWDAQVLGEAPHKFQNALEAVKTLRAEPKANDQYLPPFVIVDESGKSVGPIVDGDAVVTFNFRADRMVMLAKALEFPDFDKFDRVRVPKIKYAGMLQYDGELKLPSKYLVSPPLIERTSGEYLVKNGVRTFACSETVKFGHVTFFWNGNRSGYFDETREEYVEIPSDSGITFNEQPKMXALEIAERTRDAILSGKV

SEQ ID NO: 6687 - protein, 465 aa, Rubrobacter xylanophilus DSM 9941
MREGENTLRAESTAAFRARKGLSEGLLERQAARESNARTYPRSIPIAVSRARGPYVWDADGRRYLDCLSGAGTLALGHNHPVVVEAIREVLDRGGPLHTLDLATPVKDRFVEELFGSLPRRFAERARIHFCGPAGADAVEAAVKLAKTATGRETVLSFSGGYHGMTHGALSLTGKLAPKEPLAGLMPGVHFLPYPYGYRCPFGVGGEDGWRVGARYVERLLDDPESGVKRPAAMVLEVVQGEGGSIPAPDGWVREMRRITRERGIPLIVDEIQTGLGRTGTVWAFERPGIEPDAVVMSKAIGGSLPLAAVVYDAALDVWEPGAHTGTFRGNQLAMAAGAATVRHVLKNRLHEHAARMGELLLERLREVQREAGCVGEVRGRGLMVGVEVVDPEAGPDPLGSRPARPDLARRVQAEALRRGLILETGGRHGAVVRLLPPLIIAEEEAEEICALFGEAVLAASRGAR

SEQ ID NO: 6688 - protein, 531 aa, Streptomyces coelicolor A3(2)
MRPMAQVAMVMNLDKCIGCHTCSVTCKQAWTNRRGMEYVWFNNVETRPGQGYPRRYEDQDKWRGGWELNRRGALKLKAGGRFKKLAGIFSNPRLPEIKDYYEPWTYDYKNLTDAPLGTDYPVARPVSQLDGKPMKIGWSSNWDDSLGGAPAYGDLDPMVERTRQQASEKVRFAYEETFMFYLPRICEHCLNPSCVASCPSGAMYKRSEDGIVLVDQDRCRGWRMCVTGCPYKKVYFNHRTGKAEKCTFCYPRIEVGQPTVCSETCVGRLRYLGVVLYDADKVTAAAETPNERDLYEAQLDVFLDPEDPGVRRAAEEAGIPFDWIEAARRSPVHALVSKYRVALPLHPEYRTMPMVWYIPPLSPVVDALTETGHDGEDADNLFGAIDTLRIPLEYLAELFTAGDTGPVRASLEKLAAMRAHMRSVNLGEDPDPAVCAGVGMRPEEIQEMYRLLAIAKYEERYVIPTAAVGDAHRLEASALPDTCSLDTEGGPGMGGDGPFGQDSGRKRLPLVPVENFHILRRRQTADDEREV

SEQ ID NO: 6689 - protein, 1198 aa, Streptomyces ambofaciens
VGGVIKTVMALRHGVLPRTLHVTEPTPEVDWTTGAVELLTEARPWPEPDRPRRAGVSAFGISGTNAHVVLEPIPATTSSESPVRRTTPPLVPWVLSARTPQALREQAARLAERVTRDDTLHPVDVAVSLADGRAHLEHRAVALGHDREALLTELSDLADAGHLTVRDSAESGRLALLFSGQGSQRLGMGRELYGAFPVFADAFDAVCARVDLERPLREVVFGEDAGLLERTVYAQAGLFALEVALFRLVESWGVTPDVLVGHSIGELAAAHVAGVLSLEDACALVSARGRLMDALPGGGAMLAVEVAEEALELPDGVDLAAVNGPTSVTVSGEAEAIAELEERLRAQEVRVKRLAVSHAFHSHLMEPMLADFAAVARSLTYHTPRIPVVTTAPGDIATPEYWVGQVREPVRFADALGRFAGVRTALELGPAGVLSALAQEQVDSLVAVPALRPGHGEAETLLRVIARAHVRGAEVDWSAVTGVGDRIELPTYPFQRTRYWPDPPAPDAAARRRPPHHRRSPASGRPSTRATSSPWPPPRASTRRRWSPCCRPCRPGTATPASTRPSVPGGTGSPGSPWRSRPRRPARDGGFWWLRTTPTRRSTPAARRSPNGRARSTCSSSTPPPPNAEELADLLRDYVVPGEQLRGLISLLALDETPHPDHPVLTAGLAGTLCLLHAALDVDPGPLWTVTAGAVGAGEDEAPTSPAQAAVWGLGRVAALEHPRHWGGLVDLPADGLGDDPRLAARLAATLTRTDGEDQVAVRAAATLGRTLRHADPVPQRPGTGWTPDGTVLVTGGTGAIGGHVARWLATEGAEHLVLLSRRGPDAPGARELTGELTALGARVTVVACDLQARGDVSRVLDALAADGVTVRTVMHTAGLGVLAPLADTGVADLAHLVGGKVAGARHLDEQLDPARLDAVVHFSSIAAMWGVGQHGGYAAGNAYLDALAQQRGREGAPVLSVAWGPWDGGGMVDQDAVQPMLRRGISLLEPGPALVALRQALDAREPSTAAAEVDWERFAPSFTALRPSPLLAELPEVRALRPAAATAAPDTVQDGFRARLAALSPVERERAALELVRTHAAVALGHARAEDIEPERTFRDLGADSLTAVALRDGLASASGLTLPATLVFDQPTPVALAEHLLGLLMPEDTVDDLPSADDLDRLEAALARRSGDDLDRVRIVMRLESLLATARSGTGT

SEQ ID NO: 6690 - protein, 399 aa, Pseudomonas aeruginosa PAO1
MSGNRGVVYLGPGKVEVQNIPYPKMQDPQGRQIDHGVILRVVSTNICGSDQHMVRGRTTAPEGLVLGHEITGEVVEIGRGVETMKIGDLVSVPFNVACGHCRTCKEQHTGVCLTVNPARAGGAYGYVDMGGWVGGQAEYVLVPYADFNLLKLPNREAAMEKIRDLTCLSDILPTGYHGAVTAGVGPGSTVYIAGAGPVGLAAAASARLLGAAVVIVGDVNPTRLAHAKKQGFEIADLSKDTPLHEQIAALLGEPEVDCAVDAVGFEARGHGHSGSQQEAPATVLNSLMGITRVAGKIGIPGLYVTEDPGAVDAAAKHGALSIRFGLGWAKSHSFHTGQTPVMKYNRQLMQAIMWDRIKIADIVGVEVITLDDAPKGYGEFDAGVPKKFVIDPHNLFRAA

SEQ ID NO: 6691 - protein, 667 aa, Eremothecium gossypii
MVGLTETISKAFNDVRPTLRSVGVANNHRHISLGLLPPNRKNPLVRKYRKKARLRETDRGSFYSLDEDFGSVMGADPSMLDVTAEEEGVLDGGELSRTVSLPSTLASEAGPSSALNVDWILEEHERRYSTVNGSAEDIVAVDVEGAAPDMVHYTHFMHRVKQQLPSDKAEVRVLRPRKLSYYSIGSKGGPSSAFRGSEDLDDEPATVKSESLVLLCYSVPLIFTFLLEQMFPVVCALVVGHLGKNELAAVSLASMTTNITFAIFEGISTSLDTLCPQAYGARNYYGVGLHMQRCVLFSLAFFVPFAALFWFSEGILPYLIKEKSLVPLTSQFLRVMIVGGPGFILFENLKRYLQAQGIFDAGIYVLLICCPLNIVMSYLLVWNPVIGLGFIGAPIAVALNFWCMFLLLLLYCIYFNGSKCWGGLSRKAFDHWKDLSKLAVPGIIMLEAEDMSSEILTLFSSYLGTEYLAAQSAVSTTVAMLYMIPYAVGISVSTRIAQYIGARNPDNARLASRVGIASSAVVGIVNCTMLILGRDLIPRIYSSDAEVIRLMREILPLLGLVEIFDALNAIAGSCLRGQGMQYVGSVVNLVVYYLFAIPLGMLLSWTFDMKLSGLWVGIGSGMLVIGLIEGYYVLFADWDMLIDRAEMLKETEDDSDEEVDEFSALLP

SEQ ID NO: 6692 - protein, 281 aa, Oryza sativa
  unsure (1)..(281): unsure at all Xaa locations
MDPKFPPPPPLNKTEPTTTTTNQQHHHDEQQQQHRLQIQVHPQQQEQQDGGGGGGKDQQQQQQMQVVVAAAAGERRMQGLGPKRSSNKDRHTKVDGRGRRIRMPALCAARIFQLTRELGHKSDGETVQWLLQQAEPAIVAATGTGTIPAFALASSPPPFLPPTSASSGRTTTTTTCGRQRRPRRPXGFAGAGFSGADSGVIGGIMQRMGIPAGIELQGGGAGGLGGGGGGGGGHIGFAPMFASHAAAAAAMPGLELGLSQDGHIGVLAAQSLSQFYHQVVV

SEQ ID NO: 6693 - protein, 535 aa, Neisseria meningitidis Z2491
MSIVEIKVPDIGGHENVDIIAVEVKAGDTIAVDDTLITLETDKATMDVPADAAGVVKEVKVKVGDKISEGGVILTVETGAAAAEAAPAAAEAQPAPAAAPAAAGGATVQVAVPDIGGHTDVDVIAVEIKVGDTVAEDDTLITLETDKATMDVPCTAAGVVKAVFLKVGDKVSEGSAIIEVETVGSAAAAPAQAAQAAAPAAAPPPTAAAAPAAAPAPSAPAAAKIDEAAFAKAHAGPSARKLARELGVDLGQVKGTGLKGRIVGDDIKAFVKSVMQGGAAKPAAVGASLGGGLDLLPWPKVDFSKFGNVEVKELSRIKKISGQNLSRNWVVIPHVTVHEEADMTELEEFRKQLNKEWEREGVKLSPLAFIIKASVSALKAFPEFNASLDGDNLVLKNYFNIGFAADTPNGLVVPVIKDVDQKGLKQISQELTELSKKAREGKLKPQEMQGACFTISSLGGIGGTGFTPIVNAPEVAILGVCKSQIKPVWNGKEFAPRLMCPLSLSFDHRVIDGAAGMRFTVFLANLLKDFRRITL

SEQ ID NO: 6694 - protein, 496 aa, Ralstonia metallidurans CH34
MQDQSDQTRALWVDGVSVFTPARTFDSVNPATGEVNWQVAFATAEHVAAAVASAKRAVNDPAWRKMLPHVRAGILMRIADAMTARADEFARLQMLENGKVWSECRAQALSAASTFRFYASACETLGSEVTPSRGNYLSMTAYEPYGVVAAITPWNSPLTMEAQKVAPALAAGNAVILKPSEVTPSGALLLAQVAFEAGLPKGLLNVVTGDGRETGTALVEHPDVRMVSFTGGTATGRSIAGIAAQRLIPVALELGGKSPHIIFEDANIDAAINGVVDGIFEGSGQSCVAGSRLFVQRSIYDKAVGLLVERARALRVGLPDVAGSQLGPLAGFAHRDRVERFVSIAREEGGQILAGGRRPPEAALQAGAFFEPTVIGGLSNSATAVQQEIFGPVLCVLPFGDEDDLIAQANDSAFGLASGIWTANYQRAWRVARALETGLVWINTYKQLSIATPFGGFKDSGIGREKGVNGVRLYQQSKGIYWSMDEKNFPSDGALA

SEQ ID NO: 6695 - protein, 594 aa, Neisseria meningitidis Z2491
MSLVELKVPDIGGHENVDIIAVEVNVGDTIAVDDTLITLETDKATMDVPAEVAGVVKEVKVKVGDKISEGGLIVVIEAEGAAAAPKAEAPVAPAQEAPKAAAPAPQAAQFGGSADVEYDVVVLGGGPGGYSAAFAAADEGLKVAIVERYKTLGGVCLNVGCIPSKALLHNAAVIDEVRHLAANGIKYPEPELDIDMLRGYKDGVVSRLTTGLAGMAKGRKVDIIQGDGQFLDPHHLEVSLTTSEVYEQATPTGEKKIVAFKNCIIAAGSRVTKLPFIPEDPRIFDSSGALALKEVPGKLLIIGGGIIGLEMGTVYSTLGSRLDVVEMMDGLMQGADRDLVKVWQKQNEYRFDNIMINTKTVAVEPKEDGVYVTFEGANAPKEPQRYDAVLVAAGRAPNGKLISAEKAGVAVTDRGFIEVDKQMRTNVPHIYAIGDIVGQPMLAHKAVHEGHVAAENCAGHKAYFDARVIPGVAYTSPEVAWVGETELSAKASGRKITKANFPWAASGRAIANGCDNGFTKLIFDAETGRIIGGGIVGPNGGDMIGEVCLAIEMGCDAADIGKTIHPHPTLGESIGMAAEVALGTCTDLPPQKKK

SEQ ID NO: 6696 - protein, 318 aa, Microbulbifer degradans 2-40
MSSNQLDQLKALTTVVVDSGDINAVARYQPEDATTNPSLVLKAIEQPEYNHLVAQAVAWAKEFAKDKPLVTATADKLAVMLGCEILKHIPGRVSTEVDAHLSFNTEATIAKALELVAMYEQAGVDKSRILIKIASTWEGIQAAKQLEKMGIQCNLTLLFGFAQAQACAEAGVFLISPFVGRILDWYKKDQPNADFTGLNDPGVVSVTKIYNFYKACGFQTVVMGASFRNVGELQSLAGCDRLTISPALLDELQNQTAPLVALLVDKGVSEEKPAPLTEGSFRWAMNEDPMATEKLAEGIRNFAKDQVKLYRLIEKVAG

SEQ ID NO: 6697 - protein, 131 aa, Triticum aestivum
  unsure (1)..(131): unsure at all Xaa locations
MAPTVMASSATSVAPFQGLKSTAGLPVSRRSNGASLGSVSNGGRIRCMQVWPIEGIKXFETLSYLPPLSTEXLLKQVDYLIRSKWVPFLRVNKVGXLPVEHNASPGVXNNGRYWTXLELAMSXCTDAPXIR

SEQ ID NO: 6698 - protein, 316 aa, Zea mays
  unsure (1)..(316): unsure at all Xaa locations
MDMALASKASPXPPCNATAAVLPIPKRDKAAANDSTYLNPQAHDSVLGIILGGGAGTRLYPLTKKRAKPAVPLGANYRLIDIPVSTCLNSNISTIYVLXTQFNSASLNRHLSRAYGSNIGGYKNEGFVEVLAAQQSPDNPNWFQGTADAVRQYLWLFEEHNVMEFLILAGDHLYRMDYEKFIQAHRETNADITVAALPMDEKRATAFGLMKIDEEGRIIEFAEKPKGEQLKAMMVDTTILGLDDVRAKEMPYIASMGIYGFSKDVMLQLLREQFPEANDFGSEVIPGATSIGKRVQAYLYDGYXEDIGTIAAFYNA

SEQ ID NO: 6699 - protein, 238 aa, Zea mays
MTVPDAESRFHVLAVDDSLVDRKLIEMLLKTSSYQVTTVDSGSKALELLGLRDASSPSPSSPDHQEIDVNLIITDYCMPGMTGYDLLKRVKGSSSLKDIPVVIMSSENVPARISRCLQDGAEEFFLKPVKLADMKKLKSHLLKRKQPKEAQAQAQQGQAVELEPEQQLDPRAQPAHDAEETAAEPPPAASNGTADGGNKRKAAAMEEEGMLAVMTVAAPESSTKPRLSTTSNSLAVET

SEQ ID NO: 6700 - protein, 482 aa, Azospirillum brasilense
MANQRMLGFVHTAQRMPDKRPAAERRQDFAEIYARFSDERANEQANRCSQCGVPFCQVHCPVSNNIPDWLKLTSEGRLEEAYEVSQATNNFPEICGRICPQDRLCEGNCVIEQSTHGAVTIGSVEKYINDTAWDQGWVKPRTPSRELGLSVGVIGAGPAGLAAAEELRAKGYEVHVYDRYDRMGGLLVYGIPGFKLEKSVVERRVKLLADAGVIYHPNFEVGRDASLPELRRKHVAVLVATGVYKARDIKAPGSGLGNIVAALDYLTTSNKVSLGDTVEAYENGSLNAAGKHVVVLGGGDTAMDCVRTAIRQGATSVKCLYRRDRKNMPGSQREVAHAEEEGVEFIWQAAPEGFTGDTVVTGVRAVRIHLGVADATGRQTPQVIEGSEFTVQADLVIKALGFEPEDLPNAFDEPELKVTRWGTLLVDHRTKMTNMDGVFAAGDIVRGASLVVWAIRDGRDAAEGIHAYAKAKAEAPVAVAAE

SEQ ID NO: 6701 - protein, 254 aa, Gibberella zeae
PGVGFGTFANEGAKGETYKAVIAALKTGYRHLDCAWFYLNEGEVGQAVRDFLAEDNGVKREDLFICTKVWNHLHEPEEVKWSFENSLKNFGLDYIDLFLVHWPIAAEKGDDYQPKIGPDGKYVIKKDLTENPEPTWRAMEEIYASGKARAIGVSNWTIDGLKQLMAFAKVKPAVNQIEIHPFLPNEDLVKFCLENDILPAAYSPLGSQNQVPTTGETVRSNKTLNEVADRSGNTLAQVLIAWGLRRGTLFCPRA

SEQ ID NO: 6702 - protein, 973 aa, Adiantum capillus-veneris
MSSKTMTYSSSAAEPRSSSSSVVGSKHNRRVVVAQTTADAKLHAVFEQAQSEGDTGGSSFDYMRSIEDARGSVLSERVPAQAVTAYLQRMQRGGLIQPFGCMLALEEGSFRVIAYSENAAEMLDLMPQSVPSVGVQVLVLGIGTDARTLFTYASAAALEKASGAVDVSMLNPITVHCRSSSKPFNAIVHRIDVGLVIDFEPVRPADVAVWAAAGALQSHKLAAKAISRLQALPVGDIDLLCDSVVEEVRELTGYDRVMAYKFHEDEHGEVLAEIRRSDLEPYLGLHYPATDIPQASRFLFMKNRVRMICDCRALPVRVIQDKELRQPLSLAGSTLRAPHGCHSQYMANMGSIASLVMAVVVNDNDEDVSNRSQQPKMRRLWGLVVCHHTTPRAVPFALRSACEFLMQVFGLQLNMELELAAQMREKHILRTQTLLCDMLLRDAPIGIVSESPNIMDLVKCDGAALYYGKNFWLLGTTPIEAQIKDLAEWLLDVHRDSTGLSTDSLADAGYPGAAALGDAVCGMAAAKITTRDFLFWFRSHTAKEIKWGGAKHDPEDRDDGRKMHPRSSFKAFLEVVKRRSLPWEDMEMDAIHSLQLILRGSFQDIDDSDTKTMIHARLNDLKLHGMDELSTVANEMVRLIETATAPIFAVDAGGFINGWNAKVAELTGLTVEEAMSRSLVRDVVVNASMETAERVLDLALQGQEEQNVEIKLKTYGDQAIKGPVILIVNACSSRDFTDNVVGVCFVGQDVTGQKVVMDKFTRIQGDYKTIVQNPNPLIPPIFGADEFGYCSEWNPAMEKFSGWKREDVIGKMLIGEVFGSDLACCKLRGQDSMTKFMIILNAAMGGRDSDRFPFGFFDRYGKYAEALLIANKRTDSDGAITGVFCFLHTASPELQQALQVQKRSARTALDRLKEVAYMKQEIRNPLYGIVFTRKLLDNTNLTDEQKQIMETSSLCEKQLQNILDEDNFEKLDQ

SEQ ID NO: 6703 - protein, 661 aa, Acinetobacter sp. ADP1
MQVKTPDIGVDKATVAEILVKVGDTISENDSLILLESDKASVEVPSTASGVVKSILVSLGDEVSEGTTLIELESGDNTDKTESESAPAQTEVKAETPVEQVAPQETKPATSTSAASSVVEVQVPDIGVEKATVAELLVSVGDEIAENDSLVLLESDKASVEVPSTVSGTIESIEVKAGDTIQEGVLLLKVKTAGASNAAPAKQEAVVPTAAPVATKAETQAETPAVQSAPAGAVDVLVPDLGVDKAAVAEILVNVGDKITKDESIVVVESDKATVEVPSTVSGIVKAIHVKAGQDVKEGILLVTVEAEGAVASAPKAPVAKAEAAPAPAAQKAEAPAAKVETAPQAGADKLTKEQEAENSKVYAGPAVRKLARELGVVLAQVKASGEHGRLMKEDIYAYVKQRLTAPVAAPKAAAAAVASGLPTLPDFSAFGGVEEKTLTRLQQVSIPQLSLNNFIPQVTQFDLADITELEAWRNDLKGNFKKEGISLTIMAFIIKAVAHLLKEEREFAGHLSDDGKSVLLRKEIHMGIAVATPDGLTVPVLRNPDQKTIKQIAVELGVIGQKARDKKLSPKDLQGANFTISSLGAIGGTAFTPLVNWPQVAILGISPATMQPVWNGKDFDPRLMLPLSLSYDHRVINGADAARFTNKLTKLLQDIRSLLI

SEQ ID NO: 6704 - protein, 433 aa, Nitrosomonas europaea ATCC 19718
MKVQPAVQTNDNPRFVSTLTRNTLALILAGGRGTRLKNLTDWRAKPAVPFGGKFRIIDFTLSNCVNSGVRRIGVVTQYKAQSLIRHIQRGWSFLDGRFQEFIELLPAQQRTEEGTWYQGTADAVFQNLDILRTHNPGYVLILGGDHIYKMDYGRILAEHVERQADLTIACLEVPVEDASAFGVMAVDDSWRTTSFAEKPEHPAPIPGKPGHALISMGIYVFNAKFLYEQLIQDHDMDQSSHDFGKDVIPRLVASNARVYAHRFQNSCVNMASGVPYWRDVGTVDAYWKANIDLTTITPDLNLYDEDWPIWTHQEQLPPAKFVFDDDDRRGQALDSMVSGGCIISGATVRRSLLFSNVQIRGYSTIEDSVILPNVSIDRHAYLKRVVVEKECQIPEGLKVGFNPDEDRKHFYVTDDGITLITPEMLGQGIHYIR

SEQ ID NO: 6705 - protein, 342 aa, Pseudomonas aeruginosa PAO1
MTLPQTMKAAVVHAYGAPLRIEEVKVPLPGPGQVLVKIEASGVCHTDLHAAEGDWPVKPPLPFIPGHEGVGYVAAVGSGVTRVKEGDRVGIPWLYTACGCCEHCLTGWETLCESQQNTGYSVNGGYAEYVLADPNYVGILPKNVEFAEIAPILCAGVTVYKGLKQTNARPGQWVAISGIGGLGHVAVQYARAMGLHVAAIDIDDAKLELARKLGASLTVNARQEDPVEVLQRDIGGAHGVLVTAVSNSAFGQAIGMARRGGTIALVGLPPGDFPTPIFDVVLKGLHIAGSIVGTRADLQEALDFAGEGLVKATIHPGKLDDINQILDQMRAGQIEGRIVLEM

SEQ ID NO: 6706 - protein, 176 aa, Chlorobium tepidum TLS
MIENVPFTELISAERIAARVAELGAEISRDLAGIDELTVVCVLKGGFIFTADLVRHITIPCRIEFIRASSYGTHRASTGKVMLDHHHDPHVEGKNVLLVEDILDTGLTITRVLEELRGHNPASLHVCTLLDKPSARTTPVKADFTGFTIPDVYVVGYGLDAAGKHRELPYVASLNA

SEQ ID NO: 6707 - protein, 385 aa, Thermus aquaticus
MRGLSRRVQAMKPSATVAVNAKALELRRQGVDLVALTAGEPDFDTPEHVKEAARRALAQGKTKYAPPAGIPELREALAEKFRRENGLSVTPEETIVTVGGSQALFNLFQAILDPGDEVIVLSPYWVSYPEMVRFAGGVVVEVETLPEEGFVPDPERVRRAITPRTKALVVNSPNNPTGAVYPKEVLEALARLAVEHDFYLVSDEIYEHLLYEGEHFSPGRVAPEHTLTVNGAAKAFAMTGWRIGYACGPKEVIKAMASVSSQSTTSPDTIAQWATLEALTNQEASRAFVEMAREAYRRRRDLLLEGLTALGLKAVRPSGAFYVLMDTSPIAPDEVRAAERLLEAGVAVVPGTDFAAFGHVRLSYATSEENLRKALERFARVLGRA

SEQ ID NO: 6708 - protein, 69 aa, Lactobacillus gasseri
MTVYIEKVRAMEIFDSRGNPTVEVHVALSDGTIAKSEVPSGASTGEKEAVELRDGGECLDGKGRYECRK

SEQ ID NO: 6709 - protein, 395 aa, Tropheryma whipplei TW08/27
MRTLGGFTFPCDAPVFVRVDFNVPMDEVGTITDDLRIRASLPTIESLLGRGAPLILISHLGRPVKNEQQGFSLKPCAERLSEYIGVNVPLVDFLDLDTKLYGELTRHLDKSGIVLFENIRFFAEETSKAQADRRILAEQLAPFAGAYVNDAFGASHRRHASVYELAQAFSNKAAGFLIESEMQAFSHLASEAKRPYTVILGGAKLSDKLRLIENILPTVDRLLLCGGMAFTFLAAQGCETGKSLLEESFISEANKIIDFAKQNNVELILPVDVIEARSLTSPLGVVSKAESISYMGLDIGPETQSIFRNVIQDSKTVFWNGPAGLFENPSFSNGTRALLDALSSSSAFTFIGGGDTAAAVSLLGFDYGDFSHVSTGGGACLELLEGKILPALEVL

SEQ ID NO: 6710 - protein, 385 aa, Thermus aquaticus
MRGLSRRVQAMKPSATVAVNAKALELRRQGVDLVALTAGEPDFDTPEHVKEAARRALAQGKTKYAPPAGIPELREALAEKFRRENGLSVTPEETIVTVGGSQALFNLFQAILDPGDEVIVLSPYWVSYPEMVRFAGGVVVEVETLPEEGFVPDPERVRRAITPRTKALVVNSPNNPTGAVYPKEVLEALARLAVEHDFYLVSDEIYEHLLYEGEHFSPGRVAPEHTLTVNGAAKAFAMTGWRIGYACGPKEVIKAMASVSRQSTTSPDTIAQWATLEALTNQEASRAFVEMAREAYRRRRDLLLEGLTALGLKAVRPSGAFYVLMDTSPIAPDEVRAAERLLEAGVAVVPGTDFAAFGHVRLSYATSEENLRKALERFARVLGRA

SEQ ID NO: 6711 - protein, 107 aa, Schizosaccharomyces pombe
MEDEMQIDKKEVEIEQKPPRFEIKKWNAVALWQWDIVVDNCAICRNHIMDLCIECQANTDSAAAQECTVAWGTCNHAFHFHCISRWLNTRNVCPLDNREWEFQRYGH

SEQ ID NO: 6712 - protein, 513 aa, Synechococcus sp. WH 8103
MTIKNQVNPYFAEKKLNKIEKSKLEKDGLLVGSEIEKFAKIGWENMDETDLKLRLKWYGMFWRPKTPGKFMLRLRIPNGVLTSNQIRVVASIVERYGENGSCDITTRQNLQLRGILLCDLPEILRRLREAGLSSIQSGFDNPRNVTGNPLAGIDPNEIVDTRPYTTEVQNFLTNNCEGNSEYSNLPRKWNTAVAGSKDNFLLHNDIVFHPVENNGVMGFSIWIGGILSPQMNAYAFPMNVWVLPDEICNILDTVIRLWRDNGERENRTKGRFRMYLDEVGLVEFRSQVEKLYGTLTPDPGSIFENSPRSHFGINQQKQAGLYFAGIHVPVGRLTAEDLQDIATASLKYGNGEIRLTEDQNIIITGLTSERVEELKTDTLLQRFPLAPSNISAGTVSCTGNTYCSFALTNTKDQSLKAEKELDEELNLPEEIKVHWTGCPNTCGQAYMGAIGLTGTKAKNAEGVMGEGYTMTIGGSQGRNPTIGQVYRKAIPAAEIKAALKEVLISEFGATEER

SEQ ID NO: 6713 - protein, 483 aa, Bradyrhizobium japonicum USDA 110
MGKITGFLEIERHDRKYTPVAERVKHFHEFVVPLTERETRDQAARCMNCGIPYCHGTGSVAPGTPGCPVNNQIPDFNDLVYQGNWEEASRNLHSTNNFPEFTGRICPAPCEASCTLNIDDNPVTIKTIECAIVDRAWDNGWLKPEVASVKTGKKVAVIGSGPAGMACAQQLARAGHDVHLFEKFAKAGGLLRYGIPDFKMEKGIIDRRVKQMEGEGVTFHYNSHVGADGNVDPREMLNEYDAVALTGGAEAPRDLPIPGRDLQGIHYAMDFLPQQNRRVSEEPLNGVTEILAGGKHVVVIGGGDTGSDCIGTSLRQGALSVTQLEIMPAPPERENKGLTWPNWPLKMRTSSSQAEGAIREFAVLTQKFSGENGQVKKLHCVRVDDKFKPIAGTEFELDAELVLLAMGFVHPVHEGLLKLLSVELDPRGNVKANTLDYQTSRPNVFTAGDMRRGQSLVVWAIREGRLCARSIDTFLMGKTDLPR

SEQ ID NO: 6714 - protein, 292 aa, Eremothecium gossypii
MAAEDIRIKNKMKRKQLFAELKDKQNKERHKMRRLRAKEERENPALKEERLEKNVPKTIDSMRVFDESIGQDVEGEQDELQAFFNSGEPPKILLTTNVNARKKAYEFANVLIEVLPNVTFVKRKFGYKLKEIAEFCNNRNYTDLVVINEDKKEVTGLTFIHLPAGPSFYFKLSSYVEVEKIHGHGRPTSHIPELILNNFSTRLGKTVGRLFQSIFPQSPDIEGRQVITLHNQRDYIFFRRHRYIFRNEEKVGLQELGPQFTLKLRRLQRGIKEETEWEYKPEMDKDKKRFHL

SEQ ID NO: 6715 - protein, 385 aa, Burkholderia fungorum LB400
MALSWWQIVLATLVSTHITIVSVTVYLHRCQAHRALDLHPLASHFFRFWLWMTTGIVTGKWAAVHRKHHAKCETQEDPHSPQFKGIWKVLLGGAELYRTEAKNGETLRRFGHGTPVDWMERNVYEKYPDLGVSLLMVIDILLFGVVGVSVWAIQMMWIPFWAGGVVNGLGHFWGYRNFGPPDASTNVFPIGILIGGEELHNNHHAYATSAKMSNRWYEFDIGWMYICVLSALGLAKVRKVALRPHLVKGKSVLDDETLQAVLRNRCEVMASYARTAEHAYRQELVRAKHMSRRERAALMRGVRKWFRDGQPAQDGARQPVPTELCDNHAKLLVYVELREDLAAIWERSNRSREQLLCQLEAWCRRAEQSRIDALREFSLRLRHYG

SEQ ID NO: 6716 - protein, 464 aa, Azotobacter vinelandii
MNIAVADIEAATDEPPLYQLDENPLLARQARQESNARSYPRRIPLALKRARGIHVEDVEGRVFIDCLAGAGTLALGHNHPVVVEAIRQVLADELPLHTLDLTTPVKDRFVQDLFGALPAEFARRAKIQFCGPTGTDAVEAALKLVRTATGRSTVLAFQGGYHGMSQGALSLMGNLKAKTPLGALLAQGVQFLPFPYDYRCPFGLGGEQGVEVGLRYIANLLSDPEGGVQPPAAVIVEAVQGEAGAIPAADAWLRGLREITARAGIPLILDEIQSGFARTGRMFAFEHAQIVPDVVVLSKAIGGSLPLSVVVYRDELDKWQPGAHAGTFRGNQMAMAAGSAVIRHIQEHDLARHAEQVGEHLRGLLQALQRTYPQLGDVRGRGLMLGVEIVEPDGEPDALGHPPLDPALASAIQRECLKRGLILELGGRHGSVVRFLPPLIIRHEEVEQVAGIFARAVSAAVSAG

SEQ ID NO: 6717 - protein, 478 aa, Vitreoscilla sp. C1
MYKKSTIRIFATTSHKMNIDKEINMTNTTLNATANHLHPFSDNQQLKEKGVRVITKADGIYIYDDAGNKIIDGMAGLWCVNIGYGRKELADIARDQMNELAYYNTFFKTSHPAVINLSAKLASIAPAGFNHVFYTGSGSESVDSMIRMVRHYWDSVGKPSKKTLIGRWNGYHGSTIGGVSMGGMKGMHKQGGFPIEGIVHIEQPWFYGLHEEGETAEQFGIRAANWLEEKILEIGADNVAAFVGEPIQGAGGVIIPPSTYWPRIQEICQKYDILLVADEVICGFGRTGEWFGHETFGFQPDIFTTAKGLSSGYLPIGAVFVGDKVVEGILKGGDFNHGFTYAGHPVAAAVALKNVEILDDEGIIKNVHDKTGPYMQAKWREMLSQFKYVDDVRGVGLIQGFTLVKNKATREMFPNEGETGTMLRDIFFSNNLIMRACGDHIVASPPLTITKEEIDLMLATAEKCLQEFETAMDSKLGA

SEQ ID NO: 6718 - protein, 915 aa, Microbulbifer degradans 2-40
MTVQKSQLANVIASDNRADIASKTVKTTCCYCGVGCGVEATVEDNRVTAVKGDELHPANLGRLCVKGSSLHETQSNPNRLLQPMLHGEATDWETALNYSADKFKAIVEQYGPESVAFYLSGQLLTEDYYVANKLMKGFVGTANIDTNSRLCMASAVVAHKRAFGGDVVPGNYEDLENTDLVLLVGSNTAYAHPIIYQRIVKAKAARPNMKVVVIDPRRTATCDIADYHLAIRPGSDAFLFNGLLGYLADNNALDSEFIANHSEGFDEALSVAKAQVASVEQAAVMCDVAKNDLTAVYDLFAKTTKAVTVFSQGVNQSSSGVDKGNTIINCHLATGKIGKLGAAPFSITGQPNAMGGREVGGLANQLAAHMSFDNQPDIDRVASFWRAPNMAQGEGLKAVDMFQAVHDGKIKAIWIMATNPVVTMPDANFIREALEKCELVLVSDCIANTDTGKLADVVFPATTWSEKNGTVTNSERRISLQKGFLPAPGQAKHDWQIISEFAQKIGFEQAFNYTHPVEIFREHAALSGVDNGVDVGTNTRPVRGFDISGMQHISKQAYENLQPIQWPVNSHKPNGTARLFEDANFFTASGRAKFVPISARFPQMPPKDNQVIMNTGRIRDQWHTMTRTGSAAKLLGHIDEPFIDIHPADAKRFGLAHKDIAVLENRGARYLGRVNVSDSQRVSEVFVPMHWNDNFASSSRADALVNAITDPLCGQPEFKHSPVEINPYNAQWSGFIASELPVTPNADYWVKIPVDKGYKYRIADTVTPSNWSEWLTEQFPLVSDWVELTDSSQAFYRKVGFIEGRLAVVLNIARGNEQPIENRWLEQQLGEQCDLNQRFAVLAGVAGEGVEDEGPIVCSCFQIGAKAIQTAIEGGCCSAEALGEKLKCGSNCGSCIPEINGMIRAFSPQHAAKQA

SEQ ID NO: 6719 - protein, 501 aa, Glycine max
MTGGGITMQSTPGSSGYLDLYPERKMSFFKNPYILGLAAVAGIGGLLFGYDTGVISGALLYIKDDFEEVRNSNLLQETIVSMAIAGAIVGAALGGWINDAYGRKKATLFADVIFTAGAIIMASAPDPYVLILGRLLVGLGVGIASVTAPVYIAEASPSEIRGSLVSTNVLMITGGQFLSYLVNLAFTGVPGTWRWMLGVSGVPAVVQFVLMLFLPESPRWLFVKNRKNEAVDVLSKIFDVARLEDEVDFLTAQSEQERQRRSNIKFWDVFRSKEIRLAFLVGAGLLAFQQFTGINTVMYYSPTIVQMAGFHANELALLLSLIVAGMNAAGTILGIYLIDHAGRKKLALSSLGGVIVSLVILAFAFYKQSSTSNELYGWLAVVGLALYIGFFSPGMGPVPWTLSSEIYPEEYRGICGGMSATVCWVSNLIVSETFLSIAEGIGIGSTFLIIGVIAVVAFVFVLVYVPETKGLTFDEVEVIWRERAWGKNPNTQNLLEQGSSS

SEQ ID NO: 6720 - protein, 255 aa, Microbulbifer degradans 2-40
MLLSNLYPSLQNKVVFITGGATGIGAVLVEQFVKQGAQVAFVDIAEQEANALVERCTQAHWLAPRFYPCDITNVKALQAVIAQVKQDIGAISVLVNNAGSDERHDYTQVTEEYWDSRMHVNLKHSFFAIQACVEHMKALGGGSIINFGSASWHQRQGGMPGYTSAKAGIEGLSRGMADELGAHRIRINTVVPGWVMTERQMRMWVDKATQQQIENAQCIDDHLQPADIAAMVLFLASDDSRLCTAQKFIVDGGAI

SEQ ID NO: 6721 - protein, 1140 aa, Adiantum capillus-veneris
MSSKTMTYSSSAAEPRSSSSSVVGSKHNRRVVVAQTTADAKLHAVFEQAQSEGDTGGSSFDYMRSIEDARGSVLSERVPAQAVTAYLQRMQRGGLIQPFGCMLALEEGSFRVIAYSENAAEMLDLMPQSVPSVGVQVLVLGIGTDARTLFTYASAAALEKASGAVDVSMLNPITVHCRSSSKPFNAIVHRIDVGLVIDFEPVRPADVAVWAAAGALQSHKLAAKAISRLQALPVGDIDLLCDSVVEEVRELTGYDRVMAYKFHEDEHGEVLAEIRRSDLEPYLGLHYPATDIPQASRFLFMKNRVRMICDCRALPVRVIQDKELRQPLSLAGSTLRAPHGCHSQYMANMGSIASLVMAVVVNDNDEDVSNRSQQPKMRRLWGLVVCHHTTPRAVPFALRSACEFLMQVFGLQLNMELELAAQMREKHILRTQTLLCDMLLRDAPIGIVSESPNIMDLVKCDGAALYYGKNFWLLGTTPIEAQIKDLAEWLLDVHRDSTGLSTDSLADAGYPGAAALGDAVCGMAAAKITTRDFLFWFRSHTAKEIKWGGAKHDPEDRDDGRKMHPRSSFKAFLEVVKRRSLPWEDMEMDAIHSLQLILRGSFQDIDDSDTKTMIHARLNDLKLHGMDELSTVANEMVRLIETATAPIFAVDAGGFINGWNAKVAELTGLTVEEAMSRSLVRDVVVNASMETAERVLDLALQGQEEQNVEIKLKTYGDQAIKGPVILIVNACSSRDFTDNVVGVCFVGQDVTGQKVVMDKFTRIQGDYKTIVQNPNPLIPPIFGADEFGYCSEWNPAMEKFSGWKREDVIGKMLIGEVFGSDLACCKLRGQDSMTKFMIILNAAMGGRDSDRFPFGFFDRYGKYAEALLIANKRTDSDGAITGVFCFLHTASPELQQALQVQKRSARTALDRLKEVAYMKQEIRNPLYGIVFTRKLLDNTNLTDEQKQIMETSSLCEKQLQNILDEDNFEKLDQGNVDLDTLEFTMGTVMDAVISQGMIRSREKGLQLIRETHVEIKNTRLFGDQYRLQQVLADFLTTAIRFTSSSDGWVGIKVVPTIKNMKDGLHIVHFEFRVSHPGSGIPEDLVQQMYDRSQEITQEGMGLSVSRKLVKLMNGDVKYTREAGVCYFLVTVELPLVQEDD

SEQ ID NO: 6722 - protein, 464 aa, Triticum aestivum
MNLAAPVSTSTSTAVPPHAHGLMPLNLASASSSSLRRSLFASLRKKISPMASAPASASAALSTAAPADNGAAKPAEQRPVQVAKRLEKFKTTIFTQMSMLAVKHGAINLGQGFPNFDGPDFVKEAAIEAIKAGKNQYARGYGVPELNSAVAERFLKDSGLQIDPDKEVTVTSGCTEAIAATILGLINPGDEVILFAPFYDSYEATLSMAGANVKAITLRPPDFAVPLEELKAAVSKNTRAIMINTPHNPTGKMFTREELEFIADLCKENDVLLFADEVYDKLAFEADHISMASIPGMYERTVTMNSLGKTFSLTGWKIGWAIAPPHLTWGVRQAHSFLTFATSTPMQSAAAAALRAPDSYFEELKRDYGAKKALLVDGLKAAGFIVYPSSGTYFVMVDHTPFGFDNDIEFCEYLIREVGVVAIPPSVFYLNPEDGKNLVRFTFCKDDDTLRAAVDRMKAKLRKK

SEQ ID NO: 6723 - protein, 355 aa, Rubrobacter xylanophilus DSM 9941
MGLAGAQERAGRPLAAEFLPEVEEVLAERGEPPYRLRQVYAALAGSLASGWDEVASLPKGLREELAGRVPASVLELRRISRARDGTRKYLFFTRDGHAIETVMIPERSRRTVCISTQVGCPMACTFCATGLLGIKRNLKAREIAEQVFAVARDIAPERVTNVVVMGMGEPFLNYRETLRALRVLNDRRGFNLAARHIAVSTSGLVDKIRRFADEPEQFHLAISLHTPFEEERRRLMPVAARHPIPELMNAARYYVERTRRKLFFEYTLLAGVNDRMRHAEALAELLDHPLYHLNLLRFNWTDTGFSATSARRAKEFLRRARELGLSATLRPSRGQDIEAACGQLAARDARSPTAR

SEQ ID NO: 6724 - protein, 286 aa, Oryza sativa (japonica cultivar-group)
MAPLPAAGAAGRIILAHGACHGGWCWYKVAALLRAAGHRVDAPDLGAAGQRGLGVGGAPASSFADHARPLLDAVRALPDGERAVLVGHSFGGMSVALAAETFPDKVAAAVFVAAFLPDCANPPSHPIDTVINSYHDDKITLSFPLIFAMNFCHCQYQESDWMDTVIDPSHVPPSILFGPEFLKKKLYQLSSPEDYTLAKSLVRASSLYVDELRRRAAFREDRYGAVRKVYVVVENDMAIVQEHQRWMVANAEVAEVRVMDAGDHMAMLSAPEELAGHLADVANTYI

SEQ ID NO: 6725 - protein, 86 aa, Triticum aestivum
  unsure (1)..(86): unsure at all Xaa locations
MAATIQSVKARQIFDSRGIPIVEVDVSCLYGTFVRGAVPSGVXTGVYEALELIDGGSHYLGKGVCNAADNVYLIIVPACIGLDPIA

SEQ ID NO: 6726 - protein, 543 aa, Podospora anserina
MTLLSLKEDRPTPKAVYNWRVYTCAAVASFAACTIGYDSAFIGGTLALPSFEEEFDFASYSESGRALLKANIVSVYQAGAFFGSLFAYVTSHFGGRRISLFIFSVVFCIGAGIMLAANGDRGMAPIIAGRVLAGIGVGGCSNMVPIYISELSPPAVRGRLVGIYELGWQMGGLVGFWINYGVNTTLAPSHKQWIIPFAVQLIPAGLLLIGAFWLRESPRWLFANGKKEEGLKVLCWMRNLEPTDTYILEEVSYIEADLERFEREVGKGFWKPFLSLKQRKVQWRFFIGGILFLFQNGSGINAINYYSPTVFRSIGIDGVNTGLLTTGIFGVVKTVLTIIWLLWLVDLAGRRRMLFIGATGGSLCMWYIGAYIKLAKPEQSASGELTSAGISAVFFFYLWTAFYTPSWNGTPWVINSEMFDQNTRSLGQASAAANNWFWNFLISRFTPQMFLKMEYGVYFFFASLMILSIIFIFFFVPETKSIPLEAMDRLFEIKPVHRANKLLMAELQQTSDMGHGAEESVGKDSSSTDEKMRQAGFVQAENV

SEQ ID NO: 6727 - protein, 144 aa, Bradyrhizobium japonicum USDA 110
MRLSLIGKNMQPSIARIMIPASPDGSSDVPADVLIVEDDPIIAIDFEDRLLGFGVRSVRTVGSVAQALAAIAARAPDFALLDVELSRENSFAVAERLAALKIPFVFVTGYGAETRIASDFVNRPRLQKPCSSDALEAALRSRGS

SEQ ID NO: 6728 - protein, 475 aa, Arabidopsis thaliana
MASQSSVAVISSAAARGESFPDSKKPIGSVRFQQPLRLSFSYCKSGNMSSRICAMAKPNDAETLSSSVDMSLSPRVQSLKPSKTMVITDLAATLVQSGVPVIRLAAGEPDFDTPKVVAEAGINAIREGFTRYTLNAGITELREAICRKLKEENGLSYAPDQILVSNGAKQSLLQAVLAVCSPGDEVIIPAPYWVSYTEQARLADATPVVIPTKISNNFLLDPKDLESKLTEKSRLLILCSPSNPTGSVYPKSLLEEIARIIAKHPRLLVLSDEIYEHIIYAPATHTSFASLPDMYERTLTVNGFSKAFAMTGWRLGYLAGPKHIVAACSKLQGQVSSGASSIAQKAGVAALGLGKAGGETVAEMVKAYRERRDFLVKSLGDIKGVKISEPQGAFYLFIDFSAYYGSEAEGFGLINDSSSLALYFLDKFQVAMVPGDAFGDDSCIRISYATSLDVLQAAVEKIRKALEPLRATVSV

SEQ ID NO: 6729 - protein, 406 aa, Deinococcus radiodurans R1
MRRVSVSDPLPFSAPLAAGGEALSTSALPAGVRDVLPAEWERREHLRSHLSALLRSWGYRGVDLPALELADPAHPQGNHAFKLIDSGGQVLALRSEYTTALGRLVGTHFPSGPFPLRLQYGGRLWLRTQTSELGRLREFNQVGAELIGVTGVQADAELLALAHAALGQAGVQAQLEVGFPGFVDAALTDAGLPGPVRAALHDAIDRKSGADLDLLARQHGVSPEVTRTLHSLTELYGGPEVLTEARVLARGVRAEQAVEHLSAVHAAAQEAGVELLFDLGVSRRYGYYTGLTFRAYVDGINQPVLGGGRYALPGGLPGAGFAIGLERLAAVMPAGVPSEPETVLALDFAAATAARAAGLGAELAWTGDEAELRHYAQARGLRRWVQGAELRDVTPADLKIATEVNA

SEQ ID NO: 6730 - protein, 588 aa, Capsicum annuum
MASFSVKFSATSSLTSSKRFSKLHATPPQTVAVPPSGAVEVAAERLEPRLEERDGYWVLKEKFRKGINPAEKAKIEKEPMKLFTENGIEDIAKISLEEIEKSKLAKDDIDVRLKWLGLFHRRKHQYGRFMMRLKLPNGITTSAQTRYLASVIRKYGKDGCADVTTRQNWQIRGVVLPDVPEILKGLDEVGLTSLQSGMDNVRNPVGNPLAGIDPQEIVDTRPYANLLSNLLSQYVTANFRGNLSVHNLPRKWNVCVIGSHDLYEHPHINDLAYMPATKDGRFGFNLLVGGFFSPKRCAEAIPLDAWVPADDVVPVCKTILEAYRDLGTRGNRQKTRMMWLIDELGVEGFRAEVVKRMPQKKLERESTEDLVQKQWERREYLGVNPQKQEGYSFVGLHIPVGRVQADDMDELARLAEEYGSGELRLTVEQNIIIPNIENSKIDALLNEPLLKQISPDPPILMRNLVACTGNQFCGQAIIETKARSMKITEEVQRLVSVTQPVRMHWTGCPNSCGQVQVADIGFMGCLTRKEGKTVEGADVFLGGRIGTDSHLGDIYKKSVPCEDLVPIIVDLLVNNFGAVPREREEAED

SEQ ID NO: 6731 - protein, 1000 aa, Magnaporthe grisea 70-15
MASIGGEDSVATSNGVEGHSPTQNGVKSSPEATIKGSTDPATEADADIDKLSSNHAQNSDAFSSNKLITTEPTITTTDETEMKAEEQDDKSKSEAEDSKVPAANGTSAKSGDDDVKDESKSAKEEDEVKPAAQSATNENPKPDESIEDAEESKDAEMSEAPPSALDAKTEASGAASPKSDTKPASPKATKESEESSATKTNEVNGAEDKVDSESKPTSTDSSLNPPSMSNLAIDASQDASVAENQDTSMAEAPSQTNKVAREREDDTSEEPAAKRAKTESRSTELDAETTTTKKVSDTKPKTDSPKSSAVATDDKSETEAAEVDAAPFAPEPMDVDPEGWEESAQKLVPKPIRALPGSIMHPTSYDKPISEFANREIRRALGSVKKTKAGGNFKDSVAKLWPVLAESYNSKVKKPMDIGLMERNLRTGVYKTIGEFKADLDLLVLNSYYFNGAMHDVTKSAISLLESVLYKLVDTPLDELNKPSSSQSKSASSTRHAEPRAATQPKPKPAPAPAKPPPPPAPIEKVVQSPIHAAPAARRDSKDDDRPKRPIHPPKKELGYDGKGSKKKKLSPDLKYCDDILKDLAKPKSHGIAWIFAKPVDETRDGAPGYYSIIKKPMDLGTMTVKLQEGKYRSAADFKADFDLMLNNCFTFNPAGTDVHALARNLEAYFQDKWAGIDAYVAKHASRAPARRTSASSPSAGIKDESEDEGPASEPEPEVPAAHLDQIRELKKKIDAVDASITKHKEQYTEEVANSADPSDTSKLDILMSIIQMLNKDLGDKKKKLAELEASTPASKPKPAAKAKKAAAAGNALPNKKAAGGNKKASGAGGKKSSKRVMSTIEKEAIANGINELDGTYLEQAVAVIKKDTNQEENGDGELELEIEQLSIDALNKLYDLMCSGIKGFRSNVESMVRSAQATAPPPAQAPPAIAGRGQKPKKNKPMGKGEQERKLEHLEKLKAQYTANKGRQGSGSQEPPGANELASQEPADEEDSDVSSEEE

SEQ ID NO: 6732 - protein, 397 aa, Pyrobaculum aerophilum str. IM2
MGGSMRGFSPRIGALRESPTRKIDELREKLRRENRDVILLSTGQPSIPPPREVREALGELLKVDTMELYGYTPSQGIYEVRQAISEDLRRLGGLEVPPEQIVLTAGGQAAMFSTLATLIEPGDEVVVTDPTYFGYKPLLEYFGAVVKPVRTRLEDGFQPNPEALKDSVSRKTKALILVSPDNPTGRALKEEAAKAVVDLAEDYDFWIITDEAYKTLIYEGSHIYLYKLAPDRTISINTFSKDPAIPGWRLGYVYGPPEVMPKIKLVNEEMVYCPPSFAQRLVAIYLRSEARMRYIREVVEIYRQKRDVAVAALRKYVPEARFIVPAGSMFIFVDLSRYISDGESFARELLERYGVAVVPGSYFSEIYRAAVRISFVTEPPHRLEEGIRRIGEALKAT

SEQ ID NO: 6733 - protein, 94 aa, Glycine max
  unsure (1)..(94): unsure at all Xaa locations
MSIASMRMATIGSIKARQIFYRSGNPTVVEDLTCSDGTFDRAAVPSGAYTGIDEALELREGRSDYLGKGXDXAAGNANTAIGPDLIGGGPTEQT

SEQ ID NO: 6734 - protein, 294 aa, Oryza sativa
MMMRDVCMEVLPPMDHYASRGNWFMARKWSPEENKQFERALAGLDLRCPDWDRVARAIPARSALEVMNHFRDLELDVQQIENGMVPFPVYGAAAAGGAFTLQWDGAHGVGDFRNAYRFGGGGGGKRHFGRTPEQERKKGVPWTEEEHKLFLLGLKKYGKGDWRNISRNFVQTRTPTQVASHAQKYFIRLNSGGKDKRRSSIHDITTVNLTDDRPPSPSQSSLISNQSNTSTLTAAVAPFSSTADVKPQNAANASFNSPSRTLGMAGYGMGLQDQGLQCGGPLHDQLAASRSILF

SEQ ID NO: 6735 - protein, 260 aa, Rhodospirillum rubrum
MRGMTQETDTTHFGFRTVKAAEKASLVRGVFDSVAPRYDLMNDLMSGGIHRVWKDAFVDWLDPRPGRAYLDLAGGTGDIAFRILERSRRKVAEGVAPAHVTVCDINKEMLSVGRDRAIDRGIVSGLSWTCGDAEAVPLPDRSVDAYTIAFGLRNVTHIDAALAEARRVLKPGGRFLCLEFSKVVVPVLDQLYDLYSFKMLPIMGRYVARDEEAYRYLAESIRKFPPQEELLARMEAAGLGQVRYRNLSGGIAAMHSGRRL

SEQ ID NO: 6736 - protein, 286 aa, Glycine max
  unsure (1)..(286): unsure at all Xaa locations
MASLSCSANDLAPLFNDTAAANYLCAQFDSISRKLAETTYAVDNTYLLFSAYLVFAMQLGFAMLCAGSVRAKNTMNIMLTNVLDAAAGGLSYYLFGFAFAFGGPSNGFIGRHFFGLRDYPMGSSPSGDYSFFLYQWAFAIAAAGITSGXSIAERTQFVAYLIYSSFLTGFVYPIVSHWFWSSDGWASATRSHGNVLFGSGVIDFAGSGVVHMVGGIAVLWGALIEGPRIGRFDRSGRSVALRGHSASLVVLGSFLLWFGWYGFNPGSFLTIAKGYGSGGYYGQWSA

SEQ ID NO: 6737 - protein, 540 aa, Agrobacterium tumefaciens str. C58
MRCGTAPPLYRTAPSRPTFLPCGPLRIVFIREDEIMNIQVQQKAGEAPFKLKYGNYIGGKWVEPKSGRYMDNLSPVTGHKICEVPRSDASDIEFALDAAHKAREKWGKTSITERSNILLRIAQRIEDNLDLIARAETWDNGKPLRETTNADIPLTIDHFRYFAGCIRAQEGTIGEIDNDTVAYHFHEPLGVVGQIIPWNFPILMAAWKLAPALAAGNCVVLKPAEQTPASILIVMELIEDLLPPGVLNIVNGTGLEAGKPLAQSNRIAKIAFTGSTSVGKEIMRYAADNVTNISLELGGKSPNIFFADVMNEDDAFLDKALEGFAFFALNQGEVCTCPSRALVHESIYDRFMEKAIKRVQAISQDDPLNPSTMLGAQASQEQFDKIMSYLEIGKKEGAKVLTGGDRKTLTGDLKDGYYIQPTVFEGNNKMRIFQEEIFGPVVSVTTFKTVEEALEIANDTVYGLGAGVWSRDTNIAYRAGRGIEAGRVWTNCYHVYPAGAAFGGYKQSGIGRETHKMMLDHYQQTKNLLVSYSPNKVGFF

SEQ ID NO: 6738 - protein, 203 aa, Carboxydothermus hydrogenoformans
  unsure (1)..(203): unsure at all Xaa locations
PGRDRSGIEDIIDAGITDIGVIIAPETGEXIKKSITNAGFPAKFTFILQEKPLGLAHAVKVAKDYLEDDDFIMYLGDNLINSGIKEFVEEYKENRYDATILLKEVQDPTRFGVAVVDENFXVQRLIEKPKEPPSNLALVGIYIFSPXIFSAMTGIKPSWRGELEITDAIQELIYQGGVVKAHNITGWWLDTGEKRRFIGKQTG

SEQ ID NO: 6739 - protein, 340 aa, Oryza sativa (japonica cultivar-group)
MSSTMPAQGGVRHHRTCRMYWCYQCGRAIRIISYPSTDVFCPRCFGRFLHEIDPPPRPAPPPPHFFPQPYHPHYDGHPRRWLIYGGEAPPVAAPGRAFRQPAPAVPGRAFRQPGPAPAPSPAPAPPRRRMPSPPPVARRPSTPPAIDPGNYFNGPNLNNLIEELTQNDRPGPAPAPSSAIDSLPTVQITGAHLSDGSQCPVCKEDFELGEAARQMPCKHVYHSDCIVPWLRLHNSCPVCRYQLLSSAAAGSNANSRARRGSANNGGGGGGGDGRDREQTIVRWGPFSWMWPPRGLEDPDDGWEYGRRGRPEAGDAGGNDMTALQSFVLVATCVFFFSFLT

SEQ ID NO: 6740 - protein, 516 aa, Wautersia eutropha
MKIRAQVAMVLNLDKCIGCHTCSVTCKNVWTSRDGVEYAWFNNVETKPGIGYPKEWENQDKWQGGWKRNADGTLEPRQGGKLKILANLFANPNLPAIDEYYEPFTYDYEHLQKAPLVQTPPTARPVSVLTGRKMEKIEWGPNWEDDLGGEFSSRGRDKLFDNVQKEMYSTFENTFMMYLPRLCEHCLNPACVASCPSGSIYKREDDGIVLVDQDKCRGWRMCISGCPYKKIYFNWQSGKAEKCLFCYPRIEAGQPTVCSETCVGRIRYLGVMLYDADRIEQAASVADERDLYQSQLDVFLDPHDPAVQAEALRQGIPQSWLDAARKSPVYKMACEWKVAFPLHPEYRTLPMVWYIPPLSPIQSAAEAGHMGLNGVIPDVKSLRIPVRYLANLLTAGDVMPVLSALDRMLAMRAYKRSQVVDGVQDLGVLEQVGLTPAQVEDMYQTMAIANYEDRFVIPSSHKEMVEDSFNDKASCGFTFGNGCSGGTSEGALFGKKPQGSVHFVDMPKSRKKAVMS

SEQ ID NO: 6741 - protein, 127 aa, Triticum aestivum
  unsure (1)..(127): unsure at all Xaa locations
ATSVAPFQGLKSTAGLPVSRRSNGASSAAXXNGGRIRCMQVWPIEGIKKFETLSYLPPLSTEALLKQVDYLIRSKWVPCLEFSKVGFIFREHNASPGYXDGRYWTMWNCYVRVTTHTVSTSGRVRST

SEQ ID NO: 6742 - protein, 615 aa, Botryotinia fuckeliana
MSDFPTKEVVNHEDVSSSHYDTQAKMSEEDVSDVGNEKGAAQARPSHIGRKVSEWEALQIAAAGDMETIDNEVQDLEAEVTSRGKSRSDIFQLSFKDPRHYTWLLVAFASMGGLLSGIDQSLISGANLYMPSSLGLNTKQVSLVSSGVPLGAVGGALMLGPLNEAVGRKQAIVWSLFLYTVGAALEAGAVNFGMMMAGRVILGLGVGLEGGTVPVYVAESVAPKYRGNLVSLYQFMIALGEVLGYVVAAIFVGVKSGGWRYMLGSSLVFSTIMLVGILFMPESPRFLMHKGRTADAWGVWKRIRGTDEAARKEFFVMKHSVDSEREMEGARKRFAWLDFITVPRARRAIVYANVMIFLGQFTGINAIQYYMATLMQQVGFNDKEAVFMSLVGGGALLIGTIPAILYMEKFGRRFWAIAMLPGFFIGLVIIGCSYLIPLTNKAGSQGTYITGLILYEGFFGSYACLTWVIPSEVYPTYLRSYGMETSDTMLFLCSFLVTYFFAEMQKAMSNIGLTLGFYGGIAVVGWFYQVLFMPETKNKTLEEIDVIFSQPTGQLVKENLRSSMVTASDFIHGRWGKVFSPVSESDIFRKENGHKSDEGGMGDAKHEELMQPESM

SEQ ID NO: 6743 - protein, 526 aa, Chlamydophila pneumoniae J138
MERKRFIDCDSTKILQELALNPLDLTAPGVLSAERIKKFSLLGGGFTFSFATERLDDAILAALISLAEERGLHESMLAMQQGQVVNYIEGFPSEMRPALHTATRAWVTDSSFTGEAEDIAVRSRVEAQRLKDFLTKVRSQFTTIVQIGIGGSELGPKALYRALRAYCPTDKHVHFISNIDPDNGAEVLDTIDCAKALVVVVSKSGTTIETAVNEAFFADYFAKKGLSFKDHFIAVTCEGSPMDDTGKYLEVFHLWESIGGRFSSTSMVGGVVLGFAYGFEVFLQLLQGASAMDQIALQPNARENLPMLSALISIWNRNFLGYPTEAVIPYSSGLEFFPAHLQQCCMESNGKSIVQDGRRVGFSTSPVIWGEPGTNGQHSFFQCLHQGTDIIPVEFIGFEKSQKGEDISFQGTTSSQKLFANMIAQAIALACGSENTNPNKNFDGNRPSSVLVSSQLNPYSLGELLSYYENKIVFQGFCWGINSFDQEGVSLGKALANRVLELLEGADASNFPEAASLLTLFNIKFR

SEQ ID NO: 6744 - protein, 525 aa, Staphylococcus carnosus
MKIKAQVAMVLNLDKCIGCHTCSVTCKNTWTNRPGAEYIWFNNVETKPGVGYPKRWEDQEHYKGGWTLNKKGKLDLKAGSRWSKIAFGKIFYNPDMPVIKDYYEPWTYNYEHLTTAKASKHSPVATAHSVISGDKIDLHWGPNWEDDLAGGHVTGPEDPNIQRIEEKIQFDFDQTFMMYLPRLCEHCLNPSCVASCPSGAMYKRDEDGIVLVDQDACRGWRYCMTGCPYKKVYFNWKTNKAEKCTFCFPRVEAGMPTVCSETCTGRMRYLGVLLYDADRVHEVASCENEQDLYEKQCELFLNPYDEDVIEQAKKDGITMDWIEAAQNSPVYKLAIEYKLAFPLHPEYRTLPMVWYCPPLSPIMNYFEGKDSIKNPDAIFPAIEEMRLPIEYLASLLTAGDTKSVKEALQRMAMMRSYMRAQVTGKEFDTDRLARLGLTERQTKDMYRLLAIAKYEDRFVIPTSHKEEYMDTYAAQGSQGYTFGDQMNGTGSGSGCEGCGAPVAMKPGQTGQEAYNESFYGGIFRD

SEQ ID NO: 6745 - protein, 642 aa, Streptomyces coelicolor A3(2)
MRKRDRTPKTYTRLTHPLVRDSREAPLRRATWEEALDRTARGLTAARGAFGMFSCARATNEMNYVAQKFARVVMGTHNVDSCNRTCHAPSVAGLSAAFGSGGGTSSYEEIEHTDVIVMWGSNARFAHPIFFQHVLKGIRGGARMYVVDPRRTSTAEWAESWLGPNVGTDIPLAHAVGREIIHAGLANEAFIERATTGYDDYKALVEPWTLSLAEKVTGVPAAAIRELAHAYARAERAQLCWTLGITEHHNGTDNVRALINLSLLTGHVGRYGSGLQPLRGQNNVQGGGDMGAIPNRLPGFQDVLDPEVRRKFETAWDTVVEPHHGLTLTEMFEAMDEGTLRAVYCIGENPAQSEADAEQAVRRLRALDFLVVQDIFLTKTAELADVVLPATAGWAETEGTTTNSERRVQRVRRAVSPPGEAREDIDILCDLAARLGHDWKYADAEAVWNELRSLSPDHHGMTYARLEEHQGIQWPCPSTQELEPTYLHGRLWAQDPASRGRLAPFGIVRHDPPVDLTDEQYPIRLTTGRRLDSYNTGVQSGGYASPLRRGESVELCPEDAERYGVVVGEEVRVTSRRGSLLAPVWVDTALRPGLAFMSFHFPDEVDTNQLTIEANCPIAGTAEFKASAIRIEKVSASGPALR

SEQ ID NO: 6746 - protein, 511 aa, Alcaligenes faecalis
MGEEMKTESKKPDSARSELAMKYFQAEYGHFINGEWVGGSSSEKIAMINPANLEVLSYIQSGNAEDVNRAVEAATQAFPKWSRSTPSERQAALYEMARRLRARANDYAAMLSLDNGKPIMEALHIDIPATIGQFELFAGAAFGLHGQTIDATQGVAIIHREPLGVVAQIIPWNVPLVMMATKIAPALAAGNTIVLKPAESVCLAVMEFIREMADLLPPGVLNVITGYGPNVGEALVTHPNVRKVAFTGSRPTAQKLMQYASVNVIPQTLELGGKSANIICADADMDAAAESAAMSIVVNKGEICFAATRHFVHESVMDAFVEKVQNILRKIRVGDPMIPSTQMGPQASRMQFDKVLGYLDIGRNEGATTAMGGKRATVSGFEQGYFIEPTLFTDVRNKMRIAQEEIFGPVGVVIPWKDEAQVIREANDTEFGLAAGLWTKNITQAHRMAREIEAGTVWVNRYFNMIPNVPFGGYKQSGFGREFSLDVLSHYTQLKSVIVSLQEGPIGLFDH

SEQ ID NO: 6747 - protein, 569 aa, Prochlorococcus marinus str. MIT 9313
MLDPEASPPGTHTLCIFLPESTPEITLPTDGKDKYHNRTYRDQKQKKASAIIDYLEKNYFPELKKHILVQEIATPQTIQRYTLKSHGSIGGPQVNMSQSYMSRLAARSDWQGLYCVGDSTSQGIGVVSVTVSAISAVNAILKDLRQPQYLPLKHYPKNYVHFAKASLSQKQHSADLIPDHQKIKTVELDPRSCLSPRCVRAGPDSTHQAHIARLVEAGNWLGAAQSLRAVNPFSESTSYLSQSDDFCGSSCSQSLCPDASIPIKSLNRYVCEKVPNYIPEAAPDNGKRISIVGAGPAGLTCAHYLARLGYQIDIYEKKSEAGGTLKSIALVSRIPLSVLHREISNLLLPSIRIYFGQSLGEDITIAELRHQYDALFLACGLGEKQIQTKDVDHDFNLIHGLKFLDQFTQESTIVRGKTLTIVGATYLAMDISKLAIQNGAKKVYLIDEQSEFQSKSQAKRLNEMQELGIEIHSRIDPSAFSKLCSSSHQVIMAGLEQQRIEAQLREHLSSSLLVDVDALVDLDTLQVLGHVNVFAGGDIIRGSSSIHESIRDGRKAAAEINHAFMIKQS

SEQ ID NO: 6748 - protein, 380 aa, Washingtonia robusta
MSSTAGKVIKCRAAVAWEAGKPLVIEEVEVAPPQAMEVRMKILYTALCHTDVFFWEAKGQNPLFPRILGHEAGGIVESVGEGVTDLAPGDHVLPVFTGECRECAHCLSEESNMCELLRINTDRGVMINDGKSRFSINGKPIYHFVGTSTFSEYTVVHSGCVAKINPLAPLNIVCILSCGISTGLGATLNVAKPTKGSTVAVFGLGAVGLAAAEGARLAGASRIIGVDLNPRRFHEAKKFGVNEFVNPKDYNKPVQEVIAEMTNGGVDRSIECVGNIDAMVSAFECVRDGWGVAVLVGVPHKDAMFKSHPVNFLNERTLKGTFFGNYKPRSDLPAVVEMYMNKELELEKFITHEVPFSEINKAFDYMASRGQLRCIIRMDG

SEQ ID NO: 6749 - protein, 306 aa, Washingtonia robusta
  unsure (1)..(306): unsure at all Xaa locations
IVESVGEGGXDLSPGDHVLPVFTGECKECAHCKREESNMCDLLRIDTERGVMISDGQSRFSINGKPIYHFVGTSTFSEYTVIHSGCVAKINPLAPLDKVCVLSCGISTGLGATLNVAKPPMGSTVAIFGLGAVGLAAAEGARIAGASRIIGVDRNPARFDEAKNFGITEFVNPKDYDRPVQEVLAEMTGGGVDRSIECTGNINAMISAFECVHDGWGVAVLVGVPHKEAEFKTHPINFLNERTLKGTFFGNYKPRTDLPLVVEKYMNKELELEKFITHSVPFSEINKAFDYMLKGDGLRXIIHMDG

SEQ ID NO: 6750 - protein, 178 aa, Escherichia coli O157:H7
MKHTVEVMIPEAEIKARIAELGRQITERYKDSGSDMVLVGLLRGSFMFMADLCREVQVSHEVDFMTASSYGSGMSTTRDVKILKDLDEDIRGKDVLIVEDIIDSGNTLSKVREILSLREPKSLAICTLLDKPSRREVNVPVEFIGFSIPDEFVVGYGIDYAQRYRHLPYIGKVILLDE

SEQ ID NO: 6751 - protein, 179 aa, Glycine max
MKKCELCKVPARIFCESDQASLCWDCDAKVHSANFLVARHVRTLLCRTCRSPTPWKASGASLAHAASVCDRCAAAEETEESEAGNDDEPDTEDDDDVDNQVVPWSSTPPPPPPSSSSGSECSECKNNVASFSASEQETTTSSLKRQREDDDDASSDPDPSLSLEIRVLRRVGRLNGGCV

SEQ ID NO: 6752 - protein, 289 aa, Neisseria meningitidis Z2491
MKPIRKAVFPVAGMGTRFLPATKASPKEMLPIVDKPLIQYAVEEAVEAGCTEMVFVTGRNKRSIEDHFDKAYELETELEMRHKDKLLEHVRNILPPNITCLYIRQAEALGLGHAVLCARAAIGDEPFAVILADDLIDAQKGALKQMVEVYERSGNSILGVETVEPSQTGSYGIVETEQLKQFQRITGIVEKPKPEDAPSNLAVVGRYILTPRIFDLLTGLPRGAGNEIQLTDGIAKLLDHEFVLAHPFEGTRYDCGSKLGYLEATVAYGLKHPETGEPFRRLLEKYRTE

SEQ ID NO: 6753 - protein, 199 aa, Neisseria meningitidis Z2491
MSEKPEKIVLASGNAGKLKEFGNLFEPYGITVLPQSEFSIPECPEPYSTFVENALAKARHAAGHSGLPALADDSGICAAALNGAPGIHSARYAGSNPKSDTANNLKLAAELAGKADKSCCYVCVLVFVRHKDDPRPIIAEGVWHGQWNGVPAGENGFGYDPYFYLPGHGKTAAELDSEVKNRESHRAQALAELLRKLAL

SEQ ID NO: 6754 - protein, 463 aa, Glycine max
MASSFLSAASHAVSPSCSLSTTHKGKPMLGGNTLRFHKGPNSFSSSRSRGRISMAVAVNVSRFEGIPMAPPDPILGVSEAFKADNSDVKLNLGVGAYRTEELQPYVLNVVKKAENLMLERGDNKEYLPIEGLAAFNKATAELLLGADNPAIKQQRVATVQGLSGTGSLRLGAALIERYFPGAKVLISAPTWGNHKNIFNDASVPWSEYRYYDPKTVGLDFEGMIEDIKSAPEGSFILLHGCAHNPTGIDPTPEQWEKIADLIEEKNHIPFFDVAYQGFASGSLDEDAASVRLFVARGIEVLVAQSYSKNLGLYAQRIGAINVISSSPESAARETSQLKRIARPMYSNPPVHGARIVADVVGNPVLFNEWKAEMEMMAGRIKNVRQQLYDSITSKDKSGKDWSFILKQIGMFSFTGLNKNQSDNMTNKWHVYMTKDGRISSAGLSLAKCEYLADAIIDSYHNVS

SEQ ID NO: 6755 - protein, 397 aa, Neisseria meningitidis Z2491
MQNYLTPNFAFAPMIPERASGSRVWDTEGREYIDFSGGIAVNALGHCHPALVDALNAQMHKLWHISNIYTTRPAQELAQKLVANSFADKVFFCNSGSEANEAALKLARKYARDRFGGGKSEIVACINSFHGRTLFTVSVGGQPKYSKDYAPLPQGITHVPFNDIAALEAAVGEQTCAVIIEPIQGESGILPATAEYLQTARRLCDRHNALLILDEVQTGMGHTGRLFAYEHYGVVPDILSSAKALGCGFPIGAMLATETIAAAFQPGTHGSTFGGNPMACAVGSRAFDIINAPETLHNVRSQGQKLQTALLDLGRKTGLFSQVRGMGLLLGCVLDAPYRGRASEITAAALKHGVMILVAGADVLRFAPSLLLNDEDTAEGLRRLEHVLTEFAAANRP

SEQ ID NO: 6756 - protein, 368 aa, Malus x domestica
MGKGGQSCNGVVRDAKPVEQENMAAWLVDVNTIKILPFKLPAIGPNDVRIRIKAVGICGSDIHYLKTMKCGDFQVKDPMVIGHECAGIVDKVGSEVKHLVPGDRVAVEPGISCAHCQQCKGGRYNLCPDMKFFATPPVHGSLANQIVHPADLCFKLPENVSLEEGAMCEPLSVGVHACRRANVGPETTVLIVGAGPIGLVSVLAARAFGAPRIVIVDMDDRRLAMAKSLGADGTVKVSTKMEDLDDEVAKIKEAMGSEVDVTFDCVGFNKTMSTGLNATRPGGKVCLVGMGHGVMTVPLTPAAAREVDVVGVFRYKNTWPLCLEFLRSGKIDVKPLITHRFGFTEKEVEEAFATSARGGNAIKVMFTL

SEQ ID NO: 6757 - protein, 317 aa, Haemophilus influenzae Rd
MTTQLDSLRNMTVVVADTGDIDAIKKYQPQDATTNPSLILSASALPQYAPLIDEAVAYAKAQSADKAQQLIDAEDKLAVNIGLEILKIVPGRISTEVDARLSYDTQATVEKARKLIALYNAAGISNDRILIKIASTWQGIRAAEILEKEGINCNLTLLFSEAQARACAEAGVYLISPFVGRILDWYKANSDKKEYAPAEDPGVISVTKIYNYYKEYGYNTVVMGASFRNVGEITELAGCDRLTIAPALLKELQENSTALVRKLEYKGEVKAKPQPLTEAEFYWQHNSDAMAVEKLAEGIRKFAIDQEKLETMLSAKL

SEQ ID NO: 6758 - protein, 406 aa, Brucella suis 1330
MSEEFHKIRRLPPYVFEQVNRLKASARAAGADIIDLGMGNPDLPTPQNIVDKLCEAVQDPRAHRYSASKGIPGLRRAQAQYYARRFGVKLNPDTQVVATLGSKEGFANMAQAITAPGDVVLCPDPTYPIHSFGFIMSGGVIRSVQAKPDDNFIPTLERGVKHSIPKPIALILNFPSNPTAYVATLDFYKDVVAFARKHDIVILSDLAYSEIYFDGNPPPSVLEVPGAMDVTVEFTSMSKTFSMPGWRMGFAVGNERLIAALTRVKSYLDYGAFTPIQVAATAALNGDGSDIAYVRNVYKQRRDVLVESFGRAGWDVPPPAATMFAWVPIPERFRSLGSLEFSKLLVEQADVAVAPGVGFGEHGDDYVRIALVENEHRIRQAARNIKRFFSAKDENLQNVIPLEGHR

SEQ ID NO: 6759 - protein, 523 aa, Perilla frutescens
MAATAVFKSTPGKTAIANYSSLEDVNSTSFKRLSFAASNVAGERITSPPRLRVRRSRAGGELERRSPVIVSPKAVSDSQNSQTCLDPDASRSVLGIILGSGAGTKLYPLTKKRAKPAVPFGANYRLIDIPVSNCLNSNISKIYVLTQFNSASLNRHLSRAYASNMGGYKNEGFVEVLAAQQSPENPNWFQGTADAVRQYLWLFEEHNVLEFLILAGDHLYRMDYERFIQAHRETDADITVAALPMDEKRPTAFGLMKIDEEGRIIEFAEKPKGEQLKAMKVDTTILGLDDKRAKEMPYIASMGIYVVSKDVMLNLLRDEFPAANDFGSEVIPGATAMGLRVQAYLFDGYWEDIGTIEAFYNANLGITKKPVPDFSFYDRSAPIYTQPRYLPPSKMLDADVTDSVIGEGCVIKNCKIHHSVVGLRSCIAEGAIIEDTLLMGADYYETDADRRFLAAKGGVPIGIGKNTHIKRAIIDKNARIGENVKIVNGDNVQEAARETDGYFIKSGIVTVIKDALIPSGTMI

SEQ ID NO: 6760 - protein, 402 aa, Zea mays
  unsure (1)..(402): unsure at all Xaa locations
MATKRSVGTLGEADLKGKKVFVRADLNVPLDDAQKITDDTRIRASVPTIKFLLEKGAKVILASHLGRPTGVTPKYSLKPLVPRLSELLGVEVVMANDCIGEEVEKLAAALPEGGVLLLENVRFYKEEEKNEPEFAKKLASVADLYVNDAFGTAHRAHASTEGVTKYLKPAVAGFLMQKELDYXXGAVANPKKPFAAIVGGSKVSSKIGVIESLLAKVDILILGGGMIYTFYKAQGYSVGKSLVEEDKLELATSLIEKAKAKGVSLLLPTDIVVADKFAADAESKIVPATAIPDDWMGLDVGPDATKTFNEALDTTKTVIWNGPMGVFEFEKFAAGTEAIAKKLAELTTTKGVTTIIGGGDSVAAVEKAGLADKMSHISTGGGASLELLEGKTLPGVLALDDA

SEQ ID NO: 6761 - protein, 520 aa, Perilla frutescens
MAAVASSSPMGFSKICGLNSVSELSGQCKPTVGFSKSELFGGAVCVKSISKNGGRGNARTRLPSARVVSPKAVSDTSSSLTCLEPDANFSELAFFLEWSGTRLYLLRKKRAKPAVPIGANYRLNDIPVSNCLNSNVSKIYVLTQFNSAFLNRHLSRAYASNMGGYKNEGFVEVFAAQQSPENPNWFQGTADAVRQYLWLFEEHDVLEYLVLAGDHLYRMDYEKFVQSHRETDADITVAALPMDEKRATAFGLMKIDDEGRIIEFSEKPKGEALKAMRVDTTILGLDDERAKEMPYIASMGIYVFSKNAMLNLLRDKFPGANDFGSEVIPGATSVGLRVQAYLYDGYWEDIGTIEAFYNANLGITKKPVPDFSFYDRSAPINTQPRYLPPSKMLNADVTDSVIGEGCVIKNCKIHHSVIGLRSCISEGAIIEDTLLMGADYYETDSDRRILAAKGGIPIGIGKNSHIKRAIIDKNVRIGENVKIINSDNVQEAARETDGYFIKSGIVTVIKDALIPSSTII

SEQ ID NO: 6762 - protein, 181 aa, Zea mays
MASSMLSSAAVVTSPAQATMVAPFTGLKSSASFPVTRKANNDITSITSNGGRVSCMKVWPPIGKKKFETLSYLPDLTDVELAKEVDYLLRNKWIPCVEFELEHGFVYREHGNTPGYYDGRYWTMWKLPLFGCTDSAQVLKEVEECKKEYPGAFIRIIGFDNTRQVQCISFIAYKPPSFTDA

SEQ ID NO: 6763 - protein, 527 aa, Perilla frutescens
MDACCATLKSTSHLSNVSKSAFCGEKNGFWGEKIKGSLNNCARAYQFGKKLNLEKRGRKIKPGVAYSVLTKKNINETLMIPPPLFEKRGANPKIVAAIILGGGAGKQLFPLTSKAATPAVPVGGCYRLIDIPMSNCINSGINKIFVLTQFNSASLNRHISRTYTGNGVSFGDGFVEVLAATHTAGETGNQWFQGTADAVRQFTWVFEDAKAKDIDNILILSGDHLYRMDYMDFVQNHIDRNADITLSCAPVCDSRASEYGLVKIDSRGRIILFSEKPKEADRMAMEVDTSIIGLSPEEALKSPYIASMGVYAFKTDVLLKLLRWRYPTSNDFGSEIIPSSVKEHNVQAYIFRDYWEDIGTIKSFYDANLALTDEFPKFEFYDPKTPFYTSLRFLPPTKIDNCKIKDAIISHGCFLRECVCQHSILGERSRLDSGVELKDTLMMGADYYPTESEIASLLVQGKVPMGIGRNTKISNCIIDKNARIGKDVIIKNKDGVEEADRSEEGFYIRSGITIVVEKATINDGTII

SEQ ID NO: 6764 - protein, 197 aa, Pennisetum ciliare
MKVKSAVLLCVVLASLLLATQDATYARELTEANGPEGSVKLAGGPGFKDVKWLLGGHKHGGGYGNEGGYGGGYGNNGGYGGGNDPPSYGGGSGPGYGGPGYGTGGRYGGPGFGRSYKHHVHGGGGYGPGYGGGYGPGYGGGNSCPPCGSGNAGPGYGGGYGGGNGGGYGSGSGSGSGNGGGGGGGYGGGYGSSGISP

SEQ ID NO: 6765 - protein, 258 aa, Musa acuminata
IMTSAAQMVKPVSLELGGKSPIIVFEDVEVEKAVEWTLFGCFWTNGQICSATSRLLLHETIAEEFLRKLVTWAENIKVSDPLEEGCRLGPVVSEGQYEKINKFISTAKSEGATILCGGGRPQHLEKGYFVEPTIITNVETSMQIWREEIFGPVLCVKTFRTEEEAIELANDTHYGLAGAVISKDIERCQRTSEMIQAGVIRLNCSQPCFRQGPSRGTKRSGLGREQGEWVLVKYFSVKQVHRLHIRWPEGLVSSPCKL

SEQ ID NO: 6766 - protein, 360 aa, Mycobacterium bovis AF2122/97
MSFLIASPEALAATATYLTGIGSAINAANAVAAAPTTEILAAGTDEVSTAISALFGAHAQAYQALSAHVAAFHDQFVHTLTAGAGSYMAAEAAASPLQALQLELLNAINAPTLALLGRPLIGDGTDAAPGSGGAGGAGGILIGNGGTGGASDLAGTGRGGVGGAGGAGGLFGIGGAGGGCGSAVAIGGDGGAGGAGGVFSGGGAGGAGDAIGGSGGAGGTGGLLGGGGGAGGAGGAGGNGGGASNSASIGGDGGSGGAGGMLYGAGGVGGNGGAAVAIGGDGGAGGRAGAIGNGGDGGNGGTSNTPGGSGGDGGNGGNAGLIGSGGNGGNAEIVISGGSVAGTGGNGGLLLGFNGTNGLP

SEQ ID NO: 6767 - protein, 380 aa, Exiguobacterium sp. 255-15
MSALLPTYLRHDIELVAGNGSFVQDKAGKNYLDFVMGIAVCNTGHRHPHVEQALQEQLQKLWHTSNLFMSSKQERVAAMLTENSHLSHVFFCNSGTEANEGAFKLIRKWTQKKEILTFSQSFHGRTFAMMGATGQDKIKAGFGEMVPDFKHLTFNDFDSLEMITNQTAAVWLEVIQGEGGVIVAENAWLEALMEKARQYDVKVVIDEVQTGIGRTGSRFAFEQTPLKPDIITVAKGLGSGFPVGAIITTPEATAVFTPGTHGSTFGGNPLAMAAAEATLDVLLNEQQMKQVQQKGLYLMQQLKQLPETMVVDVRGRGLMIGIEFHEPVSSLITALQQAGMLVVSAGPNVIRLLPSLCVTEQELDLAVGKIKTVCQQEVMM

SEQ ID NO: 6768 - protein, 542 aa, Oryza sativa (japonica cultivar-group)
MEAATVVAAPIPAADAAAKALEKKLLDLELPPFPAPAKKAAAKVVAAAPKKKLAGGAGGYVLEDVPHLTDYLPNLPSFPNPLQNHPAYSVVKQYFVNADDTVAKKIVVHKGSARGTHFRRAGPRQRVFFQPDEVSAAIVTCGGLCPGLNTVIRELVCGLHDMYGVTSVVGIEGGYRGFYARNTVELTPRSVNGIHKRGGTVLGTSRGGQDTGKIVDSIQDRGINQVYIIGGDGTQKGAATIHAEVQRRGLKCAVVGVPKTIDNDIAVIDRSFGFDTAVEEAQRAINAAHVEAESAENGVGVVKLMGRNSGFIAMYATLASRDVDLCLIPESPFYLEGKGGLLEFAEKRLRENGHMVIVVAEGAGQDVIARSMRLADAHDASGNKVLLDVGLWLCAKIKDHFKKKANFPITLKYIDPTYMIRAVPSNASDNVYCSLLAHSAIHGAMAGYTGFTVAPVNGRHAYIPFYRITEKQNKVVITDRMWARVLCSTNQPCFLSTEDVEKAGQDDEEPIVPLVEGENSLVKAPPLLANAGDRAALCNGAA

SEQ ID NO: 6769 - protein, 417 aa, Penicillium citrinum
MSLSNKLPVTDVDLKGKRVLIRVDFNVPLDENKNVTNPQRIVGALPTIKYAIDNGAKAVVLMSHLGRPDGKVNPKYSLKPVVPVLEKLLGKSVTFAEDCVGPQTEETVNKASDGQVILLENLRFHAEEEGSSKDAEGKKVKADKADVDAFRKGLTALGDVYVNDAFGTAHRAHSSMVGVDLPQKAAGFLVKKELEYFAKALESPARPFLAILGGAKVSDKIQLIDNLLPKVNSLIITGGMAFTFKKTLENVKIGNSLFDEAGSKIVGEIVEKAKKYNVEIVLPVDYVTADKFSADATVGAATDATGIPDGYMGLDVGPESVKLYQKTIAEAKTILWNGPPGVFELKPFASATEATLDAAVKAAESGSIVIIGGGDTATVAAKYKVEDKISHVSTGGGASLELLEGKELPGVAALSSK

SEQ ID NO: 6770 - protein, 538 aa, Magnaporthe grisea 70-15
MGWSHAAGTNDPPEVRNWTIHWIALVASCAALAMGYDSAVIGGTMALDSFKRDFGFNDIPASLRDAHSADIVSTFHVGCFFGALFTFPVAERIGRRWAILMACLIFMVGGSMMAAADGKVALIIAGRAIGGLGIGSASLVVPVYIAETSPPSVRGRLVGIFEVASQSGGMLGFWINYATDRTIDVADKAQWVVPLALQLVPIVVLACGILFCPESPRWLARGDRFDEAERVLVYLRNLPADHEYIRTEMAAIRAQVEERSTTRMSKRQQLAKVFQRGTRNRIAIGAALMFLQSFTGVNIMTYYSPRIFETLGITGTATKLFSTGIYGVAKMLGMLAFTFVVVEGIGRRKGLIWGALLGCLPLFYVGAYVMKADPLSRAAQGDLVQDGWGYFAMVCIYLNAFIICATWQGITWTYAAEIFPLDIRMLCVALTTATTWLGSFVVARATPYMITDLGYGTYFMFGAFVVAMGIWAFFFVPETRGIFIEQMDALFAKPMHKAVWDQLRGKPVVVDSADSIAAKKDGDAESIDEKEKEAVHVA

SEQ ID NO: 6771 - protein, 175 aa, Glycine max
  unsure (1)..(175): unsure at all Xaa locations
ASSMISSPDATTVNRAGAGMVAPFTGLKSMAGFPTKKTNNDITSIASSGGRVQCMQVWPPDGKKRLETLSYLPHLDDAQLAQEVQYLLRKGCIPCLEFESXHGFAYREHNTSPXYYDGRYWTMCKLPMFGCTDASHVWNELQEANTAYANGFIRIIGFDNARQVHSISCIGYKPP

SEQ ID NO: 6772 - protein, 583 aa, Alnus glutinosa
MEESKKSCFISDRVDYKGDPADRNTTGGWVPAALIVGIEVSERLSTMGIIVNLVTYLKGTMHQSSTTSSNSTSNVAGTSFLLCLLGGILADSFLGRYWTIAIFSVIHALGTCMLAISAALPELRPSECNLHHDFPLKCEEPSSFQMGILYTALYSMALGVGGIKSSVSGFGTEQFDQNDEKEMSEMAHFFNRFYLIISFGTLLAVTVLVYVQDQVGRSWGYGICSASMFLSIVAFLVGTKRYRYRECTGSPIIQILQVIVAAIRKRKAELPTDLSFLYDKASDKESTISHTDKYSCLDKGAIITGMDRGADGLTISNPWGLCTVTEVEEVKMLIRILPIMASTIIFWTIRAQLLSFSVQQAATMERTIENFPIPPASFNGFFVGSTIITLIMYDRLLPFLRQSSNGVQGFTNLQKIGIAIFLSILGMAAASFAEMKRLEVVRANRGSTSTSSTLPITAFYLLPQFVLVGIGDGFMYTGQLDFFITESPKGMKAISTGLFLTTNALGFFGSSILVTIITKVTGEEVGHGWLLSRINDSRLDFFYALLAVLGFINLVFYLVLASWYKPSPVEDAHQKINGKEEKV

SEQ ID NO: 6773 - protein, 455 aa, Bradyrhizobium japonicum USDA 110
MNIASVRRPIVPPTPPRAPDDMSFLGRVAVIRQNMIATWGQRAYEEDVLEGRFFLHKSFILNRPDAIRHVLLSNYENYTRTPAGIRMLRPVLGEGLLIAEGHAWTFQRRTLAPAFTPRATANLVPHMTAVLDETIAKLDARSGETVDLRETMQRMTLEIAGRTMFSFGMDRHGPTLRNFVVEYGERLGRPYFLDMLLPVSWPSPMDFARARFRKRWTEFVAMLIAERRAAGKKDGAPPRDLFDLMDEARDPETGKGFSDEQLIDEVATMILAGHETTATALFWALYLLALDPDTQEEVASETRGEHLDSMADIDRQKFTRAVIEETMRLYPPAFLIARAARAKDNAAGIEIGRGDIIMIAPWLLHRHEKLWDQPNAFVPKRFMSTEAPDRFAYLPFGAGPRVCVGAPFAQAESVLALARLIGAFRVELVDTVPVIPHGVVTTQPDRSPMFRITRR

SEQ ID NO: 6774 - protein, 433 aa, Burkholderia fungorum LB400
MSLNNDAAFWRNARQHLIRYGGTFEPMIIERAQGSFVYDADGRAILDFTSGQMSAVLGHSHPDIVSVIKEYAGKLNHLFSGMLSRPVVDLATRLAEITPDGLDRALLLSTGAESNEAAIRMAKLVTGKYEIVGFAQSWHGMTGGAASATYSAGRKGVGPAAVGSFAIPAPFPYRPRFERDGQYDYLAELDYAFDLIDRQSSGNLAAFIAEPILSSGGIIELPEGYMAALKRKCEERGMLLILDEAQTGIGRTGTMFACQRDGVTPDILTLSKTLGAGLPLAAVVTSAQIEERAHELGYLFYTTHVSDPLPAAVGLRVLDVVEREGLVARANLMGERLRRGLLDLMERFECIGDIRGRGLLLGMEIVKDRRTKEPADGLGAKITRECMNLGLSMNIVQLPGMGGVFRIAPPLTVHENEIDLGLALLGQAIERSL

SEQ ID NO: 6775 - protein, 364 aa, Chlamydophila pneumoniae J138
MTTEVRIPNIAESISEVTVASLLVTEGALIQENQGLLEIESDKVNQLIYAPVSGRIFWEVSEGDVVPVGGVVGKIEPAGEGEELGDSQSKETIEAEIICFPQSGVRQSPPENKTFIPLRDQMDQGSQGLSAGDRGETRERMTSIRKTISRRLLSALHESAMLTTFNEVYMTPLFHLRKEKQEEFLSRYGVKLGFMSFFVKAVLEALKAYPRVNAYIDGEEIVYRHYYDISIAVGIDRGLVVPVIRDCDKLSNGEIEQKLADLALRAREGLLAIAELEGGGFTITNGGVYGSLLSTPIINPPQVGILGMHKIEKRPVVLDNEIVIADMMYVALSYDHRLIDGKEAVGFLVKVKEGLENPASLLDL

SEQ ID NO: 6776 - protein, 135 aa, Phaseolus vulgaris
TSVANNGGRVQCIQVWPTVGKKKFETLSYLPPLTKQQLAKEVDYLLRKGWVPCLEFELEHGFVYREHNKSPGYYDGRYWTMWKLPMFGCTDSSQVLKELYEAQTAHPDGFIRIIGFDNVRQVQCISFIAYKPPGY

SEQ ID NO: 6777 - protein, 477 aa, Pseudomonas fluorescens PfO-1
MNKLTTAAGAPVVDNNNVQTAGPRGPMLLQDVWLLEKLAHFDREVIPERRMHAKGSGAFGTFTVTHDITRFTKARLFSSVGKTTDVFVRFSTVAGERGAADAERDIRGFAIKFYTEQGNWDLVGNNTPVFFLRDPLKFPDLNHAVKRDPRTNMRSARNNWDFWTLLPEALHQVTIVMSDRGLPRTYRHMHGFGSHTFSFISPANERFWVKFTWKTQQGIENLTDQQAATLIGDDRESAQRDLYNAIEEGHFPQWKLYVQVMPELDAETYPINPFDLTKVWPHADYPLIEVGVLELNRNPDNYFADVEQAAFNPANVVPGISFSPDKMLQARLFSYGDAQRYRVGVNHHQIPVNAPRCPVNSYHRDGQMRTDANAGSTIGYEPNSYGQWAEQPDFSEPPLALKGSAGHWNHREDDDYFSQPGALFRAMSTAQQQVLFENTARSIHGASAQTRQRHIDNCTRADPAYGAGVAQAIEALG

SEQ ID NO: 6778 - protein, 477 aa, Rubrobacter xylanophilus DSM 9941
MRKTFVLAAASALLTLALPALGLAQEEAPPGNRELSLALDTVWVLVAAVLVLFMQAGFAMLEVGFSRMKNVGSVVAKILANLAIAAVLFWAVGFAVAFGTGNALFGTQGWFLAVPEGAVDEVYAGLAWTQVPLSAKFLFQVAFCAVSLAIVWGTMLERTKFAVYLVFAVVFAGIIYPMVGHWVWGGGWLTELGMQDFAGSTVVHLSGAMAALAGTLLLGPRLGKYDDEGRPVTIPGHNMPLAVLGVLILWIGWYGFNPGSTMAATPQIADIALTTTLAAACGVLGAMAMSYLYRRHVDVGMAGNGAIAALVAITAPCAFVAPWASAIIGFVAGVIMYATLLFVDRIGVDDPLGAIAAHGMGGVWGTLSAGLFTTPELAAVGRPGLLYGGGLYQLGVQALGILAAGGFVFLASLLVFAALKATIGLRVKPEQELNGLDVSEHGVYGYAGFPEHLIATDHPVNGNGGGAPRNAPAEGAA

SEQ ID NO: 6779 - protein, 529 aa, Metroxylon sagu
MAATGISRIPLLKTLIPSTSPSPSSDRGSNDLPLCLKPSLNWRLSSSFHFSGEALFSKAVLGSGKTAAGGRTPVLVSPKAVSDSKSSQTCLDPDASRSVLGIILGGGAGTRLYPLTKKRAKPAVPLGANYRLIDIPVSNCLNSNISKIYVLTQFNSASLNRHLSRAYGSNMGGYKNEGFVEVLAAQQSPENPNWFQGTADAVRQYLWLFEEHNVMEFLVLAGDHLYRMDYERFIQAHRETDADITVAALPVDERRATAFGLMKIDEEGRIIEFSEKPKGEQLKAMKVDTTILGLDEERAKEMPYIASMGIYVISKDIMLQLLRDKFPGANDFGSEVIPGATNIGMRVQAYLYDGYWEDIGTIEAFYNANLGITKKPVPDFSFYDRSSPIYTQPRYLPPSKMLDADVTDSVIGEGCVIKNCKIHHSVVGLRSCISEGAIIEDSLLMGADYYETDQEKRFLAAKGSIPIGIGKNSHIKRAIIDKNARIGENVQIVNNDNVQEAARETDGYFIKSGIVTVIKDALIPSGTLI

SEQ ID NO: 6780 - protein, 315 aa, Pennisetum ciliare
MACSTASLAANAPGVRPDVPGVPRREAAHRARAGAGHHHEVPQGRAPVGPHRRQLHLVRQLLRAAAGRHHRLRLVALRGPSGGGGTTGAVGRHLVQYGAQVLRQLQRARFPALHVGSHCPRTRPTPSASASRTGNLLKLAASGSPSHAINVVLTADDVAVDGFCMSRCGTHGASRRSRSGRFAYVWVGNPATQCPGQCAWPFHQPVYGPQAAPLTPPNGDVGADGMVISLASMIVGTVTNPFGNGFYQEGSADAPLEAATACAGVYGKGAYPGYAGSLLVDQASGASFNANGAHGRKYLVPALVDPDTSSCATLG

SEQ ID NO: 6781 - protein, 525 aa, Debaryomyces hansenii
GGLLFGYDTGVISGIVTMESFAAKFPRIYMDPDYKGWFVSTFLLCAWFGSLINSPIVDKFGRRDTIRIACVVFVIGSVFQCAGISVSMLFAGRAVAGIGVGQLTMVVPMYMSELAPPSVRGGLVVIQQLSITIGILISFWINYGTQFIGGTKCAPGRNYQGDVFDPYVDVPKQGCNGQQDASWRIPFGLQIAPAFLLGIGMTFFPRSPRWLLSKNREEEAWKSLHYLRRRNNPDMIEAEFNEIRSDVIFEKKYNEKRFPGKEGISLYVSSYWDLFSTKSNFKRVFIGSAVMFFQQFIGCNAIIYYAPTIFSQLGMDSNTTALLGTGVYGIVNCISTIPAIFAIDKFGRKTLLMAGAAGTFVSLVIVGAIVGKYGEKLSKHKVAGRAAIAFIFIYDFNFSYSWAPIGWVLPSEIFSIGMRSKAISITTSSTWMNNFIIGLITPRMLNTMKWGTYIFFAAFAIIAFVFTWYMIPETKGVPLEEMDFVFGDLDALEEKQRFSDTNAISKIHINTGTKVDSFKASTDFL

SEQ ID NO: 6782 - protein, 261 aa, Pseudomonas aeruginosa
MQFKGRKLLVVGGTSGIGLETAQMVAEQGGSVVIVGNRPEKAEAARQQLAAVAGEDKVVAYAVDLTDFASVQALIEKLAASHKDIDLMVNSAGIYYPKAFIEHSLEDYDNFLNLNRAIFFLTRQVAAELVAQGKPGSIVNVTAVAARQAVEGVPASAYSMAKIGLDTLTTHAAAELAQHGIRVNSVSPGIVETKIFERFIPGDQLAGALNDFNNFHPLGRNGTPRDVAESIVFLLSDKTSWVTGAVWDVDGGVMAGRKQGK

SEQ ID NO: 6783 - protein, 129 aa, Triticum aestivum
  unsure (1)..(129): unsure at all Xaa locations
MAPTVMASSXTSVAPFQGXKSXAXLPVSRXSNGAXLGSVSNXGRIRXMXVWXIEGIKKFETLSYLPPVKXGRASSSRSXYLIRSKWVPCLEFSKVGXSIFXVXXASPGYYDXRVLGQWEGCLVCTGPQG

SEQ ID NO: 6784 - protein, 386 aa, Vibrio parahaemolyticus RIMD 2210633
MEMKTFNLPDLGEGLAESEIVKWHVNVGDMVKLDQVILTVETAKATVDVPAPYAGRIVSRHGEEGDVINIGALLLEIDESGAENTVSAEKRQTADAATVVGSVSHQSHNVNVDDFWVGGSHNKSTDKLITALPSARLLAKKLGVDLKTMVGSGPSGLIVDADVYEEAGKQVPGTEVLKGARRTMVSTMAESHQNVAAVTITEEALLEDWLPNEDISIRLVQAIVYACQQEPALNAWFDAETMTRCVHPTVNLGVAVDSRHGLYVPVLRHADEYEPQDVRRWLDQTVKGIRDRKISREDLQHATITLSNFGAIGGIFATPVVSPPQVAIVGAGRIVDRVVIRNGQAVAVKAMPLSITFDHRACTGGEAARFTKVLAEHLQRPSVTKS

SEQ ID NO: 6785 - protein, 214 aa, Glycine max
  unsure (1)..(214): unsure at all Xaa locations
FFPSPEDFRRNAGFELSVTPKRVHAEMETSSSILYEYSIKEYTETEQLDFGPTWKHPIVWSSPHAPLYASRFSMGSGNERGAIAISLKSIQGLVAIYYVKERCKLQANVLQIVPXWYVKXIYYHTLQLVVDERPQALTDFVERMRVSPSEDKVSPGVMEMVLQCPCEMKSAVXLSIVFDKGFLHIDEYPPDVNQGFDIPSAIISFPDFHAGLQF

SEQ ID NO: 6786 - protein, 398 aa, Mesorhizobium loti MAFF303099
MAAFKTLDDIGNISGKRVLVRVDLNVPVADGKVTDATRIERIAPTIAELSGKGAKVILLAHFGRPKDGPSPEFSLEPIARATAEVLGRPVGFASDCVGDMAGSAVAAMNKGDVLLFENTRFYKAEEKNDPAFSERLAANGDIFVNDAFSAAHRAHSSTEGLARLLPSFAGRTMQAELEALEKGLGNPVRPVVAIVGGAKVSTKIDLLMNLVKKVDALVIGGGMANTFLAARGTDVGKSLCEHDLAPTAKQIMIEAAEAGCAIILPVDGVVAKEFKAGAACETVAISDVPADGMILDVGEKTVKTIGEWIDRAATLVWNGPLGAFEIEPFDHATVAAAKHAAARTKAGKLVSVAGGGDTVAALNHAGVADDFTYVSTAGGAFLEWMEGKPLPGVDVLKR

SEQ ID NO: 6787 - protein, 188 aa, Oryza sativa (japonica cultivar-group)
MRKSKQPQPQPSPEIRYRGVRKRPSGRYAAEIRDPAKKTPIWLGTFDSAEVAARAYDDAARSLRGPTARTNFPLAAPSAPPPRPPAAAAAAATSSHSSTVESWSGGAPRAAASALARSAAPMEATQEEDCHSYCGSSSSVLCEDGSDDAAASRTPLPFDLNMPPPEEELDMAAVADQMGIRYDTLLRL

SEQ ID NO: 6788 - protein, 447 aa, Neurospora crassa
MLLDVKASQRLDSRGNPTIQVEVRTAHGIFRALVPSGASTGVHEAVELRDNDKRKYGGKGVLTAVNNVNEIIGPALVKEGYSSRRDLKQIDGFMRELDGTPNKAKLGANAILGVSMACARAGAAAANIPLYEFLRREGGEEAPYMVPVPFFNVLNGGRHSGNGMAFQEFMIAPTGAKTIEEGIQMASETYFVLKQMISDKFGAIYTGVGDEGGFAPPITQPEEALDLLTEAVAKAGYTDKIKFGIDAASSEFFNPENGTYDLGFKRIKEGESHSDDVRTPAEMMALYKSLIEKYPIPLLEDPFAEDDWESWTKFCKDFYFEELVGDDLLVTNVERVRMAESRVACNAMLLKINQIGTVTEALDAAKLAKSLGWGVFVSHRSGETTDDFIADLSVGLCTGHIKSGAPCRGERVAKYNRLLDIETELKESWKPWSYAGEKFRKPEAFFI

SEQ ID NO: 6789 - protein, 339 aa, Tropheryma whipplei TW08/27
MASICDTIPEECAAAGNAVITCPGQGAQKSGLLNEWLDLPGSLEFFQAQSDFLKIDLIKHGTISDTDILRDTRIAQPLIVALGIFVIRTLQQKAKIIQSMPEEALNGANPTERIMRCVGLAGHSVGEITAAFGAGVLTEKNAMRLVKHRANQMYKSTQIFDTGMVAVLGQSENLEEYITQRYKLFPANYNCPGQIVFAGLRENLDVLLANPPEKIKVIPLQVAGAFHTRFMRPAVQNLKKLKFVTDKSFAKDPDKRIWTNYDGSEIFSGSEYVQLLIDQIARPVRWDLCQKNFENIDYLIELPPAGTLTGLARRSLPKVKGIPINTIDDLEEASCCFLL

SEQ ID NO: 6790 - protein, 228 aa, Gossypium populifolium
  unsure (1)..(228): unsure at all Xaa locations
FTSLCHTDVYFWEAKGQTPLFPRIFGHEAGGIVESVGEGVTHLKPGDHVLPVFTGECGNCRHCKSKESNMCDLLRINTDRGVMLSDGKTRFSINGKPIYHFVGTSTFSEYTVAHXGSVAKINPAAPLDKVCILSCGISTGLGATLNVAKPAKGSTVAIFGLGAVGLAAAEGARIAGAXRIIGVDLNPNRFEEAKKFGCTEFVNPKDHNKPVQEVLAEMTNGGVDRSVE

SEQ ID NO: 6791 - protein, 383 aa, Thermus aquaticus
MRGLSQRVKSMKPSATVVVNARALELRRKGVDLVALTAGEPDFDTPHHVKERARRGLAQGKTKYAPPAGIPELREAVAEKFRGENGLEVTPEETIVTVGGKQALFNLFQAILDPGDEVIVLAPYWVSYPEMVRFAGGVPVEVPTLPEEGFVPDPERVRRAITPRTKALVVNSPNNPTGVVYPEEVCEALAEMALQHDFYLVSDEIYEHLIYEGAHFSPRHLAPEHTITVERAANAFAMTGWRIGYACGPKAVIKAMADVSSQSTTSPDTIAQWATLEALTNREASMAFIAMAREAYRKRRDLLLEGLSRIGLEAVRPSGAFYVLMDTSPFAPNEVEAAERLLMAGVAVVPGTDFAAFGHVRLSYATGEENLKKALERFAQALQ

SEQ ID NO: 6792 - protein, 519 aa, Oryza sativa (japonica cultivar-group)
MQGIGRRYGRIKVYAVLGDDEAQHAKNNMRGALFHVDNPGPMAPIAKGNFLDVNQALEVVRFGIQYCDWRARQDLLTIMVLHNKVVEVLKSLAIEFKSNGTLRKELAELQEELAKAHNQVHLSETRASSALDKLAQADNLVNDRLLQDGGSSASIDNYVSLASRTSSASRFVNKKTLRPSLDVSGPVQPYNPNLKNFWYPVVFSGDLKDDTMVPIDCFEEQWVIFRGKDGRPGCVQNTCAHRACPLHLGSVSEGRIQCPFHGWEYSTDGKCEKMPATKLLNVRIRSLPCFEQEGMVWIWPGDGTPESTIPSLQPPSGFTIHAEMVMELPVEHGLLLDNLLDIAHAPFAHTSTFAKGWSVPSLVKFLTPASGLQGYWDPYPIDMEFRPPCMVLSTTGISKPGKLEGKSIKQCSTHLHQLHICLPSSRNKTRMLYQMSLNFAPWLKHIPFMHILWSHFGEKVLNEDLRLVLGQQERMINGANVWNWPVSYDKLGIRYRLWRDAIERGANRLPFNNQSESGS

SEQ ID NO: 6793 - protein, 548 aa, Neisseria meningitidis Z2491
MKHLHDLPAWSKLWNHFDDSKTLHMREMFEQDPQRAERYWLQVGGLTLDYSKNRINDETMSLLFELAHEAGVPERMRQMFHGKKINTTENRAVLHVALRNRTNSPIVVDGEDVMPKVNRVLQRMGEFAHEVRSGSWLGYTNQVITDVVNIGIGGSDLGPLMMCTALKPFGHPRLNMHFVSNVDGSQLRDVLSKVHPETTLFIIASKTFTTQETLTNALTAREWFLNHAGDEEAVAKHFAAVSTNQKAVAEFGIDTANMFEFWDWVGGRYSLWSAIGLPIMLYLGEENFIEMLNGAHLMDQHFINTPLERNLPVILALIGIWYINYYGGGSHVIAPYDQHLHRLPKFIQQLDMESNGKQVTLDGKAVGHETSPIIWGETGINGQHAFFQLLHQGTHITPIDLIASLEKRSNLPGHHEILLANVFAQAEAFMRGKTPDEVRAELKAQGMDEARIEELVPHKTFSGNRPTNLILMDKVNPRNMGSLIAMYEHKTFVQGIIWGINSFDQWGVELGKQLAKTILGELTGETGSQKHDSSTERLINLYLQTNRK

SEQ ID NO: 6794 - protein, 228 aa, Gossypium populifolium
  unsure (1)..(228): unsure at all Xaa locations
FTSLCHTDVYFWEAKGQTPLFPRIFGHEAGGIVESVGEGVTHLKPGDHVLPVFTGECGNCRHCKSKESNMCDLLRINTDRGVMLSDGKTRFSINGKPIYHFVGTSTFSEYTVAHVGSVAKINPAAPLDKVCILSCGISTGLGATLNVAKPAKGSTVAIFGLGAVGLAAAEGARIAGASRIIGVDLNPNRFEEAKXFGCTEFVNPKDHNKPVQEVLAEMTNGGVDRSVE

SEQ ID NO: 6795 - protein, 433 aa, Burkholderia cepacia
MSLNDDATFWRNARQHLVRYGGTFEPMIIERAKGSFVYDADGRAILDFTSGQMSAVLGHCHPEIVSVIGEYAGKLDHLFSGMLSRPVVDLATRLANITPPGLDRALLLSTGAESNEAAIRMAKLVTGKYEIVGFAQSWHGMTGAAASATYSAGRKGVGPAAVGSFAIPAPFTYRPRFERNGAYDYLAELDYAFDLIDRQSSGNLAAFIAEPILSSGGIIELPDGYMAALKRKCEARGMLLILDEAQTGVGRTGTMFACQRDGVTPDILTLSKTLGAGLPLAAIVTSAAIEERAHELGYLFYTTHVSDPLPAAVGLRVLDVVQRDGLVARANVMGDRLRRGLLDLMERFDCIGDVRGRGLLLGVEIVKDRRTKEPADGLGAKITRECMNLGLSMNIVQLPGMGGVFRIAPPLTVSEDEIDLGLSLLGQAIERAL

SEQ ID NO: 6796 - protein, 197 aa, Gossypium populifolium
  unsure (1)..(197): unsure at all Xaa locations
IVESVGEGVTHLKPGDHVLPVFTGECGNCRHCKSKESNMCDXLRINTDRGVMLSDGKTRFSINGKPIYHFVGTSTFSEYTVAHVGSVAKINPAAPLDKVCILSCGISTGLGATLNVAKPAKGSTVAIFGLGAVGLAAAEGARIAGASRIIGVDLNPNRFEEAKKFGCTEFVNPKDHNKPVQEVLAEMTNGGVDRSVE

SEQ ID NO: 6797 - protein, 321 aa, Glycine max
MDGDGEELTAQETALYDRQIRVWGADAQRRLSKSHVLVYGMKGTVAEFCKNIVLAGVGSLTLVDDRAATEEMLSSNFLIPPDENVYSGKTLAELCCNSLKDFNPMVHVSVERGVLSSFDVEFLSKFDVVVVSCCTLSAKKLANGKCRKLSGRGAFYAVDCRDSCGEIFVDLQDYKYSKKKQDETVECDLKYPSFEDALSVPWRALHRRMSKLYYAMRVIEKFEEAEGRSTGEVSIADFSGLLKLKKEICTAQSLNESQVPDSLLKRLVTNATEFPPVCAIIGGILGQEVIKAISGKGDPLKNFFFFDAFDGKGIIEDISPK

SEQ ID NO: 6798 - protein, 573 aa, Oryza sativa
MAKERKRRQPADAPPPGDDDEGRDHRREKKPRKERPDPVLPSQIKNKDKRKEVHAKLKREKKAQKRKLARERGQAAQRAVELGEQPPEKLVPRTIENTREPDETVCRPDDQELFAGNDADEFNAVLKQQTTPKVLITTCRFNSGRGPAFIEELMQVIPNSCYVKRGTYELKKIVEYANNRDFTSLVVVHTNRREPDALLIINLPAGPTAHFKLSKLILRKDIKNHGNPTSHKPELVLNNFTTRLGHRVGRMIQSLFPQEPNFRGRRVVTFHNQRDYIFFRHHRYIFEMKENKIASKDKKAKTSESKSQPEKQVICRLQVFELLIQYSLQVLPNMSCYPQDVSSNLLPYKGRYHPTAMGLHLIVPALLSIQELIIAGPMFFKAAIATSGAMTAPGSSYPRGQGVRHRDLELQLKITPFIFSFELSSRSLEVLTMQSNLGEQLLCSHLGIKVDTGILVSRTKAKPGHNLGEDEEAAGAGAGEAELLLGAAEQGAELRPVEKREGHHEPPPPLADVHREVAPRHVGRQAGRLLLLLPLADLLLLLLPPPQARAPLQYLLQPRRAALLDRHCRRSFC

SEQ ID NO: 6799 - protein, 541 aa, Oryza sativa (japonica cultivar-group)
MTTVASLSLLPHLLIKPSFRCCSRKGVGRYGGIKVYAVLGDDGADYAKNNAWEALFHVDDPGPRVPIAKGKFLDVNQALEVVRFDIQYCDWRARQDLLTIMVLHNKVVEVLNPLAREFKSIGTLRKELAELQEELAKAHNQVHLSETRVSSALDKLAQMETLVNDRLLQDGGSSASTAECTSLAPSTSSASRVVNKKPPRRSLNVSGPVQPYNPSLKNFWYPVAFSSDLKDDTMVPIDCFEEQWVIFRGKDGRPGCVMNTCAHRACPLHLGSVNEGRIQCPYHGWEYSTDGKCEKMPSTKMLNVRIRSLPCFEQEGMVWIWPGNDPPKSTIPSLLPPSGFTIHAEIVMELPVEHGLLLDNLLDLAHAPFTHTSTFAKGWSVPSLVKFLTPSSGLQGYWDPYPIDMEFRPPCMVLSTIGISKPGKLEGKSTKQCSTHLHQLHICLPSSRNKTRLLYRMSLDFAPWIKHVPFMHILWSHFAEKVLNEDLRLVLGQQERMINGANVWNWPVSYDKLGIRYRLWRDAIERGVDRLPFSNQSESGS

SEQ ID NO: 6800 - protein, 247 aa, Triphysaria versicolor
MAFLGLFLLGFLTTLSQVHGYGGWINAHATFYGGSDASGTMGGACGYGNLYSQGYGTNTAALSTAMFNTGLSCGSCYEIRCVNDGKWCLPGSILVTATNFCPPNSALPNNAGGWCNPPLHHFDLAQPVFQHIAQYKAGIVPVAYRRVACRRRGGIRFTINGHSYFNLVLVTNVGGAGDVHAVSIKGSRTGWQPMSRNWGQNWQSNSNLNGQSLSFKVTTSDGRTVLSYNVAPARWSFGQTFAGGQFR

SEQ ID NO: 6801 - protein, 179 aa, Haemophilus influenzae Rd KW20
MKKHHVDVLISENDVHARIAELGAQITKFYQEKQIDNLVVVGLLRGSFMFMADIVRQINLPVEIEFMTTSSYGTGMTTNHDVRITKDLDGDIKGKHVLIVEDIIDTGYTLEKVRDILNLREPASLTICTLLDKPSRREVEVPVEWVGFEIPDEFVVGYGIDYAQRHRNLGYIGKVVLEE

SEQ ID NO: 6802 - protein, 218 aa, Rosa rugosa
NGLLKKAYELSILCDAEVALIIFSNRGKLYEFCSSSSILKTLERYQKCSYGAMEVNEPAKELEQSSYREYLKLKTRCESLQRTQRNLLGEDLGPLNTKELEQLERQLESSLKHVRSTKTQYMLDQLSDLQSKEHMLIEANRDLTMKLDEINSGTQLRQTWERGHAHQTMLYGTQHAQTQGLMFQPLDCNPTLQIGYNAVGSQQMTAATPAPTQPVNGF

SEQ ID NO: 6803 - protein, 800 aa, Rubrobacter xylanophilus DSM 9941
MEHIVNLLKRHGFTDIAVTLQFMPDEIRDYFGDGSDWGVNIRYSVEDSPAGTAGSVKMAERQLGLEGERLLIISGDALTDVDLGELLAYHEQKGGEATMVLKSVENPLDFGIVITGEDGRISRFLEKPAWGQVFSDTVNTGIYLLEPSVLREIPDPEEGEYDFSKDLFPRLLEQGRPLYGMVTDAYWEDIGTLEQYASANRDVLEGRVRGVRPPGTRLRENIYVGRRVQVDDEELEGPVVIGDNVRIDEGARISPYSVIGNNVVVASGAHIERSIVADGTYVGEGAELRDTLVGRSCYIQERARILERSALGDDVIVGEGATIAPDVKVYPHKTVESGASVTQSLIYETMGLRTIFRGGRVSGKFNVDVTPEFVIRLASSFGTTLSPGSIVTLGRDSSAAAQVVKRAMTAALLATGVNVRDLRAAHAGVVRHDVLAGKSSAGCHTRAGEDSDEVEVLFFSSDATPMTEGEQRAIEKVFVREEYRRAHEGDIGQLIFPGRAVEQYVERLERAVDRSRVSGGSVVVDFCGGVAGLVASRVFSRLGISAVVMEGFANANVVGGAPRMDLEEGLERVGRIVPTVEAAFGCVVNPTGEQVHFVDDAGEYVPPDVMLACLIRGLEPREVVLPINLSSRYAELVESYGGTVHYARTGMGNVAIRAAERAADLGGLEDGQYIFPAFLPAPDCFMTLARALELFRDRPLSKVRREFGERFGNVVRERLECPWSAKGRVMRGLAERFGGDPDAILTEGVKLMVDGGWVLMLPDPDNPLFYVYAEADDGRRPEALMQDYVRLVRELIESGD

SEQ ID NO: 6804 - protein, 263 aa, Oryza sativa
  unsure (1)..(263): unsure at all Xaa locations
MMSGVGGGRSGGRDAEGEWEVRPGGMLVQRRDGDTGPAVRLRVSHGASFRDVAVPAHSTFGELKGVLTQATGVEXPERQRLFFRGKEKSDNEFLHTAGVKDGAKLLLLEKPAPANVEQRAEPVIMDESMMKACEAVGRVRAEVDRLSAKVCDLEKSVFAGRKIEDKDFVVLTELLMMELLKLDGIEAEGEARAQRKAEVRRVQGLVETLDKLKARNANPFSDQNKSVSVTTQWETFDNGMGSLNAPPPRVSSTQINTDWEQFD

SEQ ID NO: 6805 - protein, 950 aa, Mycobacterium tuberculosis
MWGARWPVARCLSTELVVGASREQLIAGLAGLAAGEPGAGVAVGQPGSVGKTVVVFPGQGAQRIGMGRELYGELPVFAQAFDAVADELDRHLRLPLRDVIWGADADLLDSTEFAQPALFAVEVASFAVLRDWGVLPDFVMGHSVGELAAAHAAGVLTLADAAMLVVARGRLMQALPAGGAMVAVAASEDEVEPLLGEGVGIAAINAPESVVISGAQAAANAIADRFAAQGRRVHQLAVSHAFHSPLMEPMLEEFARVAARVQAREPQLGLVSNVTGELAGPDFGSAQYWVDHVRRPVRFADSARHLQTLGATHFIEAGPGSGLTGSIEQSLAPAEAMVVSMLGKDRPELASALGAAGQVFTTGVPVQWSAVFAGSGGRRVQLPTYAFQRRRFWETPGADGPADAAGLGLGATEHALLGAVVERPDSDEVVLTGRLSLADQPWLADHVVNGVVLFPGAGFVELVIRAGDEVGCALIEELVLAAPLVMHPGVGVQVQVVVGAADESGHRAVSVYSRGDQSQGWLLNAEGMLGVAAAETPMDLSVWPPEGAESVDISDGYAQLAERGYAYGPAFQGLVAIWRRGSELFAEVVAPGEAGVAVDRMGMHPAVLDAVLHALGLAVEKTQASTETRLPFCWRGVSLHAGGAGRVRARFASAGADAISVDVCDATGLPVLTVRSLVTRPITAEQLRAAVTAAGGASDQGPLEVVWSPISVVSGGANGSAPPAPVSWADFCAGSDGDASVVVWELESAGGQASSVVGSVYAATHTALEVLQSWLGADRAATLVVLTHGGVGLAGEDISDLAAAAVWGMARSAQAENPGRIVLIDTDAAVDASVLAGVGEPQLLVRGGTVHAPRLSPAPALLALPAAESAWRLAAGGGGTLEDLVIRSEARSRRGCGMSGRAAPPAPPIGPPIGIPPMPPIIPVEPAGPVFNGGRPADGDVEAVRPEIWA

SEQ ID NO: 6806 - protein, 445 aa, Bacillus anthracis str. A2012
  unsure (1)..(445): unsure at all Xaa locations
MKSSIDSIQESKRLKNQQKEEKATWKAMSMFLVPLLLSNILQSVGQLFGMVVVGRWLGVNELAAISAFFPLFFLLVSFVIGIGSGSSILIGQAFGAHNEERLKAIVGTTLTFTFIIGVILAIVGNVFALNIMRLMGTPENIIDMSVHYARILFISMPVLFLYFSYTTFIRGTGDSKTPFYFLIVSTVLNIMLLPILIFGWVGIPKIGVYGAAYASVISTIITFIVMIIYLKKKNHPLQLDETVRKYLRMDWGLLKLLLRLGIPASINMILVSLSEIAVIAFVNRFGSDATAAYVVVNQVASYVQMPAVSLGITVSIFAAQSIGAKQFNRLQEVIRAGIVMNYIIGGILIAFIYLFSREILSLFLTSSNTIEIAHSLVMITLWSYLIFGHAQIIGATMRASGTVLWPTIIGVVSIWLVEVPVAYYLSYHTNLGIKGIWIGYPAAXL

SEQ ID NO: 6807 - protein, 163 aa, Glycine max
MASAAAPTTFSLLHSTTPASSSSATSASPSRVQLSSSLRSRPLARRLGFAAADPLLAANVAARVAAVRGGGKGARGVVSMAKKSVGELSAADLKGKKVFVRADLNVPLDDNQNITDDTRIRAAIPTIKHLIQNGAKVILSRHLGRPKGVTPKYRLAPCIPQLV

SEQ ID NO: 6808 - protein, 572 aa, Streptococcus pyogenes MGAS8232
MTYTENFQKWLDFEQLPDYLRQELLSMDEKTKEDAFYTNLEFGTAGMRGYIGAGTNRINIYVVRQATEGLAKLIETKGEEAKKRGVAIAYDSRHFSPEFAFESAQVLAQHGIKSYVFETLRPTPELSFAVRHLNAYAGIMVTASHNPAPFNGYKVYGQDGGQLPPADADALTDFIRAIENPFAVELADLDESKSAGLIQVIGEDVDMEYLREVKDVNINQDLINNFGKDMKIVYTPLHGTGEMLTRRALAQAGFESVVVVESQAKADPDFSTVKSPNPESQAAFALAEELGREVDADVLVATDPDADRLGVEIRQPDGSYKNLSGNQIGAIIAKYILEAHKTAGTLPENAALAKSIVSTELVTKIAESYGATMFNVLTGFKFIAEKIQEFAEKHNHTYMFGFEESFGYLIKPFVRDKDAIQAVLLVAEIAAYYRSRGLTLADGIDEIYKEYGYFAEKTISVTLSGVDGAAEIKKIMNKFRENGPKQFNNTDIVLLEDFQKQTATKNDGTISNLTTPPSNVLKYTLADDSWIAVRPSGTEPKIKFYIATIGDTLDIAQEKIANIETEINTFVG

SEQ ID NO: 6809 - protein, 341 aa, Gordonia sp. TY-5
MRAVQVVGYHDKLQLNEIPDPEITGPLDVIVRIGGAGVCRTDLHILEGQWEAKSGVALPYTIGHENAGWVEAIGDAVTNVAVGDKVILHPLITCGLCRACRDGDDVHCENSKFPGIDTDGGYADYLKTTARSVVRIDDSLEPAAVAALADAGLTAYHAAAKVARMTRPGDTCVVIGAGGLGHIGIQVLSAISGVTIVVLDRNPDAVALAVEVGAHEGIVADGNHIEKVLALTDGKGAEAVLDFVGEGGATAEGVAMLRQAGNYFVVGYGENINVPTIDIISTEINFIGNLVGSYNDLTELMTLAAQGKVTLHTATYPLTDFQQALDDLDAGKVRGRAILIP

SEQ ID NO: 6810 - protein, 228 aa, Gossypium populifolium
  unsure (1)..(228): unsure at all Xaa locations
FTSLCHTDVYFWEAKGQTPLFPRIFGHEAGGIVESVGEGVTHLKPGDHVLPVFTGECGNCRHCKSKESNMCDLLRINTDRGVMLSDGKTRFSINGKPIYHFVGTSTFSEYTVAHXGSVAKINPAAPLDKVCILSCGISTGLGATLNVAKPAKGSTVAIFGLGAVGLAAAEGARIAGASRIIGVDLNPNRFEEAKKFGCTEFVNPKDHNKPVQEVLAEMTNGGVDRSVE

SEQ ID NO: 6811 - protein, 547 aa, Eremothecium gossypii
MTLVDKLLLRNIEYKGTAYDYFPKVYNVYLVAVVACISGMMFGFDISSMSSMQDFEPYKDYFKHPNELTQGGITASMAAGSLLGSILSPGISDAFGRRVSLHMCSSLWIIGAVLQTAAQNQAMLFVGRIVAGLGVGFGSSVAPVYTAEVSPPKIRGAVGGLFQLSVTVGILVMFLIGYGSVSLNSVASFRVAWSMQLVPGVVLLLATFLLPESPRWLANHGRWDETTLVVEKVGRSVNVSDEELRIHINEIRERVALDEMARDFTYADLFRRKTQRKIFIGMAAQMWQQLCGMNVMMYYIVHVFKMAGFSGNQNLVSSIVQYVLNVGMTIPSLFLVDRAGRRPVLIIGGVLMFTWLYAVAGILATYSVPRPNGVEGNTTVRIEIPPERSSAAKAVIVCSYLFVCSFAPTWGIGIWVYCAEIFNNIERARGSALCTSVNWAFNFALAMFVPTAFKNITWRTYIIFGTFSVALTIHAFLSFPETKGKTLEEIDEMWDAHIPAWRTASYKPELAQMAAPKLSSGSISDATGGLHEKKAAAGSPGASAGSS

SEQ ID NO: 6812 - protein, 447 aa, Eremothecium gossypii
MGRSWGLLWMACLLYGVFTECRRSSQHAHTGKMSLSSKLTVKDLSLAGKRVFIRVDFNVPLDGKTITSNQRIVAALPTIKYVLEQGPKAVVLASHLGRPNGERNEKYSLAPVAAELEKLLGQKVNSWTLRGQHVTAAVNGAAAGSVFLLENLRFHIEEEGSRKVDGEKVKASAEDVQKFRQGLMSLADVYVNDAFGTAHRAHSSMVGFELPERAGGFLLSRELEYFSKALENPTRPFLAILGGAKVADKIQLIDNLLDKVDSIVIGGGMAFTFKKVLENMEIGNSIYDKAGAEIVPKLAEKAKKNGVKIVLPVDFVIGDDFSQDANTKIVSASEGIPSGWEGLDCGPESRKLFSETIASAKTIVWNGPPGVFEIPKFSEGTQAMLAAAVKASEAGSTVIIGGGDTATVAKKYGVVEKISHVSTGGGASLELLEGKDLPGVTFLSSKQ

SEQ ID NO: 6813 - protein, 228 aa, Gossypium pulchellum
  unsure (1)..(228): unsure at all Xaa locations
FTSLCHTDVYFWEAKGQTPLFPRIFGHEAGGIVESVGEGVTHLKPGDHVLPVFTGECGNCRHCKSKESNMCDLLRINTDRGVMLSDGKTRFSINGKPIYHFVGTSTFSEYTVAHVGSVAKINPAAPLDKVCILSCGISTGLGATLNVAKPAKGSTVAIFGLGAVGLAAAEGARIAGAXRIIGVDLNPNRFEEAKKFGCTEFVNPKDHNKPVQEVLAEMTNGGVDRSVE

SEQ ID NO: 6814 - protein, 428 aa, Neisseria meningitidis MC58
MSAIVDIFAREILDSRGNPTVECDVLLESGVMGRAAVPSGASTGQKEALELRDGDKSRYSGKGVLKAVEHVNNQIAQALIGIDANEQSYIDQIMIELDGTENKGNLGANATLAVSMAVARAAAEDSGLPLYRYLGGAGPMSLPVPMMNVINGGEHANNSLNIQEFMIMPVGAKSFREALRCGAEIFHALKKLCDSKGFPTTVGDEGGFAPNLNSHKEALQLMVEATEAAGYKAGEDVLFALDCASSEFYKDGKYHLEAEGRSYTNAEFAEYLEGLVNEFPIISIEDGMDENDWEGWKLLTEKLGGRVQLVGDDLFVTNPKILAEGIEKGVANALLVKVNQIGTLSETLKAVDLAKRNRYASVMSHRSGETEDSTIADLAVATNCMQIKTGSLSRSDRMAKYNQLLRIEEELAEAADYPSKAAFYQLGK

SEQ ID NO: 6815 - protein, 228 aa, Gossypium rotundifolium
FTSLCHTDVYFWEAKGQTPLFPRIFGHEAGGIVESVGEGVTHLKPGDHVLPVFTGECGNCRHCKSKESNMCDLLRINTDRGVMLSDGKTRFSINGKPIYHFVGTSTFSEYTVAHVGSVAKINPAAPLDKVCILSCGISTGLGATLNVAKPPKGSTVAIFGLGAVGLAAAEGARIAGASRIIGVDLNPNRFEEAKKFGCTEFVNPKDHNKPVQEVLAEMTNGGVDRSVE

SEQ ID NO: 6816 - protein, 309 aa, Glycine max
MAEKHNIKNPAVKRILQEVKEMQSNPSDDYMSLPLEENIFEWQFAIRGPRDTEFEGGIYHGRIQLPSEYPFKPPSFMLLTPSGRLETQTKICLSISNHHPEHWQPSWSVRTALVALIAFMPTNPNGALGSLNYKKEDRCALATKSREAPPKFGTPERQRLIDEIHEYMLSKSSPLPQLAPSQASEEQSKTEEAKAQVNLENPEALPVGAEIPDQAGDRIVEEQELPVNANPNPAGVEASMESSSSVSSNQLLQKSDARVQNLKPDTRVQKPDDRLFTLAAIGLAIAIVVLLLKKFIKSTEYGAVFMDES

SEQ ID NO: 6817 - protein, 362 aa, Glycine max
PTRPNTARPSRHVLFCIIFRSRNKEYIPIVGLADFNKLSAKLIFGADSPAIQDNRVTTVQCLSGTGSLRVGGEFLAKHYHQRTIYLPTPTWGNHPKVFNLAGLSVKTYRYYAPATRGLDFQGLLEDLGSAPSGSIVLLHACAHNPTGVDPTLEQWEQIRQLIRSKALLPFFDSAYQGFASGSLDADAQPVRLFVADGGELLVAQSYAKNLGLYGERVGALSIVCKSADVASRVESQLKLVIRPMYSSPPIHGASIVAAILKGRDLFNDWTIELKAMADRIINMRQELFDALRSRGTPGDWSHIIKQIGMFTFTGLNAEQVSFMTKEYHIYMTSDGRISMAGLSSKTVPLLADAIHAAVARVA

SEQ ID NO: 6818 - protein, 714 aa, Botryotinia fuckeliana
MYLATVLSLVGLVTAQCPYGMDKQPQKREPKDSQTSSSNFLDQFTLNDTNTYFTTDAGGPIQEDTSLKAGARGPTLLEDFIFRQKIQHFDHERVPERAVHARGAGAHGIFTSYGNYSNITAASFLNQEGKETPVFVRFSTVAESRGSADTARDVHGFATRFYTDEGNFDIVGNNIPVFFIQDAILFPDLIHAVKPSPDNEIPQAATAHDSAWDFFSQQPSSLHTLFWAMAGNGIPRSFRHMDGFGIHTFRLVTDSGTSKLVKWHWKSKQGKASLVWEEAQVLAGKNADFHRKDLWDAIESGNGPEWELGIQIVEEEDVLKFGFDLLDPTKILPEELVPVQKIGVMRLNANPRNYFAETEQVMFQPGHIVRGIDFTDDPLLQGRIFSYLDTQLNRHGGPNFEQLPINRPIVPVHNNNRDGAAHNYIPLNTAAYSPNTLNDAAPKQANQTVGRGFFTAPGRTVSGHLVREVSSTFSDVWSQPRLFYNSLIPVEQQFLINAIRFETSQLTSSVVKSNVLIQLNRVSHDLAARVASVLNLPVPEADNTYYNDNKTSSITIFGNELPTIATLNVGVLVSVKNNATLTQAANLATSFSTSGVNVKVIGEILTNGVDATYSASDATLFDGIIVTDGAENLFTNGSKSTYFPADRPRQILLDAYNWGKPVGTLGNARTSLNVASISTTPGVYSNSTSVSGLVKEFEAGLKTFRFVDRFALDD

SEQ ID NO: 6819 - protein, 416 aa, Methanococcus maripaludis S2
MESYIQNLFAERIGGKSFGKEDVIYKFEKIKRAKQAAKLKYPDMELIDMGVGEPDEMADESVVEVLCEEAKKHVNRGYSDNGVQALKDEIPIYLEKIFGVKDLDPVNEVVHSIGSKPALAYITSVFINPGDVTLMTVPGYPVTATHTKWYGGSVETLPLLEKNNFLPELDAISKEVRENAKILYLNYPNNPTGAQATKKFYKEAVDFAFENDLIVIQDAAYAALTYGDKPLSFLSVKDAKEVGVEIHSFSKAYNMTGWRLAFVAGNELIVRGFAAVKDNYDSGQFIPIQKAGIHCLRHPEITEKTRAKYERRLSKMVKILKEAGFNAKMPGGTFYLYVKAPIGTKDGAKFANAEEFSQFMIKEKLISTVPWDDAGNFVRMAACFEAFKDGEISIEEEDRILNEVKRRLTEVEFVFE

SEQ ID NO: 6820 - protein, 195 aa, Oryza sativa
MAPSVMASSATSVAPFQGLKSTAGLPVNRRSSSSSFGNVSNGGRIRCMQVWPIEGIKKFETLSYLPPLTVEDLLKQIEYLLRSKWVPCLEFSKVGFVYRENHRSPGYYDGRYWTMWKLPMFGCTDATQVLKELEEAKKAYPDAFVRIIGFDNVRQVQLISFIAYKPPGFAGHFRSFACSTTIIPTYLRSSHPHFI

SEQ ID NO: 6821 - protein, 166 aa, Zea mays
  unsure (1)..(166): unsure at all Xaa locations
MGFPVGYTEVFLPKLFVQTLSILSFIRTVVFSLFRFLGLSDFLEMDQTWPDYTSNPTRTPELRSPFSALLIREILPVIKFEDVTTTSGEDLPXSCAVCLYEFEGEQEIRWLRNCRHIFHRSCLDRXWMDHDPEDVSSWVETPFXVPDEMAKKSLIKRLWAGVPGGS

SEQ ID NO: 6822 - protein, 820 aa, Mycobacterium bovis AF2122/97
MTPLLNSINAPVLAATGRPLIGNGANGAPGTGANGGDAGWLIGNGGAGGSGAKGANGGAGGPGGAAGLFGNGGAGGAGGTATANNGIGGAGGAGGSAMLFGAGGAGGAGGAATSLVGGIGGTGGTGGNAGMLAGAAGAGGAGGFSFSTAGGAGGAGGAGGLFTTGGVGGAGGQGHTGGAGGAGGAGGLFGAGGMGGAGGFGDHGTLGTGGAGGDGGGGGLFGAGGDGGAGGSGLTTGGAAGNGGNAGTLSLGAAGGAGGTGGAGGTVFGGGKGGAGGAGGNAGMLFGSGGGGGTGGFGFAAGGQGGVGGSAGMLSGSGGSGGAGGSGGPAGTAAGGAGGAGGAPGLIGNGGNGGNGGESGGTGGVGGAGGNAVLIGNGGEGGIGALAGKSGFGGFGGLLLGADGYNAPESTSPWHNLQQDILSFINEPTEALTGRPLIGNGDSGTPGTGDDGGAGGWLFGNGGNGGAGAAGTNGSAGGAGGAGGILFGTGGAGGAGGVGTAGAGGAGGAGGSAFLIGSGGTGGVGGAATTTGGVGGAGGNAGLLIGAAGLGGCGGGAFTAGVTTGGAGGTGGAAGLFANGGAGGAGGTGSTAGGAGGAGGAGGLYAHGGTGGPGGNGGSTGAGGTGGAGGPGGLYGAGGSGGAGGHGGMAGGGGGVGGNAGSLTLNASGGAGGSGGSSLSGKAGAGGAGGSAGLFYGSGGAGGNGGYSLNGTGGDGGTGGAGQITGLRSGFGGAGGAGGASDTGAGGNGGAGGKAGLYGNGGDGGAGGDGATSGKGGAGGNAVVIGNGGNGGNAGKAGGTAGAGGAGGLVLGRDGQHGLT

SEQ ID NO: 6823 - protein, 431 aa, Methanococcus maripaludis S2
MLQRTNLTKSRKNGGIIMFLTLDDFELEGKTVALRVDINSPIDVNTGDILDDTRIKACSDTIKSLSEKGAKVVILAHQSRPGKKDFTTLEAHAKKLSEVLNMEVTHVDGLICASAREAILAMDNGEIILLENVRLLAEEVLSDWKSWEEITPEKQAKTVMIKKLHPFFDYFVNDAFAAAHRAQPSLVGFSYYVPMLCGRVMEKELFTLTKVLKNPERPCVFALGGAKADDSIEVLKNVLEKQTADQVLTSGVVANIFLVAKGYKIGPNENVIADMGYTNQIEIAKELISKYGDKIVVPIDAALNVDGERVEKELDLNEEITYPIHDMGEKTMKLYEEILKDAKTVVANGPAGVFENKNFLKGTEELLKSTANSKGFSVIGGGHLSAAAEVVGLAGKMDHISTGGGACIEFLAGKKLPVIEMLSKSYEKHKL

SEQ ID NO: 6824 - protein, 149 aa, Glycine max
  unsure (1)..(149): unsure at all Xaa locations
GFGRCWYQIERSSVMSLGGSATEEDGNIIAQLFGSIGKIWKAEEKYFDAITGLSGSGPAYVYLAIEALADGGVAAGLPRDLSLSLASQTVLGAASMVSQTGKHPGQLKDDVTSPGGTTITGIHELENGGFRGTLMNAVVAAAKRSREXS

SEQ ID NO: 6825 - protein, 494 aa, Triticum aestivum
  unsure (1)..(494): unsure at all Xaa locations
MGLFTVTKKATTPFDGQKPGTSGLRKKVTVFQQPHYLPNFVQSTFNALPADQVRGATIXVVSGDGRYFSKDAVQIIAKMAAANGVRRVWVGQDSLLSTPAVSAIIRERISADGAKATGAFILTASHNPGGPTEDFGIKYNMGNGGPAPESVTDKIFSNTKTITEYLIAEDLPNVDISVIGVTSFTGPEGPFDVDVFDSATDYIKLMKTIFDFESIKKLLASPKFSFCFDGLHGVAGAYAKRMFVDELGASESSLLNCVPKEDFGGGHPDPNLTYAKELVDRMGLGKTSNVDPPEFGAAADGDADRNMVLGKRFFVTPSDSVAIIAANAVQSIPYFASGLKGVARSMPTSAALDVVAKNLNLKFFEVPTGWKXFFGNLMDAGMCSVCGEESFGTGSDHIREKDGIXWAGLAWLSILAYKNKDNLGGDKLVPVEDIVLXHWATYGRXIYTXXTMXNVDAXAAKELMXNLXKIQSXLXDVNKSSRESPPFANAPGYK

SEQ ID NO: 6826 - protein, 172 aa, Butyrivibrio fibrisolvens
MESLTTRIKLNNGTAIPMFGYGTYKIKDQNEAYNSVRLALKNGYRHIDTAAFYENEKFVANAIKDFMEESQTKREDIFVTSKAWKTELGYDKTLAAFEKTMNEMQMDYLDLYLVHWPASYAFDDDWENTNRQTWKAMTEIYKSGRVKAIGVSNFLTHHLDTIIDMEVTPAVD

SEQ ID NO: 6827 - protein, 206 aa, Candida albicans
LFKNIAAGNYPSWTAYIQTMTEAEAKEAEFSVFDLTKVWPHKKYPLRRFGKFTLNENPKNYFAEVEQAAFSPAHTVPYMEPSADPVLQSRLFSYADTHRHRLGTNYTQIPVNCPVTGAVFNPHMRDGAMTVNGNLGSHPNYLASDKPVEFKQFSLQEDQEVWNGAATPFHWKATPADFKQAQELWKVLKRYPNQQEHLAHNIAVHA

SEQ ID NO: 6828 - protein, 555 aa, Schizosaccharomyces pombe
MNRFITSILVVFISMSGWLQGADTGSISGILGMRDFQSRFADRYNPISNSYSYSAWRQALLTGTINAGCLFGAMLSSPFTERIGKKYSICFFSGVYIIAELLLVTAVPSWIQVLVGKILAGVGIGALSVLSPGYQSEVAPPQIRGAVVATYQIFSTGAALVAACINMGTHKLRKTASWRTSFGINMLWGILLMVGVLFLPESPRYLIYKGRDEEALRIMCNMAELSPESEIIQTNFNTIKSDIEIEMAGGKARWIEIFGKDIRYRTCLGFLVMLFRELIGNNYYFYYATQVFKGTGMTDIFLPAVILGAINFGTTFGALYTIDNLGRRNPLIFGAAFQSICFFIYAAVGDRKLIYKNGTSDHRAGSVMIVFSCLFLFSYCCSWGPMGWVIVGETFPIRYRSKCASVATSGNWLGNFMISFFTPFINNAIGFKLGYIYACINLFSSFMIFFLAKETKGLTLEEVNDLYMSNIKPWESYKYVREIESHRIHFSKEEEKREREKSKGIRGQEEEFIENADEDNNDSSSSSGSVVSAVKPRRSAVSNDRFSEDSHPTYI

SEQ ID NO: 6829 - protein, 386 aa, Archaeoglobus fulgidus DSM 4304
MFKLADRLEKIPPYLFAEIDAMKRKKLQEGVKVIDFGVGDPDLPTPEHIVEALKNAAEKVERQKYPSYEGMLSFRESVARFYRRRKGVNLDPESEVISLIGSKEGIAHLPLAFVNDGDYVLVPEPGYPVYYSSTLLADGVPYEMPLKEENKFLPDFQLIPDEIARKAKIMFLNYPNNPTAAVAPKEFIKEAIDFCIDNKIILAHDAAYSEITFDGYKAPSFLEFEDAFEVCVEFNSLSKTYNMTGWRIGFACGNRDILAGLLKVKTNVDSGVFEAIQEAAIAAMDGPDRVIEENCKVYQRRRDLLVEGLRDVGIDAEKPKATFYVWAKVGGSSIEFVKQLIDKAGIVATPGIGFGKSGEGFVRFALTRGEGVIEEAIDRLKTILHK

SEQ ID NO: 6830 - protein, 234 aa, Arabidopsis thaliana
MNLKETELCLGLPGGTETVESPAKSGVGNKRGFSETVDLKLNLQSNKQGHVDLNTNGAPKEKTFLKDPSKPPAKAQVVGWPPVRNYRKNVMANQKSGEAEEAMSSGGGTVAFVKVSMDGAPYLRKVDLKMYTSYKDLSDALAKMFSSFTMGSYGAQGMIDFMNESKVMDLLNSSEYVPSYEDKDGDWMLVGDVPWPMFVESCKRLRIMKGSEAIGLGKFSFLFVSISGSFLFFQ

SEQ ID NO: 6831 - protein, 228 aa, Gossypium rotundifolium
  unsure (1)..(228): unsure at all Xaa locations
FTSLCHTDVYFWEAKGQTPLFPRIFGHEAGGIVESVGEGVTHLKPGDHVLPVFTGECGNCRHCKSKESNMCDLLRINTDRGVMLSDGKTRFSINGKPIYHFVGTSTFSEYTVAHVGSVAKINPAAPLDKVCILSCGISTGLGATLNVAKPAKGSTVAIFGLGAVGLAAAEGARIAGASRIXGVDLNPNRFEEAKKFGCTEFVNPKDHNKPVQEVLAEMTNGGVDRSVE

SEQ ID NO: 6832 - protein, 325 aa, Zinnia elegans
MVKAIRIHEFGGVEVMKWEDVEIGEPKAGEIKVQNKAIGLNYLDVYMRKGIVKEVPPFPFTPGMESAGVVIAVGPEVTTCKVGDVVAYAGYPVSAYAEEQILPADRAVPVPPSVDPVLAAAAIFKGLTAEMLVRRCFKVGPGHTILYHAAAGGVGSLACQWANALGATIIGTVSTKEKAVQAKEDGCHHVIIYKEENFVDRVMEITSGKGVDVVYDSIGKSTFQGSMECLKVRGYLVVFGMPSGAPEPPSFQQLAEKGIYCTMPSVMLYTKERNELVAASEELFSNIEKGVLRVRVNHKYPLSQAAQAHSDIESQKTTGSIVLIP

SEQ ID NO: 6833 - protein, 228 aa, Gossypium rotundifolium
FTSLCHTDVYFWEAKGQTPLFPRIFGHEAGGIVESVGEGVTHLKPGDHVLPVFTGECGNCRHCKSKESNMCDLLRINTDRGVMLSDGKTRFSINGKPIYHFVGTSTFSEYTVAHVGSVAKINPAAPLDKVCILSCGISTGLGATLNVAKPAKGSTVAIFGLGAVGLAAAEGARIAGASRIIGVDLNPNRFEEAKKFGCTEFVNPKDHNKPVQEVLAEMTNGGVDRSVE

SEQ ID NO: 6834 - protein, 354 aa, Neisseria meningitidis MC58
MKAARFYDKGDIRIEDIPEPTVAPGTVGINVAWCGICGTDLHEFMEGPIFIPPCGHPHPISGESAPVTMGHEFSGVVYAVGEGVDDIKVGQHVVVEPYIIRDDVPTGEGSNYHLSKDMNFIGLGGCGGGLSEKIAVKRRWVHPISDKIPLDQAALIEPLSVGHHAYVRSGAKEGDVALVGGAGPIGLLLAAVLKAKGIKVIITELSKARKDKARESGVADYILDPSEVDVVAEVKKLTNGEGVDVAFECTSVNKVLDTLVEACKPAANLVIVSIWSHPATINVHSVVMKELDVRGTIAYCNDHAETIKLVEEGKINLEPFITQRIKLDELVSKGFERLIHNNESAVKIIVSPNL

SEQ ID NO: 6835 - protein, 295 aa, Geobacillus stearothermophilus
MKGIILAGGSGTRLYPLTKAVSKQLLPIYDKPMIYYPLSILMLAGIRDILIISTPNDTPRFAELLGDGSQLGISLSYAVQPSPDGLAQAFIIGEEFIGDDNVALILGDNLFYGHGLTKLLQNAVERKTGATVFGYYVNDPERFGVVEFDENGKVISIEEKPKHPKSNYAVTGLYFYDNRVVEFAKSIKPSARGELEITDVNKKYLELGELHVEILGRGFSWLDSGTHESLLEASQFIETIEKRQSLKVACLEEIAYLKGYIDREQLLKLAEPLKKNQYGQYLIDIANQKKRPIYL

SEQ ID NO: 6836 - protein, 158 aa, Glycine max
MNKGAAGGLGGGAGAGSGPTAAAAAAAAQKQKTLVQRVEGDIANIVDNFSHLVNVARVNDPLVRNSQEAFMMEMRAARMVQAADSLLKLVSELKQTAIFSGFASLNDHVEQRRIEFNQLAEKTDHTLSRVGEEAAASLKELESHYSSSALKTMQNLQP

SEQ ID NO: 6837 - protein, 624 aa, Mycobacterium bovis AF2122/97
MSYLVVVPELVAAAATDLANIGSSISAANAAAAAPTTALVAAGGDEVSAAIAALFGAHARAYQALSAQAAMFHEQFVRALAAGGNSYAVAEAATAQSVQQDLLNLINAPTQALLGRPLIGNGANGLPGTGQNGGDGGILYGNGGNGGSGGVNQAGGNGGNAGLWGNGGSGGAGGNATTAGRNGFNGGAGGSGGLLWGNGGAGGAGGHGGPAPLVGGVGTTGGAGGNGGGAGLFYGFGGAGGNGGMGGVAPSTGPSMGILPAGGVGGPGGSGGASALAFGSGGVGGAGGLGGPTDGTVQGVGGFGGQGGNGGQSGLLFGNAGAGGAGAAGGAGTGDTESFGGHGGAGGDGGAVGLIGNGGGGGNGGAGGTGSPGAVVGGNGGVGGLGGAGSPGGLLYGTGGAGGNGGPGGDGGTGATVGFAGSGGFGGAGGIAQLFGTGGMGGSGGGIGAGTTTVVPPDVAPVGGTGGNGGRAGLLLGVGGMGGNGGATSVGGTLYAAGGNGGDGGLVWGNGGTGGSGGAGGAGSVGNGGAGGNAALLFGNGGAGGAGGAGGIGAGGAGGFGAVLFGNGGAGGSGAPGGIGAGGNGGNALLVGNGGNGGAGTGGAAGGAGGSGGLLFGQNGMPGP

SEQ ID NO: 6838 - protein, 135 aa, Haemophilus influenzae
EDPTPALEGADVVLISAGVARKPGMDRSDLFNINAGIVRGLIEKVAVTCPKACVGIITNPVNTTVAIAAEVLKKAGVYDKRKLFGVTTLDVLRSETFVAELKGLNVSRTSVPVIGGHSGVTILPLLSQVQYAEWN

SEQ ID NO: 6839 - protein, 189 aa, Lactobacillus gasseri
MQNSDNIDNIIDRVLFSQDDIEEICQRLGKQLTEDYAGKFPLVIGVLKGAVYFMTDLTRHMNVKMQNDFMDVSSYGDGFESSGKVRLDIDVQADVKDRDVLLVEDIVDTGHTLKFMKDLLNKRGAKSVKCCALLNKTERREDNVVVDYYGSKVENAFVVGYGLDYLNAYRNLPYVGVLKPEVIQANLNR

SEQ ID NO: 6840 - protein, 246 aa, Geobacillus stearothermophilus
MKGIILAGGTGSRLYPLTKVTNKHLLPVGKYPMIYHAIYKLKEANITDILIVTGREHMGDVVNLLGSGSEFDVQFTYKVQDQAGGIAQALGLCESFVGNDLMTVILGDNVFSGSIVPYVENFKQQATGAKILIKEVEDPERFGVPELEGNQIKSIEEKPKNPKSRYAVTGIYMYDAKVFDIIKTLKPSARGELEITDVNNAYIERNELTYDILDGWWTDAGTHASYLRANELAKDVDFGSLFNKKI

SEQ ID NO: 6841 - protein, 322 aa, Streptococcus mutans UA159
MKAVYIQKTGGPATIIVGSLPVPKVRPKSVLIKVIAASINYVDLFIRSGIYQTDLPNPYILGRDAIGQVVEIGKDVIQFKVGDCVWTNSMGYDGRQGITSEYALIPEERLFLTPKNADSLKLIGAVHSAATATIVLQDIMELKPKQKLLIEGAAGHVGSKLVYLANEMGAEVVTTASLKDFSRLKQLSDAICFDYRDKSLFKKLKSAYPDGFDHIIDTSGEIPLQFNCDLLAPKGVISLITAPKDSQFDSRQFYMNCQQMKGFVISHASLKQLKKAGRILNDAFRQGQLLEEDMVIKKFDKAAEAHDLMETKKENRKIILVP

SEQ ID NO: 6842 - protein, 737 aa, Oscillatoria chalybea
MTDSTKTLCPYCGVGCGLEVSPPARSGKPVNRDSQGYPVWKVQGDREHPSSQGMVCVKGATIAESLHKDRLLYPMMRESLDKPFRRVSWDEALNAIVNRIQTVRFTQGAEAICMYGSGQFQTEDYYVAQKLMKGCLGTNNFDANSRLCMSSAVAAYIQSFGSDGPPCCYDDLDLTDCAFLVGTNTAECHPIIFNRLRKHHKKNNGKVKMVVVDPRRTATAEAADLHLAIKPGTDIDLFNGMAYLLMRWGKIDTIFIDECTSNFPAYCEVIRHYPPEVVARKCGITVEELETAARYWAESERVLSLWSMGINQSSEGTAKARTLINLHLMTAQIGKPGAGPFSLTGQPNAMGGREAGGLSHLLPGYRVVKNARHRSEVEKFWGLPVGRIAPERGLTVWEMILGLEMGKVGLVWIAATNPAVSMPDLERTKKALSRSPFTVYQDAYYPTETANYAHVLLPAAQWSEKTGVMTNSERRITLCQAFRDRPGEAKADWEIFAEVGRRLGFVEQFNFANSAEVYAEFTQLTKGRPCEQTGIGHQRLGADGPLQWPCPEEAGENNAARLYTDLRFHTPDGRAKFAAYHSRGLAEPPDPDFPFVLTNGRLYGHWHTLTRTGRIEKTKQMHPQPFIEIHPRDAGKLGIEDEDWVEVRSRRGMARFPAKVTKAIAPGTVFVPMHWGELWADSAEANAMTHPESCPDSLQPELKACAVQLVPITADIKATNSLLETAKSSMLSATPSV

SEQ ID NO: 6843 - protein, 425 aa, Oryza sativa (japonica cultivar-group)
MAAAADAPPPPPEVAPPAPAPAPAPAPYQPPRLAVADGAGGGGGGGGKPCRHHAYSRKQKSLGLLCTNFVALYDREDVESVGLDDAARRLGVERRRIYDIVNVLESIGMLVRRAKNRYTWIGFGGVPAALAKLKEMSLRAVSSVASPSLDETSAANVSDDEDDDKLDDAEGDAESEKLSLSQSIDNPSDKPDAPPCKLRSEHRKEKSLGLLTQNFVKLFLTMEIETISLDEAAKRLLGEGHAANNMRTKVRRLYDIANVLSSLNLIEKTQQADSRKPAFRWLGQAKRNEGVTVALPPTKTLPNKRAFGTDLTNIDNKRGKLDSTMENRGKPTQDGGNLFNNLQRQLGQENRSDFVYGPFHPAVARKQEHGNRTVQEKERKSIQDWENLASSFRPQYQNPGLNDLFGHYMEAWRSWYSDLRRDRAS

SEQ ID NO: 6844 - protein, 307 aa, Haemophilus influenzae R2846
MFFPGQGSQTVGMLADLATEYPIVIETFKQASDALGYDLWYLVQQGPAEELNKTWQTQPALLAASVAIYRVWQEKFPQLKPEVMAGHSLGEYSALVCAGVLDFQDAIKLVELRGKLMQQAVPEGTGAMYAIIGLDNEAIINACKQAEEGEVVSAVNFNSPGQVVIAGAKAAVERAAALCKEAGAKRALPLAVSVPSHCALMKPAAEQLAVTLDNIQINTPTISVLNNVDVKAETEGTEIRTALVRQLYSPVRWTETVEKMAQDGVLALVEVGPGKVLNGLTKRIVGDLQAISVNDVASFNAVEEFLA

SEQ ID NO: 6845 - protein, 121 aa, Prunus persica
VEACKNSLKKLQLDYLDLYLVHYPLATKHSGVGTTASLLDENKVLDIDVTVSLETTWHDMEKTVSLGLVRSIGLSNYELFLTRDCLSYAKIKPQVSQFETHPYFQRESLVRFCKKHGVVPM

SEQ ID NO: 6846 - protein, 299 aa, Glycine max
WRRKLQQLHIPVLPESLILSVFRNTPLLSNILSAKVHPLVVFNICDCYVRRLDQAERVIGTLLGSVLPDGTVDIRNSYAVPHNESIEQVALDIEYHHNMLISHQKVNPKEIIVGWYSTGLGVTGGSALIHEFYSREVPNPIHLTVDTGFTNGAGTIKAYVSNNLSLGERQIAAQFQEIPLDLRMVEAERIGFDMLKATAVDKIPSDLEGMEASMQHLLVLIDDIYKYVDDVVEGRVAPDNKIGRFISEAVGSLPKLSPSVFDKLVNDSLQDHLLLLYLSSITRTQLSLAEKLNTAAQIL

SEQ ID NO: 6847 - protein, 228 aa, Gossypium herbaceum
FTSLCHTDVYFWEAKGQTSLFPRIFGHEAGGIVESVGEGVTHLKPGDHVLPVFTGGCGNCRHCKSKESNMCDLLRINTDRGVMLSDGKTRFSINGKPIYHFVGTSTFSEYTVAHVGSVAKINPAAPLDKVCILSCGISTGLGATLNVAKPTKGSTVAIFGLGAVGLAAAEGARIAGASRIIGVDLNPNRFEEAKKFGCTEFVNPKDHNKPVQEVLAEMTNGGVDRSVE

SEQ ID NO: 6848 - protein, 550 aa, Vibrio vulnificus
MLKTINPTQTQAWNALTAHFESAQDMDLKDLFAQDAARFDKFSARFGSDILVDYSKNLINEETLKHLFALAKETELSAAIKAMFSGEAINQTEGRAVLHTALRNRSNQPVLVDGEDVMPAVNAVLEKMKSFTDRVIGGEWKGYTGKAITDIVNIGIGGSDLGPYMVTEALAPYKNHLNLHFVSNVDGTHIVETLKKVDPETTLFLIASKTFTTQETMTNAHTARDWFLATAGDQAHVAKHFAALSTNAPAVSEFGIDTDNMFEFWDWVGGRYSLWSAIGLSIALAVGYDNFVELLEGAHEMDNHFVSTELESNIPVILALIGIWYNNFHGAESEAILPYDQYMHRFAAYFQQGNMESNGKYVDRNGNPVTYQTGPIIWGEPGTNGQHAFYQLIHQGTKLIPCDFIAPAVSHNPAGDHHQKLMSNFFAQTEALAFGKNEETVKAELVKVGKNAEEVAAIAPFKVFEGNRPTNSILVKQITPRTLGNLIAMYEHKIFVQGVIWNIFSFDQWGVELGKQLANQILPELADGSEISSHDSSTNGLINAFKAFKA

SEQ ID NO: 6849 - protein, 455 aa, Schizosaccharomyces pombe
MGRPLTEVKYLLINSAPVILGYALQNSLQTSSVIVTGRLGPSELSVAAFAYMFAMSTGWLIALGGTTAFDTLGSNLWGAGKKQELGILLQTGFIVLSILYLPICLVWWYSKPILIFLHQTPELAEASQKFLRYLIPGGLGYVCFELLKKFLQTQEITRAGSYILLVTSPLNVALNFLLVHYYGLGLKGAPLATGLSYWLSFILLTQYAKYVKGAEAWNGWNKRCLENFGPFVKLSLLGIVMVGTEWWAFEIVALVAGKLGAVPLAAQSVIMTTDQLLNTIPFGLGIITSNRVAYYLGAGLPDNASLTAKVAAIVGVAVGSVIMITMIAVRNIYGRIFTNDPDVIQLVALVMPLVAAFQISDSLNGTMGGALRGTGRQKVGAIVNITAYYLFALPLGIYLAFHGKGLVGLWIGQVIALSIVGILELKIVMATDWISQSRKAISRFGDSSELTALLN

SEQ ID NO: 6850 - protein, 558 aa, Mycobacterium tuberculosis H37Rv
MSFLVVVPEFLTSAAADVENIGSTLRAANAAAAASTTALAAAGADEVSAAVAALFARFGQEYQAVSAQASAFHQQFVQTLNSASGSYAAAEATIASQLQTAQHDLLGAVNAPTETLLGRPLIGDGAPGTATSPNGGAGGLLYGNGGNGYSATASGVGGGAGGSAGLIGNGGAGGAGGPNAPGGAGGNGGWLLGNGGIGGPGGASSIPGMSGGAGGTGGAAGLLGWGANGGAGGLGDGVGVDRGTGGAGGRGGLLYGGYGVSGPGGDGRTVPLEIIHVTEPTVHANVNGGPTSTILVDTGSAGLVVSPEDVGGILGVLHMGLPTGLSISGYSGGLYYIFATYTTTVDFGNGIVTAPTAVNVVLLSIPTSPFAISTYFSALLADPTTTPFEAYFGAVGVDGVLGVGPNAVGPGPSIPTMALPGDLNQGVLIDAPAGELVFGPNPLPAPNVEVVGSPITTLYVKIDGGTPIPVPSIIDSGGVTGTIPSYVIGSGTLPANTNIEVYTSPGGDRLYAFNTNDYRPTVISSGLMNTGFLPFRFQPVYIDYSPSGIGTTVFDHPA

SEQ ID NO: 6851 - protein, 708 aa, Desulfovibrio desulfuricans G20
MAEDKTVFSVCGMCSVRCPIMVETRGGNAAWIQGNPYSALKGALCARGAAGMALEYDSERPVTPLIRTGERGEGKWREATWDEALDYVAARLKNIMAEHGGRSVLWSDRGGPFADLHQAFVRGLGSPNYCNHDASCARNVQHAAQSVMGMGRKQVAYDLRNARHIVLQTRNILEAINVAECNGVMDALDNGCKLSVIDIRASVSASKADNFFMVRPGTDYAFNLAVINQLITRGLYDKEYVARHFHDFDELAAFTAPCTAAWAQEQTGVPAERIEALAAQLAEAAPSVIWHPGWMVARYDDSFYVCRTAYIINALLGSIGARGGLPLVSTPKDVGRKGLNKLAALMPKPEEKRADGVGWRHPQFDAGPGLVNLAYDAIATADPYAVKAYICYRHDPLMAMPDPEALKRKWEGLDLLVSVTFSWSDTAWHSDVVLPLSPYLSRESIIAGKAGLKPQFFVRKRAMQPTADTRADWEILCGLASRLTDVCPAMKHLAFTRIEDIWDYQLRDTGVSIGDFDAKGFVELADTPLYRTPESFPTASGKLEMVSAKWAKADIHTLKPYTAPAAPPQGAFRIAFGRVGVHTQGHTVNNPLLHEQMPENVAWIHTSRAERLGICTGDMIEVAPAGAPRNRAGRMKAFVTDCVHPEALFMVHGFGHRLPVESRARGCGVADHELMPGGLERYDTSGGGLSLQEHFVVISKAEQDGGAA

SEQ ID NO: 6852 - protein, 178 aa, Mycoplasma capricolum
  unsure (1)..(178): unsure at all Xaa locations
DLFKEMNISTIHDDRLVRGLDYYTGFIFEXXXXAKNIEQXXIAGGRYNNLVYEIGNINLPACGFGMGLERFINIIKEQNNKLNKNDQSIDLYTICLDQSAIKLNQQILELSRSIGLISDSNYYNMSLKSALKKSDKLNPKYLIILGEKEATSNQFIIKNKINKTEIKTTLTNFVNDLK

SEQ ID NO: 6853 - protein, 65 aa, Glycine max
  unsure (1)..(65): unsure at all Xaa locations
MRAALHRENLVINIRWTRXRNFARAYITCICMPVLIYKGVVLASRLQDEDNGRPYRRFMCKRFES

SEQ ID NO: 6854 - protein, 304 aa, Glycine max
  unsure (1)..(304): unsure at all Xaa locations
MALNYNIALAFSTVLTLLLLPLPTLGELVQEQPLVLKYHNGQLLKGRITVNLIWYGTFTPIQRSIIVDFINSLSSAPNAPLPSTATWWKTTEKYKGGGSSALVVGKQFLHSAYSLGKNLKGKDVLALASKFNELKSITVVLTAKDVAVEGFCMSRCGTHGSTRNVKNAARTAYIWVGNSETQCPGQCAWPFHQPIYGPQTPPLVAPNGDVXGVDGMVINLATLLAGTVTNPFNNGYFQGPPTAPLEAVSACTGVFGSGSYPGYPGRVLVDKATGASYNAHGANGRRYLVPAMWDPQTSTCKTLV

SEQ ID NO: 6855 - protein, 347 aa, Nicotiana tabacum
GDVTTRQNWQIRGVVLPDVPEILKGLDEVGLTSLQSGMDNVRNPVGNPLAGIDPHEIVDTRPYTNLLSQYVTANFRGNPAVTNLPRKWNVCVIGSHDLYEHPHINDLAYMPASKDGRFGFNLLVGGFFSPKRCAEAVPLDAWVPADDVVPVCKAILEAYRDLGTRGNRQKTRMMWLVDELGVEGFRAEVVKRMPQQKLDRESTEDLVQKQWERREYLGVHPQKQEGYSFVGLHIPVGRVQADDMDELARLADNYGSGELRLTVEQNIIIPNVENSKIESLLNEPLLKNRFSTNPPILMKNLVACTGNQFCGQAIIETKARSMKITEEVQRLVSVTKPVRMHWTGCPN

SEQ ID NO: 6856 - protein, 434 aa, Neisseria meningitidis MC58
MKKHIWAASLLPASLSAEPLNWWKPYSAVNSGDTAWVMTAAALVLLMTLPGLALFYGGMVRKKNLLSTMMHSFSIATLVGILWVAVGYSLAFTPGNAFIGGLGRVFLSGMQIDATAQMLTVSPNAPTVPEPVFMFFQMTFAIISTAIITGAFAERMKYSAMMLFSGIWFLLVYVPGAHWVWGGGFMSKGGVLDYAGGTVVHINAGIAGLVAALVLGRRIGYGREAMPPHNMAMTLIGAAMLWFGWFGFNAGSALAADAAAGMAMAVTQVSAVFGAAGWLACEKIAGHKPSALGLASGAVSGLVGITPAAGFTGPSGAAAIGILTAAACFVSVTVVKHKLRYDDSLDAFGIHGFGGLVGGILTGIFFDNRIFGGDAAVWQQLWIQVKDGVVMAAYSGLMSWAILKVVGKICGGLRVGKDVEREGLDLNIHGERVE

SEQ ID NO: 6857 - protein, 135 aa, Haemophilus influenzae
EDPIPALEGADVVLISAGVARKPGMDRSDLFNINAGIVRGLIEKVAVTCPKACVGIITNPVNTTVAIAAEVLKKAGVYDKRKLFGVTTLDVLRSETFVAELKGLNVSRTSVPVIGGHSGVTILPLLSQVQYAKWN

SEQ ID NO: 6858 - protein, 147 aa, Zea mays
DDIIYRDYVDVSVAVGTSKGLVVPVIRDADTMNFADIEKGINNLAKKATEGALSIDDMAGGTFTISNGGVYGSLISTPIINPPQSAILGMHSIVQRPVVVNGDILARPMMYLALTYDHRLIDGREAVFFLRRIKDVVEDPRRLLLDI

SEQ ID NO: 6859 - protein, 432 aa, Anabaena variabilis ATCC 29413
MSIHEIFMPALSSTMTEGKIVSWVKSPGDKVEKGETVVVVESDKADMDVETFYEGYLAHIIVEAGDSAPVGAAIAYVAETEAEIEAAKSLGSSGGAAATPSAPPEPVAATAAVGVPAASQNGSNHREGRLVASPRARKLAKELKVDLTSLKGSGPYGRIVADDIEAAVGKVKQPATTPTAPTPTFTPAPVPATRTPAPAPAPAPVAAAPGQVVPFNTLQNAVIRNMVASLDVPVFRVGYTITTDGLDKLYKQIKSKGVTMTALLAKAVAVTLQKHPLLNASYSDQGLVYHPDINIAVAVAMDGGGLITPVLKNADKIDIYSLSRTWKSLVDKARSKQLQPDEYSGGNFTLSNLGMFGVDTFDAILPPGQGSILAIGASRPQLVATGDGSFAIKQQMQVNITSDHRIIYGADAAAFLQDLAKLIETDAQSLTL

SEQ ID NO: 6860 - protein, 394 aa, Saccharomyces cerevisiae
MTLQESDKFATKAIHAGEHVDVHGSVIEPISLSTTFKQSSPANPIGTYEYSRSQNPNRENLERAVAALENAQYGLAFSSGSATTATILQSLPQGSHAVSIGDVYGGTHRYFTKVANAHGVETSFTNDLLNDLPQLIKENTKLVWIETPTNPTLKVTDIQKVADLIKKHAAGQDVILVVDNTFLSPYISNPLNFGADIVVHSATKYINGHSDVVLGVLATNNKPLYERLQFLQNAIGAIPSPFDAWLTHRGLKTLHLRVRQAALSANKIAEFLAADKENVVAVNYPGLKTHPNYDVVLKQHRDALGGGMISFRIKGGAEAASKFASSTRLFTLAESLGGIESLLEVPAVMTHGGIPKEAREASGVFDDLVRISVGIEDTDDLLEDIKQALKQATN

SEQ ID NO: 6861 - protein, 121 aa, Pyrus pyrifolia
VEACKNSLEKLQLDYLDLYLVHYPMPTRHNAIGKTASLLGEDKVLDIDVTISLQQTWEGMEKTVSLGLVRSIGLSNYDLFLTRDCLAYSKIKPAVSQFETHPYFQRDSLVKFCIKHGVLPT

SEQ ID NO: 6862 - protein, 566 aa, Prochlorococcus marinus str. MIT 9313
MRLIRFDEELPSSLMTSSAQTGPTQRQVHLNTPFNDQKPGTSGLRKSSKQFEQTNYLESFIEAIFQTLPGVEGGTLILGGDGRYGNHRAIDVILRMGAAHGLSRVITTTNGILSTPAASHLIRANKAIGGIILSASHNQGGPDGDFGVKVNGANGGPAAESLTNAIYACSQALEKYSLVDADVIPLETPGHHAIGGMTVDVIDGVEDYVELMQKLFDFGRIKDLIKTDFPVVFDAMHAVTGPYAKRLLEGLLGAPTGTVRNGVPLEDFGGGHPDPNLTYAAELADLLLNGKAYSFGAACDGDGDRNMILGRGCFVNPSDSLAILAANANVAPAYADGLAGVARSMPTSAAVDVVAKQLNIDCFETPTGWKFFGNLLDAGRITLCGEESFGTGSNHVREKDGLWAVLFWLQILAERRCSVADVMTQHWSRFGRHYYSRHDYEAIASENAHGLYNRLESMLPRLIGQPFAGRQVSQADNFSYSDPVDGSETQSQGLRILLEDGSRVVVRLSGTGTKGATLRVYLECYEPSHGNLNQDPQHALADLINGIDALAEIQKRTGMQRPTVIT

SEQ ID NO: 6863 - protein, 567 aa, Oryza sativa
MAAAAVAANGGGDGAQASNAPAPTRLASVYSEVQTSRLKHALPLPSVLRSPFALADGPASSAAGNPGEIAKLFPNLFGQPSVSLVPSPEPASTRPLKVGVVLSGGQAPGGHNVICGIFDYLQEYAKGSVMYGFKGGPAGVMKCKYVELTADYVYPYRNQGGFDMICSGRDKIETPEQFKQAEDTVNKLDLDGLVVIGGDDSNTNACLLAEYFRGKNMKTRVIGCPKTIDGDLKCKEVPTSFGFDTACKIYSEMIGNVMTDARSTGKYYHFVRLMGRAASHITLECALQTHPNVALIGEEVAAKKETLKSVTDYITDIVCKRAELGYNYGVILIPEGLIDFIPEVQKLIAELNEILAHDVVDEAGAWKSKLQPESRQLFDFLPKTIQEQLLLERDPHGNVQVAKIETEKMLIAMVETELEKRKAEGKYPAHFRGQSHFFGYEGRCGLPTIFDSNYCYALGYGSGALLQCGKTGLITSVGNLAAPVEEWTVGGTALTSLMDVERRHGKYKPVIKKAMVELDGAPFKKFASLRDEWSLKNHYISPGPIQFSGPGSNDANHTLMLELGAEA

SEQ ID NO: 6864 - protein, 489 aa, Zea mays
  unsure (1)..(489): unsure at all Xaa locations
MAREQLEESIVADGNGKEEEVGVMGIGAADGADDQHGGGKLSMKSLLWHGGSVWDAWFSCASNQVAQVLLTLPYSFSQLGMLSGVLLQIFYGFLGSWTAYLISVLYVEYRSRKEKEGVSFKNHVIQWXFEVLDGLLGPYWKAAGLAFNCTFLLFGTVIQLIACASNIYYINDRLDKRTWTYIFGACCATTVFIPSYHNYRVWSFLGLGMTTYTAWYLTIAAAVHGQVPGVTHSGPXKLVPYFTGATNILYTFGGHAITVEIMHAMWKPRKFKYIYLXATLYVFTLTLPSAAAMYWAFGDQLLTHSNAFSLLPRTPWRDAAVVLMLXHQFITFGFACTPLYFVWEKAVGMHVTRSVFLRALVRLPIVVPVWFLAIIFPFFGPINSAVGALLVSFTVYVIPALAHMLTYRSASARLNAAEKPPSFLPSWSGMFVLNAFVVAWMLVVGFGLGGWASVTNFIKQIDTFGLFAKCYQCPTKPHPGSPLPAPPRL

SEQ ID NO: 6865 - protein, 217 aa, Triticum aestivum
EGNLRYGALPREAVCTENLTPWLKLLPCRDKAGIASLLYRPSVYKGYYHSQKLKLKSSQSLGIILDQTLTVVLQPNTVSGKQLHSTGGQLQPSWSMEHLFSKKLSGKCLVSKSSRVFVEIEKGIVDNVHKAGSDVSWNNDLFVLSTAPDRSLKELDNLEVQSSSLYEYDVNNYNNDKPLNVGITWKLPLIWSCTRAPYHASRFLMGSGNERGSIAMS

SEQ ID NO: 6866 - protein, 175 aa, Zea mays
DKELQCRVFAYADTQRYRLGPNYLMLPVNAPRCAHHNNHYDGAMNFMHRDEEGDYYPSRHAPLRQAAPPTPLPPRPVAGRREKATIRKPNDFKQPGERYRSWDADRQDRFVRRFADSLGHPKVSQELRSIWIDLLAKVCGWHGMPVAHVFSFDLSYSCMIYVRLLCICSATRRWG

SEQ ID NO: 6867 - protein, 387 aa, Triticum aestivum
  unsure (1)..(387): unsure at all Xaa locations
MAAAASSSSPPAVITCRAAVAWGPGQALVMEDVEVAPPGPLEIRVKVVSTSICRSDVAEWQSTAQPDLFPRIFGHEASGPXVVESVGEGVTEFQVGDHALTVFIGECMSCKHCVSXXKSNMCQTLGLERKGVMHSDQTTRFSIGGKPVYHYCAVSSFSEYAVVHSGCAVKVSPTMPMDRICLLSCGASAGLGAAWNVADVSKGSSVVIFGLGTVGLSVAQGAKLRGASKIIGVDTNPAKQEKGKAFGVTDFINPAELNEPVQQVVKRLTDGGADYSFECVGDTGVVSTALQSCSDGWGLTVTLGVPKAKPEVSAHYGLLLSGRTLKGSLFGGWRPKTDIPLLXEKYANKEIQVDGLVTHDMPFSDINKALELMLQNRCLRCVIHMPK

SEQ ID NO: 6868 - protein, 456 aa, Nicotiana tabacum
MMRLKLPNGVTTSAQTRYLASVIRKYGKEGCADITTRQNWQIRGVVLPDVPEILKGLAEVGLTSLQSGMDNVRNPVGNPLAAIDPEEIVDTRPYTNLLSQFITGNSRGNPALSNLPSKWNPCVVGSHDLYEHPHINDLAYMPATKDGRFGFNLLVGGFFSAKRCDEAIPLDAWVPADDVVPVCKAILEAFRDLGFRGNRQKCRMMWLIDELGVEGFRAEVEKRMPQQQLERASPEDLVQKQWERRDYLGVHPQKQEGYSFIGLHIPVGRVQADDMDELARLADEYGSGEIRLTVEQNIIIPNIETSKIEALLKEPVLSTFSPDPPILMKGLVACTGNQFCGQAIIETKARSLKITEEVQRQVSLTKPVRMHWTGCPNTCAQVQVADIGFMGCLTRDKNGKTVEGADVFLGGRIGSDSHLGEVYKKAVPCDDLVPLVVDLLVNNFGAVPREREETED

SEQ ID NO: 6869 - protein, 544 aa, Methanocaldococcus jannaschii DSM 2661
MRDMCSISGIIVKDNQISAKYSIDMMKILKHRGRDNSGLLLDDEVIYFNDFEDVEDLEEEMIGNLSLAHNRLAIVGRYGVQPIPNEDETIWLVCNGEIYNYIELREYLKQNHEFRTDSDNEVIIHLYEEEKLEELDGDYAFAIYDKSKNVVRLARDMFGVKPLFYVDRDKYFAFASERKALWHLLINIDGCERDLDELNSKIKTLKPNSQLIYYLDDNRFEIIEGFKKLELNYMKERSYEEAKEYLDRALKNSVLKRVRGLDKVGIICSGGVDSSLIAKLASLYCEVILYAVGTENSEDLIYAERLAKDLNLKLRKKIISEEEYEEYVFKVAKAIDEVDLMKIGVGIPIYVASEMANEDGLKVVLSGQGADELFGGYARHERIYRERGEEELKKELLKDVYNLYKVNLERDDHCTMANGVELRVPFLDEEVVEIALSIPIEYKMSELSNRPYAESNISLKSEPINGLKNTNLNIKCVRSVRKKILRDVASQYLPDYIAYRPKKAAQYGSGGEKMIYKVAKKYGFSKKRINEFLDMLKRKIVSEF

SEQ ID NO: 6870 - protein, 339 aa, Eremothecium gossypii
MGYNETEPAIDGDNNEQRINEDMSTLEHTSNNNGNGLEPVEAGPDSGIPAVEGGGSVSGQSPQHEPPAYELSYVVGVAENKNAKFRRTMEDVHTYVENFASRLDWGYFAIFDGHAGNQASKWCGSHLHTIIEERILQGDDRDVRDILNDSFVYVDQQINSTLEGNSGCTAAVGILRWEAPTPIPNMPINLEQHKRMLYTANVGDTRIILFRNGRSVRLTYDHKASDIIEMQRVEKAGGLIMKSRVNGMLAVTRSLGDKFFDSLVVGNPFTTSVEIPTSDQFLIIACDGLWDVVDDQEACEMIKDIEDANEAAKTLVRHALEHGTTDNVTVMVVFFDNNQ

SEQ ID NO: 6871 - protein, 363 aa, Glycine max
MGGKRKKSDDDDDVEAEAEASGWKKKTRTTSEREKEKKEPLRPSMIKNKEKRSELHAKLKHQKKLEKRAKAKARDAALKKALELGEEPPEKKVPRTIENTRELDETVCKPDDEELFAGNDADEFGPILNQQQTPKILITTCRFHSTRGPAFISELLSVIPNAHYFKRGTYDLKKIVEYAKKKDFTSIIVVHTNRREPDALLIIGVPDGPTAHFKLSKLVLRKDIKNHGNPTGHKPELVLNNFTTRLGHRVGRLIQSLFPQDPEFKGRRVVTFHNQRDFIFFRHHRYIFETKEVKKAESKGKKDKDGESENVPEQKTIARLQECGPRFTLKLISLQHGTFDTKGGEYEWVHKPEMDTSRRRFFL

SEQ ID NO: 6872 - protein, 551 aa, Xylella fastidiosa Temecula1
MTEIKEAFVPDIGDYSNVPVIEVLVAVGDTVSKGQSLITLESDKATMEVPSSTAGIIKEIKVKVGDTLSQGHVVALIEVSEETAEVTTPMTVNTPTTRAHNTAHPEDEGSLIEVRVPDIGDYTNVPVIEVLVAVGDTVSKDQSLITLESDKATLEVPSSATGVIKQLKVNIGDTLSQGDIVVVLQSAESTPLTPTTNKPALPPNSSPAGDAISAPASPAGTQSTPPITFDANTVLPSKVPYASPAVRLLARQLDVDLSRIKGSEKNGRITREDVQKFVNTTLGTGMAEGRTPSASITTNGGLNLLPWPNVDFSKFGEIETQPLSRIKKISGANLARNWAMIPHVTQFDQADITQLEALRVQINKENAASNKNGTGIKLTVLAFLIKASASALKKFPTFNASLDATGETLTLKKYFHIGFAADTPNGLVVPVIRNVDQKGIVEIAQETSDLAKKARDGKLTPADMSGGCFSISSLGGIGGTAFTPIINAPEVAILGVSKSLIQPIWDGTQFAPKMLLPLSLSYDHRVIDGALAAHFTTYLSQILADMRRVLL

SEQ ID NO: 6873 - protein, 603 aa, Xylella fastidiosa Temecula1
MTVIEIKVPDIGDYSKVPVIEVLVTVGDHLVKNQGILTLESDKATLEVPSMNNGIVKELKVNVGDLLSQGDVILLLETEDTTAPPSPSNAATSDTTSPPPPSPQPAASKPTAPDQQHSDIKCRMVVLGAGPGGYTAAFRAADLGLDTVLVERYPNLGGVCLNVGCIPSKALLHAAAVIDEAAHASTFGIDFGKPKITLDTLREYKQNVVNKLTAGLAGMAKQRKVRTVTGIAHFVSPNTLDITAADGSTQRLHFQQCIIATGSHPVKLPNFPWDDPRIMDSTDALELAEVPKKLLVVGGGIIGLEMATVYNALGSHVTIVEFMDQIIPGTDKDLVKPLADRMKKQGIEIHLNTKASHVKADKKGITVSFEAPTQGTQPALKTSTYDRVLVAVGRTPTGNNIGAEKAGVNVTERGFIPVDRQMRSNVPHIFAIGDIVGNPMLAHKATHEGKLAAEVAAAETESGKHREWVARVIPSVAYTNPEIAWIGITETEAKAKGLNIGVAKFPWVASGRAIGIGRTEGFTKLIFDEDTHRIIGGAIVGVHAGDLLAEIGLAIEMGAEAEDISHTIHAHPTLSESIAMSAEVYDGTITDLYLPKKSATSAK

SEQ ID NO: 6874 - protein, 403 aa, Corynebacterium glutamicum
MAVKTLKDLLDEGVDGRHVIVRSDFNVPLNDDREITDKGRIIASLPTLKALSEGGAKVIVMAHLGRQGEVNEKYSLAPVAEALSDELGQYVALAADVVGEDAHERANGLTEGDILLLENVRFDPRETSKDEAERNRFAQELAALAADNGAFVSDGFGVVHRAQTSVYDIAKLLPHYAGGLVETEISVLEKIAESPEAPYVVVLGGSKVSDKIGVIEALAAKADKIIVGGGMCYTFLAAQGHNVQQSLLQEEMKATCTDLLASVDKIVLPVDLVAASEFNKDAEKQIVDLDSIPEGWMSLDIGPESVKNFGEVLSTAKTIFWNGPMGVFEFAAFSEGTRASPRPSSMQHAGNDAFSVVGGGDSAASVRVLGLNEDGFSHISTGGGASLEYLEGKELPGVAILAQ

SEQ ID NO: 6875 - protein, 260 aa, Mycobacterium tuberculosis H37Rv
MSGRLIGKVALVSGGARGMGASHVRAMVAEGAKVVFGDILDEEGKAVAAELADAARYVHLDVTQPAQWTAAVDTAVTAFGGLHVLVNNAGILNIGTIEDYALTEWQRILDVNLTGVFLGIRAVVKPMKEAGRGSIINISSIEGLAGTVACHGYTATKFAVRGLTKSTALELGPSGIRVNSIHPGLVKTPMTDWVPEDIFQTALGRAAEPVEVSNLVVYLASDESSYSTGAEFVVDGGTVAGLAHNDFGAVEVSSQPEWVT

SEQ ID NO: 6876 - protein, 295 aa, Bacillus anthracis
MKIRKAIIPAAGLGTRFLPATKAQPKEMLPIVDKPTIQYIVEEAVSSGIEDIIIVSGRGKHVIEDHFDKSYELEQTLFKKNKIKTLEDIECISNLANIHYIRQKEPKGLGHAIYCARRFIGEEPFAVLLGDDIVSSTYPCLKQLIDVYEEHHCSVVGVQRVLETEVSKYGIVKSANQNVNQSIIPISMLVEKPPLETAPSNLAIMGRYILKPDIFEVLKNLPVGSGGEIQLTDAINVLNKQQKVLAFEFDGKRYDVGDKFGFIKATIDFALQRESLKEDVLSYLRNITRDKLINK

SEQ ID NO: 6877 - protein, 197 aa, Carboxydothermus hydrogenoformans
RLVNAGITDIGVIIAPETGEEIKKSITNAGFPAKFTFILQEKPLGLAHAVKVAKDYLEDDDFIMYLGDNLINSGIKEFVEEYKENRYDATILLKEVQDPTRFGVAVVDENFKVQRLIEKPKEPPSNLALVGIYIFSPKIFSAIDRIKPSWRGELEITDAIQELITSGGMVQAHKITGWWLDTGKKDHLLGSQPGCIR

SEQ ID NO: 6878 - protein, 170 aa, Sorghum bicolor
MAAADVEYRCFVGGLAWATNNETLEHAFANFGQVLDSKVITDRETGRSRGFGFVTFSSEQSMLDAIENMNGKELDGRNITVNQAQSRGGGGGGGGYGGGGGGYGGRREGGGYGGGGGGYGGRREGGGGYGGGGYGGGGGGYGGRREGGGGYGGGGGYGGNRGDSGGNWRN

SEQ ID NO: 6879 - protein, 268 aa, Pisum sativum
MAESSSTKTGLRLAGKVAIVTGGASGIGKETAHLFANQAARMVVIADIQDELGIQVAESIGTDRCTFIHCDIRIEDDVKNLVQSTVDTYGQIDIIHCNAGIISPSDQTLLELDVSQANGVFATNAIGTALCVKHAARAMVDGKVRGSIVCTASISASYGVTTGTDYSMSKHAVLGLMRSASVQLAKYGIRVNSVSPNGLATPLTEKLLDADAKTVEEIFSKFSMLKGVVLRTNHVADAVLFLASNESDFVTGLDLRVDGNYITSDAVI

SEQ ID NO: 6880 - protein, 383 aa, Candida albicans SC5314
MTRLATDSIHGGDHLKRVIDVINPIHISTTYSYSNNPDELVPGGLTDPNTLVYSRENHPNAAQIEAIIEKITGYPAVIYNSGLGAFNGLITYVNPKTMAFGQIYHGVHGIADIWTRNFGLKQIGIDDNFDGVLQKGDLVHLETPVNPYGTNLDISKYAERAHAQGALLSVDATFAPPPLMNPFDFGADIVMHSATKFFGGHSDLLAGILLVKSQEIKNKLLLDRLVLGTNIGNLESALLMRSLRTFELRIRRQSATAEFIVKYIAENKDKFPDLETIYHGSLQDDEYIKKQMPIGQSPVFSIELVSEDKAKRLPSKLKLFHHATSLGGTESLIEWRAMSDDHISKKLLRVSIGLEDPRDLLADFVHGLGGDDDLVKQIENLEI

SEQ ID NO: 6881 - protein, 467 aa, Desulfovibrio gigas
MLPPAIASRWAAPNGYRDVLRISLPMIASMGAHTVMLTTDRFFLSQHSLEAIAASWPAGMANFAFMALFMGTAQYVNVFIAQYVGSEAPARVGAAVWQGVWFCLAAGLLMACTALLARPIFSLAGHEPMVLQMEVEYFQILSVGAIFGLLQNTLSCFYSGQGLTRPVMYVNIAGALVNVPLDYCFIFGVGPFPAWGVAGAAVATVIGAMVSAGLFALLVFSRENERRFGTRSQWRLDRELMRRFLRYGLPGGTQFGVEILAFTVFLFLAGRLGTEALAATNMAISINTVGFLPMVGLHIALSTMVGQAIGGGSPAMARRAIRSGLHLALLWTSFAVAVYVLLPEPLIAIFLDPDSPGAPAVLALGVELMRFVSAYAFFDALILVFFAALKGAGDTVFIMRSIIVVALGAMIIPGVAVVEWLDGNIYFLWSLLTAYVAILGVGGVLRYRGGKWQGMRVVETAAQVVDT

SEQ ID NO: 6882 - protein, 379 aa, Streptococcus mutans UA159
MSNLFQNYTRADLEFIKAEGNYLFDTQGKKYLDFSTGIGVTNLGFHPQVQVALQKQAEQIWHTPNLYQNSLQEEVAAKLMAGKDYLAFFCNSGAEANEAAIKIARKATGKQEIITFQNSFHGRTFGSMSATGQDKIKVGFGDAVPHFHYAVFNDLNSVKALVTENTAAVMLELVQGESGVLPAEQDFVTALADYCQKNGLLLIIDEVQTGMGRTGKLYAFQHYGIEPDIFTLAKGLANGVPVGAMLAKKQFGSAFGPGSHGSTFGGNKLAMAASSAVLDIMTKAGFLEQAWENAHYLQEQLTSALQVADTVTQVRGLGYMIGIETTADLGQLVKATRDRGLIVLTAGTNVIRLLPPLTLTKDEIDQGIMILQEVFEQHN

SEQ ID NO: 6883 - protein, 289 aa, Streptococcus oralis
MKGIILAGGSGTRLYPLTRAASKQLMPVYDKPMIYYPLSTLMLAGIKDILIISTPQDLPRFKDLLLDGSEFGIKLSYAEQPSPDGLAQAFLIGEEFIGDDSVALILGDNIYHGPGLSKMLQKAAKKEKGATVFGYQVKDPERFGVVEFDTDMNAISIEEKPENARSNYAVTGLYFYDNDVVEIAKQIKPSARGELEITDVNNAYLKRGDLSVEVMGRGFAWLDTGTHESLLEASQYIETVQRMQNVQVANLEEIAYRMGYISREDVLKLAQPLKKNEYGQYLLRLIGEI

SEQ ID NO: 6884 - protein, 349 aa, Staphylococcus sciuri
MNFNNKTKYGKIQEFLRSNNEPDYRIKQITNAIFKQRISRFEDMKVLPKLLREDLINNFGETVLNIKLLAEQNSEQVTKVLFEVSKNERVETVNMKYKAGWESFCISSQCGCNFGCKFCATGDIGLKKNLTVDEITDQVLYFHLLGHQIDSISFMGMGEALANRQVFDALDSFTDPNLFALSPRRLSISTIGIIPSIKKITQEYPQVNLTFSLHSPYSEERSKLMPINDRYPIDEVMNILDEHIRLTSRKVYIAYIMLPGVNDSLEHANEVVSLLKSRYKSGKLYHVNLIRYNPTISAPEMYGEANEGQVEAFYKVLKSAGIHVTIRSQFGIDIDAACGQLYGNYQNSQ

SEQ ID NO: 6885 - protein, 166 aa, Oryza sativa (japonica cultivar-group)
  unsure (1)..(166): unsure at all Xaa locations
MAAAAEEKNMKMIKVISSDGEAFEMTEAAASMSRILLHMIEDGCTGDGGAGITLPNVAGSALAKVIEYCTKHAIAAAEGSSSSRKAKEELKKFDVEFMEVGIDMLYDLIMAANFMGVEGLLSLAAQRTAELIKGKSPEQIREMFGIKNDHTPEEEEXIRKEYEWAF

SEQ ID NO: 6886 - protein, 426 aa, Chloroflexus aurantiacus [sequence omitted]

SEQ ID NO: 6887 - protein, 169 aa, Oryza sativa (japonica cultivar-group)
MAATADNGEKMIVLISSDGERFELSEAAASQSKTLSHMIEDDCTDNGVPLPNVTAVVLAKVVEYFKKHAAVTPKPATEAVAADKAKREEELKSFDAEFVDVDRTMLFELILAANFLNAQDLLDLTCQHAADLIKDMSVEEVREVFNITNDFTPEEEAEVRKENAWAFDN

SEQ ID NO: 6888 - protein, 276 aa, Zea mays
  unsure (1)..(276): unsure at all Xaa locations
MGFMDAEELVVTLAPVAVYWAYAGMYEALLARTTALDKYRLHSRRDEETKNIASRKDVVRGVLLQQCIQVAISVAVLKLEGHGHGHGHGHGAAADGLAAAPAEAEPFLVSAARFGVAMLVLDAWQYFMHRLMHSVPYMYRRFHSWHHRVAAPYAYAAQYGHPVDAVLTETLSGAAAYLASGMSPRVAAAFFVFATVKGVDDHCGVAXPWNPFHXAAFRNNTAYHDVHHQRGGGRRNFSQPFFVVWDRLLGTHAPYALRQRDGGGLEVKAFKGRQMQ

SEQ ID NO: 6889 - protein, 187 aa, Pyrobaculum aerophilum str. IM2
MRIRLATNNPYKLAEVSHILAPFCIEVERLDAEKVEIQHDDVVVIARKAAEFLCSRYGDFVVVDDTGLYIEALGGFPGPYAEYVYRTIGLKGVLKLLEGAADRRATFKCAAAICIGGRVEVFVGEVRGYIAHEPRGRGGFGYDPIFIPEGMTATYAELGEEVKNKISHRAKAFSQLGAWLTNRNLFK

SEQ ID NO: 6890 - protein, 496 aa, Eremothecium gossypii
MLRNVCRPAMRRSFHQTAWMSANKKHDVVVIGGGPGGYVAAIKAAQLGFDTACVEKRGRLGGTCLNVGCIPSKALLNNSHLLHQMQHDAKQRGIDVKGEVTVNMPQFQKAKDTVVKQLTGGIEMLFKKNGVTYYKGLGTFESESSIKVSPVEGLEGAVAEETILEAKNIIVATGSEVTPFPGITIDEERIVSSTGALSLKEVPKRLVVIGGGIIGLEMGSVYSRLGSKVTVIEFQPQIGATMDGEVASTTQKFLKKQGFDFHLWTKVLSAERNGYVVDIKAENVKTGKVESFQADVLLVAIGRRPYIEGLGAENIGLDVDKRGRLVIDEQFNTKFPHIKVIGDVTFGPMLAHKAEEEGIAAAEYIKHGHGHVNYGNIPSVMYSHPEVAWVGKTEEQLKEAGIAYKVGKFPFMANSRAKTNLDTEGFVKVLIDAETERLLGAHIIGPNAGEMIAEAGLALEYGASAEDIARTCHAHPTLSEAFKEANLAAFSKSINF

SEQ ID NO: 6891 - protein, 160 aa, Triticum aestivum
  unsure (1)..(160): unsure at all Xaa locations
MAPTVMASSATSVAPFQGLKSTAGLPVSRRSNGASLGSVSNGGRIRCMQVWPIEGIKKFETLSYLPPLSTEALLKQVDYLIRSKWVPCLEFNKVGFIFXVKHNASPGYYDGRYWTMWKXLPXFGXTDAXTXVINXVGGKVKKGVPWTPMFRNHRSTASRC

SEQ ID NO: 6892 - protein, 464 aa, Agrobacterium tumefaciens str. C58
MTMTAYDYDLFVIGGGSGGVRSGRVAASLGKRVGIAEEYRYGGTCVIRGCVPKKLFVYASQFPEYFEDAEGFGWSVGERRFDWKKLIAAKDKEITRLEGLYRKGLENAKADIFDSRAELVDAHTVKLTKTGETYTAERIVIAVGGTPNEHKALPGHELTISSNEAFDLEEPPKSILIAGGGYIAVEFANIFHGLGVETTLIYRGKEILSRFDHDMRKGLHEAMEAKGIRIILEDIIEEVSKDGAGGFVARTKQGSSLHVGLVMLALGRDPNTKGLGLENAGVKVDARGAIIVDDYSRTNVPSIFALGDVTDRVQLTPVAIHEAMCFIETEYKNNPTKPDHELIATAVFSQPEIGTVGLSEEEAGKKYRELEVYRAQFRPMKATLSGRQEKTIMKLIVNASDRRVVGVHILGHEAGEMAQLLGITLKAGCTKDDFDRTMAVHPTAAEELVTMYAPSYRVVNGERV

SEQ ID NO: 6893 - protein, 234 aa, Methanococcus maripaludis S2
MVSLDNAVIARLQSHGEKFEILVDPYLAAKFKEGQPIGISEILAAETVYKDSGKGEKVPEDVLLKIFETLNPLEIAEQILKKGTVQLTANQRKEIQELKRKQIVSIISKNTINPQTDTPHPPKRIENAMEEARLSVDIYKSAEEQIPKIIKELRKLLPIKFEKRDVAVKILGEFAANAYHTLHEYGATKQEEWLGDGSLVLVIEIPSGIENEFYMHLNKLTKGTVQTKVLKRYD

SEQ ID NO: 6894 - protein, 289 aa, Neisseria meningitidis MC58
MKPIRKAVFPVAGMGTRFLPATKASPKEMLPIVDKPLIQYAVEEAVEAGCTEMVFVTGRNKRSIEDHFDKAYELETELEMRHKDKLLEHVRNILPPNITCLYIRQAEALGLGHAVLCARAAIGDEPFAVILADDLIDAPKGALKQMVEVYGRSGNSILGVETVEASQTGSYGIVETEQLKQFQRITGIVEKPKPEDAPSNLAVVGRYILTPRIFDLLTNLPRGAGNEIQLTDGIAKLLDHEFVLAHPFEGTRYDCGSKLGYLEATVAYGLKHPETGEPFRRLLEKYRTE

SEQ ID NO: 6895 - protein, 204 aa, Schizosaccharomyces pombe
GPCKTVRHLNWLHCMLIFGLPMIAIYGVFTTPLQTKTLIFAIIYYAYSGLGITAGYHRLWSHRAYKAKKPLEYFLAAGGAAAFEGSIRWWSRDHRAHHRYTDTDKDPYNVKKGFWYAHVGWMIILQNPRRIGRSDVSDLNSDPFVMFNHRHFLPIASFMAFIFPSLFCGLLWGDYRGGYFYAGVCRLVFVHHATFCVNSLAHLI

SEQ ID NO: 6896 - protein, 392 aa, Schizosaccharomyces pombe
KTDDNEGYTWEGEYQRSWDIVQEDAEGSLVGVIAGLIQSGKRKRLLRDTTPLQRGIIRHMVLVLDLSNSMEERDFHHKRFDLQIKYASEFVLEFFEQNPISQLSIIGVMDGIAHRITDLHGNPQSHIQKLKSLRDCSGNFSLQNALEMARASLSHIASHGTREVLIIFGSILSSDPGDIFKTIDALVHDSIRVRIVGLAAEVAICKEICNKTNSSTKNAYGVVISEQHFRELLLESTIPPATDSAKTTDASLVMMGFPSKVVEQLPSLCACHSIPSRGGFHCPRCKAKVCTLPIECPSCSLVLILSTHLARSYHHLFPLKNWSEIPWSANPKSTHCFACQLPFPKPPVSPFDESTSSMRYACPSCKNHFCLDCDVFAHEQLHECYGCQCSGN

SEQ ID NO: 6897 - protein, 386 aa, Haemophilus influenzae Rd KW20
MSVIKMTDLDLAGKRVFIRADLNVPVKDGKVTSDARIRATIPTLKLALEKGAKVMVTSHLGRPTEGEFKPEDSLQPVVDYLKNAGFNVRLEQDYLNGVDVKDGEIVVLENVRVNKGEKKNDPELGKKYAALCDVFVMDAFGTAHRAQASTYGVAEFAPIACAGPLLAAELDALGKALKEPARPMVAIVGGSKVSTKLEVLNSLSKIADQIIVGGGIANTFIAAAGHNVGKSLYEADLIPVAKELAANTDIPVPVDVRVGLEFSETAAATEKVVNEVKDDESIFDIGDKSAEQLAEIIKNAKTVLWNGPVGVFEFPHFRKGTEIISHAIANSDAFSIAGGGDTLAAIDLFGIADKISYISTGGGAFLEFVEGKVLPAVEILEKRAKN

SEQ ID NO: 6898 - protein, 382 aa, Aspergillus oryzae
MATATVLEKANIGVYTNTNHDLWVAESKPTLEEVKSGESLKPGEVTVQVRSTGICGSDVHFWHAGCIGPMIVTGDHILGHESAGEVIAVASDVTHLKPGDRVAVEPNIPCHACEPCLTGRYNGCEKVLFLSTPPVDGLLRRYVNHPAVWCHKIGDMSYEDGALLEPLSVSLAAIERSGLRLGDPVLVTGAGPIGLITLLSARAAGATPIVITDIDEGRLAFAKSLVPDVITYKVQTNLSAEDNAAGIIDAFNDGQGSAPDALKPKLALECTGVESSVASAIWSVKFGGKVFVIGVGKNEMKIPFMRLSTQEIDLQYQYRYCNTWPRAIRLVRNGVISLKKLVTHRFLLEDALKAFETAADPKTGAIKVQIMSNEEDVKGASA

SEQ ID NO: 6899 - protein, 481 aa, Oryza sativa (japonica cultivar-group)
MTSAVLAGRNEVHHHHHHHWADARVPLMPKHATNPNPRRHHRPSPSIPPPPPPQRPPAATVAPSVPDPSPSGHVTIRPSELSRREAQVLRARLTGELSRVRALLSDIDGWEARRRRPAEPPRQRGHVSPPPALQAAMRKRCTQILTRLRKQKISVWFNSPVDVERLKLHDYHAIIRNPMDLGTVKENLAFGRYPSHEAFATDVRLTFSNALRYNPADHHVHRYASNLLATFEGLYKEALSWFEQECQRLEPPMPLALPPPPQPPVPMPMQAPPRIGGGGRRPKPKAREPNKREMSDEEKHKLRVEIGNLPEEKMGNVLQIVQKRNTDPALMGEVVELDFDEMDVETLWELDRFVVNCKKALSKSRRTVAMNGDAVDATAIVPTEDDTVQVNVHHQPSVVEIGDSENDTPEKRVSEVDMVDEYVDIGDEMPTANYQSVEIERDAQVASSSSGSDSGSSASSDSDSRSSGDSDSDGDDAQSPD

SEQ ID NO: 6900 - protein, 200 aa, Oryza sativa
MAAAAAAKTTTRRRRRGVLDLEAQFAFFRSQHRHPVNAAAHALLAWPILFTGLLVLHFLPSPPALPLDPALALALAYAAAYVAADRRAGALAGLLLAAGWAASRALAARLGFALAWKAALATQLFCWTWQFLGHGLFEKRGPAVGDLPEVFLMEPFLILLQILNKQFGYEPYPGFSKNVDKKMEAILRENREELKQRKAT

SEQ ID NO: 6901 - protein, 554 aa, Salmonella typhimurium LT2
MCSIFGVFDIKTDAAELRKKALELSRLMRHRGPDWSGIYACDNAILAHERLSIVDVNAGAQPLYNARKTHVLAVNGEIYNHQTLRAEYGDRYAFQTGSDCEVILALYQEKGPDFLDDLQGMFAFALYDSEKDAYLIGRDHIGIIPLYMGYDEFGNFYVASEMKALTPVCRTIKEFPAGSYLWSKDGEIRQYYQRDWFEFDAVKDNVTDKNALRQALEESVKSHLMSDVPYGVLLSGGLDSSVISAITKKFAARRVEDQERSEAWWPQLHSFAVGLEGSPDLKAAQEVANHLGTVHHEIHFTVQEGLDAIRDVIYHIETYDVTTIRASTPMYLMSRKIKAMGIKMVLSGEGSDEVFGGYLYFHKAPNAKELHEETVRKLQALHMYDCARANKAMSAWGVEARVPFLDKKFLDVAMRINPQDKMCGNGKMEKHVLRECFESYLPASVAWRQKEQFSDGVGYSWIDTLKEVAAKQISDQQLETARFRFPYNTPSSKEAYLYREIFEELFPVPSAAECVPGGPSVACSSAKAIEWDEAFKTMDDPSGRAVGVHQSAYQ

SEQ ID NO: 6902 - protein, 393 aa, Streptococcus mutans UA159
MAEKVSFEEGKLQVPDKPVIPYIEGDGVGQDIWKNAQIVFDKAIAKVYGGHKQVIWREVLAGKKAYNETGNWLPNETLEIIKTHLLAIKGPLETPVGGGIRSLNVALRQELDLFACVRPVRYFKGVPSPLKHPEKTAITIFRENTEDIYAGIEWNAGTAEVQKVINFLQDDMQVKKIRFPKSSSIGIKPISIEGSQRLIRAAIEYALANNLTKVTLVHKGNIQKFTEGGFRKWGYELAKREYAAELASGQLVVDDIIADNFLQQILLKPERFDVVALTNLNGDYASDALAAQVGGIGISPGANINYQTGHAIFEATHGTAPDIAGQDLANPSSVLLSGCMLFDYIGWSKVSDLIMKAVEKAIANGQVTIDFAKELGVEALTTRQFSEVLLTYL

SEQ ID NO: 6903 - protein, 289 aa, Neurospora crassa
MSQPMRTHLVFGIGEFVGTFMFLFFAFAGTQVANTAPANAAKLPSTSNLLYIAFAFGFSLMVNVWAFFRVTGGAFNPAVTLALVLVGGFPAVRAVIVIVAQILGATAAAGLVQVIFPGPLAVETTLGGGATVAQGFFIELFLTCELVFVILMMAVEKHQGTFVAPVAIGLALFLSELVGVYFTGGSLNPVRSLGPAIVNRHFPGYHWIYWLGPVLGALLACGFFKLLQALRYDDINSGADDDGRGDLEGARHAHQDGLKHTPTNLTQPLANGEAAALHNQPAQVPREEL

SEQ ID NO: 6904 - protein, 362 aa, Triticum aestivum
MLAESRSDAGATAACSRSSPTRGSWGPERVFDELTKALKDPADFVDFDLPSALKEWKLGYYIPIKRNVYLTKKRATDYCTCPPSPPPSGQPAPSGKDCQSGMLFSCCSSNCKCENDCANKSFQLRPLFKTKLIKTEKCGFGLIAEDEIKKGEFVIEYVGEVIDDRTCEERLWKMKRQRYTNFYLCEVSSNMVIDATNKGNKSRFINHSCEPNTEMQKWTVDGETRVGIFALRDIERGEELTYDYKFVQFGADQDCHCGSSNCRKMVGTSKSVNSFVLHNGNSASSQDQHDMKKRKTTSDNCIGEIIRLWDRRDKMYVPAVVHDYDEYTGMHTLLLDEETTENFDMREEDWDFLPRPEDPEED

SEQ ID NO: 6905 - protein, 198 aa, Gossypium hirsutum
GQNPLFPRILGHEAGGVVESVGEGVTDVEPGDHVLPIFTGECKECPHCLSEASNMCDLLRINTERGGMLHDGQTRFSKDGKPIYHFLGTSTFSEYTVVHVGQVAKINPEAPLDKVCVLSCGMSTGFGATVNVAKPKKGGSVAVFGLGAVGLAAAEGARVCEASRIIGIDLNPNRFEEAKKFGCTEFVNPKDHNKPVQE

SEQ ID NO: 6906 - protein, 451 aa, Candida albicans SC5314
MVMTNSPQNIGIKGIEVYIPGQAVNQSDLEKFDGIPQGKYTIGLGQTNMAFVNDREDIYSISLTVLSRLIKNYSIDTNKIGRLEVGTETLLDKSKSVKSVLMQLFPGNNDIEGIDTVNACYGGTSSVINAINWIESSSWDGRDAIVVAGDIAIYDKGAARPTGGVGAIALLIGPDAPIVFDSIRGSFMEHAYDFYKPDFTSEYPVVDGHFSLSCYVKAVDNCYKNYSKKITGDANKTVGVYDHFDFSAFHVPTCKLVTKSYARLLYNDYVSNPSKFADLIDETTRKHIDGLTYDESLTDKILEKTFVGLAKDETKKRVQPALQVPTNTGNMYTASAWVSLASLLYYVGSDNLKNKRISIFSYGSGLASTLLSVTVKGDVSAITKVLDFDYKLGDGRKIQSPEDYLAAIELREKAHLQKSFKPQGSTDNLSQGTYYLTEIDDKFRRAYAIKE

SEQ ID NO: 6907 - protein, 374 aa, Vibrio parahaemolyticus RIMD 2210633
MNQNKPPFIWLNILIFSASFVLTFIVMPWYAYHYGLGWEHLIWGILAFSFTNLSITAGYHRLWSHKTYEAHPVLRAIFAIGGAFSLQNSALHWSSDHRVHHKHVDNNDKDPYSAKRGFWYSHIGWMLRDYNKSKENEYTNCRDLKRDSIVMWQHNYYVPLALLTNIGFPVALGLIYGDVWGMLLVVGAARLFLSHHTTFFINSLAHVWGKQTFTDKNTARDNGVLAFFTFGEGYHNFHHIFENDYRNGVYWWHYDPTKWLIKSCSWLGLTSKLRTTSTFRIEKARATQLLKKAKEKLESKPNAQTVLDQLQQEFDALVHHMQEYYEARKELLGEKTANVVKKYECSVSKLKYQQLKTEFERQQRSWNLMIRRYA

SEQ ID NO: 6908 - protein, 198 aa, Gossypium hirsutum
GQNPLFPRILGHEAEGVVESVGEGVIDVQPGDHVLPIFTGECKECPHCLSEASNMCDLLRINTERGGMLHDGHTRFSKDGKPIYHFLGTSTFSKYTVVHVGQVAKINPEAPLDKVCVLSCEMSTGFGATVNVAKPKKGGSVAIFGLGAVGLAAAEGARVCEASRIIGIDLNPNRSEEAKKFGCTEFVNPKDHNKPVQE

SEQ ID NO: 6909 - protein, 224 aa, Oryza sativa
  unsure (1)..(224): unsure at all Xaa locations
MSRRYDSRMTIFSPEGRLYQVQYAMEAIGNAGSALCVLAADGVVLVGEKKVTSKLLQTSCSAEKMYKIDSHLACAVAGIMSDANILFNTGRLHAQRYILSYQEPIPVEQLIQSLCHTKQGYTQFGGLRPFGVSFLFGRWDKHHGFQLYMSDPXYSGWKAAAVGANSQATKSMLKQLLPLPSPRHPSPAADALLPPAKSEKGERDEEGRKEGKGKRERELADVAA

SEQ ID NO: 6910 - protein, 198 aa, Gossypium hirsutum
GQNPLFPRILGHEAGGVVESVGKGVIDVQPGDHVLPIFTGECKECPHCLSEASNMCDLLRINTERGGMLHDGHTRFSKDGKPIYHFLGTSTFSKYTVVHVGQVAKINPEAPLDKVCVLSCEMSTGFGATVNVAKPKKGGFVAVFGLGAVGLAAAEGARVCEASRIIGIDLNPNRSEEAKKFGCTEFVNLKDHNKPIQE

SEQ ID NO: 6911 - protein, 437 aa, Oryza sativa
  unsure (1)..(437): unsure at all Xaa locations
VLFISNHMRRAAPAVITSVRARQILDGRGEPAVEVSLHTNKAVHRASAAAADAPEGAAADAVRDAEKRKPVARAVGDXSLVGTDPRRRPLFDRASMDLDRAHRQAGIGTNSMLAVRFAXIQACAYQMQLLLQVHMKKRFGKSATSLPIPAITVINGATHAGNSLPIQEIMILPVGAKNFEEAMQMGSETYHHLKDIILEKYGSNSCNIGDDGGFAPNISSITEGLDLVIEAINRAGYNGRIKLAIDVAATDFCMGNKYDMEFKFAEKSGQGFKTADDLIEIYSQLCSEYPLVSIEQPFDKDDWEHSKKFTTLELCQVVGDDLLMSDPERIKRAVNEYTCNALVLKANQVGTVTEAIEVVRQAKDAHWGVMVSHRSGDTDDSFIADLAVGAAAGQIKAGAPCRGECLSKYNQLLRIEEELGSDGVYAGENWRTTASTS

SEQ ID NO: 6912 - protein, 97 aa, Mycoplasma capricolum
  unsure (1)..(97): unsure at all Xaa locations
FGTAHRSHASNXGXXSNIKISAXGFLVEKELKMLSQAVNDSKKPFIAILGGAKVSDKIGVIENLLPKVDKLLIGGGMSYTFLKAQGRSIGKSLLEED

SEQ ID NO: 6913 - protein, 273 aa, Xanthomonas axonopodis pv. citri str. 306
MSRQLVGELISEAVAMFIIIALGDSVAAMYILYDPSPYQNAYWGVCIAWGLAVTLAIYVTGSVSGTHANPAVTLALALFRGFSWKKVLPYWVAQVIGAFLGAAIVYQLYGPVIDHFNQLHQLTREAGGAAGVFFTAPGLAVTPMHALVDQIIITAFLIFGIFAITEQFNEAAPTANSGALMIGLLVATLGASMGYLEAWAMNPARDFGPRLFAYFAGWGEAALPAKDNYWWIPIVGPLIGGPIGALAYQWLILPFLPARVRHLQGGPKPLDPL

SEQ ID NO: 6914 - protein, 291 aa, Streptomyces galilaeus
MKGIILAGGSGTRLHPITVSVSKQLLPVGDKPMIYYPLSVLMLADIREILLICTERDLEQFRRLLGDGSQLGLRIDYAVQNRPAGLADAFVIGADHVGDDDVALVLGDNIFHGHHFYDLLQSNVRDVQGCVLFGYPVEDPERYGVGETDASGQLVSLEEKPLRPRSDLAITGLYLYDNEVVDIAKNLRPSARGELEITDVNRNYLARGRARLVDLGRGFAWLDAGTPESLLQATQYVRTLEERQGVRIACVEEVAVRMGFIDADMCHRLGEQMSQSGYGRYVMAVAREFSG

SEQ ID NO: 6915 - protein, 358 aa, Xanthomonas axonopodis pv. citri str. 306
MSQSKPLFPLNAWYAVAWDHEIKHVLSPRKLCNLDVVVYRTTSGAVVALEDACWHRLVPLSMGKLRGDDVVCGYHGLVYNTQGRCVHMPSQDTINPSACVRSFPVAEKHRYVWIWPGDPAKADTRLIPDLHWSHDPAWAGDGRTIHAKCDYRLVLDNLMDLTHETFVHGSSIGQDEVAEAPFDVVHGDRSVVVSRWMRNIDPPPFWASQIARHLDYRGKVDRWQIIRFEAPSTIAIDVGVAITGTGAPEGDRSQGVNGYVLNTITPETDTTCHYFWAFMRNYALHDQSLTTLTRAGVTGVFGEDEAVLEAQQRAIDAHPDHTFYNLNVDAGGMWARRVIDRLIAQEQRAQDLSLRMVG

SEQ ID NO: 6916 - protein, 513 aa, Methanococcus maripaludis S2
MCSISGIIAKDEEGSGSRSLLKNIQKHVINMMKILKHRGPDYSGMMFDDEVLYFENFDDITENTETISRMAMGHNRLAIVGTAVQPIPNTDESIWIICNGEIYNHVELRDELSVDHEFKTDTDSEAIIHTYEDELVDVLDGDYAYAIYDKEKNIIELRRDLMGVKPLYYIDTDEYFAFASEKKALYGLLMEINEMDYKSAFNYDISRLNPNSRLIYELDENSWYIEEDLEKVNPDYFEENDYELCKNELETTILDSVLKRVKGLERVGIIYSGGVDSTLVSKLASENCDVTLYSVGSANSEDLIYAERAAKDMGLKFRKKIILEDEFEEYVIKVAKAIDELDVMKLSVGIPIFAASEMAKEDGIKVVLSGQGADELFAGYNRYQRILNEKGEEGLKKSIISDVFDIHKVNLERDDHCTMANGVELRVPFLDKFVIDVGLSIPVEYKIEEPRKKILRDIASKYVPDYIAQRPKKAAQYGSGSEKMVYAVAKKHGYSKKEINKFFEEYLIEKIKF

SEQ ID NO: 6917 - protein, 540 aa, Mycobacterium bovis AF2122/97
MQIVGQTALDAINSPVQTLTGRPLIGNGANGVAGTGQNGGDGGWLYGNGGNGGSGGTGQNGGNGGSAGLWGSGGNGGQGGAGANGAAGQPGKAGGSGGNGGAGGWIYGHGGHGGAGGNGGNATAPGGASAGFDGGAGGNGGSGGRGGLLFGNGGNGSVGGMGGQGTNDTAGDSAGSGGLGGNGGNGAQGGWLIGNGGQGGDSGAGGGTDSTQTGVMNGASGGSAGIAGNGGDAGLVGNGGAGGNGGNGAAGSALGTTIFGGSGGVGGSGGDGGNGGWLFGSGASGGNGGQGGDAGTNGFAGFGGSAGGGGWVGAVNFGPISVQGFGLFGHGGDGGNGGDVGAGSLSIQFGASGGDGGQGGVLYGNGGNGGNAGSGGGTGFEGSAGQGGAAILIGNGGAGGNGATGGTGVGNIIQEAGGDGSDGGAGGSGGLLFGSGGAGGIGGAGGVGGSGNDGGNGGDGGQGGASGLGIGNGGPGGSGGTGGAGGTGGSAGTGGAGGDGGNAALLIGTGGDGGDGVPPAPGGQGGKGGLIGLPGQNGQP

SEQ ID NO: 6918 - protein, 567 aa, Zea mays
GRTGRARAAVSVPPPAGEQVPTERLEPRVEERAGGYWVLKEKYRAGLNPQEKVKLEKEPMALFMEGGIQDLARVPMEQIDAAKLTKDDVDVRLKWLGLFHRRKHQYGRFMMRLKLPNGVTTSEQTRYLASVIEAYGADGCADVTTRQNWQIRGVTLPDVPAILDGLRAVGLTSLQSGMDNVRNPVGNPLAGVDPHEIVDTRPYTNLLSSYVTNNSQGNPTITNLPRKWNVCVIGSHDLYEHPHINDLAYMPAVKDGEFGFNLLVGGFISPKRWAEALPLDAWVAGDDVVPVCKAILEAYRDLGSRGNRQKTRMMWLIDELGMEVFRSEVEKRMPNGVLERAAPEDLVDKRWERRDYLGVHPQKQEGLSYVGLHVPVGRLQAADMFELARLADEYGTGELRLTVEQNIVLPNVSNERLDALLAEPLLQEQRLSPRPSMLLRGLVACTGNQFCGQAIIETKARALQVAREVEKRVAVPRPVRMHWTGCPNSCGQVQVADIGFMGCLTKDSDGKIVEAADIFVGGRVGSDSHLADVYRKSVPCKDLVPIVADLLVERFGAVPREREEDEE

SEQ ID NO: 6919 - protein, 176 aa, Hevea brasiliensis
MASQSEPKSVYDFTVKDARGNDVDLSTYKGKVLLIVNVASQCGLTNSNYTELTQLYQKYKDQGLEILAFPCNQFGSQEPGTNEQIVEFACTRFKAEYPIFDKVDVNGNNAAPLYKFLKSSKGGIFGDNIKWNFSKFLVDKDGNVVDRYAPTTVPSQHREGCEETAGDCMSAQGRPN

SEQ ID NO: 6920 - protein, 473 aa, Rubrobacter xylanophilus DSM 9941
MRVADKFDLVIIGGGNAGYIPAIRASQLGMSVALVERREGGHLGGTCLNLGCIPTKALLQTAAMLHDARNGEEFGVKVGDVRFDYRQAAKRRDQVVNQLRRGVAGLMKKNKVSVYNGTGSFIQPRRIKVELNDGGTEELEAENVLIATGSAVNTLPGLEFDGEKVISSDDVVTENDGYPESVIILGSGAVGVEFASMYNDFGTEVTIVEILDRLVPLEDPEVSAELEKQFEGRGIRCLTGTKADPGSLDKSGDGVKIKVAGEGGEETLEAEKLLVAVGRKTVTEELNLEATSVKTDDRGIIQVDEFYRTDEPGVYAAGDVIGGYWLAHAAGHEGIVAVEHMAGKDPMPLDQNLIPRVTFCRPEIASFGLSEEQAREEGYEIKVGKFPFRAIGKALIEGEPNGFLKVVADAETDLILGMHAIGPHVTELIAEGVFAKLVEGTPEEIGMAVHAHPSLAEIVGEAAMAVDGHAIHF

SEQ ID NO: 6921 - protein, 280 aa, Streptococcus mutans UA159
METVVLSNGVKMPILGFGVFQVPDLEECERVVTEAIKVGYRLLDTAQVYGNEEAVGNAVRKSGLAREEFFITTKVWISNAGYEKAKASLDESLRKLQTDYVDLVLIHQPFGDYYGTWSALEAYYKSGKIKAIGVSNFYPDRLVDLASFNEIVPMVNQVETHVFNQQIEAKKVSEEYGVQLESWGPFAEGKNNFFTNPTLTAIGEKYGKSAAQVGLRYLIQRGVVVIPKTVHQERMVQNFDVFGFNLSDDDMADILKLDQGESLFINHYDPETVKFLANYK

SEQ ID NO: 6922 - protein, 288 aa, Streptococcus mutans UA159
MEYITLNTGVKMPMEGFGVFQVTDPEICKESVLNAIKTGYRLFDTAAVYGNEKALGEAIHEAIEQGLVTRNELFITSKLWVQDMNYEAAKKGIERSLEKLGLDYLDLYLLHQAMRDYFGAYRALEEAYQAGKLRAIGVSNFYPNILTNFCETVSVIPAVNQIELHPFFTQEEALETARYYGVVPEAWAPLGGGRYDAFNNAILQEVASAHQKTVGQIMLRWNVQRGVVVIPKSTHKERIEENFAIWDFSLTDDEMTKIASLDMGYGDTRTKHFDPNFVRSVLNVKIHD

SEQ ID NO: 6923 - protein, 248 aa, Triticum aestivum
  unsure (1)..(248): unsure at all Xaa locations
MEVSLDFSWETPSFFELCDADSMHLPAEDSLSCLYEDSMSSPEGASSGLTRRWAGRNMLNERDRRMRLNEKLYAIRGVVPNITXMDKASIIQDAIAYIEELQXSRSARFSPAPRTDGGAAVVQADSTVDDGIGSPPRKIRRTTSASSMCSPPRKIRRTTPATHPVQILELEVTQVAEDLAVVNVRHRKVQEAMAKVYGVLESLCLNVITASVTVVADNIVHNMFIETDGIDCAQTIKEMVQSHSVISM

SEQ ID NO: 6924 - protein, 156 aa, Glycine max
  unsure (1)..(156): unsure at all Xaa locations
ANLKISCSAVTAVHRANASMIAPFTGLKSMAGCPLAKTANHITSIASNGGRXHCMHVWPPLVKMKFETISYLPDHDDAQLAKEIEYLLTIGWIPYFEFELEHGIAYREHDMSPRYYQRRYWYTLTCQFLTALIATTVSYELXQARTEYSIGYIRII

SEQ ID NO: 6925 - protein, 400 aa, Chlorobium tepidum TLS
MSVESFERFLSRRVLSMQESQTMKITGLAKKMQAEGKDVVSLSAGEPDFPTPENVCEAGIEAIRKGFTRYTANSGIPELKKAIIRKLQRDNGLEYAEDEIIVSNGGKQALANTFLALCDEGDEVIVPAPYWVSFPEMARLAEATPVIVETSIETGYKMTPEQLAAAITPKTRILVLNSPSNPSGAVYNEAEVRALMQVIEGKEIFVLSDEMYDMICYGGVRPFSPARIPEMKPWVIVSNGTSKSYSMTGWRIGYLAAPKWIINACDKIQSQTTSNANSIAQKAAVAALDGDQSIVEQRRAEFEKRRDFMFRELNTISGIECTLPEGAFYIFPSIKGLLGKTFGGKVMKDSTDVAEYLLTEHYVATVPGDAFGAPENLRLSYAASIEELAEAVNRIRKAFS

SEQ ID NO: 6926 - protein, 394 aa, Mesorhizobium loti MAFF303099
MLHTISAFDRLGEENAFAVLARATALAQQGRDIVNLGIGQPDFKTPQHIVEAAIKALRDGHHGYTPANGLLATREAVVRRTLTTTGVEVSPEAVMILPGGKPTMFAAILMFGEPGAEILYPDPGFPIYRSMIEFTGAAPIPVPMREENGFAFSAEETLALITSKTRLLILNSPANPTGGVTPRAEIEKLVKGLEKHPDVAILSDEIYDAMTYDGETHCSLLGYPEIRDRLIVLNGWSKTWAMTGWRMGWSIWPNGDRGAHLYDKVRKLAVNCWSCVNAPSQFAGIAAIDGPQDDVDTMMRAFDRRRKVVVEGLNALPNISCITPKGAFYAFPNVSKTGWKAKKLASALLDDAGVALIGGPDFGILGEGYVRLSYANSEENILRALERIGAFLSK

SEQ ID NO: 6927 - protein, 224 aa, Gossypium hirsutum
MAFVSEEEKTEDYLFKIVLVGDSAVGKSNLLARFARNEFYPNSKSTIGVEFQTQKLDINGKEVKAQIWDTAGQERFRAVTSAYYRGAVGALLVYDISRRQTFDSIGRWLNELQTHSDMNVVTILVGNKSDLRDAREVSTAEGKALAEAQGLFFMETSALDSSNVAAAFQTVVKEIYNILSRKVMMSHELKKQDAPLDGKTVVLQGDENQERATESPKSGGCCSS

SEQ ID NO: 6928 - protein, 324 aa, Zea mays
MDPKFPTPLALNKTEPTTATTTTTSTAQHHQLDPKDYQQQTAQHQEQQQHHHHPHLQIQIHQPPPPPQDGGGGVKEQQQLLQVVAQPGDRRQQALAPKRSSNKDRHTKVDGRGRRIRMPALCAARIFQLTRELGHKSDGETVQWLLQQAEPAIVAATGTGTIPASALASVAPSLPSPTSGLARPHHHHPHHMWAPSAGFSSPSFLNSAGAGDGTGIGGIMQRMGVPAGLELPGGGAAGGHIGFAPMFAGHAAAMPGLELGLSQDGHIGVLAAQSISQFYHQVGAAAGGSGQMQHPHGHQHHHHQQQEDGEDDREDGESDDESGQ

SEQ ID NO: 6929 - protein, 551 aa, Escherichia coli CFT073
MLMKNINPTQTAAWQALQKHFDEMKDVTIADLFAKDGDRFSKFSATFDDQMLVDYSKNRITEETLAKLQDLAKECDLAGAIKSMFSGEKINRTENRAVLHVALRNRSNTPILVDGKDVMPEVNAVLEKMKTFSEAIISGEWKGYTGKAITDVVNIGIGGSDLGPYMVTEALRPYKNHLNMHFVSNVDGTHIAEVLKKVNPETTLFLVASKTFTTQETMTNAHSARDWFLKAAGDEKHVAKHFAALSTNAKAVGEFGIDTANMFEFWDWVGGRYSLWSAIGLSIVLSIGFDNFVELLSGAHAMDKHFSTTPAEKNLPVLLALIGIWYNNFFGAETEAILPYDQYMHRFAAYFQQGNMESNGKYVDRNGKVVDYQTGPIIWGEPGTNGQHAFYQLIHQGTKMVPCDFIAPAITHNPLSDHHQKLLSNFFAQTEALAFGKSREVVEQEYRDQGKDPATLDYVVPFKVFEGNRPTNSILLREITPFSLGALIALYEHKIFTQGVILNIFTFDQWGVELGKQLANRILPELKDDKEISSHDSSTNGLINRYKAWRG

SEQ ID NO: 6930 - protein, 198 aa, Gossypium hirsutum
GQNPLFPRILGHEAEGVVESVGKGVIDVQPGDHVLPIFTGECKECPHCLSEASNMCDLLRINTERGGMLHDGHTRFSKDGKPIYHFLGTSTFSKYTVVHVGQVAKINPEAPLDKVCVLSCEMSTGFGATVNVAKPKKGGSVAIFGLGAVGLAAAEGARVCEASRIIGIDLNPNRFEEAKKFGCTEFVNPKDHNKPVQE

SEQ ID NO: 6931 - protein, 198 aa, Gossypium hirsutum
GQNPLFPRILGHEAEGVVESVGEGVIDVQPGDHVVPIFTGECKECPHCLSEASNMCDLLRINTERGGMLHDGHTRFSKDGKPIYHFLGTSTFSEYTVVHVGQVAKINPEAPLDKVCVLSCGMSTGFGATVNVAKPKKGGSVAIFGLGAVGLAAAEGARVCEASRIIGIDLNPNRFEEAKKFGCTEFVNPKDHNKPVQE

SEQ ID NO: 6932 - protein, 289 aa, Streptococcus mitis
MKGIILAGGSGTRLYPLTRAASKQLMPVYDKPMIYYPLSTLMLAGIKDILIISTPQDLPRFKDLLLDGSEFGIKLSYAEQPSPDGLAQAFLIGEEFIGDDSVALILGDNIYHGPGLSKMLQKAAKKEKGATVFGYQVKDPERFGVVEFDTDMNAISIEEKPENPRSNYAVTGLYFYDNDVVEIAKQIKPSARGELEITDVNNAYLKRGDLSVEVMGRGFAWLDTGTHESLLEASQYIETVQRMQNVQVANLEEIAYRMGYISREDVLKLAQPLKKNEYGQYLLRLIGEI

SEQ ID NO: 6933 - protein, 546 aa, Salmonella typhimurium LT2
MAIHNRAGQPAQQSDLINVAQLTAQYYVLKPEAGNAEHAVKFGTSGHRGSAGRHSFNEPHILAIAQAIAEERAKNGITGPCYVGKDTHALSEPAFISVLEVLAANGVDVIVQENNGFTPTPAVSNAILVHNKKGGPLADGIVITPSHNPPEDGGIKYNPPNGGPADTNVTKVVEDRANALLAGGLQGVKRISLDAAMASGHVKAVDLVQPFVEGLADIVDMAAIQKAGLTLGVDPLGGSGIEYWKRIAEHYKLNLTLVNDQVDQTFRFMHLDKDGAIRMDCSSECAMAGLLALRDKFDLAFANDPDYDRHGIVTPAGLMNPNHYLAVAINYLFQHRPLWGKDVAVGKTLVSSAMIDRVVNDLGRKLVEVPVGFKWFVDGLFDGSFGFGGEESAGASFLRFDGTPWSTDKDGIIMCLLAAEITAVTGKNPQEHYNELAARFGAPSYNRLQASATSAQKAALSKLSPEMVSASTLAGDPITARLTAAPGNGASIGGLKVMTDNGWFAARPSGTEDAYKIYCESFLGEEHRKQIEKEAVEIVSEVLKNA

SEQ ID NO: 6934 - protein, 422 aa, Sinorhizobium meliloti
MTSLTDRKNAAISRGVGMTTQVYADRAENAEIWDKEGNRYIDFAAGIAVVNTGHRHPKVIAAVKAQLDRFTHTCHQVVPYENYVHLAERLNAIVPGDFAKKTIFVTTGAEAVENAVKIARAATGRQAVVAFGGGFHGRTFMGMALTGKVVPYKVGFGAMPADVFHAPFPIELHGVTVEQSLSALKKLFAADVDPARVAAIIIEPVQGEGGFYPVPTAFMKALREVCDQHGILLIADEVQTGFARTGKLFAMEHHGVAPDLTTMAKSLAGGFPLAAVTGRAEIMDAPGPGGLGGTYGGNPLGIAAAHAVLDVIAEENLCERANQLGNRLKQRLAAIREKAPEIVDIRGPGFMNAVEFNDVRTNLPSAEFANKVRLLALEKGLILLTCGVHGNVIRFLAPITIQDEVFAEALDTIEASILEARG

SEQ ID NO: 6935 - protein, 198 aa, Gossypium hirsutum
GQNPLFPRILGHEAEGVVESVGKGVIDVQPGDHVLPIFTGECRECPHCLSEASNMCDLLRINTERGGMLHDGHTRFSKDGKPIYHFLGTSTFSKYTVVHVGQVAKINPEAPLDKVCVLSCEMSTGFGATVNVAKPKKGGSVAIFGLGAVGLAAAEGARVCEASRIIGIDLNPNRFEEAKKFGCTEFVNPKDHNKPVQE

SEQ ID NO: 6936 - protein, 75 aa, Oryza sativa
  unsure (1)..(75): unsure at all Xaa locations
SRHTQCVLLDDAGMPTEYRHMDGWVRNTYTLATRDAEGRNSKSHWKPTCRVRXSMDDQATLVXQDDDRHATHDLY

SEQ ID NO: 6937 - protein, 267 aa, Phaeodactylum tricornutum
AQFVGMCGDVVKDVPKAQALFDQASEILGYDLLQVCVDGPKEKLDSTVVSQPAIFVASMAAVEKLRQEQGDDAINAATCAMGLSLGEYSALCFADAISFADGVKITKARGEAMQAAADAVDSGMVSVIGLDKEKVAELCAMASEKSGERIQIANFLCSGNYAVSGSSKACEAVNELAKPEFKARMTVKLAVAGAFHTDFMKPAVASLEKVLADVEIQKPRIPVISNVDAKPHSDPETIKKLLATQVTSPVLWENTMDLMLSSGFEKA

SEQ ID NO: 6938 - protein, 289 aa, Raoultella terrigena
MKGIVLAGGSGTRLYPITQGVSKQLLPIYDKPMIYYPVSVLMLAGIRDILIISTPEDMPAFQRLLGDGSQFGVNFSYAIQPSPDGLAQAFIIGEEFIGNDSCALVLGDNIYFGQSFGKKLEAAASKTSGATVFGYQVLDPERFGVVEFDENFRALSIEEKPLKPKSNWAVTGLYFYDNDVVEMAKEVKPSARGELEITTLNQMYLERGDLQVELLGRGFAWLDTGTHDSLMEASQFIHTIEKRQGMKVACLEEVAFRNKWLSAEGVEAQAERLKKTEYGAYLKRLLNER

SEQ ID NO: 6939 - protein, 198 aa, Gossypium hirsutum
GQNPLFPRILGHEAEGVVESVGEGVIDVQPGDHVLPIFTGECRECPHCLSEASNMCDLLRINTERGGMLHDGHTRFSKDGKPIYHFLGTSTFSEYTVVHVGQVAKINPEAPLDKVCVLSCGMSTGFGATVNVAKPKKGGSVAIFGLGAVGLAAAEGARVCEASRIIGIDLNPNRFEEAKKFGCTEFVNPKDHNKPVQE

SEQ ID NO: 6940 - protein, 226 aa, Mallomonas rasilis
AQTVGMAGPICEELPAARELFDKASSILGYDLLKKCVEGPKEELDSTVYINTYYFTSSIIGVIKLKATDPTAIDSCTVAMGLSLGEYSALCFAGAFSFEDGVKLTKARGEAMQAASDACSSGMVAVVGLDVATVEKICTEAAAKSGKPVQIANYLVDGNYAVSGAIEACDAVREIAPGFGARMAVPLSVAGAFHTSFMEPAVQRLQAVLKEVDIKPPRIPVISNVD

SEQ ID NO: 6941 - protein, 412 aa, Oryza sativa
  unsure (1)..(412): unsure at all Xaa locations
MARHHGNHSLLPEMVQPNNEQLNQPLPLGQKLFVHAGNDAALKIGPSYHGNVAIRSNDLPSSSRVAQYSGHRVKNTGTLHNSYVHYPAGSSGGHVSYNPQTEPVITYPHRSEGEFARGSSQIDNRTAAVKRKNPVIYPEYSINGDGYCAGSSSSTQFSNYPQPAPFSESLHRQMPPSVGPINWNDQSLVNQEGSQRNVRARHNFNNISLEPRPVHSTSNVSQSTSMKRNGPSFSTRXSTPMRASQPLPVRAVASSRHARNVLIGHANSGRNRRARSSYYGIQPLMIDAQQLIMMQQFALRESREAQDPHRAMRLDIDNMSYEDLLALGESIGNVCTGLVDEKISGCVREVIYCSSDEQQNDQDDGKCAICLEEYKDNSLLGILKCNHDFHTDCVKKWLKEKNSCPICKSAAA

SEQ ID NO: 6942 - protein, 229 aa, Hemiselmis virescens
AQYVGMAGQLVQDVPKAKELFDKAADVLGYDLLKICVEGPKEKLDSTAYSQPAIYVSSLAAVERLRQDAGDEAIDKATVAAGLSLGEYTALCFAGAISFEDGLKVVKVRGEAMQAASEAQESGMVSIIGLDVDVIKQVCEKASEMTGSKIQIANYLCPGNYAVSGAKDACAKVAEIAKPEFKARMTVPLAVAGAFHTDFMQPAVPALEKALSEIEIKKPRIPVISNVDA

SEQ ID NO: 6943 - protein, 258 aa, Manihot esculenta
MVTAHFVLIHTICHGAWIWHKLKPALERAGHKVTALDMAASGIDPRQIEQINSFDEYSEPLLTFLEKLPQGEKVIIVGESCAGLNIAIAADRYVDKIAAGVFHNSLLPDTVHSPSYTVEKLLESLPDWRDTEYFTFTNITGETITTMKLGFVLLRENLFTKCTDGEYELAKMVMRKGSLFQNVLAQRPKFTEKGYGSIKKVYIWTDQDKVFLPDFQRWQIANYKPDKAYQVQGGDHKLQLTKTEEVAHILQEVADAYA

SEQ ID NO: 6944 - protein, 1123 aa, Oryza sativa
MTIDLSMPGSSGLLDDVGGKKHMNFFSNRYVLALTGAAGIGGFLFGYDTGVISGALLYIRDDFPAVRDNYFLQTIVSMALVGAIIGAAGGGWINDTYGRRKSTLVADMLFALGSLVMCAAGGPYILILGRLLVGLGVGIASVTAPVYIAEAAPSEIRGGLVSTNVLMITGGQFFSYLINLGFTEVPGTWRWMLGVAAVPAILQFVLMLFLPESPRWLFWKDEKAKAISVLEKIYDSDRLEEEVELLASSSMHEFQSDGTGSYLDIFKSKELRLAFFAGAGLQAFQQFTGINTVMYYSPTIVQMAGFTSNKLALLLSLIVAGMNAAGTIVGIYLIDRCGRRRLALTSLAGVVVSLAILAMAFILQSSSDICSNALNGACQGALGWFAVAGLALYIAFFSPGMGPVPWAVNSEIYPEAYRGMCGGMSATVNWVSNLIVAQTFLSIVGLVGTGLTFLIIAGIAVLAFIFVALYVPETKGLSFEQVELLWKERAWGNQGNRQSLLGAAPYIGWVKNQVVLVSNLVYMGRTAQLSKGRIGSPSPSEMSATASPASALPFRAGKSGVFRPGPTVRRRVRVCPFPAQLAQPRPIGRDHRPPPSRSAGVRRASRATPPLLTSHDRDALRPRPRPTPTRRTSRTARTIRRPLAFRATEQVVSASYWFKFQGNNLLVQALGLLALQAYLPSLHPPPCNIEAELSNCEEVHGFNTVILHIGLYTWAFSEGCIRACTPSLGADQFDHEDPSESRQQSSFFNWFTFGISLGGFIGLILIVWLENYKGWDIGFGVCALLILLGLLIVATGLPFYRNQVPEGSPLTRILQVLVVAFKNRKYELPEKLEEAQENRNGLDSIEVPRPTNFLKFLDKASINHGEDGAWSVCSTMKVEETKIVLRMLPLFISSMIGYISNPLLLTFTVQQGSMTNTRLGKIHISPATLFVIPITFQMLMLAVYDRFLVPFMRKRTGYACGITHLQRVGLGFASMIVASAVAAVVERKRKEAAVQMSLFWLAPQFFLLGVSDVTSFVGLLEFFNSEAPKDMKSIGTALFWCELGLASWMGTFLVELVNKATRHGHHRGWLEGTSLNNSHLDLFYWVVAVIGLLGFLNYLYWAKKYAYRHNPRMVTPSADQDSP

SEQ ID NO: 6945 - protein, 373 aa, Zea mays
  unsure (1)..(373): unsure at all Xaa locations
LEAGREISIQTRVLPVPSPPSPYSSSAPGPAMAAPSGTMRAVQYDRYGGGAQGLKHVEVPIPSPKKGEVLIRMEATSINAVDWKFQNGFARPFMPRRFPFISGFDLAGEVVELGAGVSSFKPGDKVIAINFPNGGGLAEYAVASASRTAARPPEVSAVEGVCVPIAAVTALRSLRTAGVTVTLDDPARAPATPKNVLVTAASXGAVGHFAVQLARMGGHNVTATCGARNLGLVRSLGADEALDYKTPEGARLRSPSGRKYDAAVHCAAKGLPWSVFRPVLAASGTVVDITPGFVAVVTAILQVATFSKKRLVPLMVTPKKEEMELLLGMLKQGRLKTVIDSRHPLGSAHEGWAKSMSGHATGKVVIEIGAAQP

SEQ ID NO: 6946 - protein, 464 aa, Synechococcus sp. PCC 7942
MNLRTIRAELQQFLQLAIPLAAAQVAQAAVGFVDTVMMGRLGPEPLAAGGLASALFQFILATASGVVMAVSPLVAEAQGAGKDYKIAAIARQGLWLSVLLGLPVMLIISQLARLMPVLGQSATTIALARDYWMAVLWGIIPGLGFAMLRGYVAALEQARIILPLVLFGTLVNGLGNYLLGYGQLGFPRLELTGLGLSSALGLWVMFLGLLAYTAWQPKLRRYPFWQDWRRLQPSICRQILQLGWAIAVTVAVEFGLFTIITILMGAIGVEALAAHQTVSQTIILIFMVPLGCSFAVTVRVGWWLGRQDGLGARRAGLVGVGAIALWMLLLAIPLALFPRAIVGIYVDLNNPVNAGLLNLALPMLRVASLALVLDGVQRVAMGALHGLQDTRIPLLLSLLAFWMVGVGSSAMLGFQLGWGSTGLWIGQSLGVAIAGGLFLQRFLKLTQNRTFKQRLQPQPLATHP

SEQ ID NO: 6947 - protein, 252 aa, Prunus emarginata
AHYKYEADVGNAIAEAIRSGLVKREELFITSKASNHGHVVEACKDSLKKLQLDYLDLYLVHYPLATKHSGVGTTASLLDKNKVLDIDVTVSLESTWHDMEKTVSLGLVRSIGLSNYELFLTRDCLSYAKIKPQVNQFETHPYFQRASLVKFCWKHGVCPMAHTPLGGATANVKSFGSISPLDDPVLQGLAKKYKKSVAQIALRWNIDRNTPVIPKSSKIQRLKENLEVLTFKLEKEDIELINSIDKKSRTTL

SEQ ID NO: 6948 - protein, 368 aa, Anabaena variabilis ATCC 29413
MPKAAVMSAPNQPVVVQQLPDPILEKGGIIVETLYSEVCGTDVHLLHGRLEGVPYPIIPGHFSVGRVVETGGAVSDVNSNLIQPGAIATFLDVHETCYNCWYCLVAKASTRCPQRKVYGVTYSAKEGLLGGWSELIYLKPGVKVLTLPAEVSPKQFIAGGCALPTALHAIDRAQIQIGDVVVVQGCGPVGLSVAILALLSGAGKVIVIDKFESRLAVAKSFGVDETLAIKADDPRQHIERVLELTNGHGADVIIEATGIPIAVKEGLNMTRNGGRYVIVGHYTNTGEILINPHLEINLKHIDIRGTWGIDFSHFYRMIELLKRHSDPKKNIAWENLISRSYTLNEINQALTDVERGSVLKAVIQPNLS

SEQ ID NO: 6949 - protein, 314 aa, Anabaena variabilis ATCC 29413
MASPTLRANRTFQERGVWGEVIEFTLIYLKKIRGAAMLGDLKIAFIGGGTMGEMIISRLLSTKTVEKSELIIVSEPYSTRCLYLEKEYGVHTTNCNIEAVQGASIVILAVKPQVLPEVMAVLKDQIPPDALVISIVGGASVSSLCQGLNHGAVVRTMPNIAVQVGHGTTVWSASSNVTEIQRSHTQIILQALGKEFVTQNEHYLDMATALSSAGTGFVFLYIEAMIDAGVQMGLTRIQAQELTLHTIAGSVELMLQTNEHPAVLRNKVTSPGGVTAAGIYELEKGGMRTSISNAFSTALSRTQQLGNISCSISG

SEQ ID NO: 6950 - protein, 252 aa, Prunus emarginata
AHYKSEADVGNAIAEAIRSGLVKREELFITSKASNHGHVVEACKNSLEKLQLDYLDLYLVHYPLATKHSGVGTTASLLDENKVLDIDVTVSLESTWHDMEKTVSLGLVRSIGLSNYELFLTRDCLSYAKIKPQVSQFETHPYFQRESLVRFCKKHGVTPMAHTPLGGATANVKSFGSISPLEDPVLLGLAKKYKKSVAQIALRWNIERDTPVIPKSSKVERLKENLEVLNFKLEKEDIELINTIDKKSRTTL

SEQ ID NO: 6951 - protein, 509 aa, Zea mays
MAYPAAPHTSAAFLASFATPLPARCASPPTRRRAVSAAAIATTTTCVFADAPRGIKEEQADSGAQAAAAAAARRDVSPDTVASIILGGGAGTRLFPLTRTRAKPAVPVGGCYRLIDIPMSNCINSKINKIYVLTQFNSQSLNRHIARTYNFGEGVGFSGGSVEVLAATQTAGESGKKWFQGTADAVRQFLWLFEDARLKCIENILILSGDHLYRMDYMDFVQKHVDSGADISVACVPMDESRASDFGLMKADRNGHITDFLEKPKGADLESMQVDMGLFGLSPEFASTYKYMASMGIYVFKADVLRKLLRGHYPTANDFGLEVIPMAAKDYDVQAYLFDGYWEDIGTIKSFFEANLALTDQSPNFYFYDPVKPIFTSPRFLPPTKVLNSIVSHGCFLTECSVEHSVIGIRSRLEPGVQLKDTMMMGADYYQTEAERLSELSVGKVPVGVGENTKIRNCIIDKNARIGKNVVIMNSENVQEADRPAEGYYIRSGITVVLKNAVILNGTKI

SEQ ID NO: 6952 - protein, 150 aa, Triticum aestivum
  unsure (1)..(150): unsure at all Xaa locations
MAAAVARAIVCEAAPQRAAPPSQQKQQTRRDKILLQPRLSTLRSYGADGSGAVTRKRLPGEALEEGGVGGAPPFFASLADYIESSRKSQDFETISGRLAMVAFAAAVASAXRRIGQMLTLGCNSFVDGLIDNVVDVLFSDDQMQDWSDDV

SEQ ID NO: 6953 - protein, 600 aa, Zea mays
MGSMTIGAKYKTTIKDPGTPGILRMNGDRFTFTPNDPRSAMKFNVDFRTIKGHKFNKVEGNKAALLNLSKEDKAGGYIFEFDNVGNRDQCRDFVARVLGKHQGIVPPRPTVAPENSVASAALEQLSAAEVERRVKLLREDSELQKLHKKFVLGNILQESEFWATRKNLLDDEANKRSKQKPGFKSALVDIRPTTDGRTNKVTFQITPEMIHQIFAEKPAVRRAYLDFVPKKMSETRFWEKYCRAEYLVRTKNTAAATAEAAGNEELAIFLKNDDILAKEAKLKIKRVDPTLDMEADTGDDYIHLPDHGIHRDGSKETVDADSELARRTLSQDLNRHAAVVLEGRSLDVESSDPKTLAEALARSKKEPPSTSNVDDDNHERLMKVARMTEIEDLQAPRSLLYAPLCIKDPREYFDSQQANALRSLGGSNGGRKAHSCSLSTEEVFHHLMDQMSSVKVNRLNCPIVQSDMALKVLNELNEGISRSRRLNLKNPQEGLLGQLPQHTRDELMDHWTAIQELLRHFWSSYPITSAVLYNKVQRVKEAMTQIYQKLQLIKELAQPDVRHEISRLVKPMTQALDAAFNHDLEQQQKSSKAGNRHNGF

SEQ ID NO: 6954 - protein, 479 aa, Rubrobacter xylanophilus DSM 9941
METGVKSLKNFIGGRFVEPASGELYDVVNPSTGEVFARAPMSGEEDVDRAFGAAAKAFEEWRESTPSERQRALLRIADRIEERAEELVRAECENTGKPYALTLEDEIPPMADQIRFFAGAARCLEGKSAGEYMRGMTSYIRREPVGVCAQVTPWNYPMMMAVWKFAPAVAAGNTVVLKPSDTTPVSTLLLAEIAAEFLPEGVFNVVCGDRDTGRLLVRHEVPQMVAITGSVRAGMEVAEAAAKDLKRVHLELGGKAPVIVFDDADPEAAAEAIAEAGYFNAGQDCTAATRVLAAPGVHDDFVAALTERARSTRTGPPDDEEAYYGPLNNENQLRRVSGIIERLPDHAEVVAGGGRVGERGYFYAPTVVSGLRQDDEASQTEIFGPVITVQPFSDEDEAVRWANGVRYGLASSVWTRDHGRAMRVSRRLDFGCVWINTHIPLVAEMPHGGFKHSGYGKDLSMYGLEDYTRIKHVMSNIEA

SEQ ID NO: 6955 - protein, 302 aa, Malus xiaojinensis
MSSGTCSTVEPAGAGEIMLFGVRLVVDSMRKSVSLNNLSQYEHPQEAASNNGNNGTAAGKDDAAPGYASENDVVHNSGGNRERERKRGVPWTEEEHKLFLLGLQKAGKGDWRGISRNFVKTRTPTQVASHAQKYYLRRSNLNRRRRRSSLFDITTDTVAPTPMDEEQVQHQDNISQSQLHPLPPPPPSEPRDAGGFSMVPNFARTVGPAVLPVHIENPMENLALRQANPENSTSAKLVHPVALHSAPHATAISDLNLNSTTDASTLTLNLSLSMDSREPSSRHSAFETMQGFSNGDSMISVA

SEQ ID NO: 6956 - protein, 798 aa, Agrobacterium tumefaciens str. C58
MRPIKDILETMEYGPSPEANGDVKQWLDAHGRSFGHYINGRFVSPDGRKTIAVSNPANGDKLAEIVCGNEEDVDQAIKAARAAFGKWSKLSGHARARYLYAIARHIQKRERFLSVLETMDNGKPVRETRDIDIPLVARHFYHHAGWAEMVEDEFHGFSPVGVCGQVIPWNFPLLMLAWKIAPALAAGNTVVLKPADLTPLTAIAFAEICHEVGLPAGVVNIVQGDGSTGAAICGHDGVDKVAFTGSTKVGRVIREQIAGSGKKLSLELGGKSPFIVFEDADLDAAVEGVVDAIWFNQGEVCCAGSRLLVQEGIAEKFYARLKKRLETLRVGDPLDKSTDVGAIVSATQVKRITDLVRKGVEEGGELWQSSNPLPPTGNYVAPGFFTDVDQASTVCQVEIFGPIAAATTFRTPDEAVSLANNTRYGLAASIWSENINVALDLAARVKAGVVWINCTNMLDAGAGFGGYRESGFGREGAREGLYEYLAADWEKNLSVSKPAEAFAPSALPNADSKKAIDGLDRTMKNYIGGKQARPDGGYSYSVTGKGNAVIGMAGIGNRKDIRNAVEAASKAGSWSSATAHNRAQVLYYLAENLNARRDEFVARIIDSTGVSEKKARDEFDASLRRISYYAAQADKFDGAIHSTKSRHVTLAMNEPWGIVGIVCPDEAPLLSLVSLVLPAIAMGNRVVVIPSSRHPLIAGDFYQVLDTSDVPGGVINIVTGERDMLAKTLAEHDDVAAIWYFGSAVGSAMVERASAGNLKAAWVNNGRQPDWLDRTQWQGRDYLRRAIQVKNIWVPYGA

SEQ ID NO: 6957 - protein, 440 aa, ASPERGILLUS NIDULANS FGSC A4
MKVTITPALVLALSTLALTAPVEREVRSLETRDLSVDARHLGKLPVVKHKFGIEGGVKGGFGLGKKGKEDDKKDDKKGGKWDDDKKDDDDWDDDHWDNDDWDDDKKDDKKDDDKKDDDKKDDNGNSGGFGFGVGSSNGFDSKNPKGKPDYDPHHGKGPEGKPGYIVDHKHDDKKDDKNGGFLRARGEPKKDDDKHGGYKPDDKKDDHDHGYGYGKGDDKYDDKYDDKKDDKKDDKGKGKGFGFGFGFGAGVHGGGKGGGKGFGFGLGHGKGYGHGKGEDEGKGKGGGFGFGLGLGLGGKGSHGGHGGYGGGEGGNGGNGGGFGGGGGGGGGGGFGGGSGGFGGGEGGFGGGSGGHGGHEGGHGGHGGHEGGHGGNGGGFGGGGGGGGGGFGGGEGGFGGHGGGEGGHGGGHGGGFGGGFEGGFEGKGGYEGKGGYGKGGY

SEQ ID NO: 6958 - protein, 163 aa, Oryza sativa
  unsure (1)..(163): unsure at all Xaa locations
ILNDAIRVMAKLRSEAQKLKESNESLXEKIKELKAENNELRDEKQKLKAEKESVEQQINVVNAGASFVHHLAVILASAFAEPQGPMAGQDKITPGTVFAACPHVAVSPAPRVLRTATATCHRSCPSRSPSSSSSPALCIAMAVCRRPPLQQLDALRRPATDSI

SEQ ID NO: 6959 - protein, 261 aa, Neurospora crassa
MPQNEYIERAQKLHGKRLDTEERARKKAAREGHKQSENAQNLRGLRAKLFAKERHAQKIQMRKAIKQHEERNVKGAPEEKDPSNPVPAYLLDRSNPTSAKALSSQIKSKRAEKAARFSVPIPKVKGISEEELFKVVKTGKKVHKKGWKRVVTKPTFVGPDFTRRPVKYERFIRPMGLRYKKANVTHPTLNVTVQLPILGVKKNPSNPLYTQLGVLSKGTIIEVNVSDLGMVTASGKIAWGRYAQITNNPENDGCLNAVLLV

SEQ ID NO: 6960 - protein, 246 aa, Lycopersicon esculentum
MGRGRVELKRIENKINRQVTFAKRRNGLLKKAYELSVLCDAEVALLVFSNRGKLYEFCSTNNMLKTLDRYQKCSYGTLEVNRSIKDNEQSSYREYLKLKAKYESLQRYQRHLLGDELGPLTIDDLEHLEVQLDTSLKHIRSTRTQMMLDQLSDLQTKEKLWNEANKVLERKMEEIYAENNMQQAWGGGEQSLNYGQQQHPQSQGFFQPLECNSSLQIGYDPITTSSQITAVTNAQNVNGMIPGWML

SEQ ID NO: 6961 - protein, 484 aa, Oryza sativa (japonica cultivar-group)
MANIRALLIGLVRARGSLVDIGRCVSSSRPSYLASLGRHYKVPMEIRWLSSTGFPPHLVVGMPALSPTMNQGNIAKWRKQEGEKIEVGDVICEIETDKATLEFESLEEGYLAKILAPEGSKDVQVGQPIAVTVEDLEDIKNIPADASFGGEQKEQSIASEAQKVETDAAKESSIITRISPAAKLLIKEHRLDQSVLNASGPRGTLLKGDVLAALKLGASSSSTKQKNAPAAPSSQPTHDFQAQSVTIPQQNDAYEDIPNSQIRKVIAKRLLESKQTTPHLYLSQDVILDPLLAFRNELKEQHGVKVSVNDIVIKAVALALRNVPEANAYWNNDKEQAQKCVSVDISIAVATEKGLMTPIIRNADQKTISAISSEVKQLAEKARAGKLAPNEFQGGTFSISNLGMYPVDHFCAIINPPQSGILAVGRGNKIIEPVVDSDGTEKATVVTKMSLTLSADHRVFDGQVGGKFFTELSQNFGDIRRLLL

SEQ ID NO: 6962 - protein, 176 aa, Zea mays
  unsure (1)..(176): unsure at all Xaa locations
MHASGAISYRKEKNKKDTAVAPFQGLKSTASLPIARRSSRSLGNVSNGGRIRCMQVWPAYGNKKFETLSYLPPLSTDDLLKQVDYLLRNGWIPCLEFSKVGFVYXENSTSPCYYDXPYWAMWKLPMFGCNDATQVYKELQEAIKSYPDAFHRVIGFDNIKQTQCVSFIAYKPPGSD

SEQ ID NO: 6963 - protein, 326 aa, Oryza sativa
MASAAVPEWLNKGDNAWQMLSATLVALQGFPGLALFYVGAVPRKWALTSAFMALYAMAATMPCWALWAHNMAFGRRLLPFVGRPAPALAQDYMLSQALLPSTLHLRSNGEVETAAVAPLYPSASMVFFQWAFAGVTVGLVAGAVLGRMSVKAWMAFVPLWTTLSYTVGAYSIWGGGFLFHWGVMDYSGGYVVLLAAGVSGYTAAYWVGPRRKEEDEEEMATASGGNLVVMVAGAGILWMGWTGFNGGDPFSANTDSSVAVLNTHICATTSIVAWVCCDVAVRGRPSVVGAVQGMITGLVCITPRSNIKYSFLLVVISDEMPVPDLS

SEQ ID NO: 6964 - protein, 292 aa, Vibrio parahaemolyticus RIMD 2210633
MIKKCLFPAAGYGTRFLPATKSMPKEMMPVVNKPLIEYGVEEAIEAGMNGMCIVTGRGKHSLMDHFDKNYELEHQISGTSKEALLDDIRSLIDSASYTYIRQREMKGLGHAILTGRELVGDEPFAVVLADDLCVNEEQGVLAQMVELYKQFRCSIVAVQEVPETETHKYGVIAGEMIKDDIFRIDNMVEKPEPGTAPSNLAIIGRYILTPDIFELIENTEPGKGGEIQITDALMQQAQSGCVIAYKFKGQRFDCGSVEGYIEATNYCYENLYKKASSAELAKTPTVKVSEPA

SEQ ID NO: 6965 - protein, 708 aa, Brucella suis 1330
MNRHTPISNIRIGHSACPHDCPSTCALDVELLDERMIGRVRGSKDNSYTAGVICAKVARYAERVHHPDRLKHPLVRAGGKGEGLWKEASWQAALDLIAERFERAEREYGSETVWPFFYAGTMGLVQRDSIQRLRHAKGYSNQFDSYCTNTAWTGYFAGTGSLTGPDPREMAKADCVVIWGTNAAATQVNVMTHAVRARKERGAKIVAIDVYANATVRQADMGIVLKPGTDGAFACAVMHVLFRDGLADRDYLQRYTDDPKGLEAHLQPRTPQWAAPITGLSVGEIEAFAHLVGRTKRTYFRLGYGFTRQRNGAVNMHAAASIACVTGAFQYEGGGAFHSNSGIFRMDKREIEGRAFQKNGIRYLDQSKIGRILTGDSEALYGGPPVTAMLIQNTNPMNVTPEQRLVRKGFAREDLFVAVHEQFMTDTARMADVLLPATTFLEHDDIYRGGGQQHVVPGPKLIEPHADARPNIFVINELAKRLGVGHLPGFELDERTLIDHMNANSALPDFDTLKEKRFVDLQPSFEEAHYLNGFKWPDGKFRFRPDWLGSPSPNKPPEAMGLQGPYQTIPEFPDHWEVIEAADAEHPFRLTTSPAHNFLNSTFAETPTSTAKEIRPELLIHPDDAEALGIADGDRIEIGNHRGEVVLHAVLHAGQKRGVVVSEGLFPNSAFERGEGINTLVGAQSPAPYGGLAVHDTKIWIKAYPARA

SEQ ID NO: 6966 - protein, 260 aa, Glycine max
  unsure (1)..(260): unsure at all Xaa locations
SLNKYHIKAMELSFTQGRWNYERWGGFDSISSHNAKPPGVELWAVFDVPLHQVDASWKNLTHSLSGLFCASINFLESSTSYSDPEWAFQSALGSLRYGTLPREAVCTENLTPWLKLLPCRDKAGLSSLMDRPSIYKSFYHSQQLHLTMSTDPSDGSRSGIIXEQTLTVVLQPNDQKAGMSHLSKTKIQPSWSLSSIFGRKISGRCVLAKLSNVYLHAERSLVNQLENLQKNTVKFAANDTGLEDFRGMLGSLLSFFRSRT

SEQ ID NO: 6967 - protein, 475 aa, Synechococcus sp. PCC 7942
MYEKIQPPSEGSKIRFEAGKPIVPDNPIIPFIRGDGTGVDIWPATERVLDAAVAKAYGGQRKITWFKVYAGDEACDLYGTYQYLPEDTLTAIREYGVAIKGPLTTPIGGGIRSLNVALRQIFDLYACVRPCRYYTGTPSPHRTPEQLDVVVYRENTEDIYLGIEWKQGDPTGDRLIKLLNEDFIPNSPSLGKKQIRLDSGIGIKPISKTGSQRLIRRAIEHALRLEGRKRHVTLVHKGNIMKFTEGAFRDWGYELATTEFRTDCVTERESWILANQESKPDLSLEDNARLIEPGYDAMTPEKQAAVVAEVKAVLDSIGATHGNGQWKSKVLVDDRIADSIFQQIQTRPGEYSVLATMNLNGDYISDAAAAVVGGLGMAPGANIGDEAAIFEATHGTAPKHAGLDRINPGSVILSGVMMLEYLGWQEAADLITKGISQAIANREVTYDLARLMEPAVDQPLKCSEFAEAIVKHFDD

SEQ ID NO: 6968 - protein, 614 aa, Haemophilus somnus 129PT
MAEMHPILWSRISDRRLANPDTVSVNVLSTFEHRSFELADLGILLKPQSDLAILNYIANYLIENNAINREFIEKHTKFKRGETDIGYGLRPQDPREQIAKNVKTAGKMYDSSFEEFKKLVAPYTLEKAHEISGVPKEQLEKLAKLYADPNKKVVSYWTMGINQHTRGVWANHLIYNIHLLTGKISLPGCGPFSLTGQPSACGTAREVGTFIHRLPADLVVTKPEHRKIAEKIWKLPEGLISDKLGFHAVAQSRALKDGKMQVLWQMCNNNMQAGPNINEETYPGWRNPDNFIVVSDPYPTVSALSADLILPTAMWVEKEGAYGNAERRTQFWRQQVKAPGEAKSDLWQLVEFSKYFTTDEVWPAEILAKNPAYQGKTLYEVLYLNGQVNQYSNDELKGRLNDEAYHFGFYIQKGLFEEYASFGRGHGHDLADFDTYHKARGLRWPVVDGKETLWRYREGYDPYVKAGEGVSFYGQADKRAVILAVPYEPPAEVPDREYDLWLTTGRILEHWHTGSMTRRVPELHRSFPNNLVWMNPNDAKKRGLKHGDKIKVISRRGEITSYIDTRGRNKCPEGLIYTTFFDAGQLANKLILDATDPISKETDFKKCAVKVVKA

SEQ ID NO: 6969 - protein, 650 aa, Anabaena variabilis ATCC 29413
MVKSAPPPTTGRKPSKVEGLKENSNFLREPVATQILEDTTHFTEDAVQILKFHGSYQQDNRDNRTKGQEKDYQFMLRTKNPGGLVPPQLYLALDKLADEYGNHTLRATTRQGFQMHGILKKNLKAAIATIVKNLGSTLGACGDINRNVMAPPAPFKKRAEYQYAWEYAQNIADLLSPQTGAYYEIWLDGEKAISAEESPEVKAARQSNGNGTIIHDTEEPLYGTYYMPRKFKVSVTVPGDNSIDLYSQDLTLVVLTDKKGNLEGFNIFAGGGLGRTHNKEETFARLADPIGYVAKEDVYNAVKAIVATQRDYGDRTDRRHARLKYLINDWGVDKFRAKVEEYFGKPIAPFKQLPEFKYHDFLGWHEQGDGNLFLGISIDNGRVKDEGSFQLKTALREIVEQFNLPIRLTPNQNLIFYEITPENKPAIQAILDRCGVVSDPTTIEPLVRYAMACPALPTCGLAITESERAIPGILERIRTLLDKVGLQNEHFVVRMTGCPNGCARPYMAELGFVGSAPESYQVWLGGSPNQTRLAQPYVEKLHDNDIESFLEPIFVYFRKSRKSGESFGDFCDRVGFDGIREFVAQYQPETTPVTIEPEQPEAVSKSRKARYRVSLHDDLYNKVKATATSQGRSMTDLVKDALEAYFQSLS

SEQ ID NO: 6970 - protein, 516 aa, Zea mays
  unsure (1)..(516): unsure at all Xaa locations
MMIARRLLRSNAPAQASSLLKHVTGTASLQGHADSPLDASVRHFSSAPSAQSDTTEENGFKGHGMLAPFTAGWQSNDLHPLIIERSEGSYVYDINGNKYLDSLAGLWXTALGGSEPRLVKAATEQLNKLPFYHSFWNRTTRPSLDLAQEILSMFTAREXMGKVFFTNSGSEANDSQVKLVWYYDNALXGRPDKKKFIARSKAYHGSTLISASLTGLPALHQKFDLPAPFVLHTDCPHYWRYHLPGETEEEFATRLATNLENLILKEXLETIAAFIAEPVMGAGGVIPPPKTYFDKVQAVVKKYDILFIADEVITAFGRLGTMFGCDYYNIKPDLVSLAKALSNAYVPIGATLVSPEISEVIHSQSNKLGSFAHGFTXMVIPVACAVAIEALKLYRERDIPGHVKQIAPKFQDGIRALADSPIIGEIRGLGMIMGTEFTNNKSPADLFPAEWGVGAIFGEECQKRGMLVRVAGDAIMMSPTLIMTPXEVDELVSIYGEALRATEERVSDLKMKSEKN

SEQ ID NO: 6971 - protein, 286 aa, Rhizobium sp. NGR234
MKGIILAGGSGTRLHPMTLVMSKQILPVYDKPMIFYPLTTLMLAGIREILIISTPHHMPLFQALLGDGSQWGISLRYAVQPSPNGLAQAYVIGADFVAGSPSCLILGDNIYFGHGLQGLLQQAAALQQGATIFAYHVNDPERYGVVEFDEGMNALSIEEKPAAPKSTWAVTGLYFYDSEVVDIAANLKPSARGEYEITDVNRIYLERGKLKVAVLGRGYAWLDTGTPDSLLEAAEFVRTLEKRQAFKVACPEEVALAMGFISVEEFARIAERAGKGDYGAYLRRLA

SEQ ID NO: 6972 - protein, 313 aa, Triticum aestivum
  unsure (1)..(313): unsure at all Xaa locations
MAIKKVFARSVYDSRGNPTVEVDVVTETGLHRAIVPSGASTGQHEACELRDGDKSKWNGKGVTKAVENVNTVIAPALIEKNLDVKDQSAVDAFLNELDGTTNKTKLGANAILGVSLAVAKAGAAEKGVPLYAHVSDLAGTKKPYVLPVPFMNVLNGGSHAGGRLAFQEFMIVPTDAPTFSEALRQGXAEVYQALKGLAKKRYGQSAGNVGDEGXVLPPDIQTAEEALELITDAIEQAGYTGQMKIAMDVASSEFYKESEKKYDLDFKNPESDPPKWITYEELANMYSELCKKVPIVSIEDPFAEDNWEAWSYF

SEQ ID NO: 6973 - protein, 302 aa, Lactobacillus gasseri
MKVRKAVIPAAGLGTRFLPATKAMPKEMVPIVDKPTIQFIVEEAKKSGIEDILIVTGKNKRSIEDHFDANPELEQDLEEKGKTELLHLTQSITNLGVNLYYTRQPHPAGLGDAILRARSFVGDEPFAVMLGDDLMDDKVPLTKQLIDRYDKTHASTIAVMPVPHEEVSKYGVIDPDNEIEPGLINVKAFVEKPDVDKAPSDYAIIGRYLLTPEIFDILAHQKPGRGGEIQLTDAIDTMNKTQRVFAHVFNGERHDVGNKEGYLETSIEYGLSHPQIKDDLRKYIIAMGQKLQNEDKKTNKKK

SEQ ID NO: 6974 - protein, 343 aa, ASPERGILLUS NIDULANS FGSC A4
MPINQPSNQIKFTNVSVVRLKKGKKRFELACYKNKLLEYRSGAEKDLDNVLQVPTIFLSVSKAQTAPAAELIKAFGPDTPADEIRQEILRKGEVQVGERERKEIAERIEKEVLDIVSGRLIDPTTKRVYTPGMISKALDQLTAASGQMQQQQSAAQTGENGAGDEDAAAPRQQKKPLWTGVNPNKSAKSLALEAMKALIAWQPIPVMRARMRLRVTCPVSLLKQSVKSAAPAGSNNKEKESQSGGGGSKNKKGGKGKKSARRGDDTDSEGESAPVQPKGPSNVKDKILSFIESIESQEIASDEWEVVGFAEPGAFKGLNEFVGNETRGRGRVEVLDMAVTYED

SEQ ID NO: 6975 - protein, 194 aa, Caulobacter crescentus CB15
MGAKLVAATHNPGKVPEIAALLDGRFEIVTAGQLGLPEPDETESTFVGNALLKARHAADLSGLPALADDSGLSVTALDGAPGIFSARWAGPGKDFALAMKKVEERLEETASDDRTAWFTSALAVAWPNGPAVVVEGRVDGTLVFPGRGTRGFGYDPIFVPEGHALTFGEMEPAAKDAMSHRARAFAKLKAALFD

SEQ ID NO: 6976 - protein, 537 aa, Neurospora crassa
MGLSIGNRILRKIVKNEAMAEDPPEIYGWRVYLLACSACFGAMSFGWDSSVIGGVIELEPFKHDFGFIGNDKAKANLGANIVSTLQAGCFLGALIASPITDRFGRKWCLIAVSLVVIIGIIMQAAASGNLAPMYIGRFVAGVGVGAASCINPVFVSENAPRSIRGLLTGLYQLFIVTGGMIAFWINYSVSLHFKGKSMYIFPLAIQGLPAGLLCVCMLLCHESPRWLARRDRWEECKSVLARIRNLPPDHPYIVDEFREIQDQLEQERRLQGDATYWDLTRDMWTVAGNRKRALISIFLMICQQMTGTNAINTYAPTIFKNLGITGTSTSLFSTGIYGIVKVVSCVIFLLFLADSLGRRRSLLWTSIAQGLAMFYIGLYVRISPPIDGQPVPPAGYVALVCIFLFAAFFQFGWGPACWIYASEIPAARLRSLNVSYAAATQWLFNFVVARAVPTMLVTVGPHGYGTYLIFGSFCLSMFVFVWFFVPETKGISLEHMDELFGVTDGPAAEKSSVHGGDDVGSEMGKGDQKSKHVEVYV

SEQ ID NO: 6977 - protein, 299 aa, Kineococcus radiotolerans SRS30216
MRFERWGGPDVLHVVDVPSPAPGAGEVRVTVRAAGVTAAESAAREGALAQLYPTAFPAGTGVEFAGVVTGTGPGVESVAVGEEVLGWSPERGGHADVVVVPAEAVVPKPEGVSWEVAGALYVTGVTAYSCVESAGVRDGDRVLVLGATSDVGTLAVQLARLCGATVVGVADPADHAWLHAHGADAVAPTDDVEGLARLLRVRGTRVDAVVDTTGVDLEPLTRALGVLPARAVAAPPVEADLEFGPHPARCPEVLAELAALVAADRLHVPIAGSFPLSRVQEAFAMAERPHPQGRIVLLP

SEQ ID NO: 6978 - protein, 314 aa, Desulfovibrio desulfuricans G20
MTTAKTAILFPGQGAQQTGMGRDVAEADKDVMDLWKKAESISGLPLREIYWDGDAQAMADTRNLQPALTVVNISLWMQVAGRMQPAAAAGHSLGEYAAVAASGALSAADTIELVSLRGRLMAEADPEGRGTMAAVLKLPLTDVESVVRETAEATGEMILIANYNTPAQFVLSGTAAAIADAAARVKERRGRAMPLAVSGAFHSPMMQQAADELARVMDKRHWNNMKFPVYCNATGLPVQNGDSLRSVMKGQMAGSVRWIETIGNQWNDGVRRWVELGPKNILGKMLQPILTQCGAADGEWSTSTASTREETGTL

SEQ ID NO: 6979 - protein, 198 aa, Gossypium hirsutum
GQNPLFPRILGHEAEGVVESVGEGVIDVQPGDHVLPIFTGECKECPHCLSEASNMCDLLRINTERGGMLHDGHTRFSKDGKPIYHFLGTSTFSEYTVVHVGQVAKINPEAPLDKVCVLSCGMSTGFGATVNVAKPKKGGSVAIFGLGAVGLAAAEGARVCEASRIIGIDLNPNRFEEAKKFGCTEFVNPKDHNKPVQE

SEQ ID NO: 6980 - protein, 93 aa, Fragaria x ananassa
WESHIWDNGKQVYLGGFDTAHSAARAYDRAAIKFRGTEADINFSVGDYDEDIKQMSNYTKEEFVQILRRQSTGFARGSSKYRGVTLHKCGHWE

SEQ ID NO: 6981 - protein, 301 aa, Mesorhizobium loti MAFF303099
MKRVRKAVFPVAGLGTRFLPATKAVPKEMLTVVDRPVIQYVVDEAREAGIEHFIFVTGRNKAVIEDHFDIQFELYDTLAQRGKDEQLARLQRLQPAPGQTSFTRQQVPMGLGHAVWCARELVGDEPFALLLPDMIMQSEKSCMKSMVELYEETGNNIIAVQECDPAEAHKYGIVGRGEDTHHGFRITEMVEKPKTGTAPSNLYINGRYILQPEIFKILEGQEKGAGNEIQLTDAMLKLEKQQAFYGYHYQGRTFDCGSPEGFVEANVAFALWRSDMKENMAGVIRTLLDEMTPSERRVAVS

SEQ ID NO: 6982 - protein, 198 aa, Gossypium hirsutum
GQNPLFPRILGHEAGGVVESVGKGVIDVQPGDHVLPIFTGECKECPHCLSEASNMCDLLRINTERGGMLHDGHTRFSKDGKPIYHFLGTSTFSKYTVVHVGQVAKINPEAPLDKVCVLSCEMSTGFGATVNVAKPKKGGFVAVFGLGAVGLAAAEGARVCEASRIIGIDLNPNRSEEAKKFGCTEFVNPKDHNKPIQE

SEQ ID NO: 6983 - protein, 506 aa, Pseudomonas aeruginosa PAO1
MIYAAPGTPGAVVTFKPRYGNYIGGEFVPPVKGQYFTNTSPVNGQPIAEFPRSTAEDIDKALDAAHAAAEAWGRTSVQERSNILLKIADRIEQNLELLAVTETWDNGKAVRETLNADIPLAADHFRYFAGCIRAQEGSAAEINDSTVAYHIHEPLGVVGQIIPWNFPLLMAAWKLAPALAAGNCVVLKPAEQTPLGICVLLELIGDLLPPGVLNVVQGFGREAGEALATSKRIAKIAFTGSTPVGSHILKCAAENIIPSTVELGGKSPNIYFEDIMQAEPAFIEKAAEGLVLAFFNQGEVCTCPSRALVQESIYPAFMEEVLKKVRAIKRGDPLDTETMVGAQASQQQYEKILSYLDIAQQEGAELLAGGSVEKLEGNLASGYYIQPTLLKGHNGMRVFQEEIFGPVVGVTTFKDEAEALAIANDTEYGLGAGLWTRDINRAYRMGRGIKAGRVWTNCYHLYPAHAAFGGYKKSGVGRETHKMMLDHYQQTKNLLVSYDINPLGFF

SEQ ID NO: 6984 - protein, 291 aa, Glycine max
  unsure (1)..(291): unsure at all Xaa locations
MAKAHQIVLGSNWGIRNIFQSLVAILTTILVVAAIYLTQEGEQWSNERNKLHSLSKCNLFSGKWVFDNESYPLYKEHQCTFMSDQLACEKFGRKDLSYQNWRWKPHQCDLPRFNATALLERLRNKRMVFVGDSLNRGQWVSMVCLVESSVPPTLKSMRTIANGSLNIFKAEEYNATIEFYWAPLLVESNSDDPVXHRVAERTVRVQAIEKHARYWTDADILVFNTFLWWRRRAMNVLWGSFGDPNGISKRVGMVRVYEMALRTWSEWLEVHIKPNKTKLFFVSMSPTHQKA

SEQ ID NO: 6985 - protein, 609 aa, Magnetococcus sp. MC-1
MCGILAEVGQQSPAAARQRALDRLRHRGPDHGGQWSAQQPVPVWLGHRRLAIVDTSSAGNQPLHLHAADLHLVGNGEIYNAPALQKTLEALGHVFHSHSDNEAILHAYREWGSDCLAHLEGMFAFVLWDARQQTLLAARDRMGIKPLFYAATPAGGLVLASEASALVGLDGVAQQGYEPQALSHVLAYGHIPDPYAIWRGVNKLSPGQFLRWTPQQGLRLHTYWSPPSQSDAPSDDQAWGQRFEQVLQEHLLSDVPLSLFLSGGLDSTSVAVGVKRLGHQLKAFSLGFPGHPRDESALAQATAERLGHPFEAVVMDGRDLLQQVDAALLQQDEPHLFGSYLTMLNICSAVAKEYKVVLSGDGGDELFAGYNWYRDIPTALPTLAPWKAALAKPLLRHSPLPAALLERARLAFACCSPLHRHAWRTSQRFLPAEVEALLRPAAIRYDDEAFLAPLQRWFTPELPLVRALQRIDLMSFCSNHVCAKVDRASMAHALEVRVPYLDRRLVEWAISRPADPREAQGSKPLIRDYIAPHVPAQVLEQRKQGFSLRTTPPANLESTFVAWIEQSPLISQSILRRDWPRFLRADDRLRAQKLWHLALLARWMHHHPA

SEQ ID NO: 6986 - protein, 135 aa, Magnaporthe grisea 70-15
MPDFGAHVDSTTFEQILEMDEDEAERDFSKPLVMGFFEQAEETFEKMDKALKDRDLKELSSLGHFLKGSSATLGFTKVKDSCQVIQQYGNKLKLDGTEEPSEDVCYEKIDKALVDAKKDMESLKKLLNEFFVIDP

SEQ ID NO: 6987 - protein, 441 aa, Oryza sativa (japonica cultivar-group)
MATAAVMAAVPSSSPADAAEAVVMTEAVPSLPQRQQPVFVEGRGGKLRDHAYSRKQKSLGLLCSNFVALYNRDDVESIGLDDAARRLGVERRRIYDIVNVLESVGILVRKAKNRYSWIGFGGVPMALRELKERALREKSGLAPLPVEEPSAAIMSDDEDEDKMGDADGDTESEKLSQPVDNPSDNKPGAPRCRLRSDHRKEKSLGLLTQNFVKLFLTMEVDTISLDEAAKLLLGEGHAENSMRTKVRRLYDIANVLSSLNFIDKIQQADSRKPAFRWLGSAGKPKAENGVTIAVPPPGKTISNKRAFGTELTNIDINRSRLDSTIPKKAKLTLSGGEILKNCKLSVQKQLGQGSKGGFVYGPFHPAGARKQELDNGNKGHTDNVQNWESLAASFRPQYQNQALGDLFAHYVEAWKSWYSEFAQGSSMMQQHFGMPVINQFL

SEQ ID NO: 6988 - protein, 193 aa, Magnaporthe grisea 70-15
MAEIRRKLVIVGDGACGKTCLLIVFSKGTFPEVYVPTVFENYVADVEVDGKHVELALWDTAGQEDYDRLRPLSYPDSHVILICFAIDSPDSLDNVQEKWISEVLHFCSGLPIILVGCKKDLRYDQKTIEELRKTSQKPVSPEDGEEIKKKIGAYKYLECSAKTNEGVREVFEHATRAALLSRHKTKKKKCLIL

SEQ ID NO: 6989 - protein, 485 aa, Oryza sativa (japonica cultivar-group)
MFGGGGGGGRKPLDYEELNENVKKVQYAVRGELYLRASELQKEGKKIIFTNVGNPHALGQKPLTFPRQVVALCQAPFLLDDPNVGLIFPADAIARAKHYLAMAPGGLGAYSDSRGIPGIRKEVAEFIERRDGYPSDPELIYLTDGASKGVMQMLNTIIRNERDGILVPVPQYPLYSAAISLFGGSLVPYYLEEEANWGLDFVNLRQTVASARSKGITVRAMVIINPGNPTGQCLSEGNIKELLKFCFHENLVLLADEVYQQNIYQDERPFISARKVLFDMGPPMSREVQLVSFHTVSKGYWGECGQRGGYFEMTNLPPKTVDEIYKVASIALSPNVPGQIFMGLMVNPPKPGDISYLKFSAESKSILESLRRRARLMTDGFNSCRNVVCNFTEGAMYSFPQIRLPPKAIDAAKRAGKAADVFYCLKLLEATGISTVPGSGFGQKEGVFHLRTTILPAEEDMPAIMTSFKKFNDTFMDQYDGYSRM

SEQ ID NO: 6990 - protein, 494 aa, Agrobacterium tumefaciens str. C58
MASRPFRDDATPDATSGIEIYSVPGFFMYQFDLIVVGSGPAGRRAAIQAAKLEKKVLVIEKGSRVGGVSVHTGTIPSKTLRETALNLTGWRERGFYGRAYRVKQEIDADDLRRRLLITLDHEVEVLEHQFARNRVQHIRGTASFIDANTMKVVKSDGEVMTVTATSILLTIGTRPYRPPHIPFDGQAVLDSDEILEIKELPRSMVVVGAGVIGIEYATIFSALDTQVTVVEPRETMLEFIDKEIVEDFTYQLRDRNMKLIFGQKAEKVERDESGKCLVSLSNGRVLKAETVLFAAGRVGATDTLNLSACGLEADSRGRLKVDPETFQTSVPNIYAAGDIIGFPSLASTSMEQGRIAARHAVGAPAGEPPQFFPYGIYAVPEISTCGLTEEEVVERGIPYECGIAHFRETSRGHIMGLDSGLLKMIFSLKTRRLLGVHIVGEGATELVHIGQAVLNLKGTVEYFVENTFNYPTLAEAYKIAGLDAWNRMGELKKD

SEQ ID NO: 6991 - protein, 408 aa, Prochlorococcus marinus subsp. marinus str. CCMP1375
MVQVNSNYLKLKAGYLFPEISRRVNAFCELNPTASLIRLGIGDVTEPLPQACCKAMKTAIEEMGSTSGFRGYGPEQGYLWLREAIAKNDFQSRGCQISADEIFVSDGSKCDSSNILDILGTGNKIAVTDPVYPVYVDSNVMAGQTGIAASSGHYEGLVYIPLNAENGFEAELPSEPVDLIYLCFPNNPTGAVASKVQLTKWVEYAKKNHALILFDAAYESFIQDPLLPHSIFEIDGATDCAIEFRSFSKNAGFTGTRCAFTVIPKSLKGKTLDGAEVDFWSLWNRRQSTKFNGVSYIVQRGAEAVYSLEGQSQTNKLVSFYMKNAEIIRKQLTLAGYKIYGGKHAPYVWLEAPTEMDSWQFFDHLLNKANIVGTPGSGFGVAGEGYFRLSAFNSRSNVEEAMRRITSI

SEQ ID NO: 6992 - protein, 389 aa, Glycine max
GAECIDPDCTWVEQWVHRAGPREKIYYKPEEVKAAIVTCGGLCPGLNDVIRQIVITLEIYGVKNIVGIPFGYRGFSDKELTEVPLSRKVVQNIHLSGGSLLGVSRGGPGVSDIANSLEKRGINMLFVLGGNGTHAGANAIHHECRKRRLKVSVIGVPKTIDNDILLMDKTFGFDTAVEEAQRAINSAYIEAHSAYHGIGVVKLMGRSSGFIAMQASLSSGQVDICLIPEVPFNLHGPHGVLSHLKYLLETKGSAVVCVAEGAGQNLLQKTNATDASGNVVFGDIGVYIQQETKKYFKEIGVHADVKYIDPTYMIRAIRANASDGILCTVLGQNAVHGAFAGYSGITVGLCNTHYAYFPIPEVISHPRLVDPNSRMWHRCLTSTGQPDFI

SEQ ID NO: 6993 - protein, 395 aa, Salmonella typhimurium
MTDKQLDTKLVNAGRSKKYTLGSVNSVIQRASSLVFDTVEAKKHATRNLANGELFYGRRGTLTHFSLQEAMCELEGGAGCALFPCGAAAVANTILAFVEQGDHILMTNTAYEPSQDFCSKILGKLGVTTSWFDPLIGADITQHIQPNTKVVFLESPGSITMEVHDIPSIVSAVRRVAPEAVIMIDNTWAAGVLFEALEFHIDISIQAGTKYLIGHSDAMVGTAVANARCWEQLRENAYLMGQMLDADTAYMTSRGLRTLGVRLRQHQESSLKIAAWLANHPQVARVNHPALPGSKGHAFWKRDFTGSSGLFSFVLNKKLTEAELSAYLDNFSLFSMAYSWGGYESLIIANQPEQIAAIRPAGGVDFTGTLVRVHIGLESVDDLIADLAAGFARIV

SEQ ID NO: 6994 - protein, 376 aa, Vibrio vulnificus YJ016
MTQDKFIKSRAAVAWGPKQPLSIEEVDVMLPRKGEVLVRIVATGVCHTDAFTLSGDDPEGVFPAILGHEGGGIVEMVGEGVTSVSVGDHVIPLYTAECGQCKFCLSGKTNLCQAVRETQGKGLMPDGTTRFYKDGKPIFHYMGCSTFSEYTVLPEISLAKVNKEAPLEEICLLGCGVTTGMGAVINTAKVKQGDTVAIFGLGGIGLSAIIGARMAGASRIIAVDINDRKFELAKQLGATDCINPKEHDQPIQEVIIEMTDGGVDFSFECIGNVNVMRQALECCHKGWGESVIIGVAGAGQEISTRPFQLVTGRVWRGSAFGGVKGRSQLPAIVEQYLAGEFGLQEFITHTMPLEGINDAFELMHSGESIRSVVHFE

SEQ ID NO: 6995 - protein, 396 aa, Brucella melitensis biovar Abortus
MMFRTLDDANVQSKRVLVRVDLNVPMANGEVTDLTRIERIVPTIAELSRKGAKVILLAHFGRPKGVASDENSLKHVVKPLSKVLDHSVHFAEDCIGDKAKPAVDALKDGDVLLLENTRFHKGEEKNDPEFVQALAANGDLYVNDAFSAAHRAHASTEGLANVLPAFAGRAMQAELEALEKGLGNPARPVVAIVGGAKVSTKLDLLSNLIEKVDALVIGGGMANTFLAAKGLDVGKSLCEHELASTAREIMAKAETTKCAIILPVDAVVGWHFAADTPHQTYGVDSVPGDAMILDAGELSTDLIASAIDDAATLVWNGPLGAFELSPFDTATVKVARHVAKRTKEGKLVSVGGGGDTVAALNHAGVADDFTYISTAGGAFLEWMEGKPLPGVDVLKK

SEQ ID NO: 6996 - protein, 198 aa, Gossypium hirsutum
GQNPLFPRILGHEAEGVVESVGKGVIDVQPGDHVLPIFTGECKECPHCLSEASNMCDLLRINTERGGMLHDGHTRFSKDGKPIYHFLGTSTFSKYTVVHVGQVAKINPEAPLDKVCVLSCEMSTGFGATVNVAKPKKGGFVAIFGLGAVGLAAAEGARVCEASRIIGIDLNPNRSEEAKKFGCTEFVNPKDHNKPVQE

SEQ ID NO: 6997 - protein, 458 aa, Anabaena variabilis ATCC 29413
METADVIVIGSGQGGIPLAADFANEGRKVVLFERDALGGSCINYGCTPSKAFLAAAHTAGRANQGKKLGIHTEVEVDFPAVMERVREIRSSFNQGIRQRLESAGVKVICAEASFVGERTVKGGDVTLQAPLVIINTGTSSLIPDIPGLAGTPYLTNRNFFDLNTLPARLLVIGGGYIGLELGQGLARLGSQTHLIVRGDRVLGQEEADVSEVLAEALKQDGIGLHFGVNVNHVAHENNVFKLTLSSGEQLQGEALLVVIGRKPNTGALNAANSGIELDDKGFVKIDDQFHTTCSGVYAIGDAAKQPAFTHVSWEDYRRLKAILCGENRTRSDRVLGYAVYTEPQVGRVGMTLEQAQKQGINACAVTLPMSQIARAIEWGHDLGFYRMVIDSDTDKILGATLVGYETAELVHVFLSLIEAGATWQLLERSVHIHPTYGEALPSLARLLLGDNMPGCPNM

SEQ ID NO: 6998 - protein, 580 aa, Rhodospirillum rubrum
MVTKLGRSVPEGLADRFAQKLAHRGPDGKGVFEAPGVLLVQARLAIIDLLTGDQPLHGPDGLVLVANGEVYNYRELRAELGEGVFLTRSDCEPPLHLYARRGLAGFDVLRGMYAIALWDPPRRRLVLCRDPFGIKPLYYVETNDGVAFASEPQALIGAGLLPAREDAAAVDELLQLQFTCGARTIFQGIRRVLPGETLVFEDAQLVERHRRPALPAVRERVSPADPLALLDHVLEDSLDLHQRADVPYGLFLSGGIDSSSVLAMMARLNERPVLAFTAGFPGTEVADERADARAATRAVGARHVEVAVSEGDFLEHLPAIAAAVDDPVADYAIVPTWLLAREAAKSVKVVLCGEGGDELLGGYGRYRSAMRPWPLARPLRRKGLLDGLGLLRGGGGRNWRAGIARAEVEARAQGGSRLIRAQRVDCADWLPHDLLNKLDRCLMAHGLEGRVPFVDVDVARFCLPLADGLKVRDGMGKWILRSWLERTLPEARPFAPKRGFSVPVGEWMSRHGDRLGPLVAASPAVAARCHGEAVRALFTHPRKETALAAWILLYYALWHRRHIVGLAPEGDVFHCLSTAA

SEQ ID NO: 6999 - protein, 439 aa, Rhodotorula mucilaginosa
MAISKIHSRYVYDSRGNPTVEVELTTEKGTFRSIVPSGASTGVHEALELRDGDKSKWLGKGVLKAVANVNDTIAPALIEANIDVADQAKIDEFLLKLDGTPNKAKLGANAILGVSLAAAKAGAAQKDVPLYKHIADISKAKEGKFVLPVPFQNVLNGGSHAGGDLAFQEFMIVPSGAPSFSEGLRIGSEVYHHLKSLTKKKYGQSAGNVGDEGGVAPDIKTAKEALDLIVSAIEAAGYTGQVDIAMDVASSEFYKDGLYDLDFKNPNSDKSKWITGPQLAELYEQLLNEYPIVSIEDPFAEDDWEAWSHFFSKVEGKTQIVGDDLTVTNPIRIKKAIETKAADALLLKVNQIGTLTESIQAANDSYAAGWGVMVSHRSGETEDTFIADLSVGIRSGQTKTGAPARSERLAKLNQILRIEEELGDKAIYAGKDFHKAHSL

SEQ ID NO: 7000 - protein, 550 aa, Haemophilus influenzae R2846
MTTLFEVAQHWLNQDPDTETRAELTALLDAAKGGDKAAEAELHARFDGRLQFGTAGLRGRLQAGSMGMNRVLVSQAAGGLAEYLKGYDKEPSIVIGYDGRKNSDVFARDTAEIMAGAGVKAYLLPRKLPTPVLAYAIQYFDTTAGVMVTASHNPPEDNGYKVYLGKANGGGQIVSPADKDIAALIDKVAAGNIQDLPRSDNYVVLNDEVVDAYITKTASLAKEPACDINYVYTAMHGVGYEVLSKTLAKAGLPQPHVVADQVWPDGTFPTVNFPNPEEKGALDLAIKVAKEKNAEFIIANDPDADRLAVAVPDAQGNWKSLHGNVVGCFLGWYLAKQYQGKQGTLACSLVSSPALAEIAKKYGFQSEETLTGFKYIGKVSGLLFGFEEALGYLVDPDKVRDKDGISAAIVFLDLVRNLKKQGKTLADYADEFTKEFGAYVSGQISIRVSDLSEIGKLMTALRNNPPAEIAGVKVAQFIDHIKTDRQSDILVFNLENGGRLIARPSGTEPKIKFYLDARGKDPKDADRVLAEFDEGVRHILRQDAYGKQDC

SEQ ID NO: 7001 - protein, 576 aa, Mycobacterium tuberculosis H37Rv
MSFLFAQPEMLGAAATDLASIGSAISTANAAAAAATTRVLAAGADEVSAAVAALFSGHAQTYQALRTQAAAFHQQIVQTLTSTAGAYASAEAANVEQQLLGAINAPTMALLGRPLIGHGADGAPGTGQAGGAGGILYGNGGNGGSGATGQAGGAGGAAGLIGHGGAGGLGGTGASGGAGGAGGWLWGNGGAGGNGGVGVAGDPGGVGGAGGAGGAAGLWGSGGSGGTGGQGGVGGGKSGDGGTGGIGGAGGGGGWLHGDGGAGGHGGQGGTGVSSGGNGGAGGTGGDGRGLSGSGGAGGRGGQTGVGGKVGENNFGGAGGAGGTGGLIGNGGAGGNGGQGAISGAGGAGGNAWLIGDGGAGGNGGDIRGQGGGAGGAGGAGGQLIGNGGTGGAGGTVTSPNGLGGAGGAGGSAGLIGHGGTGGAGGHSAQGPDGNGGIGGAGGAGGNGGQLYGTGGTGGTGGKGGDGFGVFGKGGAGGTGGRGGAAGLIGDAGTGGTGGKGGTAGEDGTGGNGGTGGNGGAAVLIGNGGGGGAGGNGGAGNDGTPGNGGGGGVGGTGGTLFGQPGQPGPPGQPGPA

SEQ ID NO: 7002 - protein, 416 aa, Staphylococcus aureus subsp. aureus Mu50
MNLNDTIFMFLCTLLVWLMTPGLSLFYGGLVQSKNALNTVMQSMAAIVLVTFVWITVGFTISFGNGNLWFGNWEYTFLNHVGFATQEDISPHIPFALFMLFQMMFCTIAISILSGSIAEKMKFIPYLLFVVIWTALVYSPVAHWVWGGGWINKLGVLDFAGGTVVHITSGVSGLVLAIMIGKGNKHSESTPHNLIITLIGGIFVWIGWYGFNVGSAFTFDNIAMLAFTNTVISASAGAIGWLILEYIFKKTTSLLGLLLGALAGLVVITPAAGYVTYLSATIMALIGGICCYIVINYIKVKLKYHDALDAFGIHGVGGIIGAVLTAVFQSKKANPDIENGFIYTGDIHIILVQILCVTAVVIFSIVMTFIIAKVIKLITPLSVTEQETNIGLDKIVHGEHAYFEGELNRFNKHIRY

SEQ ID NO: 7003 - protein, 991 aa, Tuber magnatum
EFKLSVEKQYKEGIEKMIKLYQMEGDRKSRQDAESKHTDSGQKIQLLKQALKRYEDLHVDMDFGDEADDDSINSPNIRRPLTGRLAIRVLAVKDVDHATTSRFARGPETFVIIKVEDVARVRTKSTRNDKWLDEAHDIDVDKANEIEMTVYDKPGDNHMPIGLLWIRISDIAEELRRKKIEQDISSSGWVSADKMAHGGAGRPSEGTYNYNQGFGGPAAAGGGGTGMYVNNSGQTQASGGSAGIDAWFALEPVGQIHLNLNFVKYNRNKRPLDLGLGRKGAVRARKEEVHEMYGHKFVQQQFYNIMRCALCSDFLKYSAGMQCSDCKYTCHKKCYPKVVTKCISKSNAETDPEEEKLNHRIPHRFEPMTNMGANWCCHCGYMLPVGKKNARKCTECGLTCHSQCAHLVPDFCGMEVANQILGEIKKTKRRGPGMADRNLRTSGPPAPSSPLSGRPTSDPYVSHLDPRNSVQGEPTQLSQRTHPYSPSSPTAVNAANVAYGTASSPARPQQPAPYSPEQRPNRVPDPTAVAAAAHAGQRPPSVVQSQIGYPPRQSAELYRGAPASPTQTKHPTELPSSPSPYQQGQGYDNPYQQHRTSIPQQPPAAPPKAPPAPSGYGQPQAAQYDQKRSYGQPPPAPVKVAPPAHAYTAEKKPPPPPALEPQHAVSRPTKIGLDHFNFLAVLGKGNFGKVMLAETKACKKLYAIKVLKKEFIIENDEVESTRSEKRVFLIANKERHPFLLNLHACFQTETRVYFVMEYISGGDLMLHIQRGAFGSRRAQFYAAEVCLALKYFHENGVIYRDLKLDNILLTLDGHIKIADYGLCKEEMWYGSTTSTFCGTPEFMAPEILMDKRYGRAVDWWAFGVLIYQMLLQQSPFRGEDEDEIYDAILADEALYPIHMPRDSVSILQKVLTKEPELRLGSGPTDAQEIMSHPFFANINWGDIYHKRYPPPFKPSIQSATDTSNFDQEFTSVTPVLTPVQSVLTQAMQEEF

SEQ ID NO: 7004 - protein, 478 aa, Caulobacter crescentus CB15
MTDTLRHYIGGERVAADAPAESLNPSNTNDVVAKVPMGGQAEVDAAVDAARKAFPAWADASPEVRSDLLDKVGSTIIARSADIGRLLAREEGKTLAEGIGETVRAGRIFKYFAGEALRRHGQNLESTRPGVEIQTYRQAVGVYGLITPWNFPIAIPAWKAAPALAFGNTVVIKPAGPTPATANVLADIMAECGAPAGVFNMLFGRGSMGDALIKHKDVDGVSFTGSQGVGAQVAAAAVARQARVQLEMGGKNPLIVLDDADLERAVAIALDGSFFATGQRCTASSRLIVQDGIHDKFVALLAEKVAALRVGDALDPNTQIGPAVSEDQMETSYRYIDIAASEGGRVVTGGDRIKLDNPGWYVRPTLIADTQAGMRINNEEVFGPVASTIRVKSYEEALEIANGVEFGLSAGIATTSLKHARHFQRYARAGMTMVNLATAGVDYHVPFGGTKSSSYGAREQGFAAVEFFTQTKTSYSWS

SEQ ID NO: 7005 - protein, 299 aa, Streptomyces avermitilis MA-4680
MKGIVLAGGTGSRLYPLTRALSKQLLPVYDKPMIYYPLSVLMLGGIKDILVISSPDHLEQFRRLLGDGSRLGLNIDYAAQQRPGGIAEAFLIGADFIGQDQVSLVLGDNIFHGMGFSHLLRSHTRDVDGCVLFGYAVTDPERYGVGEVDASGKLLSVEEKPTAPRSNLAITGLYLYDNDVIEVARGIRSSARGELEITDVNRAYLAEGRARLVDLGRGFTWLDAGTHDSLMHAGQYVQVLEKRQGVRIACLEEIAFRMGLIDADDCYLRGVELAGSGYGEYLMSIAAEAAVRSPGCAYS

SEQ ID NO: 7006 - protein, 337 aa, Klebsiella pneumoniae
MHSYRLESFGSLQGLKLIEEQQPVPGRNQVLIKVRACSLNYRDLAILYGTGTLTPKAGLIPLSDGAGEVVATGDSVGLFKKGDRVVGTFFPHWFGGARDAAAGRGTYGTQADGWLTSYKVVDEESLVSVPDYLSWEQAATLPCAAVTAWNSLQQSRSVLPGETVLTQGTGGVSLFAVQFAKIMGARVIALTSNDVKAQLLSALGADHVINYRHYPEWSVKVRELTQGRGVDRIVEIGGPGTLNQSLLSAAPGGEIALLGFVAQGSASVDFMTLFKSGATVRPFSVGSREDFVAMNRALVKSQLQPVIDRVFEFEHAVEAWRYFESQQHTGKVVITMN

SEQ ID NO: 7007 - protein, 223 aa, Gloeobacter violaceus PCC 7421
MQAAVIESFGGPQVFEYRHLPVPVPKGRELLIRVKATSVNPLDCQIRRGNYKEQVSLPAILGHDVSGVVEAVGDAVRDFAEGDEVFYVPRIFGGPGSYAQYHVVEEAIVAHKPANLSHAQAAALPLAGGTAWDALVVRAALRVGESILIHAGAGGVGSLAVQLARAMGAQKSRVARLSAAAHFSNRQIHEQAYRRSVPGCLGHRNQLAACSASSALATASGSP

SEQ ID NO: 7008 - protein, 480 aa, Arthrobacter aurescens
MPEAAPDFDLAVIGSGGGAFAAAIRATNLGKRVVMIERSTVGGTCVNTGCVPSKALLAAADARHVALDGTGRFPGISTTAAPVDMGALIDGKRSLVEGMRSDKYVDLAAEYGWDLRQGSAVFAGTPQEPALEITRPDGGRDSLTAAHYLVATGSAPWAPPVPGLEEVDYLTSTTAMELGEVPESLIVFGGGYVALEQAQLFARLGSKVTLLARSRLASHEEPEASRALMGVFADEGIRVIRRATVTSIRANASGEEVTVTATVAGGHEEFRAAKLLVATGRRAVTNGLNLDAVGVKTGNTGQILVENTLASSNPRIWAAGDVTGHREFVYVASAHGTLMVENAFNDAGREVDYRHLPRVTFTSPALAAVGMTDKEANEAGIRCECRVLPLEYVPRALVNRDTRGFIKIVANNSTGRIVGITAVGKEAGDLAAAGVYILEAGMTVDQVANLWSPYLTMAEGIKIAAQSFTTDVSKLSCCAS

SEQ ID NO: 7009 - protein, 290 aa, Schizosaccharomyces pombe
DLYGGSDRLLSFNQRQYGFKVDNVDTSDLAAFEAALRPDTNLVLIESPTNPRISICDIRAIVKITRSKAKDALLVMDNTMLSPVLCNPLDFGYDIVYESATKYLSGHHDLMGGVIATKSDEIAKSVFFNINAMGAAMAPFECFLLLRGIKTMGLRVERAQQNAIEIAKFLKSKGLQVNFPGLDPDAKSTAIFYSFARGPGAVMSVFTGDVEVSKTIVNTTKLFEISVSFGAVNSLISMPAYMSHASIKKEVRDARGLSEDLIRICVGIENVDDLKADLENALAQANFKQN

SEQ ID NO: 7010 - protein, 458 aa, Zea mays
  unsure (1)..(458): unsure at all Xaa locations
MAGLLHLQSTLLPSASALRRRAGAPVPCSSRRRCRVEAKIREIFMPALSSTMTEGKIVSWTAAEGDRLSKGDPVVVVESDKADMDVETFHDGFLAAVLVPAGESAPVGSAIALLAESEEEIPVAQSQAASFSSSSPSPPPPQETAQEASPSPPPPPPSAPVAVSAPALPSPATQGRGTXLLASPYAKKLAKDLGVDLFSVTGSGPGGRIVAKDVEAALAAPKKAAPVTAARPDVPLGSTVPFTTMQGAVSKNMVESLAVPTFRVGYTITTDALDQLYKKIKSKGVTMTALLAKATAMALVQHPVVNCSCRDGKSFTYNKSINIAVAVAIDGGLITPVLQDADKLDIYSLSRKWKELVDKARAKQLQPHEYNSGTFTLSNLGMFGVDRFDAILPPGTGAIMAVGASEPTVVGTKDGRIGIKSQMQVNVTADHRVIYGADLAAFLQTLAKIIEDPKDLTF

SEQ ID NO: 7011 - protein, 346 aa, Eremothecium gossypii
MEIMEQELCVAEEARRRSMLPQRSTVSKGKYSLQDFQIMRTLGTGSFGRVHLVRSIHNGRYYAIKVLKKQQVIRMKQIEHTNDERRMLKVVEHPFLIRMWGTFQDARNLFIVMDYIEGGELFSLLRKSQRFPNPVAKFYAAEVTLALEYLHAHNIIYRDLKPENILLDRNGHIKITDFGFAKEVDTVTWTLCGTPDYIAPEVITTKPYNKSIDWWSLGILIFEMLAGYTPFYDVTPIKTYEKILAGKVVFPPFFHPDAIDLLGKLITDDLTRRLGNLQSGSQDIKSHPWFSEVIWEKLLAKDIETPYEPPITAGVGDSSLFDQYPEEHLDYGVQGDDPYASYFVDF

SEQ ID NO: 7012 - protein, 375 aa, Agrobacterium tumefaciens str. C58 (Cereon)
MDVRAAVAIQAGKPLEVMTVQLEGPRAGEVLIEVKATGICHTDDFTLSGADPEGLFPAILGHEGAGIVVDVGPGVTSVKKGDHVIPLYTPECRECYSCTSRKTNLCTSIRATQGQGVMPDGTSRFSIGKDKIHHYMGCSTFSNFTVLPEIALAKINPDAPFDKVCYIGCGVTTGIGAVINTAKVEIGSTAIVFGLGGIGLNVLQGLRLAGADMIIGVDINNDRKAWGEKFGMTHFVNPKEVGDDIVPYLVNMTKRNGDLIGGADYTFDCTGNTKVMRQALEASHRGWGKSVIIGVAGAGQEISTRPFQLVTGRNWMGTAFGGARGRTDVPKIVDWYMEGKIQIDPMITHTMPLEDINKGFELMHKGESIRGVVVY

SEQ ID NO: 7013 - protein, 234 aa, Clostridium tetani E88
MSAFMGELLGTMILILLGNGVVANNVLKHSKGEGSGWIVITTGWAIAVAIPVYIFGPISGAHFNPAVTIAFASIGQFSWADVPGYIIAQLVGAIIGATLVWLTYLPHWEATEDQATKLAAFSTAPAIKNTTANLITEIIGTFFLVFGILGVANTSMADGLAPLVVGLIILAAGVSLGGPTGYAINPARDLGPRIAHAILPIKGKGDSDWGYAWIPIVGPIIGGLIGAIFFNIMF

SEQ ID NO: 7014 - protein, 361 aa, Synechococcus elongatus PCC 7942
MARSGLEPQTVTDATPLLGRSLPELQDWVVAQGQPSYRAKQLYQWLYERSIHNLAEISVFPKAWRQSLQAVPVGRSQIVDRSVSPSGTIKYLLRLHDGEIIEAVGIPSGDRLTVCVSSQLGCAMACDFCATGKGGFRRHLAPHEIIDQVLTVQEDWQQRVSNIVFMGMGEPLLNLDAVLAAIRCLNQDIGIGQRGITVSTVGIPGHIRRLAETKRVGDRPLQFTLAVSLHAPNQAIRDRLIPSSRHYPITDLLQECRDYVQITGRRVTFEYILLAGLNDQPEQAEQLAQLLRGFQSHVNLIPYNPIDEVEYQRPSKARVDAFADALRQQRVAVTVRWSKGLGADAACGQLRANRSTATLPA

SEQ ID NO: 7015 - protein, 724 aa, Pseudomonas putida
MANSEVRSVCPYCGVGCGIVMSVADGKVGKISGDKLHPSNFGRLCTKGLTAHQPLSASGRMADAYLRQQRSQPPVRTSMDQAIAATAERLRGIIDQHGPDAVALYVSGQMSLEAQYLANKLAKGFIRTRHIESNSRLCMASASSGYKLSLGADGPPGSYQDFEHADVFLVIGANMADCHPILFLRLLDRVKAGAKLIVVDPRRSATADKADLFLQVRPGSDMALLNGLLHLLHRNGHTNPDFIARHTEGWDEMPAFLDDYTPERVAAITGLAEADIIKAAEWIGSANNWMSCWTMGLNQSIHGTWHSNAICNLHLATGAICRPGSGPFSLTGQPNAMGGRDMGYMGPGLPGQRSALVEDDRAFVERQWQLPPGSLRSEGGEGTVALFGQMKAGEVKACWVICSNPVASVANRQQVIDGLRKAELVITQDAFLDTETNRYADILLPAALWAEGEGVMINSERNLTLMPRAVEPPGQSLPDWQIIARVACAMGYADAFDYPNAEAVYEEIRRFHNPSTGYDLRGIGYAELRTQPRQWPCAPGSEQHRSPLRYLNDGSSQALLLDARGRRPALAFPTASGKAHFFARPWLPAAEVPDDDYPMVLNTGRVQHQWHTLTKTGKVPALNKLEPGPYLEIHPEDAARLGVAEKDQVAVRSRRGQAVLPARISDRVMPGNCFAPFHWNDLIGEQLAINAATCDAVDPLSLQPAFKHCAVALERVAGERIDAL

SEQ ID NO: 7016 - protein, 576 aa, Oryza sativa
MASSALICDTEQWKGLQIGRAHYDFVFWCGEQAHVGEIQKTHLRHLMHDVERCKAMTACLLIDSEYEGIYLDYSRQRATGETMEKLFKLAEAAKLKEKIEKMFRGDKINSTENRSVLHVALRAPRDEVINSNGVNVVPEVWGVKDKIKQFSETFRSGSWVGATGKALTNVVSVGIGGSFLGPLFVHAALQTDPEAAESAKGRQLRFLANVDPVDVARSIKDLDPETTLVVVVSKTFTTAETMLNARTLKEWIVSSLGPDAVAKHMIAVSTNLELVEKFGIDPKNAFAFWDWVGGRYSVCSAVGVLPLSLQYGFPIVQKFLEGAASIDKHFRSSSFEKNIPAILPYSQALEKFAPHIQQLSMESNGKGVSIDGVQLPFESGEIDFGEPGTNGQHSFYQLIHQGRVIPCDFIGVVKSQQPVYLKGEIVSNHDELMSNFFAQPDALAYGKQFTGYFQTPEQLHSEKVPEHLIPHKTFQGNRPSLSLLLPSLSAYEIGQLLAIYEHRIAVQGFLWGINSFDQWGVELGKSLASQVRKSLHASRVEGKPVLGFNSSTTSLLTRYLAVEPSTPYNTTTLPKV

SEQ ID NO: 7017 - protein, 255 aa, Zea mays
MAATIQSVKARQIFDSRGNPTVEVDVCCSDGTFARAAVPSGASTGVYEALELRDGGSDYLGKGVSKAVDNVNSIIAPALIGKDPTAQTELDNFMVQQLDGTKNEWGWCKQKLGANAILAVSLAVCKAGASVKKIPLYQHIANLAGNKQLVLPVPAFNVINGGSHAGNKLAMQEFMILPTGAASFKEAMKMGVEVYHNLKSVIKKKYGQDATNVGDEGGFAPNIQENKEGLELLKTAIEKAGYTRQVVIWNGMCCF

SEQ ID NO: 7018 - protein, 294 aa, Streptococcus mutans UA159
MKGIEIVNYGGPEVAKVRTFSSPVRRSGEVMIQVVASSINPVDIKYMTPETIQKIPSFPAILGWDIAGIIIEADKNSNFSAGERVVAFHPQGSWQQLVTASENQVVKLPDNIDFISGGSIPLAASTALQALRRLRLEPGERLLVTGAAGSVGYYALQFALKMGVKASGLVRNKNQKMSINLLDTEIYTNDDPIPEFDAVFDTAGVLNRIDVIHKGGRLVTVSDEQIDPQVLKHTSFAEHNYVRVNKEDLEEIVHLVSEAKIETRVAKIYSFNNVQEALAQAIKSGNNGKVMLIF

SEQ ID NO: 7019 - protein, 199 aa, Leptospirillum ferrooxidans
SGVMKKIRFPKTASIGIKPVSEEGTKRLVRAAIRFALANNRKSVTLVHKGNIMKFTEGYFRKWGYEVAKEEFGDKTVSWDDCGGNAPAGKLLIKDEIADAFLQKILLRANEYDVIATLNLNGDYLSDALAAQVGGIGIAPGANINYETGAAVFEATHGTAPKYANHDKVNPGAVILSGEMMFRYMGWNEVADLILKGLR

SEQ ID NO: 7020 - protein, 431 aa, Bacillus cereus ATCC 14579
MSTIIDVYAREVLDSRGNPTVEVEVYTESGAFGRAIVPSGASTGEHEAVELRDGDKSRYLGKGVVNAVNNVNEIIAPEIAGFDVTDQAGIDRAMIELDGTPNKGKLGANAILGVSMAVAHAAADFVGLPLYRYLGGFNAKQLPTPMMNIINGGSHADNNVDFQEFMILPVGAPTFKESIRMGAEVFHALKAVLHDKGLNTAVGDEGGFAPNLGSNREALEVIIEAIEKAGYKAGENVFLGMDVASSEFYNKETGKYDLAGEGRTGLTSAEMVDFYEELCKDFPIISIEDGLDENDWDGHKLLTERIGDKVQLVGDDLFVTNTQKLAEGIEKGISNSILIKVNQIGTLTETFEAIEMAKRAGYTAVVSHRSGETEDATIADIAVATNAGQIKTGSMSRTDRIAKYNQLLRIEDELGEVAVYDGVKSFYNIKR

SEQ ID NO: 7021 - protein, 550 aa, Haemophilus somnus 129PT
MMQNINPTQTNAWKALEQHQKDLDQVTIQQLFEQEPTRFNDYSLKFAEQILVDYSKNNINQQTLSLLRQLAKECALNEATEAMFNGEKINRTENRAVLHTALRSCANTPVYVDGKDVMPEVNAVLAKMKSFCQRVISGDWKGYTGKAITDVVNIGIGGSDLGPYMVTEALRPYKNHLTMHFVSNVDGTHIAETLKKVNPETTLFLVASKTFTTQETMTNAISARKWFLAAAQDESQIANHFAALSTNAKEVEKFGIDTNNMFEFWDWVGGRYSLWSAIGLSIALSIGFDNFEQLLAGAHEMDNHFRTAPMEQNIPATLALIGIWNCNFLGAETEAMLPYDQYLHRFAAYFQQGNMESNGKYVARNGEVINNYQTGPIIWGEPGTNGQHAFYQLIHQGTKIIPCDFIAPAQTHNPLSDHHSKLLSNFFAQTEALAFGKTQQEVEAEFVKAGKSLDEVKEIVPFKVFTGNKPTNSILVQKITPFTLGALIAMYEHKIFVQGVIFNIYSFDQWGVELGKQLANRILPELTGDESISSHDSSTNGLINQFKAWR

SEQ ID NO: 7022 - protein, 498 aa, Gluconobacter oxydans
MNVVSKTVSLPLKPREFGFFIDGEWRAGKDFFDRSSPAHDVPVTRIPRCTREDLDEAVAAARRAFENGSWAGLAAADRAAVLLKAAGLLRERRDDIAYWEVLENGKPISQAKGEIDHCIACFEMAAGAARMLHGDTFNNLGEGLFGMVLREPIGVVGLITPWNFPFMILCERAPFILASGCTLVVKPAEVTSATTLLLAEILADAGLPKGVFNVVTGTGRTVGQAMTEHQDIDMLSFTGSTGVGKSCIHAAADSNLKKLGLELGGKNPIVVFADSNLEDAADAVAFGISFNTGQCCVSSSRLIVERSVAEKFERLVVPKMEKIRVGDPFDPETQIGAITTEAQNKTILDYIAKGKAEGAKLLCGGGIVDFGKGQYIQPTLFTDVKPSMGIARDEIFGPVLASFHFDTVDEAIAIANDTVYGLAASVWSKDIDKALAVTRRVRAGRFWVNTIMSGGPETPLGGFKQSGWGREAGLYGVEEYTQIKSVHIETGKRSHWIS

SEQ ID NO: 7023 - protein, 547 aa, Rhodospirillum rubrum
MPDPTTLSAWAALAAHAPTLSDQPLRVLFDADPDRFARFHLRFEDLVLDYSKNRITGETMALLADLARQSGVEARRDAMFAGEPINTTEGRAVLHVALRDPTPTPVLVDGADVKPAIAAVLAHMEAFSEAVRSGAWTGATGKAITDVVNIGIGGSDLGPVMVVEALKAYAKPGLRVHFVSNVDGTHIAETLKGLSPETTLFLVASKTFTTQETLTNAHTARDWLVGALGEPAVARHFAALSTNAKAVSAFGIDTANMFEFWDWVGGRYSLWSAIGLPIAISVGFANFRALLDGAHAMDTHFREAPIERNLPVILGLLGVWYGDFLGARAQAVLPYDQYLHRLAAYLQQADMESNGKRTTLDGKTVAYATGAVLFGEPGTNGQHSFYQLIHQGTSLIPCDFIAPAISHNPLGRHHAILLSNFLAQTEALMRGKTEAEARAELAAQGLAGEALEALLPHKVFPGNRPTNAILVKRLDPRTLGMLIALYEHKIHVQATVWNINAYDQWGVELGKQLAKAILPELEDATISPAHDSSTNGLIALYREFSAG

SEQ ID NO: 7024 - protein, 351 aa, Escherichia coli CFT073
MIAELETDKVILEIPAPHDGVLSNIIVSEGSTVTSAQLLAHLKPQAVIEETVTPVTETLAMPSARLEAQRSGVELADVAGSGRNGRILKEDVQRVTPAPVIQPERVAEIAPAKPLTPGARQERREPMSRLRQRIAERLLASQQNNAILTTFNEVNMQSVMDLRARWKDRFAEKHGVKLGFMSFFVKAVTRAQERFPVVNASVDGNEIIWRDYCDIGIAVSSNRGLVVPVLRNAQSLSLVEIERQIAEYATQARNGKLPLEALQGGTFSITNGGTFGSMMSTPIINPPQSAILGMHAITPRPVAENGQVVIRPMMYLALSYDHRIIDGQEAVQTLVAIRELLESPEQLLLDL

SEQ ID NO: 7025 - protein, 806 aa, Haemophilus influenzae
MSNFNQISRRDFVKASSAGAALAVSNLTLPFNVMAKETQRLNENNQERIVWSACTVNCGSRCPLRMHVKDNRITYVETDNTGTETYNLDHQVRACLRGRSMRRRVYNPDRLKYPMKRIGKRGEGKFKRISWDEALTEIAYALKRNIKKYGNESIYLNYGTGTLGGTMAKSWPPASTMIARFMNCIGGYLNHYGDYSTAQIAVGLDYTYGGGWALGNGMADIENTKLIVLFGNNPAETRMSGGGLTYCIEQAKARSNAKMIIIDPRYNDTGAGREDEWIPIRPGTDAALVAALAYVMIQENLVDQPFLDKYCVGYDEKTLPADAPKNGHYKAYILGYGNDGIAKTPEWAAKITGIPAERIIKLAREIGSTKPAFISQGWGPQRRSNGELISRAIAMLPILTGNVGIHGGNTGARESAYSIPFVRMPTLKNPMKASIPMFLGTDAIIRGTEMTALTDGIRGVDKLSPPIKVIWNYASNCLINQHAQINRTHDILQDDTQCEMIITIDNHMTSTAKYSDILLPDCPTSEQMDFALDAFVSNMAYVIFADQVIKPSFECRPIYDMLSDLAEKMGVKEKFTEGRTQEEWLRHIYEQSREKLPELPTFEEFRQQGIFKKVDPNGFKVAYKDFRDNPEAHPLKTPSGKIEIYSSRLAEIAKTWKLAEDDVIHPLPIHAQSFEHYGDPLMEKYPLQLSGFHYKARTHSTYGNVDVLKAANPQEVWMNPIDAKPRNIKNGDMIRIFNDRGEVHINVKITPRIIPGVVALSEGAWYAPDKDRIDHSGCINVLTTQRPSPLAKGNPQHSNLVQVERL

SEQ ID NO: 7026 - protein, 472 aa, Escherichia coli CFT073
MSTIFDVAVMGGGPGGYVAALRAAQNGLSVVCIDDGVNAQGEPSPGGTCLNVGCIPSKSLLQSSELYAQVQHEASIHGVNVDGVSFNAAAMIQRKDAIVSRLTMGIGLLFKKNKVKYLCGLATLEHARDEIWQLRVNDQQIRARNVVIATGSQPRQLPGVTIDNQQILDNRGALALTAVPPRLGVIGAGVIGLELGSVWNRVGSDVTLLEMAPTFLPALEARLSNEVRKAMIASGMKMQLAVEIEAIEQRDDGVHVRWRQGEKREESRFDKLILAIGRVPRLSGVDLVQLGLEADNRGGIAVDNLCRTGKAGLWAIGDVVRGPMLAHKAMAEGVVVADQIAGLAVEPINFALIPSVIYTQPEVAWVGENEASLKAAGRVFNKGNSLFAGNGRALALGQEGGRCTLYSDKHTDRVLGGAIVGPQASELINEIALAMTFSASGEDIACAIHAHPTLSEVIHEAAMALNNKALHG

SEQ ID NO: 7027 - protein, 198 aa, Gossypium hirsutum
GQNPLFPRILGHEAGGVVESVGKGVIDVQPGDHVLPIFTGECKECPHCLSEASNMCDLLRINTERRGMLHDGHTRFSKDGKPIYHFLGTSTFSKYTVVHVGQVAKINPEAPLDKVCVLSCEMSTGFGATVNVAKPKKGGFVAVFGLGAVGLAAAEGARVCEASRIIGIDLNPNRSEEAKKFGCTEFVNPKDHNKPIQE

SEQ ID NO: 7028 - protein, 198 aa, Gossypium hirsutum
GQNPLFPRILGHEAEGVVESVGEGVIDVQPGDHVLPIFTGECKECPHCLSEASNMCDLLRINTERRGMLHDGHTRFSKDGKPIYHFLGTSTFSKYTVVHVGQVAKINPEAPLDKVCVLSCEMSTGFGATVNVAKPKKGGFVAVFGLGAVGLAAAEGARVCEASRIIGIDLNPNRSEEAKKFGCTEFVNPKDHNKPVQE

SEQ ID NO: 7029 - protein, 511 aa, Geobacillus stearothermophilus
MSKKPVALIILDGFALRDETYGNAVAQANKPNFDRYWNEYPHTTLKACGEAVGLPEGQMGNAEVGHLNIGAGRIVYQSLTRINIAIREGEFDRNETFLAAMNHVKQHGTSLHLFGLLSDGGVHSHIHHLYALLRLAAKEGVKRVYIHGFLDGRDVGPQTAPQYIKELQEKIKEYGVGEIATLSGRYYSMDRDKRWDRVEKAYRAMVYGEGPTYRDPLECIEDSYKHGIYDEFVLPSVIVREDGRPVATIQDNDAIIFYNFRPDRAIQISNTFTNEDFREFDRGPKHPKHLFFVCLTHFSETVAGYVAFKPTNLDNTIGEVLSQHGLRQLRIAETEKYPHVTFFMSGGREEEFPGEDRILINSPKVPTYDLKPEMSAYEVTDALLKEIEADKYDAIILNYANPDMVGHSGKLEPTIKAVEAVDECLGKVVDAILAKGGIAIITADHGNADEVLTPDGKPQTAHTTNPVPVIVTKKGIKLRDGGILGDLAPTMLDLLGLPQPKEMTGKSLIVK

SEQ ID NO: 7030 - protein, 524 aa, Mesorhizobium loti
MSTPSRPSRCRYSQEARETVPMNAPLNIAMPAEASAAPKNYRLLIDGKHVDARDGRTIARKSPGHGFTVSRYAQAGEAEVEAAVQAAHKAFETGPWPRMKAGERAAILFRAADLIEARLEDIARLDALESGKPIAQARGEIGGAVDIWRYGASLARTLHGESYANLGDAMLGVVLREPIGVVSIITPWNFPFLIVSQKLPFALAAGCTAVVKPSEMTSASTFVLGDILLEAGLPAGVVNILAGLGADVGAPMVSHPLVEMVSFTGSTRVGKMTMASAAQSLKKVSMELGGKNGQIVFPDADLEAAADAAVFGGFFNAGECCNAGSRLIVHEAIADDFLSAVKALTARVTVGDPLDDQTKVGAMISSDHLAKVTDYVTAAAGEGSNVYSGGKQLASNAGQYLDPTIIRGVTEDMAIAREEVFGPVLSVLTFESIEKALHIANNTPYGLSAGVWSASIDTCMSVARGVRSGTVWVNTFMEGYPELPFGGYKQSGLGRELGKRAVEDYTEEKTIQFHRGQRTGWWVG

SEQ ID NO: 7031 - protein, 260 aa, Brassica napus
MAMLGLVLCLLTILADFTTISEARIPGVYSGGGWETAHATFYGGSDASGTMGSACGYGNLYTKGYGVNTAALSTALFNNGFSCGACFELKCASDPKWCHSGSPSIFVTATNFCPPNFAQPSDNGGWCNPPRPHFDLAMPMFLKIAEYRAGIVPVSFRRVPCRKRGGMRFTINGFRYFNLVLVTNVAGAGNIVRLSVKGTRTSWISMSRNWGQNWQSNSVLVGQALSFRVTASDRRSSTSWNIAPTHWQFGQTFMGKNFRV

SEQ ID NO: 7032 - protein, 503 aa, Acinetobacter sp. M-1
MHYVDPNQSGSKIHFKDQYENFIGGQWVAPVKGVYFDNISPVDGKSFTRIPRSSAEDIELALDAAHKAKKEWNKSSPTTRSNLLLKIADRMEANLEMLAVAETWDNGKPVRETLAADIPLAIDHFRYFAGCIRAQEGGISEIDEDTIAYHFHEPLGVVGQIIPWNFPILMAAWKLAPALAAGNCVVIKPAEQTPVGILLVAELIQDLLPAGVLNIVNGYGAEVGRPLATSPRIAKIAFTGSTQVGQLIMQYATENIIPVTLELGGKSPNVFFADVMDHDDDFLDKTLEGFAMFALNQGEVCTCPSRALIQESIADQFMEKAIERVKRIKLGHPLDTDTMVGAQASLEQQEKILRCIDTGRQEGAEVLLGGHGRQEVGNGYYIEPTIFKGHNNMQVFQEEIFGPVLSVTTFKDFDEAIQIANDTMYGLGAGVWSRSTHTAYRAGRAIEAGRVWTNCYHIYPAHAAFGGYKKSGVGRENHKMMLDHYQQTKNLLVSYSTKAMGFF

SEQ ID NO: 7033 - protein, 304 aa, Streptococcus pyogenes M1 GAS
MTKVRKAIIPAAGLGTRFLPATKALAKEMLPIVDKPTIQFIVEEALKSGIEEILVVTGKAKRSIEDHFDSNFELEYNLQAKGKNELLKLVDETTAINLHFIRQSHPRGLGDAVLQAKAFVGNEPFVVMLGDDLMDITNASAKPLTKQLMEDYDKTHASTIAVMKVPHEDVSSYGVIAPQGKAVKGLYSVDTFVEKPQPEDAPSDLAIIGRYLLTPEIFGILERQTPGAGNEVQLTDAIDTLNKTQRVFAREFKGNRYDVGDKFGFMKTSIDYALEHPQVKEDLKNYIIKLGKALEKSKVPTHSK

SEQ ID NO: 7034 - protein, 311 aa, Eremothecium gossypii
MSAIFGNSTVAAMVGQGQGLNYWQVLANVKTVQPQLNVLEQFWAAWYSYMENDVLATGLLFFVLHEFMYFARSLPWFIIDQMSWFRKYKIQPTKTPSAKEQWHCLKSVLLSHFLVEAIPIWTFHPLCQKLGISVEVPFPTWKTVATEIALFFVLEDTWHYWAHRVFHYGVFYKYIHKQHHRYAAPFGLCAEYAHPVETMLLGFGTVGMPVLYVLYTGKLHLFTLCLWITLRLFQAVDSHSGYDFPWSLNKFLPFWAGAEHHDLHHHYFIGNYASSFRWWDYTLDTEAGLEAKTTREERMKKRAELRGKKLN

SEQ ID NO: 7035 - protein, 346 aa, Bifidobacterium longum DJO10A
MKAVVLEEQGVINVREVPDVKDPGPGELRIAPHTVGVCGSDLHYYTHGRVGKYVVEQPMILGHEAAGTVLEVGPGVTDFKPGDRVALEPGIPDMTSRASRLGMYNVDPAVRFFATPPIDGCLCEEVIHPAAFTYHLPDSMSFGEGALLEPTAVGMWAATKARIKPGDVCVVTGSGTVGMLTASAALAGGASKVLVSDVSSIKLGIIGQIPGVIPVDLTTEDLVERVREETAGWGADVAFECSGAPKAYETFWKLIAPGGCAVLVGIPVNPVPIDVTELQATEVRIENIFRYANVYQKAIDLVDSGRLNLKPFITDTFAMKDAKAAFDRMDEGRPGDIKLQITVNRD

SEQ ID NO: 7036 - protein, 293 aa, Sinorhizobium meliloti 1021
MKGIILAGGRGTRLYPVTISVSKQLLPVHDKPMIYYPLGMLMLAGIREILVITMPRDRPLFEELLGDGSQFGLAISYAEQPEPNGLAEAFIIGRDFIGNSSVALILGDNIFYGAGLPELCSDAAARPSGATIFAYRVDDPERYGVVSFDGETGRAETIEEKPELARSSWAVTGLYFYENSVLEIASSIKPSARGELEITDVNRAYLERGDLHVCRLGRGYAWLDTGTHDSLHDAASFVRTIEHRQGVKIMCPEEIALELGYVSADQVLQRADLLGKNDYAIYLRRRVRELSDA

SEQ ID NO: 7037 - protein, 754 aa, Caulobacter crescentus CB15
MGEGGQRATPSVTKIVGGEMAARVRAFDWSKTPLGPREDWSPALRLATDIVLASNFPMALRWGPELVLIYNDGYAPALHERHPSALGQSFYDTTPEFQAALRELHQDILTGTSGGFAFERLPLKVLKNGVLEAAYFTVNYSPVPDETAPNGIGGVLVAAVEISQSVKAEQTLRATQERYQMAREVAGVVGAWEWDMKADKVYADARYAELHNVDPALAERGLPVQAFLPALHPDDRDRIRAIAQSSAANGEAFSEEYRLIQADGSIRWVYTRGKAYLDADGQPARNTGVIIDVTERKKAEAELAAARVDLDLAAQAAGLGRWVLRPNVNQRHWDARTRAIFGLTEHEPPSTARFLSLVHPDDRETVRDAMVAATDPGGSGTINLDYRIRRANDGVPRWIEVFGQAFFEEGVCTRFVGVVSDVTDRREAVDRLVRQEETLRLAIDAADVGTWDHDLETGEVRLSDRCYAMFGVTPGEPVTHETLMPFTHPADVVRVQEAVARALDPAIRADYAIEFRVNGRDDHVERWLSAKGEVSFDNEGRPRRFLGAVVNITERKRAELHLRLLVNELNHRVKNSLATIQAIAAQSFNGQRDMDEAKEAFSNRIVALAEAHDLLTRENWEGAEMHDVAARVAALHGGDARFELSGVAIRLSPKTALSLSMALHELATNAVKYGALSVPEGVVRIVWDMAPEPGAPRLDLTWTERGGPPVTPPQRRGFGSRLIERGLAAELAGAAVIDFQPEGVVCRIRALLEA

SEQ ID NO: 7038 - protein, 107 aa, Glycine max
MKNCELCKLPARTFCESDQASLCWDCDAKVHGANFLVERHTRTLLCHACQSPTPWKASGADLGNTVSLCERCAGGTTEQGQESQGGNDDDIDTDIDTDDEDDYDESE

SEQ ID NO: 7039 - protein, 175 aa, Triticum aestivum
MAPTVMASSATSVAPFQGLKSTAGLPVSRRSNGASLGSVSNGGRIRCMQVWPIEGIKKFETLSYLPPLSTEALLKQVDYLIRSKWVPCLEFSKVGFIFREHNASPGYYDGRYWTMWKLPMFGCTDATQVINEVEEVKKEYPDAYVRIIGFDNMRQVQVRQLHRFKPPGCEESGKA

SEQ ID NO: 7040 - protein, 535 aa, Gloeobacter violaceus PCC 7421
MDIDHLACYRAVLARDERFDGRFYTAVKTTGIYCRPVCPTPPPKAHNCMFFASAAAAQAAGFRPCIRCRPELAPGHAGWSGTHETLRRAISLMAEGAPETENLPDIAAAVGVGERQLRRIFREQTGASAIEFKTVHRILFAKALIVDTDLAMAEIAFASGFGSIRRFNAAFQQMYGRPPHTLRKQGCIAGGCGIVLRLGYRKPFNWSAFLAFLAPRAIRGVEAVTGETYRRSLRAADGAALVTVTDDPQAGVLVARVQSDRVAALSAVAARLRRFFDLDADPAAIAAVLGADPLLAPLLETVPGRRIPGTMDSFELAVRAIVGQQVSVTGARTIVGRIAERWGEPLDLHLGALPPDGPLLLFPQVQALVNAPLEDVGVMPARARAIRALAAALVEDPELLNPAPPPARTVARLLQLPGIGPWTAQYVAIRALGDPDAFPAGDLGLLKATSSGRPHLTPRALELRSQAWRPWRAYAAIHLWASQAATTDKHEGEGEGSCHRRNPSTALYKSGTSQHRSEPYGVRSTATVPSFTSTS

SEQ ID NO: 7041 - protein, 417 aa, Erwinia carotovora subsp. atroseptica SCRI1043
MESKVVVPTEGQKITVDAQGKLVVPNNPVIPFIEGDGIGIDVTPAMINVVDAAVKKAYQGKRAISWMEIYTGEKSTQVYGKDVWLPDETLDLIREYRVAIKGPLTTPVGGGIRSLNVALRQQLDLYVCLRPVRYYEGTPSPVKQPELTDMVIFRENAEDIYAGIEWKAGSVEADKVIKFLREEMGVSKIRFPEQCGIGVKPCSEEGTKRLVRAAIEYAITNDRDSLTLVHKGNIMKFTEGAFKDWGYQLAREEFGGELIDGGPWVKIKNPNTGKEIVVKDVIADAFLQQILLRPAEYDVIACMNLNGDYISDALAAQVGGIGIAPGANIGDECALFEATHGTAPKYAGQDKVNPGSVILSAEMMLRHLQWFEAADLIVKGVEGAIKNKTVTYDFERLMEGAKLRKCSEFAQDIIDNM

SEQ ID NO: 7042 - protein, 513 aa, Nitrobacter winogradskyi
MDIRAQVSMVFHLDKCIGCHTCSIACKNIWTDRKGTEYMYWNNVETKPGTGYPTRWEDQTKYRGGWVVDGQRQKSLRLRLQGKWGTLTNIFYNPYLPTLDDYFEPWTYDYQNLINAPLADEQPTARAISMVTGKYMDTIEAGPNWDDDLGGSQVYANNDPNFDGASDEEMRQINEINSTVFFYLPRICNHCLNPGCVAACPQGALYKRGEDGVVLVSQERCRAWRMCVSGCPYKKTYFNWSTGKAEKCILCYPRLESGQPPACFHSCVGRIRYIGLVLYDADAIEETAKSPQDQLVMAQRNIIKDPFDPEIIAAARANGIPAAKIQAAQQSPVYQFVKKWGIALPLHPEFRTLPMLFYVPPLGPVLAKVENGVYNNISHEARLGPLMSSLERSRVSLRYMASLLSGGNEEVIRDVYKKLVAVRVYMRSRKVKDIPDEEVQRALSEGKTTAAEVEAIWRLTSMPTFEERFVVPPMERETAVDALFPQLDPVSHNYSIRRGAVGVGFHTDPARGP

SEQ ID NO: 7043 - protein, 594 aa, Neisseria meningitidis
MALVELKVPDIGGHENVDIIAVEVNVGDTIAVDDTLITLETDKATMDVPAEVAGVVKEVKVKVGDKISEGGLIVVVEAEGTAAAPKAEAAAAPAQEAPKAAAPAPQAAQFGGSADAEYDVVVLGGGPGGYSAAFAAADEGLKVAIVERYKTLGGVCLNVGCIPSKALLHNAAVIDEVRHLAANGIKYPEPELDIDMLRAYKDGVVSRLTGGLAGMAKSRKVDVIQGDGQFLDPHHLEVSLTAGDAYEQAAPTGEKKIVAFKNCIIAAGSRVTKLPFIPEDPRIIDSSGALALKEVPGKLLIIGGGIIGLEMGTVYSTLGSRLDVVGMMDGLMQGADRDLVKVWQKQNEYRFDNIMVNTKTVAVEPKEDGVYVTFEGANAPKEPQRYDAVLVAAGRAPNGKLISAEKAGVAVTDRGFIEVDKQMRTNVPHIYAIGDIVGQPMLAHKAVHEGHVAAENCVGHKAYFDARVIPGVAYTSPEVAWVGETELSAKASGRKITKANFPWAASGRAIANGCDNGFTKLIFDAETGRIIGGGIVGPNGGDMIGEVCLAIEMGCDAADIGKTIHPHPTLGESIGMAAEVALGTCTDLPPQKKK

SEQ ID NO: 7044 - protein, 250 aa, Solanum tuberosum
MGRGRVQLKRIENKINRQVTFSKRRSGLLKKAHEISVLCDAEVGLIVFSTKGKLFEYANDSCMERLLERYERYSFAERQLVPTDHTSPGSWTLEHAKLKARLEVLQRNQKHYVGEDLESLNMKELQNLEHQLDSALKHIRSRKNQLMHESISVLQKQDRALQEQNNQLSKKVKEREKEVAQQNQWDQQNHEINSSTFVLPQQLDSPHLGEAYQNTNVVDNGEVEGGNSSQQQGAANNTVMPQWMLRHLNG

SEQ ID NO: 7045 - protein, 180 aa, Streptococcus mutans UA159
MLEQNIKKVLYSEEEIIVKTKELGAQLTKDYAGKNPLLVGVLKGSVPFMAELMKHIDTHIEIDFMVVSSYHGGTTSSGEVKILKDVDTNIENRDVIFIEDIIDTGRTLKYLRDMFKYRQANSVRIATLFDKPEGRVVDIDADYVCYKVPNEFIVGFGLDYAENYRNLPYVGVLKEDVYSK

SEQ ID NO: 7046 - protein, 481 aa, Glycine max
MLDSATPHDKITTAASGFVLEDVPHLSAYIPHLQTYPDPLQDNPSYSVVAQYYVNVDDTIAQQIVVHKNSPRGTHFRRAGPAQKVYFDSEEVHACIVTCGGLCPGLNTVIREIVCGLYHMYGVHKVLGIQGGYPGFYSRNTVPLTPKVVNDIHKRGGSILGTSYGGHDTSKIVDSIQDRGINQVYILGGYGTQYEAAMIFEEVRRRGLKVAVVGIPKTIDNDIPVIDKSIGFDTAVEEAQRAINSAHVEAESAENGIGVVKLMGRYSGFIAMYATLASRDVDCCLIPESPFYLEGPGGLLEFIEKRLKEQGHMVIVIAEGAGQELLSGNPSIVNKPDASADKLFPDVGLWLSQKIKDHFEKRQKMAINLKYIDPTYMIRAIPSNASDNVYCTLLAQSAVHGAMAGYTGFTVGPVNGRNCYIPFHLINEGEKRVVITDRMWARLLSSTHQPCFLNPKEITGEREERTENQTTDGQNHSEIAD

SEQ ID NO: 7047 - protein, 236 aa, Oryza sativa (japonica cultivar-group)
MELSLSARLALPLSPAAGTARPRRPAAFACRCCSGGASHDGTTRRRWLASLLAATAAAVGIGVAGGDADAVSTSRRALRSAKIPESEFTTLPNGLKFCYRVTGRQTILCYFPFSECRVTSEALSRYYDITVGSGLKAVKGSRVAVHYVAKWKGITFMTSRQGLGVGGGTPYGFDIGNSERGNVLKGLDLGVEGMKVGGQRLIIVPPELAYGKKGVQEIPPNATIEVDCHLLPCHLH

SEQ ID NO: 7048 - protein, 430 aa, Heterocapsa triquetra
MIKSLFAREILDSRGNPTVEVDLVTESGISVRAAVPSGASTGIHEACELRDGDKGRYLGKGVKKAVEAVNTVLASALKGADVSEQKALDAKMCELDGTPNKGKLGANAILGVSLAAAKAAAEAKGVPLYKHFGDLAGNPGPVVLPVPCFNVVNGGSHAGNKLAFQEYFIIPVGAETFTEAMRIGAECYHTLKGIIKKKYGGDATLIGDEGGFAPPCDAREGVELVMEAIEKAGYKDKCKIGMDVAASEFKVEGQDCYDLGTWYPDGEKDAPGLKMTGAELADFYAKLCQDFPIITIEDPFDQDDWASWKLFTEKVGGPCQVVGDDLTVTNVTRVKKAIDDKACNALLLKVNQIGSVTESIDAVKLCKQSGWGVMTSHRSGETEDVTIADLAVGLCTGQIKTGAPCRSERNAKYNQLMRIEEELGDKAVYA

SEQ ID NO: 7049 - protein, 200 aa, Zea mays
  unsure (1)..(200): unsure at all Xaa locations
VPCVTPINRLRGELNPLQDASGGKKISINDLVIKAAALALRKVPQCNSSWMNDFIRHYHIVTITLLXPTGHGLVGPVIRDADKKGLGTIAEEVKQLAQKARDNSLKPADYEGGTFTISNLGGPFGIKQFCAIINPPHAAILAIGSAEKRVIPGSADGLYEFGSFMSATLSCDHRVIDGAIGAEFLKAFKGYIENPTSMLL

SEQ ID NO: 7050 - protein, 198 aa, Gossypium hirsutum
GQNPLFPRILGHEAEGVVESVGKGVIDVQPGDHVLPIFTGECRECPHCLSEASNMCDLLRINTERGGMLHDGHTRFSKDGKPIYHFLGTSTFSKYTVVHVGQVAKINPEAPLDKVCVLSCEMSTGFGATVNVAKPKKGGFVAVFGLGAVGLAAAEGARVCEASRIIGIDLNPNRSEEAKKFGCTEFVNPKDHNKPIQE

SEQ ID NO: 7051 - protein, 198 aa, Gossypium hirsutum
GQNPLFPRILGHEAEGVVESVGEGVIDVQPGDHVLPIFTGECRECPHCLSEASNMCDLLRINTERGGMLHDGHTRFSKDGKPIYHFLGTSTFSKYTVVHVGQVAKINPEAPLDKVCVLSCEMSTGFGATVNVAKPKKGGFVAVFGLGAVGLAAAEGARVCEASRIIGIDLNPNRSEEAKKFGCTEFVNPKDHNKPIQE

SEQ ID NO: 7052 - protein, 334 aa, Zea mays
PRARRLPCPPTPTGKGETLGRLASGVQGTLMTELWMEVLPPPYFAGQAAGGWFLPDRRAGPGAWTLEENKMFERALARVDWDAPDRWERVAAMLPGRTASDVAAHYDDLECDVGCIEAGFVPFPCYGSGGGGGASQSAGFTFDWDAGGLGFKRSCYVVGGGKRERGPDQERKKGVPWTEEEHKQFLMGLKKYGRGDWRNISRNFVTSRTPTQVASHAQKYFIRLNSGGKDKRRSSIHDITTVNLPDDDAGGTASASPPSVLTSASAPSSTGGGGPVVSEQFGVLVDSKPPAPHHHFVPHPYGNVKLEPVSSHHGGFLDDSVLMQMHCGQLQPLG

SEQ ID NO: 7053 - protein, 460 aa, Xanthomonas campestris pv. campestris str. ATCC 33913
MTATRYDAIVVGAGQAGPSLAVRLAERGQRVAVIERHLVGGTCVNTGCMPTKTLVASARVAHLARRAGDYGVRIAGPVEVDLPQVMARAHAISDAARTGVEQWLAQTPGVQLIRGHARFVAPDRLRVGAQELGAPRIFLNVGGRARTPELPGLDQISPLNNTSILQLRTLPQHLVVIGGSYIGLEFAQIFRRLGAQVTVVEQHAHLIGREDADISEAIAQMLQDEGIAVRTDARCIAFAAHADGAAVQLECAQGAPQIVASHVLLALGRQPNTDDLGLEAAGIATDAQGYVQVDMQLATNVPGVWAMGDCNGRGAFTHTAYNDYEILAANLLDGAERRLSQRVPAYALFTDPPLGRVGMSETQARASGRPLLVAQRPMQQVGRARENGETIGMMKLVADAQTRRVLGAAILGLHGDEAIHGIIDLINADQPIDTLEWAVPIHPTVSELWPTLARALAPAQ

SEQ ID NO: 7054 - protein, 465 aa, Glycine max
MMAHLLHTPFIPSSSALRRAAPIPHRKTTTPLVVRAKIREIFMPALSSTMTEGKIVSWTKSEGDKLSKGDSVVVVESDKADMDVETFYDGYLAAIVVEEGGVAAVGSPIAFLAETEDEIPQAKSKASSSSSSSSAPAPATAPAPAPPVESQPEKVAAPVAAAVAAPVVASSHPASEGGKRIVASPYAKKLAKELKVELGRIVGTGPMGRIVAKDVEAFAAAGNVAAAVAPALGKSAAPAGVELGSVVPFTTMQSAVSRNMAESLAVPTFRVGYTITTDALDALYKKIKSKGVTMTALLAKATALALVKHPVMNSSCRDGNSFTYNSSINIAVAVAIDGGLITPVLQGADKIDVYSLSRKWKELVDKARAKQLQPHEYNTGTFTLSNLGMFGVDRFDAILPPGTGAIMAVGASEPTVVATKDGRIGMKNQMQVNVTADHRVIYGADLASFLQTLSQIIEDPKDLTF

SEQ ID NO: 7055 - protein, 414 aa, Bordetella pertussis Tohama I
MHQNGFTTTIVHSDRDQSAEHGAVHKPMHPSSEYVYEDARELAAVFQGKAGFTYARQGTPTTTALEARITRMEAGKSTVSFATGMAALAAIFTTLLRRGDHLVSSQYVFGNTNSLLNTLMELGVEVTMVDATDVRQVRDALRPNTRMVFTETIANPGTQIANLAGMGALCRERGLVYVVDNTLTSPWMFRPVEVGASLVMNSLSKYIAGHGHALGGAVTDTGLYDWSGYANIYESYRKGAPTGWGLTQIKKKGLRDMGGTLAAEPAHRIAIGTETLALRMARHCSNALALATFLQGHPGVARVHYPGLSSHAQHQRASELFDGRYGGLLGVELAEGIDCFDFLNRLRIVLMATHLGDTRSLALPAAHTIYYEMGAEKRAQMGIADSLIRVSVGIEDEADLLFDFDQALRGCLQS

SEQ ID NO: 7056 - protein, 456 aa, Magnaporthe grisea 70-15
MSDLSKNFETLQLHAGQQPDPATNSRAVPIYATTSFVFNDSAHGARLFGLKQFGNIYSRLANPTVDVFEKRVAALEGGVAAVATASGQAAQFMTILALAHAGDNIVSTSNLYGGTYNQFKVMFPRLGIQTKFVDGDKPEDLIAAIDDKTKAVYLESIGNPRYNIPDFEKITKLAHEKGVPVVVDNTFGAGGYFVRPIEHGADIVVHSATKWIGGHGTTIGGIIVDSGKFDWGANSKRFPQMVEPSEGYHGLKFWETFGPITFAIRVRVEVLRDLGACLSPFAAQQLILGLETLSLRAERHAQNALALARHLEKSPYVAWVSYPGLESHGSHENAKKYLKRGFGGVLSVGVKGGGAAGSQVVDGFKMISNLANVGDSKTLAIHPWTTTHEQLSEQERISSGVTEDLIRISVGTEHIDDIIADFEQSFKSAAATTKSTDGGDAKGAPGKEDEAAPVVV

SEQ ID NO: 7057 - protein, 543 aa, Brucella suis 1330
MTVKTIATTPYQDQQPGTSGLRKKVPVFQQPNYAENFIQSIFDVLEGFKGKTLVVGGDGRFYNREVIQKLIKIAAANGFGRIMVGQGGILSTPAASNMIRKYKAFGGMILSASHNPGGPTQDFGIKYNIGNGGPAPEKITEAIFARSKVIDQYKIADAADIDIDKIGTSKIGDTEVVIFDPVADYAELMESLFDFAAIRAMIKGGFQMKFDAMHAVTGPYAKEIFERRLGAPEGSVVNFVPLPDFGGHHPDPNLVYAKDLYDLLMSSHAPDFGAASDGDGDRNLILGRGIFITPSDSLAMLAANAHLAPGYKGGIKGIARSMPTSAAADRVAEKLGIGMYETPTGWKFFGNLLDSGKVTICGEESSGTGSDHVREKDGLWAVLLWLNILAVRKESVKAIADDHWARFGRNYYTRHDYEAVDSDIATKLVADLRGKLAGLPGTSVNGLRIEKADDFAYHDPVDGSTSEHQGIRIYFEGGARIVLRLSGTGTSGATIRIYIERYEADPAKHNLDTQATLAPLIDAAEQIAEVKKRSGRTEPSVVT

SEQ ID NO: 7058 - protein, 477 aa, Pseudomonas aeruginosa PAO1
MNSPALPLSRGLRIRAELKELLTLAAPIMIAQLATTAMGFVDAVMAGRASPHDLAAVALGNSIWIPMFLLMTGTLLATTAKVAQRHGAGDQPGTGPLVRQALWLALLIGPLSGAVLWWLSEPILGLMKVRPELIGPSLLYLKGIALGFPAAALYHVLRCYTNGLGRTRPSMVLGIGGLLLNIPINYALIYGHFGMPKMGGPGCGWATGSVMWFMFLGMLFWVNKASIYRASQLFSRWEWPDRATIGPLVAVGLPIGIAVFAESSIFSVIALLIGGLDENVVAGHQIALNFSALVFMIPYSLGMAVTVRVGHNLGAGLPRDARFAAGVGMAAALGYACVSASLMLLLREQIAAMYSPDPAVIAIAASLIVFSALFQFSDALQVTAAGALRGYQDTRVTMIMTLFAYWGIGLPVGYSLGLTDWFQEPTGPRGLWQGLVVGLTGAAIMLCIRLARSARRFIRQHERLQREDAEAASVLGR

SEQ ID NO: 7059 - protein, 656 aa, Oryza sativa
MAAPPPALRRLLLLLLFSLLLLASVAAAAAAPAAEEEEFTEELLLRPLPDRKALAHFHFRSSASPSAAAAGRHHHLFPKAIAQLWGGYDPMSTNYAKPPGVELWAAFDLPLDEIDATWKNLTHTLSGLFCASINFLESSTAFSAPRWGFKLNEGNLRYGALPREATLTVVLQPDTFWGQQLHSTDGQLQPSWSMKDLFNRKLSGKCRVSKSSRVFLEIENDIVDKSGTEASWTNELFVLSTAPDRVLKELNNMDAQSSSLYEYDVSNYNNDKPLDVGITWKLPLIWSCTPAPYHANRFLMGSGNERGSIALSFRSTNLHKQLFGSSNDCSIKAVVFQVVPCMESATLSLDFDKGFLHIDEYPPDANQGFDIPSALVTFPEFNSSRSYPEGDTLFVSPLLQTFKEDGVVKSYTEVLLVPLTTPDFSMPYNVITFTCTVLALYFGSLLNALRRRIGEEERELKKAAAKRGLIPLLIAKLRGKKVDPPPQGSSPTSLLSTKLLLKVVFVATLLPMRKKPARAVPEWLNSPLWSAPPPSSSSPSPPVPPDPYGADLSPPPPPPPKPPPTVPPPSYEQAVGSSRRARSEAGWEEEEEEDGEVGGGAALRAHLLADFKLALSKKVVNMGELRRLACLGVPDGGAAVRPLVWKCAASVGISAN

SEQ ID NO: 7060 - protein, 513 aa, Nitrobacter winogradskyi
MDIRAQVSMVFHLDKCIGCHTCSIACKNIWTDRKGTEYMYWNNVETKPGTGYPTRWEDQTKYRGGWVVDGQRQKSLRLRLQGKWGTLTNIFYNPYLPTLDDYFEPWTYDYQNLINAPLADEQPTARAISMVTGKYMDTIEAGPNWDNDLGGSQVYANNDPNFDGASDEEMRQINEINSTVFFYLPRICNHCLNPGCVAACPQGALYKRGEDGVVLVSQERCRAWRMCVSGCPYKKTYFNWSTGKAEKCILCYPRLESGQPPACFHSCVGRIRYIGLVLYDADAIEETAKSPQDQLVMAQRNIIKDPFDPEIIAAARANGIPDSKIEAAQKSPVFQFVKKWGIALPLHPEFRTLPMLFYVPPLGPVLAKVENGVYDNVANEARLGPLMSSLERSRIPLRYMASLLSGGNEEIIRDVYKKLVAVRVYMRSRKVKDIPDEEVQRALSEGKTTAAEVEAIWRLTSMPTFEERFVVPPMERETAVDALFPQLDPVSHSYPIRKGAVGVGFHTDPARGP

SEQ ID NO: 7061 - protein, 175 aa, Synechococcus elongatus PCC 7942
MNSAATDFFAIAGWLGWATLALTILTVLAFVLGWGFRFRLVGVTAFTIVLIGGCIGFALGFKQPVSIEGAAPFNVVYDAGGSEAVVAVAPTIAPEAVEPTLKQAAFNLFSRGRYSSQGEQQLHIRLRTILHPQPGISEPLYLGEVKRSLNQLDDEAMQILVDPQAIARLAAAENG

SEQ ID NO: 7062 - protein, 513 aa, Nitrobacter sp. PJN1
MDIRSQVSMVFHLDKCIGCHTCSIACKNIWTDRKGTEYMYWNNVETKPGTGYPTRWEDQTKYRGGWVVDGQRQKSLRLRLQGKWGTLTNIFYNPYLPTLDDYFEPWTYDYQNLISAPLADEQPTARAISMVTGKYMDTIEAGPNWDDDLGGSQVYANNDPNFDGASDEEMRQINEINSTAFFYLPRICNHCLNPGCVAACPQGALYKRGEDGVVLVSQERCRAWRMCVSGCPYKKTYFNWSTGKAEKCILCYPRLESGQPPACFHSCVGRIRYIGLVLYDADAIEETAKSPQDQLVMAQRNIIKDPFDPEIIAAARANGIPDSKIEAAQKSPVYQFVKKWGIALPLHPEFRTLPMLFYVPPLGPVLAKVENGVYDNIASGSRLGPLMSSLERSRIPLRYMASLLAGGNEDIIRGVYKKLVAVRVYMRSRKVKDIPDEEVQRALAEGKTTAAEVEAIWRLTSMPTFEERFVVPPMERETAVDALFPQLDPVSHNYPIRKGAVGVGFHTDPARGP

SEQ ID NO: 7063 - protein, 594 aa, Neisseria meningitidis
MALVELKVPDIGGHENVDIIAVEVNVGDTIAVDDTLITLETDKATMDVPAEVAGVVKEVKVKVGDKISEGGLIVVVEAEGTAASPKAEAPVAPAQEAPKAAAPAPQAAQFGGSADAEYDVVVLGGGPGGYSAAFAAADEGLKVAIVERYKTLGGVCLNVGCIPSKALLHNAGVIDEVRHLAANGIKYPEPELDIDMLRAYKDGVVSRLTGGLAGMAKSRKVDVIQGDGQFLDPHHLEVSLTAGDAYEQAAPTGEKKIVAVKNCIIAAGSRVTKLPFIPEDPRIIDSSGALALKEVPGKLLIIGGGIIGLEMGTVYSTLGSRLDVVEMMDGLMQGADRDLVKVWQKQNEYRFDNIMVNTKTVAVEPKEDGVYVTFEGANAPKEPQRYDAVLVAAGRAPNGKLISAEKAGVAVTDRGFIEVDKQMRTNVPHIYAIGDIVGQPMLAHKAVHEGHVAAENCAGHKAYFDARVIPGVAYTSPEVAWVGETELSAKASGRKITKANFPWAASGRAIANGCDNGFTKLIFDAETGRIIGGGIVGPNGGDMIGEVCLAIEMGCDAADIGKTIHPHPTLGESIGMAAEVALGTCTDLPPQKKK

SEQ ID NO: 7064 - protein, 513 aa, Nitrobacter sp. NRB5220
MDIRSQVSMVFHLDKCIGCHTCTIACKNIWTDRKGTEYMYWNNVETKPGTGYPTRWEDQTKYRGGWVVDGHRQKNLRLRLQGKWGTLTNIFYNPYLPTLDDYFEPWTYDYQNLINAPLADEQPTARAISMVTGKYMDTIEAGPNWDDDLGGSQVYANNDPNFDGASDEEMRQINEINSTVFFYLPRICNHCLNPGCVAACPQGALYKRGEDSVVLVSQERCRAWRMCVSGCPYKKTYFNWSTGEAEKCILCYPRLESGQPPACFHSCVGRIRYIGLVLYDADAIEETAKASQDQLVMAQRNIIKDPFDPKIIAAARANGIPDSKIDAAQKSPVYQFVNKWGIALPLHPEFRTLPMLFYVPPLGPVLAKVENGVYDNIASESRLGPLMSSLERSRISLRYMASLLSGGNEEIIRDVYKKLVAVRVYMRSRRVKDIPDEEVQRALAEGKTTAAEVEAIWRLTSMPTFEERFVVPPMEREEAVDALFPQLDPVSYNYPIRRGAVGVGFHTDPARGP

SEQ ID NO: 7065 - protein, 593 aa, Neisseria meningitidis
MALVELKVPDIGGHENVDIIAVEVNVGDTIPVDDTLITLETDKATMDVPAEVAGVVKEVKVKVGDKISEGGLIVVVEAERAASPKAAPVAAPAQEAPKAAAPAPQAAQFGGSADAEYDVVVLGGGPGGYSAAFAAADEGLKVAIVERYKTLGGVCLNVGCIPSKALLHNAAVIDEVRHLAANGIKYPEPELDIDMLRAYKNGVVSRLTGGLAGMAKGRKVDVIQGDGQFLDSHHLEVSLTAGDAYELAAPTGEKKIVAFKNCIIAAGSRVTKLPFIPEDPRIIDSSGALALKEVPGKLLIIGGGIIGLEMGTVYSTLGSRLDVVEMMDGLMQGADRDLVKVWQKQNEYRFDNIMVNTKTVAVEPKEDGVYVTFEGANAPKEPQRYDAVLVAAGRAPNGKLISAEKAGVAVTDRGFIEVDKQMRTNVPHIYAIGDIVGQPMLAHKAVHEGHVAAENCAGHKAYFDARVIPGVAYTSPEVAWVGETELSAKASGRKITKANFPWAASGRAIANGCDNGFTKLIFDAETGRIIGGGIVGPNGGDMIGEVCLAIEMGCDAADIGKTIHPHPTLGESIGMAAEVALGTCTDLPPQKKK

SEQ ID NO: 7066 - protein, 513 aa, Nitrobacter sp. KB212
  unsure (1)..(513): unsure at all Xaa locations
MDIRAQVSMVFHLDKCIGCHTCSIACKNIWTDRKGTEYMYWNNVETKPGTGYPTRWEDQTKYRGGWVVDGQRQKSLRLRLQGKWGTLTNIFYNPYLPTLDDYFEPWTYDYQNLITAPLADEQPTARAISMVTGKYMDTIEAGPNWDDDLGGSQVYANNDPNFDGASDEEMRQINEINSTVFFYLPRICNHCLNPGCVAACPQGALYKRGEDGVVLVSQERCRAWRMCVSGCPYKKTYFNWSTGKAEKCILCYPRLESGQPPACFHSCVGRIRYIGLVLYDADAIEETAKSPQDQLVMAQRNIIKDPFDPXIIAAARANGIPDSKIEAAXKSPVFQFVKKWGIALPLHPEFRTLPMLFYVPPLGPVLAKVENGVYDNVANEARLGPLMSSLERSRIPLRYMASLLSGGNEEIIRDVYKKLVAVRVYMRSRKVKDIPDEEVQRALSEGKTTAAEVVAIWRLTSMPTFEERFVVPPMERETAVDALFPQLDPVSHNYPIRKGEVGVGFHTDPARGP

SEQ ID NO: 7067 - protein, 594 aa, Neisseria meningitidis
MALVELKVPDIGGHENVDIIAVEVNVGGTIAVDDTLITLETDKATMDVPAEVAGVVKEVKVKVGDKISEAGLIVVVEAEGTAAAPKAEAAAASAQEAPKAAAPAPQAAQFGGSADAEYDVVVLGGGPGGYSAAFAAADEGLKVAIVERYKTLGGVCLNVGCIPSKALLHNAAVIDEVRHLAANGIKYPEPELDIDMLRAYKNGVVSRLTTGLAGMAKGRKVDVIQGDGQFLDPHHLEVSLTAGDAYEQATPTGEKKIVAFKNCIIAAGSCVTKLPFILEDPRIIDSSGALALKEVPGKLLIIGGGIIGLEMGTVYSTLGSRLDVVEMMDGLMQGADRDLVKVWQKQNEYRFDNIMVNTKTVAVEPKEDGVYVTFEGANAPKEPQRYDAVLVAAGRAPNGKLISAEKAGVAVTDRGFIEVDKQMRTNVPHIYAIGDIVGQPMLAHKAVHEGHVAAENCAGHKAYFDARVIPGVAYTSPEVAWVGETELSAKASGRKITKANFPWAASGRAIANGCDNGFTKLIFDAETGRIIGGGIVGPNGGDMIGEVCLAIEMGCDAADIGKTIHPHPTLGESIGMAAEVALGTCTDLPPQKKK

SEQ ID NO: 7068 - protein, 513 aa, Nitrobacter sp. HTN8
  unsure (1)..(513): unsure at all Xaa locations
MDIRAQVSMVFHLDKCIGCHTCSIACKNIWTDRKGTEYMYWNNVETKPGTGYPTRWEDQTKYRGGWVVDGQRQKSLRLRLQGKWGTLSNIFYNPYLPTLDDYYEPWTYDYQNLISAPLADEQPTARAISMVTGKYMDTIEAGPNWDDDLGGSQVYANNDPNFDGASDEEMRQINEINSTVFFYLPRICNHCLXPGCVVACPQGALYKRGEDGVVLVSQERCRAWRMCVSGCPYKKTYFNWSTGKAEKCILCYPRLESGQPPACFHSCVGRIRYIGLVLYDADAIEETAKSPQDQLVMAQRNIIKDPFDPEIIAAARANGIPDSKIEAAQKSPVFQFVKKWGIALPLHPEFRTLPMLFYVPPLGPVLAKVENGVYDNIASESRLGPLMSSLERSRIPLRYMASLLAGGNEDIIRGVYKKLVAVRVYMRSRKVKDIPDGEVQRALAEGKTTAAEVEAIWRLTSMPTFEERFVVPPMERETAVDALFPQLDPVSHNYPIRKGAVGVGFHTDPARGP

SEQ ID NO: 7069 - protein, 299 aa, Methylobacillus sp. 12S
MRQKNVTKAVFPVAGLGTRFLPATKANPKEMLPVVDKPLIQYAVEEAVAAGITDLIFITGRNKRSISDHFDMAYELENELERNGKKQLLSVVQNIVPKNVNCIYIRQNQALGLGHAVKLAKPVVNDDPFAVILADDLIDAKVPVVKQMVDAYQYYRCSLLGVQEVPRDQTKSYGIVATHPMSNGIEQVAGIVEKPKPEEAPSNLGVVGRYILTPRIFHHLENLQAGSGGELQLTDAIASLLSEEQILAYRFEGTRYDCGSKSGFLEATVRLGLKHPECGKDLRALLEAIAAEGLVGKKK

SEQ ID NO: 7070 - protein, 551 aa, Spinacia oleracea
MQASTFMVKGNLGFEVQNRRVAGLAGLKGLSSIRSNNLSFVNVNDNNYKSNPCKLSCGSLSMGAGFARLGLDHVMKSSPKYRSVKAQAASGGDLEDATPVKYQGKSSASVLPYVGVACLGAILFGYHLGVVNGALDYLSADLAIAGNTVLQGWVVSILLAGATVGSFTGGSLADKFGRTKTFQLDAIPLAIGAYLCATAQNVQIMMIGRLLCGIGIGISSALVPLYISEISPTEIRGALGSVNQLFICIGILAALVAGLPLAGNPLWWRTMFGIATVPSVLLALGMGFCPESPRWLFQQGKIVEAEKAVAALYGKERVPEVINDLRASVQGSSEPEAGWFDLFSSRYRKVVSVGAALFLFQQMAGINAVVYYSTSVFRSAGIASDVAASALVGASNVIGTAVASSLMDKQGRKSLLMTSFSGMAASMLLLSLSFTWKALAPYSGTLAVVGTVLYVLSFSLGAGPVPALLLPEIFASRIRAKAVALSLGMHWASNFVIGLYFLSVVTKFGISKVYLGFASVCVLAVLYIAGNVVETKGRSLEEIELALSPAV

SEQ ID NO: 7071 - protein, 419 aa, Psychrobacter sp. 273-4
MTTNQSLLARRKAILPTGLGVAFPIFAEKAKNSEVWDVEGNRYIDFVGGISVLNTGHSHPKITQRVHEQLDKFTHTAAQMINYECYVDLAEKLCEKAPISGDTKAFFLTTGAEAVENCIKIARAKTGRPGVISFVGGWHGRTLMCMSLTGKVLPYKKNFGPMPGPVFHALFPAEELNVTEEQALHSLEMIFQADIDPSEVAAIIIEPVQGEGGFHQVTPSFAKSLRDICDEYGIVLIFDEVQCGFARTGTLFACEQLGVEPDLMTSAKSLAGGYPISAVIGRADIMDAPQIGGLGGTYSGNPLACVAALAVMEVIEEENLLERSIEIGDKIESFLKDLNLSSIGHIRHKGAMLAFELIDNEGKPDVEATTNLKAKSFEQGLLLASCGMYGNAIRVMVPLTVEDEVLQEGLDIIKGILTA

SEQ ID NO: 7072 - protein, 534 aa, Nicotiana tabacum
FGLQNRRILQGSGDLKRNTLLASRSLRMPERSSCFGVSMDSASMGIELGRARKTVQSVFGSSAKARSHRVRASGGDIEDATPLKVQGQSSGSVLPYVGVACLGAILFGYHLGVVNGALEYLAKDLGIVENTVIQGWIVSSVLAGATVGSFTGGALADKFGRTKTFVLDAIPLAVGAFLCTTAQSVQAMIIGRLLTGIGIGISSAIVPLYISEISPTEIRGTLGTVNQLFICIGILVALVAGLPLSGNPLWWRTMFGIALIPSVLLALGMAFSPESPRWLFQQGRISEAETSIKRLYGKERVAEVMGDLEASAQGSSEPDAGWLDLFSSRYWKVVSIGAALFLFQQFAGINAVVYYSTAVFRSAGISSDVAASALVGAANVFGTMVASSLMDKQGRKSLLLVSFTGMAASMMLLSLSFTWKVLTPYSGTLAVLGTVLYVLSFSLGAGPVPALLLPEIFASRIRAKAVALSLGMHWISNFFIGLYFLSIVTKFGISTVYLGFASVCLLAVMYIVGNVVETKGRSLEDIERELSPAI

SEQ ID NO: 7073 - protein, 488 aa, Psychrobacter sp. 273-4
MLKTTLNLSNPDLIKQQCLIKDGWYAANDEATIEVSNPFNGDVIGTVPSLTTADVNDAVTYSHEAQITWAAKTPQERAQLLQKWADLIDANKEDLAIIMTAEQGKPLAESRGEIGYANSFIRWFAEEGKRVYGDVIPATNSQLRYVVLKQPVGVCAAITPWNFPAAMITRKAAPALAAGCTIIIKPATETPFSALALGALAEQAGIPAGVIQVVTGKSSTIGDILTGDARIHKLSFTGSTEVGRTLMAQCAPTIKKLSLELGGNAPFIVFDDADLEKAADGLIASKYRNAGQTCVCANRVYVQDSIKDEFLGIFIKKVAELKVGNGMEEGVNVGPLINEKALQKVQALLKDALDKGATLIAGGSTNNASALAYNPTVITDISADMDIASEEIFGPIAPVFTFSSEEEVIRAANDTIYGLAAYFYSSDYARAWRVTEGLEYGMVGHNTGMLSTEVAPFGGVKQSGFGREGSKYGIEEYVVTKYWCSDVS

SEQ ID NO: 7074 - protein, 395 aa, Fritschea bemisiae
MDKLSLRDLKLNQKRVLMRVDFNVPLNADGSIRDATRIILTLPSIEYILRQKGRLVLISHLGRPKGSFDSKVSLRPCAQKLGELLGKEVGFCFDCIGAEVQKRVQNLNPGEVLLLENLRFHKGEESPEKDPGFAQSLAELGDVYINDAFGAAHRSHASIVPIAQFFPANCGVGFLMEKEIAAFSKIYLNPNRPFYAMVGGAKIGNKIDILQALSKRVDGLFIGGGMAFTFFKAKGLAIGESICDESRLKFARDFLKECERKGIRLHLPIDVVVTNGKKIQTVQIKGGVPDKWEGKDIGPQTVELWSKELNRGATLFWNGPMGVFEERAFASGTERLAHFLSEVPGDVTIGGGDLVAAVQSLNLEKKLSHVSSGGGASLEFLANGTLPGVEALSNK

SEQ ID NO: 7075 - protein, 470 aa, Solanum tuberosum
CRSHRVRAAGEDIEDAAPLKVQGQSSGSVLPYVGVACLGAILFGYHLGVVNGALEYLAKDLGIAENTVIQGWIVSTVLAGAFVGSFTGGVLADKFGRTKTFILDAIPLSVGAFLCTTAQSVQAMIIGRLLTGIGIGISSAIVPLYISEISPTEIRGTLGTVNQLFICIGILVALVVGLPLSGNPSWWRTMFGLALIPSVLLAIGMAFSPESPRWLYQQGRISEAETSIKRLYGKEKVAEVMGDLEASARGSSEPDAGWLDLFSSRYRKVVSIGAAMFLLQQLAGINAVVYYSTAVFRSAGITSDVAASALVGAANVFGTTVASSLMDKQGRKSLLLISYTGMAASMMLLSLSFTWKVLTPYSGTLAVLGTVLYVLSFSLGAGPVPALLLPEIFASRIRAKAVALSLGVHWIMNFFIGLYFLSIVTKFGISTVYMGFALSCLVAVVYITGNVVETKGRSLEEIERELSPAI

SEQ ID NO: 7076 - protein, 395 aa, Bordetella pertussis Tohama I
MRKFSRIERLPPYVFNITGELKMAARRRGEDIIDMSMGNPDGATPQHIVDKLVEASTRPDTHGYSVSKGIPRLRKAICDWYMRRYAVEFDPDSEAIVTIGSKEGLAHLMLATLDRGDTVLVPNPSYPIHIYGAVIAGANIRSVRMTPGIDFFEELERAVRESIPKPKMMILGFPSNPTAQCVDLSFFERVVALAKEHDILVVHDLAYADVCFDGYVAPSIMQVPGARDVAVEFFTMSKSYNMAGWRIGYMVGNRELVGALARIKSYHDYGTFTPIQVASIAALDGPQDCVNEIVAQYQRRRDVLARGLHEAGWNVEIPKASMYIWAQIPEPYRAMGSLEFAKRVLSDAKVAVSPGIGFGEYGDEYVRFALIENEQRTRQAVRGIKDMFRKDGLLK

SEQ ID NO: 7077 - protein, 407 aa, Haemophilus somnus 129PT
MSNFDIITPDLPESVADATVVTWHKNVGDAVKCDEVLVEIETDKIVLEIPALSDGVLETILQPEGSTVVSKQLLGKVSASAGIGEVTKSTVQNVEKTPADRHSANLNTDASSDVLSPAVRRLLAEHELNADEIKGTGVGGRITREDIALVVKQKAQQTETAQASQSIATGLKIDHRNEKRVPMTRLRKRIAERLLEAKNTTAMLTTFNEVDMQPIMNLRKRYAEKFEKQHGARLGFMSFYIKAVVEALKRYPEINASIDGDDIVYHNYFDISIAVSTPRGLVTPVVRNCDKLSMADIEKEIKLLAEKGRDGKLTVEDLTGGNFTITNGGVFGSLMSTPIINPPQSAILGMHAIKDRPVAVNGEVVIRPMMYLALSYDHRLIDGRESVGFLVTVKDLLEDPTRLLLEI

SEQ ID NO: 7078 - protein, 375 aa, Mycobacterium tuberculosis H37Rv
MKTKGALIWEFNQPWSVEEIEIGDPRKDEVKIQMEAAGMCRSDHHLVTGDIPMAGFPVLGGHEGAGIVTEVGPGVDDFAPGDHVVLAFIPSCGKCPSCQAGMRNLCDLGAGLLAGESVTDGSFRIQARGQNVYPMTLLGTFSPYMVVHRSSVVKIDPSVPFEVACLVGCGVTTGYGSAVRTADVRPGDDVAIVGLGGVGMAALQGAVSAGARYVFAVEPVEWKRDQALKFGATHVYPDINAALMGIAEVTYGLMAQKVIITVGKLDGADVDSYLTITAKGGTCVLTAIGSLVDTQVTLNLAMLTLLQKNIQGTIFGGGNPHYDIPKLLSMYKAGKLNLDDMVTTAYKLEQINDGYQDMLNGKNIRGVIRYTDDDR

SEQ ID NO: 7079 - protein, 422 aa, Staphylococcus aureus subsp. aureus Mu50
MPEVKVPELAESITEGTIAEWLKNVGDSVEKGEAILELETDKVNVEVVSEEAGVLSEQLASEGDTVEVGQAIAIIGEGSGNASKENSNDNTPQQNEETNNKKEETTNNSVDKAEVNQANDDNQQRINATPSARRYARENGVNLAEVSPKTNDVVRKEDIDKKQQAPASTQTTQQAPAKEEKKYNQYPTKPVIREKMSRRKKTAAKKLLEVSNNTAMLTTFNEVDMTNVMELRKRKKEQFMKDHDGTKLGFMSFFTKASVAALKKYPEVNAEIDGDDMITKQYYDIGVAVSTDDGLLVPFVRDCDKKNFAEIEAEIANLAVKAREKKLGLDDMVNGSFTITNGGIFGSMMSTPIINGNQAAILGMHSIITRPIAIDQDTIENRPMMYIALSYDHRIIDGKEAVGFLKTIKELIENPEDLLLES

SEQ ID NO: 7080 - protein, 285 aa, Zea mays
  unsure (1)..(285): unsure at all Xaa locations
MPIRFYPCGSSWPAPDFPACALSLRRRRAWATSAAAPSPGLHRTLRQVLFRPTAGNEQLLHSFDFSYRIPHRGMLAKGRKVAGRREEMSANYAFGPQDDDAIIKHRLLTRTTTTRGEPPLKKLQKKFMSFATEIEKDADNISDCERLYKAFLHEINTFELPLLKSKAVVDANIREKESFNELQVEIERQILHAKTDIEDLKKQLEQSKIERQHKEECEAIRKLISLQPPRSETEKLIAXLEKEITDLKAENVACIRTLEXLKKKQFALPPTWWVEELQXLDLKMS

SEQ ID NO: 7081 - protein, 198 aa, Gossypium hirsutum
GQNPLFPRILGHEAGGVVESVGKGVIDVQPGDHVLPIFTGECKECPHCLSEASNMCDLLRINTERGGMLHDGHTRFSKDGKPIYHFLGTSTFSKYTVVHVGQVAKINPEAPLDKVCVLSCEMSTGFGATVNVAKPKKGGFVAVFGLGAVGLAAAEGARVCEASRIIGIDLNPNRFEEAKKFGCTEFVNPKDHNKPVQE

SEQ ID NO: 7082 - protein, 744 aa, Moorella thermoacetica ATCC 39073
MAELEEGIVSLFQDRKGTAVDRWVATTCGYCGTGCGLYLGIKDDRAVAVKADTEAAVNKGHLCLKGLYEWKTLHHPERAKVPLCRRGREMHPVTWEKALEETAERLRQALAAGGPEAVGIYHGGQLTLEEYYAIHKLAKGVLGTPNIDANTRLCMASTVSGYTRSFGVDAPPGCYEDLDVSRLVFIFGANPAEMHPQLWQRILRNRKLNGARIMVADPRLTLPARVADLRLRLRCGSNIPLLYGLINILIKEDMLDRDFIRRATAGFEDLARAAAAFPPERVADLTGVPAADIVAAARLFGRSPSAVTVFCQGVNQTSQAVDAVTLINSLHLITGKIGRPGSAPFSLTGQASALSMREIGGGGSLPGFRNPENPEHRRQVADYWGIPEERLPRRVNDINRMLELIDTGRLKVLWVIGTNPAVSLPDLGFSRRQLEKVFLIVQDIFYPMETAAFADIFLPGAGWGEKTGVVTNSERRLNLVRRAVAPPGEARDDLAIVSSVARYLGAGGLFAWQGPENAFRELRELTRGRPNDMTEVDYALLEHLGGVQWPCPEGGRGTPRLYTDGVFPTRAEEAQGYGEFNHPEGRARLWAVPYAPPLEVPDGEFPFWLNTGRIIEHYHTRTRTKRIPELQALVPGAYVEINPHDAARLKISEGEVVRVVSRRGWIEVPARLTDVVAPGEVFVPFHFGDLDPGEGGRQQAANHLTGRNVDPLSGQPLAKTGACRIERQEAGSMGQEGQGENCSG

SEQ ID NO: 7083 - protein, 460 aa, Leptospira interrogans serovar lai str. 56601
MKEYDIIVIGTGGGTKLVTPPSKIGYKIAVIEKENPGGTCLNRGCIPSKMLIYPAEILSLTKHSEKFQISFPKKPEVDFKTLIERISKTVDDESASILPAYDKNPNITYISGTASFISDKVITVNGEQLTAKRIFIASGARPAIPDIPGLAGTPFMTSRETLRRTDLPKSMIVIGGGFIALELGFAYSSFGSEVTFLVRNRMLKNEDKDIVDEFERIFTKEHNVLLHTNIHKIEYNKNLFYVEAISQGKTILLQSEALLVATGIRPNTDLLNLQNTNIQTDKNGYIVVNEYLETTSPGVYALGDITGKYFYRHSVNFEGEFLFRTLYQEKKRTPIEYPPVPHAVFTHPQIAKVGKTEEELIQEGIDYVAAKNSYSASATGMARLSDSGFVKILIDKKSKKVLGAHVIGDEASNLIHLFILLMTMKGTLDDLLKMIYVHPALPEIARNAARKAKELLQSKK

SEQ ID NO: 7084 - protein, 198 aa, Gossypium hirsutum
GQNPLFPRILGHEAGGVVESVGKGVIDVQPGDHVLPIFTGECKECPHCLSEASNMCDLLRINTERGGMLHDGHTRFSKDGKPIYHFLGTSTFSKYTVVHVGQVAKINPEAPLDKVCVLSCEMSTGFGATVNVAKPKKGGFVAVFGLGAVGLAAAEGARVCEASRIIGIDLNPNRSEEAKKFGCTEFVNLKDHNKPVQE

SEQ ID NO: 7085 - protein, 101 aa, Zea mays
  unsure (1)..(101): unsure at all Xaa locations
MATKRSVGTLCEADLKGKKVFVRAXDLNVPLYDAHKITDDTRIRACVXAIKLLLXKGAQVILGSHLGRXKGVTPKYRLKPLVPRLSELLXVEVVMGNDCIG

SEQ ID NO: 7086 - protein, 350 aa, Caulobacter crescentus CB15
MATLLLLPGDGIGPEVCAQVRRVAAALTPDLKVDEALYGGASYDTHGTPLTDEVREQALASDAVLMGAVGGPKWADAPRHLRPEAGLLNLRKAMDVFANLRPAYCFEALAGASSLKPELVSGLDIMFVRELVGGVYFGQPRGIEDLADGQKKGFDTQVYTTSEIERVGRVAFELARGRTNKVHSAEKSNVMESGLLWKQVITELHAREYPDVQLEHILADNCAMQLVRAPKQFDVIVTDNLFGDILSDAAAMLTGSLGMLPSAALGAPGKPGLYEPIHGSAPDIAGKGLANPLAAILSFEMALRWSLKQTEAADALLAAVKAALDNGARTRDLGGSLTTTQMGDAVLAAL

SEQ ID NO: 7087 - protein, 269 aa, Solanum tuberosum
PIDQKIFEGMNSSKKLHLSNNEFTGPLPPIFGDMPNLRELNIHNNKFEGPIPPSYSHLYFPAYDGSDGPCGPPLAKSCIKEDELKKEESSSSSSSASSGWKIALIVVIVVVVIGIIVFALIIRRKKNLQQEVVLGGSSLSSSSPTSQDQKLIPQSHDHLNKMEQGQSSAASTPDRASNDGGKRAEVAGQKLLFLKDDIEKFDLPDLLKASAEVLGSGVFGSTYKAALSTGPVMVVKRFRHMNKVGKEDFHEHMRRLGRLSHKNLLPVIA

SEQ ID NO: 7088 - protein, 198 aa, Gossypium hirsutum
GQNPLFPRILGHEAGGVVESVGKGVIDVQPGDHVLPIFTGECKECPHCLSEASNMCDLLRINTERGGMLHDGHTRFSKDGKPIYHFLGTSTFSKYTVVHVGQVAKINPEAPLDKVCVLSCEMSTGFGATVNVAKPKKGGFVAVFGLGAVGLAAAEGARVCEASRIIGIDLNPNRSEEAKKFGCTEFVNPKDHNKPVQE

SEQ ID NO: 7089 - protein, 253 aa, Comamonas testosteroni
TNRLQGKVALVTGGASGVGLEVVKLLLGEGAKVAFSDINEAAGQQLAAELGERSMFVRHDVSSEADWTLVMAAVQRRLGTLNVLVNNAGILLPGDMETGRLEDFSRLLKINTESVFIGCQQGIAAMKETGGSIINMASVSSWLPIEQYAGYSASKAAVSALTRAAALSCRKQGYAIRVNSIHPDGIYTPMMQASLPKGVSKEMVLHDPKLNRAGRAYMPERIAQLVLFLASDESSVMSGSELHADNSILGMGL

SEQ ID NO: 7090 - protein, 269 aa, Lycopersicon pennellii
PIDQKIFEGMNSLKKLHLANNEFTGPLPPIFGDMPNLRELNIQNNKFEGPIPPSYSHLYLPAYDGNDGLCGPPLAKSCNKEDEKKKEESSSSSSSSSSGWKIALIVVIVVVVIGIIVFVLINRRNKNHQQEVVLGGSSLTSSSPTSQDQKLIPQSHDHLNKMEQGQSSAASTPDRACNDGGKRAEVAGQKLLFLKDDIEKFDLPDLLKASAEVLGSGVFGSTYKAALSTGPVMVVKRFRHMNKVGKEDFHEHMRRLGRLSHKNLLPVIA

SEQ ID NO: 7091 - protein, 263 aa, Phleum pratense
MASSSSVLLVVVLFAVFLGSAYGIPKVPPGPNITATYGDKWLDAKSTWYGKPTGAGPKDNGGACGYKDVDKPPFSGMTGCGNTPIFKSGRGCGSCFEIKCTKPEACSGEPVVVHITDDNEEPIAPYHFDLSGHAFGAMAKKGDEQKLRSAGELELQFRRVKCKYPEGTKVTFHVEKGSNPNYLALLVKYVNGDGDVVAVDIKEKGKDKWIELKESWGAIWRIDTPDKLTGPFTVRYTTEGGTKTEAEDVIPEGWKADTSYESK

SEQ ID NO: 7092 - protein, 263 aa, Lycopersicon pimpinellifolium
PIDQNIFEGMNSLKKLHLANNEFTGPLPPIFGDMPNLRELNIQNNKFEGPIPPSYSHLYLPAYDGNDGLCGPPLAKSCNKEDEKKKEESSSSGWKIALIVVIVVVVIGIIVFVLINRRNKDHQQEVVLGGSSLTSSSPTSQDQKLIPQSHDHLNKMEQGQSSAASTPDRACNDGGKRAEVAGQKLLFLKDDIEKFDLPDLLKASAEVLGSGVFGSTYKAALSTGPVMVVKRFRHMNKVGKEDFHEHMRRLGRLSHKNLLPVIA

SEQ ID NO: 7093 - protein, 513 aa, Nitrobacter sp. PBAB17
MDIRAQVSMVFHLDKCIGCHTCSIACKNIWTDRKGTEYMYWNNVETKPGTGYPTRWEDQTKYRGGWVVDGQRQKSLRLRLQGKWGTLTNIFYNPYLPTLDDYFEPWTYDYQNLITAPLADEQPTARAISMVTGKYMDTIEAGPNWDDDLGGSQVYANNDPNFDGASDEEMRQINEINSTVFFYLPRICNHCLNPGCVAACPQGALYKRGEDGVVLVSQERCRAWRMCVSGCPYKKTYFNWSTGKAEKCILCYPRLESGQPPACFHSCVGRIRYIGLVLYDADAIEETAKSPQDQLVMAQRNIIKDPFDPEIIAAARANGIPDSKIEAAQKSPVFQFVKKWGTALPLHPEFRTLPMLFYVPPLGPVLAKVENGVYDNVANEARLGPLMSSLERSRIPLRYMASLLAGGNEEIIRDVYKKLVAVRVYMRSRKVKDIPDEEVQRALSEGKTTAAEVEAIWRLTSMPTFEERFVVPPMERETAVDALFPQLDPVSHNYPIRKGEVGVGFHTDPARGP

SEQ ID NO: 7094 - protein, 403 aa, Neisseria meningitidis MC58
MAFLKLTEQNVQGKTVLIRADMNVPFKDGKISDDTRIRASLASIKYCVDNGASVIVMTHLGRPTEGEFHPEDDVAPVAAHLGSLLGKDVKVLNDWRENKPALNAGDVVMLQNVRINKGEKKNDLELGKAYASLCDVFVNDAFGTAHRAQASTEAVAQAAPVACAGVLMAGELDALGKALKQPARPMVAIVAGSKVSTKLTILESLADKVDQLIVGGGIANTFLLAEGKAIGKSLAEHDLVEESKKIMAKMAAKGGSVPLPTDVVVAKAFAADAEAVVKDIAADAEAVVKDIADVAEDEMILDIGPKSAAALADLLKAAGTVVWNGPVGVFEFDQFAGGTKALAEAIAQSKAFSIAGGGDTLAAIAKFGVTEQIGYISTGGGAFLEFLEGKELPAVAALEKRGA

SEQ ID NO: 7095 - protein, 309 aa, Erwinia carotovora subsp. atroseptica SCRI1043
MTQFAMVFPGQGSQTVGMLAELAAEYPVVTETFAQASEVLGYDLWQLTQQGPAEELNKTWQTQPVLLTASVAIWRAWQQQGGKTPALMSGHSLGEYSALVCAGVLDFQQTVRLVELRGKLMQEAVPEGTGAMYAIIGLDNDAIAKACEESAQGQVVSPVNFNSPGQVVIAGNKDAVERAGAACKAAGAKRALPLPVSVPSHCALMEPAAKKLSVALESVTFNSPVIPVVNNVDASIETTPEAIRNALVRQLHCPVRWTDCVEFMASQGVESLLEVGPGKVLTGLTKRIVDTLTAAAVNDPASLSAAIEK

SEQ ID NO: 7096 - protein, 515 aa, Arabidopsis thaliana
FAGYKSLATTGPLYCSGSEAMGATLARADNGIQSVMSFSSVKARSVRAQASSGDEEEAIPLRSEGKSSGTVLPFVGVACLGAILFGYHLGVVNGALEYLAKDLGIAENTVLQGWIVSSLLAGATVGSFTGGALADKFGRTRTFQLDAIPLAIGAFLCATAQSVQTMIVGRLLAGIGIGISSAIVPLYISEISPTEIRGALGSVNQLFICIGILAALIAGLPLAANPLWWRTMFGVAVIPSVLLAIGMAFSPESPRWLVQQGKVSEAEKAIKTLYGKERVVELVRDLSASGQGSSEPEAGWFDLFSSRYWKVVSVGAALFLFQQLAGINAVVYYSTSVFRSAGIQSDVAASALVGASNVAGTAVASSLMDKMGRKSLLLTSFGGMVHSMLLLSLSFTWKALAAYSGTLAVVGTVLYVLSFSLGAGPVPALLLPEIFASRIRAKAVALSLGMHWISNFVIGLYFLSVVTKFGISSVYLGFAGVCVLAVLYIAGNVVETKGRSLEEIELALFVSSFSL

SEQ ID NO: 7097 - protein, 159 aa, Microbulbifer degradans 2-40
MASIYDINIQSLQGQLIGFSDFKGKALLIVNTASKCGFTPQYEGLQQLHQQYASEGLVIIGCPCNQFGKQEPGDAKAISEGCLINYGVDFLITEKIHVNGANTHPLYRYLKTALPGFMGNNIKWNFTKFLIGKDGTPIKRFAPFTKPASMEGAVKKALG

SEQ ID NO: 7098 - protein, 152 aa, Glycine max
MRKCELCNSPAKLFCESDQASLCWKCDAKVHSANFLVTKHPRILLCHVCQSLTAWHGTGPKFVPTMSVCNTCVNNNSETCSQQNHVEDHDDNHDDGTGEDHVENHDGGVSEDDEENQVVPWTSTPPPPASTSSNSVTTSSTRFSNVEEGGSD

SEQ ID NO: 7099 - protein, 276 aa, Zea mays
MAPRQAVLAVVVLAALLPFALSRGLRLGHHRAQPHPRPHGHAPLGGGAWSSAHATFYGGGDASGTMGGACGYGNLYSQGYGTNTAALSTALFNNGLSCGACFEVRCDAAGGGGRSCLPGSVVVTATNFCPPNNALPSDDGGWCNPPRAHFDMSQPVFQRIALYRAGIVPVSYRRVACNKKGGIRFTINGHSYFNLVLVTNVGGAGDVHAVAVKAERSPGWQALSRNWGQNWQSNTLLDGQALSFRVTTSDGRSVLSNNAAPRGWSFGQTFSGAQFN

SEQ ID NO: 7100 - protein, 514 aa, Zea mays
MASPRGRMSSPLRSFLMICLMAQLGASNVVLMANNTTLSFDDVEAIFTPAVKGSGVNGVLYAVEPMDACSPLKTKAIGGSVSPFALVIRGGCHFDDKVRNAQNAGFKAAVVYDTEDNGVLVSMAGSSSGVHIYAVFVSKASGEELKKYSGQTDAELWIIPTYENSAWSIMAISFISLLVMSAILAACFFARRHQIRRDRARLPQTREFHGMNSRLVKAMPSLIFTKVQEDDCTSATCAICLEDYSAGEKLRVLPCRHKFHAACVDLWLTSWRTFCPVCKRDANAGTPEPPVSESTPLLSSSAIRLPEPTASVSFRSTVAEAAAASPPRPISRHPSPSRSISRKHSVSGSSIPGTPIPRFHASSSSPTCTSGSSLDLANMSSSPWPRASHLASAHYSCSGRLSPPIHIRNTSAAHVSRSAYGSPSRYVSSSHMSRGSPSCYYLGSSSGQQHPYLRHCTLSGTSLFTMVPQSPQQNQLQHGGDSEKDLSAAAPFRQLYYLQHCPDSGTSSQSLPGC

SEQ ID NO: 7101 - protein, 136 aa, Haemophilus influenzae
EDPTPALEGADVVLISAGVARKPGMDRSDLFNINAGIVRGLIEKVVITCPKACVGIITNPVNTTVAIAAEVLKKAGVYDKRKLFGVTTLDVLRSETFVAELKGLNVSRTSVPVIGGHSGVTILPLLSQVQYAKWNE

SEQ ID NO: 7102 - protein, 97 aa, Triticum aestivum
RATLFDLPAVLAQRKDMCDRMSLSESQIPTALLERLLAAGKKEHPPVCAILGGILGQEVIKSISCKGDPIKNFFYYDAADGKGIMEDIPPTPVEQFA

SEQ ID NO: 7103 - protein, 411 aa, Brucella suis 1330
MSISFDLTIDDTRDQLARHARASLEAKPSLIGMSREEMAAALIAAGVPERQVKMRISQLWHWLYVRGVSDFADMRNISKDLRAMLAQHFTIARPEVVEEQISQDGTRKWLFRFPPRGAGRPVEIESVYIPEEGRGTLCISSQVGCTLTCSFCHTGTQKLVRNLTSEEILAQLLTARDRLGDFPDKDTPDGAMVPAEGRKITNIVMMGMGEPLYNFEEVKKALLIASDGDGPSLSKRRITLSTSGVVPEIYRTGDEIGVMLAISLHAVRDELRDILVPINKKYPLAELIKACREYPGLSNAKRITFEYVMLKDINDSLDDAKLLVKLLQGIPAKINLIPFNPWPGTNYQCSDWEQIEKFADYVNAAGYASPIRTPRGRDILAACGQLKSESERLRKSERLALEAMMIAGHGE

SEQ ID NO: 7104 - protein, 821 aa, Moorella thermoacetica ATCC 39073
MKAIIMAGGEGSRLRPLTCKRPKPLVPVANRPVMEYCVDLLRELGIKEVGVTLQYLPQLIEEYFGDGSDFGLHLHYFVEDKPLGTAGSVKNAAAILDETFVVVSGDALTDFDLRPAIARHKESGALATLVLTAVDNPLEYGVVITNPDGSIRSFLEKPSWGEVFSDRVNTGIYILEPEVLELIPEGRPFDFSKDLFPRLLKEKRPLYGVTLSGYWCDIGNLTQYRQAQEDILRGRVKVRVVGQDKGGGVVMGEGVEIAPGARIEGPVLIGGACHIATGAVVGPFTVLGPYTRVEEGATVRRSVLWDNVYTGEGANVRGAVVCSRASLQRRVQVYEGAVIGDGTQVDAGAEVRPEVKVWPEKTLGRETVVHESLIWGRGVARPLFVGSQAPGYLHGDLTPFQVTRLGMAYGASFPPGTTVGLSTFAGGAGEMLYKALAAGLMAAGVQVADLGRLLTPIHRFAVRSLGLDGGCHIKRDAAERDKVWLHLVNSRGHDLNPAAVRKIENLYWREDGRRVQEVPASIYFPGLEGAYRDWLLATLGDHGLKKRALRVALGGQGQVAGVAGTILQDAGAEVIRLDLDPAKTWQAVQEDLPYFAGEIRRYGADLGAALDSNGEELILFTGEGRRVAPAQQMTLLARVYLETHRGASLVLPVTAPRVLEQVAGGLHGRVERVKGHPGIYHEAMARADGETALGQQHLQLDALAALVHILDWLASREESLDSAVAALPPVYTASRTVACPWEAKGRVMRTLISEEPADGVELLDGVQVRHGKGWSLVLPDGETPHYHIYSEAFSQEAAEELAGFYEERLKELIAREKSKGR

SEQ ID NO: 7105 - protein, 109 aa, Neisseria meningitidis MC58
MGGLIIEDLQEGFGKEAVKGKEITVHYTGWLENGTKFDSSLDRRQPLTITLGVGQVIKGWDEGFGGMKEGGKRKLTIPSEMGYGAHGAGGVIPPHATLIFEVELLKVYE

SEQ ID NO: 7106 - protein, 280 aa, Arabidopsis thaliana
MGRPPCCDKIGIKKGPWTPEEDIILVSYIQEHGPGNWRSVPTNTGLLRCSKSCRLRWTNYLRPGIKRGNFTPHEEGMIIHLQALLGNKWASIASYLPQRTDNDIKNYWNTHLKKKLNKSDSDERSRSENIALQTSSTRNTINHRSTYASSTENISRLLEGWMRASPKSSTSTTFLEHKMQNRTNNFIDHHSDQFPYEQLQGSWEEGHSKGINGDDDQGIKNSENNNGDDVHHEDGDHEDDDDHNATPPLTFIEKWLLEETSTTGGQMEEMSHLMELSNML

SEQ ID NO: 7107 - protein, 491 aa, Mycobacterium tuberculosis H37Rv
MSNVMVVPGMLSAAAADVASIGAALSAANGAAAPTTAGVLAAGADEVSAAIASLFSGYARDYQALSAQMARFHQQFVQALTASVGSYAAAEAANASPLQALEQQVLAAINAPTQTLLGRPLIGNGADGLPGQNGGAGGLLWGNGGNGGAGDAAHPNGGNGGDAGMFGNGGAGGAGYSPAAGTGAAGGAGGAGGAGGWLSGNGGAGGNGGTGASGADGGGGLPPVPASPGGNGGGGDAGGAAGMFGTGGAGGTGGDGGAGGAGDSPNSGANGARGGDGGNGAAGGAGGRLFGNGGAGGNGGTAGQGGDGGTALGAGGIGGDGGTGGAGGTGGTAGIGGSSAGAGGAGGDGGAGGTGGGSSMIGGKGGTGGNGGVGGTGGASALTIGNGSSAGAGGAGGAGGTGGTGGYIESLDGKGQAGNGGNGGNGAAGGAGGGGTGAGGNGGAGGNGGDGGPSQGGGNPGFGGDGGTGGPGGVGVPDGIGGANGAQGKHG

SEQ ID NO: 7108 - protein, 399 aa, Oryza sativa
MGRPPCCEKEGVKKGPWTPEEDMVLASYVQEHGPGNWRAVPPRTGLLRCSKSCRLRWTNYLRPGIRRGGFSHHEERLILHLQALLGNRWAAIASYLPHRTDNDVKNFWNTHLKKKLALTSSSSSPPTPTTPLVARGQWERKLQTDIDLARRALRDALSVDDAASPAMISSGPPAPAAAAAYALSERNISVMLSGWAAPPPARKGLSACNPAAATTTPGGAAAESASTAGTSLELTADCCSGGGDSSASNCLPSSMLLACDDGDATATAAGVAPLSAIESWLLLDDSGEPQLALDEQLLDKQVKEIDWADTFQPLVPKPHGTIYANIEQGLAATRSRRAARRCADSRRAARHEAPRSAAAPQRRPPPRGRRPGLCPSACRREAAGRRPPDGMMEGEGEEL

SEQ ID NO: 7109 - protein, 218 aa, Eremothecium gossypii
MSLAEFDELRWDHSCDRLDVPSNYLKRKARKTPGGLEELRKSMTSATIYVGNLSFYTSEEQLYELFSKCGSIEKIIMGLDRFKFTPCGFCFIIYQTPQEALAALKYLSKTKLDDREITIDLDPGFEEGRQFGRGKNGGQVSDELRFEFDASRGGFYVPLENRIGAVNHFGARRIRDPHKNHHHHHHGHHHHHGQPHAAAAKVNPMEVEEELDSYIPGQ

SEQ ID NO: 7110 - protein, 378 aa, Anabaena variabilis ATCC 29413
MEFETKAIHEGQQSDPQTGAVIVPIYLTSTYQQEAIGQHKGYEYSRTGNPTRNALEEALAAIENGEYGLAFASGLAATTTVLSLLKSCDHIVAGDDLYGGTYRLLERVVKNWGVTTTYVDIDDISNFAKAIQPNTKLIWVETPTNPLLKIIDIAALANIAEQNNLILVVDNTFASPYFQRPLDNGADIVVHSTTKYLGGHSDIIGGAVVTSNEQLYTELKFYQNAIGAVPSPFDSWLVLRGIKTLAVRMREHEKNALLLAQFLEQHPKVERVYYPGLPSHEQHQLAKSQMSGFGGMISLELKGDFADVEKFASRLQLFLLAESLGGVESLLCYPAKMTHGSLPQEERYKRGINDNLVRLSVGIENVLDLQADLENALS

SEQ ID NO: 7111 - protein, 463 aa, Desulfovibrio desulfuricans G20
MPNQPPAERVRNFDEVALGYTPEMARQEAGRCLQCKKPRCVKGCPVEVPIPQFIAALAQGDVEHAYRIIKTTNSLPAVCGRVCPQESQCEGACILQAKGQPVAIGRLERFVADEYMHRDACGLITGKPECPYIDPEKKVACIGSGPASLTAAGYLAAHGCKVTVFEALHELGGVLVYGIPEFRLPKEKIVAKEVNALRELQVEFVRNRVGGKTFSISDLFAQGYKAVFIGVGAGLPRFLGVPGENLNGVFSANEYLTRVNLGRAYSFPEYDTPIIRGRRVTVFGGGNVAMDAARTAMRLGAESVHIVYRRTQAEMPARHEEVEHAIEEGVQVAELCGPLEFRAGENGSLAAVVLQKMELGEPDESGRRRPVAVQGATVELPTDLAVIAVGTRSNPVLLENEPELKLTGRGYVSVDEETGETSMPGVYAGGDIVTGAATVILAMGAGRRAAKHIARSLGCAVED

SEQ ID NO: 7112 - protein, 226 aa, Nicotiana tabacum
ISDFWSSSSSSSSIAGKSDSVQSLTHSYNKPQKSDSGKLNQLEKGTISVKVEKESSGPRARKNKYRGIRQRPWGKWAAEIRDPQKGVRVWLGTFNTAEEAARAYDEAAKRIRGDKAKLNFPEPPSPPAKRHCTSTIPDQPTRSDLMSQKPASIMLNYGYENQTPYYPMEMPAAEDPQHHDYELKEQISNLESFLDLEPDSGIVDSDPLNIFLMDDFAATQQQQLFY

SEQ ID NO: 7113 - protein, 317 aa, Haemophilus influenzae R2866
MTTQLDSLRNMTVVVADTGDIDAIKKYQPQDATTNPSLILSASALPQYAPLIDEAVAYAKAQSNDKAQQLIDAEDKLAVNIGLEILKIVPGRISTEVDARLSYDTQATVEKARKLIALYNAAGISNDRILIKIASTWQGIRAAEILEKEGINCNLTLLFSEAQARACAEAGVYLISPFVGRILDWYKANSDKKEYAPAEDPGVISVTKIYNYYKEYGYNTVVMGASFRNVGEITELAGCDRLTIAPALLKELQENSTALVRKLEYKGEVKAKPQPLTEAEFYWQHNGDAMAVEKLAEGIRKFAIDQEKLETMLSAKL

SEQ ID NO: 7114 - protein, 493 aa, Staphylococcus xylosus
MKRKLTGLFGAPVSDRENSMTAGPRGPLLMQDIYFLEQMAHFDREVIPERRMHAKGSGAFGTFTVTNDITKYTCASIFAEVGKQTEMFARFSTVAGERGAGDAERDIRGFALKFYTDEGNWDLVGNNTPVFFFRDPKLFPSLNHVVKRNPKTNMKDPQANWDFWTLLPEALHQITILMTDRGIPKGFRNMHGFGSHTYSMYNDKGERFWVKFHHRTQQGIENYSAEEAEQVMAKDRDSSQRDLFNNIEQGNFPKWKMYIQVMTEEQARNHKDNPFDLTKVWYKDEYPLIEVGEFELNRNPENYFQDVEQAAFAPTNIVPGLDFSPDKMLQGRLFSYGDTQRYRLGVNHWQIPVNQPKGVGMENICPFSRDGHMRILDNNQGASTHYYPNSNGAFEDQPQYKKPALDIQGQAYEYDFREDDDNYFEQPGKLFRLLSSEEQQILFNNTANEMSPVTDALKHRHIRHCYKADPAYGQGVAEAMGIDINEVDLDVAD

SEQ ID NO: 7115 - protein, 263 aa, Oryza sativa
MADGKVACKHLVLVHGACIGGWTYFKVATRLRSAGYRVTAPDLGASGVDPRPLREVPTFRDYTAPLLGLLGSLPPGEKVVLVGHSLGGINVALAAELFPDKIAAAVFLCAFMPDHTSRPSHVLEKFIEGKWLDWMDTEFKPQDAEGKLPTSMLFGPQIAQERLMQLCSPEDVTLAGSLLRVSSMFVEDLQKQQPFTEGRYGSVRKVYVVVNQDLAIPEGFQRWMIGNSPVDEVKEIDAADHLVMLSRPDELARCLADIAESYA

SEQ ID NO: 7116 - protein, 589 aa, Clostridium tetani E88
MNFKKTIAILIIRIAMVFKICKKRGVYMIKEIKLEKLFPGSKEGKVGKIHKSIGDGIKSGEVLVEVEGKKGNIPIKAKEEGKIHSIEIEEGTTVKIGDVLLKIEIEEVTLDEFVIDKDEFAKKSELKSLECDVAILGAGPGGYVAAIQAAKLGAKVVIVEKDKVGGTCLNRGCIPTKAFVRSSEVYSNVKNSEKYGISLENPSIDIKKVVARKDNIVDKLVGGIQYLIQKHNIELISGNGKLIDRNTIETKDALIKAKNIVIASGSKASVLPIKGSNLKQVITSEEALDLKEVPEKIAIIGGGVIGMEFAFIYANMGVEVSVIEYFDNILSMLDEDVIKEITDIGKEKGIKFYTSSKVEEILEDENEGCIVKFTNKGEEKFIFCDKVLMSVGRQPYMENMGVEELGIELNQNKRGIKVNTKMETSVSNIYAIGDVTNVIQLAHVASHQGIVAVKNIMGKDIQIDYSAVPSVIFTEPEIAVVGVCEKIAKENNLDVEVGKFPFSANGKALTLGEDRGFIKVIKEKATGKVVGASIIGAHASDLIAELTLAVKNGLTSEQIAETIHAHPTTAEVVHEASLAVEGGALHFAE

SEQ ID NO: 7117 - protein, 274 aa, Burkholderia fungorum LB400
MSNEKAGGKLENKVAIVTGAGAGLGAACARALAQHGARVAVVDINGEAAAAVAADIGERAMSVRTDVSSEAQVKAMVSAVLEHFGRIDILHNNAAVLDDAQRAGDRDVINMSVEVWDRAMAVNLRGAMLCCKHAIPAMLRGGGGSIIHSSSGFGAQGDFTMSAYAASKAGLAMLSKSVAAQYGKERIRSNTIQIGLVVADHPLPEDIKGVILDGHLTPYLGDPKHVADVVCFLASDEAAFITGDTLAVDGGFSSHAPTLAPLRALFAARGKAAY

SEQ ID NO: 7118 - protein, 237 aa, Microbulbifer degradans 2-40
MTRPLIAVTGPSKKLKVGWWATQFILRLCGARSCYLSPAQPKLLQAVDGVVIGGGDDIDPEHYGESGDAGATYDAARDSLEIAMIKAALQAGVPLLGICRGAQLINVVLKGSLFQDIRPLRRKTPNKNSAFVIKKAYLQPSSQVAAILGKDVIGVNSLHSQAVNKLSSELQVAAVDGDDFVQAFEHQTKPFIIGVQWHPEYLPYSSCQRKLFHALVAAVGNQSKKLLPEHYNQYHIK

SEQ ID NO: 7119 - protein, 393 aa, Pseudomonas aeruginosa UCBPP-PA14
MVYLGPGKVEVQNIPYPKMQDPQGRQIDHGVILRVVSTNICGSDQHMVRGRTTAPEGLVLGHEITGEVVEIGRGVETMKIGDLVSVPFNVACGHCRTCKEQHTGVCLTVNPARAGGAYGYVDMGGWVGGQAEYVLVPYADFNLLKLPNREAAMEKIRDLTCLSDILPTGYHGAVTAGVGPGSTVYIAGAGPVGLAAAASARLLGAAVVIVGDVNPTRLAHAKKQGFEIADLSKDTPLHEQIAALLGEPEVDCAVDAVGFEARGHGHSGSQQEAPATVLNSLMGITRVAGKIGIPGLYVTEDPGAVDAAAKHGALSIRFGLGWAKSHSFHTGQTPVMKYNRQLMQAIMWDRIKIADIVGVEVITLDDAPKGYGEFDAGVPKKFVIDPHNLFRAA

SEQ ID NO: 7120 - protein, 233 aa, Triticum aestivum
MAGADVDVGTELRLGLPGGGAEAAKAGKRGYEDTIDLKLTLPTGGMQEDSAGKPEPAADKAKRPAEAAAADPEKPPAPKAQAVGWPPVRSYRRNAMTVQSVKIKKEEETEKQQPAAGAAAGANGSNFVKVSMDGAPYLRKVDLKMYNTYKDLSIALQKMFSTFTATGNEGKMVEAVNGSDVVTTYEDKDGDWMLVGDVPWEMFVASCKRLRIMKGSEAIGLAPRAKDKYKNKS

SEQ ID NO: 7121 - protein, 241 aa, Zea mays
MQYAKLLPLALIHMLGNVFTNMSLGKVSVSFTHTIKAMEPFFSVLLSILFLGETPSLPVLGSLVPIVGGVVLASMTEVSFNWIGFWSAMTSNLMNQSRNVYSKKILADKEDSLDDINLFSIITVMAFLLSAPLMLCVEGIKFSPSYLQNAGVNVKELFIRAALAGTSFYFYQQVSYSLLARVSPVTHSVANSLKRVVVIVSSVLFFRTLISPINALGTGVALAGVFLYSQFKKSKPKATAA

SEQ ID NO: 7122 - protein, 260 aa, Zea mays
MFPPGLIHHRPDAPVPGDGATRSGPGGPSLVLTADPKPRLRWTADLHERFVDAVAQLGGPEKATPKTILRTMGVKGLTLFHLKSHLQKYRLGKQSGKEGSEQSKDASYLLDAQSGMSVSPRVPAQDMKESQEVKEALRAQMEVQRRLHEQVEVQKRVQIRMEAFQKYIDSILESPCKMVTEQFASSGFSISDPDLPEISPGGVVMCGGPTDTLSSSVFNQLSVSSIGSHSPGGKPSPSPSGMECPPLLLHKSHELKRRSS

SEQ ID NO: 7123 - protein, 93 aa, Glycine max
  unsure (1)..(93): unsure at all Xaa locations
MFFSMISPPAXTTVNRAGSGMFAPFTGLKSMAGFPTRKTNNDITSIASNCXRVQFMQVLPPFGKKKFXLLSYLPDLYDAQLSYDVLIPSYLCM

SEQ ID NO: 7124 - protein, 404 aa, Leptospira interrogans serovar lai str. 56601
MDLSAKRLNVIEPSPTLVITAKANELKKKGEDIVSFGAGEPDFETPSHIRDAAKNAIDRGMTRYTAVSGTVELKEAIVHKFKRDNGLDYDKSQVIVGTGGKQVIYNYFLATLNAGDEVIIPAPYWVSYADIVRLAEGVPVIVNTTPEANFQITSEQLKKVITPKTKCLILNSPSNPTGAGYSKKDIEALGEVVLSTGIQVMSDDIYEKIVYDGFVFSNLAMLSPELKKQTFVINGVSKTYSMTGWRIGYGAGDLNIVKNMETIQSQSTSNPSSISQAAAQAAIAGDQSCVEEMRKAFQVRRDLIVSLLNAIPGVKCNNPQGAFYVFPYLTDVYKTTGFIKLKQGFSETSLSKIFCSTLLEKYKVAAVPGIAFGEDQALRLSYAMGENDIRRGVERIAEMIRDLN

SEQ ID NO: 7125 - protein, 508 aa, Triticum aestivum
  unsure (1)..(508): unsure at all Xaa locations
MMIARGCLLRSKAESIVKHVASGGSWHGLHSFSEASARGFSSEPSLQAHSTEEIGFKGHGMLAPFTAGWQSTDVHPLVIDRSEGAYVYDINGKKYIDALAGLWCTALGGSEPRLVKAATXQLNKLPFYHSFWNRTTKPSLDLANDVLSMFTAREMGKVFFANSGSEANDSQVKLVWYYNNAMGRPDKKKFIARSKSYHGSTLISASLSGLPALHQKFDLPAPFVLHTDCPHYWRFHLPDETEEEFSTRLANNLENLILKEGPETIAAFIAEPVMGAGGVILPPKTYFEKIQAVLKKYDVLLIADEVITAFGRLGTMFGCDMYNIQPDLVSIAKALSSAYMPIAAILVSPEIADVVHSQSSKLGSFAHGFTYSGHPVACAVAIEALKIYKERNITEHVNTIATRFQEGIKAFSGSPIIGEIRGLGLILGTEFADNKSPNDPFPAEWGVGSIFGAECEKRGMLIRVAGDNIMLSPPLIMTPDEVEEIVSKYGGALKATEERIEELKSAKR

SEQ ID NO: 7126 - protein, 153 aa, Oryza sativa (japonica cultivar-group)
MLQCRVFAYADTQRYRLGPNYLMLPVNAPKCAHHNNHYDGAMNFMHRDEEVDYYPSRHAPLRHAPPTPITPRPVVGRRQKATIHKQNDFKQPGERYRSWAPDRQERFIRRFAGELAHPKVSPELRAIWVNYLSQCDESLGVKIANRLNVKPSM

SEQ ID NO: 7127 - protein, 334 aa, Oryza sativa
MESPNPQQVNSMGDQSPLSPNLHPLSPSPSAAAAAAATPTPAAAAASSRSSRSKKPPHSSDPNQSKKPRLTLTVPGRPLSADGEVAAAIQHLRAADPALATVIDAHDPPAFQCPHRPFHSLVRSILYQQLAFKAAASVYSRFLSLLGGEHNVLPEAVLALTTQDLRQIGVSPRKASYLHDLARKYASGILSDAAVVNMDDRSLAAMLTMVKGIGAWSVHMFMIFSLNRPDVLPAADLGVRKGVQHLYGLDAVPRPSQMEKLCEQWRPYRSVGAWYMWRLIESKAPPPPPAIPVGPPALTEHGDELMLQQQQHQQQQQQSVIQMIDPLQMLPGMG

SEQ ID NO: 7128 - protein, 265 aa, Triticum aestivum
MDASLDFLELEAHLVFDLGDADSKRWMSLADCCSSYLPAEDSLSGLDSSCYNDPTSSPDGASTRASKNIVEERDRRRRLNEKLYAIRGVVPNITKMDKASIIQDAVAYIEELQEQERRILAEVSDLEAGGCTAVVVKSEASTGSEGVEDAGVGFSPPKKMRRTASSSINDPVTSPATHPVLLELEVMPIAEKLAVVSMRHDNAQHVMAKMYKALDPLRLKVITSSVTFVDGRTVHTMFIEMEETDSVETIKEMVQAALSHLEFLM

SEQ ID NO: 7129 - protein, 1329 aa, Mycobacterium tuberculosis H37Rv
MSLVIVAPETVAAAALDVARIGSSIGAANAAAAGSTTSVLAAGADEVSAAIATLFGSHAREYQAISTQVAAFHDRFAQTLSAAVGSYVSAEATNAAPLATLEHNVLNALNAPTQALLGRPLIGDGAAGAPGTGQAGGAGGILWGNGGAGGSGAPGQVGGAGGAAGLFGTGGAGGAGGAGAAGGAGGSGGWLLGNGGVGGAGGQSLLGGATGGAGGNAGLFGVGGTGGPGGPGGPGGVGGTGGAGGLGGTLYGAGGHGGAGGPGPIGGVGGHGGVGGAAGLLGVGGHGGAGGHGAEGVAGAAGEDLSPHGTSGGVGGDAGDGGTGGRGGWLAGAGGAGGAGGVGGTGGAGGAGFSRALIVAGDNGGDPGAGGAGGTGGAGSTIGAHGAAGASPTSGGNGGAGGNGAHFSSGGKAGGNGGAGGAGGLVGNGGAGGAGGNGAPGAPPSGGDPNGGGGGAGGAGGKGGDGGAQAGDGGAGGAGGKGGNGGNGATGATGLNGLGAGADGTDGGKGGNGGAGGGGGAGGQGGKALAATHQDGSMGAGGAGGNGGAGGMGGDGGNGAKGTFDNGGDGVGGNGGNGGSRGIGGAGGIGGAGSTAGADGARGATPTSGGNGGTGGNGANATVAGGAGGAGGKGGNGGLVGNGGAGGKGGDGMAGVAGSSPTTAGESGTSGQNGGAGGAGGAGGRGGDFGGDGGTGGAGGNGANGANATTPGAKGGDGGHGGPGAQGGNGGQGGPGGLAGNLFGQNGIQGVGGSGGKGGAGGLAGDGGNGANGNFAFGDGNGGHGGNGGNPGAGGQGGSGGAGSTPGAKGAHGFTPTSGGDGGDGGNGGNSQVVGGNGGDGGNGGNGGSAGTGGNGGRGGDGAFGGMSANATNPGENGPNGNPGGNGGAGGAGGAGLNGGNGGAGGNGGLGGFGGNGAAGANGVAVGAPGQPGGAGGHGGAGGNGGAGGNGGQGVVSDGAGGAGGAGGDGGAPGDGANGGNGQGAGAFAGGGGGRGGDGGNAGNAGAGGPGGTGSTAGKAGPAGSILHDGGNGGHGGHGAASGGNGGPGGHGGNGGNGGTGANGGNGGIGGTGGAGSTGAKGVLGTNEGDGGDGGRGGNGGRGGNGGQGLTGAGGNGGTGGTPGNGGNGGNGASGDLVTSPGDGGGGGRGGDAGRGGDAGLGGSSGPGGTPGDWGTGGTGGTGGTGGQGANGGLTGGRGGTGGNGGNGNTGGTGGAGGTGGTGHNGSQPGMGGNGGAGGFGGNGFAGVGGRGGMGGSGGTGGTGDAGPFGTGTGGTGGHGGQGGGGGFSILLGLGGLGGLGSPGSIATGTAGGAGGGGGFGGLGGGEFV

SEQ ID NO: 7130 - protein, 519 aa, Brassica rapa subsp. pekinensis
MATMAAIGSLKVPSSSSNHTRRLSSSSQRKTLSFSSSSLTGEKLNPTQEIIISNLPRWQREKNAIDSPKAVSDSQNSQTCLDPDASRSVLGIILGGGAGTRLYPLTKKRANRAVPLGANYRLIDIPVSNCLNSNISKIYVLTQFNSASLNRHLSRAYASNMGGYKNEGFVEVLAAQQSPENPNWFQGTADAVRQYLWLFEEHNVLEFLVLAGDHLYRMDYEKFIQAHRETDADITVAALPMDEKRSTAFGLMKIDDEGRIIEFAEKPKGEQLKAMKVDTTILGLDDERAKEIPFIASMGIYVVSKNVMLDLLRDQFPGANDFGSEVIPGATDLGLRVQAYLYDGYWEDIGTIEAFYNANLGITKKPVPDFSFYGRSAPIYTQPRYLPPSKMLDADVTDSVIGEGCVIKNCKIHHSVIGLRSCISEGAIIEDTLLMGADYYETDADRTLLAAKGRVPIGIGENSHIKRAIIDKNARIGDNVKIINTDNVQEAARETDGYFIKSGIVTVIKDALIPSGTVI

SEQ ID NO: 7131 - protein, 127 aa, GIBBERELLA ZEAE PH-1
MSKLYVGNLSWNTTDETLRQTFSEFGEVTDSIIMRDRDTGRARGFGFVTFSTEEQATAAVDALNEQELDGRRIRVNVANARPAGGNGGGFGGGRGGGYGGGRGGYGGGDRSYGGGDRSYGGGDRGGY

SEQ ID NO: 7132 - protein, 452 aa, Arabidopsis thaliana
MQSSFKTVPFTPDFYSQSSYFFRGDSCLEEFHQPVNGFHHEEAIDLSPNVTIASANLHYTTFDTVMDCGGGGGGGLRERLEGGEEECLDTGQLVYQKGTRLVGGGVGEVNSSWCDSVSAMADNSQHTDTSTDIDTDDKTQLNGGHQGMLLATNCSDQSNVKSSDQRTLRRLAQNREAARKSRLRKKAYVQQLENSRIRLAQLEEELKRARQQGSLVERGVSADHTHLAAGNGVFSFELEYTRWKEEHQRMINDLRSGVNSQLGDNDLRVLVDAVMSHYDEIFRLKGIGTKVDVFHMLSGMWKTPAERFFMWLGGFRSSELLKILGNHVDPLTDQQLIGICNLQQSSQQAEDALSQGMEALQQSLLETLSSASMGPNSSANVADYMGHMAMAMGKLGTLENFLRQADLLRQQTLQQLHRILTTRQAARAFLVIHDYISRLRALSSLWLARPRD

SEQ ID NO: 7133 - protein, 233 aa, Zea mays
MCGILAVLGCGDESQGKRVHVLELSRRLKHRGPDWSGLHQVADNYLCHQRLAIIDPASGDQPLYNEDKSIAVAVNGEVYNHEELRARLSGHRFRTGSDCEVIAHLYEEYGESFIDMLDGVFSFVLLDARDNSFIAARDAIGVTPLYIGWGIDGSVWISSEMKGLNDDCEHFEIFPPGNLYSSKEKSFKRWYNPPWFSEVIPSVPYDPLRLRSAFEKAVIKRLMTDVPFGVSLS

SEQ ID NO: 7134 - protein, 398 aa, Streptococcus pneumoniae TIGR4
MNDKTEVNMTIGIDKIGFATSQYVLKLQDLAEARGIDPEKLSKGLLLKELSIAPLTEDIVTLAASASDSILTEQERQEVDMVIVATESGIDQSKAAAVFVHGLLGIQPFARSFEIKEACYGATAALHYAKLHVENSPESKVLVIASDIAKYGIETPGEPTQGAGSVAMLITQNPRMMAFNNDNVAQTRDIMDFWRPNYSTTPYVNGVYSTQQYLDSLKTTWLEYQKRYQLTLDDFAAVCFHLPYPKLALKGLKKIMDKSLPQEKKDLLQKHFDQSILYSQKVGNIYTGSLFLGLLSLLENTDSLKAGDKIALYSYGSGAVAEFFSGELVEGYEAYLDKDRLNKLNQRTALSVADYEKVFFEEVNLDETNSAQFAGYENQDFALVEILDHQRRYSKVEK

SEQ ID NO: 7135 - protein, 394 aa, Methanosarcina acetivorans C2A
MKAVVYKGPRNVDVEEVKKPEIEKPTDVIIKVTSSGICGSDLHLYDGHGPDGLGTILGHEPMGVVEEVGDAVELVKPGDRVVIPFNVACGSCLNCIRGLTNMCLTMNPDAAIANYGYPGAGPYAGGQAEYLRVPYGDWACLKLPGEPGDEFEDDFVMLADIFPTAYYAAELAKVKTGKTVAVFGAGPVGLLAAYSSMLMGASEVYVVDKSDKRLKLAESIGAVPINFTDGDPVEMIMQIRQNNKNLMSSLRPGEEKVLGVDCAIDAVGYQALDRNNSEEFKPNQVLMDIARIIAPGGSIGVIGVYSPDPAGKDENEKQGYLTLPWAELWFKGVSIGTGPTPVKQMHGFLRNLIFNGKAKPSFIVSDRISIDEAPEAYKQFDKRDDVVKPIIKFH

SEQ ID NO: 7136 - protein, 444 aa, Glycine max
MATIVSINARQIFDSRGNPTVEVDLTCSDGTFARAAVPSGASTGIYEALELRDGGSDYLGKGVSKAVDNVNTVIGPALIGKDPTEQTAIDNLMVQQLDGTVNEWGWCKQKLGANAILAVFLAVCKAGASVLKIPLYKHIANIAGNKKLVLPVPAFNVINGGSHAGNKLAMQEFMVLPVGASSFKEAMKMGVEVYHNLKSVIKKKYGQDAINVGDEGGFAPNIQENKEGLELLKTAIAKAGYTGKVVIGMDVAASEFYKEDKTYDLNFKEDNNDGSQRISGDALKDLYKSFVSEYPIVSIEDPFDQDDWEHYAKLTAEVGANVQIVGDDLLVTNPKRVQKAIDTKACNALLLKVNQIGSVTESIEAVRMSKKAGWGVMASHRSGETEDTFIADLSVGLATGQIKTGAPCRSERLAKYNQLLRIEEELGAEAVYAGANFRTPVEPY

SEQ ID NO: 7137 - protein, 715 aa, Escherichia coli CFT073
  unsure (1)..(715): unsure at all Xaa locations
MKKVVTVCPYCASGCKINLVVDNGKIVRAEAAQGKTNQGTLCLKGYYGWDFINDTQILTPRLKTPMIRRQRGGKLEPVSWDEALNYVAERLSAIKEKYGPDAIQTTGSSRGTGNETNYVMQKFARAVIGTNNVDCCARVXHGPSVAGLHQSVGNGAMSNAINEIDNTDLVFVFGYNPADSHPIVANHVINAKRNGAKIIVCDPRKIETARIADMHIALKNGSNIALLNAMGHVIIEENLYDKAFVASRTEGFEEYRKIVEGYTPESVEDITGVSASEIRQAARMYAQAESAAILWGMGVTQFYQGVETVRSLTSLAMLTGNLGKPHAGVNPVRGQNNVQGACDMGALPDTYPGYQYVKDPANREKFAKAWGVESLPAHTGYRISELPHRVAHGEVRAAYIMGEDPLQTDAELSAVRKAFEDLELVIVQDIFMTKTASAADVILPSTSWGEHEGVFTAADRGFQRFFKAVEPKWDLKTDWQIISEIATRMGYPMHYNNTQEIWDELRHLCPDFYGATYEKMGELGFIQWPCRDTSDADQGTSYLFKEKFDTPNGLAQFFTCDWVAPIDKLTDEYPMVLSTVREVGHYSCRSMTGNCAALAALADEPGYAQINTEDAKRLGIEDEALVWVHSRKGKIITRAQVSDRPNKGAIYMTYQWWIGACNELVTENLSPITKTPEYKYCAVRVEPIADQRAAEQYVIDEYNKLKTRLREAALA

SEQ ID NO: 7138 - protein, 433 aa, Leptospira interrogans serovar lai str. 56601
MIWYPFTLQFEPDSPLKIERAKGEFLYDELGNSYIDGISSWWVSIHGHNHPKIVQAVKNQLEKLDHVLLAGFTHDPAEKLAAELLKITDGLFQKVLYSDNGSTAVEIMIKLAYQYFQNIGEVDRKIFIKWNSSYHGDTIGTMSVGGNSVFNRVFQGLMFPTKEFQTPNCNFCPMGKKPESCKVECIDPIEKFFQKSPKAVAGIVIEPLILGSGGMIFYKEEVLQRLETISKKYGSLLLLDEVFTGFGRTGSVFAYQRAKIRPDFIALAKGLSAGVSAVAVTLTTDRIHSAFVTADPEKGFYHGHTMTGNPIACSAALASLKIFFEENRLEQILRLESKLNVGLKKIAKEFPKAVKNCRVLGAVGVLELEVGKASGYHYPGNKILKKKFLEKGVLLRPLGNVIYLTPPYNIENSSLEKIFSAIRETLSEISFGN

SEQ ID NO: 7139 - protein, 499 aa, Mycobacterium tuberculosis H37Rv
MTAAQQDQAPMATPGCREGETYDVVVLGAGPVGQNVADRARAGGLRVAVVERELVGGECSYWACVPSKALLRPVIAISDARRVDGAREAVDGSINTAGVFGRRNRYVAHWDDTGQADWVSGIGATLIRGDGRLDGPRRVVVTKSSGESVALTARHAVVICTGSRPALPDLPGITEARPWTNRQATDNSTVPDRLAIVGAGGVGVEMATAWQGLGASVTLLARGSGLLPRMEPFVGELIGRGLADAGVDVRVGVSVRALGRPNPTGPVVLELDDGTELRVDEVLFATGRAPRTDDIGLETIGLTPGSWLDVDDTCRVRAVDDGWLYAAGDVNHRALLTHQGKYQARIAGTAIGARAAGRPLDTTSWGMHATTADHHAVPQAFFTDPEAAAVGLTADQAAQAGHRIKAIDVEIGDVVMGAKLFADGYTGRARMVVDVDRGHLLGVTMVGPGAAELLHSATVAVAGQVPIDRLWHAVPCFPTISELWLRLLESYRDSFYLLV

SEQ ID NO: 7140 - protein, 741 aa, Mycobacterium tuberculosis H37Rv
MSLVIVTPETVAAAASDVARIGSSIGVANSAAAGSTTSVLAAGADEVSAAIATLFGSHAREYQAISTQVAAFHDRFAQTLSAAVGSYVSAEATNAAPLATLEHNVLNALNAPTQALLGRPLIGDGAAGAPGTGQAGGAGGILWGNGGAGGSGAPGQVGGAGGAAGLFGTGGAGGAGGAGAAGGAGGSGGWLLGNGGVGGAGGQSLLGGATGGAGGNAGLFGVGGTGGPGGPGGPGGVGGTGGAGGLGGTLYGAGGHGGAGGPGPIGGVGGHGGVGGAAGLLGVGGHGGAGGHGAEGVAGAAGEDLSPHGTSGGVGGDAGDGGTGGRGGWLAGAGGAGGAGGVGGTGGAGGAGFSRALIVAGDNGGDGGNGGMGGAGGAGGPGGAGGLISLLGGQGAGGAGGTGGAGGVGGDRGAGGPGNQAFNAGAGGAGGHGGDPGAGGAGGTGGAGSITGAQGAIGATPTSGGNGGAGGNGANATTAGTNGANGGPGGHGGLVGNGGAGGNGANGAAGTNASDSGAVGGKGNSGGNGGQGGAGGDGGTLAGNGGAGGTGGRGADGGLGGSGAEGANATTAGERGQDGGKGGNGGVGGTGGNAVAPGANGGHGGNGGNPGFSGAGGLGGLSGDGVTRAAQGATPDFADTGGKGGNGGNGANAVAPGGTGASGGAGGNAGAGGKGGENIIGDGGGGNGGAGGKGGAGTLLGLTVFGDNGGAGVLGDSTDPDGSGGAGGAGGAGGAGGDPTI

SEQ ID NO: 7141 - protein, 570 aa, Brassica rapa subsp. pekinensis
MVASPDCRISLSAPSCLRGSSGYTKHIKLGSFCNGELMGKKLNLAQLRSSSTNSSQKRIQMSLNSVAGESKVQEIESEKRDPKTVASIILGGGAGTRLFPLTKRRAKPAVPIGGAYRLIDVPMSNCINSGINKVYILTQYNSASLNRHLTRAYNSNGVFGDGFVEALAATQTPGETGKRWFQGTADAVRQFHWLFEDARSKEIEDVLILSGDHLYRMDYMDFVQDQSTKRRDISISCIPIDDRECKRVQQIHSKIMVSYKSLSVLHGRRASDFGLMKIDDKGRVISFSEKPKGDDLKAMAVDTTVLGLSKEEAEKKPYIASMGVYVFKKEILLNLLRWRFPTANDFGSEIIPFSAKEFYVNAYLFNDYWEDIGTIRSFFDANLALTEHPPAFSFYDAAKPIYTSRRNLPPSKIDGSKLIDSIISHGSFLTNCLIEHSIVGIRSRVGSNVQLKDTVMLGADFYETEAEVAALLAEEKVPIGIGENTKISSKTKRSLSNGLPSKQKVLDSFFPSHFPYRECIIDKNARVGKNVVIANSEGVQEADRSSDGFYIRSGITVILKNSVIADGVVI

SEQ ID NO: 7142 - protein, 758 aa, Streptomyces avermitilis MA-4680
MSEANPLKRAARKITNSLQDNGATPEEGIPGRPGPESPSVAEPTEPRDPLPPKPDQSGPDTVSPTGQPTGADQARMAQSGSYLTTAQSTRLYDTDHSLKAGPRGPVLLQDHHLREKVMHFDHERIPERVVHARGAAAHGVFQSYGTAASVTKAAFLSEDKETPVFVRFSTVLGSRGSSDTVRDTRGFATKFYTSEGVFDLVGNNIPVFFIQDAIKFPDVIHAGKPHPDREIPQAQSAHDTFWDFVTLHTEATHHTLWNMSDRGIPRSYRMMEGFGVHTFRLVNAEGATTLVKFHWKPKLGVHSLVWEEAQITNGVDPDFHRRDLADAIEAGAHPQWELGIQTFPDTPDQTFEGIDLLDPTNLVPEELAPVQPVGLLTLMRNPSNFFAETEQVAFHVGHLVPGVDVTDDPLLAGRLFSYLDTQITRLGGPNFPQLPINRPHAPVNDMLRDGMHQTAVHRGVAPYRPNSLDGGCPFLAGADTGAFVETPVRVPEAAKVREAPESFADHFSQPRRFWLSMSPIEREHIIAAYTFELGKCYEQAVKERALQVLANIDPNLCAEVATGLGLPAPQPTVPLAEVEASPALSQVGGTWPTDGRVIGIVIGPDGDLRGVSAVREAVLDASMVPLVVAPAGGVFGSGEGMVTVQRTYATARSVEFDAILLAGTPGVGGDAYGARDAKAFPAPAQQATGDPRVGLLVSEAFRHGKAVGAWAGGEAFLEASGVPLDAPGVVVGDSGTGALAQLTGLLGKHRAWDRFRAV

SEQ ID NO: 7143 - protein, 215 aa, Eremothecium gossypii
MIRIGSRLTPSLRHYTSSSQRITKFTMSGFYDLSPLDAKGEPFPFSQLKGKVVIIVNVASKCGFTPQYEELEELYKKYKDQGFEVIGFPCNQFAHQEPATNEEIVQFCKLNYGVTFPVLKKVDVNGADADPVYVYLKSQKSGLLGFKGIKWNFEKFLVDRKGQVKDRYSSITKPLSLEKTIETLLKEEGGPAPTATTEATATATADAAKPSGESL

SEQ ID NO: 7144 - protein, 539 aa, Caulobacter crescentus CB15
MADLDAAWTRLEAAAKAAGDKRIVEFFDAEPGRLDALTLDVAGLHLDLSKQAWDEAGLEAALDLAHAADVEGARARMFDGEAINSSEGRAVLHTALRAPAGADVKALGQPVMAEVDAVRQRMKAFAQAVRSGAIKGATGKPFKAILHIGIGGSDLGPRLLWDALRPVKPSIDLRFVANVDGAEFALTTADMDPEETLVMVVSKTFTTQETMANAGAARAWLVAALGEQGANQHLAAISTALDKTAAFGVPDDRVFGFWDWVGGRYSLWSSVSLSVAVAAGWDAFQGFLDGGAAMDEHFRTAPLEQNAPVLVALAQIFNRNGLDRRARSVVPYSHRLRRLAAFLQQLEMESNGKSVGPDGQPAKRGTATVVFGDEGTNVQHAYFQCMHQGTDITPMELIGVAKSDEGPAGMHEKLLSNLLAQAEAFMVGRTTDDVVAELTAKGVSDAEIATLAPQRTFAGNRPSTLVLLDRLTPQTFGALIALYEHKTFVEGVIWGINSFDQWGVELGKVMANRILPELESGASGQHDPSTAGLIQRLKR

SEQ ID NO: 7145 - protein, 335 aa, Prochlorococcus marinus subsp. marinus str. CCMP1375
MTSLLDQLSSMTVVVADTGDLEAIRTFKPQDATTNPSLILAAAQIPAYQNLIDKSLQASRQRVGSFASAKEVVDEALDEVCVTFGKEILKIIPGRVSTEVDARLSFNTQATINKARKIIDLYKKVDISKERVLIKVASTWEGIKAAEVLESEGIHCNLTLLFGFSQAVACAEAGVTLISPFVGRILDWYKAETGKDSYAGEEDPGVVSVTKIFNYYKSNNYKTEVMGASFRNIDEILELAGCDLLTIAPKFLEQLENSDSKLTRKLDSLKPLPSETKIHLEEYDFRNMLKLDRMATEKLEEGIINFSKAIEQLEQLLSKRLSYIESGSNAELSIA

SEQ ID NO: 7146 - protein, 560 aa, Zea mays
  unsure (1)..(560): unsure at all Xaa locations
MASSWTLPDHPKLPKGKPVAVVVLDGWGEANPDQYNCIHVAQTPVMDSLKNGAPEKWRLVKAHGTAVGLPSDDDMGNSEVGHNALGAGRIFAQGAKLVDQALASGKIYDGDGFNYIKESFENGTLHLIGLLSDGGVHSRLDQLQLLLKGVSERGAKKIRVHILTDGRDVLDGSSVGFVETLENDLLELRGKGIDAQIASGGGRMYVTMDRYENDWDVVKRGWDAQVLGEAPYKFKSALEAVKTLRAQPNANDQYLPPFVIVDDSGKAVGPVLDGDAVVTINFRADRMVMLAKALEYADFNNFDRVRVPKIRYAGMLQYDGELKLPSRYLVSPPEIDRTSGEYLVKNGIRTFACSETVKFGHVTFFWNGNRSGYFDETKEEYVEVPSDSGITFNVAPKMKALQIAEKARDALLSGKFDQVRVNLPNGDMVGHTGDIEATVVACKAADEAVKIILNAVEQVGGIYLVTADHGXMAEDMVKRNKSGKPXLLDKNGGIQILTSHTLQRGARLPLGGPGLHPGVKFRNDIQIPGLAXNVAATVMNLHGFEAPADYEQTLIEVADN

SEQ ID NO: 7147 - protein, 311 aa, Vibrio parahaemolyticus RIMD 2210633
MKVAVIGAAGGIGQALALLLKNRLPAGSDLALYDIAPVTPGVAADLSHIPTPVSIKGYAGEDPTPALEGADVVLISAGVARKPGMDRADLFNVNAGIVKSLAEKIAVVCPKACVGIITNPVNTTVPIAAEVLKKAGVYDKRRLFGITTLDVIRSETFVAELKGKDPSDIRVPVIGGHSGVTILPLLSQVEGVEFTAEEVEALTKRIQNAGTEVVEAKAGGGSATLSMGQAACRFGLALVRALQGEEGVVECAYVEGDSEHAPYFAQPVKLGKEGVEEVLSYGELSDFEKAALDGMLETLNGDINIGVEFAK

SEQ ID NO: 7148 - protein, 778 aa, Oryza sativa
  unsure (1)..(778): unsure at all Xaa locations
MAVKWDYTFDLAEIACDAIQYVGKNDSFALSQGRTVAGESWRRWHRETNLVLISIMPSGDEAGREEGVVVIVSGGRGGRRRRHCVSEVGQPSAGSPLSSPPLVVPLWLTALVGQXVRRGVVAPGRAEAGAPLVLALGLSVTVVPAAACCFCASGMDADSPRRPTTVPSNTPQVSGLIPWYQGLIPRYHPVSWVPSIRYRSIPNWYQSAAPPRRRRRRMEAVGVAPAPAGVPEKKLLEVKESRKAAPAAPSTSMAAKWAMKKKLVGGDAGYVLEDVPHLTDYLPELPTYPNPLQDNPAYSVVKIPLFHSPTTLGTKRLTFLHTTCAPSSSCRQYFVNTDDTVTQKIVVHKTSARGTHFRRAGPRQRVYFQSDEVNAAIVTCGGLCPGLNTVIRELVCGLYDMYGVTSVVGIEGGYKGFYSRNTVALTPKSVNDIHKRGGTVLGTSRGGHDTGKIVDSIKDRGINQVYIIGGDGTQKGASVIYEEVRRRGLKCSVVGVPKTIDNDIAVIDKSFGFDTAVEEAQRAINAAHVEAESAENGIGVVKLMGRNSGFIAMYATLASRDVDCCLIPESPFYLEGKGGLLEFIEKRLKDNGHMVIVVAEGAGQDLIAKSIEFXWDTQDASGNKLLLDVGLWLSQKIKDHFKKKRNFPITLKYIDPTYMIRAVRSNASDNVYCTLLAHSALHGAMAGYTGFTVAPVNGRHAYIPFYRITEKQNKVVITDRMWARVLCSTNQPCFLSHEDVEHLKHDDDEHHLHNTQLLEGESSPVKDSSKCNGTAAPV

SEQ ID NO: 7149 - protein, 89 aa, Aeropyrum pernix
MKIGPPYLTKYERARIIGVRAFQLSIGAPPLVDPERAGSRNPLDIARYEVDNGILPVSIYRYLPGGGGQSLSLSRLVELAREILGSEYV

SEQ ID NO: 7150 - protein, 107 aa, Glycine max
  unsure (1)..(107): unsure at all Xaa locations
MASSMISSPAVITVDRACAGMVAPFTGLKSMAGFPTRKTSNDITSIAINRGKVHCMHVLPPIGNKMFETLSYLPYLDDAQLAKEVEYLLMKXWIPCLEFELEHRFAY

SEQ ID NO: 7151 - protein, 272 aa, Anabaena variabilis ATCC 29413
MTIATSTKPQINWVNTLFFLGLHIGALFAFVPGNFSWAAVGVALLLYWITGGLGITLGFHRLVTHRSFQTPKWLEYFLVLCGTLACQGGPIEWVGTHRIHHLHSDTDPDPHDSNKGFWWSHIGWLIYHSPSHADVPRFTKDIAEDPVYQFLQKYFIFIQIALGLLLLYLGGWSFVVWGIFFRIVWVYHCTWLVNSATHKFGYRTYDAGDKSTNCWWVAVLVFGEGWHNNHHAFQYSARHGLEWWEVDLTWMTVQLLQVLGLATNVKLADKKQ

SEQ ID NO: 7152 - protein, 449 aa, Streptococcus mutans UA159
MLENSITYEKPLYIIKMNQRKKIVQIALPAMAENLLQMLMGVVDNYLVAQIGLVAVSGVSVANNIITIYQAIFIALGAAVSSLVAKSLGEDNQARVRFYQSESVAITLMLSVVLGFISFVFGSNMLHLLGTTDSVTQAGGIYLAIVGGLVVSLGLQTTLGAILRAQGKARLPMYVSFLTNIVNVILATTAIYIGHWGIVGVAAATVLSRFLGTFVLACQLPIKAILRSMRIKIDKAFLAIALPSAGERLMMRAGDVVIIAIIVKFGTAAVAGNAIGETLTQFNYMPGMGVATATVILVAHNLGQGKKKVIKEVVRESYIISTVFMLLVGACIFFGGRQLTYLFTENKAALQASLVVLFYSFIGGPATSGTLVFTAVWQGLGKAKLTFYATTVGMWLIRIVLGYYLGVSLNLGLAGVWLATLADNVFRWLFLYCLYRKYMQGFNNNLSSS

SEQ ID NO: 7153 - protein, 618 aa, Oryza sativa (japonica cultivar-group)
MTLPPSVSGSGGGGDLEAHLDGDVGNGNARSDSAAAAAAPELRYRGWKAMPFVIGNETFEKLGSIGTAANLMVYLTTVFHMSSLDAAVALNVFAGTTNLATVVGAFASDLYLGRYATVAAGCVSTFIGMVILTMTAGVPALHPPPCGEGRCLGATRGQLAVLGLAFAFIVAGAGGIRPCSLPFGADQFDPRTESGRRGINSFFNWYYFTLTIAVCASSTAIVYVQSSVSWWVGLAIPAALMLASCALFFAGAGLYVRVRPEGSPFAGVARVAVAAFRKRSAAAPSDADESLFRTRHASGVVSRLPYTDQFRFLDKAAVVVDAKSEVGGDGHPKNPWRLCSLQQVEEAKCILRVVPVWLTCIVYYVAFAQTNTYVILQAAQSDRHLGGGGGAGSFEVPPGSFTVFPMLALAVWIPLYDRLVVPWARRLTGREGGITPLQRMGVGMALSVLAMLVAAMAEKRRRDLAAGSPSNTGRVSRQSAFWLVPQLAALGLSEAFNQVSQTEFYYREFPESMRSVAGSVLFSGLALSSYLSGVLVAAVERATRGASAGDDGGWLAEDLNKGRLDWFYLLIAAIGAANFLAFVACAKWYRYKGSDDDDDDDHEHEQVNVADRISAAAA

SEQ ID NO: 7154 - protein, 205 aa, Bacillus cereus ATCC 14579
MESMKQVVVATKNMGKVREFAELFERFDLEVKSLHDFPHIEEVEETGETFEENAILKADSLSRQLNAIVIADDSGLIVDALNGKPGVYSARFAGEPKDDQANIDKVLQELNEIPFDKRKARFYCALAVAFPEGDKKPVIVNGTCEGFILEQRRGENGFGYDPIFYVEEYKKAMAELSSDEKNAISHRGRALRKLEEKIPEWFLGE

SEQ ID NO: 7155 - protein, 163 aa, Zea mays
  unsure (1)..(163): unsure at all Xaa locations
MVSAAAQAGVVAACVVLFVPMGLAGWHLSRNKVLFFSGALFISLAVGVHLSPYLPSLPHLASSFLLPHSGAASASASSSSGSSCVPFLHRVSWSDAAGAADDGSGGGKARAWSWPPSLASACGFARLSRDDASLLLNGSWVMVAXDSQARLLVLALLRLLLDP

SEQ ID NO: 7156 - protein, 396 aa, Haemophilus somnus 129PT
MFENINAAPADPILGLGEAFKSETRANKINLGIGVYKDANGNTPIMKAVKEAENRLFELETTKNYLTIDGIAEFNSYTKELLFGTNSKIIKQGRAKTVQSLGGTGALRIAAEFIKRQTTSQNVWISSPTWPNHNAIFNAVGMTIREYRYYDAEKKALDWDNLIADLSNASEGDVVLLHGCCHNPTGIDPTPEQWKILAEMSEKNGWLPLFDFAYQGLANGLEEDAIGLRTFAENHKELLVASSYSKNFGLYNERVGAFTLVAETEEISAIALTQVKSIIRTLYSNPASHGATAVSIILGDDLLRQQWESELTEMRNRIKRMRYQFVELLKEYGAKQDFNFIIEQNGMFSFSGLNAEQVDRLKEEFAIYAVRSGRINLAGVTEDNIRYLCESIVKVL

SEQ ID NO: 7157 - protein, 289 aa, Streptococcus pneumoniae
MKGIILAGGSGTRLYPLTRAASKQLMPVYDKPMIYYPLSTLMLAGIRDILIISTPQDLHRFQELLQDGSEFGLKLSYAEQPSPDGLAQAFIIGEEFISDDSVALILGDNIYHGSGLSKMLQKAASKESGATVFGYHVKDPERFGVVEFDQDMKAISIEEKPEQPRSNYAVTGLYFYDNDVVEIAKSIKPSPRGELEITDVNKAYLDRGDLSVELMGRGFAWLDTGTHESLLEASQYIETVQRMQNVQVANLEEIAYRMGYISREDVLALAQPLKKNEYGQYLLRLIGEA

SEQ ID NO: 7158 - protein, 261 aa, Methanocaldococcus jannaschii DSM 2661
MQMVPPSAYDRAITVFSPEGRLYQVEYAREAVRRGTTAIGIACKDGVVLAVDRRITSKLVKIRSIEKIFQIDDHVAAATSGLVADARVLIDRARLEAQIYRLTYGEEISIEMLAKKICDIKQAYTQHGGVRPFGVSLLIAGIDKNEARLFETDPSGALIEYKATAIGSGRPVVMELLEKEYRDDITLDEGLELAITALTKANEDIKPENVDVCIITVKDAQFKKIPVEEIKKLIEKVKKKLNEENKKEEENREETKEKQEE

SEQ ID NO: 7159 - protein, 240 aa, Methanocaldococcus jannaschii DSM 2661
MGRDIMVSLEEAVIARYTSHGEKFEILVDPYLAAKLKEGQNVDFDELLAIEVVFRDASKGEKAPEELLSKIFGTTDVKEIAKKIILKGQVQLTAKQREEIREQKKRQIITIISRNTINPQTDTPHPPHRIEKAMEELRINIDIYKSAEEQVPEIVKKLKKVLPIRFEKRDIAVKIPAEFASKAYNALYQFGAVKQEEWQPDGSLIVLIEIPSGIEAEFYAHLNKITKGNVQTKVVKKYSE

SEQ ID NO: 7160 - protein, 283 aa, Vibrio vulnificus CMCP6
MTNKKHTLFGECLAEFIGTGLLIFFGVGCVAALVLAGAQFGQWEISIVWGFGVSIAIYCTAGVSGAHINPAVTIALAAFHGFDKAKVVPYIIAQLLGAFCSAALVYTLYSNLFTDYEIAHNFVRSSQEALATAGIFSTYPHASLSFFGAFAVEFVITAVLMFAILALGDEHNGAPRGAMNPLLIGILIAVIGGSLGPLTGFAMNPARDFGPKLFAYFAGWDYALSGGRDIPYFIVPILAPIAGACFGGWLYPKAIAAYLPKVGSGCTIPNQCETEEEAKEARA

SEQ ID NO: 7161 - protein, 587 aa, Leptospira interrogans serovar lai str. 56601
MNHLESFILPWTQEPFPNTVRKEANLALEKFSRGESGPEVEAFSIPLEFGTGGMRGKLGNGIGRMNEFTVGRAALGFISYLSKKNKKASIVIAYDSRRRSKEFAEVTAGIAAYLGVKVILFKEVTPTPILSYAIRYYKASGGVVITASHNPPEYNGFKAYLSDGGQLVPPDDQKIISKIDSIQDWKQIPILSTKDPIYKKMVKFAGKDCFTSYKKDLSKAGILSISLKPKDRTALKIVYSPLHGTGGKSMQELLNSFGYKNVFLVPEQKDPNGEFPTVKYPNPEEAEAMELSKKFAIQKNAHAFIATDPDADRLGIGVKNENGEYVLFNGNQIGSIMAAYLCEAYSTGKKKKKAVLVKTIVTTDLQENIAKKNKVKYKNVLTGFKFIAQVMAKIDKSKTDFFLFGGEESFGYLPVSFVRDKDSLSSALLLLEILTEKKDLFNYMDEIYLKYGLFQESLKSLTLEGSAGKEKIRKSLESLRTLDLLGKKIHHRKITGILDYKTQIAKGNASKSAFSGCPLSDVIQVILEGNAKLTIRPSGTEPKIKIYSSFQSLKAPKSKEEIKILTKDLLSEIKTSEEIFLQLAGLS

SEQ ID NO: 7162 - protein, 263 aa, Neisseria meningitidis MC58
MNVYFLGGGNMAAAVAGGLVKQGGYRIYIANRGAEKRERLEKELGVETSATLPELHSDDVLILAVKPQDMEAACKNIRTNGALVLSVAAGLSVGTLSRYLGGTRRIVRVMPNTPGKIGLGVSGMYAEAEVSETDRRIADRIMKSVGLTVWLDDEEKMHGITGISGSGPAYVFYLLDALQNAAIRQGFDMAEARALSLATFKGAVALAEQTGEDFEKLQKNVTSKGGTTHEAVEAFRRHRVAEAISEGVCACVRRSQEMERQYQ

SEQ ID NO: 7163 - protein, 154 aa, Oryza sativa
MAEEQRWQEGCHRLCANNCGFFGSPATLDLCSKCYRDRQGRESTAPVVVAAAASACPATHPSSPSSSSCPAFLPSSTAAEAGVVVAAVAKASRCASCRKRVGLTGFACRCGGTFCGAHRYPERHACGFDFKAAGRDAIARANPLIKGDKLKDKI

SEQ ID NO: 7164 - protein, 475 aa, Methanosarcina mazei Goe1
MEGERFLNHRTPEELEKWKNTGKTEGSEDSMKELETEFNSFEQEVGLLDTVGPKAREIIGQDCNMVSACVSRPYPLVVDRAKGSVVRDIDGKEYIDFVAGIAVMNAGYSNPEVQAAISAQLEKMVHCGYGDFFAEPPLKLAKKLRDLSGYSKVFYCNSGAESIEAAMKLSLWKTKRQNFISFYNAFHGRTLGALSLTCSKVRHKEHFPTIRTVHTDYAYCYRCPLNLDYPSCGIECAKQIENLVFRRELSPEDTAAVFVEPIQGEGGYIVPPVEFHKEVRRICTDNDVLLVADEVQTGCFRTGPFLAMENFEVRADITCLAKALGSGLPIGAMLADNELMDWPPGVHSNTFGGNLLSSAAALASLEFLEKENTENHVREMGAHIRHRLRELQENFPCIGDVRGLGLMTGVEIVKPDKSIDPVRRDKIIREAFKDGVLLLPCGDSVIRFSPPLVMTDEEADLGLDKFEKALKKAVR

SEQ ID NO: 7165 - protein, 509 aa, Cucumis sativus
MAKKDDSATRPPLQRPTITLPPRPSMEAFFTGVPTGVSPGPMTLLSSYLADFADGAVDSPSFSQLLAGAMASPMAMGFFGTGSTPNYYAKDGPASELEFGMKQSKPVNLVVARSPLFSVPPGLSPSGLLNSPGFYPPQSPFGMSHQQALAQVTAQAALANSHMHMQQAEYQHSSVPAPTEPLVRDPSFSLDDASQLAIIPSTSDTKSLIAESTEVSHSDRKYQPPPPPHGSDKPADDGYNWRKYGQKLVKGSEFPRSYYKCTHLNCPRKKKIEGLPDGEITEIIYKGQHNHEPPPANKRARDNIEPAGCTNSLIKPECGLQNQAGILNKSSENVQLGSSDSEGRADTEITDDRDEDEPNPKRQNIDAGTSGVALSHKTLTEPKIIVQTRSEVDLLDDGYRWRKYGQKVVKGNPNPRSYYKCTSAGCNVRKHVERSSTDSKAVVTTYEGKHNHDVPAARNSSHHTVNNTVHHIKPLKVVAQKHPLLKEMEFGTNDQRPAVLQLKEEQITV

SEQ ID NO: 7166 - protein, 523 aa, Magnaporthe grisea 70-15
MFLQRGSRHLLRQLPKGVIAIPTTPTVTTTVSARSRQQPTQQRQQQRHCRTTRGFHSTRRLLDVKPVLLADIGEGIVECEIIQWFVEPGARVEEFSPLCEVQSDKASVEITSRFSGVVKKLYYDAGEMAKVGKPFVDIDITGDLEAEPEKVLAGDVAPAKPVEEKTTQKAVETAPDMIGTPASVGGAERKRGKCAALATPAVRHLSKELKVDINEIDGTGRDGRVLKEDIYKFVQGKQSGSGVAPTIPAAPAAPAPQAASKVPPTPAPLPSQPGTPQTEEVMQLSHTQQMMFKTMTRSLTIPHFLYADEIDFTSLVELRTRLNRVLAAGGTGGPGTAEISKLSYLPFIIKAVSLALYQYPILNARVDIPSDGGKPSLAMRKQHNIGVAMDTPSGLLVPVVKNVNERNVLSIAAELVRLQSLATAGKLSPADMSGGTMTVSNIGSIGGTYLSPVVVEREVAILGVGRMRTVPAFDENDKVVKKHVCNFSWCADHRVVDGATLARAANMVRQVVEEPDVMVMHLR

SEQ ID NO: 7167 - protein, 183 aa, Erwinia carotovora subsp. atroseptica SCRI1043
MSTEIYAIPLTTIDGKATTFEAFKGQVALVVNVASKCGLTKQYDALEKLYETYRDKGLVVLGFPSNEFAGQEPGSEEEIQEFCRGTFGVQFPMFSKIEVNGENRHPLYQLLIRQQPEANGTWKSDFFARLVNKGRKPKNPEDILWNFEKFLVDREGRVIERFAPDMSPDHDTIVKAIEAALAK

SEQ ID NO: 7168 - protein, 179 aa, Haemophilus influenzae R2866
MKKHYVDVLISENDVHARIAELGAQITKFYQEKQIDSLVVVGLLRGSFMFMADIVRQINLPVEIEFMTTSSYGTGMTTNHDVRITKDLDGDIKGKHVLIVEDIIDTGYTLEKVRDILNLREPASLTICTLLDKPSRREVEVPVEWVGFQIPDEFVVGYGIDYAQRHRNLGYIGKVVLEE

SEQ ID NO: 7169 - protein, 234 aa, Streptomyces carzinostaticus subsp. neocarzinostaticus
MILAGGKGTRLRPYTSRLPKPLVPIGDEFSILEIVLSQLSQRGFDTVTLAIGYLGHLIRSFVGDGSRWNMHITYASEDTPRGTIGPVLGILDQLPEHFLVMNGDILTDLDYADVLAHHTRGEAPLTVATCTREVRIDFGVLTTTSNRVVHFVEKPTVDYRVSMGVYGLSRTTLETYPSHMPFGFDDLVLDLLARGVQPAEYPFDGYWLDIGRPDDYDRANAEFDSIKGTLLKGA

SEQ ID NO: 7170 - protein, 197 aa, Prochlorococcus marinus subsp. marinus str. CCMP1375
MSISQFLQEATIWLAWAGIGLGICTLLAFLLRWGIRFRLVGASIFTLLLSGSCFAFQTSYSPPVNIEGALYVPVVYDNGADLVVAQAPEGFPDESIQPSLEQIAGNLKGSGRNGAKVNIRIRKIESAGDGISRPIILGEVISDPTQKTTIPIETNNFYSVKKVDAEEISEPALDEENSTNKISGSSQQGLNDNEEFL

SEQ ID NO: 7171 - protein, 53 aa, Vicia faba
HVKNWGQNWQSNNYLNGQSLSFQVTTSDGRVVTSNNVVPSNWQFGQTFTGAQF

SEQ ID NO: 7172 - protein, 174 aa, Triticum aestivum
MAPAVMASSATTVAPFQGLKSTAGLPVGRRSSGSLSSVSNGGRIRCMQVWPIEGIKKFETLSYLPPLSTEALLKQVDYLIRSKWVPCLEFSKVGFVFREHNSSPGYYDGRYWTMWKLPMFGCTDATQVLIEVEEVKKEYPDAYVRVIGFDNLRQVQCVSFIAFRPPGCEESGKA

SEQ ID NO: 7173 - protein, 252 aa, Haloferax volcanii
MQGQAQQQAYDRGITIFSPDGRLYQVEYAREAVKRGTASIGVRTPEGVVLAADKRSRSPLMEPTSVEKIHKADDHIGIASAGHVADARQLIDFARHQSQVNRLRYGEPIGIETLTKEVTDHIQQYTQVGGARPFGVALLIGGVENGTPRLYETDPSGTPYEWKAVSIGADRGDHQEHLEENFRDDLTLDEGIELALEAIASTSDEGTAPDGVDVATVSAETERFVELSNDEIESYLEANDLLATEDDEQTEE

SEQ ID NO: 7174 - protein, 221 aa, Bacillus cereus ATCC 14579
MLKKAIAEFIGTFVLVLFGTGVAVTGGGIEGIGILGIAMAFGLSIVAMAYSIGTISGCHINPAVSVAMFINKRMNAMELCYYVLAQILGGLLGTATLVTILKSAKTPLDNLGQNGFGTLGLSGAFLVEFILTFVFILVIVAVTGKKGSSSLAGLVIGFTLVLIHLLGIPLTGTSVNPARSIAPALFVGGEALSQLWVFIVAPILGGIFAAIVGKFILNTEK

SEQ ID NO: 7175 - protein, 249 aa, Haloferax volcanii
MNRNDKQAYDRGTSLFSPDGRIYQVEYAREAVKRGAPVLGVRTADGVVLAALRSTPSELMEAESIEKLHKLDDALGAATAGHVADARKLVDFARTTAQREHLRYGEPIGVETLTKTITDNIQESTQSGGTRPYGASLLIGGVENGSGRLFATDPSGTPQEWKAVAIGGHREDVQAALEDGYAEDLSLEDGLALAVEALVAADEEIESDELNLVTVSEAGYEIVDEETIAELFADATADDESDETDEREE

SEQ ID NO: 7176 - protein, 408 aa, Xanthomonas campestris pv. campestris str. ATCC 33913
MSTAADSPLSLAHYYLPVYRPRQVVLERGQGSRVWDDQGREYLDLSSGIAVSGLGHNDPDLMAALTEQAGKLWHTSNVFFSAPPLKLAEELVTASRFAQKVFLCNSGTEANEAAIKLVRKWASSQGRPADKRVIVTFRGSFHGRTLASVTATAQPKYQEGYEPLPGGFRYVDFNDVPALESAMASGDVAAVMLEPIQGEGGVMPAAPGFLARVRALCDQHDALLVLDEIQCGMGRTGSLFAHWQEQVTPDIVTLAKALGGGFPIGAMLAGPKVAETMQFGAHGTTFGGNPLAAAVARVALRKLASPQIAENVARQSAALRAGLEALNAEFGVFAQIRGRGLMLGAVLAPAHAGQAGAILDLAAAHGLLLLQAGPDVLRFVPALNLTDAELADGLARLRLAIAAYVAQH

SEQ ID NO: 7177 - protein, 489 aa, Chloroflexus aurantiacus
MIGGEFVPAQSGKTFERRNPADTRDVVGIFADSDERDVHAAVEAAKAAFPQWSKVPAPKRGEILLRAAELLQARKEQYSRDLTREMGKPLFEAGGDIVEAIGMAQYAGSEGRRMHGVTTPSELPNKFQMSIRQPIGVVGLITPWNFPMAIASWKMLPAIVCGNTVVIKPGEDASVSTYNLVQCLMEAGLPPGVVNIVTGYGPRAGQPLVEHPDVPVISFTGSTETGRLVYELGARRIKRVSLEMGGKNPLIVMPDADLDLALDGVLWAAFGTTGQRCTATSRLIVHRAVAKELVERIVARAQSLRVGNGLDPATEMGPLVNEKQLQRVLNYIDIGKQEGATLLCGGYRLTGGDYDYGYFIAPTVFTNVTSQMRIAREEIFGPVLSVIEVDSLDEAVAIANDVAYGLSSAIYTRDINAAFRAMQALQAGIVYINAPTIGAEIHLPFGGVKATGNGHREAGPTMLDVFSEWKSVYIDYSGALQRAQIDNAD

SEQ ID NO: 7178 - protein, 492 aa, Methanosarcina mazei Goe1
MIREYKLLIGGKSVDSSTGETFDDINPATLENLATLQVAGIEDVDRAVEAAEAGFRVWSEVPAPGRAEVLFRAARIMQERKEGLARLMTEEMGKVLPETRGDVQEAIDITIYAAGEGRRMFGETTTSELRDKFCMTVLRPVGVVGMITPWNFPIAIPSWKIMPALIAGNAIVFKPASDTPLLTIKLVEILMEAGLPPGVINIVPGPGGSTGKAIVQHPRIRAISFTGSLDTGKWIMEECAKSMKRVSLELGGKNPVIVMDDANLELALEGVVWGAFGTTGQRCTATSRLILHEKIKDEFIKRLLAKTKSLRVGNGLLPETDVGPVINKAQLEKIEKYVRIGKEEGAAILVGGNRIDPGLPGYFFEPTIFTDVSPEMRIAQEEIFGPVLSIITVSDFDEAIEVANNIKYGLSSAIYTENVRTAFRAIEKLEAGITYVNAPTIGAEVHLPFGGIKGTGNGFREAGTEAIKEFTEVKAVYIDYSGRLQKAQIDTE

SEQ ID NO: 7179 - protein, 400 aa, Psychrobacter sp. 273-4
MNFLRMSELSLTNKVVLIREDLNVPIKEGKVASDARLQASLPTIKMALEKGAAVIVCSHLGRPTEGSSEAIYSLAPVADYLSDKLSAPVTLNNDYLAQGVAIKAGEVVLLENVRFNEGEKKNNAALAQKYADLCDVFVMDAFGTAHRAQASTEGVTQAMHQAGKTACAGPLLAAELDALSLALETPAQPMLAIVGGSKVSTKLEVLHSLAELCSQIIVGGGIANTFLAAQGHSVGASLYEADLVDTAREIMGKTEILLPEYVVVANKNDIDFADFTGSLQKAVATIKSVDNIGDNDMILDIAPDSAIKLAAAITNAKTILWNGPVGVFEVDAFGQGTQIVAEAVKNSQGFSIAGGGDTLAAIDKYQVADGVSYMSTGGGAFLEFVEGKVLPAVAALQINE

SEQ ID NO: 7180 - protein, 237 aa, Oryza sativa
  unsure (1)..(237): unsure at all Xaa locations
MAGADVDVGTELRLGLPGGGGGAAEAAAKAAKRGFEETIDLKLKLPTAGMEEAAAGKAEAPAAEKAKRPAEAAAADAEKPPAPKAQAVGWPPVRSFRRNIMTVQSVKSKKEEEADKQQQQPAANASGSNSSAXFVKVSMDGAPYLRKVDLKMYNSYKDLSLALQKMFGTFTATGNNMNEVNGSDAVTTYEDKDGDWMLVGDVPWQMFVESCKRLRIMKGSEAIGLAPRAKDKYKNKS

SEQ ID NO: 7181 - protein, 557 aa, Triticum aestivum
MATTNWTLPDHPTLPKGKTVAVVVLDGWGEASPDQYNCIHVAQTPVMDSLKNGAPEKWRLVKAHGTAVGLPSDDDMGNSEVGHNALGAGRIFAQGAKLVDAALASGKIWEDEGFNYIKESFDKGTLHLIGLLSDGGVHSRLDQVQLIVKGASERGAKRIRLHILTDGRDVLDGSSVGFVETIEKDLAQLREQGVDARIASGGGRMYVTMDRYENDWSVVKRGWDAQVLGEAPYKFPNALEAVKTLRAEPKANDQYLPPFVIVDESGKSVGPIVDGDAVVTFNFRADRMVMLAKALEFPDFDKFDRVRVPKIKYAGMLQYDGELKLPSKYLVSPPLIERTSGEYLVKNGVRTFACSETVKFGHVTFFWNGNRSGYFDETREEYVEIPSDSGITFNEQPKMKALEIAERTRDAILSGKFDQVRINLPNGDMVGHTGDIEATVVACKAADEAVKMVLDAVEQVGGIYLVTADHGNAEDMVKRNKAGQPMLDKSGSIQILTSHTLQPVPVAIGGPGLHPGVRFRSDIQTPGLANVAATVMNLHGFQAPADYETTLIEVVDK

SEQ ID NO: 7182 - protein, 507 aa, Xanthomonas campestris pv. campestris str. ATCC 33913
MRPGSLMVLALLAPTLIAPPVFAQSVLTRDNGAKVGDNQNSQTAGATGPTLLQDVQLIQKLQRFDRERIPERVVHARGTGVKGEFTATADLSNLTKAKVFSAGEKTPVFVRFSSVVHGNHSPETLRDPHGFATKFYTSEGNWDLVGNNFPTFFIRDAIKFPDMVHAFKPDPRTNLDDDSRRFDFFSHVPESTRTLTLLYSNEGTPAGYRFMDGNGVHAYKLVNAQGEVHYVKFHWKTLQGIKNLDPKQVAAVQAKDYSHLTNDLVGAIKKGDYPKWDLYVQVLKPDDLAKFDFDPLDATKIWPDVPEQKVGQMVLNKNVDNFFQETEQVAMAPANLVPGIEPSEDRLLQGRIFSYADTQLYRIGTNGLSLPVNRPRVAVNNGNQDGEANTGHTTSGVNYEPSRLEPRPQDTAARYSELPLSGTTQQAKITLEQNFKQAGELYRSYSKKDRADLVQSFGESLATTDTESKHLVLSFLYKADPEYGAGVTRVAKGDLARVKQLASTLQD

SEQ ID NO: 7183 - protein, 400 aa, Thermosynechococcus elongatus BP-1
MSKKSVAQLSAADLEGKRVLVRVDFNVPVDEKGVITDETRIRAALPTIQDLISKGAKVILVSHFGRPKGVDEKLRLTPVAQRLSELLHKPVAKLDDCIGDAVIAHTQAMANGDVCLLENVRFHPGEEKNDPEFAKQLAACAEVYVNDAFGTAHRAHASTAGVTQYLSPCVAGFLMEKELEYLQNAIEHPRRPLAAIVGGSKVSSKIGVIEALLEKVDKLLIGGGMIFTFYKARGLNVGKSLVEEDKLELAKHLETKAQEKGVELLLPTDVVVADNFANDANSQVVSIEAIPDDWMGLDIGPASVKRFQEALQDCKTVIWNGPMGVFEFDQFAKGTEAIARYLAELTSQGVCTIIGGGDSVAAVEKVGVADRMSHISTGGGASLELLEGKQLPGIAALDDA

SEQ ID NO: 7184 - protein, 107 aa, Magnaporthe grisea 70-15
MGLDRFNKTPCGFCFVEYYTHQDAIDCMKYIGGTKLDERVIRTDLDPGFEEGRQYGRGKSGGQVRDEYREDYDEGRGGLGRAIQMEREARAREQRDSRDEEERGHLR

SEQ ID NO: 7185 - protein, 72 aa, Oryza sativa
  unsure (1)..(72): unsure at all Xaa locations
MGKKKXRXEKVFXYYCDXEFDDEKILVXHQKAKHFKXHVFHKKLXTVGGXGIHVLQXHKEXXTKVPNAKPLG

SEQ ID NO: 7186 - protein, 302 aa, Gloeobacter violaceus PCC 7421
MCACGVCHSDLHMIDNDWGRSRYPLVPGHEVVGEVVEIGSEVRHLKPGDRVGVGWQRSACLQCLDCLRGNENLCAHSQATIVTGYGGFGDYLAIDARFAFKIPAGIPTHVAGPLLCGGITVYSGLRAAGMSSGQEIGVIGVGGLGHLAVQFAGRLGNRVTVFTTSEDKARQAAALGAHRAVIVPPGDSPPPPVERLDIIISTIPYALDAVGYLAHLATDGTLVFVGVPPEPLALPVRELIRGRRRLMGSGIGSRSRIVEMLSVAERFGVMPLVETFAMAEANAALERVRRNRVRYRAVLLAE

SEQ ID NO: 7187 - protein, 505 aa, Staphylococcus warneri
MSKQDGKLTGLFGAPVSDRENSMTAGPRGPLLMQDIYFLEQMSHFDREVIPERRMHAKGSGAFGTFTVTNDITQYTSAKMFSEVGKQTEMFARFSTVSGERGAADAERDIRGFALKFYTEDGNWDLVGNNTPVFFFRDPKLFVSLNRAVKRDPRTNMRSAQNNWDFWTGLPEALHQVTILMSDRGIPKDLRHMHGFGSHTYSMYNDKGERVWVKYHFRTQQGIENLTDEEAANVIATDRDSSQRDLFNAIENGDYPKWKMYIQVMTEEQARNHKDNPFDLTKVWYHGDYPLIEVGEFELNRNPNNYFQDVEQAAFAPTNIVPGLDYSPDKMLQGRLFPYGDAQRYRLGVNHWQIPVNQPKGVGIENLCPFSRDGQMRILDDNQGGGPHYYPNNQGVYDSQPEFKKPPFPADGDGYEYNQRQDDDNYFEQPGKLFRLQSDEAKERIFTNTANAMDGVTEDVKRRHIRHCYKADPDYGKGVAKALGIDINSIDLEGEQDETYENFKN

SEQ ID NO: 7188 - protein, 176 aa, Triticum aestivum
  unsure (1)..(176): unsure at all Xaa locations
MAPTVMASSATSVAPFQGLKSTAGLPVSRRSSSAGLSSVSNGGRIRCMQVWPIEGIKKFETLSYLPPLSTEXALLKQVDYLIRSKWVPCLEFSKVGFVFREHNSSPGYYDGRYWTMWKLPMFGCTDATQVLNEVEEVKKEYPDAYVRVIGFDNLRQVQCVSFIAFRPPGCEESGKA

SEQ ID NO: 7189 - protein, 212 aa, Zea mays
MAVDLMRFPKIDDQTAIQEAASQGLQSMEHLIRVLSNRPEQQHNVDCSEITDFTVSKFKTVISLLNRTGHARFRRGPVHSTSSAASQKLQSQIVKNTQPEAPIVSQPVRTTTNHPQIVPPPSSVTLDFSKPSIFGTKAKSAELEFSKENFSVSLNSSFMSSAITGDGSVSNGKIFLASAPSQPVNSSGKPPLAGHPYRKRCLEGGPGTQFAL

SEQ ID NO: 7190 - protein, 119 aa, Metrosideros excelsa
NKINRQVTFSKRRCGLLKKAHEISVLCDAEVALIVFSTKGKLFEYATDACMEKILERYERYSYAERQILTNNAETNGNWTLEHAKLKARMEILQKNQKNLMGEELDSLSLKELQNLEHQ

SEQ ID NO: 7191 - protein, 544 aa, ASPERGILLUS NIDULANS FGSC A4
MASEGMAPFTPEYASYNWTGAPSDYSSLATNELGGNSRVENLNKWYQSGDQAYIIVASAMVMLMVPGLGFLYSGLARRKSALSMIWACMGSMCVVTFQWYFWGYSLAFSPTATNGYIGNLRNFGLMKVLADPSPGSPLVPNLLYAFYQMQFCAVTAAIIMGAVAERGRLLPAMVFTFVWATIVYCPIACWVWNVNGWAFNYGVLDYAGGGPVEICSGLSALAYSMVLGRRQERMMLNFRPHNVSLILLGTVFLWFGWLGFNGGSSFGANMRATMACWNTNLTAAFGAITWVILDWRLARKWSMVGWCSGTISGLVAATPASGFLPPWASVVLGIVTGIVCNYSTKVKYWIRIDDSMDVFAEHGVAGIVGLIFNAFFADDAIVGLDGVNTGSEMGGWLIHNWKQLYIQIAFIVAASAYSFVVSAIVAYAINAIPGLKLRASEEAELLGMDDDQLGEFAYDYVEVRRDYLAWTPQKHDQHADGHEVPAAARYGIGEHSEMMLDGEAPTGATNSRGSEVSGVQEINVKEESQRPAPPTDAEKAAQGL

SEQ ID NO: 7192 - protein, 552 aa, Psychrobacter sp. 273-4
MTNTQQQSESIDDNQAQLSKQQNSDNNKKVPRVLMILDGFGHREDDKDNAIAAADMPNLDKIYEQYPHGLISASGEDVGLPDGQFGNSEVGHMNLGAGRVLYQDSTRISSEVASRDFYKNEALVNAVKAANTLGGNVHIMGLLSDGGVHSNQDHIEAMCHSALVHGAKNVFVHCFLDGRDTPPKSADKYINRLRDHIIKLNAHYESGRVQIASIIGRYYAMDRDNRWDRVQKAYELITEGKADRLSTRADGAVQAAYKARETDEFINPTVVIGRDEVPYTVDDNDALIFMNFRADRARELAQAFVLPDHEFSGFARNKQPKLAAFVMLTKYSDVLADNPKTSIAYYPTSLTNTLGEYLQSKGKTQLRIAETEKYAHVTFFFSGGREDEYKGETRILVPSPDVATYDLQPEMSAPEVTDKLVEAIESGQYDVLVVNYANGDMVGHTGIFDAAVQAVEALDVCVGRVAAAVHAAGGDMLITADHGNCEQMQDYESGQVHTQHTTEHVPLIYVGEKKVQVRSGGKLSDVAPTILALMDIEAPKEMTGENLLVAAE

SEQ ID NO: 7193 - protein, 1176 aa, Cytophaga hutchinsonii
MSQSTKTYTSTCSYCGVGCGVKIHKAVNGSLQIEGDKSYPANQGMLCSKGMNLHYAAMDQTDRLLYPEMRGNRNMPLQRVSWDTALDRAAAVFKALIEKYGPDSVGYYVSGQCLTEEYYIANKITKGFIGTNNIDTNSRLCMSSAVVGYKLALGEDSVPLSYDDIELADCFFITGANPAWCHPILFRRLENHKAANPHVKIIVADPRKTQSCSLADVHLQLQPGTDIVLCHAIARRLIETGKIDQAFIDAHTSGYEAFKEKVFTLSLQEAADICVLEKELIIQAADMIGDSQAFISMWAMGLNQSVIGVNKNVSLLNLSLITGQIGKPGAGPLSLTGQPNAMGGREVGGLSNMLPAHKNLLNPAHRKEVADFWGVPAINEKPGFTATEMFDQLLSGKMKAVWIICTNPLVSLPDARNAEAALRNARFVVVQDISNKSDTLKYADLVLPAAAYMEKEGVMTNSDRRISYLSKVMEPPGEALPDVDILCRFAHKMGWKESFNYASNAEIFEEYTRITKGTNIDISGLSYADLIQRRSVQWPVPEKGHPGTPRLFTDHTFYTPTGLANIISVDSMNHSEKLDDDFPLILTTGRIRDQWHTMTRTGKVRKLNKHISKPFLEIHPEDAGIRGIKQDDVVTIESRRGDVRVTAILTEDIKKGVVFLPMHWGRMLSTDLTRTNNVTNNLIDPVSKEPDYKFTAVQVTKYVKPREHIVIVGAGAASCQFIKRHRELGAEDTITVFSAENFHFYNRVLLPEYVSKHKSWDNLEKLRKAEWLELGVTLIPRKITRLITESKSIVDDTGEVHCYDRLLVATGSRSTQMKHIAPVKGIFTMRRREDADALIHHLSTGDSVVVVGGGLLGLEMADSLLEIGMKVSVIQRSSRLMDRQLDKTAANLLAKELTERGMDLYFDDEVLYVNGEYAVESLRLKSSRKIDCKAILFAIGTQPNVEFLKEAGIQVNRGVIVDEHLQTSNEFVYAMGEIAERNGALFGITAGAEEQATVLAEYLNGSTTSNYTGTLSMNILKVHGVELCSIGMVEAPPNNPDYEEIIFLDKTRKYYKKCIVYQDRLVGAILMGDKSEFNEFRDWIKSGVELGEKRESLLMSGSISKEPMLGTLVCSCNTVGSGNIENAIKGGCKDVTSICNTTGAGTGCGSCKPEVKAILERMHAVTESSNSQKTYA

SEQ ID NO: 7194 - protein, 208 aa, Phytolacca americana
KRRNGLLKKAYELSVLCDAEVALVVFSSRGRLYEYANHSVKGTIERYKKACSDQSGAGSVAEANAQYYQQDSAKLRNQIRTITENNRLLSRHMMGEGLSSLTMKELKNLEGKLERGISRIRSKKNELLFAEIEFMQKREIELHNNNQFLRARIAENERAQQSMSLMPGGGDYELVPSQSFDSRNYFQVNALQPNNQYSRQDQTPLQLV

SEQ ID NO: 7195 - protein, 226 aa, Thalictrum dioicum
MGRGKIEIKRIENTTNRQVTFCKRRNGLLKKAYELSVLCEAEVALVVFSSRGRLYEYSNNSVKKTIERYKKASTDSPNSGSVYEANVQFYQQEASKMRNQIASLQNHNRNLLGESLSNLNIRELRQIEKKIEGGISKIRAKKNELLFSEIEYMQKREIDLQTDNKYLGAMIAANERVPPEHMNLMPANEYHIMSSAPFDSRNFLPANLLDHNNNYSHSDQTTLQLG

SEQ ID NO: 7196 - protein, 451 aa, Vibrio vulnificus CMCP6
MATHFDYICIGGGSGGIASANRAAMYGAKVALIEAKDLGGTCVNVGCVPKKVMWHGAQIAEAMSLYAPDYGFDVEVKGFDWSKLVESRQAYIGRIHQSYDRVLGNNKVNVIKGFAKFVDEKTVEVNGEHYTADHILIAVGGRPTIPNIPGAEYGIDSNGFFDLAEQPKRVAVVGAGYIAVEIAGVLNALGTETHLFCRKESPLRSFDPMIIDTLVEVMAAEGPTLHTHSVPKEVVKEADGSLTLHLENGESQNVDQLIWAIGRHPATDAINLSATGVATNERGYIKVDEFQATNVAGIYCVGDIMEGGIELTPVAVKAGRQLSERLFNNKPNAKMDYDLVPTVVFSHPPIGTIGLSEPEAIAQYGEENVKVYTSGFTAMYTAVTQHRQPCKMKLVCAGEDEKVVGLHGIGFAVDEMIQGFGVAMKMGATKADFDSVVAIHPTGSEEFVTMR

SEQ ID NO: 7197 - protein, 518 aa, Synechocystis sp. PCC 6803
MNNSTVSSIDITPQDRYNQQLLAHVHPPDWINPSPKDQYDLVVIGAGTAGLVVAAGAAGLGIGLKVALIEKHLMGGDCLNFGCIPSKALISSARVVGVMNNANSLGIKKPDSIEIDFPAVMARMRQIRTGISHHDSAQRFRDLGIDVFLGEGHFVRNNQIEVGGAILNYKKAIIATGAKAVKPNIPGIEEVGFLTNETVFSLTACPDRLGVIGGGPIGCELAQAFQRLGAQVTLFHRGSHLLNKEDPEAAAIVQESLIKDGIELILNAKLERAELTDRGKVLHYRANGDSGTIVVDEILVGAGRAPNVEELNLEAVGVKFDRRGVKVNDYLQTTSPQIYAAGDICMDWKFTHAADAAARIVIKNTLFSPFGLGRSKLSSLTMPWVTYTDPEIAHVGLNETMAEALDIGYKIIKIPFSQVDRAIAADETEGFLKIIHVANSDEILGATIVASHAGEMISEITTAIVNKIGLSKLAGVIHPYPTQAEAIKKAADTYRRTLLTNNTKNLLKLLTKFPSKLF

SEQ ID NO: 7198 - protein, 216 aa, Sanguinaria canadensis
IENTTNRQVTFCKRRNGLLKKAYELSVLCDAEVALIVFSNRGRLYEYANNSVKSTIERYKKTCQDPSNSGCAVEANTQFYQQEASKLRQQIGFLQNSNRNLTGEALSSMTVKELKQLETRLEKGISRIRSKKNELLFSEIEYMQKREIDLQNDNMYLRAKIAENERAQQHMNLMPGNEYDVMTSSAYDSRNFLQVNLLESTNHHYSRQEQTALQLG

SEQ ID NO: 7199 - protein, 352 aa, Magnaporthe grisea 70-15
MPEIPTEQWAQVIEKTGGPSVYKKIPVAKPGPDEVLVNIKYSGVCHTDLHAMNGDWPIPTRLPFVGGHEGAGVVVARGELVQDVEIGDHVGVKWINSSCQNCDFCRSANEMLCPKVTLSGYTVDGSFQQYAIAKAALVARLPKEVSLEAVAPVLCAGITVYKGLKETGARPGQWVAIVGAGGGLGAMALQYARAMGLRVIAIDSGEEKRRACLEDLGAAAFVDFATSADVVADVRKVTADGLGPHAAVLLAVTSRPFQQAAEYIRPRGTVVCIGLPSGAQIKADVLDMVVRLITIKGSYVGNRQDTAEAVDFFARGLIKAPFKTVGLSELGKVFEALEQGKVVGRYVLDTSK

SEQ ID NO: 7200 - protein, 147 aa, Fritillaria agrestis
TMLSSVATAARAAPAQASMVAPFVGLKSTSSFPVTQKPATGLSTLPSNGGRVQCMKVWPIVGLKKFETLSYLPTLSVESLLKQIEYLIRNGWVPCLEFSLEGFVSRDNNKSPGYYDGRYWTMWKLPMFGCTDAAQVVKEAAECKKEY

SEQ ID NO: 7201 - protein, 147 aa, Fritillaria agrestis
TMLSSVATAARAAPAQASMVAPFVGLKSASAFPVTQKPATGLSTLPSNGGRVQCMKVWPIVGLKKFETLSYLPTLSVESLLKQIEYLIRNGWVPCLEFSLEGFVSRDNNKSPGYYDGRYWTMWKLPMFGCTDAAQVVKEAAECKKEY

SEQ ID NO: 7202 - protein, 640 aa, Triticum aestivum
MSSPRRPEMSPAARNSDNGYVETDPTGRYGRFDELLGKGAMKSVYRGFDEVRGVEVAWNQANLADVLRTPDALQRMYSEVHLLSTLRHDAIIAFHASWVSVSSPSPRGGCTGGTPRRTFNFITELFSSGTLRAYRLRYPRVSLRAVRGWARQILRGLAYLHAHDPPVIHRDLKCDNVFVNGHQGTVKIGDLGLAAVLRGAQAAHSVIGTPEFMAPEMYDEDYDELVDVYSFGMCMLEMLTVEYPYAECSNPAQIYKKVTSGKLPDAFYRVDDADARRFIGRCLVPASHRPSAQELLLDRFLSTQDTTMTLSPPPLLPALPTSGDRKDNPEEAEPVAARTDMTITGKLNTDDDTIFLKVQIVDEAGHSRNIYFPFDIAGDTATEVAREMVKELDITDRDPSEIAAMIEQEITRLVPDWVGGGCDDQQEYYTYADNDDNEEQPPFYYLSSSPTSSNGSHCGTGPTTSGGGYAGWFQDYAVSSDDDETSSTRSALHYSSEEAQPEEKPGVSKTGQVKATRFGPGDSGTAGHDVSSSRAGRPRHHRGSPDAGGDEGRPRRQQGRMTRNRSMVDVRSQLLHRTLVEELNKRMFFNTVGAVENIGFRRIPGYGGGPSSSSATVTSSRGGDQRGRRSGKDKHQFFMF

SEQ ID NO: 7203 - protein, 391 aa, Xylella fastidiosa Dixon
MSIVRMTDLALSGKRVLIRQDLNVPIDQGLITSEQRIIASLPTIRVALERGAAVMVTSHLGRPKEGVWSEEDSLAPVAKRLSQLLGIEVPLRRDWVDGVQVAPGQLVLLENCRMNVGEAENDEALARKYAALCDVFVMDAFGTAHRAQASTHGVICCAAIAAGGPLLMAELDALSRGLKHPVKPLLAIVGGSKVSTKLELLSNLVNNVEQLITGGGIANTFLAAAGYSIGKSLYEADLIETAREIITVAKARGAEIPLPTDVVVAKQFLPGVTATVKTVDAIVADDLILDIGPQTARHYAALIETAATVVWNGPVGVFEFDAFSKGTEVLARAVAASSAFSIAGGGDTLAAIDKYGVADQISYISTGGGAFLEFLEGKTLPAVAALQARSG

SEQ ID NO: 7204 - protein, 459 aa, Gloeobacter violaceus PCC 7421
MAFDYDLLIIGCGVGGHGAALHAVAHKLKVAVVEARDLGGTCINRGCIPSKALLAAAGRLRVLRESEHLGISVGEISFDRAKIAHHAASVVDKIRADLTKSLQKLGVTILHGHARLKGSQTVEIDPGEGGGEVQVLTARDVLIASGSQPFVPPGIVTDGKTVYTSDEGVRLEHLPEHICIIGSGYIGLEFSDVYTALGTKVTMIEALDRLMPGFDPDIARLAARLLVKSRDIDTKVGVFAKKVTPGQPATVELSTGEQLQFDAVLVACGRTPDTKNLGLESVGLETARGFIPVDGRMATSAEHLWAIGDATGKMMLAHAASAQGIVAVDNMLGHERTIDYRSIPAACFTHPEIGFVGLTEPQAKEQGYKVGVVRTYFGGNSKAIAQGDTEGMAKIVYDQTTGELLGCHIIGPEASLLVAEAAQAIAGRDRIERLAHLVHTHPTLSEILDEGYKRAAAVL

SEQ ID NO: 7205 - protein, 314 aa, Bacillus cereus ATCC 14579
MGKIAFLFPGQGSQAVGMGKQLAENNKEVAKVFAKADEVLEDSLSEVIFEGPQEKLTLTTNAQPALLTTSFAILTALKEYDITPDFVAGHSLGEYSALVAAGALTFEDAVYAVRKRGEYMEEAVPGGEGAMAAILGADPHMLKQVTEEVTSEGYAVQIANMNSTKQIVISGTKQGVEVASQRAKENGAKRAIPLKVSGPFHSSLMKPAAEKFQSVLNEITIHDTNIPVIANVTAEVITRGADIQEKLIEQLYSPVLWYPSIEYMVNQGVDTFIEIGPGKVLAGLMKSIDSSVKAYAIYDEETLKDTISNLRGEN

SEQ ID NO: 7206 - protein, 275 aa, Zea mays
PNCGSENSVLPAALGQLSAAEVERRVKLLREDSELQKLHKKFVLGNILQESEFWATRKNLLDDEANKRSKQKPGFKSALVDIRPTTDGRTNKVTFQITPEMIHQIFAEKPAVRRAYLDFVPKKMSETRFWEKYCRAEYLVRTKNTAAATAEAAGNEELAIFLKNDDILAKEAKLKIKRVDPTLDMEADTGDDYIHLPDHGIHRDGSKETVDADSELARRTLSQDLNRHAAVVLEGRSLDVESSDPKTLAEALARSKKEPRYTSNCLNTIKWEREG

SEQ ID NO: 7207 - protein, 186 aa, Zea mays
  unsure (1)..(186): unsure at all Xaa locations
MSILRIHAREIFDSRGNPTVEVDLYTAKGLFRAAVPSGASTGIYEALELRDNDKTRFMGKGVSQAVEHINKTIAPALVSKKVNVVEQEKIDKLMIEMDGTENKSKFGANAILGVSLAVCKAGAVEKGVPLYRHIADLAGNPEVILPVPAFNVINGGSHXAGNKLAMQEVMILPVXAXSFREAMRIG

SEQ ID NO: 7208 - protein, 464 aa, Haemophilus somnus 129PT
MKLTRFQQYHTEAKKLIAIATPILLAQVAQNSMGLVDTIMAGRVSAADMAAVAVGASIWLPLVLFGHGLLLALPPTISYLNGSGQRDHIAHQIRQGLWIVFISCIPLGLLIYNSDFVIQYMKMEEKLANITIGYLRAMLWGLPGYLLLINFRCLNDGIAKTKPAMVITFFGLLCNIPLNYIFIYGKLGIPAFGAVGCGIATAIVNWIMCLMMIVYSKHARNQRDLKVFEHLFEKPDTKTLAKLFRLGLPIAVSLCCEVALFALTSLLLSPLGTQVVASHQIALNTSSFAFMLPMSLGMATTILVGQRLGEGKIDNAKQISFSALTVGLSIAFLTASIIFFFRYEIAAIFVNDKEVIAISSSLLMIVALYQFSDTAQVVSSGALRGYKDTQAILYITLFCYWGIGMPLGFSLSRTDWIIPSIGAAGFWVSFVVSLTIAAILLLWRMYKIQQQPAPILLAKLDKLK

SEQ ID NO: 7209 - protein, 225 aa, Meliosma dilleniifolia
MGRGKIEIKRIENTTNRQVTFCKRRNGLLKKAYELSVLCDAEVALIVFSTRGRLYEYANNSVKATIDRYKKACADTSNTGSVSEANAQFYQQESSKLRQQIVILQNSNRHLMGEALSAMTVKELKQLEGRLEKGISRIRSKKNEMLFAEIEYMQKREIDMQNDNMYLRAKIAENERAQQHMSMMPTSEYEAMPPQQFDSRNFLQVNLLEPNHHYSRQEQTALQLG

SEQ ID NO: 7210 - protein, 394 aa, Desulfovibrio desulfuricans G20
MYEFPRMHRLPPYVFAVVGELKMQLRRQNVDIVDMGMGNPDMPTPQHIVEKLNEAAAKGVNHRYSVSRGIPNLRKAICEWYMRKFDVYLDPDKEAVVTMGAKEGLSHLALAMLSPGDVVFAPDPTYPIHTYAAIIAGADVRRIPIGKGRDFFEDLLAATRQTWPQPKLLMLSYPHNPTTELATLEFFQKVVDFAKEHKMYVVHDMAYADLAFDGYEPPSFMQADGAKDVGVEFYSMSKSYSMAGWRVGFCVGNREMVHALTRIKSYLDYGIFQPIQIAATVALNGPEDCVKEIVDTYRQRRDVLCEGLNRVGWPIEPPKATMFAWAEIPEPFRQMGSVEFSKLLLREAGVAVSPGLGFGHFGDHHVRFALIENPHRIKQAIKGIKRVLSGSSCG

SEQ ID NO: 7211 - protein, 212 aa, Chloranthus spicatus
IENTTNRQVTFCKRRNGLLKKAYELSVLCDAEVALIVFSTRGRLYEYANNSIKSTIERYKKASADSSSTTSIAEANTQYYQQEASKLRQQIHILQNSNRHLMGDALSSLSIKELKQLENRLERGITRIRSKKHELLFAEIEYMQKREADLQNDNMYLRAKIAENENAQQANMLPGPEFDTLPTFDSRNYFQANILEAAPQYSHQDQTALHLG

SEQ ID NO: 7212 - protein, 822 aa, Haemophilus somnus 129PT
MKTQNKVNTSRRDFLKNSSLGVAGVSLSGGVVGTLASKAVAAEQHTVVTAAHWGALGVVVENGKVVKSGSAMPISVENELQSVVADQLYSETRVKYPMVRKGFLEGNKDTSLRGRDEWVRVSWDKAFDLVAGEMKRVRDAYGAGGIFAGSYGWYSSGALHASRTLLQRYMNVTGGFVGVKGDYSTGAAQVIMPHVLGTIEVYEQQTSWETVLENSDIVVLWAANPLTTLRIAWTSTDQQGIEYFKKLKESGKRIICIDPVRSESCEFLNAEWLPVHTGTDVPLMLGIAHTLVTTDKHDKAFLKKYTTGYDKFEQYLLGKTDGQPKDANWASKICGLPADIIKQLAADFSSKRTMLMGGWGMQRQRHGEQTHWTLVTLAAMLGQIGLPGGGFGFSYHYSNGGAPSAVGGIIGSITANPSVQAGEKTWLDDTSKFSFPLARIADVLLNPGKTIDYNGSKVTYPDIKLIYWAGGNPFVHHQDTNTLVKAWQKPETVIVNEVNWTPTARMADIVLPATTSYERNDLTMSGDYAMMNIFPMKQVVPPQFEAKNDYDIFAELAKRAGVEDKFTEGKTEMEWLQDFYNVAFNAARKNRVLMPKFEKFWQENKPVNFKPTEKSKKWVRYEAFRNDPLLNPLGTPSGKIEIYSDVVAKMNYDDCKGHPYWFVPEEFAGNTTTEAPLALVTPHPYYRLHSQLAHTSLRKKYAVNDREPVLIHKEDAMARGIMDGDIVRIFNKRGQVLAGAVVTEGIIKGTVALHEGAWYDPADLGQSEQPLCKNGCANVLTRDEGTSKLAQGNSPNTCIVQVEKYTEAAPKVTVFDQPKQSV

SEQ ID NO: 7213 - protein, 516 aa, Zea mays
MQFALALDTNSGPHQIRSCEGDGIDRLEKLSIGGRKQEKALRNRCFGGRVAATTQCILTSDACPETLHSQTQSSRKNYADANRVSAIILGGGTGSQLFPLTSTRATPAVPVGGCYRLIDIPMSNCFNSGINKIFVMSQFNSTSLNRHIHRTYLEGGINFADGSVQVLAATQMPEEPAGWFQGTADSIRKFIWVLEDYYSHKSIDNIVILSGDQLYRMNYMELVQKHVEDDADITISCAPVDESRASKNGLVKIDHTGRVLQFFEKPKGADLNSMRVETNFLSYAIDDAQKYPYLASMGIYVFKKDALLDLLKSKYTQLHDFGSEILPRAVLDHSVQACIFTGYWEDVGTIKSFFDANLALTEQPSKFDFYDPKTPFFTAPRCLPPTQLDKCKMKYAFISDGCLLRECNIEHSVIGVCSRVSSGCELKDSVMMGADTYETEEEASKLLLAGKVPVGIGRNTKIRNCIIDMNARIGKNVVITNSKGIQEADHPEEGYYIRSGIVVILKNATINDGSVI

SEQ ID NO: 7214 - protein, 147 aa, Fritillaria agrestis
TMLSSVATAARTAPAQASMVAPFVGLKSTSAFPVTQKPATGLSTLPSNGGRVQCMKVWPIVGLKKFETLSYLPTLSVESLLKQIEYLIRNGWVPCLEFSLEGFVSRDNNKSPGYYDGRYWTMLKLPMFGCTDAAQVVKEAAECKKEY

SEQ ID NO: 7215 - protein, 442 aa, Psychrobacter sp. 273-4
MIKAIKGFNDILPAQSAKWLYLESILADVLGRYGYEHIRLPIVEQTDLFARAIGGATDIVEKEMYSFTDKSDPPTPLTLRPEGTAGAVRAVNEHNLLRGDTPKLWYIGPMFRYERPQKGRYRQFHQLGVESFGSALPDADAELIAMTHLMWQELGLKDEMRLQLNSLGERDERHAYREALVTYLTDKQEQLDEDSKRRLTTNPLRILDSKEASTQALLIDAPKLANFLGEESVAHFEQVQTYLTELGIDFEINPHLVRGLDYYNKTVFEWVTDKLGSQATVCAGGRYDGLVGQLKSIDTRDAKADAKADAKADSKPVKSEPAVGFAMGLERLLLLIDAVAPIADIPACDVFVVAHPEVYSAGIGYAQNLRYSRPDLRVKMASATSLKAQMKKADKSGAALTVIIAQQEIDDKTISIKDMQTGEQKTAAQDWLSDKDNFCRRK

SEQ ID NO: 7216 - protein, 226 aa, Saruma henryi
MGRGKIEIKRIENTTNRQVTFCKRRNGLLKKAYELSVLCEAEVALIVFSSRGRLYEYANNSVRTTIDRYKKASDSSNPASVSETNSQYYQQEATKLRQQIGILQNANRHLMGESLSSMSVKELKQLETRLEKGISRIRSKKNELLFAEIEYMQKREVELQNDNIFLRGKIVENERAQQNMNMLPGGGGYEVMSQHPPYDSRNYLPVNLLEHNQHFSHQEPTALQLG

SEQ ID NO: 7217 - protein, 548 aa, Yersinia pestis CO92
MKNINPSQTAAWKALQQHFEQMKDVTISSLFAKDDQRFNRFSATFDDQMLVDFSKNRITSETLEKLQDLAKETDLAGAIKSMFSGEKINRTEDRAVLHIALRNRSNTPIVVDGKDVMPEVNAVLAKMKQFCDRVISGDWKGYTGKAITDVVNIGIGGSDLGPYMVTEALRPYKNHLNMHFVSNVDGTHIAEALKPLNPETTLFLVASKTFTTQETMTNAHSARDWFLSAAGDPAHVAKHFAALSTNAKAVGEFGIDTNNMFEFWDWVGGRYSLWSAIGLSIALSVGFEHFEQLLSGAHAMDKHFAETPAEKNLPVLLALIGIWYNNFFGAETEAILPYDQYMHRFPAYFQQGNMESNGKYVDRNGHPVDYQTGPIIWGEPGTNGQHAFYQLIHQGTKLIPCDFIAPAISHNPLSDHHAKLLSNFFAQTEALAFGKSLEDVEAEFAAAGKTPEQVAHVAPFKVFEGNRPTNSILLREITPFSLGALIALYEHKIFTQGVILNIYTFDQWGVELGKQLANRILPELADDQEVTSHDSSTNALINRFKNWR

SEQ ID NO: 7218 - protein, 147 aa, Fritillaria agrestis
TMLSSVATAARTAPAQASMVAPFVGLKSTSAFPVTQKPATGLSTLPSNGGRVQCMKVWPIVGLKKFETLSYLPTLSVESLLKQIEYLIRNGWVPCLEFSLEGFVSRDNNKSPGYYDGRYWTMWKLPMFGCTDAAQVVKEAAECKKEY

SEQ ID NO: 7219 - protein, 749 aa, Mycobacterium tuberculosis H37Rv
MIGNGGAGGSGAPGAIGGAGGPAGLIGVGGAGGAGGDSAVAGVIGGAGGAGGAALLFGAGGAGGAGGSGGSGAAGGAGGAGGAGGLFASGGSGGFGGFASTGTGGAGGTGGAGGLFASGGVGGTGGGAGSGGTGGVGGTGGAGGLFASGGAGGAGGSGGTGGAGGTGGAGGLFGAGGAGGLGGQGNHTGGHGGAGGSAGLLALGDGGAGGAGGAATTGTGGAGGAGGKAGLLFGSGGAGGSGGAAGTFGDTGNSGGAGGAGGKAGLLFGSGGAGGSGGAGGFANGSTGGAGGAGGGAGLIGNGGNGGSGGTSVATGGAGNGGAGGAGGGAGLIGNGGNGGSGGMGDAPGGTGVGGIGGLLLGLDGANAPASTNPLHTAQQQALAAVNAPIQAVTGRPLIGNGANGAPGSGAPGGHGGWLFGGGGTGGSGVSGGAGGDGGAGGILFGAGGAGGAGGAVTGTGATGGSGGAGGGALLFGAGGAGGAGGSSGIGGFAAGGAGGPGGAGGLFNGGGAGGAGGSGVSGGAGGEGGAGGAGGLFAGGGAGGAGGSGNNVGGAGGAGGVGGLFGAGGAGGSGGGGSVAGDSGAGGNAGLLAPGLAGGAGGGGGQGFDTGGAGGPGGDAGLLVGSGGVGGAGGFGLTTGGPGAAGGDAGLLFGSGGAGGAGGSGRTDLGGAGGAGGKAGLIGNGGNGGAGGAGGNGGGDGGPGGAAFGLGNGGNGGNGGTGTSAGSPGAGGAGGSLIGAEGLPGLLP

SEQ ID NO: 7220 - protein, 147 aa, Fritillaria agrestis
TMLSSVATAARAAPAQASMVAPFVGLKSTSSFPVTQKPATGLSTLPSNGGRVQCMKVWPIVGLKKFETLSYLPTLSVETLLKQIEYLIRNGWVPCLEFSLEGFVSRDNNKSPGYYDGRYWTMWKLPMFGCTDAAQVVKEAAECKKEY

SEQ ID NO: 7221 - protein, 196 aa, Nymphaea sp. EMK-2003
KRRNGLLKKAYELSVLCDAEVALIVFSSRGRLFEYANNNIKATIDRYKKACAESSNANSVTEANAQYYQQEATKLRQQIQILQNANRHLMGESLSNLSVKELKQLENKIERGITRIRSKKNELLFAEIEYMQKRELELQSDNMYLRAKVAESERAQHSNMLPGSDYETMQTFDSRNFFSVNMLQYSNQDQTALHLG

SEQ ID NO: 7222 - protein, 882 aa, Mycobacterium tuberculosis H37Rv
MSFVIAAPDLVAMATEDLAGIGASLTAANAAAAVPTSGLLAAAGDEVSAAIAALFSSHGQQYQAMSAQAAAFHARFVQALAGAMGAYAAAEAANASPLQTLEQGLLGAINAPAAALSGRPFIGNGTNGAPGTGEAGGPGGWLLGNGGNGGSGAPGQTGGAGGAAGLLGHGGTGGAGGTGASGGKGGTGGWLWGSGGAGGAGGSGGGSGGAGGNALMFGIGGNGGAGGAASGVGNGGVGGAGGAGGALVAIGGAGGAGGAATTGTGGAGGAGSNALGLFLGLGGSGGQGGDSAMGSGGAGGAGGSGGAASPFGIDIGIGGAGGHGGAGTNGGAGGAGGAGGSSGTVFALDLSWGGAGGNGGAATTGTGGAGGTGGFAVAPDFIGFGAAYGGAGGLGGAATGAGGTGGTGGVGAGGFAALGVGVGGAGGAGGAATETGGIGGAGGLGVGLLGGAGGAGGPGGAASAGSGGHGGTGGDALGLIGAGIGGVGGVGGAATDTGGNGGAGGSGTGLLGGVGGAGGHGGGASVGTGGSGGAGGDGFGFVGAGGNGGNAGTGVGVNGANGGNGGSATGALAAVGGAGAAGGDATSGTGGFGGAGGSARGLIFALGGAGAAGGDASTGVGGPGGPGGTGTASSPFGIAIAIGGAGAQGGAGTSGATGGAGGDGVFEGIAVLGLGFGGAAGAGGAATGDGATGGAGGFGGAGAGIANFLGFSVLHGGAGGAGGTATGTGGNGGAGGGGGLSSPVILGIGIGGAGGDGGGALGVLGGMGGDGGDGGEAVAVGIAVGGAGGAGGAAPTGNGGAGGNGGDALGLVGVGGNGGNAGTGFGANTGGNGGDTTIVVNGMLAPSTLGYGGNGGNGVNGGAGGTGGKAGVFGAPGQNGLP

SEQ ID NO: 7223 - protein, 386 aa, Exiguobacterium sp. 255-15
MAKKNVVAMLLAGGEGKRLGALTKHTAKPAVAFGGKYRIIDFPLSNCTNSGIDTVGVLTQYEPLELNRYLGIGSAWDLDRRNGGLTILPPYQAQNGKNWYEGTANAIYRNMSYINQYDPDYVLVLSGDHIYKMDYEKMIEEHRQGGADVTISVREVPWEEAPRFGILNTDEDLRINEFEEKPENPKSNLASMGIYVFNWDVLKRHLIQDAGDAESSFDFGKNIIPNMLYENLNIRAYKFKGYWKDVGTIQSLWEANMDLLEADPEFDLYEPSWKVHSVNPNQQPQYIGNNASIETSIINEGCHIEGEINHSVLFYGVDVAEGSLVKDSVIFPNVKIGKDVTIHRAILADGVVVEDGATIGTPNGEVFVIEANSVIPKNEVVKEAIQ

SEQ ID NO: 7224 - protein, 147 aa, Fritillaria agrestis
TMLSSVATAARAAPAQASMVAPFVGLKSTFAFPVTQKPATGLSTLPSNGGRVQCMKVWPIVGLKKFETLSYLPTLSVESLLKQIEYLIRNGWVPCLEFSLEGFVSRDNNKSPGYYDGRYWTMWKLPMFGCTDAAQVVKEAAECKKEY

SEQ ID NO: 7225 - protein, 474 aa, Synechocystis sp. PCC 6803
MSQDFDYDLVIIGAGVGGHGAALHAVKCGLKTAIIEAKDMGGTCVNRGCIPSKALLAASGRVREMSDQDHLQQLGIQINGVTFTREAIAAHANDLVSKIQSDLTNSLTRLKVDTIRGWGKVSGPQEVTVIGDNETRILKAKEIMLCPGSVPFVPPGIEIDHKTVFTSDEAVKLETLPQWIAIIGSGYIGLEFSDVYTALGCEVTMIEALPDLMPGFDPEIAKIAERVLIKSRDIETYTGVFATKIKAGSPVEIELTDAKTKEVIDTLEVDACLVATGRIPATKNLGLETVGVETDRRGFIEVNDQMQVIKDGKPVPHLWAVGDATGKMMLAHAASGQGVVAVENICGRKTEVDYRAIPAAAFTHPEISYVGLTEAQAKELGEKEGFVVSTAKTYFKGNSKALAEKETDGIAKVVYRQDTGELLGAHIIGIHASDLIQEAAQAIADRKSVRELAFHVHAHPTLSEVLDEAYKRAV

SEQ ID NO: 7226 - protein, 565 aa, Vitis vinifera
SARARAEFGTSSLSTPRLTFSSPKLQTLYRNFPISLSLNFSSSLSHSKTLTVAPGSLSQRPSSFSPRRCFAVRAESENGAEPRHYDFDLFTIGAGSGGVRASRFAANFGSSVAVCELPFATISSETTGGVGGTCVLRGCVPKKLLVYASKFSHEFDESGGFGWKFEAEPKHDWSTLMANKNAELQRLTGIYKNILKNAGVTLIEGRGKIVDPHTVDVDGKLYTARHILIAVGGRPFIPEIPGSEHAIDSDAALDLPSKPKKIGIVGGGYIALEFAGIFNGLNTDVHVFIRQKKVLRGFDEDVRDFVAEQMSLRGIEFHTEESPQAILKSADGSLSLKTNKGTVEGFSHIMFATGRRPNTKNLGLETVGVKMTKTGAIEVDEFSRTSVPSIWAVGDVTDRINLTPVALMEGGALAKTLFGNEPTKPDYRAVPSAVFSQPPIGQVGLTEEQAIQKYGDIDVYTANFRPLKATLSGLPDRVFMKLIVCAKTNKVLGLHMCGEDSPEIVQGFAVAVRAGLTKADFDATVGIHPTAAEELVTMRTPTRKIRNSSPPEGKTDPEVKAAAGV

SEQ ID NO: 7227 - protein, 568 aa, Brucella melitensis biovar Abortus
MARDATKLEATVAKLKKHWAESAPRDMRAAFSTDPGRFGRYSLCLDDLLFDWSKCRVNDETMALLKELAVAADVEGRRAAMFAGEHINNTEDRAVLHVALRDTSSKEVLVDGHNVLPDVKHVLDRMAAFADGIRSGALKGATGRKITDIVNIGIGGSDLGPVMATLALAPYHDEPRAHFVSNIDGAHIADTLSPLDPASTLIIVASKTFTTIETMTNAQTARKWVADTLGEAAVGAHFAAVSTALDKVAAFGIPEDRVFGFWDWVGGRYSVWSAIGLPVMIAVGPDNFRKFLAGAHAMDVHFRDAPLEKNLPVMLGLIGYWHRAICGYGSRAIIPYDQRLSRLPAYLQQLDMESNGKSVTLDGKPVSGPTGPVVWGEPGTNGQHAFFQLLHQGTDTIPLEFIVAAKGQRADTGINQHEMLMANCLAQSEALMKGRTLDEARAQLQAKNPACVASGAHSPAPASFPANRPSLTLIHDMLDPYALGRLIALYEHRVFVEAQIFGINPFDQWGVELGKELATELLPVVSAKEGASVRDASTQGLVAHLHARRKACRIICKVRNTRKAGPEA

SEQ ID NO: 7228 - protein, 352 aa, Azoarcus sp. EB1
MTYVQDGNKSELRKAKRQLVTVIDLNKCLGCQTCTVACKNIWTKRPGTEHMRWNNVTTYPGKGYPRDYERKGGGFLRGEPQPGVLPTLIDSGDDFQFNHKEVFYEGKGQTVHFHPTSKSTGKDPAWGYNWDEDQGGGKWPNPFFFYLARMCNHCTNPACLAACPTGAIYKREDNGIVLVDQERCKGHRHCVEACPYKAIYFNPVSQTSEKCILCYPRIEKGIANACNRQCPGRVRAFGYLDDTTSHVHKLVKKWKVALPLHAEYGTGPNIYYVPPMGARGFGEDGEITDKTRIPLDVLEGLFGPEVKRVLAVLHTERENMRAGRGSELMDLLISKKWSDRFGGLTNDPLTQS

SEQ ID NO: 7229 - protein, 3016 aa, Synechocystis sp. PCC 6803
MAASTQTPAIAVDSNGFTHLVWNQNNVIYHAYYDPSVGRWRESAPIANSVSAKELKITTGVRSQGEETGSSVEGIFISWIEGEGNNSDIHGASGILNSLGQYNWGQTFKLTDDAVSDENMRLQTTADGNLLLITEKIDLDDPQADRDLYSQVIDLRNRETLHNTLTQVKPLNPSNFIAPNASPTLALGDGDIQVPGTFLITKENKKEYQLPLSFFNGKLEFKNALALGGGINFTNLINSGDPGLSAFLQLQDELSGALSFGKNKVSLKGRLQGKLQLDFLLNGDGNTFSASDALRLRGEYERNLLPGKTTYDIGFSVGGVPISLLDAEVQLGLLFDLAFTLKQKWSTDFDLTPQALVTGGSTLAETQTENTTVEYWYSLVRADGTPAQPGDDPSQLYWLINSDQAADNLLAPPPGLEAPSPAELALIPGVENTGLLSFGTGLSGKLKLALLGFTAFDFESKLEILANFEVFPNVGFDSLEETLALGLNLFGKKWSTTLKVEQNFDNPSLIAENLSTTLNADDLLVGINPDFIQGSTAIYAGNPLDGTSVGSNLTDDTSPSILVASDGNLYATWVKNTHNESLSQVLLAKSTDGGNTWSNPLVIPNSAGMNFNPVIGTTVTGQLLVVWSNASPDIFNPDGSVNRPEFVESLAASTLFYSTSNDNGATWSDAIPINPDIKTPQALTLTQLANGALLLSWVVADTLIPDTGLYTNGGDTKNDVLYSSFWNGTSWSNAQIVASGDLRLLETPVSATVGGEATIFWTEVNPAADDGISIFYSSYNQQFAQWTPAVLFAPDLSNLTTFQTVAEAIEISNSISNQTVNSAFDQPTHNSVVAESDLRLVIPHNNSQGSSQLQVSPIRVKETDGEAVLLVRRTGNIQEAVSFNYRTVDGSATAGADYVAQAGTLTFAPGEVFKEIRIAILDDDITERRAEKFRVVITSDHEGAHLRLDGLRLGNTRLELVATVTTIEDEPTSLSEIDSGFILNADPLAQAGMAIAPGGDINSDGTDDFLVGAPAKNGGNGAVYVVYGNPTIGIRDQGLSLDSLDGTNGVIIQGASQSLLGTAMATADLDSDGLSDLVLGAPQNSVQNSAGKVYILRGSNVEGQSTIDLSTASSLVLESNQAGNAAGFKTAIADVTGDGLADVIISAPAINTIYVVFGSAIKNALNSNTPSLNLDNLGSDGFLLNTGIGQIGTGLGVADINGDGVFDLLLGAPQANPVDYSGSEDADSKPLAYGGQVYVAFGGTGLNGSLNLGQLNGSNGLILNGQAFYNQSNLGGGTPSDPNLQPDFTIADNAGTNVVNAGDINNDGFDDFIISAANSAANGINGLGRAYVVFGKASGWNSAINLQNLDGTNGFIINGIYDTTQNLGGNAGYWISAVGDINNDFFDDFIISAPTLGTNGPNSATGQSYLILGTSQWANFLNQGVLELSDVNTLNSRVFLFNNPNSGTQLGLGLGSIGDVNGDGSPDMAIATPQIYPGVETSQIYVAYGHPWVGAGGSIDVTKLRSDNGFVFQPVTKNEIGTVQLGADINNDGYVDTLIADAGFNGAGGKIVYLFFGSDPAQPSTFVDSVAITIASNDGLILGQQTLDYGDFNNDGITDFVVSRSGALGQSYATIILGSEDSSIWSSINPDTGIDINNLLASNGGVNITVPNVPNQGALVNLASGDFNGDGIDDVLLSSANLNPVIVFGKETWSSGVTSNVNVLNESLPIQIEAGKPITAVNSLGDVNGDGYEDFGLIGIDEVNENLYGYVIFGKNNLASNSSLNLATLNGSNGFKLTSPSISSISEQGGVGSISLAGDLNGDGFGDFIVGLTNDLNFGKNGAAYVVFGGRNLGSSGSFNLSNLNGGNGFTIQQAPGSEDLVGYSIAGGGDINGDGYDDLLVSAPSAGVGNPDGTNNGDTEGTIYTLFGSSILGVGGTVDLSNLNGSNGFETVGAQAYSFAGSFVGGLSDVNGDGYADLGIGAQGDNSQGVSGLAYNVFGGDFTQNVTYVGTIDNDIFSATSLATSSAPHIMNGGQGNDILQSAGVNVSAGGRVVMNGGQGNDLLSIGSLNFERLDGGSGKDILQLNSYILSSNNLDLTDTTIGSRIRGIEVIDLGINNRVTLNVETLTALSDTTNTFTVLGHNSFIVASDFQNWTKSGTVTEQGVTYDQYINKGTKLLIQQSNNLFESTAVSSVAVYGTENGETLVPGIFPGFVGKDNIIFALGGDDLVDLSLAQGNNQVYGGPGNDRLIAGQNDSLFGGLGNDILDTSGDRGTNNLNGGDGDDTFFLGQGDKAFGNDGNDRFFMRGSGRNLISGGAGADHFWIADIDFTNSFNAILDFELGIDTIGLKGLASRQDDLKLIQYGTDVLIALGDEYLARVTGVLRPFLEVVSDGIDLFVQGAQDVSPIVVSNTNDSGAGSLRQAIIDAGANASPDTIDMTGIAAGTIILNSPLPTLNNRNDITFVTLGAFGTPTIKFNNPSAFNNIFTLEGVAVNLSYMNLQNGYAKGGDGVSGGGGGAGAGGALTILQGSTVIIDNVSFDSNRAVGGNGTAGARGGGGEIFGTPDDRPSAGGGGGNFNASGNANNGGAAGSVGDDKAGGTGGTGGTGGFGIGGGGGGGGGGSSSGSPFDFTPRNGGSGGPGGAGGFGAGGGAGGGGGGSSGQNPGDDKRGGFGGSGGSGGGNPIGGNGSVGSQGGAGNTVEGGSPGNGGSGGGGAGLGGALFINQATVTITNSQFSGNTTQGGTGGNSGQALGGAIFITDNSFVTGAGLTFSNNSAPSSPGGSFSNAYGQFQNNNDVYGTIDSLSNASTNLFLVPPLTPEVQNEISVVAKDNLFFVQLPDGSEVSLLYEDQPFVSGSFGNWQILEAETINGVNNVLWQNPDIDEIGVWNADSNWNWISSETWPTNSFNTLEAEINFQIDLNGDELLGDRLTNIESKGNTSFLEGIFGNYYVQTGDDLTAPIKYLGEVFENNFGDWQGLAAETVNGINQVLWQNLETSEIGVWSTDSNWNWLSSDVFAAGSLQALEQQLIFAVDVN

SEQ ID NO: 7230 - protein, 185 aa, Zea mays
  unsure (1)..(185): unsure at all Xaa locations
KLELPAVAAALELVDPPGCRKRRVNYSPPPPKNVSPAVFDSHLRGLVFAADAEEWPYQXEFXXTXQXHLXDGTMXXXAXXRXGTXXAAVCSXGXXXXXXXXXXXXGXXFXXRDXTVPXTSGXWXRYGHXXXAXXTDKSLTLWDXXXGEKIARXTLXXTPLRAXLQPGSPTXXIGWXCPLXSAPLL

SEQ ID NO: 7231 - protein, 206 aa, Zea mays
  unsure (1)..(206): unsure at all Xaa locations
MSVQEYLGKHLLSRKSEEALNTAVRAKAPNPALFIVGHMRREAPTVITRVRARQILDGRSAPAVEVELHTNKAVHRASTASVGALEGAAADAAGASERRKFLARGVAYAVRVINDKVSEALVGMDPQQQTQIDQAIMXLDRARHKAEFGANTMLGVSIAACKAGAAEKEVPLYKHIADLVGKSATTLRVPAITVINGGRAHEDTRI

SEQ ID NO: 7232 - protein, 229 aa, Streptococcus pneumoniae TIGR4
MKKPVIGITGNEKTHPDDDIMMSYAAKGFVEGVKDAGGIPIILPIGDQEMACHYISLIDKLILTGGQNVDPKFYGEPKTIDSDDYHLQRDIFELALIKEAIKQKKPIFSVCRGTQLFNVAMGGTLYQDIEDHWQDSSVEYTTQRLVTEPDTVLQEIYGEISHINSFHHQSIKDLAPNLKVVAHDPKDGIIEAVMSTDDVAFLGVQWHPELLFENRPKDKKLFDYVVNEL

SEQ ID NO: 7233 - protein, 362 aa, Bacillus cereus ATCC 14579
METTVRKQKKNLETKKPSIYSLQLHEMQDWLKEQGEPKFRAGQIFDWLYKKRVKNYEDMSNLSKGLRDKLSNSFDITTLKTLVKQTSSDGTIKFLFQLYDGYSIETVLMRHEYGNSICVTTQVGCRIGCTFCASTLGGLKRNLEAGEIVAQVVEVQRALDETEERVSSLVVMGIGEPFDNYDNLMGFLRIINHEKGLHIGARHMTVSTSGIIPKIYKFAEEDLQINFAISLHAPNSELRSKLMPINRAYKLPDLMEAIKYYVNRTGRRITFEYGLFGGENDQVEHAEELAALLKGVKCHVNLIPVNYVPERDYVRTPREQIFLFEKTLKDRGVNVTIRREQGHDIDAACGQLRAKERKEETR

SEQ ID NO: 7234 - protein, 192 aa, ASPERGILLUS NIDULANS FGSC A4
MVVATIKCVVVGDGAVGKTCLLISYTTNKFPSEYVPTVFDNYAVTVMIGDEPYTLGLFDTAGQEDYDRLRPLSYPQTDVFLVCFSVTSPASFENVREKWFPEVHHHCPGVPCLIVGTQVDLRDDPAVRDKLARQKMQPIRKEDGDRMAKDLGAVKYVECSALTQYKLKDVFDEAIVAALEPAPKKRSRCVLL

SEQ ID NO: 7235 - protein, 224 aa, Nymphaea sp. EMK-2003
MGRGKIEIKRIENTTNRQVTFCKRRSGLLKKAYELSVLCDAEVALIVFSSRGRLYEYANNSVRGTIERYKKAYAESSSSGAVAETNAQYYQHEAHKLRQQISKIQQDNRQMLGEGVSEMSLRDLKSLENKLERSISKIRGKKNDLLNGEIQYMQNWNEDLQKENTFLRAKVCENERAQQQHISILAAGPAEYELPPAVPFQHINLMESSHHQYSHQERTALQLG

SEQ ID NO: 7236 - protein, 456 aa, Bilophila wadsworthia
MTYDKAELVALDKKYVWHHLTQHKNFEPAIYVKGEGMRITDIDGKTYLDAVSGGVWTVNVGYGRKEIVDAVAKQMMEMCYFANGIGNVPTIKFSEKLISKMPGMSRVYLSNSGSEANEKAFKIVRQIGQLKHGGKKTGILYRARDYHGTTIGTLSACGQFERKVQYGPFAPGFYEFPDCDVYRSKFGDCADLGVKMAKQLEEVILTVGPDELGAVIVEPMTAGGGILVPPAGYYETIREICDKYELLLIIDEVVCGLGRTGKWFGYQHFNVQPDIVTMAKGVASGYAPISCTVTTEKVFQDFVNDPADTDAYFRDISTFGGCTSGPAAALANIEIIERENLLENCTKMGDRLLEGLKGLMAKHPIIGDVRGKGLFAGIEIVKDRATKEPIAEAVANAMVGAAKQAGVLIGKTSRSFREFNNTLTLCPALIATEADIDEIVAGIDKAFTTVEQKFGL

SEQ ID NO: 7237 - protein, 217 aa, Meliosma dilleniifolia
KRRNGLLEKAYELSVLCDAEIGLIVFSSRGRLYEYSNNSIKSTIERYKKACTNSSSTTTIVETSAQYYQQEAVKLRQQIQILQNANRHLMGESLGSLSIKELKQLENRLERGITRIRSKKYELLFAEIEYMQKREVELQNDNLYLRTKISENERPQQTMMVPEPGFDAIQTYNSQKQDFEQEIQTYDARNNYLQATNMLEGGPTTYSHPDQTALHLG

SEQ ID NO: 7238 - protein, 497 aa, Spinacia oleracea
MAFPIPARQLFIDGEWREPIKKNRIPVINPSTEEIIGDIPAATAEDVEVAVVAARRAFRRNNWSATSGAHRATYLRAIAAKITEKKDHFVKLETIDSGKPFDEAVLDIDDVASCFEYFAGQAEALDGKQKAPVTLPMERFKSHVLRQPLGVVGLISPWNYPLLMATWKIAPALAAGCTAVLKPSELASVTCLEFGEVCNEVGLPPGVLNILTGLGPDAGAPLVSHPDVDKIAFTGSSATGSKVMASAAQLVKPVTLELGGKSPIVVFEDVDIDKVVEWTIFGCFWTNGQICSATSRLLVHESIAAEFVDKLVKWTKNIKISDPFEEGCRLGPVISKGQYDKIMKFISTAKSEGATILYGGSRPEHLKKGYYIEPTIVTDISTSMQIWKEEVFGPVLCVKTFSSEDEAIALANDTEYGLAAAVFFNDLERCERITKALEVGAVWVNCSQPCFVQAPWGGIKRSGFGRELGEWGIQNYLNIKQVTQDISDEPWGWYKSP

SEQ ID NO: 7239 - protein, 204 aa, Berberis gilgiana
KRRNGLLKKAYELSVLCDAEVALIVFSARGRLYEYANNSVKTTIERYKKACSDSTNTGSVSEANAQFYQQEATRMRQQIGNLQNANRHLLGQDLSSVSVKDLKQMETRLEKGISRIRSKKNELLFAEIEYMQKREIDLQNDNMYLRAKIAENERAQQQMNLMPGNEYETITSAPYDSRNFLQVNLLPESNNQYSRSDQTALQLG

SEQ ID NO: 7240 - protein, 202 aa, Akebia quinata
RRNGLLKKAYELSVLCDAEVALVVFSNRGRLYEYANNSVKTTIERYKKACIDSSNSGSVSEANAQFYQQESLKLRQQIGNLQNLNRHLMGEALGSMSIKELKQLETRIEKGISRIRSKKNELLFAEIEYMQKREIDLQNDNMYLRAKIAENERAGQHMSLMPGNEYEVMSSAPFDSRNFLQVNLLEPNNHYSHTDQIALQLG

SEQ ID NO: 7241 - protein, 378 aa, Moorella thermoacetica ATCC 39073
MRLATELVQLGVGYDSKTGAISTPIYQSATFRHPALGQSTGFDYSRTGNPTRQVLEEGLAGLEGGCRALAFASGMAAITAVLCLFRPGDHLVVSEDLYGGTYRLLNQVAVPLGLEFSLVDTTDLAALAASIRNNTKGIFLETPTNPLMKITDIAAVVALARQRGLLTIVDNTFMTPYLQRPLELGADLVVHSATKYLGGHNDVVMGAAIAAREDLSERLAFIQNTIGAIPGPQDCWLVIRGLKTLAVRLERAQANAFELARWLAEHPLVTRVYYPGLPHHPGHEICKKQSSGFGAMLSFEVKHAGLVEQILQRLKIISFAESLGGVESLITFPERQTHAEIPAEMRLKLGINDRLLRLSVGLEDLNDLKADLDQALAC

SEQ ID NO: 7242 - protein, 337 aa, Thermoproteus tenax
MKIGVLTGGGDAPGLNIAVYTFVKLAERKHEVYAIYHGWRGLLNKEVKRVSSRDLLDFAFSGGTYIRTSRTNPFKDEERARLLESNVKELGLDVVVAIGGDDTLGAAGEAQRRGILDAVGIPKTIDNDVYGTDYTIGFDSAVNAAIEATESFKTTLISHERIGVVEVMGREAGWIALFTGLSTMADAVLIPERPASWDSVAKRVKEAYNERRWALVVVSEGIKEYGGPKDEYGHSRLGGVGNELAEYIERSTGIEARAVVLGHTIRGVPPTAFDRILAVRYATAAYEAVENGRYGVMVAYSNGDIAYVPIVDVVGKNRLVSGYWMRLYETYWPDLAG

SEQ ID NO: 7243 - protein, 370 aa, Moorella thermoacetica ATCC 39073
MDSATGGVSIPIHQSVVFAQESLDQPGEYEYTRSGNPTRRALEEAIAELEGGNYGFAFASGMAAITAALSLFSSGDHLLVSRDIYGGTYRALAEVFPRFGLEVTFVDTTNLETVAAQIRPSTKGLYLETPSNPLMKITDLARAAALAREHGLITIADNTFMTPYLQRPLELGIDIVVHSATKYLGGHSDCLAGLAVTRDAGLARELTLLQNTLGTVLAPHECWLILRGIKTLKVRLLQQQRTATVLAEWLRKHPQVKAVYYPGLEGHPGRETHFRQADGGGGVLSFRLATPELARQVINNVRLPVIGSSLGAVESIISLPATMSHGSLPGELKRELGITPDLVRLSVGLEEAEDLQADLEQALDSPRGHR

SEQ ID NO: 7244 - protein, 426 aa, Magnaporthe grisea 70-15
MGSQMGTRAKGASLSLKTGNKLKRQYLNVRNKKDKDARKRAERFKRRKEENADPTLRQERLAKNKPASQDKKRVWDEGDDDSLGAIVDLAALKRRRIEEEENAALEGAAGLEEQKLDDNDDADSMLDSEEEDDDDDESREEKLRSQRARRDPSLVPSLAPSLAVSTTSTNLDLTPTSLARKFPTLFTEGPHPTPKILVTTSLRATIHREAQIITSLFPNSQYVPRSSHRYGHKYSLREICKFSTNRDFTAVILIREDQKKPTGMTVVHLPEGPTFHFTINNWIEGSKLPGHGNSQGFYPELLLNRFTTPLGLLTAQLLRRLFPYQPEIAGREVVTIHNQRDYLFVRRHRYVYRERRQTEKTVVDEEGKEIPGFSDIRVGLQEIGPRFTLKLRRVDKGIGRAGSEGDDAVQWEWKAGMEKVRTKFNL

SEQ ID NO: 7245 - protein, 536 aa, Magnaporthe grisea 70-15
MASNPDPGVLSPQEAIHASTQATSTVAASTVAASTQAPSPDLPISQPQPQPQQPSPPLPTSPSQLEQAHAFAEPEVPPPLLPTPKSATFARSTQGGSSRRRRRSRSRNRAGTATSANNPYFPGDQASTRRLRYSIDEYEDEGLRNEIGRHPDGRSMPRARPPRAYLNHPAYANLDSPAKPYTEDPKGHREFDYEVDPNTRQQYEEEYAYGTGVSHGPGMAGPQPFMRFGPTSNASHYGPDSQAPRINWKDLSREERTEVLRLPWTQWMNSNVKNHFVAMLGELIGTTMFLFFAFAGVEVANIGLPSSAPFNLAKQLYISLSFGFSLMVNVWIFFRISGAQFNPAVTLALWMTGAVDAVRGVCLVISQLCGGMLASVIVRFLFPQRFSVRTSLSQNTSLVQGVFIEALLTSELVFTILMLAKEKHKATYMAPVGIGLALWIDHMVGVPFTGAGINPARSFGPCVVTATFEPEHWIYWVGPGIGALIAVAFYKLIKVLEYEMANPGADGDADNDPTQNPAKRAELAAGRRFAGGFDAK

SEQ ID NO: 7246 - protein, 135 aa, Haemophilus influenzae
EDPTPALEGADVVLISAGVARKPGMDRSDLFNINAGIVRGLIEKVATTCPKACVGIITNPVNTTVAIAAEVLKKAGVYDKRKLFGVTTLDVLRSETFVAELKGLNVSRTSVPVIGGHSGVTILPLLSQVQYAKWN

SEQ ID NO: 7247 - protein, 312 aa, Salmonella typhimurium
MKVAVLAAAGGIGQALALLLKNQLPSGSELSLYDIAPVTPGVAVDLSHIPTAVKIKGFSGEDATPALEGADVVLISAGVARKPGMDRSDLFNVNAGIVKNLVQQIAKTCPKACVGIITNPVNTTVAIAAEVLKKAGVYDKNKLFGVTTLDIIRSNPFVAELKGKLPTEVEVPVIGGHSGVTILPLLSQIPGVSFTEQEAAELTKRIQNAGTEVVEAKAGGGSATLSMGQAAARFGVSLVRALQGEKGVVECAYVEGDGQYARFFSQPLLLGKNGVEERKSIGTLSAFEQHSLDAMLDTLKKDIQLGEEIINK

SEQ ID NO: 7248 - protein, 117 aa, Zea mays
PGSPPASGGKKERKGELGGGMEVPQNRWFQKWNPAPQTPGFNFPWAPPTLPVVGLLGLPVPTLVYKGFVPEFHIQDGDPGRPPRKFLLPGSRAPGNVVPPPGAARRGVSLPFVPGFF

SEQ ID NO: 7249 - protein, 594 aa, Neurospora crassa
MAIFAMGWQKPDNVAGSSAPAIMVGLFVATGGLLLGYDTGTINGILAMKSFKDHFSTGYIDGNGQPGIYPKESALIVAMLSAGTAIGALLAAPLGDHYGRRRSLIGAIGIFVIGAILQVCAYNIDLLVAGRTVAGVGIGIVSVLVPLYQSEMAPKWIRGTLVCTYQLSITMGLLAAAVVNILTYKLKTAAAYRVPIGLQLTWACVLALGLTVLPETPRYLIKRGDKNAAALSLSRLRRLDITHPALVEELAEIEANHQYEMALGPDSYKDILFGEPHLGRRTFTGCCLQMLQQLTGVNFIMYYGTTFFNNAGVGNPLKISLIMQVINTASTIPGLFVVESWGRRRLLMVGAIGMAICQLLIAAFATASGSNNLSAHNKVLITFVAIYIFFFAASWGPVVWVVTSEIYPLKVRAKSMSITTASNWFLNFGIAYGTPYMQTNSAASDESSIDLGSKVFFVWGAFCIVAVGFVWCMVYETSKISLEQIDEMYERVDHAWHSRRFEPSWSFQEMRDLGFSDGGIPPTQQLQQQPQQPQQQQQQHHQQQQHQLQVDLQQSQSRTSNSSTSQTDTGGSNNTGASQDDKLVASLGNIDLSY

SEQ ID NO: 7250 - protein, 91 aa, Glycine max
MVFWEGYVSDELMGTFAPIVLYWVYAGFYHLLPPLDRYRLHTRRDEETKNLVPFSTVVKGVLLQQLVQAIVALFLLTATASASGVIVQPSI

SEQ ID NO: 7251 - protein, 398 aa, Hordeum vulgare subsp. vulgare
VQTPVIVRFSTVVHERGSPETLRDPRGFAVKFYTREGNFDLVGNNMPVFFIRDGMKFPDMVHAFKPSPKTNMQENWRVVDFFSHHPESLHMFTFLFDDVGIPLNYRHMDGFGVNTYTLISRDGKAHLVKFHWKPTCGVKCLLDDEAVTVGGTCHTHATKDLTDSIAAGNYPEWKLFIQTIDADHEDRFDFDPLDVTKTWPEDIIPLQPVGRMVLNKNIDNFFAENEQLAFCPAVTVPGIHYSDDKLLQTRIFSYADTQRHRLGPNYLMLPVNAPKCAHHNNHHDGLMNFIHRDEEVNYFPSRFDPTRHAEKYPMPPRVLSGCREKCIIDKENNFKQAGERYRSFDPARQDRFLQRWVDALTDARVTHEIQSIWVSYWSQCDASLGQKLASRLKIKPNM

SEQ ID NO: 7252 - protein, 460 aa, Arthrobacter globiformis
MADQATAQEFDILVLGGGSGGYAAALRAVQLGLTVGLVEKGKLGGTCLHNGCIPTKALLHSAELADHARDSAKYGVNVTLDSIDINAVNAYKDGIIAGKYKGLQGLIKSKGITVIEGEGKLQGTDTVVVNGTAYKGKNIVLATGSYSRTLPGLEIGGKVITSDQALTMDYIPKSAIILGGGVIGVEFASVWKSFGVDVTIVEGLPSLVPNEDATIVKNFERAFKKRGIKFSTGVFFQGVEQNDDGVKVTLVDGKTFEADLLLVAVGRGPVTANLGYEEAGITIDRGFVITNERLHTGVGNVYAVGDIVPGVQLAHRGYQQGIFVAEEIAGLKPVVVEDINIPKVTYSEPEIATVGYTEKAAKEKFGEDQVQTQEYNLAGNGKSSILGTSGLVKLVRQKDGPVVGVHMIGARMGEQVGEAQLIVNWEAYPEDVAQLLHAHPTQNEALGEAHLALAGKPLHG

SEQ ID NO: 7253 - protein, 294 aa, Arthrobacter globiformis
MSESVNLPALGESVTEGTVTRWLKQVGDRVEVDEPLLEVSTDKVDTEIPSPVAGVIEEILVAEDETAEVGAPLVRIGDGSGGGSAPAEEAPAAAPAQEAPAQEAPAEAAPAQEAPAQDAPAAGGESHEVTLPALGESVTEGTVTRWLKAVGDSVEVDEPLLEVSTDKVDTEIPSPVAGTLQEIRVNEDETAEVGSVLAVIGSGAPAAAAPQAAPAAPQQEATKQEAPKQEAPAPAAAPAPAAAPAPAPQAAPAAQEAAPAAGSESGYVTPLVRKLANQHGVDIASLSGTGVGGR

SEQ ID NO: 7254 - protein, 394 aa, Pseudomonas aeruginosa UCBPP-PA14
MSQHDQHPDAPAQAFATRVIHAGQAPDPSTGAIMPPIYANSTYIQESPGVHKGLDYGRSHNPTRWALERCVADLEGGAQAFAFASGLAAISSVLELLDAGSHIVSGNDLYGGTFRLFERVRRRSAGHRFSFVDPTDLQAFEAALTPETRMVWVETPSNPLLRLTDLRAIAQLCRARGIISVADNTFASPYIQRPLELGFDVVVHSTTKYLNGHSDVIGGIAIVGDNPDLRERLGFLQNSVGAISGPFDAFLTLRGVKTLALRMERHCSNALALAQWLERQPQVARVYYPGLASHPQHELAKRQMRGFGGMISLDLRCDLAGARRFLENVRIFSLAESLGGVESLIEHPAIMTHASIPAETRADLGIGDSLIRLSVGVEALEDLQADLAQALAKI

SEQ ID NO: 7255 - protein, 506 aa, Wolbachia endosymbiont of Drosophila melanogaster
MNIKSVVLCILDGWGNGIENNKYNAISNANPPCWQYISSNYPKCSLSACGADVGLPGGQIGNSEVGHMNIGSGRVVIQSLQRINQEIGTIENNVNLQSFINDLKSKNGVCHIMGLVSDGGVHSHQKHISTLANKISQHGIKVVIHAFLDGRDTLPNSGKKCIQEFTKSIKGNDTRIATVSGRYYAMDRDNRWKRTIEAYEAIAFAKAPCHDNAVSLIENNYQNNITDEFIRPAVIGDYQGIKPEDGVLLANFRADRMIQLASILLGKTDYAKVAKFSSILSMMKYKEDLKIPYIFPPTSFADTLGQTIEDNKLRQLRIAETEKYAHVTFFFNCGKEEPFSGEERILIPSPKVQTYDLQPEMSAFELTEKLVEKIHSQEFALIVVNYANPDMVGHTGNIKAAEKAVLAVDDCLAKVLNAVKKSSNTALIVTADHGNVECMFDEENNTPHTAHTLNKVPFIVSCDNLKLRDGRLSDIAPTILQLLGIKKPNEMTGSSLISCITLCHSS

SEQ ID NO: 7256 - protein, 506 aa, Brassica napus
MTSVNVKLLYHYVITNLFNLCFFPLTAIVAGKAYRLTIDDLHHLYYSYLQHNLITIAPLFAFTVFGSVLYIATRPKPVYLVEYSCYLPPTHCRSSISKVMDIFYQVRKADPSRNGTCDDSSWLDFLRKIQERSGLGDETHGPEGLLQVPPRKTFAAAREETEQVIIGALENLFKNTNVNPKDIGILVVNSSMFNPTPSLSAMVVNTFKLRSNVRSFNLGGMGCSAGVIAIDLAKDLLHVHKNTYALVVSTENITYNIYAGDNRSMMVSNCLFRVGGAAILLSNKPGDRRRSKYELVHTVRTHTGADDKSFRCVQQGDDENGKIGVSLSKDITDVAGRTVKKNIATLGPLILPLSEKLLFFVTFMGKKLFKDKIKHYYVPDFKLAIDHFCIHAGGRAVIDVLEKNLALAPIDVEASRSTLHRFGNTSSSSIWYELAYIEAKGRMKKGNKVWQIALGSGFKCNSAVWVALNNVKASTNSPWEHCIDRYPVKIDSDSGKSETRVQNGRS

SEQ ID NO: 7257 - protein, 167 aa, Zea mays
  unsure (1)..(167): unsure at all Xaa locations
ITAALAQXGLLEPKDVDLLNITSMACPALPLCPLAQTEAERGILPILKRIRAVFDKVGIKDEESVVVRITGCPNGCARPYMAEVGFVGDGPNSYQIWLGGTPNQTTLAETFMNKVKLQDIEKVLEPLFSYWNSTRQEGESFGSFTNRMGFEQLKEVVNKWEGSASAA

SEQ ID NO: 7258 - protein, 484 aa, Oryza sativa
  unsure (1)..(484): unsure at all Xaa locations
MNVLASKIFPSRSNVASEQQQSKREKATIDDAKNSSKNKNLDRSVDESVLGIILGGGAGTRLYPLTKKRAKPAVPLGANYRLIDIPVSNCLNSNISKIYVLTQFNSASLNRHLSRAYGNNIGGYKNEGFVEVLAAQQSPDNPNWFQGTADAVRQYLWLFEEHNVMEFLILAGDHLYRMDYEKFIQAHRETDSDITVAALPMDEKRATAFGLMKIDEEGRIVEFAEKPKGEQLKAMMVDTTILGLDDVRAKEMPYIASMGIYVISKNVMLQLLREQFPGANDFGSEVIPGATNIGMRVQAYLYDGYWEDIGTIEAFYNANLGITKKPVPDFSFYDRSAPIYTQPRHLPPSKVLDADVTDSVIGEGCVIKNCKIHHSVVGLRSCISEGAIIEDSLLMGADYYETEADKKLLGEKGGIPIGIGKNCHIRRAIIDKNARIGDNVKIINVDNVQEAARETDGYFIKSGIVTVIKDALLXLAEQLYEVAA

SEQ ID NO: 7259 - protein, 326 aa, Wolbachia endosymbiont of Drosophila melanogaster
MIFAFPGQGSQFVGMGKSLYSEFSVARQVFHEVDSILDGKLSHLIFNGPIEELTITENAQPAIMAVSIAMLRVMEHVFGKSLFTDHNVKYVCGHSVGEYTALCAAGALTLESAIKLLKVRSEAMHEASLKCKGGMVALLGAEINEVEDILKSVQIDGICEIANDNGGGQVVISGTREALEMLPDLFKNSSVRKLIKLQVSGPFHSSLMKPADEKVLEFLKGIKITRPIVPLISNVTAKEESDPKVIKTLLAKQVVSRVKWREMVLYMSSRGINKFVEIGPNKVLSNLVKRIDQSISTKNIDSIGDIDSFFNESLVLTAKNLKVGLS

SEQ ID NO: 7260 - protein, 295 aa, Vibrio vulnificus YJ016
MKGIILAGGSGTRLYPITRGVSKQLLPVYDKPMIYYPLSVLMLAGIQEILVITTPEDQASFQRLLGDGTDFGLSLHYAVQPSPDGLAQAFIIGEEFIGDDCVCLVLGDNIFYGQDFTTKLKSAVENAENGHGATVFGYQVKDPERFGVVEFDDKMQALSIEEKPHVPKSDYAVTGLYFYDNQVVVMAKMVKPSARGELEITALNQMYLEQGNLNVELLGRGFAWLDTGTHASLHEASSFVETIENVQGLKVACLEEIAWRSGWLSHKQLTSLATAMLKNDYGQYLMKLVTEKVKP

SEQ ID NO: 7261 - protein, 157 aa, Zea mays
  unsure (1)..(157): unsure at all Xaa locations
LERAFAAREISLLNPLWIHSRASSKPXYAILHRIDVGVVIDLEPARTEDPALSIAGAVQSQKLAVRAISRLQALPGGDVKLLCDTVVEHVRELTGYDRVMVYKFHEDEHGEVVAESRRDNLEPYLGLHYPATDIPQASRFLLQQNRVRMIADCHAIP

SEQ ID NO: 7262 - protein, 204 aa, Helleborus orientalis
KRRNGLLKKAYELSVLCDAEVALIVFSTRGRLYEYSNNSVKKTIERYKKASTDSSGSGSVSEVNAQYYQQEASKLRNQIATLQNSNRNLLGEQLSNLNIRELKQIEKKIETGINKIQSKKNELLFAEIEYMQKREADLQNDNMYLRAKISENERTQQHMSLMPGTNDYEVISSGAFDSRNFLQVNLLGSNDTYSRSDQTALQLG

SEQ ID NO: 7263 - protein, 216 aa, Helleborus orientalis
IENTTNRQVTFCKHRNGLLKKAYELSVLCDAEVALIVFSSRGRLYEYSNNSVKKTIERYKKASTDSSNSGSASEANAQYYQQEAAKLRNQIAALQNSNRNLLGEQLSNLSIRELKQIEKKIETGINKIRSKKNELLFAEIEYMQKREVDLQNDNMFLRAKISENERTQQHMSLMPGTNNYEVISSGPFDSRNFLQVNLLESNNNYSRSDQTALQLG

SEQ ID NO: 7264 - protein, 214 aa, Aquilegia alpina
IENTTNRQVTFCKRRNGLLKKAYELSVLCEAEVALIVFSNRGRLYEYANNSVRKTIDRYKKTCGEGSSTLTVSEANLLFYQQESSKMKQQIEILQNSNRHLMGEALSCLSIKELKQLESRLEKGISRIRSKKNEMLLAEIEFMQKREIELHNDNIYLREQITANERAQQHMNSLPGNVYEAITSAPYNSRDFLQVNLRESKPNQYCDSTALQLC

SEQ ID NO: 7265 - protein, 337 aa, Oryza sativa
MSRTLVQPVGQKRLTNVAVVRLRKHGQRFEIACFPNKVLSWRTRVEKDIDEVLQSHTVYSNVSKGVLAKSKDLLKAFSTDDHTAICLEILDKGELQVSGKEREAQLSSQFHEIATIVMDKTINPETRRPYTITMIERLMHDVHFAVDPNLTSKEQALKVIKKLTEHFPIKRAPLRVRFTAPKSKFASLTEKLEEWNANVISKDESGSQPSVGRVEVLSVSAHAEGGSSVDQYENTEESQSVPAVEIDPVARIGEAMQKQSISSEPENPGQGQGKQQRRCKECDVLVEDKLYREHCKSGWHKHNYTRHKNGLPPLSQEECLVEMELADSKRDLKDYDF

SEQ ID NO: 7266 - protein, 397 aa, Chlorobium tepidum TLS
MQKKTLSDISLQGKRVLMRVDFNVPLDQDRNITDEKRIVEALPSIRKVIDNGGRLILMSHLGRPKGKVNPAFSLSPVAKRLSELLDCPVTMAGDCIGTEVMQQVLALQDGDVLMLENLRFHPEEEANDPDFARELASLGEIYVNDAFGTAHRAHASTEGITHFMQTAVAGYLIEKELRYLGTALNDAQRPFVAILGGAKISGKIDVLESLFEKVDTVLVGGAMVFTFFKAQGLDVGNSLVEENKLELAVSLLEKAKAKNVRLLLPEDVVVAGEISADAPSRVEPVSAISAGMIGLDIGPATIETYRKEILDAKTVLWNGPMGVFEIDQFARGTFAVAQALADATAEGAITIIGGGDSAAAIAKAGLSDKVTHVSTGGGASLEFLEGKELPGIAALND

SEQ ID NO: 7267 - protein, 203 aa, Aquilegia alpina
KRRNGLLKKAYELSVLCEAEVALIVFSSRGRLYEYSNNSVKKTIERYKKASTDSNNSGSVSEANAQFYQQEATKLRNQIASLQNHNRNLLGESLSNLNIRELKQIEKKIEGGISKIRAKKNELLFAEIEYMQKRELDLQTDNKYLRAMIAANERAPEHMNLMPANEYHALSSAPFDSRNFMPANLLDHNNNYSRSDQTTLQLG

SEQ ID NO: 7268 - protein, 725 aa, Aspergillus oryzae
MRALSLASLIGIASAACPYMTGELERRDTGTDDATAATEEFLSQYYMADNDTFLTSDVGGPIEDQNSLQVGDRGPTLLEDFIFRQKIQRFDHERVPERAVHARGVGAHGVFTSYGDYSNITAASFLGAEGKETPVFVRFSTVAGSRGSSDLARDVHGFATRFYTDEGNFDIVGNNIPVFFIQDAILFPDLIHAVKPRGDNEIPQAATAHDSAWDFFSQQPSSLHTLLWAMSGHGIPRSLRHVDGFGIHTFRFVTDNGDSKLVKFHWKSLQGKASMVWEEAQQVSGKNPDFMRQDLFEAIEAGRYPEWELGVQIMDEEDQLKFGFDLFDPTKIVPEEYVPITKLGKMTLNRNPRNYFAETEQVMFQPGHIVRGVDFTEDPLLQGRLFSYLDTQLNRHGGPNFEQLPINQPRVPVHNNNRDGAGQMFIPLNPNAYSPNTLNKGSPKQANQTVGKGFFTAPGRESTGRFTRAVSPSFEDVWSQPRLFYNSLTPAEQQFVVDAIRFENSNVKSSVVRNNVIIQLNRVSNDLARRVARAIGVEEPEADPTYYHNNKTTDVGTFGQKLKKLDGLKVGFLASVETPASIEAASELSKQLSEDGVDVVVVAERLSDGVDQTYSGSDAIQFDAVIVAPGAEGLFSTFSFTAPSNATSSSTLFPAGRPLQIVIDGFRFGKPVGAVGSAATALKNAGIQTSRDGVYVDKSVTSGFVDGIKDGLRTFKFLDRFKLDH

SEQ ID NO: 7269 - protein, 203 aa, Clematis integrifolia
KRRNGLLKKAYELSVLCDAEVALIVFSNRGRLYEYANNSVRKTIDRYKKTCSDPQTALTVSEANTMFYQQETTKMKQQIEILQNSNRHLMGEALSCLSIKELKQLESRLEKGLGRIRSKKNEMLLSEIEYMQKREIDLHNDNLYLRAKISDNEKAQHNMNVLPGNVYEAMTSAPYDARNFLQVNLPDTKEHPYCSGSTALQLC

SEQ ID NO: 7270 - protein, 363 aa, Oryza sativa (japonica cultivar-group)
MRGSRIALLLLMLLQCGGLPGIAVGRCVVFNFGDSNSDTGSLPAAFGFYLGPPAGRRFFHRQTGRWSDGRLYIDFIAEKLKISYLSPYMESSGSDFTSGVNFAVAGAAVTQKSAIPLGLDTQVNQFLHFKNRTRELRPRGAGSMIAESEFRDAVYAIDIGQNDITLAFLANLTLPEVERELAASAAMVADAVRALRASGARKFWVYNTGPIGCLPQTLALRQKPGDELDAAGCLAEYNAAARSFNAELAAACRRLAAELGGGEDGATVVCTDMYAIKYELFANHSRYGFERPLMACCGHGGPPYNYANLKTCGQPTATACPEGERHVIWDGVHYTEDANAIVARKILSGDFSSPRTKLKALCK

SEQ ID NO: 7271 - protein, 294 aa, Glycine max
FGSRDGFGVNTYTLINKAGKALYVKFHWKTTSGEKSLLDDEAIRVGGSNHSHATQDLYDSIAAGNYPEWKLYIQTLDPENEDRLDFDPLDVTKTWPEDVLPLQPVGRMVLNKNIDNFFAENEQLAFCPAIIVPGVYYSDDKLLQTRVFSYADTQRHRLGPNYLQLPANAPKCAHHNNHHDGFMNFMHRDEEVNYFPSRYDPVRHAEKVPVPPRILGGKREKCMIEKENNFKQPGERYRSWPSDRQERFVRRWVDALSDPRVTHEIRSIWISYWSQADRSLGQKIASHLNLKPSI

SEQ ID NO: 7272 - protein, 344 aa, SYNECHOCOCCUS SP. WH 8102
MLLGRSAAELESWAVAQGQKPFRGRQLHDWLYAKGARSLSEITVLPKAWRESLKEDGVEVGRLKEVHRSVAADATTKLLLSTDDGETIETVGIPTDQRLTVCVSSQVGCPMACRFCATGKGGLQRSLRTHEIVDQVLSVREVMDRRPSHIVFMGMGEPLLNSQAVLDAIRCLNDDLGIGQRRITVSTVGVPKTLPQLAELALATLGRAQFTLAVSLHAPNQALREELIPTAHAYPYEALLEDCRHYLAVTGRRVSFEYILLGGLNDAPEHAAELADRVGGFQSHVNLIAYNPIEEEEFQRPTRARIEGFQRVLERRGVAVSLRASRGLDQNAACGQLRRRRQGS

SEQ ID NO: 7273 - protein, 236 aa, Thermosynechococcus elongatus BP-1
MSLRQHQHPLIQRLADRIEAIWQAFFPLAPYALPEDLGYVEGKLEGERLTIENHCYQAPPFRKLHLELARVGESLDILHCVMFPEPRYDLPMFGCDLVGGRGQISAAIVDLSPVTGQLPAAYTCALNALPKLTFRQPRELPPWGHIFSPFCIFIRPQGEAEEQQFLDRIGEYLTLHCQLSQQAVPTDHPQAVIAGQRQYCQQQQQNDKTRRVLEKAFGVPWAERYMTTVLFDVPPV

SEQ ID NO: 7274 - protein, 156 aa, Haemophilus influenzae
NRTNTPVLVDGKDVMPEINAVLAKMKDFCQRIISGEWKGYTGKAITDVVNIGIGGSDLGPYMVTEALRPYKNHLNMHFVSNVDGTHIAETLKKVNPETTLFLVASKTFTTQETMTNAQSARDWLLKAAKDESAVAKHFAALSTNAKDVEKFGIDTN

SEQ ID NO: 7275 - protein, 265 aa, Magnaporthe grisea 70-15
MKAVVFEGPYKISVQDRPVPQLQDDKDIIVKVHASGLCGSELHSYRGIEESGSGFIMGHEFTGTVTEVGSAVKTVQTQTSRCEHSQLFGSAGLDGGQAEYVRVPFADGTVVKAPAEFAEDDKVLVLMADIWPTGYFGASNAFKLLEATPDPVVVVIGCGPVGLCAVVAALEHKPKHLFAIDGVDSRLDLARGLGAEPLNFVTDREGMFKRIMEVTGGRGVDAVVEVVGLKDALRTAFDILRPFGVISSIGVHSTELPWTAAEAYE

SEQ ID NO: 7276 - protein, 281 aa, Shigella flexneri
  unsure (1)..(281): unsure at all Xaa locations
MSQTSTLKGQCIAEFLGTGLLIFFGVGCVAALKVAGASFGQWEISVIWGLGVAMAIYLTAGVSGAHLNPAVTIALWLFACFDKRKVIPFIVSQVAGAFCAAALVYGLYYNLFFDFEQTHHIVRGSVESVDLAGTFSTYPNPHINFVQAFAVEMVITAILMGLILALTDDGNGVPRGPLAPLLIGLLIAVIGASMGPLTGFAMNPARDFGPKVFAXLAGWGNVAFTGGRDIPYFLVPLFSPIVGAIVGAFAYRKLIGRHLPCDICVVEEKETTTPSEQKASL

SEQ ID NO: 7277 - protein, 401 aa, Mesorhizobium sp. BNC1
MSGSALFDTFARLPLSFERGEGSWLITADGTRYLDFAAGIAVNSLGHAHPHLVAALTEQAGKLWHVSNLYEIPGQRRLGERLAEHSFADKVFFTNSGAEALECAIKTARRYHYVNGQENRFRIITFEGAFHGRTLATIAAGGQKKYLEGFGPKVEGFDQLPFGDLRAVENAITPETAAILIEPIQGEGGIRMPPAQFIQGLRELCDKHGLLLIFDEVQTGIGRTGKLFAYEWTGVAPDIAAIAKGIGGGFPMGACLATEEAAKGMTPGVHGTTFGGNPLAMAVGNAVLDVVLEPGFLDEVSRRGLLLKQGLAAIADTFPDIVDEIRGTGLLLGIRCKSPTSALQQALREEGILVAPAGENVLRLLPPLNVTDEDIQEGLERIHRAMESLVSASSIATATKV

SEQ ID NO: 7278 - protein, 568 aa, Glycine max
  unsure (1)..(568): unsure at all Xaa locations
MASSALISDTQQWKDLKAHVEDINKTHLRDLLSDDKRSQSMLVEFDDILLDYSRQQATPETIQKLFELAEAASLKEKIIRMYSGEHINSTENRSVLHVALRASRDAVIQSDGQNVVPEVWKVLDKIQEFSEQIRNGSWVGATGKALKDVVAIGIGGSFLGPLFVHTALQTDPEAVESARGRQLRFLANVDPIDVARNITGLNPETTLVVVVSKTFTTAETMLNARTLREWISSALGPLAVAKHMVAVSTNLTLVEKFGIDPNNAFAFWDWVGGRYSVCSAVGVLPLSLQYGFSVIEKFLTGASSIDQHMYSHPFERNVPVLMGRLGVWNVSFLGYPARAILPYWQALEMFGTHILNVCIKSNGXGVLIDGVPLPFEPGEIDFGEPGTNGQDSFYQLLHQGRVLAYWKKSEQLQKRTVSLNVEVVSNHDELMSNYFAQSDALAYGKTADQLQKENVSPHLVPHKTFSGNRPSLSLLLPSLNAYNIGQLLAIYEHRIAVEGFIWGINSFDQWGVELGKSLATQVRKQLNASRTKGEPIQGFNFSTTTMLTRYLQASSDVPADLSTVLPKI

SEQ ID NO: 7279 - protein, 394 aa, Hordeum vulgare subsp. vulgare
VRFSTVIHERGSPETIRDPRGFAVKFYTREGNWDLLGNNFPVFFIRDGIKFPDVIHAFKPNPKSHVQEYWRVFDFLSHHPESLHTFFFLFDDVGIPTDYRHMDGFGVNTYTFVSRAGKSHYVKFHWRPTCGVSCLMDDEATLVGGKNHSHATQDLYDSIDAGNFPEWKLFVQVIDPDEEDRFDFDPLDDTKTWPEDLVPLQPVGRLVLDRNVDNFFNENEQLAFGPGLVVPGIYYSDDKMLQCRVFAYADTQRYRLGPNYLMLPVNAPKCGFKNNHYDGAMNFMHRDEEVDYYPSRHAPLRHAEPASFPVPTRPVVGKREKTRIKKENDFVQPGERYRSWAPDRQDRFVRRFSDALAHPKVSHELRVIWIDFLSKCDKSCGMKVANRLNVKPSM

SEQ ID NO: 7280 - protein, 555 aa, Oryza sativa (japonica cultivar-group)
MATTATLPFSCSSTLQTLTRTIPLRLRLHRRRFLHHLPSLAALPRLPLPRPPLLPHARRHVSASAAPNGASSEGEYDYDLFTIGAGSGGVRASRFASTLYGARAAVCEMPFATVASDDLGGVGGTCVLRGCVPKKLLVYGSKYSHEFEESHGFGWVYETDPKHDWNTLIANKNTELQRLVGIYKNILNNSGVTLIEGRGKIVDPHTVSVDGKLYTARNILIAVGGRPSMPNIPGIEHVIDSDAALDLPSKPEKIAIVGGGYIALEFAGIFNGLKSEVHVFIRQKKVLRGFDEEVRDFIAEQMSLRGITFHTEQSPQAITKSNDGLLSLKTNKETIGGFSHVMFATGRKPNTKNLGLEEVGVKLDKNGAIMVDEYSRTSVDSIWAVGDVTDRVNLTPVALMEGGAFAKTVFGDEPTKPDYRAVPSAVFSQPPIGQVGLTEEQAIEEYGDVDIYTANFRPLRATLSGLPDRIFMKLIVCATTNKVVGVHMCGEDAPEIIQGVAIAVKAGLTKQDFDATIGIHPTSAEEFVTMRNATRKVRRSTTDEVESKDKVVTQN

SEQ ID NO: 7281 - protein, 325 aa, Arabidopsis thaliana
MHSLNETVIPDVDYMQSDRGHMHAAASDSSDRSKDKLDQKTLRRLAQNREAARKSRLRKKAYVQQLENSRLKLTQLEQELQRARQQGVFISSSGDQAHSTGGNGGALAFDAEHSRWLEEKNRQMNELRSALNAHAGDTELRIIVDGVMAHYEELFRIKSNAAKNDVFHLLSGMWKTPAERCFLWLGGFRSSELLKLLANQLEPMTERQVMGINSLQQTSQQAEDALSQGMESLQQSLADTLSSGTLGSSSSDNVASYMGQMAMAMGQLGTLEGFIRQADNLRLQTLQQMLRVLTTRQSARALLAIHDYSSRLRALSSLWLARPRE

SEQ ID NO: 7282 - protein, 438 aa, Triticum aestivum
MGPPAPQAGRFTDLVSIGIRESLLEPQFVSEALAPDNPPLKIRFIDNTDPAGIDHQIAQLGEELKSTLVIVISKSGGTPETRNGLLEVQKAFRDAGLDFSKQGVAITQENSLLDNTARIEGWLDRFPMFDWVGGRTSELSAVGLLPAALQGIDVKEMLVGAALMDEETRNTVVKENPAALLALSWYWATDGIGSKDMVVLPYKDSLLLLSRYLQQLVMESLGKEFDLDGNRVNQGLTVYGNKGSTDQHAYIQQLREGVHNFFVTFIEVLRDRPPGHDWELEPGVTCGDYLFGMLQGTRSALYSNDRESISVTVEEVTPRAVGALVALYERAVGIYASLVNINAYHQPGVEAGKKAAGEVLALQKRVLTVLNEASCKDPAEPLTLEQIADRCHCPEDIEMIYKIIQHMAANDRALIAEGSCGSPRSVKVYLGECNVDDV

SEQ ID NO: 7283 - protein, 410 aa, Arabidopsis thaliana
MTVDIMRLPKMEDQTAIQEAASQGLKSMEHLIRVLSNRPEERNVDCSEITDFTVSKFKKVISLLNRSGHARFRRGPVHSPPSSSVPPPVKVTTPAPTQISAPAPVSFVQANQQSVTLDFTRPSVFGAKTKSSEVVEFAKESFSVSSNSSFMSSAITGDGSVSKGSSIFLAPAPAVPVTSSGKPPLSGLPYRKRCFEHDHSEGFSGKISGSGNGKCHCKKSRKNRMKRTVRVPAVSAKIADIPPDEYSWRKYGQKPIKGSPHPRGYYKCSTFRGCPARKHVERALDDSTMLIVTYEGEHRHHQSTMQEHVTPSAKIDMPLSVINGTSNVRYHSLTLLVKFQIVAILNINFLCGYLKHELNVEYHLKHEKFVDQAKIDMSLSVEPRNPLMTVNLSKITSFKNNRKNIKIFSI

SEQ ID NO: 7284 - protein, 426 aa, Mycobacterium leprae
MTRASDEVGAASACVGDPAQMTDDRSVRTPKALPDGVTAATVGVRGGLLRSRFEETAETMYLTSGYVYESAVVAEKSFTGELDHFVYSRYGNPTVTMFEERLRLIEGAPAAFVTASGMAAVFTSLGALLASGDRLVAARSLFGSCFVVCNEILPRWGVETVFVDGEDLVQWEQALSVPTQAVFFETPSNPMQSLVDIAAVTELAHAAGAKVVLDNAFATPLLQHGLPLGVDVVIYSGTKHIDGQGRVLGGAILGDRDYIDGPVQKLMRHTGPAMSAFNAWILLKGLETLAIRVDHCNSSAHRIAEFLEKHPAVSWVRYPFLVSHPQYDLAKRQMSGGGTVVTFALNSPEDAAKQRAFEVLDRLRLIDISNNFGDVKSLITHPATTTHRAMGPEGRAAIGLGDGVVRISIGLEDAADLIADIDQALS

SEQ ID NO: 7285 - protein, 194 aa, Colletotrichum trifolii
MVVATIKCVVVGDGAVGKTCLLISYTTNKFPSEYVPTVFDNYAVTVMIGDEPYTLGLFDTAGQEDYDRLRPLSYPQTDVFLVCFSVTSPASFENVREKWFPEVHHHCPGVPCLIVGTQVDLREDPSVREKLSKQKMSPVRKEDGERMAKDLGAVKYVECSALTQYKLKDVFDEAIVAALEPPAPKKKSHKCLVL

SEQ ID NO: 7286 - protein, 635 aa, Mycobacterium leprae
MLGRGRAEDSPLLIGAVKTNLGHLEAAAGIAGFIKTVLAVQRGQIPPNQRFESPNLHIPFAELRMKVVDKHMEWPDTGHLRRAAVSSFGFGGTNAHVVIEQGPELTPVTECSSNTAVSTLVVTGKTASRVAAMAGMLADWVEGPGAEVALADVAHTLNHHRSRHAKFGTVVARDRIQAVAGLRALAAGKQAPGVVGQQDGTPGSGTVFVYSGRGSQWAGMGRQLLADEPAFTAAVAELEPVFVVHAGFSLHDVLANGKELVGIEQIQLGLIGMQLTLTELWRSYGVQPDLVIGHSLGEVAAAVVAGALTAAEGLRVTATRSRLMAPLSGQGGMALLELDAVETEALIVDYSQVTLAIYNSPRQTVIAGPTEQIDELIDRVRAQNRFASRVNIEVAPHNPAMDALQPQMRSELADVAPRTPTIPILSTTYADLGSCPVFDAQHWATNMRNPVHFQQAIMTAGTDHRTFIEISAHPLLTQAITDTLHGTRCISIGTLQRDADDTVTFHTNLNNVHTVHPPHTPHPAEPHVTIPSTPWQHTRHWIPRKRSVNSIGLAPQVGTLLGQHTAVSGILPIHLWQARLGRRPSRTGVGIESTVSRWSLLLLCCAQSFVLQQNWVILRYSRSDSSNPFSLISPV

SEQ ID NO: 7287 - protein, 499 aa, Candida albicans SC5314
MFKKALPLVSKLTTPKGITYNQPLGLFINNEYVHPKQQKTFEVISPSTEEKITDVYEALEEDIDTAVAAAQAAYHNGWAQGPPEQRSKVLFKLADLIEENAELLAQIETWDNGKSLQNARGDVALTAAYFRSCGGWADKILGSQINTGNTHFNYTQRVPLVCGQIIPWNFPLLMASWKLGPVLATGSTTVLKTAESTPLSALYLSQLLVEAGMPKGVINIVSGFGATAGAAIAKHPKIEKVAFTGSTATGKIIMKLAAESNLKKVTLELGGKSPNIVFNDADLDKTIQNLIVSIFYNSGEVCCAGSRLLIQSGVYDQVVEKFKEAAESVKVGNPFDEDTFMGAQVSDVQLSKILKYVESGKSQGATVVTGGARADGKGYFVKPTIFADVKKDMDIVREEIFGPVVTLIKFDTVDEAVELANDSDYGLAAGIHSADVNKCIDVANRVKAGTVWVNTYNDFHPMVPFGGFSASGIGREMGEEVLHEYTQVRAVRMKINPPN

SEQ ID NO: 7288 - protein, 203 aa, Clematis integrifolia
KRRNGLLKKAYELSVLCDAEVALIVFSSRGRLYEYSNNSVRKTIERYKKASSDTSNTGSVSEANAQFYQNEAGKLRNQIASLQNNNKNLLGESLSNLSIRELKQLEKKIEGGITKIRSKKNELLFAEIEYMQKREIDLQNDNLYLRAKIADNERTQQQMNLMPGNEYEVISSAPFDSRNFLPVNLLEPNNSYSHCDQTTLQLG

SEQ ID NO: 7289 - protein, 291 aa, Desulfovibrio desulfuricans G20
MKGIILAGGSGTRLYPITRGACKQLLPVYDKPMIYYPLSVLMLAGIREVCIISTPADLPRFRDILGDGSALGLSFSYIEQSSPDGLAQAFVLARDFIAGQPVCLILGDNLFYGTGLATLLENSARLQQGGIVFGYKVRDPERYGVVEFDKNARVISIEEKPQSPKSRYAVTGLYFYDGRVADVAAGLTPSARGELEITDLNNEYLKQGRLQVEFLGRGVAWLDTGTFESLHQASSFVRAVQDRQGLKIACIEEIAYRKGYICADRLRELAAPMMKNEYGKYLMEVASEAVR

SEQ ID NO: 7290 - protein, 216 aa, Ranunculus ficaria
IENTTNRQVTFCKRRNGLLKKAYELSVLCEAEVALIVFSNRGRLYEYSNNSVKKTIERYKKHSTDSSNTGSVSEANAQFYQQEANKLRNQIATLQNSNKNLLGESLSNLSVRELKAIEKKIEGGIAKIRSKKNELLFAEIEYMQKREIDLQNDNMFLRAKIAENERTQQQHMSLMPVNDYEVISSAPYDSRNFLPVNLLDSNHNYSRNDQTTLQLG

SEQ ID NO: 7291 - protein, 205 aa, Listeria monocytogenes
IGGILVWFGWYGFNVGSALTIDNVAMTAFVNTNTAAAAGIIGWGLVEWLTNKKPTMLGTISGAIAGLVSITPAAGFVTVPSSLIIGFFGGALCFWAVFWLKGKVKYDDALDAFGLHGIGGIWGGIATGLFATTKVNEAGADGLFYGNASLVVKQLIAIGSTVAYVAVVTALIVVIIKLFLPIRVNEEQEYKGLDLTLHGEKAYQE

SEQ ID NO: 7292 - protein, 453 aa, Candida albicans SC5314
MLRRLFPIRQLYTTTRAMASKSTDPTSLHNPYFYQKPGQKDIWSLINETAAQAQQESGEPIVNLGQGFFSYNPPEFAINAVEEALTKPQFNQYAHARGNPNLLKQVAEHYSRSYGRAVGVDEVQITTGANEGMFAIFFGFLTPGDEVIVFEPFFDQYIPNVEMTGAKIKYVEIKYPKKFDNEVVTGQDWEIDWEGLNNAITDKTKIIVINTPHNPIGKVFTEKELYKIGKLAVEHNLILVSDEVYENLYYTDKFPRPAALPQLPELAERTLTVGSAGKSFAATGWRVGYIQGPANLIKFVTAAHTRICFSTPAPLQQAVSQGFEQAEKSNYFENTRKEYEHKYKIFTKVFDDLGLPYTVAEGGYFVLVNLSKVKIPADYEFPGTISDRGTLDFKLAYWLIKEIGVVGIPPTEFLTESNRKGNGLENCVRFAVCKDDSVLEDAVERLKKLKDYL

SEQ ID NO: 7293 - protein, 417 aa, Glycine max
  unsure (1)..(417): unsure at all Xaa locations
MLALLQNCSMPLARAVRSPPRTHVRPCFTAVAYASISSRANSQSQVLLGLSEKELQQLALDLNQETYRGKQLHHFLYQRKLREIQDFTQLPQGFRNTLEETGWKVGRSPIFQTVTAADGTVKLLLKLEDNRLVETVGIPVMVDKGLTRLTACVSSQVGCPLRCSFCATGKGGFSRNLQRHEIIEQVLAIEEVFKNRVTNVVFMGMGEPMLNLKAVLEAHRCLNKDVQIGQRMITISTVGXVPNTIKKLASHKLQSTLAVSLHAPNQKLRETIVPSAKSYPLDALMSDCREYFQQTSRRVSFEYALLAGVNDSVNHALELAELLHRSGSGYHVNLIPFNPIEGSEYQRPSKRAVLAFSGALESSKITVSVRQTRGLDANAACGQLRNKFQKTPLVTDPFDLAVTDTSMPYNNNFAVSS

SEQ ID NO: 7294 - protein, 203 aa, Ranunculus ficaria
KRRNGLLKKAYELSVLCEAEVALIVFSNRGRLYEYANNSVRKTIDRYKKQCSDASTALTVSEANSLFYQQESSKMKQQIDILQNSNRHLMGEALSCLSIKELKQLESRLEKGLSRIRSKKNEMLLAEIEYVQKREIDLHNDNVYLRQKISENERAQQHMNSLPGNAYEAMTSAPYDARNFLQVNLSDNKDNHYGSSSTALQLC

SEQ ID NO: 7295 - protein, 518 aa, Cucumis melo
MEIWFIFLISLSICSLLTSIFTHFQTSTKLPPGPPSIPILTNFLWLRRSSLQIESLLRSFVAKYGPVLTLRIGSRPTVFIADRSIAHKILVQNGALFADRPPALSVGKVITSNQHNISSASYGPLWRLLRRNLTSQILHPSRVRSYSEARKWVLDILLNRLQSQSESGNPVSVIENFQYAMFCLLVLMCFGDKLDESQIREVENVERAMILSFQRFNILNFWPKFTKILFRKRWEAFFQLRKNQEKVLTRLIEARRKANGNRENKAQNEEEEIVVSYVDTLLELELPDEKRKLNDDELVTLCSEFLTAGTDTTSTALQWIMANLVKHPEIQNKLFVEMKGVMGNGSREEVKEEVLGKLPYLKAVVLEGLRRHPPAHFVLPHAVKEDAELGNYVIPKNVTVNFMVAEIGRDPKVWEDPTAFNPERFVKGGKEKEEQVAEFDITGSKEIKMMPFGAGRRICPGFGLAILHLEYFVANLVWRFEWKVVDGDEVDMSEKVELTVAMKKPLKAKIHPRIHTES

SEQ ID NO: 7296 - protein, 200 aa, Saxifraga careyana
KRRNGLLKKAYELSVLCDAEVALIVFSTRGRLYEYANNNIRSTIERYKKANSDSLNTGDVVETNTQFYQHESVKLRQQIQMLQNSNRNIMGESLSSLTLKELKQLENRLERGITRIRSKKHEMLLAEIEYMQKREIDLENESIYLRAKIGEAESIEQANVAAANDLHAIQAYVAHNFFQPSLLDAEPSFGYPNKKSPRLG

SEQ ID NO: 7297 - protein, 542 aa, Prochlorococcus marinus str. MIT 9313
MVISSPAKQFLQGKKLNKIEQNKAFKDGLDVGDELENFAQLGWEQVDKTDLELRLKWYGMFWRPKTPGKFMLRLRIPNGVLNSHQIKVVASIVGRYGEDGSCDITTRQNLQLRGVLLSDLPEILKRLEEAGLNTIQSGFDNPRNVTGNPLAGIDPLEIVDTRPYTTELQNFLTNQGKGNHEFSNLPRKWNTAVAGARDNFLLHNDIIFHPVEHDGVMGFGVWLGGILSSQMNDYALPLNAWVKPNEICRLTGTILTLWRDNGERNNRPKGRFRMYLDSVGIEAFRTMVVEKFGPLTPDPGSVFEDKPRSFYGIHPQKQTGLHYAGMHVPVGRLNAEDLQDLASASLNYGSGEIRLTEDQNIILVGLSTTNLDKFQADPLLQRFPLEPGSIAAGTVSCTGNTYCSFALTNTKDQAMAMAHELDAELILPEEIKVHWTGCPNSCGQAYMGAIGLTGTKARAPNGGQGMVEAYDLSLEGRQGPDAQIGTLHRKGIPGSELKDVLRELLIERFGAQPRSQPKQNSDPFSNFMNWFSNLGENSSPSP

SEQ ID NO: 7298 - protein, 384 aa, Acinetobacter sp. ADP1
MQPLSSKLPNQGVTIFSTMTALAQRLNAINLSQGFPDFATPDALIEALCDATRAGFNQYVSGDGWLPLREQVVQQFEQRDQVRLDPVHEITITPGATIAIFAAIQAVIHTGDEVVIFDPSYDSYAPAVRVAGGIPVHLALTAPDFRVDWQQVQDNINARTRMIIVNTPHNPTGTLWTLDDWHHLIELAEKHDLIVLSDEVYEHLVFDGHHHYSALHFSTLRERSFVVGSFGKTFHVTGWKTGYCVASPMLMKLFRQIYQYANFCGNTPAQVALSQYMQQHPEHIQELGSFYQAKRDLFNQGLTQSRFKFQPTHGTYFQTVDYTAIRPDLNDLEMCYFLAEQYGVVAIPLSVFYQQPDPELRLIRFCFAKTEQTLKDATQRLSQC

SEQ ID NO: 7299 - protein, 212 aa, Saxifraga careyana
KRRNGLLKKAYELSVLCDAEVALIVFSTRGRLYEYSNNSVKQTIERYKKACSGPSNSGSVSEANAQSYQQEASKLHAQINNLQNTNRQMLGEALGSLSPRDLKNLENKVEKGISKIRSKKNELLFSEIEYMKKREIDLHNENQYIRAKIAETERAQQQMSLMPPGGGSTNYDQQLNMHPQQFDSRDFFQVNALQPNNHHYSRQHDQISLQLV

SEQ ID NO: 7300 - protein, 521 aa, GIBBERELLA ZEAE PH-1
MEKFPDFVDTPLGESPSDSPSNTPGWANGAPPRPSDRWLPVSKHDSNWSTASRGHTRQKSLTDAIRTIRGRNGSVSQNAQEIADALRAPVSPKLIILCLMWYASSALTNTSSKSILIAFDKPATLTLVQFAFVSSLCIFMAWLATIFPVLRTKVAALKYPIRKPTRDVIRTTLPLAAFQIGGHLLSSTATSKIPVSLVHTIKGLSPLFTVLAYRFVYDIRYPKTTYLSLIPLTFGVMLACSGKTTYGGELIGVIHALLATVIFVTQNIFSKKLFNEAAKAEAESPHSMSKKLDKLNLLCYSSGMAFLLTLPIWLWSEGFTLLMNLYHEGSIDLNEQPNSMDHGRLTLEFIFNGVFHFGQNILAFILLSIVSPVTYSVASLIKRVFVIVLALVWFRSPTTPIQGVGIALTFLGLYLYDRTKSSNKADQKAQSMQVKRSSLLPTTNGGLRPTPITESPQSTDLNPYPYREGYFGRPTAAEDSKKSDDGGARSRTPATSNGWLPPGTKQEDTWQPGDRVAGVAR

SEQ ID NO: 7301 - protein, 493 aa, Mesorhizobium sp. BNC1
MSTSARNRFPGVSFDPKALRSNLFIGGAWKEGATGNRIPVYDPSTGTVIAEVADAEVEDVMGAIDAAHEALPGWAATPPRHRSEVLRRCFELMIENRDMLAELISLENGKTLADAQGEVAYAAEFFRWFAEETVRLNGELYKAPSGANRILVQHQPIGVSVLVTPWNFPAAMATRKIGPALAAGCTVILKPATETPLTAYALAALCAEAGVPDGVVNVYTSSRSGKTVSAMLHDPRVRKLSFTGSTEVGRILLREAADKVISCSMELGGNAPFIVFDDADLSAALDGAMVAKMRNGGEACTAANRFYVQSGIADAFAKGLAERMKALAIGKGYETGSQCGPLINKDAVERISGLVEEAQSRGARVLAGGKALNREGYYFPPTVIDNVDPASAIMSEEIFGPVAPIIRFDSEDEVLSAANGTEYGLMAYVYTQDLSKGLRVSEKIESGMVGLNRGLVSDPAAPFGGVKQSGLGREGSHHGILEFTETKYIATNW

SEQ ID NO: 7302 - protein, 436 aa, SYNECHOCOCCUS SP. WH 8102
MTKDAQAAMRTTADQSRHPNLWPPFTQIESAPLPQRVIAGDGALLLREQGIPLIDAISSWWVTLHGHGHPVMAKAIADQAARLEQVIFADFTHEPAERLGERLSKLTGLDRLFFSDNGSTAVEVALKIACQWWVNRGEPRHQIVAFDGAYHGDTFGAMAVGERNLFSEPFDDKLFPVARCPWPATWWDDPDVDAREQAALAVLETTLQQPTAAVILEPLLQGAGGMAMVRGTFLRQVEMLVRQAGALLIADEVLTGFGRCGDWFACHRAGIQPDLMALSKGLTGGCLPMGVTMASERVFSAFVGADPSLTLWHGHSFTANPLGCAAANASLDLLQQDPDQFRGFEARHRPHLEQLRAHPNVTRCRLTGTVAAFDLSVSGDAGYLNPAGPTIKRIALEHGVFLRPLGQVVYLLPPLCISNDQLGQCYKAIATALDQI

SEQ ID NO: 7303 - protein, 525 aa, Cicer arietinum
MAVSATGQIMLSSTVQLREPTIMGSTRNLRFVKFCNGEIMGRKIELKAGGAISNCCTKNVIRQNISMSLTADVAAESKLRNVDLEKRDPSTVVAIILGGGAGTRLFPLTKRRAKPAVPIGGAYRLIDVPMSNCINSGINKVYILTQFNSASLNRHIARAYNSGTGVTFGDGYVEVLAATQTPGEQGKKWFQGTADAVRQFHWLFEDARSKDIEDVLILSGDHLYRMDYMDFVQNHRESGADITLSCLPMDDSRASDFGLMKIDNKGRVLSFSEKPKGEDLKAMQVDTTVLGLSKDEALEKPYIASMGVYVFKKEILLNLLRWRFPTANDFGSEIIPASAREFYMKAYLFNDYWEDIGTIRSFFEANLALTEHPSKFSFYDAAKPMYTSRRNLPPSKIDNSKIVDSIVSHGSFLNNSFIEHSVVGIRSRINSNVHLKDTVMLGADFYETEAEVAALLAEGRVPIGIGENTKIKDCIIDKNARIGKNVIIANSEGIQEADRSAEGFYIRSGVTVVLKNSTIEDGLVI

SEQ ID NO: 7304 - protein, 521 aa, Cicer arietinum
MDLAIGSNYASLRSSVFLGETLKGNLSTKFLTSPKFSQIHINNLRSFNPRNGASYSVLTSGINDFEESMTFHEGPYFDTPKADPKSVASIILGGGAGTRLFPLTSKRAKPAVPIGGCYRLIDIPMSNCINSGIRKIFILTQFNSFSLNRHLSRSYNFGNVSTFGEGFVEVLAATQTSGEAGKKWFQGTADAVRQFIWVFEDAKTKNVEHILILSGDHLYRMNYMDFVQKHIDTNADITVSCIPMDDSRASDYGLLKIDGKGRIIQFAEKPKGSELKAMRVDTTLLGLSPEEAKKQPYIASMGVYVFRTETLLKLLRSNCSTCNDFGSEIIPSAVNDDHNVQAYLFNDYWEDIGTIKSFFDANLALTDQPPKFQFYDPNTPFYTFPRFLPPTKVEKCKIVDAIISHGCFLRECSVQHSIVGIRSRLESGVELQDTMMMGADYYQTESEIASLLAEGKVPVGVGENTKIRNCIIDKNARIGRNVIITNADGVEEADRTKEGFYIRSGITAILKNATIKDGTVI

SEQ ID NO: 7305 - protein, 262 aa, Glycine max
MDLCWLKTLASQLRRPPPRDKKRLQKIKQVHICTSHSSQHSAAAVVGSHRRLGEKSYKIWEMAAARGLVLSRPVTFVTGNAKKLEEVRAILGNSIPFQSLKLDLPELQGEPEDISKEKARMAAVQVNGPVLVEDTCLCFNALKGLPGPYIKWFLQKLGHEGLNNLLMAYDDKSAYALCVFSFAAGSNSEPITFSGKTPGKIVPPRGPNDFGWDPIFEPDGYDQTYAQMPKEEKNKISHRSKSLALVKSHFAEAGYTFDIKNV

SEQ ID NO: 7306 - protein, 516 aa, Cicer arietinum
MASMAAIGVLKVPPSSSSSSSSSSSKAIIARNLSFTSSQVCGDKIGTFSRRGRGSYVGNPIIVSPKAVSDSKNAQTCLDPDASRSVLGIILGGGAGTRLYPLTKKRAKPAVPLGANYRLIDIPVSNCLNSNVSKIYVLTQFNSASLNRHLSRAYASNMGGYKNEGFVEGLAAQQSPENPNWFQGTADAVRQYLWLFEEHNVLEYLVLAGDHLYRMDYERFIQAHRESDADITVAALPMDELRATAFGLMKIDEEGRIIEFAEKPKGEQLKAMKVDTTILGLDEERAKEMPYIASMGIYVVSKHVMLDLLREKFPGANDFGSEVIPGATNIGMRVQAYLYDGYWEDIGTIEAFYNANLGITKKPVPDFSFYDRSSPIYTQPRYLPPSKMLDADITDSVIGEGCVIKNCKIHHSVVGLRSCISEGAIIEDTLLMGADYYETDADRRFLAAKGSVPIGIGKNSHIRRAIIDKNARIGDNVKIINSDNVQEAARETEGYFIKSGIVTVIKDALIPSGTVI

SEQ ID NO: 7307 - protein, 488 aa, Oryza sativa
LGSGLSVPESFTPRGEGKTGGARAVVAGVGKIREARGKGGFSMTSLLWHGGSVWDAWFSCASNQVAQVLLTLPYSFSQLGMLSGLLLQVFYGLMGSWTAYLISVLYVEYRARKEKEGVSFKNHVIQWFEVLDGLLGPYWKAAGLAFNCTFLLFGSVIQLIACASNIYYINDRLDKRTWTYIFGACCSTTVFIPSFHNYRIWSFLGLGMTTYTAWYLAIAAAVHGQVDGVTHSGPSKMVLYFTGATNILYTFGGHAVTVEIMHAMWKPQKFKYIYLVATLYVFTLTLPSASAMYWAFGDALLTHSNAFSLLPRSGWRDAAVILMLIHQFITFGFACTPLYFVWEKAIGMHGTRSVLTRALARLPIVVPIWFLAIIFPFFGPINSAVGALLVSFTVYIIPSLSHILTYRSASARLNAAEKPPPFLPSWSGMFVVNVFVVAWVLVVGFGLGGWASVTNFIKQIDTFGLFAKCYQCPPRAHAGAPLPAPPRH

SEQ ID NO: 7308 - protein, 167 aa, Erwinia amylovora
RHFADTPEEKNLPILLALIGIWYNNFFGAETEAILPYDQYMHRFAAYFQQGNMESNGKYIDRAGNAVSYQTGPIIWGEPGTNGQHAFYQLIHQGTKLVPCDFIAPAVSHNKLSDHHSKLLSNFFAQTEALAFGKSREAVEQEFADAGKDAKSVEHIVPYKVFEGNRP

SEQ ID NO: 7309 - protein, 149 aa, Oryza sativa
MAPIVIASLATSVAPFQGLKSTAGLPVSRRSTNSGFGDITNGGRIKCMQVWPVDGKKKFETLSSPGYYDGRYWTIWKLPMFGCSDNSQVIKELEEAKKAYPDAFIHIVGFDNVEPILMGPHIKGFMAYKPLGCEESDTTKPRSSITAQK

SEQ ID NO: 7310 - protein, 464 aa, Glycine max
MANTLYNGATCRIPLRNQSLAFSRHVSRSLSFLPITRAAKQPNAIAVKASSHSDFDVDLSLSPRVNAVKPSKTVAISDHATALVQAGVPVIRLAAGEPDFDTPAPIAEAGINAIREGYTRYTPNAGTMELRQAICHKLKEENGITYTPDQVVVSNGAKQSIAQAVLAVSSPGDEVIIPAPFWVSYPEMARLADATPVILPTLISDNFLLDPKLLESKITERSRLLILCSPSNPTGSVYPKELLEEIARIVAKHPRLLVLSDEIYEHIIYAPATHTSFASLPGMWDRTLTVNGFSKAFAMTGWRLGYIAGPKHFVAACGKIQSQFTSGASSIAQKAGVAALGLGHAGGEAVSTMVKAFRERRDFLVKSFREIDGIKISEPQGAFYLFLDLSFYYGREAEGFGKIVDSESLCQYLLEVGQVALVPGSAFGDDTCIRISYAESLTTLQAAVERIKKALVPLSSAALV

SEQ ID NO: 7311 - protein, 388 aa, GIBBERELLA ZEAE PH-1
MAAPQIPSQQWAQIFEKTAGRIWAQSHLFQSYPAIHSSCNTPVTFQALYSHLFLTAIEYKQIPVQKPGPDEVLVNVKFSGVCHTDLHAWQGDWPLDTKLPLVGGHEGAGVVVARGELVKDVKIGEKVGIKWLNGSCLSCSYCQNADESLCAEALLSGYTVDGSFQQYAIAKAIHVARIPEECDLEAISPILCAGITVYKGIKESGVKAGQSLAIVGAGGGLGSIAVQYAKAMGIHAIAIDGGEEKEKMCMSLGAQTFIDFTKTKNIVADVKATTNDGLGPHAALLVAAAEKPFQQATQYIRSKGTVVCIGLPAGAQFSAPVFDTVVRMIQIKGSYVGNRADTAEAIDFFRRGLIKVPFKTVGLSELNEVFKLMKAGQVAGRYVVDTSR

SEQ ID NO: 7312 - protein, 537 aa, Oryza sativa (japonica cultivar-group)
MNRRRTMLLLICLCATFCLMTQLGAANVVLMGTNLTLSFDDVEASFAPGVKGSGFEGVVYTAEPLDACSPLTSKAEKGPPSPFALIIRGGCTFDEKVKNAQDAGFKAAIVYDNENSGVLISSNFTVAGSSGGIHIYAVFISKASGEVLKKFSGHTDVEVWILPAFENSAWSIMAISFISLLAMSAVLATCFFVRRHHIRRDRPRIPEAREFHGMSSQLVKAMPSLIFTKVQEDNCTSSMCAICLEDYNVGEKLRVLPCRHKFHAACVDLWLTTWRTFCPVCKRDASTGIPDPPASETTPLLSSAVRLPSQSSSFRSSVAASPPRPISRRPSSQSISRIYAASGTPNSPNPIRSFTNSTAMSISRSNVDLSNMSSRPRASHLASAHSLVGSHLSPPINIRYASPHMSHSGYASPSPHVSSSYVSNSGYGSSSYYLGSSSQHRSYLRRCGESGPSLSTMAPQSPQQSQLRHGGESDLNLAGASSGQSFRQSYLRHCADSEVNLAGASSGQSFRQSYLRHCADSDASLSAMASAQSLPGC

SEQ ID NO: 7313 - protein, 167 aa, Pectobacterium carotovorum
QHFATTPAEKNLPVLLALIGIWYNNFFVAETEGILPYDQYMHRFAAYFQQGNMESNGKYVGRNGNPVDYQTGPIIWGEPGANGQHAFYQLIHQGTKLVPCDFIAPAMTHNALSDHHSKLLSNFFAQTEALAFGKSREVVEAEFAAAGKSAKEVEHVAPFKVFEGNRP

SEQ ID NO: 7314 - protein, 312 aa, Magnaporthe grisea
MADKDFTLNTGAKIPAFGLGTWQGDKGVIKEAVLTAIKSGYRLIDGAYVYGNEEEVGQGIREAISSGIVKREDLFVVSKCWATYTTRCELGLDQSLKLLGLDYVDLYLVHWPILMNPEGNDEKFPKHADGSRDIIHTHNHVDTWKLMEKLPATGKTKAVGVSNYSKAWLEQLLPHATTVPAVNQVENHPQLPQQELVDFCKEKGIHIMAYSPLGSTGGPLLTAEPVVKIAEKHSISPAAVLLGYQIARGITVIPKSVNPDRIKANAQLKDLDAEDMKLLNDYSEQLAKDGKLNRYVFPPFGTDFGFPDKVGQ

SEQ ID NO: 7315 - protein, 202 aa, Lycopersicon esculentum
MSNEYDYLFKLLLIGDSSVGKSCLLLRFADDSYVDSYISTIGVDFKIRTVEQDGKTIKLQIWDTAGQERFRTITSSYYRGAHGIIIVYDVTEMESFNNVKQWLNEIDRYANESVCKLLVGNKCDLVENKVVDTQMGKALADELGIPFLETSAKDSINVEQAFLTMAGEIKKKMGNQPAGAKRTGSTVQIKGQPIEQKGNCCG

SEQ ID NO: 7316 - protein, 474 aa, Streptococcus pneumoniae TIGR4
MTRYQNLVNGKWKSSEQEITIYSPINQEELGTVPAMTQTEADEAMQAARAALPAWRALSAVERAAYLHKTAAILERDKEEIGTILAKEVAKGIKAAIGEVVRTADLIRYAAEEGLRITGQAMEGGGFEATSKNKLAVVRREPVGIVLAIAPFNYPVNLSASKIAPALIAGNVVMFKPPTQGSISGLLLAKAFEEAGIPAGVFNTITGRGSEIGDYIIEHKEVNFINFTGSTPIGERIGRLAGMRPIMLELGGKDAALVLEDADLEHAAKQIVAGAFSYSGQRCTAIKRVIVLESVADKLATLLQEEVSKLTVGDPFDNADITPVIDNASADFIWGLIEDAQEKEAQALTPIKREGNLLWPVLFDQVTKDMKVAWEEPFGPVLPIIRVASVEEAIAFANESEFGLQSSVFTNDFKKAFEIAEKLEVGTVHINNKTQRGPDNFPFLGVKGSGAGVQGIKYSIEAMTNVKSIVFDVK

SEQ ID NO: 7317 - protein, 391 aa, Cytophaga hutchinsonii
MEYTNFETLAIRTQTERSQNREHSAPIYMTSSFVFEDAEQARAMFADEVGGNLYTRFSNPNNSEFIEKMCLMEGAEDGFATASGMSAVFSSMAPFLNSGDHILLCKSVFGSSLQIVTQIFPKWGIEYTFAPIDKPETWESLIKPNTKMVMIETPSNPALDLIDLEWLSSLCKKHKILLNVDNCFATPYLQNPIKLGADIVTHSATKFIDGQGRAIGGIILASKELIKQVRFFCRHTGPALSPFNSWIFSKSLETLAVRMDRHCENALKLATFLEQHPDVELVKYPFLPSHPQYQLAKKQMRAGGGIVTFIIKGGVDRGRKFLNATEMASHSANLGDTRTIVTHPASTTHSKLSDADRESVGIFPGTIRISVGLEHSDDIIAEIRQALENSK

SEQ ID NO: 7318 - protein, 380 aa, Streptococcus pneumoniae TIGR4
MKNEMLALILAGGQGTRLGKLTQSIAKPAVQFGGRYRIIDFALSNCANSGIHNVGVVTQYQPLALNNHIGNGSSWGLDGINSGVSILQPYSASEGNRWFEGTSHAIYQNIDYIDSVNPEYVLILSGDHIYKMDYDDMLQSHKDNNASLTVAVLDVPLKEASRFGIMNTDANNRIVEFEEKPAQPKSTKASMGIYIFDWQRLRNMLVAAEKSKVGMSDFGKNVIPNYLESGESVYAYEFSGYWKDVGTIESLWEANMEYISPENALDSRNRQWKIYSRNLISPPNFLGANAHVEDSLVVDGCFVDGTVKHSILSTGAQVREGAEVLDSVIMSGAIIGQGAKIKRAIIGEGAIISDGVEIDGTDEVQVVGYNEVVGVATDED

SEQ ID NO: 7319 - protein, 342 aa, Candida albicans SC5314
MSTFKPPANFSRVLSQPTFYEKIIITEQPSLIKGIPDGILALIVPVVAYWSYSMFFHIIDVYELAEQYRIHPSEEEKSRNKVTLHEVVRDVIFQHIIQTIAGFAVYCIDPIPKTGYELYTMWNLKYNYLPSFVPDWAIYYGYMYGWSFLRILIAFCIIDSWQFWLHRLMHINKSLYRRFHSRHHRLYVPYAFGALYNDPVEGFLLDTLGTGIASLVTGLSHRESIFLYTFATLKTVDDHCGYRLPFDIFQIIFPNNSVYHDIHHQMWGIKNNFSQPFFTFWDVLNNTQYKFVNEYKDLQKHITLTKYKEFLAKKSGSKSKSKQELEIEEEEKSIDKETKKEI

SEQ ID NO: 7320 - protein, 191 aa, Zea mays
QSLAAGAKAASWILEGHYDFYGDYDRNPDNVDIHDVFVWPIFLTALMLLHLTDPSTHAGGIRDAPYEVYYFLLDRREDALGDILCYLCWVDSVDLSARLVYSVGWKVEVVLQMFSRTMQVIGHGRVQKRGPAHLDKHVQDFLMAPFIVMLEVKFRIAAEFLCHTTDSIDESWIPRPPMPIFESYIVMTHLT

SEQ ID NO: 7321 - protein, 199 aa, GIBBERELLA ZEAE PH-1
MIGDSGVGKSNLLSRFTRNEFNLDSKSTIGVEFATRSIQVDSKTIKAQIWDTAGQERYRAITSAYYRGAVGALLVYDISKHQTYENVTRWLKELRDHADANIVIMLVGNKSDLRHLRAVPTEEAKSFASENHLSFIETSALDASNVELAFQNILTEIYRIVSSKALDSGDSAQATIGAGTNISLSKPADDDAAKGGKCC

SEQ ID NO: 7322 - protein, 396 aa, Danthonia spicata
  unsure (1)..(396): unsure at all Xaa locations
TGYDRVMVYKFHEDEHGEVVAESRRPDLEPYLGLHYPATDIPQASRFLFQQNRVRMIHDCHATAVRVIQDPGLQQALCLVGSTLRAPHGCHAQYMANMGSIASLVMAVIISSGSDDEQMARGGXSSAMKLWGLVVCHHTSPRFIPFPLRYACEFLMQAFGLQLNMELQLAHQMSEKHILRXQTLLCDMLLRDSPTGIVTQSPSIMDLVKCDGAALYYHGKYYPLGVTPTESQIKDIIEWLTVCHGDSTGLSTDSLADAGYLGAAALGDAVCGMAVAYITPSDYLFWFRSHTAKEIKWGGAKHHPDDKDDGLRMHPRSSFKAFLEVVKSRSLPWENAEMDAIHSLQLILRDSFRXAAEGTSNSKAIVBGQVQLGELELRGINELSSVAREMVRLIET

SEQ ID NO: 7323 - protein, 837 aa, Magnetococcus sp. MC-1
MKLSRREYIKAHAIAAAAAAAGMPVAAPTEAHATTLGGDIRWDKAPCRFCGTGCSILVGTKDNRIVATQGDPDAPVNRGLNCIKGYFLSKIPYGKDRLTKPLLRKTAGKYDKNGDFQEVSWDEAFDVMADHFKKAIKKGLDAGKMPPVGMFGSGQWTVWEGYAASKLMKAGFRSNHLDPNARHCMASAVAGFIRTFGIDEPMGCYDDLEHADTFVLWGSNMAEMHPILWSRLTNTRLTKPNAKVVVLSTYQHRCFDLADLGIVFNPQSDLAIANFIANYVIEKGRYNKAFIEKHVNFRLGNTDIGYGLRPTDEREKSAKNNKNRKDTIGSQPISFEEYAAFVKTYDVAKASQISGVPERQLIELAELYADPDRKIMSLWTMGMNQHTRGTWQNNLVYNLHLLTGKISEPGNSPFSLTGQPSACGTAREVGTFSHRLPADMVVANKAHRDICEKHWLLPEGTIPEKVGFHAVLQNRKLKDGELNAYWVMCNNNMQAAANINEEALPGYRNPDNFIVVSDPYPTVTAQAADLILPTAMWVEKEGAYGNAERRTQFWRQQIPPPGEAKSDVWQLMEFSKRFKVEEVWPAELIAKQPELKGKTLFEVLYANGQVNKYPLSETAEGFDNNESTDFGFYVQKGLFEEYAHFGRGHAHDLADFDSYHQARGLRWPVVDGKETLWRFREGYDPYVPKGEGVRFYGKPDGKAWIFALPYEPPAEEPDAEYDMWLCTGRVLEHWHSGSMTRRVPELYRAMPDAMVYMHPNDAAKRGLKRGMSARLITRRGEVIARVETRGRNRVPEGLIFIPWFDASRLVNKLTLDATCPISKETDYKKCAVKVLKA

SEQ ID NO: 7324 - protein, 247 aa, Mesorhizobium sp. BNC1
METAFGYRNVGEGEKQGLVNEVFHRVAERYDLMNDLMSGGLHRLWKAGMVSWLSPPKQPGFKALDVAGGTGDIAFRIVEASGGQAQVTVLDINGSMLAVGRDRAEKRGLAQNLSFVEANAEELPFPSSAFDAYTIAFGIRNVPQIDKALSEACRVLRPGGRFLCLEFSEVDVPLLDKVYEAWSFNAIPRIGQAVAGDGEPYRYLVESIRKFPNQDNFAVMIKRAGFDRVSWRNYSGGIAALHSGWKI

SEQ ID NO: 7325 - protein, 167 aa, Pantoea agglomerans
QHFASAPAEQNLPVLLALIGIWYNNFFGAETEAILPYDQYMHRFAAYFQQGNMESNGKYVDRAGHPVDYQTGPIIWGEPGTSGQHAFYQLIHQGTKLVPCDFIAPAITHNALADHHPKLLSNFFAQTEALAFGKSRDVVEKEFTDAGKSAESVAHIVPFKVFEGNRP

SEQ ID NO: 7326 - protein, 233 aa, Allium sp. AL-2003
VQLKRMENKINRQVTFSKRRNGLLKKAHEISVLCDAEVALIVFSAKGKLYEYSTDSSMEKILERYERYCFAEKSSTMSDIDSQEDWSLEYHKLKAKVESLNNRQRHLMGEQLESLSLREIGQLEQQLENSLKTVRTRKSQELLSSISELQDKEKTLRDENKALENELMKRARAKAILEQQARWKHHNHKQQDNLHNPNINIGNYQTRNNEGGVEPATDVQVRVVRNLLPHWML

SEQ ID NO: 7327 - protein, 300 aa, Pneumocystis carinii
MEQYQRLEKIGEGTYGVVYKAKDLESGTIVALKKIRLEAEDEGVPSTAIREISLLKEMHNDNVVRLLNIIHQESRLYLVFEFLDLDLKKYMNSIPKDMMLGAEMIKKFMSQLVSGVKYCHSHRILHRDLKPQNLLIDREGNLKLADFGLARAFGVPLRGYTHEVVTLWYRAPEVLLGGRQYATALDIWSIGCIFAEMATKKPLFPGDSEIDEIFRIFRILGTPDENSWPGITSYPDFKATFPKWSPKNLGELITELDSDGIDLLQKCLRYYPAERISAKKALDHPYFDDFINLNRSNVVL

SEQ ID NO: 7328 - protein, 300 aa, Pneumocystis carinii
MEQYQRLEKIGEGTYGVVYKAKDLESGTIVALKKIRLEAEDEGVPSTAIREISLLKEMHNDNVVRLLNIIHQESRLYLVFEFLDLDLKKYMNSIPKDMMLGAEMIKKFMSQLVSGVKYCHSHRILHRDLKPQNLLIDREGNLKLADFGLARAFGVPLRGYTHEVVTLWYRAPEVLLGGRQYATALDIWSIGCIFAEMATKKPLFPGDSEIDEIFRIFRILGTPDENSWPGITSYPDFKATFPKWSPKNLGELITELDSDGIDLLQKCLRYYPAERISAKKALDHPYFDDFININRSNVVL

SEQ ID NO: 7329 - protein, 431 aa, Bradyrhizobium japonicum USDA 110
MPAPKPPAFETLSLHAGQHPDPATGARAVPIYQTTSYVFQDSDHAAALFNLERAGHIYTRISNPTTGVLEERLAALEGGVGAICTASGMAALHLAIATLLNAGDHIVASSSLYGGTINLLAHTLPRFGITTTFVKPRDLDAFRSAIKPNTKLVIGETIGNPGLEVLDIPKVAAIAHEAKIPLLIDNTFATPYLSRPIELGADIVMHSATKWIGGHGIAIGGAIIDGGRFDWRGSGKFGVLTEPYGGYHGIVFDEQFGTAAFIMRARTEGLRDFGACLSPTNAFQLLQGVETLGVRMDRHMQNTHSVLEALKSNKAVDWVLHPSLEDHTDYQLAKQLLPRGAGSIVSFGIKGGRPAGRKFIESLRMISHLANVGDAKTLVIHPASTTHQQMDAEQLKAAGIGEELVRLSVGIETASDIIDDLNQALRISQKV

SEQ ID NO: 7330 - protein, 167 aa, Photobacterium sp. WH69
KHFAEAPLEQKLPVILALIGIWYNNFHGAETEAILPYDQYMHRFAAYFQQGNMESNGKYVDRGGNPVDYQTGPIIWGEPGTNGQHAFYQLIHQGTKLIPCDFIAPAISHNPLGDHHPKLMANFFAQTEALAFGKSREKVEAEFFAAGKSQEEVNELAEFKVFEGNRP

SEQ ID NO: 7331 - protein, 295 aa, Ralstonia metallidurans CH34
MLNAFADNPVVRATLEEASTALGQDIGKLIAEGPAEELNLTTNTQPVMLTAAVAVYRAWLDAGGPAPALVAGHSLGEYSALVAAGVIPFAEAVPLVRFRAQAMQEAVPVGEGGMAAILGLSDDDVRAACAEAAAAGAGVVEAVNFNAPSQVVIAGNKGAVEKACEIAKAKGAKRALPLPVSAPFHSSLLKPASDRLRERMAGLSFSAPAIPLVNNVDVAIISDPAQIKDALVRQAAAPVRWVECVQKIAAEGVTHVIECGPGKVLAGMTKRIDGNLVGGAIFDPASLQETLALLK

SEQ ID NO: 7332 - protein, 212 aa, Antirrhinum majus
KAHELSVLCDAEVALIIFSNRGKLYEFCSSTSMLNTLERYQKCNYGPPETNVSTREALELSSQQEYLKLKARYEALQRSQRNLLGEDLGPLNSKELESLERQLDMSLKQIRSTRTQAMLDTLTDLQRKEHALNEANRSLKHRLMDGSQISLQWNPNAEDHVGYGRQPSQPSADGFYHPLECEPTLHIGFQSDQITVAGAGPSVNNYISGWLP

SEQ ID NO: 7333 - protein, 96 aa, Pseudomonas sp.
KDRLTQPLRWRDGQYDKQGEFTPISWDQAFDIMAEKFKGAMKEKGPEAAGMFASGQWTVWEGYAAAKLFKAGLRTNNLDPNARHCMASAVVGFMRT

SEQ ID NO: 7334 - protein, 250 aa, Neisseria meningitidis Z2491
MGYMIDGTQAEYVRTQAEYVRTQAEYVRTPYADNSLVPLPDNVNEEVALLLSDALPTAHEIGVQYGDVKPGDTVFIAGAAPVGMSALPTAQLYSPAAIIVCDMDENRLKLAKELGATHTINPASGDVSKQVAAIVGEDGVDCAIEAVGIPATWNMCQDIVKPGGHIAVVGVHGQSVDFKLEKLWIKKLAITTGLVNANTTEMLMKAISSSSVDYTKMLTHRFKFSELEKAYDVFKHAAENQAMKVVLEAD

SEQ ID NO: 7335 - protein, 167 aa, Serratia marcescens
KHFAETPAEKNLPVLLALIGIWYNNFFGAETEAILPYDQYMHRFAAYFQQGKMESNGKYVDRNGNPVDYQTGPVIWGEPGTNGQHAFYQLIHQGTKLVPCDFIAPAISHNPLGDHHAKLLSNFFAQTEALAFGKSLEVVEAEFAAQGKTPEQVKHVAPFKVFEGNRP

SEQ ID NO: 7336 - protein, 207 aa, Antirrhinum majus
  unsure (1)..(207): unsure at all Xaa locations
CDAEVALIIFSNRGKLYEFCSSSSSMLTTLERYQKCNYGAPDHANISTREAMELSSQQEYLKLKARYEALQRSQRNLLGEELGPLNSKELESLERQLDMSLKQIRSTRTQAMLDTLTDLQRKEHALNEANRNLKHRLMEGSQIGLQWNLNAQDMGYGRQPTQPQGDGFFHPLECEPTLQMGFHSDQISVAAXAGPSVNNNYMSGWLP

SEQ ID NO: 7337 - protein, 88 aa, Oryza sativa
  unsure (1)..(88): unsure at all Xaa locations
MESGKHHACSSCDTKTTTTNAGAPVWNDNQALTAGPRGHRLLEDYQLIQKVMHLVRXAFGERVVHTSGAFAKGYXESTHNVTDNTCTG

SEQ ID NO: 7338 - protein, 400 aa, Oryza sativa (japonica cultivar-group)
MAIVSRSRRLAVTLLLLLFAVVAAAAVATKAEAGTEDAASKEDESWTGWAKEKITEGLGLKHHVADVDEEEDAARKAGHAAKSAQHTASEAGRQTSKKAGDAKEAAEATASGASSKAEQAKEKTKEAAKGAAGEATRRAEQAKHKTKEAAEAAGERGAEVHEQSKQGKAKVEETAKEKAGEGYDAAKDKAGKAQETLRQSTDAAKDKAGKAQETLRQSTDAARDKAGKAQETLRQSTDAAAEKAGAAKDSAWERTSSAKDAAAEKAGSAKDAAWEKTSSAKDAAAEKAGAAKDAAREKAEAAGEKARQSKEAAKGKAGAAKDAAWEKAEAAKDAAWETAEAAREKANEGYEKVKEKAKEKVEEVKERVTGADDAADHGKEKKHHHRHVDGKQKPRTVDEL

SEQ ID NO: 7339 - protein, 204 aa, Antirrhinum majus
DAEVALIIFSNRGKLYEFCSNSGTMLKTLERYQKCNYGAPEANVSTREALELSSQQEYLKLKARYEALQRSQRNLLGEDLGPLNSKELESLERQLDMSLKQIRSTRTQAMLDTLTDLQRKEHALNEANRSLKHRLMEGSQISLQWNPNAHDMGYGRQAAAQPQGDGFFHPLECEPTLQMGFQSEITVGAAGPSVNNYNMTGWLP

SEQ ID NO: 7340 - protein, 97 aa, Pseudomonas sp.
VDRLTQPLLRMTNGQYDKQGEFHPVSWKQAFDVMELKYKEALKNKGGESIAMFGSGQWTIWEGYAANKLMKAGFRSNNIDPNARHCMASAVMGFMRT

SEQ ID NO: 7341 - protein, 178 aa, Buchnera aphidicola (Acyrthosiphon pisum)
  unsure (1)..(178): unsure at all Xaa locations
MKHTLQVIITEKELDIRVRELGQEITKKYRNSRNKMILIALLRGSFIFISDLCRRIHIEHEIDFMTTSSYGRGMLSSGDVKIIKDLDEDIYNKNVLIVEDIIDSGKTLSKVLDILKLRNPKSLSICTLLDKPECREVNINVDFIGFSILENFFIVGYGIDYAQSYRXLPNIGKVVFKK

SEQ ID NO: 7342 - protein, 97 aa, Pseudomonas sp.
VDRLTQALLRMTNGQYDKQGEFHPVSWKQAFDVMELKYKEALKNKGGESIAMFGSGQWTIWEGYAANKLMKAGFRSNNIDPNARHCMASAVMGFMRT

SEQ ID NO: 7343 - protein, 1145 aa, Pinus sylvestris
MVSISSDQACTIPKLYANFFLGSDIEFVRPDGRPEFFNADRFLSYYHSMTFAVNQEGQALLPGRKLLAMELHEPFFESWDPRHENPCKWTGVICSLDHENLVTEINIQSVQIAGNVPSQFAVLGSLRSLVISAANLTGSIPAEIGGYESLEILDLSGNRLRGNIPAEISKLKNLKSLILNSNQLQGSIPAEIGNCHNLVDLVVFDNQLSGKIPAELGRLANLEVFRAGGNENIEGTLPDELSNCTNLVTLGLAETNISGKIPLSFGSLKKLQTLAIYTAFLSGTIPAELGNCSELVNLYLYENRLSGAIPRELGKLQKLEKLYLWDNELDGSIPAELGSCSSLKFVDLSTNSLSGSIPDSFGSLKNLSELEITDNNVSGSIPAALANCTELTQIQLYNNQISGQMPAELGALKKLTVLFLWQNNLEGPIPSSLGSCDNLQSLDLSHNRLTGSIPPSLFEIKNLTKLLLLSNELTGALPPEIGNCVALSRLRLGNNRLLNQIPREIGKLENLVFLDLAMNQFSGSIPAEIGGCSQLQMLDLHGNRLGGELPRALGFLHGLQVVDLSANELTGLIPANLGNLVALTKLTLNGNALSGAIPWEISRCTNLQLLDLSLNRFSGQIPPEMGKCKRLEIALNLSWNNLSGSIPAQFSGLTKLASLDLSHNLLSGNLSALAQLSESCFSQHFFQRFFRVSARYQVFSDLCLPSDLSGNAALCTSEEVCFMSSGAHFEQRVFEVKLVMILLFSVTAVMMILGIWLVTQSGEWVTGKWRIPRSGGHGRLTTFQKLNFSADDVVNALVDSNIIGKGCSGVVYKAEMGNGDVIAVKKLWTGKESECEKVRERDSFSAEVNTLGAIRHRNIVRLLGCCTNGRSKLLMYDYMPNGSLGGLLHEKRSMLDWEIRYNIVLGVRRGLSYLHHDCRPPILHRDVKANNILLGSQYEPYLADFGLAKLVDSADFNRSSTTVAGSYGYIAPEYGYTMKITQKIDVYSFGVVLLEVVTGKQPIDPTIPEGVHLVEWARDAVQSNKLADSAEVIDPRLQGRPDTQIQEMLQVLGVAFLCVNSNPDERPTMKDVAALLKEIRHDCHDYNGKADLLLKQTPAPGSTRSPNPTADARSPVGSSFGLEYSSASTTAHESYSLHSSVSNVI

SEQ ID NO: 7344 - protein, 379 aa, Streptococcus pneumoniae TIGR4
MKIDKYSAILGNTVGFHNMSTLTDHRPVASLPFGGKYRLIDFPLSSLANAGVRSVFGIFQQDNISSVFDHIRSGREWGLSTLLSHYYLGIYNTRVESSTVGKEYYQQLLTYLKRSGSNQTVALNCDVLINIDLNQVFHLHSTTKEPITVVYKKLAKKDISEVNAILDVDETDHVLSHKLFDSKSTAETFNMSTDIFVVDTPWLIEHLEEEAKKEHPEKLRYVLRDLAVKEGAFAYEYTGYLANIHSVKSYYQANIDMLESQKFYSLFSPNQKIYTKVKNEEPTYYANTSKVSTSQFASGSIIEGQVANSVLSRNIHVHKDSLVKDSLLFPRVVIGEGAQVEYAILDKGVEVEHGVVIRGTAEHPVVVKKGAKVTEDIHS

SEQ ID NO: 7345 - protein, 97 aa, Pseudomonas sp.
VDRLTQPLLRMSNGQYDKQGEFQPVSWTQAFDIMELKFKEALKNKGADSIAMFGSGQWTVWEGYAANKLMKAGLRCNNIDPNARHCMASAVMGFMRT

SEQ ID NO: 7346 - protein, 434 aa, Streptococcus pneumoniae TIGR4
MSIITDVYAREVLDSRGNPTLEVEVYTESGAFGRGMVPSGASTGEHEAVELRDGDKSRYGGLGTQKAVDNVNNIIAEAIIGYDVRDQQAIDRAMIALDGTPNKGKLGANAILGVSIAVARAAADYLEIPLYSYLGGFNTKVLPTPMMNIINGGSHSDAPIAFQEFMILPVGAPTFKEALRYGAEIFHALKKILKSRGLETAVGDEGGFAPRFEGTEDGVETILAAIEAAGYVPGKDVFIGFDCASSEFYDKERKVYDYTKFEGEGAAVRTSAEQIDYLEELVNKYPIITIEDGMDENDWDGWKALTERLGKKVQLVGDDFFVTNTDYLARGIQEGAANSILIKVNQIGTLTETFEAIEMAKEAGYTAVVSHRSGETEDSTIADIAVATNAGQIKTGSLSRTDRIAKYNQLLRIEDQLGEVAEYRGLKSFYNLKK

SEQ ID NO: 7347 - protein, 319 aa, Fragaria x ananassa
MAKVPSVTLSSCGDDIQTMPVIGMGTSSYPRADPETAKAAILEAIRAGYRHFDTAAAYGSEKDLGEAIAEALRLQLIKSRDELFITTKLWASFAEKDLVLPSIKASLSNLQVEYIDMYIIHWPFKLGKEVRTMPVERDLVQPLDIKSVWEAMEECKKLGLARGIGVSNFTSSMLEELLSFAEIPPAVNQLEMNPAWQLKKLRDFCKAKGIHVTAYSPLGAARTKWGDDRVLGSDIIEEIAQAKGKSTAQISLRWVYEQGVSIVTKSYNKERMRQNLDIFDFCLTEEELEKMSHLPQRKGVTFASILGPHDIVLKVDEEL

SEQ ID NO: 7348 - protein, 179 aa, Fritillaria agrestis
MASSATMLSSVATAACVAPAQASMVAPFVGLKSASAFPVTQKTVTGLSTLPSNGGRVQCMKVWPIVGLKKFETLSYLPTLSVESLLKQIEYLIRNGWVPCLEFSLEGFVSRDNNKSPGYYDGRYWTMWKLPMFGCTDAAQVVKEAAECKKEYPAAFIRVIGFDNVRQVQCVSFIVEKPE

SEQ ID NO: 7349 - protein, 179 aa, Fritillaria agrestis
MAASSTMLSSVATAACAAPAQASMVAPFVGLKSTSAFPVTQKPATGLSTLPSNGGRVQCMKVWPIVGLKKFETLSYLPTLSVESLLKQIEYLIRNGWVPCLEFSLEGFVSRDNNKSPGYYDGRYWTMWKLPMFGCTDAAQVVKEAAECKKEYPAAFIRVIGFDNVRQVQCVSFIVERPE

SEQ ID NO: 7350 - protein, 242 aa, Gerbera hybrid cultivar
MGKGRLELKRIENKINRQVTFAKRRNGLLKKAYELSVLCDAEVALIVFSTRGKLYEFSSTSSMLKTLERYEKCSFGPPEQRRPAAKEDLQEQSSYQEYMRLKERYDALKRLERNYYGEEIDSLTTSELESLERQLHCSLKQIRTIRTQSLLDKLYEQQKMEHQLYESNKTLRLRLDEEGQAEALQWDAHAHANGMVYAHQHQVSQPMRDTFYHPTGCETTLQIGYQSEQMSAVNHQMQGWPA

SEQ ID NO: 7351 - protein, 179 aa, Fritillaria agrestis
MASSATMLSSVATAARAAPAQASMVAPFVGLKSASAFPVTQKPATGLSTLPSNGGRVQCMKVWPIVGLKKFETLSYLPTLSVESLLKQIEYLIRNGWVPCLEFSLEGFVSRDNNKSPGYYDGRYWTMWKLPMFGCTDAAQVVKEAAECKKEYPAAFIRVIGFDNVRQVQCVSFIVEKPE

SEQ ID NO: 7352 - protein, 534 aa, Mycobacterium leprae
MTPEEWITHDPDPQTAAELAACDPDELAARFTRALRFGTSGLRGPVRGGPDAMNLAVVLRATWAVAQVLLQRAGSRPATVIVGRDSRHGSAAFVAATAEVLAAEGFSVLLLPNPAPTPVVAFAVRNTGAAAGIQITASHNPPTDNGYKVYFDGGIQIISPIDHQIENAMAAAPLADQITRKPVNPSENSASDLVDHYIQRAAAVRRSNGSVRVALTPMHGVGGAVAVETLRRTGFDDVHTVAAQFEPDPDFPTVAFPNPEEPGATDALLALAAHVGADVAIALDPDADRCAVGIPTNSGWRMLSGDETGWLLGDYILSQTDKPETAVVASTVVSSRMLPAIATHYNAVHVETLTGFKWLARADANLPGTLVYAYEEAIGHCVDPTAVRDKDGISAAVLVCDLVAALHKQGRSVPDMLDQLALRHGVHDVTAISRRIGPKQTGVDEAVDLIQRLRAAPPSQLAGFTATTTDITDALIFTGGDDDTWVRVVVRLSGTEPKLKCYLEVRCSVAGNLPSTRQRARVLRDELVTLVQQW

SEQ ID NO: 7353 - protein, 179 aa, Fritillaria agrestis
MASSATMLSSVATAACAAPAQASMVAPFVGLKSASAFPVTQKTATGLSTLPSNGGRVQCMKVWPIVGLKKFETLSYLPTLSVESLLKQIEYLIRNGWVPCLEFSLEGFVSRDNNKSPGYYDGRYWTMWKLPMFGCTGAAQVVKEAAECKKEYPAAFIRVIGFDNVRQVQCVSFIVEKPE

SEQ ID NO: 7354 - protein, 351 aa, Gordonia sp. TY-5
MKALVFHGPGQKAWEDVPDPKLSEPTDVIVKMDTTTICGTDLHILKGDVPAVTPGRILGHEGVGTITEVGDAVTTLAVGDQVILSCISSCGKCSFCKQGVYSHCLGSEGTSGIGWIFGHLIDGTQAEYVRVPYAENSVHKLPSAVSPEQGTLLSDILPTGHEIGVRHGAVKPGDVVAVIGTGPVGLAAIATAGLYGPSRVIAVDIDANRVEQARRFGATDGVVSTSSGWREEILAMTDGLGVDVAIEAVGIPDTFQMCLDIVRPAGHVANVGVHGKPVELPIQDLWISNIVMSMGLVNTNTLGTLLKLVAQRRIDPEPFISHRFGLGEIIDAYDVFSRAAETKALKVIMSA

SEQ ID NO: 7355 - protein, 507 aa, Gordonia sp. TY-5
MTVYAKPGTEGSVMSFESRYDNWIGGQWTPPVKGQYFENPSPVDGKTFCEVARSTAEDIDLALDAAHKAAPQWGKTSVAERSLVLLRIADRLEENLEKIAVAETWDNGKAVRETLAADIPLAVDHFRYFAGALRAQEGSISEVDEDTVAYHFHEPLGVVGQIIPWNFPILMAVWKLAPALAAGNAVVLKPAEQTPASILYVMSLIADLLPAGVINIVNGFGVEAGKPLASSNRIRKIAFTGETTTGRLIMQYASENLIPVTLELGGKSPNIFFNDVMSADDGFLDRALEGFSMFALNQGEVCTCPSRALIQEDIYDDFIGKAVDRVSKIKQGNPLDTDTMMGAQASNDQFEKISSYLAIGKEEGAKVLIGGEPADLGGDLSGGYYIKPTVFDGHNKMRIFQEEIFGPVLAVTTFKDYADAIHIANDTLYGLGAGVWSRDGATAYRAGREIQAGRVWTNTYHDYPAHAAFGGYKQSGIGRETHLMMLEHYQQTKNLLVGYAQSAKGFF

SEQ ID NO: 7356 - protein, 354 aa, Zea mays
MGKKKKRVDKVFCYYCDREFDDEKILVQHQKAKHFKCHVCHKKLSTASGMAIHVLQVHKESVTKVPNAKPDRESTEIEIFGMQGIPAHVLAAHYGEEEDPSTKVPKVEVPQVRPVIMPNSLGMAFPPRPAYGVAPPIYNPALNPLMARPPIWPAAPAQAWYPQQAAYPQQSAVSVPPIVAGLPPQQPLFPIQNVPTPMTSAAANVLQTSFPMAPPGVPSPVAPHVSQPLFPVNTSAVNGAVNSPFLASVAPGTIPASSPAAVGVAGIGYGTNNQGTRDPAVGSSPAVSNNKASGAQPATNEVYLVWDDEAMSMEERRLSLPKYQVHDETSQMNSVDAAIDRRISESRLAGRMAL

SEQ ID NO: 7357 - protein, 137 aa, Glycine max
  unsure (1)..(137): unsure at all Xaa locations
LGPKEIHAYLTRVMYNRRNKFDPLWNSLVLGGVKKGPKGDEKYLGMVNMIGTHFEENHIATGFGNHMAIPILRGEWREDMTFEEAVKLIEKCLLVLLYRDRSSINKFQIAKITTEGSTIYPPYALKTNWGXAAFENH

SEQ ID NO: 7358 - protein, 581 aa, Glycine max
  unsure (1)..(581): unsure at all Xaa locations
MCGILAVLGCSDSSQAKRVRVLELSRRLKHRGPDWSGLHQYGDNYLAHQRLAIVDPASGDQPLFNEDKTVVVTVNGEIYNHEELRKQLPNHTFRTGSDCDVIAHLYEEHGENFVDMLDGIFSFALLDTRDNSFIVARDAIGVTSLYIGWGLDGSVWISSELKGLNDDCEHFESFPPGHLYSSKERAFRRWYNPPWFSEAIPSAPYDPLALRHAFEKAVVKRLMTDVPFGVLLSGGLDSSLVAAVTARYLAGTNAAKQWGTKLHSFCVGLEGAPDLKAAKEVADYIGTVHHEFHYTVQDGIDAIEDVIYHIETYDVTTIRASIPMFLMSRKIKSLGVKWVISGEGSDEIFGGYLYFHKAPNKDEFHQETCRKIKALHKYDCLRANKSTFAWGLEARVPFLDKDFIRVAMNIDPEYKMIKKEEGRIEKWVLRRAFDDEEHPYLPKHILYRQKEQFSDGVGYGWIDGLKAHAEKHVTDRMMLNXAANIFPFNTPTTKEAYYYRMIFERFFPQNSARXLSVPGGPSVACSTAKAVEWDAAWSNNLDPSGRAALGVHASAYGNQVKAVEPEKIIPKMEVSPLGVAI

SEQ ID NO: 7359 - protein, 168 aa, Pseudomonas sp. 61-3
MSASLAFVFPGQGSQSLGMLAELGAQYPLILETFKEASDALGYDLWALTQQGPEEQLNQTDKTQPAILTASVALWRLWLAEGGARPAYVAGHSLGEYSALVAAGSLSLGDAVKLVERRGQLMQEAVPAGQGAAWPPFSVWKMPMCWRPVQRLRKVKWSVRSTSTRRVK

SEQ ID NO: 7360 - protein, 405 aa, Coxiella burnetii
MAIEIKVPTLPESVSDATVAKWYKKEGDSISRDENLVDLETDKVMLEVPAPKDGVVEKIVAKEGEVVKADQILALLKEGGSVAKEKEKKDEKETKKEKEKKEEKKDKEKKEKTEEKESDLSPAVRRMVSEKDVDVEEIEGSGKGGRITKKDVEDYLEKQKEKPSEGKEGPADERTEKRVPLSRIRQRVAERLVQVQQEAALLTTFNEINMQLVMELRKKYREEFEKKFKVRLGFMSFFTKAVVEALKRFPMVNASIDGSDIIYHNYYDIGIAIGTERGLIVPILRNAEKMNMADIEKQIREYASRAQEGRLNIEELTGGTFTITNGGTYGSLLSTPIINPPQTAILGMHKIMDRPTVENGEVVVRPIMQVALSYDHRVIDGREAVLFLVTIKELLEDPARMILEC

SEQ ID NO: 7361 - protein, 252 aa, Prunus persica
MPIRNIAVGRPEEAYHPDALRAGLAEFISTLIFVFAGEGSGMAFAKLTHGAATTPAGLVAAALAHGFGLFVAVSVSANISGGHVNPAVTFGAFVGGNISLLRGILYWIAQLLGSAVACGLLRFAPNYQTTSAFALSEGVGVWNAFVFEIVMTFGLVYTVYATAIDPKRGSVGTIAPIAIGFVVGANILAGGAFDGASMNPAVSFGPALVSWNWHNHWIYWAGPLIGGGLAGLIYEFVFIGNSSHEPLPTADY

SEQ ID NO: 7362 - protein, 154 aa, Mesorhizobium sp. BNC1
MTFTIRSALAYDLALLLFRPQDAIKFPDIIHAVKPEPDRGFPQAQSAHDTFWDFISLTPESMHMIMWVMSDRAIPRSFRFMEGFGVHTFRFVNAKDESTFVKFHWKPKLGLQSVAWNEAVKINGADPDFHRRDLWQAIELAREICTAGISGVSA

SEQ ID NO: 7363 - protein, 203 aa, Clarkia concinna
RHELSMLCDAEVALIVFSTKGKLFEYSTDSSMEKILERYERYSYAERQLATNDSDPQGSCWTFECPKLMAKIEVLQRNIRHYVGEDLDPLSQRELQSLEQQIDTAIKRIRTRKNQLMHETISELHKKEKVLQEQNNLLSKKLKDNENALAERAQREQEFGQNTSNFMFPPATPPLLLHSLTIGGTFQGNVAPGKENEAQVRPS

SEQ ID NO: 7364 - protein, 313 aa, SYNECHOCOCCUS SP. WH 8102
MSHPSRRKGIILAGGSGTRLHPITQAVSKQLLPVYDKPMIYYPLSTLMLAGIREMLIITTPHDQEAFQRLLGDGSRWGMTIQYAVQPSPDGLAQAFLIGADFLDGAPAALVLGDNLFHGHDLVPQLVSSDGRAEGATVFAYPVSDPERYGVAEFDADGRVLSIEEKPKQPKSRYAVTGLYFYDATVVERARQVKPSARGELEITDLNQMYLDDGKLKVELMGRGMAWLDTGTCDSLNDAGGYIRTLEHRQGLKVGCPEEVAWRQGWISGEQLESLAQPLKKSGYGTYLLQLLEESISDHAALQSSLEVPAHAG

SEQ ID NO: 7365 - protein, 217 aa, Chelidonium majus
  unsure (1)..(217): unsure at all Xaa locations
VKKAHEISVLCDAEVGLIVFSTKGKLFEFSSESSMDNILERYERQCFVEEELKATHPESEGNWSLEHTKLKARIEILQKNQRHFMGEDLDPLSLKELQNLEHQLDIALKHVRSRKNQLLYASIAELRKKEKALHEQNILLGKKIKQKEEQIAQWSAQQNDAQNSSSFLTQAPQNSQSFLTQALPSLTLRTGYYQTARVVVCEEDGARSNMXMPPWML

SEQ ID NO: 7366 - protein, 637 aa, Xanthomonas campestris pv. campestris str. ATCC 33913
MIASSPIDAAALRASVAAALDPSTAVATLARFDTHAPRLLDALSTLYGDHADYVTWLPQWLSALGVVAQARPAALRHLDDSRAPGWFGQQDMLGYSAYVDRFAGTLRGVAERVPYLQELGVRYLHLLPFLRARAGDNDGGFAVSDYGQVEPALGSNDDLVALTARLRAANISLCADFVLNHTADDHAWAQAARAGDTRYLDYYHHFADRNAPDQYDTTLVQVFPQTAPGNFTWVDETRQWMWTTFYPYQWDLNWSNPAVFGEMALAMLELANLGVEAFRLDSTAYLWKRPGTNCMNQPEAHTILVALRAVADIVAPSVVMKAEAIVPMAELPPYFGSGVQRGHECHLAYHSTLMAAGWSALALQRGDILQDVIAHSPPLPPNCAWLSYVRCHDDIGWNVLQHEAAGTAAQPPFSLREVAQFYANAVPGSYARGESFQSSGDGVHGTNGMSAALVGVQAAHEHADAAAAARAVDRLVLLYAVSLAMPGVPLIYMGDELALPNDTAYLDDAQRRHEGRWLHRPAMAWELAAQRHDASTLAGTVYTRLRALIRLRAGLPALAATQSLGSVALGDARLFALTRGDSFLAVHNFSDVPLPVDLTQTGHALWAVLDTDGTGDAPEPHTELLLPAYGVRWLQRR

SEQ ID NO: 7367 - protein, 219 aa, Chelidonium majus
  unsure (1)..(219): unsure at all Xaa locations
GLVKKAHEISVXCDAEVALIVFSTKGKLFEYSTDSGMERILERYERYSYAERELVASELDQGNWSLEYTKLKAKIEILQKNQRHFMGEDLESMSLKELQNLEQQLDTALKQIRSRKNQLMYESISELQKKEKVLQEQNNQLGKKLKEKEKEVAQQQAQWDQQSQGQSSPSFLLSQSLPSLNIGGSYHMRGSNGSEEEGVRPQTTRTNTTLMPPWMVHHL

SEQ ID NO: 7368 - protein, 202 aa, GIBBERELLA ZEAE PH-1
MNPEYDYLFKLLLIGDSGVGKSCLLLRFADDTYTESYISTIGVDFKIRTIELDGKTVKLQIWDTAGQERFRTITSSYYRGAHGICVVYDVTDMDSFNNVKQWLQEIDRYATEGVNKLLVGNKSDMSDKKVVEYSVAKEFADSLGIPFLETSAKNASNVEQAFLTMARQIKERMGTTTANNTKPSVQVGQGQGVGSSSNNSCC

SEQ ID NO: 7369 - protein, 514 aa, Chlamydomonas reinhardtii
MALKMRVSQRQALGSQTFVCPHGSVVRKAVSSKARAVSRQAQVVRAQAVSTPVETKVANGVAASSAAGTGQNDPAGDISKTVLGIILGGGAGTRLYPLTKKRAKPAVPLGANYRLIDIPVSNCLNSNVTKIYCLTQFNSASLNRHLSQAYNSSVGGYNSRGFVEVLAASQSSANKSWFQGTADAVRQYMWLFEEAVREGVEDFLILSGDHLYRMDYRDFVRKHRNSGAAITIAALPCAEKEASAFGLMKIDEEGRVIEFAEKPKGEALTKMRVDTGILGVDPATAAAKPYIASMGIYVMSAKALRELLLNRMPGANDFGNEVIPGAKDAGFKVQAFAFDGYWEDIGTVEAFYNANLALTDPEKAQFSFYDKDAPIYTMSRFLPPSKVMDCDVNMSIIGDGCVIKAGSKIHNSIIGIRSLIGSDCIIDSAMMMGSDYYETLEECEYVPGCLPMGVGDGSIIRRAIVDKNARIGPKCQIINKDGVKEANREDQGFVIKDGIVVVIKDSHIPAGTII

SEQ ID NO: 7370 - protein, 435 aa, Zea mays
MPIQKILARTIFDSRGNPTVEVDLTTDKGLFRAAVPSGASTGIYEALELRDGDKANYHGKSVFKAVSNVNDVIAPALLAQNFNLTQQRDIDNFMLNLDGTENKSKLGANAILGVSLAVCKAGAAEAGLPLYAYIAKLAGNDKIILPVPAFNVINGGEHAGNKLPMQEFMILPTGAATFREAMKIGSEVYHHLKAVIKKRFGLDATAVGDEGGFAPNILDAKDALELIKTAVEVSGHASKIEIGMDVAASEMYKRDQKKYDLDFKNPQSDPTKWITSAELGALYQKFATEYPIVSIEDPFDQDDWEAWTALTGAVNFQIVGDDLTVTNPKRIQSAVEKKACNCLLLKVNQIGSVSESIDAHLLAKKNGWGTMVSHRSGETEDTTIADLVVGLSAGQIKTGAPCRSERLAKYNQILRIEEELGDKAIYAGKNFRHPA

SEQ ID NO: 7371 - protein, 292 aa, Zea mays
FCFALQFRPSSSHDTTVTTTNAGAPVWNDNEALTVGPRGPILLEDYHLIEKVAHFARERIPERVVHARGASAKGFFECTHDVTSLTCADFLRAPGVRTPVIVRFSTVIHERGSPETIRDPRGFAVKFYTREGNWDLLGNNFPVFFIRDGIKFPDVIHAFKPNPRSHVQEYWRVFDFLSHLPESLHTLFFLFDDVGVPSDYRHMEGFGVNTYTFVSAAEKATIRKPNDFKQPGERYRSWDADRQDRFVRRFADSLGHPKVSQELRSIWIDLLAKCDASLGMKIATRLNMKPNM

SEQ ID NO: 7372 - protein, 218 aa, Corylopsis sinensis
GLVKKAHEISVLCDAEVALIVFSTKGKLFEYSTDSCMEKILERYERYSYAERQLVATDPNSQGNLSLEYSRLKAKVELLQRNQRHFLGEDLDSLSLRELQTMEQQLDTALKRIRSRKNQLMYESISELQKKEKAMQEQNNMLAKKIKEKEKTMTQQAQWEEQNQDPGAASFLLQQPLPCLNIGNTYNQGVGGGAPEVRRNELDLTLEPVYPCHIGCFA

SEQ ID NO: 7373 - protein, 229 aa, Corylopsis sinensis
VQLKRMENKINRQVTFSKRRAGLLKKANEISVLCDAEVGLIVFSTKGKLYDMERIFDRYERYSYAERQLVVTNHESQGSWTIEHAKLKARMEVLQRNQRHFMGENLDSVSLKELQNLEHQLDNALKHIRSRKNLLMQESISELQRKDKSLQEENNSLSKKIKEKENALAHRAQWEQQNQGLNSFPILLSQPPQSLNIGTYQTGCSEGEEGTPFQQRPNTLLPHWMVSHL

SEQ ID NO: 7374 - protein, 882 aa, Agrobacterium tumefaciens str. C58
MPAETKTTCPYCGVGCGVIATVNDSGVVSVKGDPDHPANFGRLCSKGSALAETIDLDGRLLHPEIAGRRAAWDEALDLVASRFSDAIAEHGPDSVAFYVSGQLLTEDYYLANKLMKGFIGSANIDTNSRLCMSSSVAGHRRAFGADTVPGTYEDMELADLVILTGSNLAWCHPVLYQRLAAAKAARPGMKVVVIDPRRTMSADIADMHLAIRPDGDVALFTGLLAHLFASSAIDRGYVENHTAGFEAATQAASEHSLPEIAEATGLTIAELIPFYELFERTEKTVTCYSQGVNQSESGTDKVNAIINCHLATGRIGRPGMGPFSLTGQPNAMGGREVGGLANMLAAHMSIENADDRDRVQRFWASPAIAQKPGLKAVDMFRAVADGRIKALWIMATNPVVSMPDAGAVEVTIKACPFVVVSDVMANTDTARHAHVLLPSLGWGEKDGTVTNSERRISRQRSFLDAPGEAKADWWQMAEVARRMGFDAAFAYQQPSEIFAEHAALSGFENAGRRDFDIGGIERDSYETMAPVQWPKAGAGEAEVTRFFANGRFYHADGKARFIATALPETDRTSADYPLTLNTGRIRDQWHTMTRTGKSARLTAHIAEPFAEIHPRDAQALGIKSADLVELESPHGKVLLRALVSERQARGSVFAPMHWNDQFASRARIDVVVAPVTDPHSGQPASKNVGVRVTRFEASAYGFAICRSRPDAPDCAYWAVAKAEGGYRMELAFAEAPEDWTLWARRVFGIDVRIEPLGYSDRQTGDLRLAFFDGDTLLAALFIAREPVAVARNWAISQLSERHEDLRMRFALVAGRPGAGRADPGATVCSCFNVGVNQITAAIREGCHSVEAIGNALNAGTNCGSCRAEIRGIIDGCLKTAAE

SEQ ID NO: 7375 - protein, 222 aa, Brassica rapa subsp. pekinensis
MAAPPARARADYDYLIKLLLIGDSGVGKSCLLLRFSDGSFTTSFITTIGIDFKIRTIELDGKRIKLQIWDTAGQERFRTITTAYYRGAMGILLVYDVTDESSFNNIRNWIRNIEQHASDNVNKILVGNKADMDESKRAVPTAKGQALADEYGIKFFETSAKTNLNVEEVFFSIGRDIKQRLSDTDSRAEPATIRISQTDQELDCAGHTEVCMLWKLKTNYIN

SEQ ID NO: 7376 - protein, 182 aa, Fagus crenata
MASSMISSATVATVSRATPAQATMVAPFTGLKSTAAFPATRKSNNDITSLASNGGRVQCMKVWPPLGLQKFETLSYLPPLSIESLAKQIEYLILKGWIPCLEFELEHPFVYRENNRSPGYYDGRYWVMWKLPMFGCTDATQVLAELQEASKTYPTSHIRIIGFDNKRQVQCISFIAYKPPAK

SEQ ID NO: 7377 - protein, 187 aa, Capsicum annuum
MASSVMSTATVATGANAAQASMIASFNGLKSAASFPVTRKQDLDITSIASNGGRVECMLVWPPINKKKYETLSYLPDLSDEQLLKEIEYLLQKGWVPCLEFETEHGFVYREHHRSPGYYDGRYWTMWKLPMFGCTDATQVLNEVQEAKKAYPQAWIRIIGFDNVRQVQCISFIAYKPEATKFSMFNV

SEQ ID NO: 7378 - protein, 286 aa, Brassica rapa
MEGKEEDVRVGANKFPERQPIGTSAQSDKDYKEPPPAPLFEPGELASWSFWRAGIAEFIATFLFLYITVLTVMGVKRSPSMCASVGIQGIAWAFGGMIFALVYCTAGISGGHINPAVTFGLFLARKLSLTRAVYYIVMQCLGAICGAGVVKGFQPKQYQALGGGANTVAPGYTKGSGLGAEIIGTFVLVYTVFSATDAKRNARDSHVPILAPLPIGFAVFLVHLATIPITGTGINPARSLGAAIIFNKDNAWDDHWVFWVGPFIGAALAALYHVIVIRAIPFKSRS

SEQ ID NO: 7379 - protein, 303 aa, Erwinia chrysanthemi
MSTVNKKVKKAVIPVAGLGTRMLPATKAIPKEMLPLVDKPLIQYVVNECIAAGINEIILVTHSSKNSIENHFDTSFELEAMLEKRVQRQLLKEVQSICPEHVTIMQVRQGLAKGLGHAVLCAHPLVGDEPVAVILPDVIIDEYESDLKKDNLSEMLQRFYSTGHSQIMVEPVENVSSYGVVDCKGVELKPGDSAPMVGVVEKPKASEAPSNLAVVGRYVLSEHIWDLLKKTEPGAGNEIQLTDAIAMLMEKETVEAYHLKGVSHDCGNKLGYMTAFVEYGLRHDALGEDFTQWLKEAIEEDAN

SEQ ID NO: 7380 - protein, 403 aa, Wolbachia endosymbiont of Drosophila melanogaster
MKEESILVKAGRKFNDYKGSMNPPVYHSSTILFPTYKDYLNAANGESIYDVINDGVARDYSYSNVGTPTVHYLSNALAEIEGSGQALIYPSGLFALTFAILTFAKAGSHVLIQDNSYYRLRRFAENELPKRGTEVTFYDPTQDITDLIQSNTSLIMIETPGSVTFEISNIEHIVKVAKEHKIVTVCDNSWATPLLFKPLDYGVDVALYAVTKYLAGHSDLVMGAIIAEGEIFKLLYESYKNYGVTIQSHDCYLAHRGLRTLYTRMKRHQNTAMEVAKWLEKHSKIKKVLYPALPFHPQHELWKSYFKGASGTFSIALDREYSCEELSCMVDHMKIFGIGASWGGCDSLILPIDRRSMSRSVMNSDYGGSFIRIFCGLEDPEDLISDLNAALARLPCLNTKTGR

SEQ ID NO: 7381 - protein, 514 aa, Oryza sativa (japonica cultivar-group)
MPLDTNACAQPMRRAGEGAGTERLMERLNIGGMTQEKALRKRCFGDGVTGTARCVFTSDADRDTPHLRTQSSRKNYADASHVSAVILGGGTGVQLFPLTSTRATPAVPVGGCYRLIDIPMSNCFNSGINKIFVMTQFNSASLNRHIHHTYLGGGINFTDGSVQVLAATQMPDEPAGWFQGTADAIRKFMWILEDHYNQNNIEHVVILCGDQLYRMNYMELVQKHVDDNADITISCAPIDGSRASDYGLVKFDDSGRVIQFLEKPEGADLESMKVDTSFLSYAIDDKQKYPYIASMGIYVLKKDVLLDILKSKYAHLQDFGSEILPRAVLEHNVKACVFTEYWEDIGTIKSFFDANLALTEQPPKFEFYDPKTPFFTSPRYLPPARLEKCKIKDAIISDGCSFSECTIEHSVIGISSRVSIGCELKDTMMMGADQYETEEETSKLLFEGKVPIGIGENTKIRNCIIDMNARIGRNVIIANTQGVQESDHPEEGYYIRSGIVVILKNATIKDGTVI

SEQ ID NO: 7382 - protein, 440 aa, Enterococcus faecium
MKTYDAIIIGSGVSGLSAAYGLKEAGKTVLVVEEDLWGGTCPNRGCDPKKVLLSAVEARNRVKQLSGKGFNEIPTANWEELQKFKRTFTDPVPESRKKQLAEAEIDHLSGTARFLDDSSIEVNEEVFHADYLVLATGQRPTILPVEGKEYLKTSADFLSLPVLPKEIIFIGGGYIAFELATIANAAGSKVTIVHHNQRPLKEFEASLVEEAVHQMEASGIQFAFGVETQKIISEGTRYRLVGKETELVADMIFCATGRQPNTESLALEQANIVFDKHGIAVNDYLQTSNPKIFACGDIVSRKTPKLTPVATFEGNYVAKRITDATSEPIKYPIIPTIVYASPKLAEVGVTKSHASSSDQVVEMDLTSWFTYHRVNEPVAKAELTFDQQNYLIGAAVISEQADELIDDLTLVINQKLTKKELDSYIMGYPTLASDLSYLLK

SEQ ID NO: 7383 - protein, 270 aa, Rhodococcus sp. RHA1
MGWLEGNVAVITGGGSGLGRALVERFIEEGAKVGVLERSAEKVKKLAADFGENVVTVEGDVSKYEDNASVVRETVRQFGRLDTFVGNAAIWDFSTKLVDIPEDRLDPLFDEMFHINVKGYLNGAKAAVKELALTGGSIVFTVSNAGFYPGGGGPLYTASKHAVVGLVKELAFEFAPKIRVNGVAPGAMATDLRGPGSIGLGETNVSSLPLADLIKQCTVLQELCEPADYTGHYVLLASKDNSRTATGAIINCDGGMGVRGLAETAGGNDL

SEQ ID NO: 7384 - protein, 423 aa, Xanthomonas campestris pv. campestris str. ATCC 33913
MSTAPQKPLAIRERLSEVRYEIRGELARRARELEAQGRKLIKLNIGNPGAFGFRAPEHLQRAIADDMGRTDPYTHQQGLPEAREAIAAAYARRQHPDAHPDRIFIGNGVSELIDLSLRALLNPGDEVLVPSPDYPLWSAATILNDGRPVYYRCAPENGFQPDPVEIETLVSSRTRAIVLINPNNPSGASYSRELLERIVAIAVKHNLLLMVDEIYDQVLYDGAAFVPVAPLAGEHPCITFSGLSKVHRACGWRVGWALLSGEQSRINDLRNAMDLLGALRLCANVPGQYAIDAAVNGPDTISALCAPGGRLYETRRAVIEACAASSHLSLVAPAGALYAFPAVVGPAARAFDDHTFALDLMNDEGVLVVPGSSFNVPYRHHFRVTLMPEAAVMRDVFARIDRALTRRAEAVTKVVPLKSRSVA

SEQ ID NO: 7385 - protein, 236 aa, Heuchera americana
VQLRRMENKINRQVTFSKRRGGLVKKAHEISVLCDVEVALIVFSNKGKLFEYSTDSCMEKILERYERYSYAERRLVATGSESQENWSLEYTKLKAKIELLQRSQRQFMGEDLDLLSLRELQNLEQQLDTALKHIRSRKNQLMNQSISDLQKKEKAIQEQNNLLAKKIKEKEKAMSQQAEWEQQNNGASTSNFLNPQPLPCLNISSTYQGGAQPEAMRRNELDLTLEPIYSCHLGCF

SEQ ID NO: 7386 - protein, 264 aa, SYNECHOCOCCUS SP. WH 8102
MIGLGRMAQALVEPLLSSKAFSAEQVLAVVGTVATAQRLRQGAFAGVSIQSSRSAEAARVWTAPIQLLAVKQQQIDGIAAAAPVAENQPLLVSVLAGVSLDRLQRLFPGHRVVRAVPNTPALVGEGLTALAWGEAISSEQRLKVREMFAGVSEVLELPEDKLDAFLALTSSGPAFVALMAEAMADGAVAAGLPRDLSHRLAHRTLAGTAALLDQRQLHPATLKDMVTSPGGTTIAGVRALERAGARSALMEAVIAAAERSRELA

SEQ ID NO: 7387 - protein, 415 aa, Penicillium chrysogenum
MSLSNKLPVTDVDLKGKRVLIRVDFNVPLDENENVTNPQRIVGALPTIKYAIDNGRKAVVLMSHLGRPDGKVNPKYSLKPVVPVLEELLGKSVTFTEDCIGPQTEETVNKASDGQVILLENLRFHAEEEGSSKDAEGKKVKADKADVDRSASLTALGDVYVNDAFGTAQRAHSSMVGVDLPQKAAGFLVKKELEYFAKALESPARPFLAILGGAKVSDKIPVIDNLLPKVNSLIIIGGMALTFKKTLENVKIGNSLFDEAGSKILGEIVEKAKKHNVEIVLPVDYVTADKFSADATVGSATTQRIPDGYMGSDVGPESVKLYQKTIAEAKTILWNGPPGVFELKPSPRPTEATLDAAVKAAESGSIVIIGGGDTATVAAKYKAEDKISHVSTGGGASLELLEGKELPGVAALSSK

SEQ ID NO: 7388 - protein, 557 aa, GIBBERELLA ZEAE PH-1
MAPANTLPAWSDLQSHRDSVGKSFVLKEAFASDPQRFDKFTRTFTSGGVSSEILFDFSKNFLNDETLDLLVKLAEQAGVEKKRDAMFAGEKINFTEDRAVYHTALRNVGGWDMKVEGVDVMNTQGGVNDVLQHMKEFSEQVRSGEWKGYTGKKLTTIINIGIGGSDLGPVMVTEALKHYGADDMKLHFVSNIDGTHIAEALKESDPETTLFLIASKTFTTAETTTNANTAKKWFLEKTDNKGEIAKHFVALSTNEEEVTKFGIDSKNMFGFESWVGGRYSVWSAIGLSIALYVGFDNFHKFLSGAHAMDKHFRETPLKENIPILGGLLSVWYSDFFQAQTHLVAPFDQYLHRFPAYLQQLSMESNGKTITSDGSSAKYTTANQSGPILFGEPCTNAQHSFFQLVHQGTKLIPTDFILAAKSHNPVSDNLHQKMLASNYFAQAEALMVGKTDEQVRAEGAPEELVPHKRFLGNRPTTSILVGGAIGPAELGALIVYYEHLTFTEGAIWDINSFDQWGVELGKVLAKKILKELDEEGNGEGHDASTGGLIGAFKKYGQN

SEQ ID NO: 7389 - protein, 210 aa, Heuchera americana
  unsure (1)..(210): unsure at all Xaa locations
SVLCDAEVALIVFSNRGKLYEFCSTSNMLKTLERYQKCSYGAVEVNRPCKELESSYREYLKLKGKFEGLQRTQRNLLGEDLGPLNTKELEQLERQLDSSLKLIRSTRTQFMLDQLSDLQNKEQVLMDSNRSLARKLDEISAKNNNLRLSWEGGEQSIPYSQQQAQPQGLFQPLDCNPTLQIGYNSIGSDPDDYXQLMHRMSTGFMPSWML

SEQ ID NO: 7390 - protein, 311 aa, Actinobacillus pleuropneumoniae serovar 1 str. 4074
MSNFAMVFPGQGSQAVGMLADLATAYPIVEETFKQASDVLGYDLWDLVQNGSAEDLGQTQRTQPALLASSVAIYRVWQQKYPELKPSVMAGHSLGEYSALVCAGVLDFQDAIKLVELRGNAMQQAVPAGTGAMYAIIGLDNEAIINACEQAQAEVGEIVSAVNFNSPGQVVIAGTKAAAEKAGELCKAAGAKRALPLAVSVPSHCALMKPAADKLAEALQNITLNVPVVPVINNVDVSVETDAEAIRNALVRQLYSPVRWTETVEKMANQGVTTLYEIGSGKVLTGLAGRIVKELNAKAVNDVASLEAVSA

SEQ ID NO: 7391 - protein, 155 aa, Physcomitrella patens
MAFLAQLGGLVRQSIARNALQRHSSAAAIPAMFLVSRGMSGSKLFVGGLAWGTTDDNIKEAFSAFGEVTEVKIICDRDTGRSRGFGFVTFATDQDAEAALQALDGRDLAGRTIRVNYATKQSPQDRQSGGGMYGRRDHSGGNSGNFGGSGTWRGM

SEQ ID NO: 7392 - protein, 629 aa, Cytophaga hutchinsonii
MCGITGIFAFNQIGAFYMINLGKSIELLAHRGPDGRGTFVEELIALGHRRLSVIDTINGRQPMHDSTDRYVLTFNGEIFNYKILREQLIQEAGYTFTTDSDTEVLLNAYIHWGEACLLKLNGFFAFAIYDKQKHEIFVARDRMGVKPLLYYKDEDKFIFASEMKAVLAYNVPKEIDWVSVQQYFTLGYIPEPDSIFKDVKKLEAGSYLLINKAGVISKKYYEIPSSTQTKHQHSFEQAAAHVKELVDASVKDRLVADVPVGAFLSGGLDSSIVVASASKHVENLHTFSVGFKGADFYDETKSAELVAKTFNTSHTTFSLSQTELADNILPCLESMSEPFGDTSSLPLFVLSKKVAPSMKVILSGDGADELFGGYNKHRAEWLIKNPNWQIRFAQLIQPVVKILPGNRNTPMGDKIRQAQKLIEGLTLTDAERYYRWCSVFSEEAHKEMFQENIADNEEYKIRKGGILHAFKKNPYDLNRILYTDLNLVLGSDMLHKVDSMSMANGLEVREPMIDYRLVEYVSTLPSSYKINKNGGKQVLKHAYKDELPAEILSKAKHGFDVPLTKIFSKELKAWILDELLSQKFIEQQHVFKWSYIKNIRNAIDKNSNLDESKIWPLITFQFWWKKFMN

SEQ ID NO: 7393 - protein, 178 aa, Glycine tomentella
MASSMISSPAVTTVNRAGAGTVAPFTGLKSMAGFPTRKTNNDIASIASNGGRVQCMQVWPTTGKKKFETLSYLPDLDDAQLAKEVEYLLRKGWIPCLEFELEHGFVYRENHRSPGYYDGRYWTMWKLPVFGCTDASQVLKELQEAKTAYPNGFIRIIGFDNVRQVQCISFIAYKPPSF

SEQ ID NO: 7394 - protein, 220 aa, Oryza sativa
FAAACGAFPWDASPSCSNPSVEVSSYVNTTSYVLKEPGSNKRVRSGSCGRPTSKASREKIRRDKMNDRFLELGTTLEPGKPVKSDKAAILSDATRMVIQLRAEAKQLKDTNESLEDKIKELKAEKDELRDEKQKLKVEKETLEQQVKILTATPAYMPHPTLMPAPYPQAPLAPFHHAQGQAAGQKLMMPFVGYPGYPMWQFMPPSEVDTSKDSEACPPVA

SEQ ID NO: 7395 - protein, 178 aa, Glycine tabacina
MASSMISSPAVTTVNRAGAGTVAPFTGLKSMAGFPTRKTNNDIASIASNGGRVQCMQVWPTTGKKKFETLSYLPDLDDAQLAKEVEYLLRKGWIPCLEFELEHGFVYREHHRSPGYYDGRYWTMWKLPMFGCTDASQVLKELQEAKTAYPNAFIRIIGFDNVRQVQCISFIAYKPPSF

SEQ ID NO: 7396 - protein, 539 aa, Zea mays
MSAAQLLRHSRKLRSLQNAVGCENFSFVRHFSSGSGSFIARENGIGKRTRGTRFSQHNQPAKQLETFSAGVNGSCTWRIASNSLTPSAASWLSGSFSCGQVVSARPFSSSADLPPHQEIGMPSLSPTMTEGNIAKWLKKEGDKVSPGEVLCEVETDKATVEMECMEEGYLAKIIHGDGAKEIKVGEVIAITVEEEGDIEKFKDYKPSSSAEPVAPAEPKAEPEPSQPKVEEKKLTQAPEVKAPKIEEASQSGDRIFASPLARKLAEDNNVPLSSVKGTGPDGRILKADIEDYLAKGGLREAFAAPGLGYVDIPNAQIRKVTANRLLASKQTIPHYYLTVDARVDKLVKLRGELNPLQDASGGKKISINDLVIKAAALALRKVPQCNSSWMNDFIRQYHNVNINVAVQTEHGLFVPVIRDADKKGLGAIAEEVKQLAQKARDNSLKPADYEGGTFTVSNLGGPFGIKQFCAIINPPQSAILAIGSAEKRVIPGSADGQFEFGSFMSATLSCDHRVIDGAIGAEFLKAFKGYIENPTSMLL

SEQ ID NO: 7397 - protein, 508 aa, Oryza sativa (japonica cultivar-group)
MATGVSVENINPKVILGPSSIAECIVTNARREINRYLTFFFQHLQQQLQTQPGSLPFDEIVYCNIGNPQSLGQKPITFFREVLALCNHPNLLEREEIKSLFSTDAIARAKKILSMIPGRATGAYSHSQGIKGLRDEIAAGIASRDGFPANADDIFLTNGASPGVHMMMQLLIRNNRDGIMCPIPQYSLYSASLALHGGALVPYYLDESSGWGLEVSKLKNQLEDARSKGITVRALVVINPGNPTGQILDEQQQYELVKFCKDEELVLLADEVYQENIYVTNKKINSFKKIARSMGYNGDDLQLVSLHSVSKGYYGECGKRGGYMEVTGFSTPVREQLYKIASVNLCSNITGQILASLIMDPPKAGDASYDLYEEEKDNILKSLSRRAKAMESAFNSIDGITCNKTEGAMYLFPRIYLPQKAIEAARAVNKAPDVFYALRLLDTTGIVVTPGSGFGQIIRCYLFTCNSEFLTTQVWSFVKGCRDMAREMHDPAAGGEDTFDDLPLQGIP

SEQ ID NO: 7398 - protein, 180 aa, Musa acuminata
MVSSMMVSSAATFTRASPAQSSMVAPFTGLKSASAFPVTRKPNADLSHLPSNGGRVQCMKVWPIEGVKKFETLSYLPTMKDEALVKQIEYLLRSKWIPCLEFCPKGFVWRENHRSPGYYDGRYWTMWKLPMFGCTDAVQVAKEVEECKKEYPHAFIRIIGFDNNRQVQCISFIAYKPTGY

SEQ ID NO: 7399 - protein, 317 aa, Xylella fastidiosa 9a5c
MMPVTESAFAFVFPGQGSQSLGMLSEFAVLYPEILDTFAEASEGAGVDLWTLSQRGPEEMLSRTEYTQPALLAAGVALWRLWQARGGRAPDLLVGHSLGEYSALVAAGALSLKDGAYLVRLRGQLMQDAVPVGVGAMAAVLGAEDALVVEVCAQVAGSEIVVPANFNSPGQVVIGGHAAAVDRALVLLAERGVSKTVKLVVSVPSHTPLMRDAAHRLAEAMLGLVWKVPRIPVVQNVDGRVHDGVEAICEALVKQLYLPVQWTDCVRELVTCGVVRIAECGPGKVLMGLIRRIDKTLDVRSLATPTGFSDVLDEWGF

SEQ ID NO: 7400 - protein, 401 aa, Chlorobium tepidum TLS
MKKIGILTSGGDCGGLNAVIKGAALMALNKGLELYVIPNGYAGLYNLLNQDRLVRLDEARLDQFQASFAGSEAGHSRVKIKAISNPDKYNRIKVGMKKFDLDALIISGGDDSGSVMIDLNHNGIQCIHCPKTMDLDLQTYSVGGDSTINRIAQFVEDLKTTGRTHNRVLVTEVFGRYAGHTAFRSGVAAEADCILIPEIPVDWDVVYEHIVERFTRRIRQSDVHSGTYTIVVAEGMKNADGTDIVDESAGIDAFGHKKLAGAGKYVCQEIKKRFKTDPRMPQFMKDTGMFVEGIYEIPEVREVHPGHLVRAGHSSAYDINFGFEAGAAAVLLLLEGKTGVTISKVKGRKIEYIEASKAIEQRYVDLDQVAMYESIGTCFGRTPAAYEPILREVDGVYERIY

SEQ ID NO: 7401 - protein, 493 aa, Klebsiella pneumoniae
MSEIKTLEMPKWGLSMEEGLLARWAIQEGDDFTRGQEICEIETSKIVNVLEAPFAGTLRRILAREGETLQVGAVLALAADASVSDAELDEFVARLATAKPAAPGPEAAAPDVAAQAGAKPASVVSPPSNSPEPPVGQTVIPVSLQGVTDVTQVNATPHALRLSARWGVDLKKVAAAGAGIVSLFLIWKARSLPRGRLASPTPPVRRSKAPRSHADDSQVSATPLARRLAGKLGINLHDCRSSGSRGRVSRDDVLAAALLLDEHPQTSPVQESAPAPFESIPMSGMRRAIASRLQTSKQQSPHFRLSVDLDLERLLALRQDINREVPGVKISVNDLLVKACALALVAVPDVNIQFDEAAQSIRRFTDADISVAVALPAGLITPIVRSAERKSISDISNEIHSLVTRAKAGTLKPEEFQGGTFSLSNLGMLGVRQFDAIINPPQSAILAIGAGEVRAVVRDGQIVARQQMTVSLSCDHRVIDGAAGAAFLRNSSD

SEQ ID NO: 7402 - protein, 222 aa, Triticum aestivum
  unsure (1)..(222): unsure at all Xaa locations
RSGILRSTHASAGNECKQWLSKMWACRMMQRTDFFYESYRWQPHGCEMPEFSGPNLLSRLRHKTLAFVGDSLGRQQFQSIMCIATGGKYSPDVEDVGWKYGLVKAPGALRPDGWAYRFPETNTTILYYWXSASLSELXPLNTTNSXTSYALHLDRPVTFLKKYFHGFDVLXVLNTGHHWNXRGKSSGNHWELYANGEPVGKGRLAVLNRAKNLTLYSIARWV

SEQ ID NO: 7403 - protein, 814 aa, Escherichia coli O157:H7
MKTKIPDAVLAAEVSRRGLVKTTAIGGLAMASSALTLPFSRIAHAVDSAIPTKSGEKVIWSACTVNCGSRCPLRMHVVDGEIKYVETDNTGDDNYDGLHQVRACLRGRSMRRRVYNPDRLKYPMKRVGARGEGKFERISWEEAYDIIATNMQRLIKEYGNESIYLNYGTGTLGGTMTRSWPPGNTLVARLMNCCGGYLNHYGDYSSAQIAEGLNYTYGGWADGNSPSDIENSKLVVLFGNNPGETRMSGGGVTYYLEQARQKSNARMIIIDPRYTDTGAGREDEWIPIRPGTDAALVNGLAYVMITENLVDQAFLDKYCVGYDEKTLPASAPKNGHYKAYILGEGPDGVAKTPEWASQITGVPADKIIKLAREIGSTKPAFISQGWGPQRHANGEIATRAISMLAILTGNVGINGGNSGAREGSYSLPFVRMPTLENPIQTSISMFMWTDAIERGPEMTALRDGVRGKDKLDVPIKMIWNYAGNCLINQHSEINRTHEILQDDKKCELIVVIDCHMTSSAKYADILLPDCTASEQMDFALDASCGNMSYVIFNDQVIKPRFECKTIYEMTSELAKRLGVEQQFTEGRTQEEWMRHLYAQSREAIPELPTFEEFRKQGIFKKRDPQGHHVAYKAFREDPQANPLTTPSGKIEIYSQALADIAATWELPEGDVIDPLPIYTPGFESYQDPLNKQYPLQLTGFHYKSRVHSTYGNVDVLKAACRQEMWINPLDAQKRGIHNGDKVRIFNDRGEVHIEAKVTPRMMPGVVALGEGAWYDPDAKRVDKGGCINVLTTQRPSPLAKGNPSHTNLVQVEKV

SEQ ID NO: 7404 - protein, 349 aa, Streptococcus pyogenes SSI-1
MKAATYLSTGNLQLIDKPKPVIIKPTDAIVQLVKTTICGTDLHILGGDVPACKEGTILGHEGIGIVKEVGDAVTNFKIGDKVIISCVTSCHTCYYCKRGLSSHCEDGGWILGHLINGTQAEYVHIPHADGSLYHAPDTIDDEALVMLSDILPTSYEIGVLPSHVKPGDNVCIVGAGPVGLAALLTVQFFSPANIIMVDLSQNRLEAAKTFGATHTICSGSSEEVKTIIDDITNGRGVDISMECVGYPATFDICQKIISVGGHIANVGVHGKPVDFNLDELWIKNITLNTGLVNANTTEMLLNVLKTGKIDATRLITHHFKLSEVEKAYETFKHAGANNALKVIIDNDIS

SEQ ID NO: 7405 - protein, 487 aa, Arabidopsis thaliana
MSFRDDNEEARNDLRRPFIHTGSWYRMGSRQSSMMGSSQVIRDSSISVLACVLIVALGPIQFGFTCGYSSPTQAAITKDLGLTVSEYSVFGSLSNVGAMVGAIASGQIAEYIGRKGSLMIAAIPNIIGWLCISFAKDTSFLYMGRLLEGFGVGIISYTVPVYIAEIAPQNMRGGLGSVNQLSVTIGIMLAYLLGLFVPWRILAVLGILPCTLLIPGLFFIPESPRWLAKMGMTDEFETSLQVLRGFETDITVEVNEIKRSVASSTKRNTVRFVDLKRRRYYFPLMVGIGLLVLQQLGGINGVLFYSSTIFESAGVTSSNAATFGVGAIQVVATAISTWLVDKAGRRLLLTISSVGMTISLVIVAAAFYLKEFVSPDSDMYSWLSILSVVGVVAMVVFFSLGMGPIPWLIMSEILPVNIKGLAGSIATLANWFFSWLITMTANLLLAWSSGGTFTLYGLVCAFTVVFVTLWVPETKGKTLEELQSLFR

SEQ ID NO: 7406 - protein, 731 aa, Oryza sativa
MLETAKKFKEIFSETTTNSQEITAEANKQADLLVNQIKHLTTDLPVPSIPAIPHIPSAVTPKPDAAKLEHYGIIEDLREFVKGMTTLPTPSSRVNADNLLHATASRHRLHSVASRAVDTQLSSPGARTLSHRATPSMPSAAPARAHAHLRLTGPATNVVTDDEEERERIGEKEGCHINTMYVPHSRSDDVSVTSPDMASGPHPPTAMGPATNPGVVLCNFSPLPSTQPLAQCHVTSLRMRSTRALRASSFSPNEIFYKDMMATVCEERYSAVSDLVGCGFEEEGYPVVDYDLAYILVSKIPILCKYRNRDIKCRQNPNMKRIVNNSARESESATALLVLVLFLLPNPIHPLAAAAAAASCVACSCPETMGSLAAEKTVTGWAARDASGHLTPYNYTLRKTGPEDVVVKVLYCGICHTDIHQAKNHLGASKYPMVPGHEVVGEVVEVGPEVTKYSAGDVVGVGVIVGCCRECHPCKANVEQYCNKRIWSYNDVYTDGRPTQGGFASAMVVDQKFVVKIPAGLAPEQAAPLLCAGLTVYSPLKHFGLMSPGLRGGVLGLGGVGHMGVKVAKSMGHHVTVISSSARKRGEAMDDLGADAYLVSSDAAAMAAAGDSLDYIIDTVPVHHPLEPYLALLKLDGKLILMGVINQPLSFISPMVMLGRKAITGSFIGSMAETEEVLNFCVDKGLTSQIEVVKMDYVNQALERLERNDVRYRFVVDVAGSNIDDADAPPA

SEQ ID NO: 7407 - protein, 210 aa, Lycopersicon esculentum
AHEMSVLCDAEVALIIFSNRGKLYEFCSSSSMLKTLERYQKCNYGAPEPNISTREALEISSQQEYLKLKGRYEALQRSQRNLLGEDLGPLNSKELESLERQLDMSLKQIRSTRTQLMLDQLTDYQRKEHALNEANRTLKQRLMEGSQLNLQWQPNAQDVGYGRQTTQTQGDGFFHPLDCEPTLQIGYQNDPITVGGAGPSVNNYMAGWLP

SEQ ID NO: 7408 - protein, 338 aa, Bradyrhizobium japonicum USDA 110
MAGLLRRAAVVAAPAGLMSIVAAPAQAAGSEINTADTAWMIVATALVLMMTIPGLALFYSGMVRKKNVLATMAQSLAAVTMISILWVAFGYSLCFVGDGPWIGTLDRWFLAGMTLDSVNPAAKTIPESLFMLYQMTFAIITVALVAGSVADRMRFSAYLLFSVAWFIFVYIPLAHWVWGGGFLASMGVLDFAGGLVVHLSAGTAGPRRRQGDGAPPRLRHRKSLAVRSVARRDGHWPVVGRLVRLQRRFGRRGQFARGAGDHRDPSGGLLRRADLGRNRMVNAAQAFRARHDLRRGRWPRHHHAGFGLRRAVAWHRHRHHRRGGLLLGLHLAEAPLRL

SEQ ID NO: 7409 - protein, 223 aa, Bradyrhizobium japonicum USDA 110
MMGRRHGYGTENLSPFDLSLAVMGTGLLWVGWFGFNGGSAGAANSRAVLAIIATHLAACSGALTWGAIEWSTRRKPSVLGMISGAVAGLGTITPASGFVAPWHGIVIGIIAGAVCYWACTWLKHRFDYDDSLDVFGVHGIGGLTGTLLAGVFATSAIGGTAGLLEGHPRQLLIQLYGVAVTFVWAAGVSFILLKLVGLFVPLRVSREHELEGLDISQHGEALQ

SEQ ID NO: 7410 - protein, 264 aa, Deinococcus radiodurans R1
MQLAIVGVGKLGLSLLTGVIARGVIAPQDIGIIEANAARAQDIAAQTGVQVITPPQLAQVGRIVVSVQPRVFPEVAPWLAQENAGYISTMAGVSAGTIGRRLGTRRVVRVMPNLAATIGRSQTAITGPREAHEAGDIAFAEQLFGAVGQVYELPEHLFNAFTGMSASGPAYVAVVAEALADGGVRMGLPRPLANELAARLLASTGELLLERAHPGLLKDEVASPGGTTIAGLEELEAAGVRGGVMRAVVAATRRGTELGKDQED

SEQ ID NO: 7411 - protein, 214 aa, Michelia figo
  unsure (1)..(214): unsure at all Xaa locations
RPCAEMSMLCDAEVALIVFSSRGKLYEFGSAGVNKTLERYQRCCYTFQDANITDRDTQGWYQEVSKLKAKCDSLQRSQRHLLGEDLGPLSVKELQKLERQLESALTQTRQRKTQIMLEHMEALREKERQLGDINKELKNKLEAKGQGAFRAMQASWESGPLVGNNGFPMHPSQSAAIECEPTLQIGYHSFAAPEASIPRTVVAESNFMPXGMLC

SEQ ID NO: 7412 - protein, 450 aa, Zea mays
MKTEASHKAIAAGGGKMTVLHSPVGVRSIVTSLVAFFILASSIVFLLDRGQEEQVQVAVEHGRQEVQVKLESGLQEPAIRGTTQEGDASNEECNWSRGRWVYDNVSRPLYSGLKCSFIFPEVACDKYGRKDAMYQHWRWQPHGHGCDLPRFDAIKLLENLRNKRMVFVGDSVNRNQWVSLVCMVEASIPDDRLKIRTFNGSLISFKALEYNATIDFYWSPLLVESNSDNPIIHRVEYRIIRADRIEKHASVWRDADIIVFNSYLWWRKQKDDMRMKVMYGSFEDGDAKLDEMEMADGFEIAIKKLTEWLAENIDKNKTRIFFAGSSPTHSWASNWGGEDKNKCLNETEPIYRPGGYKAATTDYSLMAKARSYFRRTLEPRGIRVQILNITELSDYRKDGHPTVFRRQFVPLTKEQIADPASYADCTHWCLPGVPDVWNEFLYGYLVQQRK

SEQ ID NO: 7413 - protein, 521 aa, Rhodococcus sp. YK2
MTLSSLGDEYLATVPTGRSVTPHWESGAEFRDEIFVGGLWRRGTGSLIESVDPSSGKIFATLHGAVEADVDDAVDTGLCAVRQSGWADRLPHERAAVLHRIGALIDAEVEQIATLQTIDTGKTLSETRALARSAAATFRYVAAAVETMEGAVTPSRGSYLTMSTHEPMGVIGSITPWNSPIASDAQKIAPALGAGNAVVAKPPVWAPWVTLLLARICERAGLPAGVLSVLPGPGRTVGDAIVRHPGIAKVTFTGGTDTGRALAHVAAEKLMPITLELGGKSPTIVFEDADLDQAVAGIMFGVFSSSGQSCIAGSRVFVQRSIFDEFVNRLVTATNALELGPGTDPRTQVAPMVAFSHRDNVSAMVDEAVLQGAKVLCGGMIPDEPRLADGAYYLPTILSVTDNSAPICQQEIFGPVAIVLPFDNESDLVDQANDTVFGLACGLWTTDFPRAWRIAKAISAGTVWVNTYKQFSISTPFSGLKDSGLGTEKGRDGIRSYMNQKSIYIDTAGQPLPWARTADNR

SEQ ID NO: 7414 - protein, 492 aa, Glycine max
MDPYKHRPSSAFNSPFWTTNSGAPIWNNNSSLTVGARGPILLEDYHLVEKLANFDRERIPERVVHARGASAKGFFEVTHDISHLTCADFLRAPGVQTPVIVRFSTVIHERGSPETLRDPRGFAVKFYTREGNFDLVGNNLPVFFVRDGMKFPDMVHALKPNPKNHIQENWRILDFFSHFPESLHMFTFLFDDLGVPQDYRHMDGFGVNTYTLINKAGKAVYVKFHWKTTSGIKCLLEEEAIKVGGANHSHATQDLHDSIAAGNYPEWKLFVQTIDPEHEDKFDFDPLDVTKTWPEDIIPLQPVGRLVLNKNIDNFFAENEQLAFCPAIVVPGVYYSDDKMLQTRIFSYADSQRHRLGPNYLQLPANAPKCAHHNNHHEGFMNFIHRDEEVNYFPSRYDPVRHAERFPIPPAICSGRREKCGIEKENNFKQPGERYRSWAPDRQDRFARRWVDALSDPRVTHEIRSVWISYWSQADRSLGQKIASHLSTRPNI

SEQ ID NO: 7415 - protein, 434 aa, Buchnera aphidicola str. APS (Acyrthosiphon pisum) [sequence omitted]

SEQ ID NO: 7416 - protein, 538 aa, Rubrobacter xylanophilus DSM 9941
MLVKAQIGMVMNLDKCIGCHTCSVTCKTTWTNRDGAEYMWFNDVETKPGVGYPKEWENQEKWRGGWELRDGRLRLKAGGKLRKLASIFYNPDLPAIEDYYEPWTYDYDTLTSSRPSRHQPVARPHSTLSGDPLDLEWGPNWEDDLAGAPETAPRDPNITEDLQERIRMEYEKVFMMYLPRICEHCLNPSCVASCPSGAMYKRDEDGIVLVDQEQCRGWRYCVSGCPYKKVYFNHNTGKAEKCTLCYPRIENGEPTICSETCVGRIRYIGLLLYDADRVEEVASTPDEKDLLEAQRSIFLDPNDPEVAEQARFDGVPDDWIEAARRSPLYRLVIDWGVALPLHPEYRTLPMVWYIPPLSPVMGLVEDGEPDPDKVFPAIDEMRIPARYLANMLTAGDEEEIRRVLRRLAAMRAYMRELDVAGEEDPELAREAGMSHPEILEMYRLLAIADYDERYVIPKAHREVAARLDAQQGACGLDFAGGPGGCGAVGASSGRNEAFYSMKEELERRASALGGAPTPVRLFRSRADFEAFHLRAGEA

SEQ ID NO: 7417 - protein, 522 aa, Arabidopsis thaliana
MVVSADCRISLSAPSCIRSSSTGLTRHIKLGSFCNGELMGKKLNLSQLPNIRLRSSTNFSQKRILMSLNSVAGESKVQELETEKRDPRTVASIILGGGAGTRLFPLTKRRAKPAVPIGGAYRLIDVPMSNCINSGINKVYILTQYNSASLNRHLARAYNSNGLGFGDGYVEVLAATQTPGESGKRWFQGTADAVRRFHWLFEDARSKDIEDVLILSGDHLYRMDYMDFIQDHRQSGADISISCIPIDDRRASDFGLMKIDDKGRVISFSEKPKGDDLKAMAVDTTILGLSKEEAEKKPYIASMGVYVFKKEILLNLLRWRFPTANDFGSEIIPFSAKEFYVNAYLFNDYWEDIGTIRSFFEANLALTEHPGAFSFYDAAKPIYTSRRNLPPSKIDNSKLIDSIISHGSFLTNCLIEHSIVGIRSRVGSNVQLKDTVMLGADYYETEAEVAALLAEGNVPIGIGENTKIQECIIDKNARVGKNVIIANSEGIQEADRSSDGFYIRSGITVILKNSVIKDGVVI

SEQ ID NO: 7418 - protein, 231 aa, Streptococcus pyogenes SSI-1
MTKPIIGITANQRLNMALDNLPWSYAPTGFVQAVTQSGGLPLLLPIGDEAAAKTYVSMVDKIILIGGQNVDPKYYQEEKAAFDDDFSPERDTFELAIIKEAITLKKPILGICRGTQLMNVALGGNLNQHIDSHWQEAPSDFLSHEMIIEPDSILYPIYGHKTLINSFHRQSLKTVAKDLKVIARDPRDGTIEAVISTNDAIPFLGVQWHPELLQGVRDEDLQLFRLFVNDF

SEQ ID NO: 7419 - protein, 513 aa, Arabidopsis thaliana
PVRKFPGRPTRPVRRVWVGKNTLLSTPAVSAVIRERSGADGSKATGAFILTASHNPGGPTEDFGIKYNMENGGPAPESITDKIYENTKTIKEYPIAQDLPNVDISAVGVTSFEGPEGKFDVEVFDSADDYVKLMKSIFDFEAIRKLLSSPKFTFCYDALHGVAGAYAHRIFVEELGAQESALLNCTPKEDFGGGHPDPNLTYAKELVARMGLGKSDTGGEPPEFGAAADGDADRNMILGKRFFVTPSDSVAIIAANAIGAIPYFSSGLKGVARSMPTSAALDVVAKSLNLKFFEVPTGWKFFGNLMDAGMCSVCGEESFGTGSDHIREKDGIWAVLAWMSILAHKNKGNIDGNAKLVSVEDIVRQHWATYGRHYYTRYDYENVDAGKAKELMEHLVKLQSSIPEVNKIVKGIRSDVASVASADEFEYKDPVDGSISKHQGIRYLFEDGSRLVFRLSGTGSEGATIRLYIEQYEKDASKTGRESQEALSPLVDLALKLSKMEEFTGRSAPTVIT

SEQ ID NO: 7420 - protein, 442 aa, Magnaporthe grisea 70-15
MLTRSPAAPHPRSSNASPSFHHTFHYAPASAATASAAPAPSPPSRLSVPVPLLAKPRRPSLSSSPSPSLPASGPLSRSTDAPSPAASPAAAPKRYVAVDAGTQYSPMEPINYLATLHARQNLHVIPDEPPPTPGPKPMTPGVEQGAAAAAAAASASAHQPPPSASSGPVPNMAVTPVEPKAVTSPAIKRRNSQAVASNSGDAATQAQNIPQKRAKPTRPPPKVLPQRYELCQVEDIVVLIAHMLGELIETNDALALKSGHLTRFHSRTAPGISVLEYLHRLAKHATLSPPLLLSMVYYIDRLCALYPDFTINTLTVHRFLITAATVAAKGLSDLFWNNTTYARVGGVRVAELKLLELEFLYRVDWKIVPNPDVLVAYYKGLVERCPGYVIQGDEGEQQPGAQADDEIEDYDDELDDDDEEEEDEVADDDEASSEDDSAKNGR

SEQ ID NO: 7421 - protein, 214 aa, SYNECHOCOCCUS SP. WH 8102
MSIFVGNLPFRAEQEDVIELFAQFGEVANCALPLERDTGRKRGFAFVEMADEAVEDAAIEGLQGAELMGRPLRINKAEPRGSAPRGGGGGYRGGGGGYGGGGGYGGGGGRDGGGGYGGGGGGYRGGGGGYGGGGGGGRDGGGGYGGGGGGYRGGGDAGDRPSGARGWEDRSYGARDSGGEGGGGHDDGRSRRRRGSSGGGGGGDDYSGYGGAEG

SEQ ID NO: 7422 - protein, 510 aa, Bradyrhizobium japonicum USDA 110
MRFVSAPARPMPRPFDFALNLIQSGVNNMTFKRPYGAGLAALAVGLFAATAAYAEPTVNKGDNAWMLTSTVLVLLMTIPGLALFYGGLVRSKNMLSVLMQVFYTVCVVTVIWAVYGYSLAFTGGSDFIGGFSKAFMMGVTTDSKAATFSVDANISELIYMCFQMTFAAITPALIVGAFAERMKFSAIALFIPLWVTLIYFPIAHMVWYWPGPDAIQDAAKALAAATDAAAKTAAQAKLDEINADAGWIFKKGAIDFAGGTVVHINAGIAGLVGALLIGKRTGYGKELMAPHSLTMSMIGASLLWVGWFGFNAGSNLEANGGAALAMTNSFVATAAAALSWMFAEWIVKGHPSVLGVISGAVAGLVAVTPAAGFSGVMGAIVLGLVVGVVCLFFCTVVKNAIGYDDSLDVFGVHCIGGIVGALGTGILVNPALGGAGIIDYTAIPPKVADYDFAAQMVSQFWGVCTTLVWSGIGSAILYKVVDVIVGLRANVESEREGLDITEHTERAYNM

SEQ ID NO: 7423 - protein, 306 aa, Bradyrhizobium japonicum USDA 110
MLALLCGGQGTLSDKIFDLAAGQPAAEPVFVAATAHLGEDPREFVRTHSADELSANHVSQILTVTSALAIHACIADLLTEPAAVTGYSVGEMTAWSIAGIWTADEALRLTAVRARLMDSVAGPDGRLGYVRGLDPAALERLLGKHRCEIAIRNPDRLVVVGGAEQDVIDLCEEAIRQGATRTGLLAVRIASHTRQLEQACRPLQLALDASTRSAIASQRVLLAGGDGERIFSASNATAKLARQVARPIDWSATLEALAELGVSRVLDLGPGHALAEMMQAFLPSIRCYAADGFRTVDGLRNWIAAE

SEQ ID NO: 7424 - protein, 148 aa, Oryza sativa
QRQTRRLAELLTEANLLPVLRSLLEINITAPLTPLRTSLLEGIAGVLIRFTVPWDKKLQSLAVGHGVVPCLVKLLSEGSIKAKSKAATSLAQLSQNSLALRKTKLPRWLCVAPSAETYCLVHNSQCTVKSTFCLVEAGAVSPLIQNLE

SEQ ID NO: 7425 - protein, 206 aa, Michelia figo
  unsure (1)..(206): unsure at all Xaa locations
VQLKRMENKINRQVTFSKRRNGLLKKAYELSVLCDAEVALIIFSSRGKLYEFGSAGTNKTLERYQRCCYTPQDVVVSDRETQGWYQEVSKLKAKYESLQRSQRHLLXEDLGPLSVKELQHLERQLEVALSQARQRKTQIMIEQMEELRKKERQLGDINKQLKIKLEAEGQGPFRCIQGSWESGAMVGNNTFSMNAPQAAPLDAXSP

SEQ ID NO: 7426 - protein, 239 aa, Phytolacca americana
  unsure (1)..(239): unsure at all Xaa locations
VQLRRMENKINRQVTFSKRRSGLVKKAHEISVLCDAELALIIFSPRGKLFEYSTDSSMEKILERYERYFYAERQLASNDPNTEVNWTFDFAKLKAKLELLQRNHRHYLGQDLDSLNIKDLQSLEQQLDNALKHIRTRKNQLMHESISELHKKEKAMQEQNNMLVKKIKEREKAMAEAQGMQWQRQQNEPPEASNFLLPPPLTSWNTAGDAYHGQIAGEVKRNDLDLTLEPVYSCXXGCF

SEQ ID NO: 7427 - protein, 420 aa, Staphylococcus aureus
MIKIPRGTQDILPEDSKKWRYIENQLDELMTFYNYKEIRTPIFESTDLFARGVGDSTDVVQKEMYTFKDKGDRSITLRPEGTAAVVRSYIEHKMQGNPNQPIKLYYNGPMFRYERKQKGRYRQFNQFGVEAIGAENPSVDAEVLAMVMHIYQSFGLKHLKLVINSVGDMASRKEYNEALVKHFEPVIHEFCSDCQSRLHTDPMRILDCKVDRDKEAIKTAPRITDFLNEESKAYYEQVKAYLDDLGIPYTEDPNLVRGLDYYTHTAFELMMDNPNYDGAITTLCGGGRYNGLLELLDGPSETGIGFALSIERLLLALEEEGIELDIEENLDLFIVTMGDQADRYAVKLLNHLRHNGIKADKDYLQRKIKGQMKQADRLGAKFTIVIGDQELENNKIDVKNMTTGESETIELDALVEYFKK

SEQ ID NO: 7428 - protein, 367 aa, Zea mays
  unsure (1)..(367): unsure at all Xaa locations
SIQVHAIVPIPGGSVVKDIVLSRDGQYLLTNSNDRVIRVYRNILPVKGSREEIRNISSNSNEYGSHYDKLKANGTSCLILSCELLDAITKIQWKAPCFSGNGEWIVGASANKGEHRLQIWNQAGRLVKMLEGPKEALIDLAWHPVEPTIATVSVTGFVYIWAKEHVENWSAFAPDFVELEENEEYAEREDEFDLNPREEQAEKVVIDEDADVDIETSEKNTVFSDVEDSVDEISYLPAIPYPDSPDEQPEKCLGSSKLEDSNHSGSPSSMDAVQNGQAIPPASSPMEVDNSTAEDPEEGPNSKRKRRXLSVKGLELQQSEKGKKGSTKNKSLGKSTKSSAKKMESANGNSSAFDDEATEDDEINIDS

SEQ ID NO: 7429 - protein, 344 aa, Pseudomonas aeruginosa UCBPP-PA14
MTMTLPQTMKAAVVHAYGAPLRIEEVKVPLPGPGQVLVKIEASGVCHTDLHAAEGDWPVKPPLPFIPGHEGVGYVAAVGSGVTRVKEGDRVGIPWLYTACGCCEHCLTGWETLCESQQNTGYSVNGGYAEYVLADPNYVGILPKNVEFAEIAPILCAGVTVYKGLKQTNARPGQWVAISGIGGLGHVAVQYARAMGLHVAAIDIDDAKLELARKLGASLTVNARQEDPVEALQRDIGGAHGVLVTAVSNSAFGQAIGMARRGGTIALVGLPPGDFPTPIFDVVLKGLHIAGSIVGTRADLQEALDFAGEGLVKATIHPGKLDDINQILDQMRAGQIEGRIVLEM

SEQ ID NO: 7430 - protein, 331 aa, Oryza sativa
MALSISTPPTSSSLLPASLQVGRWSSSAAMSARPVAFSLRRPVLAARVAAGGNAPSSSVDEVVTELDAVASFSEIVPDTVVFDDFEKFAPTAATVSSSLLLGIAGLPDTKFKSAIDTALADGECNTMEKPEDRMSCFLTKVCILHFSFNVHELLKLYSDHDVLSERLLFKIPATWQGIEASRLLESEGIQTHLTFVYSFAQAAAAAQAGASVVQIFVGRVRDWARTHSGDPEIDEALKKGEDAGLALILQSLEESVTDTDVKYGYVPRLTPALGKTYNFTEEELVKWDQLSLAAAMGPAAEELLASGLEGYVNQARRVEELFGKIWPPPNV

SEQ ID NO: 7431 - protein, 627 aa, Lotus japonicus
MPAWWNRKPWKNKQEHDDDEDGEYEAEEVEEAPRSGLQFNFMKSPISSARSSDKKKKKKIKDKKKPKSFDEVLYRNSPRTSKDCDGGAAAMEKKGLPLPRPTTPCDQASISGSSLSSSASASFDDHSISPHFNANRGQEEVKFNVRPKSPCSRGPTSPTSPLHQRLHALSLDSPTGGKQDEGTSQCHPLPLPPGSPTSPSAPCNTRANGVLENNTCNLSKWKKGKLLGRGTFGHVYLGFNSENGQMCAIKEVKVFSDDKTSKECLKQLNQEINLLNQFSHPNIVQYYGSELGEESLSVYLEYVSGGSIHKLLQEYGAFKEPVIQNYTRQIVSGLAYLHSRNTVHRDIKGANILVDPNGEIKLADFGMSKHINSAASMLSFKGSPYWMAPEVVMNTNGYGLPVDISSLGCTILEMATSKPPWSQFEGVAAIFKIGNSKDMPEIPEHLSDDAKNFIKQCLQRDPLARPTAQSLLNHPFIRDQSATKVANASITRDAFPYMSDGSRTPPVLEPHSNRSSITTLDVDYATKPALAAVRTLRNPRDSTRTITSLPVSPSSSPLRQHRPTHNSPFFSPPHPSYAMMGQSSYTSNNMHKNPARSNATLTLDPWLETSRYKAHTPPGGSPRMRFI

SEQ ID NO: 7432 - protein, 461 aa, Zea mays
MAPANVRAAQAQAQAPSADRRLSTLVGHLLPSSPRRAAADTSATSTLESFPTMASQGSSVFAALEQAPEDPILGVTVAYNKDPSPMKVNLGVGAYRTEEGKPLVLNVVRRAEQMLINNPSRVKEYLPITGLAEFNKLSAKLIFGADSPAIQENRVATVQCLSGTGSLRVGGEFLARHYHERTIYIPQPTWGNHPKVFTLSGLNVRSYRYYDPATCSLHFEGLMEDLGSAPSGSIVLLHACAHNPTGVDPTIEQWEQIRQLMRSKSLLPFFDSAYQGFASGSLDKDAQSVRMFVADGGELLMAQSYAKNMGLYGERVGALSIVCRSADVAVRVESQLKLVIRPMYSNPPLHGASIVATILRDSEMFNEWTLELKAMADRIINMRQQLFNALKSRGTPGDWSHIIKQIGMFTFTGLNSEQVAFMRQEYHIYMTSDGRISMAGLSMRTVPHLADAIHAAVTQLK

SEQ ID NO: 7433 - protein, 569 aa, Buchnera aphidicola str. APS (Acyrthosiphon pisum)
MNKKFKKIVTEKKLTDAERIKENSNYLRGTITDDLKNEITNGFTGDNFSLIRFHGMYQQDDRDLRIERNEQKLEPRYAMMLRCRLPGGVIKAKKWLKIDYFASKYTLYGTIRLTNRQTFQFHGILKKNLKDVHKMLHSIGLDSLATANDVNRNVLCTSNPMESLIHQEAYEWARKISNFLLPHTKAYAEIWLDQKKIVTTEKEPILGKTYLPRKFKTTVVIPPYNDVDLYANDMNFVAITKNEKIIGFNILIGGGLSFIHGNKNTWPFLATEIGYISVENTLSIAKAIVTTQRDWGNRTDRANAKTRYTINNFGLNEFKKEIEKRANVNLKPVREYSFISRGDRFGWIKDINNNWSLTLFIQNGRIYDDNDKLFKSGLLKIANIHDGNFRITSNQNIIISEVSEKNKNKIEKIALSSGLINKSTNLRKNSMACVSFPTCPLAMAEAERMLSFFITQLENIMLKYGVEDEVIILRVSGCPNGCGRSLLAEIGLIGKSIGRYNLYIGGNRIGNRIPKIYKENITEQEILIHLKYLIKTWSNERKNKEDFGDFIVRKEFVKEVINPVYDFWS

SEQ ID NO: 7434 - protein, 379 aa, Gossypium hirsutum
MSTAGQVIRCKAAVAWESGKPLSIEEVEVAPPQKDEVRIKILFTSLCHTDVYFWDAKGQNPLFPRILGHEAGGIVESVGEGVTDLKPGDHVLPIFTGECKECPHCLSEESNMCDLLRINTDRGEMINDGKSRFSINGKPIYHFLGTSTFSEYTVVHVGQVAKINPEAPLDKVCVLSCGMSTGFGATVNVAKPKKGQSVAIFGLGAVGLAAAEGARVSGASRIIGVDLNPSRFELAKNFGVTEFVNPKDHKKPVQEVIAEMTGGGVDRSVECTGSIQAMISAFECVHDGWGVAVLVGVPNKDDAFKTHPVNLLNERTLKGTFFGNYKPRTDIPAVVERYMNKELELDKFITHSVPFSEINKAFEYMLAGEGLRCVIRMVA

SEQ ID NO: 7435 - protein, 379 aa, Gossypium hirsutum
MSTAGQVIRCKAAVAWESGKPLSIEEVEVAPPQKDEVRIKILFTSLCHTDVYFWDAKGQNPLFPRILGHEAGGIVESVGEGVTDLKPGDHVLPIFTGECKECPHCLSEESNMCDLLRINTDRVGMINDGKSRFSINGKPIYHFLGTSTFSEYTVVHVGQVAKINPHAPLDKVCVLSCGMSTGFGATVNVAKPKKGQSVAIFGLGAVGLAAAEGARVSGASRIIGIDLNPSRFEQAKKFGVTEFVNPKDYNKPVQEVIVEMTGGGVDRTVQCTGSIQAMISAFECVHDGWGVAVLVGVPNKDDAFKTHPVNLLNERTLKGTFFGNYKPRSDIPAVVEKYMNKELELDKFITHTVPFSEINKAFELMLAGEGLRCCIRMDA

SEQ ID NO: 7436 - protein, 573 aa, Xanthomonas oryzae pv. oryzae
MPNPVMSHSVEDIKSESRRLRGSLEQSLADAVTGALREDDQTLIKYHGSYQQDDRDIRDERRQQKLEPAYQFMIRTRTPGGVITPAQWLALDGIATRYANHSLRITTRQAFQFHGVIKRELKATMQAINATLIDTLAACGDVNRNVQVAANPLLSQAHATLYADAACVSEHLLPNTRAYYEIWLDEERVSGSGNEDEPIYGDRYLPRKFKIGFAAPPLNDVDVFANDLGFIAILRDGRLLGYNVSIGGGMGASHGDAQTWPRVANVIGFVTRDQLLDIATAVVTTQRDFGNRAVRKRARFKYTIDDHGLDTIVAEIARRAGFALQPAQPFAFEHNGDRYGWVEGEDGLWHLTLSLPAGRIADTDTATHLSGLRAIAQLNVGEFRMTPNQNLVIAGVPASERARVDALVAQYALDAGNRSASALARGAMACVALPTCGLAMAEAERYLPDFSAALQPLLQQHGLADTPIVLRLSGCPNGCSRPYLAEIALVGKAPGRYNLMLGGDRRGQRLNTLYRENITEPEILAALEPLLARYAAERDHANDEGFGDFLHRAGLIALPSYPTHRRLDLELLA

SEQ ID NO: 7437 - protein, 514 aa, Salmonella typhi
MSVSKKPMVLVILDGYGYREEQQDNAILNAKTPVMDALWAKRPHTLIDASGLEVGLPDRQMGNSEVGHVNLGAGRIVYQDLTRLDVEIKERTFFANPVLTNAVDQAKNAGKAVHIMGLLSAGGVHSHEDHIMAMVELAAERGAEKIYLHAFLDGRDTPPRSAEASLKKFEDKFAALGKGRVASIVGRYYAMDRDNRWDRVEKAYDLMTLAQGEFQADTAVAGLQAAYARDENDEFVKATVIRAEGQADAAMEDGDTLIFMNFRADRAREITRAFVNADFDGFARKKVVNLNFVMLTEYAADIKTAVAYPPASLANTFGEWMAKNDKTQLRISETEKYAHVTFFFNGGVEEPFAGEERILINSPKVATYDLQPEMSSAELTEKLVAAIESGKYDTIICNYPNGDMVGHTGVMEAAIKAVEALDNCIEQVTKAVESVGGQLLITADHGNAEQMRDPATGQEHTAHTNLPVPLIYVGEKNVKAVEGGKLSDIAPTMLSLMGMEIPQEMTGKPLFIVE

SEQ ID NO: 7438 - protein, 340 aa, Acinetobacter sp. ADP1
MTTNVIHAYAAMQAGEALVPYSFDAGELQPHQVEVKVEYCGLCHSDVSVLNNEWHSSVYPVVAGHEVIGTITQLGSEAKGLKIGQRVGIGWTAESCQACDQCISGQQVLCTGENTATIIGHAGGFADKVRAGWQWVIPLPDELDPTSAGPLLCGGITVFDPILKHQIQAIHHVAVIGIGGLGHMAIKLLKAWGCEITAFSSNPNKTDELKAMGADHVVNSRDDAEIKSQQGKFDLLLSTVNVPLNWNAYLNTLAPNGTFHFLGVVMEPIPVPVGALLGGAKSLTASPTGSPAALRKLLEFAARKNIAPQIEMYPMSELNEAIERLHSGQARYRIVLKADF

SEQ ID NO: 7439 - protein, 971 aa, Candida albicans
MTSIYTSDLKNHRRAPPPPNGAAGSGSGSGSGSGSGSGSLANIVTSSNSLGVTANQTKPIQLNINSSKRQSGWVHVKDDGIFTSFRWNKRFMVINDKTLNFYKQEPYSSDGNSNSNTPDLSFPLYLINNINLKPNSGYSKTSQSFEIVPKNNNKSILISVKTNNDYLDWLDAFTTKCPLVQIGENNSGVSSSHPHLQIQHLTNGSLNGNSSSSPTSGLLSSSVLTGGNSGVSGPINFTHKVHVGFDPASGNFTGLPDTWKSLLQHSKITNEDWKKDPVAVIEVLEFYSDINGGNSAAGTPIGSPMINSKTNNNNNDPNNYSSTKNNVQEANLQEWVKPPAKSTVSQFKPSRAAPKPPTPYHLTQLNGSSHQHTSSSGSLPSSGNNNNNNSTNNNNTKNVSPLNNLMNKSELIPARRAPPPPTSGTSSDTYSNKNHQDRSGYEQQRQQRTDSSQQQQQQKQHQYQQKSQQQQQQPQQPLSSHQGGTSHIPKQVPPTLPSSGPPTQAASGKSMPSKIHPDLKIQQGTNNYIKSSGTDANQVDGDAKQFIKPFNLQSKKSQQQLASKQPSPPSSQQQQQKPMTSHGLMGTSHSVTKPLNPVNDPIKPLNLKSSKSKEALNETSGVSKTPSPTDKSNKPTAPASGPAVTKTAKQLKKERERLNDLQIIAKLKTVVNNQDPKPLFRIVEKAGQGASGNVYLAEMIKDNNRKIAIKQMDLDAQPRKELIINEILVMKDSQHKNIVNFLDSYLIGDNELWVIMEYMQGGSLTEIIENNDFKLNEKQIATICFETLKGLQHLHKKHIIHRDIKSDNVLLDAYGNVKITDFGFCAKLTDQRNKRATMVGTPYWMAPEVVKQKEYDEKVDVWSLGIMTIEMIEGEPPYLNEEPLKALYLIATNGTPKLKKPELLSNSIKKFLSICLCVDVRYRASTDELLEHSFIQHKSGKIEELAPLLEWKKQQQKHQQHKQETSDTGFA

SEQ ID NO: 7440 - protein, 268 aa, Acinetobacter sp. ADP1
MMIVPKFGLGTFRLNDQIVIDSVKTALDVGYRAIDTAQIYDNEAQVGQAIQESGIARDQLFLTTKIWVDHLNSEQLIPSLKQSLQKLRTDAVNLTLIHWPAPQKGIDIAAVMQLLLQAKQQGLTEHIGISNFNIAQTKTAIESIGQSHIATNQIELSPYLQNRTLVDFLKAQQIDVTSYMTLAYGKVLHDPVLQDIASEHQASTAQIALAWALQSGYAVIPSSTKREHLISNLKAQEIQLSQQDMQLIAALERNGREVDPAELAPEWD

SEQ ID NO: 7441 - protein, 210 aa, Oryza sativa
MAATIQSVKARQIFDSRGNPTVEVDICCSDGTFARAAVPSGASTGVYEALELRDGGSDYLGKGVLKAVDNVNSIIGPALIGKDPTEQTVIDNFMVQQLDGTKNEWGWCKQKLGANAILAVSLALCKAGAIIKKIPLYQHIANLAGNKQLVLPVPAFNVINGGSHAGNKLAMQEFMILPTGASSFKEAMKMGVEVYHNLKSVIIWARCYLL

SEQ ID NO: 7442 - protein, 153 aa, Mesorhizobium sp. BNC1
MIFRAFLLVLCLLGFSGIAVAVQPDEILVDPALEARARQLSAELRCMVCQNQSIDDSDAELARDLRVLVRERLKAGDTNEEVLNYIVSRYGEFVLLKPRFNARNAILWAAPVLILVGGSALAFSVLRRRGNTVPAPLSTEEEAALRDILKDES

SEQ ID NO: 7443 - protein, 430 aa, Deinococcus radiodurans R1
MVGRPAGVGVEWASMSKHIKVPEQGEKITMQNGKLTVPNRPIIPFVEGDGTGPDIWAASVRVFDAAVEKAYGSERKLEWMEVYAGEKSLEVYGANEWLPQETLTAFRDYLFGIKGPLTTPVGTGIRSINVALRQELDLYACVRPVQYFNGVPSPVKRPEDIDMVIFRENTEDIYAGIEWKAGTDEAEKVRGFLMREMNVTKIRFPDTSSFGVKPVSKEGTERLVRAAIEYAIENGRKSVSLVHKGNIMKFTEGGFRDWGYELAKREFGAVEIDGGPWCQLPNGIVIKDVIADNFLQQILLRPTEYDVIATLNLNGDYISDALAAQVGGIGIAPGANINYVTGHAIFEATHGTAPKYAGKNVINPSSVILSGEMMLRYMGWTEAADLILKGLDATIQQRVVTYDFARGMDDATEVKTSEFADKIIENMRNA

SEQ ID NO: 7444 - protein, 226 aa, Phytolacca americana
GLVKKAHEISILCDADVALIVFSTKGKLFQYATGSCMEKILERYERYSYAERQLITPDPESHLSWTLEHAKLKARVEILQKNQRNYMGEELDTLSLKELQTLEHQLDSALKQIRSKKNQLMYESISQLQKKDKALQEQNKSLSKEVKEKEKEKEKTMTQQAQWDNQNQDINSSSCLMSDQALPSLNIGMNYQTESGSSSVENEAIQQQNRNNTTIALMPHWMLSHL

SEQ ID NO: 7445 - protein, 448 aa, Sphingomonas paucimobilis
MLTYDYDLFVIGAGSGGVRAARVSAAYGARVAVAEEHRVGGTCVIRGCVPKKLLVYGSHFAEDLQDARRFGWKVPDCEFDWSALRDNVLAEVSRLEGLYTETLGNNKVEIIRERATVAGPHEVLLGSGQTITAGKILIATGAWPIVPHFPGAEHGITSNEVFHLDTFPKRVVIAGAGYIANEFAGIFHQFGAHVTLVNRTDVILRGYDEQIRDRLLQISMTKGIEFKFHVAFEKVDKQPDGSLLVHMTGHEPIPADMLLFATGRRPHTENLGLETADVALDAKGAIKVDDDNRSSCASIYAVGDVTNRVQLTPVAIREGQAFADTVFGNNPRRVDYGCIPSAVFSHPPMAGVGMTEAEARNKLGEVKVYTSDFRAMKNVLADRHERALYKLVVHPETDVVVGIHMIGPDAPEILQAAAIAVKARLTKAQFDDTVALHPSMAEELVLMR

SEQ ID NO: 7446 - protein, 234 aa, Pachysandra terminalis
  unsure (1)..(234): unsure at all Xaa locations
VQLRRMENKINRQVTFSKRRTGLLKKAHEISVLCDAEVALIVFSTKGKLSQYSSNSSMETILDRYERYSYAERKLMAGDHLDSQGSWPLEYTKLKSKIEVLQRNQRHFMGEELDSLSLKELQYMEHQLDTSLKHIRSRKNQLMNDSIYDLQKKEKALQEQNSTLIKKLKEKEKAPAHQACWEQQGQNLPSFLLSQPLPSLNIGXNYXLARXSRDEEEGAQSHARTNPIMPPWML

SEQ ID NO: 7447 - protein, 259 aa, Zea mays
MMSGRSGGRDAEGEWEVRPGGMLVQRRDGEAAGPVIRIRVSHGANFREVVVPAQATFGELKRILVQTTGLEPERQRLFFRGKEKSDREFLHTAGVKDGAKLLLLEKPAPANIEQKVEPVIMDESMMKACAAVARVRVEVDKLSAKVCDLEKNVLGGRKVEDKEFVVLTELLMMQLLKLDGIEAEGEARAQRKAEVRRVQSLVETLDKLKARNANPFSDHNKAVSVTTQWETFENGMGSLSAPPPHVSSKQVNTDWEQFD

SEQ ID NO: 7448 - protein, 238 aa, Pachysandra terminalis
VQLRRMENKINRQVTFAKRRNGLLKKAYELSVLCDAEVALIIFSARGKLYEFCSSSSMQNTLERYQKCSYGPLEPSQPAKETQSSYLEYMRLKARVEGLQRSQRNLFGENLGPLSTKELEQLEHQLEMSLNQIRSTKTQFMLDQLSDLQRKEQMLQEANRSLKRKLEESNAENSLGPSWESGGHGVPFGHQPAQSEGFFQPLECNSTLQIGYNHVGADQMSITVPPQNVNGFVPGWMV

SEQ ID NO: 7449 - protein, 238 aa, Peperomia caperata
  unsure (1)..(238): unsure at all Xaa locations
VQLKRMENKINRQVTFSKRRTGLLKKAHEISVLCDAEVALIVFSTKGKLYEYATNSSSMPGILDRYERHSFTDKEFFIKEGEPPEGAWTLEYAKLKARYELLQKNYRHYLGEDLGSLSGKELQQLEGQLDASLKNVRSRRTQALFHTISDLQKKEKSLLEQNSVMIKKLQDLEKAEKAQQSQLEMQNHERTQNQPPLILLPPPALSXGSFRQENGPSVEGEAAPRVAQKNSLLPPWMX

SEQ ID NO: 7450 - protein, 311 aa, Haemophilus influenzae Rd
MKVAVLGAAGGIGQALALLLKLQLPAGTDLSLYDIAPVTPGVAVDVSHIPTAVNVKGFSGEDPTPALEGADVVLISAGVARKPGMDRSDLFNINAGIVRGLIEKVAVTCPKACVGIITNPVNTTVAIAAEVLKKAGVYDKRKLFGVTTLDVLRSETFVAELKGLNVSRTSVPVIGGHSGVTILPLLSQVQYAKWNEDEIEPLTKRIQNAGTEVLNAKAGGGSATLSMAQAAARFARSLVKGLSGETVVECTYVEGDGKYARFFSQPVRLGKEGVEEILPIGPLSNFEQQALENMLPTLRADIELGEKFING

SEQ ID NO: 7451 - protein, 485 aa, Agrobacterium tumefaciens str. C58 (U. Washington)
MTSPLQHLQQSGRLKKFYIDGKWVLPSGSDKVAVINPATELEFAEIALGNDEDVALAVAAARGAFAGWARTGPADRSELLNRVHQLMQQRLELLAQALTMEMGAAINYARSVQVPLAAEHIKVARDNAASYSFLSQRGHTAILREPIGVCGLITPWNWPLYQITAKVGPALAAGCTVVLKPSELSPLSALLFAEIIEDAGFPPGVFNLVNGEGTIVGAGLSAHPDVDMISITGSTRAGILVAQAAAPTVKRVAQELGGKSPNIILADADMTRAVPLGVAAAFRNLGQSCSAPTRMIVPRSHQKHIEELAAAAALEIVVGDPLSEHTTHGPVANHAQFDRIQRMISIGMDEGAKLVVGGTGRPDGLDTGFYVRPTIFSDVDPKMQIAQQEIFGPVLSIISYDTLEEAIEIANDTVYGLGAHVQGTDLQTVRIVAEQIRSGQVHLNYPAWDPNAPFGGYKQSGNGREYGTEGMEEYLEIKSILGFYP

SEQ ID NO: 7452 - protein, 535 aa, Neisseria meningitidis MC58
MSIVEIKVPDIGGHENVDIIAVEVKAGDTIAVDDTLITLETDKATMDVPADAAGVVKEVKVKVGDKISEGGVILTVETGAAAAEAAPAAAEAQPAPAAAPAAAGGATVQVAVPDIGGHTDVDVIAVEIKVGDTVAEDDTLITLETDKATMDVPCTAAGVVKAVFLKVGDKVSEGSAIIEVETVGSAAAAPAQAAQAAAPAAAPPPTAAAAPAAAPAPSAPAAAKIDEAAFAKAHAGPSARKLARELGVDLGQVKGTGLKGRIMGDDIKAFVKSVMQGGAAKPAAASASLGGGLDLLPWPKVDFSKFGNVEVKELSRIKKISGQNLSRNWVVIPHVTVHEEADMTELEEFRKQLNKEWEREGVKLSPLAFIIKASVSALKAFPEFNASLDGDNLVLKNYFNIGFAADTPNGLVVPVIKDVDQKGLKQISQELTELSKKAREGKLKPQEMQGACFTISSLGGIGGTGFTPIVNAPEVAILGVCKSQIKPVWNGKEFAPRLMCPLSLSFDHRVIDGAAGMRFTVFLAKLLKDFRRITL

SEQ ID NO: 7453 - protein, 256 aa, Zea mays
  unsure (1)..(256): unsure at all Xaa locations
MEFLSDEALAIFVPILVYWVYSGMYMALGQSMDRYRLHPRKEEDSKNLVSKREVVKGVLLQQLVQAGVAAVVFTVRTSXTQQHKASYYLLLTVARQFGVAMVVLDGWQYAWHRYMHLNRFLYRHIHSWHHRLVVPYAFGSQYNHPVEGLLLDTLGGALAFVVSGMSPRASIFFFSLCTVKGVDDHCGLWLPAGNLFHLFFWNNTAYHDVHHQLRGSRFNFSQPFFVTWDKLFGTHMPYVLEERPGGGLQARPCLLC

SEQ ID NO: 7454 - protein, 472 aa, Oryza sativa
MEGGRLGGAAASASAAAAADARGGMSGFAAPQHAIHTNLNNVQPTQVTDFGALAQSAGFRIEDLANLSTNGLFNLKSNAHTIINDPLQFENYVKSISPSNITTTATVTVVDPQTLVPQKGAQLNLVTIRTGNVENWGESTIADTSPRTDTSTDPDTDERNQMFEQGQLAAPTASDSSDRSKDKLDHKTLRRLAQNREAARKSRLRKKAYIQNLESSRLKLTQIEQELQRARQQGIFISTSSDQSHSASGNGALAFDMEYARWLEEHNKHINELRAAVNAHAGDNDLKSTVDSIMAHYNEIFKLKGVAAKADVFHVLSGMWKTPAERCFMWLGGFRSSELLKLLAGQLEPLTEQQLAGIANLQQSSQQAEDALSQGMEALQQSLAETLASGSLGPAGSSGNVANYMGQMAMAMGKLGTLENFLRQADNLRLQTLQQMQRILTTRQSARALLAISDYFSRLRALSSLWLARPRE

SEQ ID NO: 7455 - protein, 290 aa, Actinobacillus actinomycetemcomitans
MKGIILAGGSGTRLYPITRGVSKQLLPVYDKPMIYYPLSVLMLAGVRDILIITTPEDNESFKRLLGDGSEFGVNLQYTIQPSPDGLAQAFLIGERFINGDSCCLVLGDNIFYGQNFTQMLQQAVARPYGATVFGYLVKDPGRFGVVEFDENFKAVSIEEKPVQPKSNYAVTGLYFYDNRVVDFAKQVKPSARGELEITTLNEMYLKDGSLNVQLLGRGFAWLDTGTHESLHEAASFVRTIENVQGLQVACLEEIAWRNGWLTSEQVEKLAKPMAKNEYGQYLLRIIKETG

SEQ ID NO: 7456 - protein, 468 aa, Glycine max
  unsure (1)..(468): unsure at all Xaa locations
CLILCIGVLLQTYPNPLQDNPAYSVVKQYFVHVDDSVPQKVVVHKDGARGVHFRRAGPRQXDEVQAAIVTCGGLCPGLNTVIRELVCGLHHMYGVKKVLGINGGYRGFYARNTITLTPKSVNDIHKRGGTVLGTSRGGHDTKKIVDSIQDRGINQVYIIGGDGTQKGASAIFEEVRKRGLKVSVVGIPKTIDNDIPVIDKSFGFDTAVEEAQRAINAAHVEAESVENGIGVVKLMGRNSGFIAMYATLASRDVDCCLIPESPFYLEGPGGLYEYIEKRLKENGHMVIVIAEGAGQELVSESVQSMSKQDASGNKLFQDVGLWISQKIRDHFAAQKTLPITLKYIDPTYMIRAIPSNASDNVYCTLLAQSAVHGAMAGYTGYTSGLVNGRQTYIPFYRITERQNHVVITDRMWARLLSSTNQPSFLDAKGDNEEKEEEEALNQLPDGHCAKDTSLASKEINSSIYPTAC

SEQ ID NO: 7457 - protein, 410 aa, Rubrobacter xylanophilus DSM 9941
MASGGEEQRRFETRAVHAGESRPGAGGDRGGDGFYPISTPIYASTTFSHADAQTTDRVLGGEEPGYSYARWGNPSVAALEEALTALEAPQGGARALAFASGMAAMHAALTAAELGEGARVLAADQLYGSTATLLLQIFGPAGTEASFFDAYDPGEAEKKVSSLRPRAVVVETISNPLLRVADIPRLAEISRSHGAALIVDNTFGTPYLQRPLELGADMVVHSATKYLSGHGDVTAGVVAAGPPYDAALEQIRKTVGSTLGPFEAWLLHRGLKTLPLRISRQCANARRIAAWLAEHPKVFRVHHPSLEGHPDREATGRLLADTGGLVAFELAAEGREAAFRFLNALRLCVRAPSLGDIYTLAIHPATSSHRELPPSRREQLGVRENLIRLSAGIEHPEDIIADLEQALERL

SEQ ID NO: 7458 - protein, 417 aa, Rubrobacter xylanophilus DSM 9941
MPVEIRVPELGESVTDATVGRWLKKEGEAVKSGEPIVEVETDKINFEIEAEQDGVLESIAKGEGETVGVGDVIGTIAEGDGRAAAAAEEEEEPEEREEAPAAEAPAGREEAAEEGFRASPSVRRLAQEYGVDLAEVSGTGSGGRITREDVERLIRERSRPPAAPEEDGRREERPAPPPERAPGREALEERVRFSRRRQTIAQRLVESQRNAAMLTTFNEVDMSAVMDLRRRRKESFQERTGARLGFMSFFTKASVAALKAFPQVNAELAGNELVLKKYYDIGVAVSTDEGLVVPVVRDADRKSFAEIEKEIADLAVRAREGRLTLEDLRGGTFTITNGGVFGSLLSTPILTLPQVAILGMHKVQERPVVVDGEIQVRPMMYVALSYDHRVIDGAEAVSFLVRIKELVEDPETLLLEG

SEQ ID NO: 7459 - protein, 477 aa, Acinetobacter sp. ADP1
MSQQFDLVVIGGGPGGYEAAIRAAQLGFKVACIEKRVHKGKPSLGGTCLNVGCIPSKALLDSSHHYEDTIHHLGDHGITTGEVNIDIAKMLARKDKVVENLTGGVAQLLKGNGIEWLQGTGKLLAGKKVEFVPFEGETQVLEPKYVILASGSVPVNIPVAPVDQDLIVDSTGALEFAEVPKRLGVIGAGVIGLELGSVWRRLGSEVVVFEALDAFLPMADKALSKEFQKILTKQGLDIRIGAKVSGTEVNGREVTVKYNQAGEDKEQVFDKLIVCVGRKPYAEGLLAEDAGIKLTDRGFIEVNDHCATSLEGVYAIGDLVRGPMLAHKAMEEGVMAVERIHGHAAQVNYDTIISVIYTHPEAAWVGLTEEQAVANGHEVKTGQFPFAVNGRALAAGEAAGFVKFVADAKTDRLLGMHVIGPGASDIVHQGMIALEFVSSVEDLQLMTFGHPTYSEVVHEAALAVDGRAIHAIQRKRK

SEQ ID NO: 7460 - protein, 388 aa, Picea mariana
MGRAPCCAKVGLNKGAWSAEEDSLLGKYIQTHGEGNWRSLPKKAGLRRCGKSCRLRWLNYLRPCIKRGNITADEEELIIRMHALLGNRWSIIAGRVPGRTDNEIKNYWNTNLSKKLAVRGIDPKTHKKVTTDSINRASDRFNQRKGGKLYDCSQRSQRLERNVARAGQSTGLVIPNVHNLKADLKGQYIAGPRAIQSSNSIRSSSPINTLIQPKSNELTDDPDFMQPQPVVSSEAGKQTDDSTVYCSSDSAASCALIDHLSSADDDQYLSLEGNSNECYSHTVAEESGTLKSSNPQTHSEAICDSRERDNGGPVQKHDQFPEYDVLSFFDVRNAENEICCNDDQWVHEQEMPQLHSWDNQIDDQGKEHFGSHVNNDVTAMSWEASFWF

SEQ ID NO: 7461 - protein, 402 aa, Acinetobacter sp. ADP1
MATEIKAPVFPESVADGTIATWHKKVGEAVSRDEVICDIETDKVVLEVVAPADGQLVSIIKDEGETVLSDEVIAQFQEGAVSGANETQAVQSDSKVEQAAAKTEAGAAPVVERAQPVSDQAPAVRKALTESGISASDVQGTGRGGRITKEDVVNHQSKPAAQPLSVAVGERIEKRVPMTRLRKRVAERLLAATQETAMLTTFNEVNMKPIMEMRAQYKDAFEKRHGARLGFMSFFVKAATEALKRYPAVNASIDGDDIVYHGFYDIGVAVSSDRGLVVPVLRDTDRMNYAEVENGIRDYAVKARDGKLGIEDMTGGTFTITNGGTFGSLLSTPILNTPQTAILGMHKIQERPMAVNGQVEILPMMYLALSYDHRLIDGKEAVGFLVTIKELLEEPAKLILDL

SEQ ID NO: 7462 - protein, 328 aa, Neisseria meningitidis
MAKCIERQLSFGTFRYWKIVFRRHPDAMPSENPSQRKKEKMKGIILAGGSGTRLYPITRGVSKQLLPVYDKPMIYYPLSVLMLAGIRDILVITAPEDNASFKRLLGDGSDLGISISYAVQPSPDGLAQAFIIGEEFIGNDNVCLVLGDNIFYGQSFTQTLKQAARQTHGATVFAYQVKNPERFGVVEFNENFRAVSIEEKPQRPKSDWAVTGLYFYDNRAVEFAKQIKPSARGELEITDLNRMYLEDGSLSVQILGRGFAWLDTGTHESLHEAASFVQTVQNIQDLQIACLEEIAWRNGWLEKKDVETRAKPLEKTAYGQYLLHLIGK

SEQ ID NO: 7463 - protein, 262 aa, uncultured soil bacterium
MGTLTGKTAVVTGSTSGIGLAIARAFAGAGANIVINGFGAPADIERERSGIETDFKVKAVHSAADMSKPAEIAEMIALGEKTFGSVDILVNNAGIQFVSPIEEFPIEKWDAIIAINLSSAFHAIRAAVPGMKKRGWGRIINTASAHSLVASPFKSAYVSAKHGIAGLTKTVALELATHKITCNCISPGYVWTPLVEKQIPDTMKARNLTKEQVIHDVLLEAQPTKEFVTSEQVAALALFLCGADAAQITGTNLSIDGGWTAA

SEQ ID NO: 7464 - protein, 505 aa, Brassica napus
MTSINVKLLYHYVITNLFNLCFFPLTAIVAGKAYLTIDDLHHLYYSYLQHNLITIAPLLAFTVFGSVLYIATRPKPVYLVEYSCYLPPTHCRSSISKVMDIFFQVRKADPSRNGTCDDSSWLDFLRKIQERSGLGDETHGPEGLLQVPPRKTFARAREETEQVIIGALENLFKNTNVNPKDIGILVVNSSMFNPTPSLSAMVVNTFKLRSNVRSFNLGGMGCSAGVIAIDLAKDLLHVHKNTYALVVSTENITYNIYAGDNRSMMVSNCLFRVGGAAILLSNKPRDRRRSKYELVHTVRTHTGADDKSFRCVQQGDDENGQTGVSLSKDITDVAGRTVKKNIATLGPLILPLSEKLLFFVTFMGKKLFKDEIKHYYVPDFKLAIDHFCIHAGGKAVIDVLEKNLGLAPIDVEASRSTLHRFGNTSSSSIWYELAYIEPKGRMKKGNKVWQIALGSGFKCNSAVWVALNNVKASTNSPWEHCIDRYPVKIDSDSGKSETRVPNGRS

SEQ ID NO: 7465 - protein, 550 aa, Streptomyces coelicolor A3(2)
MSDTPKLNQRPEWTALADHAKGTLPHPDLRELFAQDPGRAERYVVRVGDLRIDYSKHLVTDETLALLQELAAATGVSGLRDAMFRGERINITEDRAVLHTALRAPRDAVIEVDGENVVPQVHAVLDKMAGFADRVRSGEWTGHTGRRIRNVVNIGIGGSDLGPAMAYEALRAFTDRSLTLRFVSNVDGADLHEAVRDLDPAETLFIIASKTFTTIETITNATSARSWLLDGLGGDEKAVAKHFVALSTNAEKVADFGIDTANMFEFWDWVGGRYSFDSAIGLSLMIAIGPDRFREMLDGFRIVDEHFRNAEAPANAPLLLGLLGVWYGDFLGAQSHAVLPYSHYLSKFTAYLQQLDMESNGKSVDREGNPVQWQTGPVVWGTPGTNGQHAYYQLIHQGTKLIPADFIGFARPVDELSEELKAQHDLLMANFFAQTQALAFGKTPDEVRAEGVPEELVPHKTFRGNHPTTTVLAAELTPSVLGQLIALYEHKVFVQGAIWNIDSFDQWGVELGKVLAKRVEPALTEGADVPGLDPSTAALVAAYRELKEVH

SEQ ID NO: 7466 - protein, 506 aa, Brassica napus
MTSINVKLLYHYVITNLFNLCFFPLTAIVAGKAYRLTIDDLHHLYYSYLQHNLITIAPLFAFTVFGSVLYIATRPKPVYLVEYSCYLPPTHCRSSISKVMDIFYQVRKADPSRNGTCDDSSWLDFLRKIQERSGLGDETHGPEGLLQVPPRKTFAAAREETEQVIIGALENLFKNTNVNPKDIGILVVNSSMFNPTPSLSAMVVNTFKLRSNVRSFNLGGMGCSAGVIAIDLAKDLLHVHKNTYALVVSTENITYNIYAGDNRSMMVSNCLFRVGGAAILLSNKPGDRRRSKYELVHTVRTHTGADGKSFRCVQQGDDENGKIGVSLSKDITDVAGRTVKKNIATLGPLILPLSEKLLFFVTFMGKKLFKDKIKHYYVPDFKLAIDHFCIHAGGRAVIDVLEKNLALAPIDVEASRSTLHRFGNTSSSSIWYELAYIEAKGRMKKGNKVWQIALGSGFKCNSAVWVALNNVKASTNSPWEHCIDRYPVKIDSDSGKSETRVQNGRS

SEQ ID NO: 7467 - protein, 206 aa, Peperomia caperata
SVLCDAEVAVIVFSTKGKLYEYATDAGMARILDRYEKHTFSNRELELTNLESEGAWSLEYGKLKARFELLQKSHRHYLGEDLGALNMKELQHIEHQLDSALRHVRSRKNQILSDTISDLQTKEKLIHEQNKILQKRIQEKEREITGQPQWEIVPSRQENQNPQPTLFPIPLHTLSIGYCKEDGKAIELGLENEPRPLSQKMPPWML

SEQ ID NO: 7468 - protein, 251 aa, Arabidopsis thaliana
MGRGRVELKRIENKINRQVTFAKRRNGLLKKAYELSVLCDAEVALIIFSNRGKLYEFCSSSSMLRTLERYQKCNYGAPEPNVPSREALAVELSSQQEYLKLKERYDALQRTQRNLLGEDLGPLSTKELESLERQLDSSLKQIRALRTQFMLDQLNDLQSKERMLTETNKTLRLRLADGYQMPLQLNPNQEEVDHYGRHHHQQQQHSQAFFQPLECEPILQIGYQGQQDGMGAGPSVNNYMLGWLPYDTNSI

SEQ ID NO: 7469 - protein, 250 aa, Sphingomonas paucimobilis
MSDLSGKTIIVTGGGSGIGRATVELLVASGANVAVADINDEAGEAVVAASGGKAAYFRCDIAQEEDVKALVAQTLAAFGGLDGAFNNAAIPQAGLPLAEVSLERFRQSMDINVTGTFLCMKYQILAMIERGTKGSIVNTASVAGVVGVPMHGEYVGAKHAVVGLTRVAAADYGKHGIRVNALVPGAVRTPMLQRAMDNDAGLEPYLNSIHPIGRFSEPHEQAQAAVWLLSDAASFVTGSCLAADGGFTAI

SEQ ID NO: 7470 - protein, 1005 aa, Desulfovibrio vulgaris subsp. vulgaris str. Hildenborough
  unsure (1)..(1005): unsure at all Xaa locations
MTVTRRHFLKLSAGAAVAGAFTGLGLSLAPTVARAELQKLQWAKQTTSICCYCAVGCGLIVHTAKDGQGRAVNVEGDPDHPINEGSLCPKGASIFQLGENDQRGTQPLYRAPFSDTWKPVTWDFALTEIAKRIKKTRDASFTEKNAAGDLVNRTEAIASFGSAAMDNEECWAYGNILRSLGLVYIEHQARIXHSPTVPALAESFGRGAMTNHWNDLANSDCILIMGSNAAENHPIAFKWVLRAKDKGATLIHVDPRFTRTSARCDVYAPIRSGADIPFLGGLIKYILDNKLYFTDYVREYTNASLIVGEKFSFKDGLFSGYDAANKKYDKSMWAFELDANGVPKRDPALKHPRCVINLLKKHYERYNLDKVAAITGTSKEQLQQVYKAYAATGKPDKAGTIMYAMGWTQHSVGVQNIRAMAMIQLLLGNIGVAGGGVNALRGESNVQGSTDQGLLAHIWPGYNPVPNSKAATLELYNAATPQSKDPMSVNWWQNRPKYVASYLKALYPDEEPAAAYDYLPRIDAGRKLTDYFWLNIFEKMDKGEFKGLFAWGMNPACGGANANKNRKAMGKLEWLVNVNLFENETSSFWKGPGMNPAEIGTEVFFLPCCVSIEKEGSVANSGRWMQWRYRGPKPYAETKPDGDIMLDMFKKVRELYAKEGGAYPAPIAKLNIADWEEHNEFSPTKVAKLMNGYFLKDTEVGGKQFKKGQQVPSFAFLTADGSTCSGNWLHAGSFTDAGNLMARRDKTQTPEQARIGLFPNWSFCWPVNRRILYNRASVDKTGKPWNPAKAVIEWKDGKWVGDVVDGGGDPGTKHPFIMQTHGFGALYGPGREEGPFPEHYEPLECPVSKNPFSKQLHNPVAFQIEGEKKAVCDPRYPFIGTTYRVTEHWQTGLMTRRCAWLVEAEPQIFCEISKELAKLRGIGNGDTVKVSSLRGALEAVAIVTERIRPFKIEGVDVHMVGLPWHYGWMVPKNGGDTANLLTPSAGDPNTGIPETKAFMVDVRKV

SEQ ID NO: 7471 - protein, 378 aa, Ralstonia metallidurans CH34
MFIRADLNVPQDDAGNITEDTRIRASVPAIQACLEAGATVMVTSHLGRPTEGEFKPEDSLAPIATRLSELLGKPVKLVQNWVDGVEVAPGQIVLLENCRVNKGEKKNSDELAQKMAKLCDVYVNDAFGTAHRAEATTHGIAKFAPIACAGPLLAAEIDALGRALGQPARPLVAIVAGSKVSTKLTILKALADKVDNLIVGGGIANTFMLAAGLKIGKSLAEADLVGDAKTIIDIMAARGASVPIPVDVVCAKEFSATAAATVKDVKDVTDDDMILDIGPKTAAMLADQLKAAGTIVWNGPVGVFEFDQFGNGTKVLAEAIATSKAFSIAGGGDTLAAIAKYGIADRVGYISTGGGAFLEFLEGKKLPAFEVLEQRAAG

SEQ ID NO: 7472 - protein, 66 aa, Glycine soja
ETRHPVYRGVRRRDSGKWVCEVREPNKKSRIWLGTFPTAEMAARAHDVAAIALRGRSACLNFADSA

SEQ ID NO: 7473 - protein, 210 aa, Petunia x hybrida
AHEMSMLCDAEVALIIFSNRGKLYEFCSSSSMLKTLERYQKCNYGAPETNISTREALEISSQQEYLKLKARYEALQRSQRNLLGEDLGPLNSKELESLERQLDMSLKQIRSTRTQLMLDQLQDLQRKEHALNEANRTLKQRLMEGSTLNLQWQQNAQDVGYGRQATQTQGDGFFHPLECEPTLQIGYQNDPITVGGAGPSVNNYMAGWLP

SEQ ID NO: 7474 - protein, 854 aa, Shewanella sp. ANA-3
MKKENQVNLGRRQLLKSTAAGTVLTGIGGTLSFTPIVEGIAAELPAPLRRTGVGEWLATTCQGCTSWCAKQIYVMDGRALKVRGNPNSGVHGMSSCPRQHLSLQQVYDPDRLRTPMMRTNPKKGRDQDPKFVPISWDKALDMLADKIIALRVANEPHKYALLRGRYSHINDLLYKKMTNLIGSPNNISHSSVCAEAHKMGPYYLDGNWGYNQYDVKNAKFILSFGADPIASNRQVSFYSQTWGDSLDHAKVVVVDPRLSASAAKAHKWIPIEPGQDSVLALAIAHVALVEGVWHKPFVGDFIEGKNLFKAGKTVSVESFKETHTYGLVEWWNQALKDYTPEWASKITGIDPKTIIAIAKDMGAAAPAVQVWTSRGAVMQARGTYTSISCHALNGLFGGIDSKGGLFPGNKTPLLKEYPEAKAYMDEIAAKGVKKEKIDQRGRLEFPALAKGKSGGGVITANAANGIRNQDPYEIKVMLAYFNNFNFSNPEGQRWDEALSKVDFMAHITTNVSEFSWFADVLLPSSHHMFEKWGVLDSIGNGVAQISIQQPSIKRLWDTRIDESEIPYMLAKKLADKGFDAPWRYINEQIVDPETGKPAADEAEFAKLMVRYLTAPLWKEDASKYGDKLSSWDEFVQKGVWNSSPYKLEARWGKFKTETTKFEFYSKTLEKALQSHADKHKVSIDEVMKACDYQARGHLAFIPHYEEPYRFGDESEFPLLLVDQKSRLNKEGRTANSPWYYEFKDVDPGDVANEDVAKFNPIDGKKFGLKDGDEIRITSPVGMLTCKAKLWEGVRPGTVAKCFGQGHWAYGRYASAKFGVTPRGGSNNDLIADRYDRLSGASAFYGHIRVRVEKV

SEQ ID NO: 7475 - protein, 594 aa, Neisseria meningitidis MC58
MALVELKVPDIGGHENVDIIAVEVNVGDTIAVDDTLITLETDKATMDVPAEVAGVVKEVKVKVGDKISEGGLIVVVEAEGTAAAPKAEAAAAPAQEAPKAAAPAPQAAQFGGSADAEYDVVVLGGGPGGYSAAFAAADEGLKVAIVERYKTLGGVCLNVGCIPSKALLHNAAVIDEVRHLAANGIKYPEPELDIDMLRAYKDGVVSRLTGGLAGMAKSRKVDVIQGDGQFLDPHHLEVSLTAGDAYEQAAPTGEKKIVAFKNCIIAAGSRVTKLPFIPEDPRIIDSSGALALKEVPGKLLIIGGGIIGLEMGTVYSTLGSRLDVVEMMDGLMQGADRDLVKVWQKQNEYRFDNIMVNTKTVAVEPKEDGVYVTFEGANAPKEPQRYDAVLVAAGRAPNGKLISAEKAGVAVTDRGFIEVDKQMRTNVPHIYAIGDIVGQPMLAHKAVHEGHVAAENCAGHKAYFDARVIPGVAYTSPEVAWVGETELSAKASGRKITKANFPWAASGRAIANGCDNGFTKLIFDAETGRIIGGGIVGPNGGDMIGEVCLAIEMGCDAADIGKTIHPHPTLGESIGMAAEVALGTCTDLPPQKKK

SEQ ID NO: 7476 - protein, 191 aa, Glycine max
NLFLLTMHSHIERILWSEDQISRRVFELAAEISDDFGGHSPAPVVVGVATGAFLFLADLVRKIDLSIAVDFVRVESYGSGTVSNGAPTISFDLKVDVNSRHVIVVEDIVDTGHTLSKVIEHLKSKGASSVSVCTFLDKPARRKVHFQLVGEGKYYRGFECPNYFVVGYGLDFAELYRNLPYIGVLKPELYK

SEQ ID NO: 7477 - protein, 505 aa, Agrobacterium tumefaciens str. C58 (U. Washington)
MHEPLTAAEYKAIASDLQFPANAFIDGAFRPAGSGKTFKTINPATGETLADISACDVSDVDYAVGKARAAFDDGRWRLLPPGERKAILLTFAKLLEQHRHELAVMESLDSGKPVSECQTVDIPDTIHTIRWHAELIDKLYDNTAPVGSNALALVVREPVGVVGCVLPWNFPLLMLAWKIGPALASGCSVIVKPAEETTLTTLRVAELAHEAGIPAGVFNVVPGGGKEVGEPIGMHMDVDMVAFTGSTPTGRRFLRYAADSNLKRIVLECGGKNPAVVLDDAEDLDLVAEQVVNGAFWNMGENCSASSRLIVHAKIKDELLQRIGAYMREWRMGDPLDPQNRVGALVSKAHFDKVHSFLEDVKAENLTIVHGGKTEKGIFIEPTVVDAVPPASRLFREEIFGPILSVTTFNTLAEAVALANDTNYGLAASVYTGSLRKAIKLSREIRAGVVTVNCFGEGDATTPFGGYKESGFGGRDKSIFAHDNYCELKTIWIDVSDRSVDETVR

SEQ ID NO: 7478 - protein, 391 aa, Xylella fastidiosa Temecula1
MSIVRMTDLALSGKRVLIRQDLNVPIDQGRITSEQRIIASLPTIRVALERGAAVMVTSHLGRPKEGVWSEEDSLAPVAKRLSQLLGIEVPLRRDWVDGVQVAPGQLVLLENCRMNVGEAENDEALARKYAALCDVFVMDAFGTAHRAQASTHGVICCAAIAAGGPLLMAELDALSRGLKHPVKPLLAIVGGSKVSTKLELLSNLVNNVEQLITGGGIANTFLAAAGYPIGKSLYEADLIETAREIITVAKARGAEIPLPTDVVVAKQFLPGVTATVKTVDAIVADDLILDIGPQTARHYAALIETAATVVWNGPVGVFEFDAFSKGTEVLARAVAASSAFSIAGGGDTLAAIDKYGVADQISYISTGGGAFLEFLEGKTLPAVAALQARSG

SEQ ID NO: 7479 - protein, 343 aa, Pseudomonas fluorescens PfO-1
MSNSTEPTTFTGWAATSAGAPLERFSYDPGPLGDEEVEVAVEYCGVCHSDQSLIDNDWGISQYPFIPGHEVVGRIVRTGPQVRGLEVGQRVGIGWYKGSCMHCSSCIGGSHHLCATAKPTIIGSHGGFADRLRTHWAWALKLPDNLDPALAGPLFCAGSTVFNPLVEFDIKPTDRVGVVGIGGLGHLALRFLNAWGCDVTAFTSSLSKQDEAKRLGAHKVVASTDSEALKAIAGTLDFLLITANANLDWTAMLATLRGKGRLHFVGIVPDAIPVHVFNLIPQQKSLSASPVGSPATAATMLEFCARHQILPQVEEFPMSKVNEAVDHLRSGKARYRIVLNASK

SEQ ID NO: 7480 - protein, 1212 aa, Oryza sativa
MQFMMPLDTNACAQPMRRAGEGAGTERLMERLNIGGMTQEKALRKRCFGDGVTGTARCVFTSDADRDTPHLRTQSSRKNYADASHVSAVILGGGTGVQLFPLTSTRATPAVPVGGCYRLIDIPMSNCFNSGINKIFVMTQFNSASLNRHIHHTYLGGGINFTDGSVQVLAATQMPDEPAGWFQGTADAIRKFMWILEDHYNQNNIEHVVILCGDQLYRMNYMELVQKHVDDNADITISCAPIDGSRASDYGLVKFDDSGRVIQFLEKPEGADLESMKVDTSFLSYAIDDKQKYPYIASMGIYVLKKDVLLDILKSKYAHLQDFGSEILPRAVLEHNVKACVFTEYWEDIGTIKSFFDANLALTEQPPKFEFYDPKTPFFTSPRYLPPARLEKCKIKDAIISDGCSFSECTIEHSVIGISSRVSIGCELKDTMMMGADQYETEEETSKLLFEGKVPIGIGENTKIRNCIIDMNARIGRNVIIANTQVYVLGLFWNGNSIIGILKFAPLSQQTCPVICFACLMCLRFFNSHLLATYETEELMGEVNSCKEMKSVCNWFALARQLIILLSVLVSCPGCQDFLSSLKMSHSSDEDSEISDSEIDEYADKFYARLVAGEFKVKDGQSYSCPFCSGKKKKDFNINNLIQHASGVGAASNRQAKDKATHRALAKHLKNGLTKSSGQQSQTAVVEPQPLPNRDEKFVWPWMGVLVNVPTEWKDGRQIGRSGNHLKEQLSRFCPLKIIPLWNFRGHSGNAIVEFGKDWHGFRNALAFEDYFGKEGYGKRDWKEKQNQGSNLFGWVARAEDHTSPGLIGDHLRKNGDLKTINDLENEGARKTDKLVANLANQIEVKNRHLQELEVTYNERTTSLEKMMGQREQLLQKYNEEIRKMQQLAQRHSQKIIDENQKLRSELESKMSELNTRSKELDEIAAKSDYDRRIIDQEKQKNAIKSSHLKLATLEQERADENVLKLVREHKREKEAAVKKILKLEQQVDAKQKLELDIQQLKGKLEVMKHMPGDEDSALKNKIDELSEELQEKMDELDAMESLNQTLVIKERKSNTEMQDARKELENGLLDLLDGQSHIGIKRMGELDLEAFSKACRKMSSEEDAEITAAILCSKWQAEIKNPDWHPFRFVLVDGQEKEIIEDDAKLQELKEEHGEDIYRLVRDALCEINEYNPSGRFPVGELWNFKDKRKATLKETVQFVLRQWRANRRKR

SEQ ID NO: 7481 - protein, 260 aa, uncultured soil bacterium
MKLRNKSALITGGASGIGKDIALTFAREGARVAIADLNKEAAEATAAQIRDSGAQAVGIAMDVTDEKAVNDGVAAVVAAFSGIDVLISNAGIQIIHPIEEFSYAEWKKMLAIHLDGAFLTTRACLPHMYGSGRGGCVIYMGSVHSKEASLLKAPYVTAKHGLIGLAKVVAKEGAAHGVRANVICPGFVRTPLVEKHDPRAGETLGISEQEVIRNVMLKETVDGEFTTVEDIAEAALFFAAFPSNALTGQSLVVSHGWFMQ

SEQ ID NO: 7482 - protein, 390 aa, Buchnera aphidicola str. APS (Acyrthosiphon pisum)
MTIRKMTELNITEKRILIRSDLNVPIENGIIQSDARILAALPTIELALQKKAKVIIMSHLGRPKEGYYTKKYSLFPIFEYFKKKFNNTKIYFSNNFLDGIKLNPGEIALLENTRFNKGELNNDEQLSKKYSDLCDIFVMDAFGSAHRMQSSTYGIGKFVKIACAGLLLISEIDALKKALKKPKRPMVAIVGGSKVSTKFNVLNKLSKIADTIIVGGGIANTFLAIDYKIGKSLYEPDFVFEAKKLRDKYNIIVPIDSRVGKNFCKNEQAIIKSPDNIKEDEEIMDFGDESIKKIISIITQSQTIMWNGPVGVFEFPNFRKGTEMIAKTIANSNAFSIAGGGDTLSVIDMFNIKNNISYISTGGGAFLEFIEGKKLPAIQMLEENFKNKSK

SEQ ID NO: 7483 - protein, 463 aa, Glycine max
MASSFLSAASHAVSPSCSLSTTHKGKPMLGGNTLRFHKGPNSFSSSRSRGRISMAVAVNVSRFEGIPMAPPDPILGVSEAFKADNSDVKLNLGVGAYRTEELQPYVLNVVKKAENLMLERGDNKEYLPIEGLAAFNKATAELLLGADNPAIKQQRVATVQGLSGTGSLRLGAALIERYFPGAKVLISAPTWGNHKNIFNDASVPWSEYRYYDPKTVGLDFEGMIEDIKSAPEGSFILLHGCAHNPTGIDPTPEQWEKIADLIEEKNHIPFFDVAYQGFASGSLDEDAASVRLFVARGIEVLVAQSYSKNLGLYAERIGAINVISSSPESAARVKSQLKRIARPMYSNPPVHGARIVADVVGNPVLFNEWKAEMEMMAGRIKNVRQQLYDSITSKDKSGKDWSFILKQIGMFSFTGLNKNQSDNMTNKWHVYMTKDGRISLAGLSLAKCEYLADAIIDSYHNVS

SEQ ID NO: 7484 - protein, 1150 aa, Mycobacterium bovis AF2122/97
MTAIFLGSSGTPGEDGGNGGAGGAGGAGGAHAGDGGAGGAGGNGGAGGAGGNGAHGFNAVLVSDGGNGGDGGAGGRGGDGGAGGAGGDAPAGRAGSQGVGGDGGAGGAGGAPGNGGSGGRGDMAFKDGDGGAGGDGGDPGAGGKGGAGGAGATEGVTGATGATVHSGGNGGKGGNGADATVAGANGGKGGAGGNGGLVGDGGAGGDGGSGAAGANGANVGEDGADGTLSGQPGEGSEANGGQGGVGGGGAGGAGGDGGAGSSALGSGGNGGRGDAGQAGGAGGAGGAGGAGGSVSGDGGPGGKGGAGGAGGAGASGGGGGKGASGADSAEAVGGAGGKGGDGGVGGVGGDGGPGGDGGAGGAAPAGQVGSHGVGGVGGDGGLGGAGGNGGDGGHGSDGGDGGDGGDPGAGGLGGLGGDSGNGTRAASGVDASDHGPGSGGNGGNGGNGAQASVAGGAGGNGGDGGNAGRVGDGGAGGNGGDGAAGANGANSGAPGSDALALGQPGGNGGQGDAGQAGGAGGAGGAGGSVSGDGGAGGNGGAGGNGGVGASGGAGARGANGIDSIGGTGGAGGGGGDGGAGGVGGHGGDGGVGGAAPSGTVGSHGTGGVGGDGGLGGAGGVGGAGGNGGIGITVGGAGGAGGNGGDPGAGGRGGLGGDSGNGTSAANGVDASKHGPLTGGDGGVGGNGAKAAAAGGDGGQGGDGGNAGLFGDGGAGGDGADGTAAEALGGDGGAGGAGGKGGDAGDIGDGGDGGKGGDGAHGALGGLTVAGGNGGAGGAGGAGGAGGAFLGDGGNGGAGGQGGAGRGGSPGGGGGVGGHGGAGGDAGMNGGGGTGGQGGNGAAGGAGWSPDSDLKGFDGFDGGSGGAGGDGGAGGAGGTQTGDGGDGGAGGLGGAGGVGGNGVDGFDINETTGRDGDGGDGGYGGWGGAGGNGGAGGSAPAGEVGNRGVGGDGGDGGSGGDAGNGGLGGDGFTYLADFDGEPGGDGGDGGDGGWGRPGGQGGFGSTSGAHGKAGFGAPGGDGGDGGNGGHGGDGNGSFADAGDGGPGGNGGNGGLGGAGRDGGAPGGDGGDGGTGGSGGFGAPPPRSIGGGDGGDGGRGGDGGRGAGGLTSGGVGSSGESGGSGNGRGDPGSGGSGGEGGEGGPSISVNVT

SEQ ID NO: 7485 - protein, 502 aa, Exiguobacterium sp. 255-15
MSTVHEKTIEMKRSVYHLVINGEQVEGTSGETFKTYNPATGEVIAEVAKASKADADRAVQAARDAFDHGKWKMWPVGRRSQVLNKIAGIMRSRFNELVELEILDTGKSLAAAQGQITQAIEDFEFYAGAIVGHRGSVNNVPGQFHNYTEKEPVGVCAQIIPWNYPLMMAAWKVAPAIAVGCSVVVKPATLTPLTAIILGEICLEAGVPAGVVNVIPGSGREIGNHLVEHPNVNKVAFTGSTPVGKDIMGRASESLKRVTLELGGKSPNLVFEDADITAAVDGSLFGIFYNSGQSCEARSRLYIHEDIYDTFMEQFVAKTKQLVLGNPFDKGTHVGAIIDQQQLDVIDGYVQSAKADGATILTGGQVEKVAGFEEGFWYAPTIIADVTHDMKAVQEEIFGPVVVVMKFKDEKEAVRLANDTEFGLGSAIWTKDGARATRIANQIKAGIVMINCPFSAFPGTPFGGYKQSGFGRELCIETLDLYTETKSILSYYGSRPLNPFGL

SEQ ID NO: 7486 - protein, 267 aa, Guillardia theta
AQYLGMAGDLVKDVPKAKEMFEQASDVLGYDLLKLCLEGPKEKLDSTVISQPAIYVASLAAVEKLRMEAGQEAIDRATVAAGLSLGEYTALSFAGALSFEDGLKIVKVRGEAMQAASEASESGMVSVIGLDSDTVKKLCEKASELSGEKIQIANYLCSGNYAVSGAKSACAKVSEIAKPEFKARMTVPLAVAGAFHTDFMMPAVSKLSDVLATVEIKKPRIPVISNVDAMPHSCPTTIKNILTRQVTSPVLWENTIAAMMDRGFEQG

SEQ ID NO: 7487 - protein, 230 aa, Thraustotheca clavata
SQKVGMVKDLLARWPQHVAPVLEEAEAAMGANLKSLMMDGPQDQLTHTSIAQPAILTHSYAVLQILKKEANFNVNDYSYALGHSLGQFSALVATNALQFADAVQLVHFRGKAMMQAMQGASDPGAMAALLPATAETGDAICARVQKETGLVCQVANYNSSKQVVISGNAVAINAAIKMAKEFKVRRAVLLDVSAPFHCALMQPAADQLAVALERIRFKEPSIPVISNVDA

SEQ ID NO: 7488 - protein, 245 aa, Neisseria meningitidis Z2491
MGGQKTHFGFSTVNEDEKAGKVAEVFHSVAKNYDIMNDVMSAGLHRVWKHFTINTAHLKKGDKVLDIAGGTGDLSRGWAKRVGKEGEVWLTDINSSMLTVGRDRLLNEGMILPVSLADAEKLPFPDNYFNLVSVAFGLRNMTHKDAALKEMYRVLKPGGTLLVLEFSKIYKPLEGAYDFYSFKLLPAMGRLIAKDAESYQYLAESIRMHPDQETLKQMMLDAGFDSVDYHNMSAGIVALHKGVKF

SEQ ID NO: 7489 - protein, 268 aa, Prymnesium parvum
AQTVGMGAQVAAEIPAAAELYEKASKILGYDLLAKCTDGPKEELDTTVISQPAIFVSSMAAVEKLRASEGGAEAIEAASAACGLSLGEYTALCFAGAISFEDGVRITKARGEAMQAASDASDSGMASIIGLDAETAAKLCEAAAEATGEPVAIANYLCPGNYACSGSTVAVDKVMELAKPEFKARMAVKLAVAGAFHTKFMAPAVEKLAEVLKSVEVVKPRIPVISNVDAKPHSDPAIIKDILTQQVTAPVQWETIMTKMIANGFEEG

SEQ ID NO: 7490 - protein, 444 aa, Chloroflexus aurantiacus
MIDIKMPQLGESVTEGTVGRWLKRPGDPVAKYEPLLEVVTDKVDTEVPAPEAGVLHEILVPEGETVRVGTVIARLAPAGATVPATPASAPAATTVAATASATTTVTATVAPPVADGRNTYLSPVVARLLSEHNLDPGQIRGTGQGGRITKQDVLRFLAERQQQPSAPVAAPVAPTPVAPSPAPAPAPAPVSPTPAPTPAPTPAPAPAPATFDIPADAELVPLTPMRRSIAEHMVRSVRTSPHVTTVMEVDLSRVIAHRAAHQEAFSRQGVRLTMTPYFVMAAVAGLQAVPVFNGSFTDQGIILHRRINIGVAVALQEGLLVPVIPDADEKNLLGLARAVSDLAERARTKRLRPEETQGGTFTITNHGVTGSLFATPIINQPQAGILGVGAIVKRPVVITQNGLDAIAIRPLCYLSFTFDHRIADGATADQFLATVKKRLEEWEG

SEQ ID NO: 7491 - protein, 215 aa, Papaver nudicaule
  unsure (1)..(215): unsure at all Xaa locations
RHEMSMLCDAEVALIIFSNRGKLYEFCSSNSMFKTXERYQKCNYGQPEPNVSARESLEHASHQEYLKLKARVEALQRSQRNLLGEDLGPLSGKELEFLEKQLDSSLKQIRSTRTQYMLDQLTDLQRREQMLSDANKTLRRRLEEGAQASQQQWDMQHGVGYSRQQQSXHHQAADHNQGFFHPLECEPTLQIGYQQDQITVAQGAPMGSYMPGWLA

SEQ ID NO: 7492 - protein, 404 aa, Neisseria meningitidis Z2491
MDKFPKSAKLDHVCYDIRGPVHKKALQLEEEGNKILKLNIGNPAPFGFEAPDEILVDVIRNLPTSQGYCDSKGLYSARKAIVHYYQTKGLRDITVDDVYIGNGVSELITMSMQALLDDGDEILIPAPDYPLWTAAATLAGGTVRHYLCDEENGWFPNLADMEAKITPKTKAIVVINPNNPTGAVYSREILLEIAELARKHGLIIFADEIYDKILYDGAVHHHIAALAPDLLTVTFNGLSKSYRVAGFRQGWMVLNGPKHHAKGYIEGLDMLSSMRLCANTPMQHAIQTALGGYQSINEFILPGGRLLEQRNRAWELVSQIPGVSCVKPMGAMYMFPKIDTEMYRIRDDMKFVYDLLVREKVLLVQGTGFNWIKPDHFRIVTLPYVHQIEEAMGRLARFLQTYRQ

SEQ ID NO: 7493 - protein, 351 aa, Eremothecium gossypii
MSAPTIPRTQKAVIFYENGGPLQYTDIEVPKPKATELLINVKYSGVCHTDLHAWKGDWPLPTKLPLVGGHEGAGVVVAMGENVRGWKIGDLAGIKWLNGSCMACEYCEKSNESNCPEADLSGYTHDGSFQQYATADAVQAAHIPAGTDLAQVAPILCAGITVYKALKSANLRAGDWVAISGACGGLGSLAIQYATAMGYRVLGIDGGEEKEQLFRQLGGEVFIDFRKSKDIVADVVKATNGGAHGVINVSVSEAAIESSTEYVRSNGTVVLVGLPGGAKCKSDVFSHVVKSISIVGSYVGNRADTREALDFFARGLVKSPIQVVGLSELPQIYEKMEKGAVVGRYVVDTSM

SEQ ID NO: 7494 - protein, 210 aa, Papaver somniferum
SVLCDAEVALIVFSTKGKLFEYSTDACMDAILERYERQCCVEEELVGTDQESQGNWSLEHAKLKAKVEVLQRTQRHMMGEDLESFNVKELQNLEHQLDTSLKHIRSKKNQLLYASISELQRKEKALQEQNTILGKKIKEKEQEMGRLDQQQQSNQAQNSCSQAQNSAQNSPTFLLSQELPSLTICTGTYEPAARPIAIQTVMPPWMLRHL

SEQ ID NO: 7495 - protein, 614 aa, Xylella fastidiosa Temecula1
MSFSKHFGKLMLATCLSLSAAPAFSYSISHGKVVDDKGNQIQLRGVNWFGFETGDHVVNGLWARNWKEFITQLQGMGFNAIRLPFCPANLNSNTSPSSIDYSRNPDLQGLSSLQILDKVVKELSDRRMYVLLDHHRPDCSAISELWYTDSYSEKQWIDDLRFVAHRYANVHGVIGLEVKNEPHGRTTWGTGDPKTDWNTAVEHAAAAILEAAPKWLIGVEGIGENPICSSTIGHFWGENLEPMDCTPLKVPADHLLLMPHVYGPDVYVQPYFNSPDFPNNMAAIWDKHFGHFAKAGYAMAIGEFGGKYGEGDPRDIAWQNAFVDYLISIGVTDAFYWAANQNSVDTGGMVGNDWTTPRDDKVKLLNKLWNAGGGASGGSGGGAGASSGSGAGGGSSGGAGTGSGSGAGGGSSGGAGTGSGSGAGGGSSGGAGASSGSGAGGGSSGGAGTGSGSGAGGGSSGGAGASSGSGAGGGSSGGAGASSGSGAGGGSSGGAGAGSGSGARGGSSGGAGAGSGSGAGGGSGSGSDPTKSKIAVNTIVDSDWHTGYCERIQVTNTSDSPNTWTVTIPIKGKIQTLWSARWSVKDNALTAFGMDWNKTLDPKGRTEFGFCSNY

SEQ ID NO: 7496 - protein, 478 aa, Haemophilus influenzae Rd
MSKEIKTQVVVLGAGPAGYSAAFRCADLGLETVIVERYSTLGGVCLNVGCIPSKALLHVAKVIEEAKHANKNGIYFSEPRIELDEVRAGKEAVVAKLTGGLAGMAKARKVTVVEGLATFTDSHTLVARDRDGNPTTVKFDNAIIAAGSRPVQLPFIPHEDPRIWDSTDALKLKEVPKKLLIMGGGIIGLEMGTVYNALGSEVEVVEMFDQVIPAADKDVVGIYTKQVEKKFKLMLETKVTAVEAKDDGIYVSMEGKACNDTKRYDAVLVAIGRVPNGKLIDAGKAGVEVDDRGFIHVDKQMRTNVPHIYAIGDIVGQPMLAHKGVHEGHVAAEVIAGQKHYFDPKVIPSIAYTEPEVAWVGKTEKECKQEGLNYEVAKFPWAASGRAIASECSEGMTKLIFDKDTHRVLGGAIVGSNGGELLGEIGLAIEMGCDAEDIALTIHAHPTLHESVGLAAEVFEGSITDLPNAKAKEKIISI

SEQ ID NO: 7497 - protein, 567 aa, Haemophilus influenzae Rd KW20
MSKQIQIPDIGSDEVTVTEVMVNVGDTISVDQSIINVEGDKASMEVPAPEAGVVKEILVKVGDKVSTGTPMLVLEAAGAAPAADEPTAPVADAPTAPVVATAPTASAIVEVNVPDIGGDEVNVTEIMVAVGDTITEEQSLITVEGDKASMEVPAPFGGVVKEILVKSGDKVSTGSLIMRFEVLGAAPAESASAPASTSAPQTAAPATTAQAPQAAAPDTTAQAPQAAAPDTTAQAAQSNNNVSGLSQEQVEASTGYAHATPVIRRLAREFGVNLDKVKGTGRKGRIVKEDIEAYVKTAVKAYESGATAQATGNGVANGAGLGLLPWPKVDFSKFGEIEEVELSRINKISGANLHRNWVIIPHVTHFDKADITDLEAFRKEQNALREKQKLGVKITPVVFIMKAVAKALEAYPRFNSSITEDAQRLILKKYINIGVAVDTPNGLVVPVFKNVNKKGIIELSRELMEVSKKAREGKLTASDMQGGCFTISSLGGIGTTHFAPIVNAPEVAILGVSKSSMEPVWNGKEFAPRLILPMSLSFDHRVIDGADGARFISYLGSVLADLRRLVM

SEQ ID NO: 7498 - protein, 293 aa, Rubrobacter xylanophilus DSM 9941
MKGIVLAGGSGTRLYPLTIAVSKQLLPVYDKPMIYYPLSTLMMAGIREILIISTPQDLPRFEQLLGDGSQWGMSFSYAVQPRPEGLAQAFVIGRDFVGRENVSLILGDNIFYGQGFEELLGRAASRREGATIFGYYVRDPERYGVVEFDRDGSVLSIEEKPERPRSHYAVTGLYFYDNRVLDIAAGLKPSWRGELEITDVNVAYLRLGELRVELMGRGMAWLDAGTHESLQQAGNFIETLEVRQGLKIGCPEEIAYRRGYIDAAQLERLAAAMQKNGYGQYLLELLRSEEFVV

SEQ ID NO: 7499 - protein, 159 aa, Zea mays
  unsure (1)..(159): unsure at all Xaa locations
MAAAARAIICELAPQKLSSTASGPAAPKKRDAGTKVVLQPRLCTLRSYGAGSGVVTRRILAGEEDGSGAADSGGSAALPFFASLADYIESSRKSQDFETISGRLAMVAFAAAMTVQTTTGSSLLKKLDTMKIEDAAXMCVAVVDSAAAFAWASSARNRI

SEQ ID NO: 7500 - protein, 509 aa, Mycobacterium bovis AF2122/97
MSYVIATPEMMATAAFDLARIGSQVSAASAVAAMPTTEVVAAGADEVSAGIAALFSAHAQEYQALSAQAAAFHDQFVHTLTAAARWYTATEIANAAAMRVVLGAVNAPTQTLLGRPLIGDGAHGTAPGQPGGAGGLLFGNGGNGAAGAVGQVGGAGGAAGLFGIGGAGGAGGAGAPGGTGGTGGWLAGGGGVGGMGGAGGGAGGAGGNAGLFGNGGAGGAGGAGGGAGGAGGNAGWFGHGGAGGVGGVGAAGANGATPGQDGAAGVAGSDDGAGGDGLAGSDGGDGGAGGVGGNGGRGGWLLGNGGAGGVGGVGGAGGAGAAGGAGGAGATGINGPAGISAAGGDGGAGGNGGAGGNGGVGGAGGAGGSAGLLGYVGRAGDGGAGGGGGLGGAPGDGGAGGNGGSWLAAGDGGAGGHGGDPGLGGAGGAGGGGGRRAAPVLARGPMVWRPATTGRSAAATAAKVAMAPTHRSPAVMAVTAVPVATAGWSVTVGPAVMAVTEPRVPAMPI

SEQ ID NO: 7501 - protein, 351 aa, Zinnia elegans
MPPPLLGVEGDGLGNVSLMTSASTMESIFQKNAELTERNYLGLSDCSSFDSTAVSGISEVKRNNLNLKATELRLGLPGSQSPERDVDVDLVNSESLDEKPLFPLLPSKDGICSNSQKVFVSGNKRGFSDAIDEGKWMFGSSGTDSETSNMNGKISSGAQPVMIKDATSKVVTQEQTHATFGTNLNIVNTSNPPAAKAQVVGWPPVRSFRKNILATNSKTNDEVDGKPGPGALFVKVSMDGAPYLRKVDLRSYSTYQQLSSAIEKMFSCFTIGQCGSQGAPGRESLSESKLRDLLHGSEYVLTYEDKDGDWMLVGDVPWDMFIGSCKRLKIMKGSDAIGLAPRAMEKSKNRN

SEQ ID NO: 7502 - protein, 313 aa, Oryza sativa
MEATAKYNRGNPAVKRILQEVKEMQSNPSPDFMAMPLEEDIFEWQFAILGPRDSEFEGGIYHGRIQLPSDYPFKPPSFMLLTPSGRFEIQKKICLSISNYHPEHWQPSWSVRTALVALIAFMPTPGGGALGSLDFKKEDRRALAIKSRETPPKFGSAERQKVIDEIHEQMLSRAPPVPQLLTNETNEETNQLPASDASDEHAHKAVGGVNTAGSNSDSVNNDLPRPDSESEIVQHIVEGRTEGVSNHSRANLSRENIPRVAPTPQNPVVAIQKPKHDRLLTLAAFGLTLAIMALVIKKFFKINGLAGYIEGKF

SEQ ID NO: 7503 - protein, 560 aa, Schizosaccharomyces pombe
MSKRKSSSILDFFKKSNNGKNMWGNEAVSVEKTDSTTKPSTVKNAISSSQIKNEKFSQEVLLQFNDPSFTSEVGESPQWQSFGDANILEPLKNELVKNEESTMSELLLCPICGITLESLTVDANIHVNDCLDGRTTEAVSKKLKKDSVVKADPSNSSTFPISDSCKQALLPLPGKQINVRSVVPFYKLMPYNIPFAVDAFAYGAIDGVEAYFLSHFHSDHYGGLTPKWKHGPIYCSEVTGNLLINVMHVDEQYVKRLKLNQPYNIMGITVYVLDANHCPGSAMFVFETLQSNQTRRVLHCGDFRASKDHVMHPVLREKTIHKVYLDTTYLNPKYTFPPQADVVQACADKAISIKKSTDSRLLVVVSTYSIGKEKVAVAIAKSLSSRIYVVPRKMHIIKQLENQDLIDLLTDDPTQASVHMVTMMGIHPNSLLDYLEQYNSSFDKIIGYKVTGWTFQPLENRAQLSSSLDSIISRPPKFVEYDLRAIRGSTDKVAAFVAPYSEHSSFYDLTMFCLSMNIGHIIPTVNVGSQRSREKMNVWLDRWAWRRKKQGLLSLENVDW

SEQ ID NO: 7504 - protein, 311 aa, Oryza sativa
MGRPPCCDKEGIKKGPWTPEEDIILVSYIQEHGPGNWRSVPINTGLMRCSKSCRLRWTNYLRPGIKRGNFTAHEEGIIVHLQSLLGNRWAAIASYLPQRTDNDIKNYWNTHLKKKLAAAANSTSSSNRHPIFADATFPSAAGGSYTVSSNSDVTQMAAIARRSPFADCPSSSYASSMDNISKLLDGFMKTNSPSPPPPPLQHYDSGYYDDVKPAVDVGGNPLLSSFDCMSGADLDCCFDVHQQHQQQQPASFMEYGGYGGGYGDESKQQLMNQAAPPLSSIEKWLFDEAAAEQVADLMDLSDGCCSVPMMF

SEQ ID NO: 7505 - protein, 186 aa, Rubrobacter xylanophilus DSM 9941
MSSMMPDVQEVLIPSEEIQQKVKDLGEQITRDYREHRRLLLVGVLRGAVIVMGDLMRRIDLPCEIDFMEVSSYGAGTTSSGVVRILKDLEEDISGRHVLIVEDIIDTGLTLSYLRRSLLARKPASLEICALLSKPARRRVELDVKYLGFEIPDEFVVGYGLDYAGCYRNLPDICILKPEVFGGAAS

SEQ ID NO: 7506 - protein, 393 aa, Mycobacterium bovis AF2122/97
MSGEDSIRSFPVPDLGEGLQEVTVTCWSVAVGDDVEINQTLCSVETAKAEVEIPSPYAGRIVELGGAEGDVLKVGAELVRIDTGPTAVAQPNGEGAVPTLVGYGADAAIETSRRTSRPLAAPVVRKLAKELAVDLAALQRGSGAGGVITRADVLAAARGGVGAGPDVRPVHGVHARMAEKMTLSHKEIPTAKASVEVICAELLRLRDWFVSAAPEITPFALTLRLLVIALKHNVILNSTWVDSGEGPQVHVHRGVHLGFGAATERGLLVPVVTDAQDKNTRELASRVAELITGAREGTLTPAELRGSTFTVSNFGALGVDDGVPVINHPEAAILGLGAIKPRPVVVGGEVVARPTMTLTCVFDHRVVDGAQVAQFMCELRDLIESPETALLDL

SEQ ID NO: 7507 - protein, 343 aa, Saccharomyces cerevisiae
MVKVAILGASGGVGQPLSLLLKLSPYVSELALYDIRAAEGIGKDLSHINTNSSCVGYDKDSIENTLSNAQVVLIPAGVPRKPGLTRDDLFKMNAGIVKSLVTAVGKFAPNARILVISNPVNSLVPIAVETLKKMGKFKPGNVMGVTNLDLVRAETFLVDYLMLKNPKIGQEQDKTTMHRKVTVIGGHSGETIIPIITDKSLVFQLDKQYEHFIHRVQFGGDEIVKAKQGAGSATLSMAFRGAKFAEEVLRSFHNEKPETESLSAFVYLPGLKNGKKAQQLVGDNSIEYFSLPIVLRNGSVVSIDTSVLEKLSPREEQLVNTAVKELRKNIEKGKSFILDSSKL

SEQ ID NO: 7508 - protein, 441 aa, Chlorobium tepidum TLS
MKSFLSKSGAIAAGLLLAAATFSPPIQAATPTPDAVNAFAIDNFFLFICAVLVLFMQAGFALVETGLNSAKNAVNILFKNLMDMAIGGIIYYFVGYGLMYPGEAFSGGFFGFGGPGISTAMPEIAGGTLYPAVDFLFQVAFAATAATIVSGAVAGRMQFRAYLIYSAVISAVVYPISGFWLWGGGWLKALGFHDFAGSLLVHALGGFAGLAGAIVLGPRIGRFNEDGTPNAMPGHNLALSTLGVFILLIGWYGFNPGSQLAIVGGDNTAAVMKIAVNTTLAACAGAVVAMIFAWGLFKKPDLTMALNGMLAGLVAITANCDVVSYNASLIIGAVGGILVVLGIMLLDKLRIDDPVGAWPVHGLNGIWGGVAAWIFGGQPMVAQLVGSLVVPFWGFVTMMVLFLILKAMGILRVHKDEEMKGLDISEHEEEAYYGFDIYTTQ

SEQ ID NO: 7509 - protein, 559 aa, Chlorobium tepidum TLS
MYLSRSAEWSALESHYQDISHQAMIDLFSTDPNRHERFSLSFNAIHLDYSKNRISARTMELLMDLVRRSGIEKKRRQMFEGEQINFTEHRSVLHTALRRPPGYTMTIDGNDVASEVSDVLDQMKAFCKKVISGEWKGYTGKRITDVVNIGIGGSDLGPFMVTEALKPFAHGKLKVHFVSNVDGSHLVETLRGLNPETTLFIIASKTFTTQETLANAVSARAWFLVKAGNRDHVAKHFVAVSTNREKVEEFGIDPDNMFRFWDWVGGRYSLWSAIGLSIALYLGFDRFRELLAGAHAMDEHFLNAPLEENMPMILAMLGIWYNNFFGAHSQAIIPYDQYLHRFPAYLQQLDMESNGKRVDRAGHEVDYATGPVIWGEPGTNAQHAFFQLLHQGTEIVPVDFIVSLKSQNPVGEHHDMLVANCFAQSEALMKGKSEAEARAELEAAGLSGGDLEKLLPHKLFPGNRPTNTIVLDELNPFNLGSLIALYEHKVFVQGVVWNINSFDQWGVELGKQLAKAILPEFDAVDPVETHDASTNALINRYRQFRNGLKFPKSNQLKMF

SEQ ID NO: 7510 - protein, 359 aa, Streptomyces coelicolor A3(2)
MPHMTAFARNQWYVAAYSHEVGRELLGRTVLGEPLVLYRAEEDGGPVVLHDRCVHRRYPLSEAPTRLDGDRIVCGYHGFTYDTTGTCVYVPGQKRVPRTARVASYPVAERDSLVWVWIGDPALADPEAVPRARHLDAPGWVTVRGMEPIDADYGLLVDNLLDLSHETYLHGGHIGTPEVAETPITTEVDEGAGIVRVSRHMDDAECPPFYARSTGIVGRIDRWQDIEYHAPCLYVLHSRVAPTGTVPAPDGGDPEGFHTEITYAITPSGDGKVYDFWAVSRDWATDDAEVTEFLYKSNRTVVMQDVDALNLLQRTLGGERAGYQELSINIDTGGLAARRILARLVEEGEGAGTGPRVAR

SEQ ID NO: 7511 - protein, 240 aa, Papaver somniferum
VQLRRMENKINRQVTFSKRRSGLLRPCAEMSVLCDAEVALIVFSTKGKLFEYSTDSGMDRILERYERYSYAERELVTTEIDQGNWSLEYSKLKSKIEILQKNQRHFMGEDLQSMSLKELQNLEQQLDVALKQIRSRKNQLMYESISELQKKEKALQEQNNKLGKQLKEKEKEVAAQQQQASQFSQGQSSPSFLLSQSLPSLNIGSGSYQARGGDNGNEEGNRTQTTRTNTATLMPPWMLN

SEQ ID NO: 7512 - protein, 383 aa, Pyrobaculum aerophilum str. IM2
MRKGTVAVRGYKHSDPYGALQPPIYLTALFRMEGEALKSDRGFDLKYSREENPTLRPLEEVVANLEGGVDSLAFNSGMAALSTVFFSLLSADASVLTPMEAYGATLRLLNALEKYGVRMRKAYPDTETYIEALKAVKPNLAFFETITNPMLRVLDGPEIIKAAKDLGAVVVVDNTFATPVLTTPISYGADVVVHSATKYLAGHNDVVGGIAVVARGDLLEELWIWRAMLGSIMQPFEAFLTLRGLKTLFVRFEKQCKTAMAVAQFLEGHGKVAEVIYPGLSSHPHHATAKRLFGDKFGAVVSFRIKGGRDAVVRFFKSLRLITPGPSLGGVESNATYPVASAASPIPEDERKILGITEDLVRLSIGLEEAEDLIEDLDRALNS

SEQ ID NO: 7513 - protein, 209 aa, Ranunculus bulbosus
  unsure (1)..(209): unsure at all Xaa locations
AHEISVLCDADVALVIFSIKGKLXEYSTNDRMEGILERYERYSYTSTELVAADPESQECLSMEYXKXKSKVEALQRSQRYFMGEDIGSXGVKELQALEQQLDTSLRQIRSRKNQLMAGSITELQKNEKALLEENIXLKKQAKEKELALSLCEQLNPVERSPYVPLPDAVPALNTSEPTNQSSGSXGEEEVXAQPSQTKTLMPPWMLHHL

SEQ ID NO: 7514 - protein, 348 aa, Corynebacterium sp. ST-10
MKAIQYTRIGAEPELTEIPKPEPGPGEVLLEVTAAGVCHSDDFIMSLPEEQYTYGLPLTLGHEGAGKVAAVGEGVEGLDIGTNVVVYGPWGCGNCWHCSQGLENYCSRAQELGINPPGLGAPGALAEFMIVDSPRHLVPIGDLDPVKTVPLTDAGLTPYHAIKRSLPKLRGGSYAVVIGTGGLGHVAIQLLRHLSAATVIALDVSADKLELATKVGAHEVVLSDKDAAENVRKITGSQGAALVLDFVGYQPTIDTAMAVAGVGSDVTIVGIGDGQAHAKVGFFQSPYEASVTVPYWGARNELIELIDLAHAGIFDISVETFSLDNGAEAYRRLAAGTLSGRAVVVPGL

SEQ ID NO: 7515 - protein, 214 aa, Ranunculus bulbosus
  unsure (1)..(214): unsure at all Xaa locations
KAHEISVLCDADVALXIFSIKGKLXEYSTNDXMEGILERYXRYSXTSTELVAADPESQECLSMEYNKLKSKAEALQRSQRHFMGEDIGGLCVKELQALEQQLDTSSRQIRSRKNQLMAGSIIELQKNEKALLEENINLKKQAKEKELALSLCEQLNPVERSPYVPLPDXVPALNTNGPTNQSSGSGGXGGGGEEVVAQPPQTKTPMPPWMLXHL

SEQ ID NO: 7516 - protein, 446 aa, Synechococcus sp. PCC 7942
MSFDYDLLVIGAGSGGLAASKRAASYGAKVAIAETDLVGGTCVIRGCVPKKLMVYASSFASQYHYAEAYGWSAVQPQFSWPKLIAAIDAEVNRLSRLHISLLEKAGVDLILGHAQFVDEHRLQVGDRQVTAAKILIAAGGRPIKLPIPGGELAITSREMFHLPEQPQRFAVIGGGYIGCEFAGILRSLGSEVTQIIRRDRILQGFDQELREAVQTGMSQHGVQFRTGVTVERIDQTETGLQLSYSDGSQQIVDQVLMATGREPWLEGLNLDAAGVAIEGRRIAVDAWSRTNQPHIFAVGDCTDRVNLTPVAIAEGRAFADTEFGQKPRQISYENIASAVFSQPEACSVGLSEEAAKAEYGEERIRVYRSRFRPMFYTLPQAEERVLMKLVVETESDRVLGAHMVGKDAAEIIQSVAIAVTMGATKADFDATMALHPTSAEEFVTMP

SEQ ID NO: 7517 - protein, 194 aa, Ranunculus acris
HEMSVLCDADVALIVFSIKGKLTEYSTNDSMESILERYERYSSSCKELPATDPESQECLFRDYNKLKSKVEALQKSQRHLKGEEIGGLGVKELQALEQQLDTSLRQIRSRKNQLMNGSITELHRSSKALHEENVNLKKQAKEMELALSVYKKHNQAPLNVSGTSTQSSETQGEGDVVQPLRAKTLMPPWMLNHL

SEQ ID NO: 7518 - protein, 283 aa, Schizosaccharomyces pombe
MSESQTESTTVTLTNGMVIPRIGFGAFMLKYNECYGLVTQALDSGYRHIDTAAVYGNEDICGKAIVDWCEKNNVKRTDIFLTSKLANCSDYYSTRAAIRSSLHHLGTYIDLFLIQSPAGGKKSRIASWKAMEEFVDSGDIRSVGVSNYGVKHLQELYASNPKFYPCVNQIELHPFLSQDDIVKYCQSHDIAIEAYSPLTHGIRLNDEKLVPIAKKLNISVAQLLIRWSLQKGYIPIIKSTKKEHMLSDLDVFNFTIPDDVVQELSSFDEHWHAGTTYDPTVCD

SEQ ID NO: 7519 - protein, 513 aa, Schizosaccharomyces pombe
MESQPVIWYCHSCSNEFQRPGNCPRCNSDFVEMVEPNTAPEDDPRAANFVNATEFNDPNAMLQNILQSLGQGVVPNVNPTDANRTANPNTNSNPNPNATNAQPNPTMFSTGQFSTEQGLPNVFFGAAAAQPGSGTPFVMPGIVNAAQIRNFFQNIMGGNAPQPEANSEQARNANTETSNPPFASAQTQGQEHRPSSPNPAEHMTGAYVNTPLNQPPSYAASTQPEFQQTTSPIFSSSSTPPPPPPRPSQPTSGESQNTNPRFPFSAQSFVFSVGPNGALHQVNTSTENPQNAQAGAIPITDLGSILERIFGSLNQPGAQQGEGEPFNPANMFSNIFNLSGNPGDYAWGARGLDDIISQLMEQAQGHNAPAPAPEDVIAKMKVQKPPKELIDEEGECTICMEMFKINDDVIQLPCKHYFHENCIKPWLRVNGTCAICRAPVDPNSQQRNNTSTDSANGHNPSNHANPSTSTTNDQGATLRNESFNAASQSNLSSEHGHSSRTPMDDFVDEEPLE

SEQ ID NO: 7520 - protein, 216 aa, Ranunculus bulbosus
  unsure (1)..(216): unsure at all Xaa locations
GLVKKAHEISVLCDAEVALIVFSTKGKLFEYSTDSGMDKILERYERYSYAERELVTNDTDSQGNWSLEYTKLKAKVEILQKNQRHFRGEEIGNLGLKELQNLEQQLDTALKLIRARKNQLLFESISEYQKKEKALNEQNNQLEKQLKEKEKELAKRPQWEQPPNQGQTSQSFTLQSHPCLNIGGNYQGGSSGREDEVPQTQARPTILMPPWMVXHL

SEQ ID NO: 7521 - protein, 477 aa, Neisseria meningitidis Z2491
MNEYSQLIKHPDISLSPISDGIGVGNPATGEILAYVRNTGSDKLKNLIQKAAAAQKLWAAKTALERADILWRWYFLVKENKEALARLMTMEQGKSLTESRGEIDYAASFVRWFAEEARRIDGDVLTSVKASQKLIVLKQPVGVTAAITPWNFPSAMIARKAAPALAVGCAMIVKPASLTPLSAYALVVLAYEAGVPQDLLPVVSGRASEIGREFATNPIIRKISFTGSTEVGAKIFADSAADIKKLSLELGGNAPFIVFDDADLDKAVEGALASKFRNSGQTCVCTNRVYAQSGIYDAFCRKLSEKAAALKLGNGLEDGVNQGPLIEEKAVEKVEQHIADALSKGAVCLTGGKRSALGGTFFEPTVLSGVTAQMAVAREETFGPLCPVFRFETEAEVIEAANNTEYGLAAYLFTADTARQWRVGEALEYGMVGINTGLISNEAAPFGGVKRSGLGREGSKYGADEYLELKYLCMDVG

SEQ ID NO: 7522 - protein, 398 aa, Neisseria meningitidis MC58
MQNYLTPNFAFAPMIPERASGSRVWDTKGREYIDFSGGIAVNALGHCHPALVDALNAQMHKLWHISNIYTTRPAQELAQKLVANSFADKVFFCNSGSEANEAALKLARKYARDRFGGGKSEIVACINSFHGRTLFTVSVGGQPKYSKDYAPLPQGITHVPFNDIAALEAAVGEQTCAVIIEPIQGESGILPATAEYLQTARRLCDRHNALLILDEVQTGMGHTGRLFAYEHYGIVPDILSSAKALGCGFPIGAMLATEKIAAAFQPGTHGSTFGGNPMACAVGSRAFDIINTPETLNHVREQGQKLQTALLDLCRKTGLFSQVRGMGLLLGCVLDEAYRGRASEITAAALKHGVMILVAGADVLRFAPSLLLNDEDMAEGLRRLEHALTEFAATSDNP

SEQ ID NO: 7523 - protein, 284 aa, Bacillus cereus ATCC 10987
MTKIFILASTLSLSFFSGLNIGNAATENFSPVTNAIVQNNDHFAEGNSKDNNKPPGNDGSQDDSDSGGNGSDGSGSGDNGSGGNGSGGNGSGDNGSGGNGSGGNGSGGNGSGGNGSGGNGSGGNGSGGNGSSGNGSDGSGSGGNGSGGNDSGGNGSGGNGSGGSGSDGNGSGGSDSGGSGSSGNGSGGSGSDGNGSGGSGSGGNRGKGDSSSQGGNDSHGGNRGKGDSSSQGGNGSQGGNVKDNAKKQGDKLPNTATHYPASILMGLSTFLIGMLLFIRRKNAK

SEQ ID NO: 7524 - protein, 215 aa, Mesorhizobium sp. BNC1
MRPIDNKKFVLASHNKGKLDEFAGLLAPFGYEIRSAAELGLPEPEETGTEFEQNAYIKASAAAKATGLPALSDDSGMCVDALGGAPGVYTADWATLPDGRRDFGIAMEKVEKLLREKGATSPEQRRARFVAVLCLCFPDGEAEFYRGEVEGHLVWPPRGGLGFGYDPVFQPDGHQRTFGEMTAAEKHGWKPGDAQALSHRARAFQKFARARLGVA

SEQ ID NO: 7525 - protein, 519 aa, Oryza sativa
MQFSSVFPLEGKACVSPIRRGGEGSASDRLKIGDSSSIKHDRAVRRMCLGYRGTKNGAQCVLTSDAGPDTLHVRTSFRRNFADPNEVAAVILGGGTGTQLFPLTSTRATPAVPIGGCYRLIDIPMSNCFNSGINKIFIMTQFNSASLNRHIHRTYLGGGINFTDGSVEVLAATQMPGEAAGWFQGTADAVRKFIWVLEDYYKHKAIEHILILSGDQLYRMDYMELVQKHVDDNADITLSCAPVGESRASDYGLVKFDSSGRVIQFSEKPKGTDLEAMKVDTSFLNFAIDDPTKFPYIASMGVYVFKRDVLLNLLKSRYAELHDFGSEILPRALHEHNVQAYVFADYWEDIGTIRSFFDANMALCEQPPKFEFYDPKTPFFTSPRYLPPTKSDKCRIKDAIISHGCLLRECTIGHSIVGVRSRLNSACELKNTMMMGADLYETEDEISRLLSEGKVPIGVGENTKINNCIIDMNARVGRNVVITNSEGVQESDRPEEGYYIRSGIVVILKNATIKDGKVI

SEQ ID NO: 7526 - protein, 517 aa, Sorghum bicolor
MQFSLASDANSGPHPIRRSCEGGGIDRLERLSIGGSKQEKALRNRCFGGRVAATTQCILTSDACPETLHFQTQSSRKSYADANHVSAIILGGGTGSQLFPLTSTRATPAVPVGGCYRLIDIPMSNCFNSGINKIFVMTQFNSTSLNRHIHRTYLGGEINFADGSVQVLADTQMPEEPDGWFQGTADSVRKFIWVLEDYYNHKSIEHIVILSGDQLYQMNYMELVQKHVEDNADITVSCAPVDESRASNNGLVKCDHTGRVLQFFEKPKGADLNSMRVDTNFLSYAIGDAQKYQYIASMGIYVFKKDALLDLLKSKYTQLHDFGSEILPRAVLEHNVQTCIFMGYWEDVGTIKSFFDANLALTEQPSKFDFYDPKTPFFTAPRYLPPTQLDKCKIKDASISDGCLLRECSIEHSVIGVCSRVSYGCELKDCVMMGADIYETEEEASKLLLAGEVPVGIGGNTKIRNCIIDINARIGKNVVITNSKGIQEADHPEEGYYIKSGIVVILKNATIKDGSVI

SEQ ID NO: 7527 - protein, 416 aa, Methanococcus maripaludis S2
MFQKPKGTRDFLPEEMKKRKTIEKKLRKVFDSYNFSEINTPTFESFELLSKKTGDEIRTQLFVFRDHGDREMGLRPELTSSVARFYINEFKNTPKPVKLYYFTNCFRYENPQAGRYREFWQMGSELIGSKKPIADAEVVNMAIEGLKEINMDFEIHIGHLGVLKGVFEKYNLSDDEGNEIRRLIDKEDMDGLKSVLSRLESEKNIEISKKVFEVLDLKGGKEVIPILKEKLADFESSVAALENLDSILEFVPHDYVINFGIARGLDYYTGMVFEVYGKKEGAKQVCGGGRYDNLIELFEGEPSPAVGFAYGFDRIMLNIDDFEVENESIFVVPVKSSEMLLKECLKIAKTLRDSGKSVEVDLMGRKLNKALNYANTKNIKKVLIVGENDIRDGKVSLKNMETGEQSLIELKDILNI

SEQ ID NO: 7528 - protein, 254 aa, Escherichia coli O157:H7
MENIMNNPVIGVVMCRNRLKGHATQTLQEKYLNAIIHAGGLPIALPHALAEPSLLEQLLPKLDGIYLPGSPSNVQPHLYGENGDEPDADPERDLLSMALINAALERRIPIFAICRGLQELVVATGGSLHRKLCEQPELLEHREDPELPVEQQYAPSHEVQVEEGGLLSALLPECSNFWVNSLHGQGAKVVSPRLRVEARSPDGLVEAVSVINHPFALGVQWHPEWNSSEYALSRILFEGFITACQHHIAEKQRL

SEQ ID NO: 7529 - protein, 308 aa, Glycine max
MFTFLFDDLGVPQDYRHMDGFGVNTYTLINKAGKAVYVKFHWKTTSGIKCLLEEEAIKVGGANHSHATQDLHDSIAAGNYPEWKLFVQTIDPEHEDKFDFDPLDVTKTWPEDIIPLQPVGRLVLNKNIDNFFAENEQLAFCPAIVVPGVYYSDDKMLQTRIFSYADSQRHRLGPNYLQLPANAPKCAHHNNHHEGFMNFIHRDEEVNYFPSRYDPVRHAETFPIPPAICSGRREKCGIEKENNFKQPGERYRSWAPDRQDRFNRRWVDALSDPRVTHEIRSVWISYWSQADRSLGQKIASRLSMRPNI

SEQ ID NO: 7530 - protein, 287 aa, Zea mays
  unsure (1)..(287): unsure at all Xaa locations
MATSPALLFPSPSSASSAPSSARVEAVVLFNVCDSYVRRPDQADRVIGTLLGSLLSDGTVHVRNSYVVPHSESADQVAIDIDYHHNMYASHQKVNPKEVIVGWFSTGFGVSGGSTLIHEFYSREVQNPIHLTVDTGFTRGEASIKAYISSNLSLRDSQLAAQFQEIPLDLKMIEAEKAGFEILKSTMVEKLPNDLEGMESSMGKLYILIDEIYKYVDDVVEGRVAPDNRIGRFISDSFASVPXLSPAAFDKLXHGQDQDNLALVYLSSIPRTQISIAEKLNTAAQAL

SEQ ID NO: 7531 - protein, 472 aa, Selenomonas ruminantium
MKIKAQISMVMNLDKCIGCHTCSITCKNVWTNRQGAEYMYFNNVETKPGIGYPKHWENQEKWKGGWELKNGRLQLRSGNKATRLAKLFYHPDQPEMDDYYEPWTYDYETLITSQRKNHQPIARPRSLITQKRMEIKWGPNWEDDLAAGESARQDYNLQNIAEDITLEFHDLFMKYLPRTCNHCLNPACVAACPSGAIYKRDEDGVVLVSQDGCRGWRHCVPACPYKKVYFNWKTNKAEKCIFCFPRLENGLPTVCADSCVGRLRYMGVLLYDMDKVKEAASTPDKGEIYHSMLDIILNPHDPEVIAAAKDAGIPANWLEAAQNSPVYKMVKEWQVALPLHVEYRTLPMVWYVPPLSPITQRAEADVYLPAVQEMRIPLSYIAELFAAGNVGVVEKVLQRLLDMRMVMRTQETGEKLSRKLEYELETYQAMYRLMGIAKYKDRFNIPAGLTGESQDKLRELQGSCGYNCPGGC

SEQ ID NO: 7532 - protein, 987 aa, Bradyrhizobium japonicum USDA 110
MSQMMMNNRSLPLSPDEIDPSRDRHRSGPRTPAPSRCAGLGWLLRRALLASVGVLVGLAAQMMPAHAQLVGGNGGTGSAYSDSVPGAGGAGGLAGDGNAAGNGASGGGPDTAGSGPYGGAAGNNVAPGGGTGGAGYSGGGGGGSGSGGGGGFQGGINAGGGGGGGGRAATVSGNYAAVVNLTGGNGGAGGLGPYNGSAGGGGGGGDGLYLSGGDLQVNAGVFIRGGSGGDAGTTSADGNGGAGGGGKGVVVGTTATVTNAGSITGGSGGSGGGSAIGSGSGGGGGDGLVLAAGGIVINTGMISGGTGGPQGDPRYPTFFPPVAGGAGISGAGLVVQNAGIISGGLGNAGTGARANAITFTGGVNSLELQAGSTVTGNVMAFSYADTLRLGGAANSSFDLSTLGDSAQYRGFGSFVKAGSSNWTLTGSSSFTGAVSVDAGILSVNGSLASASLTTVNSGGTLGGNGTVGNTTINGGVLAPGNSIGLLTVNGNLVFTAPSTYVVEVSPANADRVNVTGTATLGGATVSAVFAAGSYVAKQYTIVNAGGGLTGTFGALVDTNLPATFHTSLSYDANNAYLDLALNFSIPGGLNVNQQNVGNALSTFFNLTGGIPAVYGTLSQAGLTQASGETATGSQQTTFDAMTQFIGVLTDPFLAGRGDGGSSPAGASQFADEDGFRAYASTGRGRSAAERDAYAALSRKAPAASDIVMQRWGVWAAGYGGSQTTDGNATMGSNTATSRIAGTAVGADYRFSPDTVAGFALAGGGTSFGVANGGSGRSDLFQAGAFLRHGVGAAYVSAALAYGWQDITTTRTVTIAGSDQLRARFNANAYSGRVEAGYRFVTPWMGLTPYAAGQSTIFDLPAYAEQVLAGSNAFALSYGSRSVTDTRSELGLRADRSFALSDAVLVLRGRAAWAHDFDPDRAIAATFQALPGASFVVNGAAQARDSALVTASAEVKWRGGVSFGATFEGEFSNVTSSYAGKGIIRYAW

SEQ ID NO: 7533 - protein, 207 aa, Ranunculus bulbosus
RHEMSGVCDAEVALIVFSTKGKLFEYSTDSGMDKILERYERYSYAERKLGASDTDSQGNWSLEYTKLKAKVEILQKNQRHFRGEDIANMSLKELQNLEQQLDSALKLIRARKNQLTYESISDLQKKEKVLQEQNNQLEKQLKEKEKELAKREQWEQPNQGQTSRSFTPQSPSSLNIGGSYQGNNGGEGFQTQNRPTILMPPWMLSHL

SEQ ID NO: 7534 - protein, 253 aa, Zea mays
MPSQSTHTSSSLSSSTAPILPCSSAAALFRSVMAAVATETPFHVLAVDDSLPDRKLIERLLKTSSFQGKLSHRMIIPVSFASALMTTVDSGSKALQFLGLHDQDSTVPPVHTHQLDVAANQDVAVNLIITDYCMPGMTGYDLLKKIKESSSLRDIPVVIMSSENIPSRINRCLEEGADEFFLKPVRLSDMNKLKPHILKSRCNQEQHQQSDSHSGERRNPTIGSSSDSINNRKRKGAGTEEILPQLANRSRHS

SEQ ID NO: 7535 - protein, 215 aa, Ranunculus bulbosus
ALRHEMSVLCDAEVGLIIFSARGKLYEFASAGGMSRTLERYHKNSFSNQDSNLAIDRETQSWYQEVSKLKAKYESLQRSQRHLLGEDLGPLNVKELQNLEKQLEGALAQARSRKTQIMLEQMEALRRKERELGDMNKQLKNKYQLEAEGQGSLRAMQGSWESNALNNYSGHPSHSSSMDCEPTLQIGYHQYVSADGGPIQRNNAGENNFIQGWEL

SEQ ID NO: 7536 - protein, 234 aa, Archaeoglobus fulgidus DSM 4304
MVSLDKAVIARLRKGGEEFEVLVDPYLARDLKEGKEVNFEDLLAAEEVFKDAKKGERASVDELRKIFGTDDVFEIARKIILEGEVQITAEQRREMLEAKRKQIINFISRNTIDPRTNAPHPPSRIERALEEAKVHIDIFKSVEAQVKDIVKALKPILPLKFEEMEIAIKIPPEHTGRAISALYNFGGVTREEWQRDGSWICVMRIPSGMYGDLMDLLGKVAKGEALTKVLRRIG

SEQ ID NO: 7537 - protein, 511 aa, Azotobacter vinelandii
MTALPKPLVLIILDGFGHSDSPAHNAIHAARTPVYDRLLATCPHGLISGSGMDVGLPDGQMGNSEVGHMNLGAGRVLYQDFTRVTKAIQDGEFFDNPAICAAVDRAVAAGKAVHILGLLSEGGVHSHQDHIAAMAELAVRRGAEKIYLHAFLDGRDTPPKSALSPLLTLDACFARLGKGRIATLIGRYFALDRDNRWDRIEQAYRLIVDGKAEYAAETAAAGLQAAYARDESDEFVKATAIGAPVRVEDGDAVVFMNFRADRARELSRTFVEADFKEFERPHVPRLAGFVTLTQYSASIPAPCAFPPTELTNVLGEYLANNGKTQLRIAETEKYAHVTFFFSGGREEPFAGEERILIPSPQVATYDLKPEMSAPEVTERMVEAIENRRYDVIIANYANGDMVGHTGVFEAAVKAVECLDASLGRIVAALEKVGGEALITADHGNVEQMRDESTGQAHTAHTCEPVPFIYVGKRALRIRAGGVLADVAPTMLKLLDLPQPREMTGRPLVEPA

SEQ ID NO: 7538 - protein, 232 aa, Syringa vulgaris
  unsure (1)..(232): unsure at all Xaa locations
RMENKINRQVTFAKRRNGLLKKAYELSVLCDAEVALIIFSNRGKLYEFCSSSSMLRTLERYEKCNYGAPEPHVSSREALELSSQQEYLKLKARYEALQRSQRNLLGEDLGPLNSKELESLERQLDMSLKQIRSTRTQAMLDTLTDLQRKEHALNEANQSLKQRLMEGNHISLQWNQDPEEVGYGREPTQHQPHGFFHPLECEPTLQIGYQNDPMAAAGPSLNNFMSGWLPXI

SEQ ID NO: 7539 - protein, 192 aa, Schizosaccharomyces pombe
MPTIKCVVVGDGAVGKTCLLISYTTNKFPSDYVPTVFDNYAVTVMIGDEPYTLGLFDTAGQEDYDRLRPLSYPQTDVFLVCFSVTSPASFENVKEKWFPEVHHHCPGVPCLIVGTQIDLRDDPSVQQKLARQHQHPLTHEQGERLARELGAVKYVECSALTQKGLKNVFDEAIVAALDPPVPHKKKSKCLVL

SEQ ID NO: 7540 - protein, 250 aa, Azotobacter vinelandii
MPRLPLIGVTACTRQIGSHPFHIAGDKYLRAVAEGAGGLPLIVPALGELIDREALLERLDGLLCTGSPSNVEPHYYQGAASAPGTPHDPARDSTTLPLIRAAVAAGVPLLGICRGFQEMNVAFGGSLHQKVHEAGPYADHRELEDEALEIQYGPRHALHVQPGGLLDGLGLPRRIEVNSLHGQGIERLAPGLRTEGLAQDGLIEAFSVEGAKSFALGVQWHPEWQFHTNPCSRALFQAFGDACRRRAERR

SEQ ID NO: 7541 - protein, 139 aa, Triticum aestivum
MAMAALREASRRLAFTSTRVLAGAATRPLLLTHSRGITHKLFIGGLSQFATEDSLAEAFTRYGQVLEATIVTDKMTSRSKGFGFVKFASEEEANKAREEMNGKVLNGRVIYVDIAKAKQDRAADVVPIARGPPKPVGNT

SEQ ID NO: 7542 - protein, 548 aa, Neisseria meningitidis MC58
MKHLHDLPAWSKLWNHFDDSKTLHMREMFEQDPQRAERYWLQVGGLTLDYSKNRINDETMSLLFELAREAGVPERMRQMFHGEKINTTENRAVLHVALRNRTNSPIVVDGEDVMPKVNRVLQRMGEFAHEVRSGSWLGYTNQVITDVVNIGIGGSDLGPLMMCTALKPFGHPRLNMHFVSNVDGSQLRDVLSKVHPETTLFIIASKTFTTQETLTNALTAREWFLNHAGDEEAVAKHFAAVSTNQKAVAEFGIDTANMFEFWDWVGGRYSLWSAIGLPIMLYLGEENFIEMLNGAHLMDQHFINTPLERNLPVILALIGIWYINYYGGGSHVIAPYDQHLHRLPKFIQQLDMESNGKQVTLDGKAVGHETSPIIWGETGINGQHAFFQLLHQGTHITPIDLIASLEKRSNLPGHHEILLANVFAQAEAFMRGKTPDEVRAELKAQGMDEVRIEELVPHKTFSGNRPTNLILMDKVNPRNMGSLIAMYEHKTFVQGIIWGINSFDQWGVELGKQLAKTILGELTGETGPQKHDSSTERLINLYLQTNRK

SEQ ID NO: 7543 - protein, 239 aa, Methanococcus maripaludis S2
MSMIKKLIAECLGTGILVFFGPGAAAMTLMIANNTGTAGIGLLGGLGDWFAIGFSFAIAIAAVIYTMGRISGAHINPAVTIGLWAVKKFPTKDTVLYIIAQLIGAAIGSLLFFACIGIDSVTIGGLGATAPFAGISYFQAILAEFIGTFLLMFVIMGVAVDKRAPDGFAGLVIGLTVGAIITTTGNIAGASLNPARTFGPYLIDSIYGLNLWYYFPIYIIGPVLGAIVAAFTYEYLNRE

SEQ ID NO: 7544 - protein, 258 aa, Manihot esculenta
MVTAHFVLIHTICHGAWIWHKLKPALERAGHKVTALDMAASGIDPRQIEQINSFDEYSEPLLTFLEKLPQGEKVIIVGESCAGLNIAIAADRYVDKIAAGVFHNSLLPDTVHSPSYTVEKLLESFPDWRDTEYFTFTNITGETITTMKLGFVLLRENLFTKCTDGEYELAKMVMRKGSLFQNVLAQRPKFTEKGYGSIKKVYIWTDQDKIFLPDFQRWQIANYKPDKVYQVQGGDHKLQLTKTEEVAHILQEVADAYA

SEQ ID NO: 7545 - protein, 512 aa, Escherichia coli
MTNNPPSAQIKPGEYGFPLKLKARYDNFIGGEWVAPADGEYYQNLTPVTGQLLCEVASSGKRDIDLALDAAHKVKDKWAHTSVQDRAAILFKIADRMEQNLELLATAETWDNGKPIRETSAADVPLAIDHFRYFASCIRAQEGGISEVDSETVAYHFHEPLGVVGQIIPWNFPLLMASWKMAPALAAGNCVVLKPARLTPLSVLLLMEIVGDLLPPGVVNVVNGAGGVIGEYLATSKRIAKVAFTGSTEVGQQIMQYATQNIIPVTLELGGKSPNIFFADVMDEEDAFFDKALEGFALFAFNQGEVCTCPSRALVQESIYERFMERAIRRVESIRSGNPLDSVTQMGAQVSHGQLETILNYIDIGKKEGADVLTGGRRKLLEGELKDGYYLEPTILFGQNNMRVFQEEIFGPVLAVTTFKTMEEALELANDTQYGLGAGVWSRNGNLAYKMGRGIQAGRVWTNCYHAYPAHAAFGGYKQSGIGRETHKMMLEHYQQTKCLLVSYSDKPLGLF

SEQ ID NO: 7546 - protein, 123 aa, Fagus sylvatica
LMSLLLLSGRLVRERIGPAMLSAVQSQMGAVETNFDEIPNIFDTGSAKGLPGDSVEKIPKIIITTNNNVDASGDRVSCSVCLQDFQLGETVRSLPHCHHIFHLPCIDKWLLRHGSCPLCRRDL

SEQ ID NO: 7547 - protein, 257 aa, Prochlorococcus marinus str. MIT 9313
MKPSRLSSLDPVKMPEWRWAPFLSHAINAFIPLKPEPYPVAPEFLQREGKTGSKSQPIRVTTCTWACRTKKFRQVRAACVEAGRSASVLNFVINPYHTFDLPFFGADLVTLPSGHLLALDLQPAITSDERHTKQVWERLMPIFEHWRVHLPEGGPIPEEAKPYFSPGFLWTRLPLSIEGNQLIDEVIMPAFKDYLNLYLDLVEMAEEVSPQRAFKLLEGQKRYLSYRAKKDPARAMLARFHGHQWTESYIHNVLFDL

SEQ ID NO: 7548 - protein, 479 aa, Vibrio parahaemolyticus RIMD 2210633
MTNKKLTTAAGCPVAHNQNVMTAGPRGPQLLQDVWFLEKLAHFDREVIPERRMHAKGSGAYGTFTVTHDITKYTRAKIFSEVGKKTELFARFTTVAGERGAADAERDIRGFALKFYTEEGNWDLVGNNTPVFFLRDPLKFPDLNHAVKRDPRTNMRSSTNNWDFWTSLPEAFHQVTIVMSDRGIPASYRHMHGFGSHTFSFINAENERYWVKFHFKTQQGIKNIGDEEAQLLAGKDRESHHRDLYESIERQDFPKWKMYVQIMPELEADEVNFNPFDLTRVWSQKDYPLIPVGEFELNRNPENFYAEVEQSAFNPAAIVPGIGFSPDKMLQGRLFAYGDAQRYRLGVNHHQIPVNAPRCPVHSYHRDGAMRVDGNFGSTLGYEPNYKQEWAEQPDYSEPPLRISGHADHYDHRVDEDYFSQAGDLFRLMNEEQRQALFDNTARAMDGVPDFIKERHVTHAYQADEAYGKGLELALGLAK

SEQ ID NO: 7549 - protein, 481 aa, Zea mays
MAIVGGGGSWSIHGRADVTSRYEVLGRAGSGSYADVYRGRRRSDGAAVALKEVHDAVSARSEVEALLAIPPSPNVVALIDHFPGGDCDDDVLVLEWLPLDLAAVVRDARRRAGGGEGGEGIPASQLKRWMLQVLEGVAACHRAGVVHRDLKPENLLISEDGVLKVADFGQARILQQSAPTFQEMYPHEQSSGMETWVPQQQPAVLQGTEEEPTSYESDATAGQEPETLTAADYLRELDQLREKSSDVDKMSFQDEHASCLATCSTGDIEDDPYPASYSDDMEGIGEDSGAFTSCVGTRWFRAPELLYGSTNYGLEIDLWSLGCILAELMKLEALFPGISDIDQISRIINVLGDITEETFPGCSNLPDYNKISFNKVEKPTGLEACLPNRSPTEVSIIKQLICYDTAKRTSAVDLLNDRYFTEEPLPAPIEGLHVPASKDEDDDSSTEEWGNYRDGVSRVDFDEFGSMDATKTEKGFSIQFS

SEQ ID NO: 7550 - protein, 205 aa, Zea mays
LIMRFSTVIHERGSPETIRDPRGFAVKIYTREGNWDLLGNNFPFPDVIHAFKPNPRSHVQEYWRVFDFLSHLPESLHTFFFLFDDVGVPSDYRHMEGFGVNTYTFVSAAGKAQYVKFHWKPTCGVRCILTDEEAALVGGRNHSHATQDLYDSIAAGSFPEWTLYVQVMDPDTEEQYDFDPLDDTKTWPEDLLPLRPVGRLVLDRN

SEQ ID NO: 7551 - protein, 346 aa, Neisseria meningitidis MC58
MKAMVYHGANDIRFEEKPRPQIIDPTDAVVKIVKTTICGTDLGIWKGKNPEVADGRILGHEGIGIVEEVGEAVKNIKVGDKVIISCVSKCCTCDNCKTQLYSHCRNGGWILGYMIDGTQAEYVRTPYADNSLVPLPDNVNEEIALLLSDALPTAHEIGVQYGDVKPGDTVFIAGAGPVGMSALLTAQLYSPAAIIVCDMDENRLKLAKELGATHTINPASGEVSKQVFAIVGEDGVDCAIEAVGIPATWNMCQDIVKPGGHIAVVGVHGQSVDFKLEKLWIKKLAITTGLVNANTTEMLMKAISSSSVDYTKMLTHHFKFSELEKAYDVFKHAAENQVMKVVLEAD

SEQ ID NO: 7552 - protein, 430 aa, Agrobacterium tumefaciens str. C58
MSPSPVWHPFTQHGLEPPMKRVVSADGAFLVDEDGNRLFDAISSWWVITHGHRHPAIMAAIRAATETLDQVIFAEFSHEPAETLARGLIELAPAGLSHVFYSDSGSTAVEVALKMALGYFHNCGEKRDRIVVMEHGYHGDTIGTMSTGERGVFNAAYEPLLFGVDRLAFPEVGSEQCTLDMFEAYCRSGRVAALLVEPLVLGAGGMKVYAANVLAGLKQIAESHGCLVIADEVMTGWGRTGTVFACEQAAISPDILCTSKGLTGGSLPLAATLCSAQIFDAHFSTDRRKTFFHSSSYTANPIACAAAVANLQVWRDEPILQRIGQVQQTLGDHIRRFADDGRFANIRQAGTIAALDLVVPAGGYLSEAGPRMRQLFRRRGFLIRPLGNVLYLMPPYCSTADDLTRAFDVIDEVAGIVTDVASAKSYGVGK

SEQ ID NO: 7553 - protein, 147 aa, Griffithsia japonica
MALKRINKELQDLGKDPPSNCSAGPASDDLFHWQATIMGPPDSPYSGGVYFLTIHFPTDYPFKPPKISFTTRIYHPNINSNGSICLDILRDQWSPALTVSKVLLSICSLLTDPNPDDPLVPEIAQTYKTNRARYEETAREWTRKYAQ

SEQ ID NO: 7554 - protein, 177 aa, Vibrio cholerae O1 biovar eltor str. N16961
MKHTVEVMISEQEVAQRIRELGQQITEHYQGSSDLVLVGLLRGSFVFMADLARQIHLTHQVDFMTASSYGNSMQSSRDVRILKDLDDDIKGKDVLLVEDIIDTGNTLNKVKEILALREPKSIRICTLLDKPTRREVDVEVNWVGFEIPDEFVVGVGIDYAQKYRHLPYIGKVVPLAE

SEQ ID NO: 7555 - protein, 232 aa, Oryza sativa
MCGILAVLGVADVSLAKRSRIIELSRRSVKIVRRNFDDSTWSKSSSECLGGGGGKSNVVFVFGYQYGSELWCIINDGLFDGWLRHRGPDWSGIHCYQDCYLAHQRLAIVDPTSGDQPLYNEDKSVVVTVNGEIYNHEELKANLKSHKFQTASDCEVIAHLYEEYGEEFVDMLDGMFAFVLLDTRDKSFIAARDAIGICPLYMGWGLDEMKALSDDCERFISFPPGHLYSSKT

SEQ ID NO: 7556 - protein, 686 aa, Pirellula sp.
MMSTPDTSPSAYNDRPQATTGMPPGIPYIIGNEAAERFSFYGMKAILTVFMVDYLHWMSSAATNQGMSNAEATEHYHTFTAAAYFFPVIGALLSDIFLGKYRTILYLSIVYCIGHGALALMGSPPMSAGMWLFAGLLLISIGSGGIKPCVSAHVGDQFGKSNSHMLTKVYQWFYFSINFGSFISTLLTPWVLEHYGPHWAFGIPGVLMAIATLLFWMGRHKFVHIRPGGYRFLQELLSWEKFSSIPKLMIIFSFVAVFWALFDQTGSSWVLQAKNLNREWLGYTWLESQIQAINPILVLTLIPLFQFLIYPTIDRVFPLTPIRKISLGLFVMIGGFAIVALLQERVDAGSQPSIGWQFLAYAVLTASEVMVSITCLEFAYTQAPKTMKSIVMAVFLFSVSMGNVFTATVNRYIQTPAAASLAADIDLEEDAKEPMDNGSFVGELKLDDPAAPKLTLLGPDNTLGTPDDATLLLNKEGKLDSIENASLTSFNAVAEKIEAYFLDQTGDDSTRAFPSVEEAQPLVAGAEDAFGNPITYKLLSRDQYQLVSAGADGENDTQWDETLTGTVDRANTSDTVNTDAPTFNWLERQKIAIESEGDPNKAETVKSKLISERGGGDETKLSRDYAIGGRTLLEGAAYFWFWTTCIFVTAILFVPVGYLYKEKTYIQDEEDAEHEAEALADEAIST

SEQ ID NO: 7557 - protein, 377 aa, Streptomyces avermitilis MA-4680
MKAVVYKGAFDVAVEDVEKPSIQHPNDVIVRITSTAICGSDLHMYEGRTAAEPGIVFGHENMGIIEELGQGVTALKEGDRVVMPFNVACGFCTNCVDGFTGYCLTVNPGFAGGAYGYVAMGPWQGGQAEYIRVPYADFNCLKLPPGNEHESDFILLADIFPTGYHGCELAQVRPGESVAVYGGGPVGLMAAYSALLRGAKKVFVVDRVLERLQKAEEMGAVPINFAEGDPIAQIKEQTEGIGTDKGVDAVGYQAMAHGTDREEPATVLNSLVGTVRPTGALGVPGLYVPADPGGPDEQAKQGMLLVAIGKLFEKGLRVGTGQCNVKRYNRYLRGMITEGRAKPSFVVSHELPLDQAPSAYDKFDKRIEGYTKVVLHP

SEQ ID NO: 7558 - protein, 164 aa, Vitis amurensis
GEGGFGRVYRGTLPNSQTPIAVKRISHDSKQGMREFVSEIASIGRLRHRNLVQLLGWCRRYGNLMLVYDFMENGSLDKFLFDEPKLILSWEQRFNIIKGVASGLLYLHEGYEQVVIHRDIKASNVLLDNELNGRVGDFGLARLYEHGSNPGTTRVVATLVTSRQ

SEQ ID NO: 7559 - protein, 193 aa, Tropheryma whipplei TW08/27
MEIVFVSENENKITEAREILLPLGFQPIFCGVTCRETGLTFTENAVLKAQAAVGSVKDVPIMADDSGICVDALNGMPGVLSSRWSQDGRNIDLLLWQMRDVPDVHRTAHFVCSIACVMPNTEVRTVSSVWHGRILHVPDGTGGFGYDPVFLPDGYSVSAAGLGSDLKNRISHRYKALRLMSSLLKRTYSSCHA

SEQ ID NO: 7560 - protein, 567 aa, Eremothecium gossypii
MTQLPAEPMPKHQQKHAQTSIKAVKRLKDAKPFLQPVDPVKLNVPHYFQHIKRPMDLSTIERKLAVGAYETPEQVAQDFNLMVDNCAKFNGASSVIAQMARNIQASFEKYMLNMPPRDQPVQPRKRRKSSEEAAVVIRRAETHTGRPKREIHPPKSKDIYPLENAKPQSKKHQTEMKFCQQVLKELTAKKHASFNYPFLEPVDPIALNCPSYFDYVKEPMDLGTIGKKLGNWEYADYDDFERDVRLVFKNCYAFNPDGTLVNMMGHRLEDVFNSKWADRPIVADEDSDEGEDDSEYESDVPYTEEDIDESLITNPAIQYLEQQLARMKVELQQLKRQELERIRKERRLARGLSNGGSSSTGRRKRSRTARKKGGAGAAAAAGGSSGGGAGLGNGSGGSGLVKKKRKLKTVVTYDMKRIISERIGDLPEAKLERAVDIIKNSMPDIVGADGEVELDIDQLDDTTILTLYNTFFRQYGAPSSSVAEDELRTNSLSPPSAASSKANKRRRSKALSEEEQNKQIEKIKNKLAILDSASPVSPNLLGLLSGNNEGSSEDDDDDDISSESEEE

SEQ ID NO: 7561 - protein, 644 aa, Deinococcus radiodurans R1
MLTPDLAARLRLAFDDDRDAETFRLRLERYGPELADNLRAVYGNHADALIGELLEVMLHAYHARPADLKRLDEARLLRPDWLQGPEMVGYVAYVDRFAGTLRGVGERLEYLEGLGVTYLHLLPLLRPRDGENDGGYAVQDYRSVRPDLGTIDDLSALARELRGRGISLVLDLVLNHVAEEHEWAVRATAGEAAYRDYFHIFPDRTQPDAYERTLPEIFPDFAPGNFTWNGEAGGWVWTTFNRSQWDVNWGNPAVFREYLDLILTLANRGVEVFRLDAIAFLWKRLGTDCQNQPEVHRLTHALRAATRIVAPAVAFKAEAIVAPGDLIHYLGSRDHHGRVSDMAYHNSLMVQLWSSLASRDTRLLTAALAAFPPKPTNTTWGVYVRCHDDIGWAIADEDAARVGLSGPAHRHFLSDFYSGEFPGSFARGLVFQHHPQTGDRRISGTAASLAGLDLALETGDAERVNDALARLLLLHAVMLGFGGVPLLYMGDELALLNDTDFAAVPAHAADNRWVHRPQMDWELVASAQADAATGQPVTPAGRMFAGLRHLLAVRRRTPHLHASTESRPLPSPDPCVLLLRREHPTGVLLQVYNFSEHHITFPTWPLQEQLGAVAHDLLGESQFHLGGPDLALEPYRALWLVAGG

SEQ ID NO: 7562 - protein, 488 aa, Streptomyces avermitilis MA-4680
MPDLFIDGEWVRGATGTTREVVNPFDATVVRSVDEGDATDVDRAVTAARRAFHAADWAAAPTQRRADVLFRVAEYLLRDIEEIARDETLNTGKTLAEARIDVKDVSNAFRYFAEMAGKDAGRVVDAGPDVLSRVVHEPVGVCALIAPWNYPLLQASWKVAPALAAGNTFVLKPSEITPLTTIAMMRLIEEAGAPPGVANLVLGAGATVGSAMTVHPEVDLVSFTGGLGTGRRIMESAAREVKNIALELGGKNPNVVFDDADFEAAVDHTLDASFLHSGQVCSAGSRLLVQDSWHDRFVRELADRASRIRLGNGLDPHTESGPLSSAEHRAKVEKYIDLGRSEGARLVTGGRRPDDPDLAHGFFLLPTIFDDCDRSMRIVQEEVFGPVVTVETFRTEDEAVELANDTRYGLAAGVWTGEASRAQRVAARLRHGTVWINDFHPYLPQAEWGGYGQSGVGRELGPTGLREYQEIKHIYQNLSPGPSGWFKG

SEQ ID NO: 7563 - protein, 164 aa, Vitis amurensis
GQGVFGRVYRGVLPTSKLEIAVKKISHESRQGMKEFVAEIVSIGRLRHRNIVSLLGYCRRKGELLLVYDYMPNGSLDKYLYDQPKVSLNWSQRFRVLKGVASGLSYLHGEWEQVVVHRDVKASNVLLDGELNGRLGDFGLARLYDHGTDPQTTHVVGTLGYIAR

SEQ ID NO: 7564 - protein, 324 aa, Oryza sativa
  unsure (1)..(324): unsure at all Xaa locations
MAGAAATPPAMMRAVXHVEVPVPSAKKNEVLLKLEAATINPVDWKIQKGMLRPLLPRRLPFIPVTDVAGVVAGVGPGVNDFAVGDQVVAMLNSMNGGGLAEYAVAAANLTVKRTPNVSAAEGAGLPIAAGTALQALRSIGAKFDGTGEPLNVLVTAASGGVGLYAVQLAKLANLHVTATCGARNAELVRGLGADEVLDYRTPEGAAMRSPSGRRYDGVVHCTVGVGWPAFEPLMAPRGKVIDITPNFSAMLTSALHAVTLRRKRLVPLLLSPNKADLEFLVGLVGEGKLRTVVDSRFPLGDAAKAWQKSIDGHATGKIVVEMEG

SEQ ID NO: 7565 - protein, 1183 aa, Neurospora crassa
MSQISDADVSGKPDIVSVPSLESAIPLLENEQQNQARQQLQQEQQGAGQGITEPQPDAIVVVPQPPADPSLPAQEPVPDTTGRFPRRARGNNAPVYNLARLTGTYVHGKRASKGDIVLQKKRKPKGRKLQALLAQQALEAEQAAQLAAQGGTPANPAADVPSIQPATQETDKPDSNAPADTLTIPPVHAPAAPEPTFPESAASPDKNGAAEAADAPAEENRVDHESLDASVHEAPLELSTNTAELSSTTKADTAQDINLDPCGALIPALPVDVPDHIPAIAPSATRKPDTRGAKATEKDVVKRPVGRPKKHTVTNIGKAARTALVETAEPATAEKVGTNTIGEAVTSSPKEAVPNVEKEAERGIEKEAEPSGTEDIQTGAWEDVPAETTGDVHTSTASQVKAVKAKGTKTTRGKATKAETIKASAVVPATRRATRHSGVPVEDPILPLITPASGKKAKTAEPALSRVPRELKRLRDTNEFVGIDTRPIRYSVWSNGKYVNVTEEKEPTAPAKKKAKVDSSTATVREDRKDKTVEPEAPTNTDSSRPAVKQKRVKKWLNKGLYAGQQAPEDVTKSLTTQERKRLLNIPELAKSGPPNKVLPLPIFNGLRLLIAGRDFKLPFDVCHPLPPGQPKPAAYRTMTKNRFIGQAAAIWKKTPHFEDFASKCVCTPEDGCAQDCQNRVMLYECDDTNCNVGKEFCQNRAFQMLTERTKKGGRYRIGVEVFKTEDRGYGVRSNRCFEPHQIIMEYTGEIITDEECERRMNEEYKNNECYYLMSFDQNMIIDATTGSIARFVNHSCSPNCRMIKWIVSGQPRMALFAGDRPIQTGEELTYDYNFDPFSAKNVQKCLCGAPNCRGVLGPKPKEVKPPKPPKAEVKGKKKVGKRKLQELLANGIENVVEGEGRSPKKLKVGNAQAGKATEDTAKGAPTFVSRKVSKVSVSAKSKVASAKTTKTFTRKVSIATTRVVKSYSKKGAAAKSKTITLKAPSKGSSLTIVAADAAGSITAAETAGAEEEAGNKASKTARVTPKNTPRAKKMADAVQNTPTIAEGDDGSIFDVPSSSSARKRAPSWKVRDSGVKNVSSLFRKARKSPVKIKDTADPAAKSTAATTKIVKPRKAFTKGKVTRPGKAMPKLTVAKKTGKSVAKPAISKSGKGSVSTKGATKIRLVNKAADGQDENAAPELVV

SEQ ID NO: 7566 - protein, 419 aa, Pyrobaculum aerophilum str. IM2
MSGLPDHLRRPVRGMRDWLPPQYYALRHMEEVLCKVAESFGYRRVETPVVEHFEVLAKKAGQDVINEIYYFKDKAGRDLGLRFDMTVPVARVLSYNLELPRPVRWYYFTKVFRYDEPQHGRYREFYQFGVELVGSSSPRADAEVIQLLIASLEAAGASNFYVRINDRRAVDKLLEHLGVAPYRDIIYKALDKKLKLPREDVIKIMTGGGVSKEIAEEIYNTATEITIQEAVELLYKLDKALGASYEKIVKYLEASVPMERLKFDMSIVRGLDYYTGIVFEAFVGEYKLAVGGGGRYDDLLELYSGVKTPALGFAIGVERLMEAVGIQNVERPLDYYIYIFDDDAYKYAAAVAKKLRTEGYSVVVELGEKGLKDAFEYALKVGARHIIIIGRKELEKGVIKVRDLEKRIEVEKPLSQFLA

SEQ ID NO: 7567 - protein, 368 aa, Thauera aromatica
MAAKSSVSSWRSEMSSNPHRWMMTSPGAPMVRAEFEIGELSADQVVVAVAGCGVCHTDLGYYYDSVRTNHALPLALGHEISGRVVQAGANAAQWLGRAVIVPAVMPCGTCELCTSGHGTICRDQVMPGNDIQGGFASHVVVPARGLCPVDEARLAAAGLQLADVSVVADAVTTPYQAVLQAGVEPGDVAVVIGVGGVGGYAVQIANAFGASVVAIDVDPAKLEMMSKHGAALTLNAREISGRDLKKAIEAHAKANGLRLTRWKIFECSGTGAGQTSAYGLLTHGATLAVVGFTMDKVEVRLSNLMAFHARALGNWGCLPEYYPAALDLVLDKKIDLASFIERHPLDQIGEVFAAAHAHKLTRRAILTP

SEQ ID NO: 7568 - protein, 299 aa, Zea mays
MMRETYMDVLPPVDHIAARSNWFPAAARLWTAAENKQFERALAGLDLCRPDWEEVARAIPGRTVREVVSHFKHLEVDVQQIESGQVPLPAYGGGASSFTLQWDGYGPGPGDFRHGYRFAGGCGRRHHGRTPEQERKKGVPWTEEEHRLFLLGLKKYGKGDWRNISRNFVQTRTPTQVASHAQKYFIRLNSGGKDKRRSSIHDITTVNLTDDQPPSPSQSSLITSQSNAPAPAPGPAPAAGICQVPLAADAKRHGARTLPFSSPNRTSAAPAYRMEFHDQQGLQCGPLHDQLLASQSVLF

SEQ ID NO: 7569 - protein, 201 aa, Rhodospirillum rubrum
MAMSRRLVESPLVVASHNAGKVREIAELIAPFGLEARSAASLDLPEPEETGSSFVENALLKAHAAARATGLPALADDSGLAVSALGGDPGIYSARWAGPTKDFALAMATINHLLGDNPDRSAHFVCALALAWPDGHAETFEGRVDGVLVWPPRGDQGFGYDPMFLGEGAAETFGEMDPAAKHAISHRARAFALLVAACLGG

SEQ ID NO: 7570 - protein, 523 aa, Oryza sativa
MAGAEAANGRNKYAVLDPSDEPEGRRRPSAWERRSKERFVLACAIFASLNAILLGYDVGVMSGAIIYIQKDLHITEFQEEILVGCLSVVSLLGSLSGGRTSDAIGRKWTMALGAIVFQAGAAIMTFAPSFTVLMIGRLLAGVGIGFGAMVSAVYIAEISPAAARGTLTSLPEICINLGILLGYVSNYAFSGLSEHINWRIMLGVGILPSVFIGFALFVIPESPRWLMMEKRVPEARAVLLQISESEAEVEERIAEIEEAANLLKSTKSEDKAVWMELLNPSPAVRRMLYAGCGIQMFQQITGIDATVYYSPTIFRDAGIKSDQELLAATVAVGFTKTVFILVAIFLIDKVGRKPLLYVSTIGMTMCLFVLGIALTLQKHAMGLISPRIGIDLAVFAVCGNVAFFSIGMGPICWVLSSEIFPLRLRAQASALGQVGGRVSSGLVSMSFLSMARIISVAGMFFVFAVISTVSVAFVYFCVPETKGKTLEQIEMMFEGGKEWRGSEIELEDTQHLIQSSKKSVSLG

SEQ ID NO: 7571 - protein, 180 aa, Glycine max
MSFSTKLPLVLLFSSLFIHASLAEMVCEDLPKEVCAFSVASSGKRCLLETEKAADGGVEYQCRTSEVVVERMADYIETDQCVEACGVDRNSVGISSDAFFEPQFTGKLCSPACYQKCPNIVDLFFNLAAGEGVFLPELCEKHKTNPRRAMVELVSSGAAPGPVSDVSEAIIASAPAPSAL

SEQ ID NO: 7572 - protein, 574 aa, Lotus japonicus
MEGKGYTLDGTVDLAGRPVLSSLTGKQKACTYILVYRVLERFAYYGVGANLVNFMTTQLNKDVVSSITSFNNWSGLATLTPILGAYIADTYTGRFWTITFSLLIYAIGLVLLVLTTTLKSLRPACENGICREASNLQVALFYTSLYTIAVGSGAVKPNMSTFGADQFDDFRHEEKEQKVSFFNWWAFNGACGSLMATLFVVYIQEKNGWGLAYSLSAIGFLLSSIIFFWGSPVYRHKSRQARSPSMNFIRVPLVAFRNRKLQLPCNPSELHEFQLNYYISSGARKIHHTSHFSFLDRAAIRESNTDLSNPPCTVTQVEGTKLVLGMFQIWLLMLIPTNCWALESTIFVRQGTTMDRTLGPKFRLPAASLWCFIVLTTLICLPIYDHYFIPFMRRRTGNHRGIKLLQRVGIGMAIQVIAMAVTYAVETQRMSVIKKHHIAGPEETVPMSIFWLLPQNIILGVSFAFLATGMLEFFYDQSPEEMKGLGTTLCTSCVAAGSYINTFLVTMIDKLNWIGNNLNDSQSRITIMPFFSVISALNFGVFLWVSSGYIYKKENTSTTEVHDIEMSAEKTVKY

SEQ ID NO: 7573 - protein, 174 aa, Triticum aestivum
  unsure (1)..(174): unsure at all Xaa locations
MSKPGGSAGGATAGPTAAAAAAAAQKQRALLQKADADVSSLVDNFSALINIARDNDPPVRNSQEAVQMHMRASRMMYSADSLLKLVSELKRTAIFSELSSLRDTDDRRIEVLXQQGEGTEIMLERNGQETRASLKELEAHYYLTCCAPLRSMTEPFLGFKEVSGLPIGSRVSVY

SEQ ID NO: 7574 - protein, 279 aa, Pseudomonas aeruginosa PAO1
MIKKCLFPAAGYGTRFLPATKAMPKEMLPVVNKPLIQYAVEEALEAGLSEIGIVTGRGKRSLEDHFDISYELEHQIRNTDKEKYLVGIRRLIDECTFAYTRQVEMKGLGHAILTGRPLIGDEPFAVVLADDLCLNLEGDSVLKQMVKLYNQFRCSIVAIQEVPPEETNKYGVIAGEMIRDDIFRVNTMVEKPKPEEAPSNLAIIGRYILTPDIFDLIEQTEPGKGGEIQITDALMKQAQDGCVLAYKFKGKRFDCGSAEGYIEATNFCYENLYKTGKAH

SEQ ID NO: 7575 - protein, 414 aa, Thermus caldophilus
MVKVEVLGMILAGGQGSRLYPLTAKRAKPAVPFGAKYRIIDFVLNNFVNSGIYAIYVLTQYKAQSLTEHIQRYWRFGAFLEDHFILLVPAQMYRYEELGPVWYRGTADAIYQNLHLVHNHAPKAVAVFGGDHIFKMNIRHMVEYHYDTRADITIAAYPVPVAEATRFGVLQVDEEWRITEFQEKPEEPKPIPGRPDMALASMGNYIFRTEALFELLEADARDETSAHDFGKGVIPRAIRVGYRVYAYDFHRNPIPGQEGPNLYWRDVGTLDAYYEASMDLVKVDPVFGLCSPVWPLRTANLFSPPAKFVHETGERVGRALNSLLAGGVIVSGGTVRESVLFRRVRVNSYSLVERSVLFDDVEVGRYCRIRNAIIDKNVKIPPHTEIGYDLELDRARGFTVTPEGVVVVPKGYRF

SEQ ID NO: 7576 - protein, 346 aa, uncultured bacterium 560
MPDLDRSALIENRINSGILGQWYPVAKSVEVKSISPLGIEVLGEKLVLWRGDNGKVHCIKDQCPHRGAPLSFGRLHEGHISCRYHGIVVSGEGVVVRVPAMQNCKFEGQKIVRAFEVTEIYDAIFIYMPSAENEKAPRMVFPKEFLSDSWSGFLCTAVWKTNYRYALDNLADPMHGSYLHAESFTLAYGAKEDLFKVDHTENGFIVSRTGQLGKNFDWAEFEMHDGTMFCFLDIPYPKAAGPGGNMRIVGFVLPINENSCKVFFWRMREVSGIQRDCWRFLYRTELESKHWTVLEQDREILEAMSDDVRGNEKLYQHDVGVNRIRQTLLKQAKSNVDFELNIEGKS

SEQ ID NO: 7577 - protein, 239 aa, Zea mays
MGSLASERKVVGWAARDATGHLSPYSYTLRNTGPEDVVVKVLYCGICHTDIHQAKNHLGASKYPMVPGHEVVGEVVEVGPEVAKYGVGDVVGVGVIVGCCRECSPCKANVEQYCNKKIWSYNDVYTDGRPTQGGFASTMVVDQKFVVKIPAGLAPEQAAPLLCAGVTVYSPLKHFGLTTPGLRGGILGLGGVGHMGVKVAKAMGHHVTVISSSSKKRAEAMDHLGADAYLVSSDAAAMA

SEQ ID NO: 7578 - protein, 413 aa, Erwinia carotovora subsp. atroseptica SCRI1043
MADSTSPRRFTRIDRLPPYVFNITAELKMAARRRGEDIIDFSMGNPDGPTPPHIVEKLCTVAQREDTHGYSTSRGIPRLRRAISRWYADRYEVDIDPESEAIVTIGSKEGLAHLMLATLDHGDTVLVPNPSYPIHIYGAVIAGAQVRSVPLVEGVDFFNELERAIRESIPKPKMMILGFPSNPTAQCVELDFFERVVELAKQYGVLVIHDLAYADIVYDGWKAPSIMQVPGAKDIAVEFFTLSKSYNMAGWRIGFMVGNSELVNALARIKSYHDYGTFTPLQVAAIAALEGDQQCVRDIAEQYRQRRNVLVRGLHEAGWMVDEPKASMYVWAKIPDAYAHLGSLEFAKRLLSEAKVCVSPGIGFGDYGDTHVRFALIENQDRIRQAVRGIKTMFRADGILPTTKPLAGKGPAA

SEQ ID NO: 7579 - protein, 346 aa, Deinococcus radiodurans R1
MPLLLDLHPDHYPLEGFRRKQLLEWVFVQGVGTFDAMTNLPAGLRAELESEYQLNPFRDIETVRSHDGSVKYLFTLNDGRQMEAVYMPYLDRKTICVSTMVGCPARCAFCATGKMGFGRNLTPGEIVGQVLAVAGGEGISPREIRNLVFMGMGEALLNYENSMAAARVLLHPDALGMSKRRVTLSTVGIAKGIRRLAEEDDLGIKLAISLHAPDEETRQQIIPTGAANSIEEIMAAARDYQAVTGRRVTMEYTMLRGVNDHLWQAELLADRLDGLVSHVNLIPMNPWDGSDFVSSSEEQIQAFYDALQDRGVDVSVRRSRGKDAGAACGQLALRRPGARTGEVGAA

SEQ ID NO: 7580 - protein, 571 aa, Pirellula sp. 1
MSSTIDDVTRSRITDVYGHVPDVLADGLKRCFDQSNPPSTPDELWDHRDVVMITYADQIREPGKSPLDAQRQFLLDHNLDELIRCVHLLPFCPSTSDDGFSVADYLAVDPESGDWDDIKRLGENFDLMYDLVLNHSSQHHRWFQGFLNDEPEYKDFYATADPSEDLSEVVRPRSLPLLTEFDSASGKRHVWTTFSADQVDLNYANPHVMLAMLETLVEYACRGARIIRLDAIAFLWKEIGTSCLHLPQTHAAVRLMRHVLDVAAPGTIVLTETNVPHAENISYFGDGTDEAHMVYQFSLPPLLLDAIHSGDTGVLQGWMRSLDLPTDQVTYFNFTASHDGIGVRPAEGILPQERVDALVEIAKAHGGRIGMRTKPDGSQSPYELNITYLEAVADRATVPAEEHAQRFLATQAIMLSMAGVPAVYFHSLVGSPNDIAGVESSGIPRRINRHKYERAELEAALSETGSLQQLVANGYRHLLRVRKQQTQFHPNASQTVLNLPTDGLLGFVRRHDDQPALCVLANLSGETRAVDPADMPGKLDLDVLSDESLDQNAPIAMAPYQVRWLKSSSTA

SEQ ID NO: 7581 - protein, 452 aa, Tropheryma whipplei TW08/27
MEEYDLIVVGAGSGNSILDQRFDSLKIALLDDGAHFGGTCLNYGCIPTKMLLRPATLAYQAKHASKLGVHFSDPRIDWQKIRSRTFSTTDDISAAGLEYRLGCSNIDVYRESYFFIDQRTLQSSSGHRISGEKIVIAAGSRPRLFGIEPDNRLIYTSAEIMRIEQLPESLVILGGGVVAVEMATFFSGYGVDTTTVNRSEFLLSSFDTEVAKSLTAQVPWKHIGQERVQNVSKKDSSVEIELSSGTRLLAQALLLAQGRVSNADKLRCRDVGFDIHSDGRLKTDKYQRVLADNRPLDNVFALGDVSDPNQLKHIANHQARIVGHNLLNGDMLASDLVPPAAAVFSEPQVAWVGTFPNNSIVVRGNYSDTAYGWAFGLRPDDAFVKLFIDKSGVLNGAFVIGPEASIIIQPLIQAVSLNLKVQGLARSQYWPHPAGTEVVENALLKAEEFLRA

SEQ ID NO: 7582 - protein, 335 aa, Saccharomyces castellii
MSEPAQKKQKTTGSSLEQLKASGTVVVADTGDFASIAKFTPQDSTTNPSLILAAAKQPAYAKLIDVAVSYGKKNGKTTDEKVELAVDRLLVEFGKEILKIVPGRVSTEVDARLSFDKEATIAKALEIIKLYEDLGISRERVLIKIASTWEGIQAARELESKHKIHCNLTLLFSFSQAVACAEAKVTLISPFVGRIMDWYKAKTGETYNGRNDPGVLSVHKIYNYYKKHGYKTIVMGASFRNVDEIKNLAGVDYLTISPNLLDELLNSNDHVPRVLDVATAKKEGAEKISYIDDEATFRFSLNEDAMGTEKLAEGIRKFSADIVTLFDMIEKKVTA

SEQ ID NO: 7583 - protein, 451 aa, Pseudomonas aeruginosa PAO1
MSFDFDLFVIGAGSGGVRAARFAAGFGARVAVAESRYLGGTCVNVGCVPKKLLVYGAHFSEDFEQARAYGWSAGEAQFDWATLIGNKNREIQRLNGIYRNLLVNSGVTLLEGHARLLDAHSVEVDGQRFSAKHILVATGGWPQVPDIPGKEHAITSNEAFFLERLPRRVLVVGGGYIAVEFASIFNGLGAETTLLYRRDLFLRGFDRSVREHLRDELGKKGLDLQFNSDIARIDKQADGSLAATLKDGRVLEADCVFYATGRRPMLDDLGLENTAVKLTDKGFIAVDEHYQTSEPSILALGDVIGRVQLTPVALAEGMAVARRLFKPEEYRPVDYKLIPTAVFSLPNIGTVGLTEEEALSAGHKVKIFESRFRPMKLTLTDDQEKTLMKLVVDAHDDRVLGCHMVGAEAGEILQGIAVAMKAGATKQAFDETIGIHPTAAEEFVTLRTPTR

SEQ ID NO: 7584 - protein, 300 aa, Schizosaccharomyces pombe
MNTTSEVIVGTGFQAIRQQLAQMHPELNFVEQLWLAYYKWFDNDVVATGLMSFLLHELIYFGRCIPWMIIDAMPYFRRWKIQPKKVPTLAEQWECTRLVLLSHFTVELPQIWLFDPMCATFGLSTSVPFPPVTKMIWQITLFFFLEDTWHYWAHRLFHYGIFYRFIHKVHHRYSAPFGLSAEYAHPLEIILLGAGTVFVPLMWCYFTHDLHLVTMYIWITLRLFQAVDSHAGYDFPWSLNKFLPIWAGADHHDYHHMAFKDNFSSSFRWWDAVLKTDQNYHQFKARRLAAKYEAESKKAK

SEQ ID NO: 7585 - protein, 385 aa, Neisseria meningitidis Z2491
MKFATKAIHSSYDCDEHNRALMPPIYQNSMFALHEIGENVPYRYSRLSNPTRQILEDTVADLEHGAAGFAFSSGMAGIDAVWRTFLQPGDTIVAVADIYGGAYDLLVDVYQKWGVNVVFADLGNPDNLDELLKAHKVKLVWLETPSNPLLRLVDIKALAAKAKAAGALVGIDNTFATPYLQQPLDMGCDFVFHSATKYLCGHSDVLMGIVVAKTKELAQPLHDMMVHTGAVAGPMDCWLVLRGIKTLALRMNAHYQNALEIARRLEAHPAIEKVFHPGLPSHEHYELAKTQMPKGIGGVVTVYLKNDTREAANSVIKNMKLVKMASSLGGVESLVNHCYSQSHSGVPHNVKMEMGIRVGLLRFSVGIEDVDDIWNDISAALDTTL

SEQ ID NO: 7586 - protein, 264 aa, Haemophilus influenzae R2846
MDKSLKANCIGEFLGTALLIFFGVGCVAALKVAGASFGLWEISIMWGMGVALAVYATAGLSGAHLNPAVTIALWKFACFDGKKVIPYIISQILGAFFAAALVYALYRNVFIDYETVHNIVRGTQESLSLAGTFSTYPHPSLSIGGAFAVEFVITAILMALIMALTDDGNGVPRGPLAPLLIGILIAVIGGAMGPLTGFAMNPARDFGPKFFAYLAGWGELALTGGREIPYFIVPMVAPVLGALAGAWLYKKAIGGNLPCNCGCE

SEQ ID NO: 7587 - protein, 987 aa, Chloroflexus aurantiacus
MATSLLHRLLGTLGQRSSSRVEPLTPPVQAYVTSTTPTATLTSSQELRDYPPVERWQDWTEYDPKAWPQKVARRYTLVPTVCFNCESACGLLAYVDVETLKIKKFEGNPLHPGSRGRNCAKGPATLNQVYDPDRILYPLKRAGKRGEGKWVRVSWDEALDDIAGRIRKAIIEKRQTEIIYHVGRPGHDGFMEWVLPAWGVDGHNSHTNVCSSGARCGQAMWMGLDRPSPDHANARVILLISSHLETGHYFNPHAQRIMEGKMAGAKLIVLDTRLSNTASLADEWLSPWPGSETAILLAIANYLIRTGQYNRDFVRRWVNWADYLRAEHPDLPVSFEHFEMKLQELYAQYTFEFAAQESGVSAEQIERVAKIIARCEGKLATHSWRSATSANLGGWMVARCLWFLNVLTGSIGVEGGTSANVWDKWIPRHPNMAPHVKVWNELTWPQEYPLNFYEMSILLPHFLKEGRGKVDTYFTRVYNPLWTNPDGMSWLEVLTDESKIGLHVHLSPTWSETGWFADYILPMGVGAERHDVMSQETHAGCWIAFRQPVLREAMRRLGKPVNDTRDANPGEVWEEVEFWIELSWRIDPDGSLGIRKTFESPYRPGQKITVDEFYGWMFENHVPGLPEAAAKEGLTPLEYMRRYGAFELRKGVQPTFDKPLSAADLSDATIDPNTGIVYTKTPAPPSSNITPLPYFEPDPERGRPIGIKLEDGSIVTGFPTPSRRLEFYSTTLRDWGWPEYAIPTYIHSHVHPSKIDRSKNEAVLLSTFRLPTLIHTRSGNAKWLYEISHKNPVWIHTSDAERLGLRTGDLIKVVTEIGYFVDRVWVTEGIRPGVIACSHHLGRWRLQEDGGGRLSTALVELKQEGQGEWRMRQLHGIRPYESDDPDTSRIWWEDAGVHQNLTFAVHPDPISGMHCWHQKVRLEPAGPNDRYGDIYVDTKRAHEVYREWLAMTRPASKVSPNGMRRPHWLLRPFRPAREAYFLPEKKS

SEQ ID NO: 7588 - protein, 432 aa, Tropheryma whipplei TW08/27
MSKIKLVTAIPGPESERLHRIRQATVARGVSSTFPIYIKESHGSILIDEDGNHLIDMGCGIGVTTLGHSHPAVVDAARAQINSVWHTLFSITPYESYVEVCKLLAKNTPGDFPKKSLLLNSGAEAVENAVKISRAYTGRPTVAVLDRSFHGRTNLTSSMTYRGSLYSSDFGPTASNIVSAPNSYPLHDRLSGKEAAARTISYLETRVAARNIACLFYEPIQGEGGVIVPADGFLPALQDWCRENDIVFVADEIQSGFGRTGCFFASETDGLEPDIVCSAKGIANGLPLSAVTGRSDIVDAARPGTLGGTFTGNHVSCAAALEVFEQYKDNAPLDSASRLGDILKELLLNLQSKHPQIAEVRGRGAMFGAEFSGNHAGEMVSRVITRAAELGVIFLSSGVEGNVVRFLPNVFMDKETIEEAIGVLDSAISSVV

SEQ ID NO: 7589 - protein, 627 aa, Arthrobacter aurescens
MAKMRKVTTVRGYGAFVGANHLEVEETTGTGQEKTGTKKVIAFKRAIIAAGSQAVRLPFMPNDPRVVDSTGALALSGVPKRMLILGGGIIGLEMGTVYSTLGARLDVVEMMDGLMQGADRDLVKIWQKMNAKRFDNIMLKTKTVGAEATPEGIKVTFAPAEEGGTTPEPQVYDLVLQAVGRTPNGKKIAAEKAGVAVTDRGFINVDIQMRTNVPHIFAIGDIVGQPMLAHKAVHEAHVAAEVIAGELQGNKELASAAFNARVIPSVAYTDPEVAWVGLTEDQAKAQGIKVKKGLFPWTASGRAIANGRDEGFTKLLFDDSPEAATPRISSPGVIFHAATGIDAATVAPVQTTLQKRILRAFVARGLLENCDAKDMLGYKHSGFSVDAGVCIEAHDRAALERLLRYCARPPFSMERLRKEGSKLVYRCAKQRSEPTSDKRGAKADELHLTPLELIDRIAALVPPPRTHRHRYFGVLAPNSPLRAAVTALAQPAASQPATVETAQPGAGVPGVAAPGNAATPTPEPEARPKRAAHYLWAVLIARIYEAFPLLCPMCGGQMRIIAFITHSAEIRHILNHIGVESAPPHITPARGPPLWEGCDAPVDDGAQGEPDWDLAAQPDEVDQRVNW

SEQ ID NO: 7590 - protein, 478 aa, Pyrobaculum aerophilum str. IM2
MIIVKNYINGEFIEVEERRPKHSPIDGSVIAETPVSKREDAKAAIDAAYDALKAWSQLPAIKRAEYLYKLYEIIKSREEELINILMVEGGGIYKKAWGEVVFTERLVRNAAELARHYGGKTLQSDAEGVVSMVFKRPKGVVGVITPWNYPLSISMKKIAHALATGNTIVYKPASETPVTGFKIAEMIHQAGFPKGVFNLVVGPGSTVGDEIVVNKKVSHVTFTGESATGREIASKAGGALKTVTLELGGSDPLIILDDADLNLAVRIAVFGAFFHQGQICTSSKRIIVHERVYDVFVKKFVERVSQLKVGDPRDRTVEQGPLISPRQADEMERFYQDAVSRGGRALTGGKRAGAYFWPTVFVDVDRNFRIMREEVFGPIRPVVPVKNDDEAVEVANDTEYGLSAAVVTTNINRAFKIAEAIESGMVHINDVTMLEESHVPFGGIKASGFGREGGEWSFHETTYDRWLTITLRERKYPI

SEQ ID NO: 7591 - protein, 492 aa, uncultured bacterium 560
MIKMPDGKLFIGGEWETGTGKEIVSIFPADGSINCSLYGASKNDVLRAVKLAKSAQSQPSWRSLKPHERARYLYAIADGIEANIDRISQIQTRDTGKTLRETAILASSASGTFRYFGALLESSDDLLTAQRNDSLTMSVYEPLGLVSAITPWNSPIASDAQKIAPALAAGNAVLLKPSSWSPLVSLELAKLVESSGLPKGLFSVLPGSGEEVGNLLVEHPDISKVTFTGSTKTGRSLAIKAAKKLMPISLELGGKSPVIVFKDSDIDIAIAGVMFGIFSSTGQSCIAGSRLFVQKDIYNEFVERLVKATKKLKVGSPYNLDTQVSTMIHPQHRDSVAAYVDLARNEGAKILCGGKSPSGAEYKKGAYYLPTIITQVDNSAQICREEVFGPVLVVMPFDDEADVIEQANENEYGLACGIWTSDFPKAWRVGRAINAGTVWVNTYKQFSISTPFGGEKNSGMGREKGRNGIRAFMSQKSLYFDLTGNSHPWAET

SEQ ID NO: 7592 - protein, 402 aa, Pseudomonas fluorescens PfO-1
MENLQSAVDTLVHSSNTLFILIGAVMVLAMHAGFAFLEVGTVRQKNQVNALSKILSDFAVSTLAYFFIGYWLSYGVTFLHPAAVLSADHGYGLVKFFFLLTFAAAIPAIISGGIAERARFVPQLCATALIVAFIYPFFEGMIWNGNYGLQAWLTAQFGAPFHDFAGSVVVHAMGGWLALAAVLLLGPRTGRYRDGKLVAFAPSSIPFLALGSWILIVGWFGFNVMSAQTLQGVSGLVAVNSLMAMVGGTVAALIVGRNDPGFLHNGPLAGLVAVCAGSDLMHPVGALVNGAIAGALFVWCFTAAQVKWRIDDVLGVWPLHGLCGVWGGIACGIFGSTTLGGLGGVSLISQLIGTALGVAVALIGGFAVYGSIKALHGLRLSQEQEYYGADLSLHKIGAVSQD

SEQ ID NO: 7593 - protein, 305 aa, Lactobacillus gasseri
  unsure (1)..(305): unsure at all Xaa locations
MKRIGILTSGGDAPGMNAAIRAVTRTALANGIEVCGIRYGYAGLVAGDIFQMTSETVADKINRGGTFLYSARFPEFKEEEVQLKGIEQLKKHGIDALVVIGGDGSYHGALKLTRHGYNAVGLPGSIDNDIPYTDFTIGFDTACNTAMEAIDKIRDTATSHQRVFVVNVMGRDCGDIAMHVGVATGADAIVIPEEPYDIKEIAENLKQGFANGKKHGIVVLAEGVMDANKFKDELLKYGDFDARANILGHMQRGGSPTTRDRVLASEMGAYAVKLLLEGKGGLAVGIENXXXXXXXXXXXXXXXXX

SEQ ID NO: 7594 - protein, 405 aa, Acinetobacter sp. ADP1
MGLSTFFEQIMQNVDLFFLLLGAVLVLAMHAGFAFLELGTVRHKNQVNALSKILTDFSISAIAYFFVGYYISYGHSFFQTGAVLAADHGYNLMRCFFLLTFAAAIPAIISGGIAERAKMRPQAIATFALVALVYPLFEGMAWNGNFGLQKWLESQFGASFHDFAGSVVVHAMGGWIALAAVMLLGARHGRYKKDGRVSAHPPSSIPFLALGSWILIVGWFGFNVMSAQRVDAISGLVAINSLMAMVGGTLSANFMGKNDPGFLHNGPLAGLVAICAGSDIVHPVSALVIGVIAGIIFVKLFTYTQNKLKIDDVLGVWPLHGVCGALGGLAVGVFGQKAFGGLGGVSMMSQLIGTTFAIVIALVGGFVVYGILKATLGIRLSQEEEFQGADLSIHKISANSEDGMF

SEQ ID NO: 7595 - protein, 893 aa, Eubacterium acidaminophilum
  unsure (1)..(893): unsure at all Xaa locations
MVLVKIDGRELEVPKDYTILKACEAAGAKIPTFCYDERLSRHGAGACRICLVEIEGQRNLMPSCTEKVWEGISVFTKSERVIKERKGILELMVQNHPLDCLTCEKSGDCKLQDYCYEYGVTGIKGLEERVLPVDESNPFYTFDPDKCILCGKCVRVCEELQGTRAILISERGPVAKVSTQFEEGLENSPCVSCGNCVSYCPVGALLPKSKTEHRVWETKKVRTTCSYCGVGCQLELIVKGDEVVGVQPAMGAGNDGLLCVKGKFAYNFVNHPDRLKKPLIRKDGVLVEATWEEALSLVAKKISDIKSQHGADSIAGLTSARCTNEENYLFQKLLRAVVGTNNVDHCARLXHASTVAGLATTLGSGAMTNSIAETRYNDVIFVTGSNTTENHPVIAAQMKQAVKNGAKLIVADPRRIELADYADVFLQITPGTNIALLNAMMNVIISEGLQDKKYIEDKTENYEELVGLAKRYTPEEAARICGVDAEDIRKAARIYASADKAGIYYAMGITQHISGTDNVMSISNLALLCGNIGKEAAGVNPLRGQNNVQGACDMGGLPGDLPGYQKVISPEVIEKFEAVWSAKLSSKVGLTVPEMLTEASNGNIRMIYIMGENPMVSDPDITHVKHALEHLDFLVVQDIFLTETAELADVVLPAASFAEKDGTFSNTERRVQRVRKAVNPVGDSKPDYEILINLMKKLGYNAFYKDASEIFDEIASVTPQYAGIDYKRLEDINGLQWPCPTKEHPGTKYLHSKGCARGKGLFVPCEYAQSAEMPDSTYPLVLTTGRILYQYHTTTMTGKTEGISSNYSESFIEVNPSTANKLGIEDGEMVRVVSRRGSVETNVRVTEIVEEDVVFMPFHFAKGAANMITNSKLDPKAKIPELKVCAVRIERIK

SEQ ID NO: 7596 - protein, 83 aa, Viscum album subsp. album
LGFAWSWGPLGWTVPSEIFPLEIRSVGQSVTVAVNLLFTFAVAQSFLSLLCVLKWGIFLFFAAWIAAMTVFVYVFLPETKGIP

SEQ ID NO: 7597 - protein, 339 aa, Saccharomyces castellii
MVGPKTKKQKVANAGGSTSLDLLKKTGTTVVADTGDFATIDKYKPQDATTNPSLILAASKKEDYSSLVDNAVAYGKENGETIDEQVECAIDKLLVEFGTEILKIVPGKVSTEVDARLSFDKDATIKKALQLIHLYEKAGISKDRVYIKVASTWEGIQAAKVLEQEHGITTNLTLLFSFTQAVACAEAGVSLISPFVARITDYYKAQTGKDYSPEDDPGIHSVKKIYNYYKKHGYHTIIMAASLRTTGQVKQLAGIDNLTLSPKVLDELVASTDEVPKLLDPKKAAKQGDEKISFLDDEPKFRYSLNDDAMATEKLADGIRKFAADAITLSNAIKEKLQK

SEQ ID NO: 7598 - protein, 75 aa, Glycine max
  unsure (1)..(75): unsure at all Xaa locations
SISWPGDTTVNRAGAGMDAPFTGLKSMAGLPTRXTYNDITSIGCNCXRVQCMQVWPPIGXKKYETLSYLPDLDDA

SEQ ID NO: 7599 - protein, 182 aa, Gossypium hirsutum
MASSMISSATIATVNCSSPAQANMVAPFTGLKSASAFPVTRKANNDITSLASNGGRVQCMQVWPPLGKKKFETLSYLPDLTPVQLAKEVDYLLRSKWIPCLEFELEEGFVHRKYSSLPTYYDGRYWTMWKLPMFGCTDSAQVLEELENCKKEYPNAFIRIIGFDNVRQVQCISFIAYKPKGY

SEQ ID NO: 7600 - protein, 336 aa, Pirellula sp. 1
MKTVHAYAVKESKGTFEEFEYELDHIGANEVDIDVESCGICHSDISMVDNDWEMSQYPLVPGHEVIGKVSSVGDHVTHLSVGDRVGLGWHAGYCMVCDQCMSGDHNLCNDAQATIGGRHGGFADTVRAQSASVVKIPDSLNAKEAGPLLCGGITVFNPFVQLDLSPTSSVGVIGIGGLGHLALKFANAWGCEVTAFTSESKEEEALEMGAHHTINSRDMDAIKNTDLRFDLVISTINVPLDWNAVLGTLKTHGRLHMVGALTEPMEIGLLPHMLFNQLTLGASPVGPPVIIRRMLDFAARHQIAPVTEHYPMSKVNDAFERLRSGDARYRIILDRD

SEQ ID NO: 7601 - protein, 342 aa, ASPERGILLUS NIDULANS FGSC A4
MAAVNRALWQDEAGIAGVIRENAVPTTVADNEILVKVNAWAMNPADAILQDAALPAVKYPLILGEDVAGTVEKVGSEATGKLKVGDRVLGLALGAAVFKTEQGAFQEYVILDYTLACKIPDSLSFAEASVFPLCIATAAYGLFSKDYLGLPLPKINPTSTGKSILIWGGSSGVGSNAIQLSKAAGFEVITTCSAHNFDYVKRLGADKVFDYKDPFVIDKIVAELDNGECIGVLQAAGDTTPSCEVATKSKHKLRLAASNPVPEGMAPADIEVKMIFAGGTAIYYETSSATFAGYLPEALAKGLYQVAPTPQIVPTKGLEGIQEALNILKKGISAKKLVTLAN

SEQ ID NO: 7602 - protein, 474 aa, Pseudomonas aeruginosa UCBPP-PA14
MQTKLLINGALVAGESESHAVYNPSQGNVLVRITEASGAQVHAAVQSADAAFDAWSQTPPKDRAALLLKLAERIDAQAHVFARLEADNCGKPFNAVLLDELPAVSDVFRFFAGAVRCLQGSAAGEYVAGHTSMIRRDAVGVVASIAPWNYPLLMAAWKLGPALAGGNTVVLKPSEHTPLSTLKLGELLAEIFPAGVVNIVHGRGASVGEPLTSHAQVRMVSLTGSVRTGSRIIEGTAESVKRMHMELGGKAPVLIFDDADIDAAVEGIRAFGFYNAGQDCTAACRLYVQKGVYQEFVRKLGEAVSSIRCGLPDDPATEMGPLITKEHLERVEGFVNRARELPHIEVVTGGKRAEGAGFFFEPTVLAGATQEDEVVRREIFGPVVTVSSFEDEAQALAWANDSDYGLASSVWTADVGRAHRLAARLQYGCTWVNTHFMLVSEMPHGGVKLSGYGKDLSMYGLEDYTVVRHVMFKH

SEQ ID NO: 7603 - protein, 459 aa, Neisseria meningitidis Z2491
MLLDLNRFSFSVFLKEVRLLTALALPMLLAQVAQVGIGFVDTVMAGGAGKEDLAAVALGSSAFATVYITFMGIMAALNPMIAQLYGAGKTDEVGETGRQGIWFGLFLGVFGMVLMWAAITPFRNWLTLSDYVEGTMAQYMLFTSLAMPAAMVHRALHAYASSLNRPRLIMLVSFAAFVLNVPLNYIFVYGKFGMPALGGAGCGLATMAVFWFSALALWIYIAKENFFRPFGLTAKFGKPDWAVFKQIWKIGAPIGLSYFLEASAFSFIVFLIAPFGEDYVAAQQVGISLSGILYMIPQSVGSAGTVRIGFSLGRREFSRARYISGVSLVSGWMLAVITVLSLVLFRSPLVSMYNNDPAVLSIAATVLLFAGLFQPADFTQCIASYALRGYKVTKVPMFIHAAAFWGCGLLPGYLLAYRFDMGIYGFWTALIASLTIAAIALVWCLELCSREMVRSHKAV

SEQ ID NO: 7604 - protein, 428 aa, Pirellula sp.
MTLIESIHARQILDSRGNPTVECEVTLMDGAAGRAAVPSGASTGMHEAWELRDGDKSVFMGKGVTTAVKNVNTKIADALEGMDATDQAAVDQAMIELDGTPNKKELGANAILGVSLAVAHAAAASTNQPLFRYLGGAGARMLPAPMMNIINGGEHADNGVDIQEFMVMPLGFERFSDALRCGTEIFHNLKKVLSDKGYSTAVGDEGGFAPDLKSNQEALDVIMTAIDKAGYKAGEQVWIALDAASTEFYDKSSGKYSLDNNQMSGDEMVDFLAGWCDKYPICSIEDGCDEDDWETWKKLTTKIGDKVQLVGDDLFVTNVERLQRGIDEGIANSILIKVNQIGTMTETIDAIQLAHRNGYTSISSHRSGETEDSTIADLAVAMSTGQIKTGSASRSDRMAKYNQLLRIEELLGDAAQYGGPLFAKRITG

SEQ ID NO: 7605 - protein, 457 aa, Mesoplasma florum L1
MKTNKNKTNIKMIGFYHFFYFVKPYYLLINENVIIFKAKGDFMIQKPRGTQDLFLNNSKEWNAVEEKFRKVLNLFNYGEIITPMFESKELFVRGVGDSSDIVSKEMYEFTDRKGREYVLRPEGTAPTVRALIENKLYIQENLPYKTFYIGPIFRYERPQAGRYRQFNQLGVETFGIDSISHDVELISLGQSFLKELKINKDVIVEMNYLISGNERKEYELELKKYLNLFDDLCSDCEIRINKNVLRVLDCKIDGNKFAEAPKMTLFASQENKERLNKTFDQLKQLGIEAKINFNLVRGLDYYTGLVFEFKNIKTDQAIIAGGSYNNLVEELGGPNLPASGFAIGIERIMMILSDQEIKVADEDELDLFIIPLSDDAQFLTNKLLLEARTANLKVDTNWNIKNLKAGFKSAERLKSKNIVIIGENSINSDIYAIKDQKSGETKELKFKDIVKYLKGEK

SEQ ID NO: 7606 - protein, 253 aa, Bordetella parapertussis 12822
MNRLEGKVVFITGGGAGIGRASALLFAREGARVVIAERDADAGRQTVELIAGQGGPRALFVPTDVTEADSVEQAVARTVAEYGRFDVLYNNAGGSTVRDSRVTDTPVEEFWAKMKLDLFGTWLGCRYGIQAMIDAGHGGAVINSTSIFALIGTHGKDAYTAAKGAVSALTRSMAVEYAQHRIRVNAVAPGATATERVLKLLQEDGVTSKSLDGQLFGLVQPEDIAHAALYLASDESKSTTGHILAVDGGLTIS

SEQ ID NO: 7607 - protein, 267 aa, Zea mays
MDPKMTEVTQMFARFKAAYTRNDLDACVTLLSQLKVHLTKFPSLPPSFEQTPKAVEELKLARDIYEHAVVLSVKLEDQDAFERDFCQLKPYYMDTCGIIPPSPEEYPILGLNLLRLLVQNRIAEFHTELELLPVKALEHPCIKHAVELEQSFMEGAYNRVLSARQAVPHETYVYFMDLLAKTVRDEIAGCSEKGYDSLSVSDAKQMLMFSSDQDLHEYITEEHPEWELKNGAVFFQKAKESQPYKEIPSLQLINQTLSYARELERIV

SEQ ID NO: 7608 - protein, 434 aa, Mycobacterium tuberculosis H37Rv
GQSYQAVSAQAAAFHDRFVQLLNAGGGSYASAEIANAQQNLLNAVNAPTQTLLGRPLVGDGADGASGPVGQPGGDGGILWGNGGNGGDSTSPGVAGGAGGSAGLIGNGGRGGNGAPGGAGGNGGLGGLLLGNGGAGGVGGTGDNGVGDLGAGGGGGDGGLGGRAGLIGHGGAGGNGGDGGHGGSGKAGGSGGSGGFGQFGGAGGLLYGNGGAAGSGGNGGDAGTGVSSDGFAGLGGSGGRGGDAGLIGVGGGGGGNGGDPGLGARLFQVGSRGGDGGVGGWLYGDGGGGGDGGNGGLPFIGSTNAGNGGSARLIGNGGAGGSGGSGAPGSVSSGGVGGAGNPGGSGGNGGVWYGNGGAGGAAGQGGPGMNTTSPGGPGGVGGHGGTAILFGDGGAGGAGAAGGPGTPDGAAGPGGSGGTGGLLFGVPGPSGPDG

SEQ ID NO: 7609 - protein, 480 aa, Aspergillus niger
MPSLGGLLKKRRTKDSQTLSKELEAGSAQTQTSPNAAEDHHNHNHHQHHHHLFHHHHQPQPATNSGSAANTPPQPQDSVPQQSNRSSGAEKSSDGQVASMQSAVTQASPSAHHTSGLPQPNANAASIQNIINPSQQGAMHSASSGHTQSHHAGRSDARTTKGKYSLDDFSLQRTLGTGSFGRVHLVQSKHNHRFYAVKVLKKAQVVKMKQIEHTNDERRMLNRVRHPFLITLWGTWQDSRNLYMVMDFVEGGELFSLLRKSQRFPNPVAKFYAAEVTLALEYLHTQNIIYRDLKPENLLLDRHGHLKITDFGFAKEVPDITWTLCGTPDYLAPEVVSSKGYNKSVDWWSLGILIFEMLCGFTPFWDSGSPVKIYENILRGRVKYPPYLHPDAVDLLSQLITADLTKRLGNLHGGSDDVKNHPWFAEVTWDRLARKDIDAPYVPPIRGGQGDASQYDRYPEETEQYGMAGEDPHGHLFPDF

SEQ ID NO: 7610 - protein, 278 aa, Corynebacterium sp.
MTVPSIVLNDGNSIPQLGYGVYKVPPADTQRAVEEALEVGYRHIDTAAIYGNEEGVGAAIAASGIARDDLFITTKLWNDRHDGDEPAAAIAESLAKLALDQVDLYLVHWPTPAADNYVHAWEKMIELRAAGLTRSIGVSNHLVPHLERIVAATGVVPAVNQIELHPAYQQREITDWAAAHDVKIESWGPLGQGKYDLFGAEPVTAAAAAHGKTPAQAVLRWHLQKGFVVFPGSVRREHLEENLDVFDFDLTDTEIAAIDAMDPGDGSGRVSGHPDEVD

SEQ ID NO: 7611 - protein, 180 aa, Triticum aestivum
  unsure (1)..(180): unsure at all Xaa locations
MAPTVMASSATSVAPFQGLKSTAGLPVSRRSNGASLGSVSNGGRIRCMQVWPIXEGIKNSETLSYLPPLSTXGLLKQVDYLDPSKWVPCLRXSKVXSSSVEHNASPGXYYDGRYWXTMWXLPISGXXGPTQVINEVXKRSRRXPDAYSAXRFDNMRKCMRNSSPTTGSRIRKANSHHTGN

SEQ ID NO: 7612 - protein, 505 aa, Xanthomonas axonopodis pv. citri str. 306
MSDNKNFHLPDLGEGLPDATIVEWFVKEGDTVRLDDPLVSMETAKAVVEVPSPFSGTVVKLAGAAGDVIVTGSVLAQFALDASQPQRADGQDTGHSHGPAPTHSPTPSTGDSAAGPTARVVASDNGGEIADADAGDEGSGDRDDAGTVVGAMQSSNAVQSEQAIAVGGVRAMPVVRALARKLRVELAQVRATGPDGTVTLADVKQAAAAGTAQPSPGVQGAPSSPANGKRGLIGDGGRAAGIAADGRDRPATAALLPSAGEGARRADVGGAAARSPLSASGKPMRTQSPGISAKGQPEQLKGVRRNMARVMADAHTKVVPTTLNDDADLHAWQPGNDVTVRLVRGIVRACQAVPALNAWFDGDALSRTLHHQVDIGIAVDTEEGLFVPALRNADMLDAHGIREGVNRLRQQVESRSIAASELSGYTISLSNFGMFAGRYATPVVVPPCVAIVAAGRARYQLTPVMGGVETHKVMPLSLTFDHRAATGGEAARFLRALLDDLALAN

SEQ ID NO: 7613 - protein, 165 aa, Zea mays
  unsure (1)..(165): unsure at all Xaa locations
AALAFERSPQCTAPWMNXFIRQSHNVTINVAVQTEHGLFVPVIRDADKKGLGAIAEEVKQLAQKARDNSLKPADYEGGTFTVSNLGGPFGIKQFCAIINPPQSAILAIGSAEKRVIPGSADGQFEFGSFMSATLSCDHRVIDGAIGAEFLKAFKGYIENPTSMLL

SEQ ID NO: 7614 - protein, 470 aa, Vibrio cholerae O1 biovar eltor str. N16961
MIKFGTGGWRAFIGEEFTKDNVRLVAQALANIIHHEQAANEGFVIGYDRRFLSDKAGRWFAEVLAANGVVVSFIDKFVPTPVVMFKAKAMDCAYSACITASHNPADYNGIKVFIRGGRDADEVITQKIEQQIATLTLQDVKSIDFDQAVNDKLIDIINPMNEFVDSIINFIDIEAIKKANLRVLIDPMFGVAKNALQTVLINGRCDVDVINDGKNPDFGGLMPSPSAATLYRLKHLVKHEGYDIGIGTDGDADRLGIIDEKGNFIHPNEVLILLYYYLLEYKGWKGSVVRNIATTHLLDKIAADHGERCFEVPVGFKHISSQMEADDSLIGGESSGGLTIRGHIKGKDGVFASSLLVEMISVTGKKLSELLTEIYDRYGYAYTAEGDCKFKPAQRDEIYNKVYIEKKLPEFEFDIDKVSYEDGAKVYFKNGGWVIARFSGTEPLLRIFAEMADKDTAERVLQQMKAFLAL

SEQ ID NO: 7615 - protein, 897 aa, Eubacterium acidaminophilum
  unsure (1)..(897): unsure at all Xaa locations
MINVTINGTTVSVPRKSTLLEACNAAGVSIPTFCHDERLQAHAACRICVVEVAGARGLMTACSTPAVDGMDVQTHSERVIEARRGVLSLMIANHPLDCLTCVKSGDCRLQDYCYEYGVKEPEFEGAKKNYEIDDSNPFYISDQNKCISCGRCVRVCNELQCTGAIDLAERGFDTHVATPFDVDLEKSKCVSCGNCVAVCPVGALMPKSKELFRQWETKKVRTTCSYCGVGCQMDLVVKGDTVVGAEPANGPANEGLLCVKGRFGYKFLSHPDRLTKPLIRKNGELVESSWDEAYSLVAKKMKQTKEEFGADSLVGLTSARCTNEENYLMQKLFRAVIGTNNIDHCARLXHSSTVAGLAATLGSGAMTNSITEVKDSDAIFVIGSNTTENHPVIGAMMKQAVKKGAKLIVAEPRRIELADYADVFLQIKPGTNVALLNGMMKAIVDEDLHDKEYIEERTEDFDKLKELLGRHTVEEYAAICGVDAEDVRKAARIYAEADKAGIYYAMGITQHSDGTNHVKSVSNLALLCGNLGKESAGVNPLRGQNNVQGACDMGGLPNSFPGYLSVTSPEIREKFEKAWDAKLSGNVGLTIPKMLSGIDSGDVRLMYIMGENPMVSDPDLTHVEKSLRKVDFLVVQDIFLTETALLADVVLPAAAFAEKDGTFSNTERRVQMVRKAVNPPGEAKADWKIFMDLMNKLGYSNYYRNTSEIMDEIASVTPQYGGISYDRLEEKGSLQWPCPTKEHEGTKFLHKGQFARGKGLFTAVEYKGPAEITDEEYPLILTTGRVLYHYHTMTMTGKVEGLMQKSPESFIELSPNAAENLGVADGEMVKVSSRRGTINVKAAVKDILADNVVFMPFHFAVGAANMLTNTALDPTCNIPEFKVCAVKVEKIATEKTA

SEQ ID NO: 7616 - protein, 253 aa, Triticum aestivum
MAADLGFEATELRLGLPGGGGEGEARSSSGKRGFAETIDLKLKLEPAGEEAPAEEDRADVAVVAAAAAENQEETATDAGAGKMKRSPSQSSVVTSAALPDPAEKPRAPKAQVVGWPPVRSFRKNILAEKSSPAAAAAFVKVSMDGAPYLRKVDLNMYKTYQDLSKALEKMFSSFTIGNCGTPGMNGMNESKLMDLLNGSEYVPTYEDKDGDWMLVGDVPWEMFVESCKRLRIMKGSEAIGLAPRAMEKCKNRS

SEQ ID NO: 7617 - protein, 326 aa, Rubrobacter xylanophilus DSM 9941
MVLRAPGGPLRPEELPVPEPGSGEVLVRVRACGVCRTDLHVVDGELREPKLPLVVGHQIVGVVERVGEGVERFSPGDRVGVPWLGRTCGRCRYCRTGRENLCGEARFTGYQLDGGFAEYARADARFCLPVPEGYPDLQAAPLLCAGLIGYRALRMAGDAERLGLYGFGASAHIILQVARHQGRRVFAFTRDGDEEAQRFARRLGAEWAGGSGQRPPEELDAAIIFAPVGALVPLALRAVARGGTVVCAGIHMSDIPSFPYELLWGERQLRSVANLTRRDGEEFLALAPEVPVRTEVRPYPLEGANQALDDLRSGRLTGAAVLVVGR

SEQ ID NO: 7618 - protein, 197 aa, Nicotiana tabacum
MSAPRFIKCVTVGDGAVGKTCLLISYTSNTFPMDYVPTVFDNFSANVVVNGSTVNLGLWDTAGQEDYNRLRPLSYRGADVFILAFSLISKASYENVSKKWIPELKHYAPGVPIVLVGTKLDLRDDKQFFIDHPGAVPITTAQGEELRKTIGAPAYIECSSKTQQNVKAVFDAAIKVVLQPPKTKKKKGKSQKSCSIL

SEQ ID NO: 7619 - protein, 417 aa, Thermococcus profundus
MKKLEKKLSAEPINFDSFFSEKAMLMKASEVRELLKLVETSDVISLAGGLPAPETFPVETIKKIAVEVLEEHADKALQYGTTKGFTPLRLALARWMEKRYDIPMSKVEIMTVAGSQQALDLIGRVFLNPGDPIVVEAPTYLAAIQAFKYYDPEFISIPLDDKGMRVDLLEEKLEELRKQGKRVKIVYTVSTFQNPAGVTMSVDRRKKLLELANEYDFLIVEDGPYSELRYSGEPTPPIKHFDDYGRVIYLGTFSKILAPGFRIGWVAAHPHLIRKMEIAKQSIDLCTNTFGQAIAWKYVENGYLDEHIPKIIEFYKPRRDAMLEALEEYMPEGVEWTKPEGGMFVWVTLPEGIDTKLMMERAVAKGVAYVPGEAFFVHRDKKNTMRLNFTYVPEETIREGVRRLAETIKEEMKRVKG

SEQ ID NO: 7620 - protein, 459 aa, Amycolatopsis methanolica
MTLHLDDLRVRLLGECRYDSPFAEVLSTKRTSPHYVAEGDRVLLEDTVAMLAEHSLPSVQAPSFEAAGPRRKIYFDPARVTAGIVTCGGLCPGLNNVIRGLVQELSVHYRVKRIVGFRNGPGLTAAHRDDTVELTPEVVRDIHNLGGTILGSSRGGQDADEMVETLALHGVDVMFVIGGDGGMRAATFLSGAIRARGLDIAVIGVPKTIDNDLPFTDQSFGFQSAFARATDFISAVSVEAAASPNGVGIVKLMGRHSGFIAAYAALAANSADVVLIPEVPFALDGDDGLLAHVERLVRAKGFAVVVVAEGAGQDLFDAHGLPQLNGRGTDASGNVKLGNIGELLRTSIEAHLTAAGLAPTMRYIDPSYAIRSIPANAYDSVYCLRLAHAAVHAAMAGRTEAAVARWRRRFVHVPFSLMTRRRNQVDPDGDLWMSVLETTCQPAEFGAVAARERISSGFC

SEQ ID NO: 7621 - protein, 557 aa, Chloroflexus aurantiacus
MTDTPRLSKVEQIKLASRHLRGPVDHELHDGNDHFSDEGYQILKFHGIYQQDNRDVRKARKARGLGPEYSFMIRVAIPGGRLSPEQYLTLDRLADELGNTTLRFTTRQAIQYHGVRKGGLKPLIRTLNRHLLTTLSACGDVVRNIVACPAPFVDRQRIELMQYAKALSDRLKPKTRAYYEIWLDGEKAASLEEDEPLYGATYLPRKFKIAFAFPGDNCVDVYTQDIGIVPWIEESLQGFTILVGGGLGQSHGVKETHPALAKPLTTVAPAQLFEVVEAIVKVQRDHGRRDDRKLARMKYLVESWGIERFKAEVERYVGYALPEPRPLTWLSADDHLGWHEQGDGRLFFGLFVENGRVRDHLRAAIRDVVQRFGLEVRLTPQQNILFVNIQPADRAAIEAIFRQYDVALPGTIPLVVQNALACPALPTCGLAITESERVMPQVIRDMNALLDRLGLHDGPVPHVRMTGCPNGCARPYTAEIGLVGRSLNSYTIYLGGSPLGTRLGEVYLDNVKREEIVARLEPILLLYQRERNPGESFGDFCHRLGSATLQHLAGQNE

SEQ ID NO: 7622 - protein, 65 aa, Zea mays
MDPNMTEVTHMFSRFKAAYARNYLNTYVTLLSQLNVHLTQFPILSPLFHQTPNIVEELKLAKDIY

SEQ ID NO: 7623 - protein, 431 aa, Trichodesmium erythraeum IMS101
MIKEIFMPALSSTMTEGKIVSWQKTSGDWVEKGETVVVVESDKADMDVESFFSGYLATIIVEAGDVAPVGSTIGLLAETEAEIEQAKQQGVTTLNKEPANTSSSTTPVATAPISTATENQENSSRRNGRIIASPRARKLAKDLKVDLSTLKGNGPHGRIVAEDVEMAAGRIPAVVAASAKSTIPTTPTQVSIPAPPPPPSVVSAPVTPGQVVPMNSLQNAVVRNMNVSLSVPTFHVGYTITTDNLDRLYKQIKSKGVTMTAILAKAVAITLQKHPLLNAVYVDQGIQYPSGINIAVAVAMPDGGLITPVLPNADKMDIYSLSRTWKGLVDRARAKQLQANEYSTGTFTISNLGMFGVNRFDAILPPAQGSILAIGASQPQVVATDDGMIGVKRQMEVNITCDHRIIYGADAAAFLQDLANLIENNSQSLTM

SEQ ID NO: 7624 - protein, 181 aa, Cryptomeria japonica
DDHGEVVAEMLRPDLEPYLGLHYPATDIPQASRFLFLKNRVRMICDCRAPAVKVRQDKRWCRSLSISGSTLRAPDGCHAQYMANMGSIASLVMAVTVSNSEEGGRRLWGLVVCHHATPRFVPYPLRYACEFLMQVFGVQLNKEVELAARLRERHILRTQTVLCDMLLRDAPVGIVTKTPNI

SEQ ID NO: 7625 - protein, 422 aa, Synechococcus elongatus PCC 7942
MSPETVLAAVDAAIASPFSTDAFDACVMQTYGRFPLALERGEGCRVWDTQGRSYLDFVAGIATCTLGHAHPELVDAISDQIRKLHHVSNLYYIPEQGQLAAWLTANSCADRVFFCNSGAEANEAAIKLARKHGNTVLEAENPIILTAQASFHGRTLAAVTATGQPKYHKGFQPLVQGFRYVPYNDLAALEATLAELDAAGETVAAILLEPLQGEGGVNPGDRAYFQAVRQLCDQRRMLLILDEVQVGMGRSGQLWGYENLGIEPDAFTVAKGLGGGVPIGALLVKASCNILQAGEHASTFGGNPLACRAGLAIAQVMERDQLLANVQARGEQLRAGLQELVDRYPNLLAGVRGWGLINGLVLRNDPNVTPIALVKAAIEQGLLLVPAGAEVVRFVPPLIVSAAEIDEALAMTERALLAIAGE

SEQ ID NO: 7626 - protein, 345 aa, Spiroplasma citri
MTSIFGYPKEELQLDLVAHGFKKYLAEQIFDWIYVKNIYSFDEMTNISKTDRNKLQEYYTIEPLKIVVQQQSKDWTVKFLFQLADGYKIETVLMPQSYGNSVCVTTQVGCNMACTFCASGLLKKTRNLSTAEIVQQVMMVNRYLATTNERVSHIVVMGIGEPFDNFDNTLKFVNIINDPKGYQIGARHITISTCGLVPKIKQFAELKTQVNLAISLHAPNNTIRNQLMPINKAYPVEKLMDAVRYYIELTNRRVTFEYILIENVNDSRETALELAKLIRGLNAYVNLIPYNTVAENGHQRSTKINKFFETLQQQKINCIVRREFGHDIDAACGQLRAKNEGVIRK

SEQ ID NO: 7627 - protein, 161 aa, Pseudomonas fluorescens PfO-1
MSDNLLNIPCTTIKGEQKTLADFAGKAVLVVNTASKCGFTPQYKGLEELWQTYKDQGLVVLGFPCNQFGKQEPGNEGAISEFCELNYGVSFPLFKKIEVNGTGAHPLFVQLKKRAPGVLGSQGIKWNFTKFLIGKDGQLVKRFAPATKPQDLSREIEALLK

SEQ ID NO: 7628 - protein, 403 aa, Pseudomonas fluorescens PfO-1
MQFSKSNKLANVCYDIRGPVLKHAKRLEEEGHRILKLNIGNPAPFGFEAPDEILQDVIRNLPTAQGYSDSKGLFSARKAVMQYYQQKQVEGVGIEDIYLGNGVSELIVMSLQALLNNGDEVLVPAPDYPLWTAAVSLAGGNAVHYLCDEGADWFPDLADIKAKITPNTKAMVIINPNNPTGAVYSKEVLLGMLELARQHNLVVFSDEIYDKILYDDAVHICTASLAPDLLCLTFNGLSKSYRVAGFRSGWIAISGPKHNAHSYIEGIDMLANMRLCANVPSQHAIQTALGGYQSINDLVLPQGRLLEQRNRTWELLNDIPGVSCVKPMGALYAFPKIDPKVCPIHNDEKFVLDLLLSEKLLVVQGTAFNWPWPDHFRVVTLPRVDDLDMAIGRIGNFLKSYRQ

SEQ ID NO: 7629 - protein, 82 aa, Triticum aestivum
ILKKILMQMVKHSGQGEAASETVEFCLRALEDFDLALHESPSNGSASIEAMRSKIIDIIEALDNILQIVPLKLMPKGRMLGD

SEQ ID NO: 7630 - protein, 303 aa, Haemophilus somnus 129PT
MALIKEIKMKVIIPVAGLGTRMLPATKAIPKEMLTLVDKPLIQYVVNECVNAGIKEIVLVTHSSKNAIENHFDTSFELETMLEQRVKRQLLDEVRSICPTGVTIMHVRQGNAKGLGHAVLCGRAIVGKEAFAVVLPDVLLAEFDSNQKTENLAAMLKRFKETGNSQIMVSPVPDKDISSYGIVDCGGVTLNVGESVKISNIIEKPSFDDAPSNLSVVGRYVFSATIWDLLEKTPVGVGNEIQLTDAIGMLIEKEVVEAFHMTGKAFDCGDKIGYMQAFVEYGLQHPQLGENFKTYLKQLVQDL

SEQ ID NO: 7631 - protein, 424 aa, Glycine max
  unsure (1)..(424): unsure at all Xaa locations
MENGVVTVNRKNHESKANSTITIKGFMSLLMKSVDENGDGSKRVISLGMGDPTLTTYFPISNVAEEAVSEALQSHKFRGYAPTAGLPQARIAIAEYLSRDLPYQLSNEDVYITCGCTQAIDDSVAMLARPGANILLPRPGFPLYELSASFRGVEVRHYDLLPEKGWEVDLDVVEALADQNTVALVIINPGNPCGNVYSYHHLXKIAETAKRIATIVIADEVYGHLAFAGKPFVPMGIFGSIVPVLTLGSFSKRWIVPGWRLGWFVTNDPSGTFRNPKVDERIKKYFDLLGGPATFIQAALPQIIAHTQKVFFKKTIDNLRHAAYICCKELKDNPYIICPYKPEGSMAMMVRLNLSLLEDISDDIDFCFKLAKEESVIILPGTAVGLNNWIRIIFATDPFALLEGLKRVKSFCERHARKCLKTTE

SEQ ID NO: 7632 - protein, 405 aa, Oryza sativa
  unsure (1)..(405): unsure at all Xaa locations
IDPMQIVRLEVGSETEIDKSKSIKTWLMHIFEESGNTDIEGVDSSNACYGGTAALLNXVNWVESKSWDGRYGLVVCTDSAVYAEGPARPTSGAAAIAMLIGPNAPISFESKYRAAHMAHVYEIYKRELAREYPVADGKLSQTCYLMALDSCYRQYCTKYEKIVGEQFSISDAEYCVFHSAYNKLVQKSFARLYFNDFMRNCSTVDNDAKEKLQPFANLTGEESYQSRDLEKASQQVAKPLYDIKVQPSTLLPKQIGNMYTASLYAALASVLYNKHASLDDQRIVMFSYGSGLTSTMFSLKLNNGQDPFSLSNIASVLNATEKLESRHMTLPEKFVETLKLMEHRYGAKDFETCKDTSLLPPGTFYLTRVDSMYRRFYERKADEEIAAAKAKYSNGHATNGYANGH

SEQ ID NO: 7633 - protein, 428 aa, Lactobacillus gasseri
MKVQRPKGTVDILPAESGSWEKVETIARNFFKRANYREIRTPSFENYEVFSRSSGESSDVVEKEMYDFNDKGGRHIALRPEGTAGVVRAYVENKLYGPDVVKPFNVYYIDNTFRYERPQAGRQREFHQIGVESFGSNSPLADVETIMMGHDLLAELGVKNYELHINTLGNAQVRKDYHDALVNYFTPLKDQLSEDSQRRLSMNPLRILDSKAEEDKQFLPDAPRIVDYLDEDSKKNFETITDMLEQLGINYVLDDDLVRGLDYYTGVIFEFMVEDKNLWESATTILGGGRYNHLVEEFDGPETPAVGFGIGEERLMLVLKEQNPALFEDEGIDFFITNIGEGTEMKAVEIARSLRKQDFKAQYDVDQKKLKQQFRKADRVHAKFVITLGAKELENGVLNIKRLADGKTLDLSLEDLNDMKSVMEKIED

SEQ ID NO: 7634 - protein, 481 aa, Elaeis guineensis
LTFVDLSRNNLSGEIPAEIAGIRILNYLNVSRNHLEGSIPPSIATMQSLTAVDFSYNNLSGLVPSTGQFSYFNVTSFVGNAELCGPYLGPCGFTNSSGSTHARGPLSASFKLLLGHWSPPLFHCLRHRRHHQKLGSFEEGRARPGHGSLTAFQRLDFTCDDVLDWLKEENIIGKGGAGIVFQGCDAQRRTVAVKKLPAINPGSSHEHGFSAEIQTLGRIRHRHIVRLLGFCSNHETNLLVYEYMPNGSLGEVLHGKKGGHLRWDTRYKIAVEAAKGLCYLHHDCSPLILHRDVKSNNILLDSDFEAHVADFGLAKFLQDSGTSECISAIAGSYGYIAPEYATLKVDEKSDVYSFGVVLLELVTGRKPVGEFGDGVDIVQWVRKVTDTNKEGILKIIDPRLSSVPLHEAMHVFYVAMLCVEEQSVERPTMREVVQILTELPGTPAKQGEDPPPPPPVGGETPPRESKPRQEQQSPPPDLLSI

SEQ ID NO: 7635 - protein, 236 aa, Streptococcus pyogenes MGAS8232
MNFIGELLGTFILVLLGDGVVSACILNKTKAQNSGWIAIVLGWGIAVTVAVYISGFMSGAHLNPAVTLAMAAIGSLPWSQVVTYLVAQFLGAMLGALVLYLHYYPHWNETKDAGTILACFSTGPAIRHTWSNLFGEALGTAVLVITVMAIGPNKVAAGFGPIIVGFVVMAVGFSLGATTGYAINPARDLGPRIMHALLPIPNKGDSDWSYAWIPVLGPILGGVAGALIYQAILNMM

SEQ ID NO: 7636 - protein, 353 aa, Pseudomonas aeruginosa UCBPP-PA14
MTLQIRGYAAQSASAPLAAHRFERRAPRADDLVIDILYCGVCHSDLHQARNEWHNSLYPLVPGHEIIGRVASVGEAVSGFAVGELVGVGCMVDSCRHCAACSEGLEQYCAEYPTLTYNGRDRHDGLPTFGGYSERIVVSARFVLRIPQGLDPKAAAPLLCAGITSYSPLRHWKIGPGSRVAVVGLGGLGHMGLKFARALGAEVALFTRSPGKEEEARRLGADQVILSTDPQRMAAVAGRFDLILDTVPHQHDLNPYLATLKRDGTLVLVGLLEPLEPAVHGAQLVMGRRSIAGSAIGGIAETQEMLDFCATHGIACDIEMIEIQQINQAYERMLASDVKYRFVIDMASLPKSF

SEQ ID NO: 7637 - protein, 258 aa, Oryza sativa
MVPWEGYVSDETMGTFAPIALYWVYAGGYQLVLHRRPLERYRLHTRAEEEEKNLVALPAVVRGVLLQQLVQAIVAMILFMGSSPSSAVVVQPPIIIQAFQFLVAMLVMDSWQYFVHRYMHQNKFLYRHIHSQHHRLIVPYAIGALYNHPLEGLLLDTVGGAISFLVSGMTPRTSVFFFCFAVLKTVDDHCGLWLPYNIFQSLFQNNTAYHDVHHQLQGSKYNYSQPFFSIWDRILGTHMPYNLVRRKEGGFEARPLRD

SEQ ID NO: 7638 - protein, 324 aa, Synechococcus elongatus PCC 7942
MPTFTDCLRSPLTKAHIHTLQINLGKRCNLACSHCHVEAGPKRTEELTEEVCQQLIQLIQKHPEIQVIDLTGGAPEMLYGFRPLVEAARQANKTVIVRSNLTIYFEPGFEDLPEYCADKQVRIVASLPCYLSDNVDKMRGHGVYDASIRALQKLTELGYGSQPQLVLDLVYNPPLPTQEKQFRLTPNQISLEQDYKTFLQEKFSIQFNHLLTITNLPIGRTGQFLKRQDLYGKYLQFLSDHFNSETVEGLMCRHQLSVDYQGQIYDCDFNQMAEVPALNQQGNPLTVANLLASDRLDLISTIQTRDYCYGCTAGSGSSCGGALL

SEQ ID NO: 7639 - protein, 187 aa, Cryptomeria japonica
DEHGEVVAEIRRSDLEPYLGLHYPATDIPQASRFLFMQNRVRMICDCRANPVGVIQVEELKQPLCLVGSTLRAPHGCHAQYMANMGSIASLVMAVIVNGNGNDEEGSSGRVKLWGLVVCHHTSPRAVPFPLRSACEFLMQTFGLQINMEMQLAAQLTENNILRTQTLLCDMLLRDAPIGIVTQSPSI

SEQ ID NO: 7640 - protein, 329 aa, Burkholderia sp. DBT1
MARTIRIRQVGGPEVLQFEELDVGKPGPDELCIRVEAIGLNRAEAIFRAGRYIEPTNLPARLGYEASGVVERVGSGVGGVLPGDAICVIPAFSMNQYGVYAHKAIVPASAVIKRPEGLGAVEAAAVWMAYLTAYGALIDVGKLGKGDAVVIQAASSSVGLAAIQIANSVGAVPIATTRTSTKRSALLDAGAAHVIASLEQDLATEVMRITNGKGARIVFDPVGGPHVEILAQAMSRGGTFFVYGNLSGQPTPFPRWMLKHGQSMRGYLLFEITKDQSRLERACAFISDGLRSGQFKPFIAKTFSFDQMVEAHRYQALNQHIGKIIVTVP

SEQ ID NO: 7641 - protein, 192 aa, Cryptomeria japonica
DDHGEVISELRRSDLEPYLGLHYPATDLPQASRFLFMKNKVRMICDCQATPVKVVEDKRLPRELVLCGSTLRAPHGCHAEYMSNMGSVASVVIAVTINAKEEDGDTDGQQRQQKGRRLWGLVVCHHTSPRFVPFPMRYACEFLMQVFAIQLNKEVELADQLREKHILRTQTLLCDMLLRDAPMGIIREKPNI

SEQ ID NO: 7642 - protein, 245 aa, Neisseria meningitidis MC58
MGGQKTHFGFSTVNEDEKAGKVAEVFHSVAKNYDIMNDVMSAGLHRVWKHFTINTAHLKKGDKVLDIAGGTGDLSRGWAKRVGKEGEVWLTDINSSMLTVGRDRLLNEGMILPVSLADAEKLPFPDNYFNLVSVAFGLRNMTHKDAALKEMYRVLKPGGTLLVLEFSKIYKPLEGAYDFYSFKLLPVMGRLIAKDAESYQYLAESIRMHPDQETLKQMMLDAGFDSVDYHNMSAGIVALHKGVKF

SEQ ID NO: 7643 - protein, 496 aa, Zea mays
MTMDPTKFRPSSSHDTTVTTTNAGAPVWNDNEALTVGPRGPILLEDYHLIEKVAHFARERIPERVVHARGASAKGFFECTHDVTSLTCADFLRAPGVRTPVIVRFSTVIHERGSPETIRDPRGFAVKFYTREGNWDLLGNNFPVFFIRDGIKFPDVIHAFKPNPRSHVQEYWRVFDFLSHLPESLHTFFFLFDDVGVPSDYRHMEGFGVNTYTFVSAAGKAQYVKFHWKPTCGVRCILTDEEAALVGGRNHSHATQDLYDSIAAGSFPEWTLYVQVMDPDTEEQYDFDPLDDTKTWPEDLLPLRPVGRLVLDRNVDNFFNENEQLAFGPGLVVPGIYYSDDKMLQCRVFAYADTQRYRLGPNYLMLPVNAPRCAHHNNHYDGAMNFMHRDEEVDYYPSRHAPLRQAAPPTPLPPRPVAGRREKATIRKPNDFKQPGERYRSWDADRQDRFVRRFADSLGHPKVSQELRSIWIDLLAKCDASLGMKIATRLNMKANM

SEQ ID NO: 7644 - protein, 192 aa, Cephalotaxus fortunei
DDHGEVISEIRKSDLEPYLGLHYPATDIPQASRFLFMKNRVRMICDCYAPPAKVVEDKRLPRELNLCGSTLRAPHGCHAQYMANMSSIASLVMAVIINEKEEEQGESDGQQQQKGRRLWGLVVRHHTSPRFVPFPLRYACEFLMQVFGIQLNKEVELAAQLKEKHILRTQTLLCDMLLRDAPVGIVTQKPNI

SEQ ID NO: 7645 - protein, 134 aa, Zea mays
MFSGDWTPPCGSCCTKKYASLVQIPWRVFCKKGCNADGDTWDECIGKCTEICYKDPVLEDRQWSAYIDRSPGQDSYSLECFNACVSGCGFRFDIPTEKVEEIKPNRPSKPSAPEPEVKQTRNADCNEDVPCTSA

SEQ ID NO: 7646 - protein, 487 aa, Synechococcus elongatus PCC 7942
MSWLTQANACPGVFYGTRAQDGFLLRIRIPAGTLHLNQLKVIANLLTTLQCDQVQVTNRANLQIRGVQRAIDSSELNQLQAVGLAATHPQTDHLRNLMASPTAGIDPEELLDTRPYIQQIDQFLQQHPEYGELSAKFSIGLDGGGSVGIGTRSPVAWEHRLNDVQLTAIQTNQQEIPFLLQLAVKKQLIDTGYIITPDQLLPTIATLTAIYYEYSNQEVKAGRQGKPRLHSLIESWGLEQFLQVIQERSRQSLETTQQSLPVSQPYRQFGFYPQSNPDLFYLGIRSFLGQITGLQLTALIQILEALNCQEIRLTPWQSLIVPNLNKSEVIEAQQRFQELGFATTAKEPVIIACAGHPVCQAAIVPTQPLAERLQQAIDQVCQALDPINIHISACSKFCAQSSPAEITILAADSPEEQKPNERYNIFFGDSDRFDRISGPSLSFHQVISFITEVLKRYQKHRQSTSESLVQFLLRSQFDLNTIVPVLL

SEQ ID NO: 7647 - protein, 815 aa, Shigella flexneri 2a str. 301
MIREEVMALTRREFIKHSGIAAGALVVTSAAPLPAWAEEKGGKILTAGRWGAMSVEVKDGKIVSSTGALAKTIPNSLQSTAADQVHTTARIQHPMVRKSYLDNPLQPAKGRGEDTYVQVSWEQALKLIHEQHERIRKANGPSAIFAGSYGWRSSGVLHKAQTLLQRYMNLAGGYSGHSGDYSTGAAQVIMPHVVGSVEVYEQQASWPLILENSQVVVLWGMNPLNTLKIAWSSTDEQGLEYFHQLKKSGKPVIAIDPIRSETIEFFGDNATWIAPNMGTDVALMLGIAHTLMTQGKHDKVFLEKYTTGYPQFEEYLTGKSDNTPKSAVWTAEITGVPEAQIVKLAELMAANRTMLMAGWGIQRQQYGEQKHWMLVTLAAMLGQIGTPGGGFGFSYHYSNGGNPTRVGGVLPEMSAAIAGQASEAADDGGMTAIPVARIVDALENPGGKYQHNGKEQTYPNIKMIWWAGGGNFTHHQDTNRLIKAWQKPEMIVVSECYWTAAAKHADIVLPITTSFERNDLTMTGDYSNQHIVPMKQAVAPQFEARNDFDVFADLAELLKPGGKEIYTEGKDEMAWLKFFYDAAQKGARAQRVTMPMFNAFWQQNKLIEMRRSEKNEQYVRYGDFRADPVKNALGTPSGKIEIYSKTLEKFGYKDCPAHPTWLAPDEWKGTADEKQLQLLTAHPAHRLHSQLNYAELRKKYAVADREPITIHTEDAARFGIANGDLVRVWNKRGQILTGAVVTDGIKKGVVCVHEGAWPDLENGLCKNGSANVLTADIPSSQRANACAGNSALVYIEKYTGNAPKLTAFDKPAVQA

SEQ ID NO: 7648 - protein, 250 aa, Arabidopsis thaliana
MGRGRVELKRIENKINRQVTFAKRRNGLLKKAYELSVLCDAEVALIIFSNRGKLYEFCSSSSMLRTLERYQKCNYGAPEPNVPSREALAELSSQQEYLKLKERYDALQRTQRNLLGEDLGPLSTKELESLERQLDSSLKQIRALRTQFMLDQLNDLQSKERMLTETNKTLRLRLADGYQMPLQLNPNQEEVDHYGRHHHQQQQHSQAFFQPLECEPILQIGYQGQQDGMGAGPSVNNYMLGWLPYDTNSI

SEQ ID NO: 7649 - protein, 254 aa, Zea mays
MSLPPGPADSGAGTGDDWFLDCGILDDLPAAACGAFPWDASPSSSNPSVEVGSYVNANDAFKEPNDVFKEPGSSKRLRSGSSDMPTSKACRERMRRNKLNDRFLELGSALEPGKPVKADKAAILSDATRMVIQLRSESQQLKETNGSLEEKIKELKAEKDELRDEKQKLKLEKESLEHQMKLMASAPAYMPHPTLMPAPFAQAPLAPFHAQGQAAGQKLMMPFVGYPGYPMWQFMPAFRGRHPRRTSEACPPVA

SEQ ID NO: 7650 - protein, 366 aa, Escherichia coli
MLPLHLLPVNRWKSLKLTLHHRKKGEVLIKVTHTGVCHTDAFTLSGDDPEGVFPVVLGHEGAGVVVEVGEGVTSVKPGDHVIPLYTAECGECEFCRSGKTNLCVAVRETQGKGLMPDGTTRFSYNGQPLYHYMGCSTFSEYTVVAEVSLAKINPEANHEHVCLLGCGVTTGIGAVHNTAKVQPGDSVAVFGLGAIGLAVVQGARQAKAGRIIAIDTNPKKFDLARRFGATDCINPNDYDKPIKDVLLDINKWGIDHTFECIGNVNVMRAALESAHRGWGQSVIIGVAVAGQEISTRPFQLVTGRVWKGSAFGGVKGRSQLPGMVEDAMKGDIDLEPFVTHTMSLDEINDAFDLMHEGKSIRTVIRY

SEQ ID NO: 7651 - protein, 520 aa, Agrobacterium tumefaciens str. C58 (Cereon)
MPSTRRNSPERPFHSAAGNNQALAARARVMASWNISNPNMSASAIWLPERISPMTIDIKNIAEMDRNAVLHPFTQLKDFASGKLGEPTIVETGKGIRIQDAHGKQLIDGFAGLYCVNVGYGRTEVAEAISRQAYRLAYYHSYAAHTTDELAILSDRLVRMAPGKMSKVFYGMSGSDANETQAKLVWYYNNLRGKPQKKKIISRERGYHGCSVVAGSMTGMSFYHDHMDLPRVGILHTGVPHHYWGAEAGETELEFSKRRAAELEALILREGPDTIGAFIAEPVLGTGGITPPPEGYWPAIQEVLKKYDVLLIADEVITGFGRTGSMFGSQHYGIEPDLITVAKGLTSAYFPLSGAIVGEKVYTVMEDGADRVGAFSHGYTYSGHPIGAAAANAVLDIVEKEDLPGNAQAVGSYFQEQLKAKFAQLPIVGEVRGVGLMGAIEFVADREKKTRFAPHLTVGARVSKAARNGGLIARAMPHGDILGFAPPLVTTKAEVDEIIAIAEAAVRTVMDDLVQAGEKI

SEQ ID NO: 7652 - protein, 425 aa, uncultured bacterium 560
MTIKQIKAREVLDSRGNPTVEADVILSNGVFGRAMVPSGASTGQREALELRDGDKNRYLGKGVTQSVNNINHEINNALVGMKISNQQAIDQKMIDIDGTETKSRLGANSILAVSLACAHANANNNKQSLFRSFDFSETYQLPVPMMNIINGGEHANNSIDIQEFMIIPAGAPNFREALRYGAEVFHHLKKLLDQEGLNTAVGDEGGFAPDLSSNEEALKIIIKAIKSAGYKAGKDIFIGIDAASSEFYNNGTYNLSSEGLKLSNEEFTSYLASWVEKYPIISIEDGMDENDWSGWEMLTKKLSDKVQLVGDDLFVTNSKILARGIENNIANSILIKVNQIGTLTETFNAMKMALNAGYTCVMSHRSGETEDTTIADLSVATGCGQIKTGSLSRSDRLAKYNRLLRIEEELGDDAFYPGINAFKHL

SEQ ID NO: 7653 - protein, 163 aa, Kineococcus radiotolerans SRS30216
MTSPLDVPLTALTGGPLDPAQLTGRAVLVVNVASRCGSTPQYAGLQELQEEYGERGFTVLGVPCDQFGGQEPGTEEEIAEYCSATWGTTFPMTAKVEVNGPGRHPLYGALTATPDADGTAGDVAWNFEKFLVSPAGEVVARFRTRTTPQDPALRAAIEARLPA

SEQ ID NO: 7654 - protein, 507 aa, Pirellula sp. 1
MNALLPHDEHNQQLEANVHPTDWQNPSPKQPYHLVVIGAGTAGLVTAAGAAGLGARVALIERDLMGGDCLNVGCVPSKGVISAARVAATVKNASDFSVHVPNGVEIDFDGVMSRMRELRAKISQNDSAKRFQDLGVDVYFGQASFTDSQTIDVQGTKLQYKRAVIATGARAAAPPIKGLDQVDYLTNETVFSLTKLPKRIGIIGAGPIGCEMAQTFAQLGSEVFLIESQHGILPKEDREAADIVQKAMLADGVQLLCCGHDLEIKNEGGIRLTLNSHGNQYDQPVDQLLVAVGRAPNVEKLNLDAVGVKFDKNGVEVNDNLQTTNPNIFAAGDVSSKYQFTHVADFLARIVIQNSLFAIGPFGKKKASELIIPWATYTSPEIAHVGMYEQDAKDAGIEIDTYVQHFREVDRAILEGEEEGFVRIHTKKGTDKIVGTTIVAKNAGDMISEITVAMNNNVGLGAIANAIHPYPTQAEAIRKLGDQYNRTRLTPFSKTMLHALMRWNVGR

SEQ ID NO: 7655 - protein, 448 aa, Chloroflexus aurantiacus
MAYEIRVPSLGESIVEATVARWLKREGEPVAVGEPVVELETDKVNLEVAADQSGILTSIACPEGTTVGIGDLLGTIEAGALPKEAPVAAASTTTVAAPVAEPVAATAVNEVLATPVAQRMAAEHAIDLRTVPGTGPGGRITKEDVMRLVSGTGPSEATAKADEARVHVSHPTPAVVERPQPAQPSPAPAPVAPPPPAPAPRPTPPAAPAVVSTNGDRREERQRLSRRRLTIARRLVEAQHTAAMLTTFNEVDMSAVMALRARHKDSFKERHGVGLGFMSFFTKAVVGALKAFPMVNAEIQGEEVVIKYYYDIGIAVGVDEGLVVPVVRDADRKTFAQIEREIAQLAKKAREGTLSLAELQGGTFTITNGGVYGSLMSTPILNAPQVGILGMHKIEERPVVVGGQIVIRPMMYVALSYDHRLIDGSTAVRFLVKVKELIEDPEALLLEG

SEQ ID NO: 7656 - protein, 193 aa, Cephalotaxus fortunei
DDHGEVISEIVRSDLEPYLGLHYPATDIPQAARFLFMKNRVRMICDCGAPPVRVVEDKRLPREVSLCGSPLRAPHGCHTGYMTNMGSIASLVMAVVIDEKEEGGGDTNGQHEQKKGRRLWGLVVCHHTTPRFVQFPLRYACEFLMQVFGIQLNKEVDLAVQLREKHILRTQTMLCDMLLRDAPLGIIRQKPNI

SEQ ID NO: 7657 - protein, 321 aa, Arabidopsis thaliana
MTVDIMRLPKMEDQTAIQEAASQGLKSMEHLIRVLSNRPEERNVDCSEITDFTVSKFKKVISLLNRSGHARFRRGPVHSPPSSSVPPPVKVTTPAPTQISAPAPVSFVQANQQSVTLDFTRPSVFGAKTKSSEVVEFAKESFSVSSNSSFMSSAITGDGSVSKGSSIFLAPAPAVPVTSSGKPPLSGLPYRKRCFEHDHSEGFSGKISGSGNGKCHCKKSRKNRMKRTVRVPAVSAKIADIPPDEYSWRKYGQKPIKGSPHPRGYYKCSTFRGCPARKHVERALDDSTMLIVTYEGEHRHHQSTMQEHVTPSVSGLVFGSA

SEQ ID NO: 7658 - protein, 188 aa, Chamaecyparis lawsoniana
DEHGEVVAEIRRSDLEPYLGLHYPATDIPQASRFLFMQNKVRMISDCRADPVRIIQAEELPQLLCLVGSTLRAPHGCHAQYMANMGSIASLAMAVIVNNGNDEVGSSGRNTGKLWGLVVCHHTSPRAVPFPLRSACEFLMQAFSLQINMEMRLAAQLTENNILRTQTLLCDMLLRDAPYGIVTQSPSI

SEQ ID NO: 7659 - protein, 429 aa, Magnetococcus sp. MC-1
MSSIVEIHGREVIDSRGNPTVEVDVYTEDGGFGRAAVPSGASTGSREAVELRDGDKSRFLGKGVRKAVDAVNTVLAEVVLGMEVADQKGIDAAMIALDGTHNKSRLGANAILGISMAVAKAAADECDLPLYRYLGGTNTSLLPVPMMNIINGGAHADNNVDIQEFMIMPVAATSCTEAIRMGAEVFHSLKKVLKSKGLNTAVGDEGGFAPNLGSNEEALKVIVEAIEAAGYKPGEDIKLALDCASSEFYNKETGNYDLTGEGRVLTKQELVAFYEDLVAKYPIISIEDGFDESDWDGWKLMTEALGNKIQLVGDDLFVTNSKILAEGISKGIANSILVKVNQIGTLTETFEAVEMAQRAGYTAVISHRSGETEDATIADIAVALNAGQIKTGSMSRSDRIAKYNQLIRIEEELGGMARFEGMKVFYNLR

SEQ ID NO: 7660 - protein, 370 aa, Mycobacterium tuberculosis H37Rv
MSFVVANTEFVSGAAGNLARLGSMISAANSAAAAQTTAVAAAGADEVSAAVAALFGAHGQTYQVLSAQAAAFHSQFVQALSGGAQAYAAAEATNFGPLQPLFDVINAPTLALLNRPLIGNGADGTAANPNGQAGGLLIGNGGNGFSPAAGPGGNGGAAGLLGHGGNGGVGALGANGGAGGTGGWLFGNGGAGGNSGGGGGAGGIGGSAVLFGAGGAGGISPNGMGAGGSGGNGGLFFGNGGAGASSFLGGGGAGGRAFLFGDGGAGGAALSAGSAGRGGDAGFFYGNGGAGGSGAGGASSAHGGAGGQAGLFGNGGEGGDGGALGGNGGNGGNAQLIGNGGDGGDGGGAGAPGLGGRGGLLLGLPGANGT

SEQ ID NO: 7661 - protein, 181 aa, Chamaecyparis lawsoniana
DDHGEVVAEMRRPDLEPYLGLHYPAADIPQASRFLFLKNRVRMICDCRAPAVKVRHDESLGQVLSLQGSTLRAPFGCHAQYMANMGSIASLVMAVTVSDSEEGGRRLWGLVVCHHTTPRFVPYPLRYACEFLMQVFGIQLNKELELASRLRERHIFRTQTLLCDMLLRDTPVGIVTTTPNI

SEQ ID NO: 7662 - protein, 263 aa, Zea mays
  unsure (1)..(263): unsure at all Xaa locations
MSKPRLDGKVAIVTGGASGIGEAAARLFASSGATVVIADVQDALGEAVAASVGPRCAYARCDVTDEAQVEATVARAVSAHGRLDVMLSNAGVLLPTGSVMDMDLAELDRVMAVNFRGAAACVKHAARAMASXXXGAIVCTASVASLQGGFGPASYTASKHALLGLVRAAAGELGRHGVRVXCVSPGXVATPLSCALMGVGPRELEAMTVPHNVLQGKVLRAEDVAEAALFLASDQAAFISGHNLVVDGATTAVNPAVLHTVGL

SEQ ID NO: 7663 - protein, 256 aa, Mycobacterium tuberculosis H37Rv
MIGDGANGGPGQPGGPGGLLYGNGGHGGAGAAGQDRGAGNSAGLIGNGGAGGAGGNGGIGGAGAPGGLGGDGGKGGFADEFTGGFAQGGRGGFGGNGNTGASGGMGGAGGAGGAGGAGGLLIGDGGAGGAGGIGGAGGVGGGGGAGGTGGGGVASAFGGGNAFGGRGGDGGDGGDGGTGGAGGARGAGGAGGAGGWLSGHSGAHGAMGSGGEGGAGGGGGARGEAGAGGGTSTGTNPGKAGAPGTQGDSGDPGPPG

SEQ ID NO: 7664 - protein, 596 aa, Schizosaccharomyces pombe
MDSPLSSLSFTNTLSGKRNVLRPAARELKLMSDRNANQELDFFFPKSKHIASTLVDPFGKTCSTASPASSLAADMSMNMHIDESPALPTPRRTLFRSLSCTVETPLANKTIVSPLPESPSNDALTESYFFRQPASKYSITQDSPRVSSTIAYSFKPKASIALNTTKSEATRSSLSSSSFDSYLRPNVSRSRSSGNAPPFLRSRSSSSYSINKKKGTSGGQATRHLTYALSRTCSQSSNTTSLLESCLTDDTDDFELMSDHEDTFTMGKVADLPESSVELVEDAASIQRPNSDFGACNDNSLDDLFQASPIKPIDMLPKINKDIAFPSLKVRSPSPMAFAMQEDAEYDEQDTPVLRRTQSMFLNSTRLGLFKSQDLVCVTPKQSTKESERFISSHVEDLSLPCFAVKEDSLKRITQETLLGLLDGKFKDIFDKCIIIDCRFEYEYLGGHISTAVNLNTKQAIVDAFLSKPLTHRVALVFHCEHSAHRAPHLALHFRNTDRRMNSHRYPFLYYPEVYILHGGYKSFYENHKNRCDPINYVPMNDASHVMTCTKAMNNFKRNATFMRTKSYTFGQSVLASPDVNDSPTAMHSLSTLRRF

SEQ ID NO: 7665 - protein, 825 aa, Haemophilus influenzae Rd KW20
MKKNNVNEQRRDFLKKTSLGVAGSALSGGMVGVVSKSAVAKEAEMKTVVTAAHWGSIGVVVQDGKVVKSGPAIEPAVPNELQTVVADQLYSERRVKCPMVRKGFLANPGKSDTTMRGRDEWVRVSWDEALDLVHNQLKRVRDEHGSTGIFAGSYGWFSCGSLHASRTLLQRYMNATGGFVGHKGDYSTGAAQVIMPHVLGTIEVYEQQTSWESILESSDIIVLWSANPLTTMRIAWMSTDQKGIEYFKKFQASGKRIICIDPQKSETCQMLNAEWIPVNTATDVPLMLGIAHTLVEQGKHDKDFLKKYTSGYAKFEEYLLGKTDGQPKTAEWAAKICGVPAETIKQLAADFASKRTMLMGGWGMQRQRHGEQTHWMLVTLASMLGQIGLPGGGFGLSYHYSNGGVPTATGGIIGSITASPSGKAGAKTWLDDTSKSAFPLARIADVLLHPGKKIQYNGTEITYPDIKAVYWAGGNPFVHHQDTNTLVKAFQKPDVVIVNEVNWTPTARMADIVLPATTSYERNDLTMAGDYSMMSVYPMKQVVPPQFEAKNDYDIFVELAKRAGVEEQYTEGKTEMEWLEEFYNAAFSAARANRVAMPRFDKFWAENKPLSFEAGEAAKKWVRYGEFREDPLLNPLGTPSGKIEIFSDVVEKMNYNDCKGHPSWMEPEEFAGNVTEEYPLALVTPHPYYRLHSQLAHTSLRQKYAVNDREPVMIHPEDAAARGIKDGDIVRIHSKRGQVLAGAAVTENIIKGTVALHEGAWYDPMYLGESEKPLCKNGCANVLTRDEGTSKLAQGNSPNTCIVQIEKFIGVAPEVTVFKQPKQVA

SEQ ID NO: 7666 - protein, 587 aa, Oryza sativa
MRGGGGGGGGGGEEAGQKLKSMDVDKLENGGDKPALKYHGWRAMPFIIGNETFEKLGTLGTSANLLVYLTQVFHMRSVDAATLLNGLNGTTSLAPIIGAFLSDAYLGRYLALAIASVASLIGMFLLTMTAAADGLHPAECGVGETCSKATSGQFAVLFMSFAFLVLGSAGIRPCSMPFGADQFDPHTESGKRGINSFFNWYYFTFTSAMLVSATVIIYVQSNVSWPIGLGIPTALMLLACVLFFMGTRLYVRVTPEGSPFTSIVQVFAAAARKRSLKQPKDPKQDLFDPPHTSAIVTKLAHTDQFRCLDKAAIVSGPDDVRAGGAAPSNPWRLCSVQQVEEVKCLIRIVPVWSTGIIYYVAVVQQSTYVVLSALQSDRHLGRSFQIPAASFTVFAMLAQTLWIPIYDRLLVPRLRRVTGKDEGLTLLQRQGIGIALSTVAMVMSAVVEDRRRHIALTQPTLGTTITGGAISAMSSLWMVPQLMVLGLSEAFNLISQIEFYYKEIPEHMRSVAGALAFCNLALGNYLSGFLVTIVHRTTGAGSNWLAQDLNKGRLDLFYWMIAGIGIFNIIYFMICAKWYRFKGAAAN

SEQ ID NO: 7667 - protein, 135 aa, Haemophilus influenzae
EDPTPALEGADVVLISAGVARKPGMDRSDLFNINAGIVRGLIEKVAITCPKACVGIITNPVNTTVAIAAEVLKKAGVYDKRKLFGVTTLDVLRSETFVAELKGLNVSRTSVPVIGGHSGVTILPLLSQVQYAKWN

SEQ ID NO: 7668 - protein, 135 aa, Haemophilus influenzae
EDPTPALEGADVVLISAGVARKPGMDRSDLFNINAGIVRGLIEKVATICPKACVGIITNPVNTTVAIAAEVLKKAGVYDKRKLFGVTTLDVLRSETFVAELKGLNVSRTSVPVIGGHSGVTILPLLSQVQYAKWN

SEQ ID NO: 7669 - protein, 156 aa, Haemophilus influenzae
NRANTPVLVDGKDVMPEVNTVLAKMKDFCQRIISGKWKGYTGKAITDVVNIGIGGSDLGPYMVTEALRPYKNHLNMHFISNVDGTHIAETLKKINPETTLFLVASKTFTTQETMRNAQSARDWLLKAAKDESAVAKHFAALSTNAKDVEKFGIDTN

SEQ ID NO: 7670 - protein, 428 aa, Lactobacillus gasseri
MLKSVIENVHALEIFDSRGNPTVEVFVTLSNGVVGKAEVPSGASTGENEAVELRDGGSRLGGKGVMNAVNNVNTEINDALKGLDPHDQPNIDATMIALDGTPNKGRLGANAILGVSMATACAAAKDNHQPLYRYLGGTDLEMPQTFHNVINGGEHADNGIDIQEFMITPVAKTSFRDGFEKIVNVYHTLKKVLEDMGYETGLGDEGGFAPNMKNSEEALKALHESIIKAGYKPGEDIAIACDCAASYFYNKEDGKYHLEGKVLTDEELADYYDKLLDEFPELISMEDPYDENDVEGMVKFTESHKDRIQIVLDDFICTNPKLLNKAIHEGAGNASLIKLNQIGTVTETLETIRLSRKNGYNTMISHRSGETGDTFIADFAVAVNGGQLKSGAPARSERVEKYNRLLEIEEELGKGERLAFFPDNVDLD

SEQ ID NO: 7671 - protein, 171 aa, Glycine max
  unsure (1)..(171): unsure at all Xaa locations
ISLHSLNLKISTRVKAGCDMTKILMATTLSRLVLTDHSKLTLGQDGAIEPLVRMFNSGKLESKLSALNALQNLSSLTENVRRLVGTGIVGSLLQLLFSVTSVLMTLREPASAILAXIAESETVLVNLGVAQQILSLLNLSSPVIQGHLLEALNSIASLPCASKERRKMKEK

SEQ ID NO: 7672 - protein, 393 aa, Lactococcus lactis
MKKCSDFVLKMDESVTLAAANRAKALKAQGRDIIDLTLGQPDFPTPKKIGQAAIEAINNGQASFYTQAGGLPELKKAVQHYWTRFYAYEIQTNEILITAGAKFALYAYFMATVDPLDEVIIPAPYWVSYVDQVKMAGGNPVIVEAKQENNFKVTVEQLEKARTSKTKILLLNSPSNPTGMIYSKEELTAIGEWAVAHDLLILADDIYHRLVYNGAEFTAISSLSDEIRNRTTVINGVSKTFAMTGWRIGLAVGDPEIIAAMTKIASQTTSNPTAVAQYAAIEAFEENDKSFEKMHAAFEERLNKIYLQLSEVPGFELVKPNGAFYLFPKVTKAMAMKGYTDVTDFTTAILEEAGVALVTGAGFGSPENVRLSYATSLETLEAAVTRLKDWMND

SEQ ID NO: 7673 - protein, 190 aa, Blechnum spicant
DEHGEVVAEIRKSDLEPYLGLHYPATDIPQASRFLFMKNRVRMISDCLAIPVKVIQDRELRQPLSLAGSTLRAPHGCHSQYMANMGSAASLVMAVTVNDNEEASSSRNHQPKQRKLWGLVVCHHTTPRAVSFPLRSACEFLMQVFGLQLNMEVELAAQMREKHILRTQTLLCDMLLRDAPIGIVSESPNI

SEQ ID NO: 7674 - protein, 548 aa, Neurospora crassa
MVLGKKSIKINGADIGVEAILLGAVTAIGGFLFGYDTGQISGMLLFSDFKNRFGQITQPDGSKEFESIIQSLLVSLMSIGTLLGSLTSSYTATWWGRRKSLTFGVGLFIIGNIIQITAMHSWVHMMMGRFVAGLGVGTLSVGVPMFQSECSPREIRGAVVASYQLLITFGILIANIVNYGVREIQEQDASWRIVIGLGIFFSLPLGVGVLLVPESPRWLASKEDWEGARMSMARLRGLKHDPHNELVEDDMKEMREVLEKERTAAVGTWKECFIPNKNGVPKQVYRTFLGIGIHFLQQWTGVNYFFYYGATIFQSAGIKDPIQTQLILGAVNVFSTLFGLWVVERFGRRWPLFIGAIWQASWLAVFASMGTALEPDQNKASGIVMIVSAALFIASFACTWGPIAWVVIGESFPLRTRAKQASLATAGNWLGNFMISFLTPLATDGIGYAYGYVFVATNIMGALLVWFFLYESTSLSLENVDLMYSEPGIKPWNSHKWMPPGYITRMQRDDEYFHHPEKGGSDGLEITNGSKEMHPHEEREEKVINHRV

SEQ ID NO: 7675 - protein, 317 aa, Neurospora crassa
MATPKFNSKSPTIRRILREAQEISASPSPDYTATPLESDLFEWHFTLRGPPNSVYADGIYHGRIVLPQAYPLRPPSFRFVTPSGRFEANREICLSISGHHEETWQPAWGVRTSLVALRSFMETDPKGQLGGLDATEAVRRRMATESRAWKCQACGKTNEEIIWECEEAAKEHQGEGQAEVEVPSDLKMGWRDEMDKNSSGAVAASRSGAQQDEEDAESAELAEGFVQTVPLPPAPQPRSVGVTSSSSTPAQPGQGVPQPTRTIPLPSQFNPHPPPMMQHRRPQQVRVSNDEVTFWIDRLIVVLSIALAAMILKVFLA

SEQ ID NO: 7676 - protein, 475 aa, Staphylococcus aureus subsp. aureus Mu50
MRDYTKQYINGEWVESNSNETIEVINPATEEVIGKVAKGNKADVDKAVEAADDVYLEFRHTSVKERQALLDKIVKEYENRKDDIVQAITDELGAPLSLSERVHYQMGLNHFVAARDALDNYEFEERRGDDLVVKEAIGVSGLITPWNFPTNQTSLKLAAAFAAGSPVVLKPSEETPFAAVILAEIFDKVGVPKGVFNLVNGDGAGVGNPLSEHPKVRMMSFTGSGPTGSKIMEKAAKDFKKVSLELGGKSPYIVLDDVDIKEAAKATTGKVVNNTGQVCTAGTRVLVPNKIKDAFLAELKEQFSQVRVGNPREDGTQVGPIISKKQFDQVQNYINKGIEEGAELFYGGPGKPEGLEKGYFARPTIFINVDNQMTIAQEEIFGPVMSVITYNDLDEAIQIANDTKYGLAGYVIGKDKETLHKVARSIEAGTVEINEAGRKPDLPFGGYKQSGLGREWGDYGIEEFLEVKSIAGYFK

SEQ ID NO: 7677 - protein, 188 aa, Blechnum spicant
DEHGEVVAEIRRADLEPYMGLHYPATDYPQAARFVFMKNRVRMICDCTLPPVKISQDKNLAQPLSLTGSTLRAPHGCHAQYMSNMGSIASLVMAVIVNDSDVDSAGHTSQGIKLWGLVVCHHTSPRYVPFPVRSACEFLMQVFSLQLNMEVGMAAQVREKHILRTQTLLCDMLLRDAPIGIVSQSPSI

SEQ ID NO: 7678 - protein, 404 aa, Vibrio parahaemolyticus RIMD 2210633
MQDALAVILAGGMGSRLSPLTDDRAKPAVPFGGKYRIIDFTLTNCLNSGLRKILVLTQYKSHSLQKHLRDGWSIFNPELGEYITAVPPQMRKGGAWYEGTADAIYHNLWLLSRNDAKYVVVLSGDHIYRMDYAAMLEEHKEKGAKLTVACMDVPVKDASAFGVMGIAENGLVKSFVEKPENPPTLPDDNAKSLASMGIYIFDMDVLKEALTEDAKLETSSHDFGNDIIPKLIDTESVYAYKFCGSKGRVDKDCYWRDVGTIDSFYEANMDLLEPVPPMNLYQSNWAIRTYEPQFPPARTVSSATGNEGIFINSIIATGVINSGGSVQHSIISSNVRIQDSATVVDSIIFDDVEVGEGSQLVNCIVDKHVRIPPNTQIGINKVEDAKRFKISEKGIVVIPESYQF

SEQ ID NO: 7679 - protein, 491 aa, Synechococcus sp. PCC 7942
MPRGVAPAFAGRKPKGWAWASTAVPDFQGGFKRLINRFQGSKLWLACVPLAATIAVFWGVAANAQGSADPVPSAQFLVNNLWLMVATVLVIFMNAGFAMVETGLCRQKNAVNVLAKNLIVFTLAATAYWFIGYSLMYGSPVVDGFLYFGKGGPLGFFFDPTVSAETIKNDGLISSLDFLFQAAFAGTAATIVSGSVAERIKFVDFIIFSLILTAVIYPIAGSWQWNVGSGWLNKAGFIDFAGSTVVHSVGGWAALIGAITLGPRMGKFQDGPPGALTGHNLAIATLGALILWIGWYGFNGGSVLAFNTAVPYVAVTTTLGGAAGGISATITSWSTSGKPDLSMVINGILAGLVGVTAGCDGFGMGGSFIVGLIAGVLVVFSVYTFENLKIDDPVGACSVHLVCGIWGTLAVGLFNLEKGLFYGGGFGQLGSQILGIISYGVWTVVASVIIWNILKALLGLRVSLKKSYKAWILANTGWKPTLALPRMHLTP

SEQ ID NO: 7680 - protein, 190 aa, Botrychium lunaria
DEHGEVVSEIRQPDLEPYLGVHYPATDIPQASRFLFMKNKVRMICDCRAPPVRVIQDKESRRPISLAGSTIRAPHDCHAQYMENMGSIASLVMAVVVNENDEQPSNQSYRRKNRKLWGLIVCHHTTSRAVPFSLRSACEFLMQVFGLQLNIEVELAGQMREKHILRTQTLLCDMLLRDAPLGIVTQIPNI

SEQ ID NO: 7681 - protein, 363 aa, Vibrio parahaemolyticus RIMD 2210633
MTDKSYKIAVLPGDGIGPEVMAQAHKVLDAIEQKHGISFEREEHDVGGIAIDNHGCPLPESTVTACEESDAVLFGSVGGPKWEHLPPNDQPERGALLPLRKHFQLFCNLRPAQIHAGLEAFSPLRADISGRGFDIVVVRELTGGIYFGQPKGREGEGANEKAFDTEVYHRYEIERIAKIAFESARLRRKKVCSIDKANVLQSSILWREVVEEIAKDYPDVELSHMYIDNATMQLIKDPAQFDVMLCSNIFGDIISDECAMITGSMGMLPSASLNESKFGLYEPAGGSAPDIAGKNIANPVAQILSAALMLRYSLGEEAAAQDIESAVSKALSAGELTADLASDKPALTTSEMGDKIAEYILNS

SEQ ID NO: 7682 - protein, 426 aa, Vigna aconitifolia
MFKPHLLAVVSRCNSFFGCVDICCNWGNSAPRTLKGLKSVTSEQVFEREQKYGAHNYHHCSAYRAKGVSLDMEGKRYFDFLSAYSAVNQGHCHPKIVNTMVEQAQRLTLTSRAFYTDVLGEYEEFLTKLFNYDKVLPMNTGVEGGETACKIARCWAYMKKKVPENQAKIIFAENNFWGRTLSAISASTDPMSYDELRPYMPGFEIVKYNDTAALEKAFQDPNVCAYMVEPIQGEAGVVALDAGYLTEVRELCTKYNVLFIADEVQTGLARTGRMLAVDHEDVKPDLLILGKALSGGLYPVSAVLRDDHIMDCIQPGLHTAMDVMDPRMRILAASRYYVRVARERCENAQIQATYLRKELNTLPKDVVPVVRGKGLLNAIVINKKFDAWDVCLNLCKPTHGDIIRFATTGHHRGTDPRMCQYYQKYH

SEQ ID NO: 7683 - protein, 561 aa, Enterobacter cloacae
MTTLKITGMTCDSCAAHVKEALEKVPGVQSALVSYPKGTAQLAIEAGTSSDALTTAVAGLGYEATLADAPPTDNRAGLLDKMRGWIGAADKPSGNERPLQVVVIGSGGAAMAAALKAVEQGAQVTLIERGTIGGTCVNVGCVPSKIMIRVAHIAHLRRESPFDGGMPPTPPTILRERLLAQQQARVEELRHAKYEGILDGNSAITVLHGEARFKDDQSLIVSLNEGGERVVMFDRCLVATGASPAVPPIPGLKESPYWTSTEALASDTIPERLAVIGSSVVALELAQAFARLGSKVTALARNTLFFREDPAIGEAVTAAFRAEGIEVLEHTQASQVAHMDGEFVLTTTHGELRADKLLVATGRTPNTRSLALEAAGVAVNAQGAIVIDKGMRTSSPNIYAAGDCTDQPQFVYVAAAAGTRAAINMTGGDAALDLTAMPAVVFTDPQVATVGYSEAEAHHDGIETDSRLLTLDNVPRALANFDTRGFIKLVIEEGSGRLIGVQAVAPEAGELIQTAVLAIRNRMTVQELADQLFPYLTMVEGLKLAAQTFSKDVKQLSCCAG

SEQ ID NO: 7684 - protein, 201 aa, Zea mays
MAVTITWVKARQIFDSRGNPTVEVDVGLSDGSYARGAVPSGASTGIYEALELRDGGSDYLGKGVLKAVSNVNNIIGPAIVGKDPTEQVEIDNFMVQQLDGTSNEWGWCKQKLGANAILAVSLAVCKAGAMVKKIPLYQHIANLAGNKTLVLPVPAFNVINGGSHAGNKLAMQEFMILPTGASSFKEAMKMGVEVYLGRDHA

SEQ ID NO: 7685 - protein, 156 aa, Haemophilus influenzae
NRTNTPVLVDGKDVMPEVNTVLAKMKDFCQRIISGEWKGYTGKAITDVVNIGIGGSDLGPYMVTEALRPYKNHLNMHFVSNVDGTHIAETLKKVNPETTLFLVASKTFTTQETMTNAQSARDWLLKAAKDESAVAKHFAALSTNAKDVEKFGIDTN

SEQ ID NO: 7686 - protein, 124 aa, Glycine max
  unsure (1)..(124): unsure at all Xaa locations
LACLQELTTFEIPLLKSKAIVEANVREKENFNELKEEMNRQILLAQSDIEDLKKQLEESKXXXXXXXXXEAIRKLIAMQXXRSETMKVISELEKEIAALDAENTAGSRLLELRKKQFALLLHVV

SEQ ID NO: 7687 - protein, 518 aa, Dianthus caryophyllus
MGSYKGVYDREILSKIATNDGHGENLEYFDGWKAYDRDPYHSTKNSNGVIQMGLAENQLCFDLVTEWLLKNPQASICTNEGVNKFMDIAIFQDYHGLPEFRSAVAKFMGKARDEKVIFNPDRIVMSGGATGASETLLFCLANPGDAFLIPSPYYPAFNRDLRWRTGVNLIPFTCSSSNNFKITKEALQSAYEDALKKNIKVKGIIVTNPSNPLGTVLDKDTLKMLLTFVNAKNIHLVCDEIYATTVFNSPSFISVAEVIKDMPHVNQDLVHILYSLSKDMGMPGFRVGIIYSYNDRVVSTARRMSSFGLVSSQTQFMIAALLSDDDFVRRFLVESRDRLFRRHQHFTSELAKIGIGCLQGNAALFVWMDLRHLLDEATVEGELKLWRVIINEVKINVSPGSSFLCSEPGWFRVCFANMDNATLDVALNRIRSFVTRGRVDNSTMTTTSARAAATTTTTTTTTTTTTTTTTTIKKKRGQMELRLSFNNRRFEDGLMSPHSSLLSPHSPMPQSPLVKART

SEQ ID NO: 7688 - protein, 322 aa, Microbulbifer degradans 2-40
MRAIVQTKYGSADELELREIETPSPAANQVLVRVQAVAINDYDWCMVSGKPLVYRLMFGLFKPKTPIPGMEIAGEVVECGVNVKNFKVGDTVFGDLSECGFGGFAEYVSADENALFLKPSQMKYEDAAAISHAACLALQGLVDVGNLACGEKVLINGAGGGVGAYGLNIAKFYDAHVTAVDAAHKLAMLKQNGFDEALDYQSIDFTRQPAQYDLILDTKTNRGVFRYLKVLAPNGRYVTVGGSVMRLIQLLLLKPWVALFTNKRVSIVALKTNKDLATICEWYLAKKLVPVVELRESLSAVPQAISYFGAGKHKGKLVVRLK

SEQ ID NO: 7689 - protein, 309 aa, Oryza sativa
MRRWLAEGVMELAAGAPESNSSFCSSPSGATPSSGGPMWWVSGCHGTVYSLAVMLPSLAFVGFLAWQARRSFRRLSYCRSHVVVVAYYALLWAVAVLNLLWCFLQAWQCMPDRAFSWNVLSLFTKSGMLFWEVSLIAFLLQGNETRGFESLARTFVISGAVVAADVLLKTIYVFGFGVSLFIDVDQGTGGKWGLWFLHKLVLTGVYGLIVFMYHSRWRDRLPAKPAYYNYVCAMLLLNGISLFGCFLVATGAGFGLWLYNLTSVCYHSLYLPLLYVTFLADFFQEEDMLLENVYYSEMKDAGFFDADWD

SEQ ID NO: 7690 - protein, 1568 aa, Ustilago maydis 521
MSAATPTSPGFPLTMGTGVMAAHFAAPSSNAGSPRSRPTTPLSAGLTPSGPTYDDLGRWDDADVASWLNAARLGHYASIFAEHDIRGSVILDVDQAALKEMGITMVKDRVRISAAIKLLNKRCADSAVARRPSVVSISPLLPLASHPLYAHEGEIEYLQHDHTADPSADGSGSNFGLNSMGMRRGQMRPPPLTLKQSTSRGMPGYASPAGSINQSQGFGLSAARGLTPGAARGSVWNTASSSSATSKPGTPDGALHRKVNSIGGVAAPLAVGASSSLSSSRHPYGHAVHSNRPSTATGASGYSTVPASQSLRSNHTSSSPTATSFGSNINAASARPSTATGAQSYTTNVPGTSSARDGYSPLTPISESNSLGNTPTTPSGIQQQQQSAGYAVGRGPFASSQRYAASSVPSQQQPSSGHTLRHVDSGEGYNLAGYQNPNPPTLEDLKRRTIKFISEEDNTTRIVNVSDCRDAYDVMARVLKKFGKPPSGNSYTPTADQGPTGDELGATETWGIFATSADGQNTKALSDNELLAICHAPQPHDPLRERGLTLRRIPNHLPGEDARKVPVRSGRNKLEAFFGERMPVAQMQPAGPGSGVNADEEDAGSVTISGKKMKRASTVSIMSGLGDGPFSSSSHNTGAGHTHGSTRAEGKLLSKKESKHMSPPPVTSKPSKIRNFFGQRPPSELINTNLADFFPSTDSKALQRTARRSIYGRASASTRSKRNSTWSFVADPDAPPLPNKGSMDGHPTPLERSSISIRERGTTPVIQIGYDSRSEDDHQSNARRTSSGTHSHLHPSLTGPPTLPPVVSRDSLDEWSRDLKAVGSPVTEENAMFQSSRHGHASGSQQHHAAMKHYPSHASGYADRPSISRRASGESARSRRSLASQVRHGLSAARERNADTASLLTVDEITQEVENRRESISLAGAGGGWVVDEDGVPIPIPGSSSPFSSSAAASTRPSSGISSSYVHNGHLEHDDSEGHSDEEANQSSDLEEATRTRKARGVPSKAASIRTVASKRASSVLQAPGDESDRHLGDPMAVARSTTSRASSVSELRRSVHDHGDPSDGESGSDFTDSDLDSDGSETDEDEQANDVYLPSAKPAPIKWHKGALIGAGSFGNVFLGMNAKTGLLMAVKQVELPSGDSHLDQRKKGMLEALEREIKLLKSLEHENIVQYLDSFADDSHLNIFLEYVPGGSIVALLRNYGAFEEPLVRNFVRQILNGLSFLHNRGIMHRDIKGANILVDNKGGIKISDFGISKKVESDLVLATNKSGAGGGGAGGAAHRPSLQGSVFWMAPEVVKQTSYTIKADIWSLGCLVVEMISGTHPWAELNQMQALFQIGMGRKPSLPDEISNECRDFLEKTFELDYNNRPSADELLNHAFMGTEMTFPPSSGADGSGGGDDDAGGSGDAGDGDASTMGMTNDAETGTTRETRETKDGKRPTRSKSTRRLEREKRHKEAAAAAAAATALDTGTPNTPTSHTAAAAAAAAAAAASASASASASPAVASTSPAPGDAETGSPTNGKSAVPPAGSTGGTPESILTVSIATARGNSTSTALSAADAAFSEEADS

SEQ ID NO: 7691 - protein, 192 aa, Ephedra major
DDHGEVISEIRRSDLEPYLGLHYPATDVPQASRFLFMKNRVRMICDCYSPPVRVIQDKRLKKELSFCGSTLRAPHGCHAQYMANMGSVASLVMAVIVNEKEDEEAENEGQSQQKGRKLWGLVVCHHTGPRFVPFPLRYACEFMMQVFSIQLNKEVELACQMREKQILRTQTLLCDMLLRDTPLGIISQKPSI

SEQ ID NO: 7692 - protein, 418 aa, ASPERGILLUS NIDULANS FGSC A4
MSATTARSDPFKPAARVAGQRQDVWSIVNEAAAASPVQPIVNMGQGFFGYNPPQFALDAAKAALDRVDCNQYSPTKGRPRLKKALADAYSPFFGRQLNPDTEVTITTGANEGMLSAFMGFIEQGDEVIIFEPFFDQYISNIEMPGGTIRYVPLQPPKDGATKTLPASEWSINFDELERTINPKTKMIVFSRDELERIGDLAVKHNLIILSDEVYDRLYYVPFTRIATMKPEYYERTLTVGSAGKAFYATGWRVGYLIGPEHLIKYVAGAHTRICYSSVSPLQEAAAVAFEEADKQGFWDQSREEMKRKMERFCEVFDELNIPYSDPEGGYFVLANMASVKLPEGYPFPPHVASRPRDFKLCWFLIHEVGVAAIPPTEFYTDANAHIAEDYLRFAVCKEDDVLETAKERLRGLKKYIVR

SEQ ID NO: 7693 - protein, 462 aa, Arabidopsis thaliana
MASNGVDEQIKLVEGPAGYVLEDVPHLSDYILDLPTYPNPLQSNAAYSVVRQYFVDEDDTVQEKIVVHKDSPRGTHFRRAGPRQKVYFKPSDVRACIVTCGGLCPGLNTVIREIVCGLHFMYGVTEVIGVDCGFRGFYSKNTVALTPKTVSDIHKRGGTILGTSRGGHDTSKIVDNIQDREINQVYIIGGDGTQKGANAIYKEIRRRGLKVAVAGIPKTIDNDIPVIDKSFGFDTAVEEAQRAINAAHVEATSVENGIGIVKLMGRYSGFIAMYATLASRDVDCCLIPESPFYLEGKGGLYEFIAKRLRENGHMVIVIAEGAGQDLVAESIEQQDASGNKLLKDVGLWMSLKIKEYFAKHNVMDITLKYIDPTYMIRAIPANASDNVYSTLLAQSAVHGAMAGYTGFVSGLVNGRHTYIPFNRITERQNKVVITDRMWARMLSSTNQPSFMNPPKGTTEFTD

SEQ ID NO: 7694 - protein, 610 aa, Pseudomonas aeruginosa PAO1
MCGITGWTDWSRDLGEQRSILERMTRTLAPRGPDAEGLWLSRHALLGHRRLAIIDLENGAQPMLAEAGGRVALTYSGEVYNFRELRAELETLGQVFRTRSDTEVVLRAYLQWGEASFVRLRGIYGFALWDEREQSLWLVRDRFGVKPLYYYPTAGGVLFASEPKAIFANPEANPVLDASGIAELFALTTAPTPGHGLYKGLRQVRPGQALRFDRNGVRELVYWALRAERHEEGAEDSAERAGQLLREAVAEQLVADVPLGSLLSGGLDSSAISAFAVAALDGDARRLPTFSVDFPGEGRGFVPTPWQSSWDEPYAQLAANFLGTPHRTVLVAPEEVLEQDEAVLQARDLPGWGELDASLYLLFRQVREHTTVALSGESADEVFGGYPFFHDPSALAHDGFPWLAGKSGPWQLLRREVAERVAAPEYIRARYREALAEVPRLDGEDAAQRRQREVAYLALSRWLPAMLERKDRMSMAVGLEVRVPFCDHRLVEYVWNLPWALKSVAGESKSLLRRALRGHLPQAILERRKSGFPANPDPRYLALLRERVGRLLDDGRSPLFELVDAGRVRQALEQGTPLPSPRASASPTAGLAYLLNLDRWLTRHGVDISL

SEQ ID NO: 7695 - protein, 433 aa, Eremothecium gossypii
MANRLLQDPFSVLKEYPETLTYTFEIPLQCDCLEFSPGGDYLAVGCSNGSLVIYDMDTKKPISVLGNHGGGHVRAVQSVAWSQCGRYLWSSSRDWRVKMWDLAAVGRQNQEYMFDGPVWMCRVLAGPQPRCIATVVEERWALLVDFSAGAADVREVRDPAEDAAEDRGNTLVTCLHPRAQDVVITGTSKGWVVIYRLLADGGFHALHSEFISNCNIKNIEVAPYGERMAINCSDRTIRQYALVLHDTSASLQLEHKYQDVINKLQWNSVAFSNHAGEYLVASAHGSSAHDLYVWETASGTLVRVLEGPEEELLDIDWNYYNMSIASNGLESGNVYVWSIVIPPKWSALAPDFEEVEENIEYREKEDEFDQLDELGHQLEQDEAEEVHIDLRTRDRFDVRGNDLAVQRFIIPTDYESILLINRMQEDHADRQST

SEQ ID NO: 7696 - protein, 344 aa, Cicer arietinum
GFREFKDDSDFDEDEEDDDDDEGLLVGGKGFTFSSNNTKSFKTFSRGSTAAKSVSPKSNEQAEKACKRKRKNQYRGIRQRPWGKWAAEIRDPRKGVRVWLGTFNTAEEAARAYDAEARRIRGKKAKVNFPEEAPVTSSKRFKPNLENKLVNKNLNSFNPNGNKMFNFGENVENYYSPMDQVEQKPLVNNNNQYANMGPFSGNGVQHSQISPSADVTAYFSSEHSSNSFDYSDLGWGEQGPKTPEISSMLSAAAPLESESQYVQNNMQSNNNQNMLPVEDNSAKTLSEELADIESQLKFFETPYDDNWGDASLASFLGGDATQDGGNPMNLWSFDDLPSISGGVF

SEQ ID NO: 7697 - protein, 252 aa, Zea mays
MISPDTIRTAIGVIGNGTALVLFLSPVPTFIRIWKKGSVEQYSPIPYVATLLNCMMWVLYGLPAVHPHSMLVITINGTGMAIQLTYVALFLLYSAGAARREVVLLLAAEVGFVGAVAALVLSLAHTHERRSMVVGILCVLFGTGMYAAPLSVMKMVIQTKSVEYMPLFLSLASLVNGICWTAYALIRFDLYITIPNGLGVLFAVAQLVLYAIYYKSTQEIIEARKRKADQIAMTGVVVDGGKTNNQAGAGQY

SEQ ID NO: 7698 - protein, 920 aa, Anabaena variabilis ATCC 29413
MSPIAKPNSQVSLNQESVVRRITARIRQSLELEDIITATTAEVRTLLGTDRVMMYKFHADGSGQVIAESIYENRLPSLLGLNFPADDIPPHARELLVKSKVRSIVNVTTGMIGQSPVHNLETGELISEDICYRPVDPCHLEYLTAMGVKSSVVAPIFHQDELWGLLVSHHSENRTVSEDELEAMQMIVDQLAVAIAQSHLLTQARKKAQKEAIINRIITLLHSLPTIVLQPTLEAAVAAFDGVGGRLCLRNQAVESQHVASRSLAECLIPGNNCVQLYTCGQQPITPEQTIYPLIEQYRVWQEHYTSHHDIWAIADIYQDPTLRSLQAVFQTTKIRSILIIPLEYRQQLLGYLTIFRNEIDTETLWAGHIDQDQRQMFPRVSFNLWRDAKKSQAQQWTSEEIELAKEIGQHFASAIQQYELYQQVQAFNENLEKQVQKRTLELRHTSEQQQAVFGVISKIRESLDTNTIFQITTKEACQLIKADRVSVYRFDDEWGGEFVGDFEATSLHWSNESSISINTVWNDTYLQNTQGGRYRYNETFAVDDIYKVGFTQCHVENLEQFQIYAFVLAPIFVGQKLWGLLATYQHSGPRQWKPSEVNFLTQIAAQLGVALQQAELLNQTQQQAQKLTQTLHHLQQTQTQLIQTEKMSSLGQLVAGVAHEINNPVNFIYGNLSHVSEYAQNLLTMLELYQQELPNPSAAILEQADEIDLEFLAEDLPKTLSSMQIGVERIRQIVMSLRTFSRLDEAEMKAVNIHEGIDSTLLILQHRLKAKPETAGIKLTKKYADIPLVECYAGQMNQVFMNVLSNAIDALEDYKEAQSKNHHGEIIIFTSFGQIRDNIQSVVIRIVDNGPGIPEDLRLRICDPFFTTKPVGKGTGLGLSISYKIVVEKHGGVFKCDSQLGSGTEFWIEIPIQQVNNNW

SEQ ID NO: 7699 - protein, 559 aa, Pseudomonas sp.
MTELKIIGMTCASCVVHVKEALEKIPGVHRADVSYASGKAELKVDEGASREQMQAAVEALGYRAAFEDAMVQARPGLLDKARGWLSSTDAGKEGDKLHVAVIGSGGAAMAAALKVVEGGARVTLIERGIIGGTCVNVGCVPSKIMIRAAHVAHLRRESPFDAGLSAMTPTVLRERLLAQQQDRVAELRHAKYESILESTPAISVLRGTARFQDGHTLSVKLAEGGEHIVAFDRCLVATGASAAVPPIPGLKDTPYWTSDQALASDTIPKRLAVIGASVVAVELAQAFARLGSEVTILARSAMFFHEDPAIGAAVTEAFRMEGIEVLEQTQASQVSHANGEFVLATNHGELRADQLLVATGRTPNTQGLNLEAADVQLDERGGIQIDERMRTSAADIYAAGDCTDQPQFVYVAAAAGTRAAINMTGGEAKLNLDVMPAVVFTDPQVATVGYSEAEAQHAGIETDSRTLTLDNVPRALANFDTRGFIKLVAEAGSGRLLGVQAVAPEAGELIQTAVLAIRNRMTVQELADQLFPYLTMVEGLKLAAQTFNKDVKQLSCCAG

SEQ ID NO: 7700 - protein, 405 aa, Arabidopsis thaliana
MDSVFSNVARAPEDPILGVTVAYNNDPSPVKINLGVGAYRTEEGKPLVLDVVRKAEQQLVNDPSRVKEYIPIVGISDFNKLSAKLILGADSPAITESRVTTVQCLSGTGSLRVGAEFLKTHYHQSVIYIPKPTWGNHPKVFNLAGLSVEYFRYYDPATRGLDFKGLLEDLGAAPSGAIVLLHACAHNPTGVDPTSEQWEQIRQLMRSKSLLPFFDSAYQGFASGSLDTDAQSVRTFVADGGECLIAQSYTKNMGLYGERVGALSIVCKSADVASKVESQVKLVVRPMYSSPPIHGASIVATILKSSDMYNNWTIELKEMADRIKSMRQQLFEAIQARGTPGDWSHIIKQIGMFTFTGLNKEQVEFMTKEFHIYMTSDGRISMAGLSSKTVPHLADAMHAAVTRLG

SEQ ID NO: 7701 - protein, 474 aa, Prochlorococcus marinus subsp. marinus str. CCMP1375
MVHYEKLSPPTTGEKIKFNNGLPIVPANPIIPYIRGDGTGVDIWPATQKVIDQAIEKAYGIDRKIEWFKIYAGDEACDLYGTYQYLPKDTIEAIREYGVAIKGPLTTPIGGGIRSLNVALRQKFDLYSCVRPCRYYQGTPSPHKHPENLDVIVYRENTEDIYIGIEWESNDPIGIKLIEHLNNDVIPASPSLKNRIIPQGSGIGIKPVSKDGSQRHIRRAIQHALKLNGNKRHVTLVHKGNIMKFTEGSFRDWGYELATNEFRNECITERESWILSNLEQNPRLSIENNAKLIDPGYESLTKEKKDIICNEVQLVINNIHKTHGNNKWKKMVLVDDRIADSIFQQIQTRPQEYSILATLNLNGDYISDAAAAIVGGLGMAPGANIGDRAAIFEATHGTAPKHAGLDRINPGSVILSGVMMLEYIGWQEAADLITKGLSQSIYDKQVTYDLARLMEPPQSPLSCSEFANAVIERF

SEQ ID NO: 7702 - protein, 430 aa, Methanococcus maripaludis S2
MLRNMDDSFDIYEIKARQVLDSRGNPTVEAEVLTAGGGYGHTIVPSGASTGTFEAVELRDKKEKYGGKSVLNAVSNVNDIIAQELIGEDARNQRLIDQIMLNLDGTENKGNLGANAILAVSLAVAKAAADTASLPLYKYIGGSNAYVMPAPMMNVLNGGQHAGNALDFQEFMIMPVGADSFAEAVRMCSETYQSLKKVVAEKYGKDAVNVGDEGGFAPPVKTIDEALAVLLEGVKKAGYEDEIVFTIDSAASEFYDEKSGSYMIAGEKVSTDKLIDIYKEMVEQYPIVSIEDPLFEEDFEGFKTATKELKGIQIVGDDLFVTNTKRLKKGIEMGAANSLLLKVNQIGTLSESIDAANMAFRNGYSLVVSHRSGESEDSTIADLAVALNAGQIKTGAPARGERTAKYNQLMRIEEELQISKYAGKDFKIPF

SEQ ID NO: 7703 - protein, 554 aa, Pseudomonas fluorescens PfO-1
MAYYRTPHDVTALPAWQALKDHRQAMQDFSMREAFNADPQRFNQFTLSSCGLFLDYSKNLINAETRNLLVGLANEVDLKGAIKALFDGEIVNSSEGRPALHTALRRPVGDKLSVNGVNVMPEVHKVLNQITDLVGRIHDGLWRGYTEKPITDVVNIGIGGSFLGPELVSEALLSYAQKGVRCHYLANIDGSEFHELTQKLRAETTLFIVSSKSFNTLETLKNAQAARAWYLAQGGSEAELYRHFIAVSSNNAAAVAFGIREENIFPMWDWVGGRYSLWSAIGLPIALAIGMSNFKELLSGAYTMDQHFQSAPFEQNMPVLLALLGVWYGNFWGAQSHAILPYDHYLRNITKHLQQLDMESNGKSVRQDGTPVSTDTGPVIWGGVGCNGQHAYHQLLHQGTQLIPADFIVPIVSFNPVSDHHQWLYANCLSQSQALMLGKTLPEAEAELRDKGMSEDQVQKLAPHKVIPGNRPSNTLVVERISPRRLGALVAMYEHKVFVQSVVWGINAFDQWGVELGKELGKGVYNRLVGSEETAAEDASTQGLINYFRGRHRG

SEQ ID NO: 7704 - protein, 512 aa, Shigella flexneri 2a str. 301
MKIRSQVGMVLNLDKCIGCHTCSVTCKNVWTSREGVEYAWFNNVETKPGQGFPTDWENQEKYKGGWIRKINGKLQPRMGNRAMLLGKIFANPHLPGIDDYYEPFDFDYQNLHTAPEGSKSQPIARPRSLITGERMAKIEKGPNWEDDLGGEFDKLAKDKNFDNIQKAMYSQFENTFMMYLPRLCEHCLNPACVATCPSGAIYKREEDGIVLIDQDKCRGWRMCITGCPYKKIYFNWKSGKSEKCIFCYPRIEAGQPTVCSETCVGRIRYLGVLLYDADAIERAASTENEKDLYQRQLDVFLDPNDPKVIEQAIKDGIPLSVIEAAQQSPVYKMAMEWKLALPLHPEYRTLPMVWYVPPLSPIQSAADAGELGSNGILPDVESLRIPVQYLANLLTAGDTKPILRALKRMLAMRHYKRAETVDGKVDTRALEEVGLTEAQAQEMYRYLAIANYEDRFVVPSSHRELAREAFPEKNGCGFTFGDGCHGSDTKFNLFNSRRIDAIDVTSKTEPHP

SEQ ID NO: 7705 - protein, 155 aa, Arabidopsis thaliana
MGLQGQLSDVSSDSIPLMLLSLLAVFINHLRSFLLRLTSKSNPNLPVDDVSIASGLANIIVLADQLSLNRLFSYRCGDGGGGGSDCVVCLSKLKEGEEVRKLECRHVFHKKCLEGWLHQFNFTCPLCRSALVSDDCVSKTQRSVGRDLISCFSLH

SEQ ID NO: 7706 - protein, 403 aa, Arabidopsis thaliana
MNSILSSVLPAPEDPVLSVIFACRDDPSPVKLNLSAGTYRTEEGKPLVLDVVRRAEQQLANDLDKEYLPLNGLPEFNKLSTKLILGDDSPALKENRVVTTQCLSGTGSLRVGAEFLATHNKESVIFVPNPTWGNHPRIFTLAGLSVQYFRYYDPKSRGLDFKGMLEDLGAAPPGAIVVLQACAHNPTGVDPTFEQWEKFRRLVRSKSLLPFFDSAYQGFASGSLDADAQAVRMFVADGGECLIAQSYAKNMGLYGERIGSLTIVCTSEDVAKKVENQVLLVVRPMYLTPPIHGASIVATILKNSDMYNDWTIELKGMADRIISMRQQLYAALEARGTPGDWSHIIKHIGMFTFTGLSEEQVRLMAKEYHIYMTYDGRISMASLSSKTVPQLADAIHAVVTRIA

SEQ ID NO: 7707 - protein, 173 aa, Nostoc punctiforme PCC 73102
MLTTANFLQYTQWSGIATLVFAALTVLAFILKWGIRFRLVGTTGFMLVLTGGLFALSIVPLSRAVIPGATKYTLVYDNGSTQAVITTSPQITPTQLEATLRQAASNLFSYGRSGTREDDKLTVRARTIIHPEPGVSVPVYLGEAKRSLVSHQNSPVTVEIYTDKFAQLPKPNA

SEQ ID NO: 7708 - protein, 222 aa, Streptococcus pneumoniae TIGR4
MKKFVAELIGTFMFVFVGTGAVVFGNGLDGLGHLGIAFAFGLAIVVAAYSIGTVSGAHLNPAVSIAMFVNKRLSSSELVNYILGQVVGAFIASGAVFFLLANSGMSTASLGENALANGVTVFGGFLFEVIATFLFVLVIMTVTSESKGNGAIAGLVIGLSLMAMILVGLKITGLSVNPARSLAPAVLVGGAALQQVWIFILAPIAGGVLAALVAKNFLGTEE

SEQ ID NO: 7709 - protein, 403 aa, Nostoc punctiforme
MSLNWIVPAERIQKLPPYVFARLDELKAKAREQGLDLIDLGMGNPDGATPAPVVEAAIAALKDPANHGYPPFEGTASFRRAITNWYHRRYGVVLDPDSEALPLLGSKEGLTHLAIAYVNPGDLVLVPSPAYPAHFRGPAIAGGKIHSLILKPENDWLIDLAAIPDEVARQAKILYFNYPSNPTAATAPREFFEEIVAFARKYEILLVHDLCYAELAFDGYQPTSLLEIPGAKDIGVEFHTLSKTYNMAGWRVGFVVGNRHVIQGLRTLKTNLDYGIFSALQKAAETALQLPDVYLHEVQQRYRTRRDFLIDGLGELGWDIPRTKATMYLWVKCPVGMGSTDFALNVLQQTGVVLTPGNAFGVAGEGYVRISLIADCDRLGEALHRFKQAGIRYQPEAVVSASG

SEQ ID NO: 7710 - protein, 258 aa, Mesorhizobium loti MAFF303099
MSVERTTAAGGMETSYGFKRVGEGEKQSLVNDVFHKVANRYDLMNDLMSAGLHRLWKDAMVTWLNPPKRPGWKVLDVAGGTGDIAFRIVDASHGNAHATVLDINGSMLGVGRDRAQKKGLSGNTDFVEANAEELPFADATFDAYTIAFGIRNVPRIDVALSEAFRVLKPGGRFLCLEFSEVEMPLLDKAYEAWSFNAIPKIGKMVTGDGEPYSYLVESIAKFPNQQNFAAMISRAGFDRVSFRNYSGGIAALHSGWKL

SEQ ID NO: 7711 - protein, 390 aa, Zea mays
MARIQPRTDQRPAVDVDHVGHGNFTGHLKSTLSSGDMDLPGGARAPKARKPYTISKQREKWTEDEHRLFLEALRQHGRAWRRIQEHVGSKTAVQIRSHAQKFFSKVIRESSGGDSNGNGNGVAAPPQIQIPPPRPKRRPTHPYPRKLGNSVGKDASAAIKQLRKPQLQAQSLSEQENCSPKSVLTTAQMCSEALPAEGSGSPASSVHMEDKCLTPNTSVGESSVQVALSTDSNDAACEIPEAEGPVLRLFGKRVVVSNLDQQPSSNTGSLQHAADMELDDASAETPTSGTGKLSSHAAEEAETWCPWLVALDAQTVTSNKQRSRPWTESIETSSSVPGTAQNSDPAESTKVNRGEDKVAVPVPGSRKCAGAIPACRRGFVPYKKCTARSK

SEQ ID NO: 7712 - protein, 439 aa, Pyrobaculum aerophilum str. IM2
MAVDIEKIKQGIPNIVPYAGKYVDPPEGDYVEYTGPGQFKVPDKVVIGYIEGDGIGPEVAYAAIRVANAAVEKAYGKSRKVIWYEVVVGEKAEKIFGNRLPDQSINVLKKIRVFLKAPLETPVGGGFRSINVTLRQLFDLYANIRPVKYFPGLPSPLKRPEVVDLVIFRENTEDVYAGIEWPYNSPEASKIRDFLRREFGINIRDDAGIGIKPISKFGTQRIARLALKFAIENKRRVVTVMHKGNIQKYTEGAFKDWAFEVARNEFREHVVFEDELAQYGGQVPPGKVLVNDRIADNMLQQLLTRTGEYDVILAPNLNGDYVSDEAAGLVGGLGVAPGIDVGDWGMMAEPVHGTAPKYRGKNYVNPTATILALELLFRFLGWREAANYIIKGVETAYREGYFTGDLARQMDEEERKHRVKEVLGTQEFADKVVEIIKRL

SEQ ID NO: 7713 - protein, 296 aa, Xylella fastidiosa Ann-1
MIKRIRKAVFPVAGLGTRFLPATKTIPKEMLPIIDKPLIQYAVDEAIQAGCDTLVFVTNRYKHAVADYFDKAYELEQKLERAGKYEQLELVRHVLPDGVRTVFVTQTEALGLGHAVLCAKPVVGDEPFAVLLPDDLMWSRNGGALKQMADVAEVSGSSVIAVEDVPVDKTVNYGIVGTDVFDGCKGRITQIVEKPKPDDAPSNLAVVGRYVLSGKIFEMLENTSIGTGGEIQLTDAIAELLKYERVDAYRFQGRRFDCGAHIGLIEATLHLALEHKKHGQAVREILRDTLLTVDKR

SEQ ID NO: 7714 - protein, 506 aa, Triticum aestivum
MAAPPAIPRRGLFIGGGWREPTLGRRIPVINPATEDTIGDIPAATAEDVELAVAAARSAFLLDGGSRWARASGATRAKYLNAIATKIKEKISYLALLETVDSGKPKDEAVADMDDVAACFEFYAGLAEALDGKQHAPISLPMEEFKTYVLKEPIGVVGLITPWNYPLLMATWKVAPALAAGCTAVLKPSELASLTCLELGAICEEVGLPSGVLNIITGLGPDAGAPIASHPHVDKIAFTGSTATGKTIMTAAAQMVKPVSLELGGKSPLVIFDDVADIDKAVEWAMFGCFFNSGQVCSATSRLLLHEKIAERFLDRLVEWAKNIKISDPLEEGCRLGSVISKGQYEKIKKFISTARSEGATILHGGDRPKHLGKGFFIEPTIITDVSTSMQIWREEVFGPVICVKVFKTESEAVELANDTHYGLAGGVISDDLERCERIAKVIHSGIVWINCSQPTLVQAPWGGNKRSGFGRELGEWGLENYLSVKQVTRYCKDELYGWYQRPSKL

SEQ ID NO: 7715 - protein, 1016 aa, Escherichia coli K12
  unsure (1)..(1016): unsure at all Xaa locations
MQVSRRQFFKICAGGMAGTTAAALGFAPSVALAETRQYKLLRTRETRNTCTYCSVGCGLLMYSLGDGAKNAKASIFHIEGDPDHPVNRGALCPKGAGLVDFIHSESRLKFPEYRAPGSDKWQQISWEEAFDRIAKLMKEDRDANYIAQNAEGVTVNRWLSTGMLCASASSNETGYLTQKFSRALGMLAVDNQARVXHGPTVASLAPTFGRGAMTNHWVDIKNANLVVVMGGNAAEAHPVGFRWAMEAKIHNGAKLIVIDPRFTRTAAVADYYAPIRSGTDIAFLSGVLLYLLNNEKFNREYTEAYTNASLIVREDYGFEDGLFTGYDAEKRKYDKSSWTYELDENGFAKRDTTLQHPRCVWNLLKQHVSRYTPDVVENICGTPKDAFLKVCEYIAETSAHDKTASFLYALGWTQHSVGAQNIRTMAMIQLLLGNMGMAGGGVNALRGHSNIQGLTDLGLLSQSLPGYMTLPSEKQTDLQTYLTANTPKPLLEGQVNYWGNYPKFFVSMMKAFFGDKATAENSWGFDWLPKWDKGYDVLQYFEMMKEGKVNGYICQGFNPVASFPNKNKVIGCLSKLKFLVTIDPLNTETSNFWQNHGELNEVDSSKIQTEVFRLPSTCFAEENGSIVNSGRWLQWHWKGADAPGIALTDGEILSGIFLRLRKMYAEQGGANPDQVLNMTWNYAIPHEPSSEEVAMESNGKALADITDPATGAVIVKKGQQLSSFAQLRDDGTTSCGCWIFAGSWTPEGNQMARRDNADPSGLGNTLGWAWAWPLNRRILYNRASADPQGNPWDPKRQLLKWDGTKWTGWDIPDYSAAPPGSGVGPFIMQQEGMGRLFALDKMAEGPFPEHYEPFETPLGTNPLHPNVISNPAARIFKDDAEALGKADKFPYVGTTYRLTEHFHYWTKHALLNAILQPEQFVEIGESLANKLGIAQGDTVKVSSNRGYIKAKAVVTKRIRTLKANGKDIDTIGIPIHWGYEGVAKKGFIANTLTPFVGDANTQTPEFKSFLVNVEKV

SEQ ID NO: 7716 - protein, 202 aa, Desulfovibrio desulfuricans G20
GTLGEVVSLAGISQFRIAETEKYAHVTYFFNCGREEPFTGEDRLLVPSPRDVATYDLKPEMSVYEVTDSLLAALDKGYGLIVCNLANLDMVGHTGVFSAAVKACEAVDACTGRIIDAFVERGGVVMVTADHGNAEQLLDAQGNPHTAHSMNPVPVALLGAPAAWRLVPEGKLGDVAPTIIDILGLHRPEAMTGQSLLVKESV

SEQ ID NO: 7717 - protein, 348 aa, Triticum aestivum
  unsure (1)..(348): unsure at all Xaa locations
LSSILTASNLQPPPRPCGAAVALLLAAVLCLGGGGAASASPDFDYPAAFNFGDSNXSDTGGRIAAGFEPMPPPYGSTFFGAPSGRFSDGRLILDFLMDASVLPFLNAYVGSLREPSSRGGVNFCSSXAVRLYMHDQRQSALSGQFYSRTEDQVIASIPTILLEFETGPKTLFDQGARKFWIHNTGPLGCLPQNIALFGKDPTQLDELHCVAKHNRAAKIFNLQLHALCTKLRGQFAGANITYIDIYSIKYALIGNYSRYGFESPTEACCGYGGPPLNYDGRVPGGQTKSVNGNLVTAKGCSDSTEYVNWDGIHYTEAANFHVTSQILTGKVSDPPVGHWLPFLSWPRL

SEQ ID NO: 7718 - protein, 293 aa, Oryza sativa (japonica cultivar-group)
MQQQGAAALTPATGLGSRPSLTVKTSRVCTTAALPPLCRCGRRHLIGSTSATALLPLLALPSPAASPVDPEVMLERVHPARPEWYEKFYATAMDKFMKPYEAEIAQYKSKLFSQLMTAGKNILELGVGTGPNLKYYANADGVNIVGVDPNKHMEEYARAAAVSAGLPPSNFTFRRGVGEALPAEDNSMDAVVGTLVMCSVSDVEMALREIKRVLKPGGLYIFIEHVAAPDGSFLRFVQGALNPLQQFVSDGCHLTRETGEIIRDAGFSSLDLNTTRLSTAFILSPHVYGVACK

SEQ ID NO: 7719 - protein, 285 aa, Eremothecium gossypii
MKRAREDVGNIPIEYLSRHSDAFEKAVQYILSVDSSLLEVIVAKEFPQYLIATERQLTLQSHFKHLASGIITQQISGAAARSIKSRVEQLFGGTFPNYVELQSKFAAGDSASLRKCGLSARKVSYVESLTAYFNQNEMRLKHLFNSGSDAEIVDDLVRNVKGIGPWSAKMFLVTSLHRQDVFAADDLGIARGCSRYLTARPEVLKKLMVSRTTVKRSKIKHKNSNWRIYDEDIVESCGQLFKPHRTLFMFILWRLSSTNIDALLNTNPQLSVKPLIESNQTHSIH

SEQ ID NO: 7720 - protein, 155 aa, Nicotiana tabacum
MSSSKMIVLKSSDGETFEVEEAVALESQTIKHMIEDDCADTSIPLPNVTSKILAKVIEYCKRHVDATKTEDKASEDELKGFDSDFVKVDQATLFDLILAANYLNIKSLLDLTCQTVADMIKGKTPEEIRKTFNIKNDFTPEEEEEVRRENAWAFE

SEQ ID NO: 7721 - protein, 280 aa, Streptococcus mutans UA159
MEAYTLINGVHIPKIGFGTWKLADGDEAYKSVSYALEVGYRHVDTAQYYGNEVSVGRAIADSPIKREELFITTKIWNDKHSYDEAKQSVEESLAKLKLNYLDLLLIHWPNPKALRENDAWKTRNADVWRAMEDLYQAGKVRAIGVSNFMIHHLEPLLEVATVKPMVNQVLLAPGCSQEELVAFCRQNEMILEAYSPLGTGSIFDNQTAQDLANKYNKTVAQIALRWSLQKGFLPLPKSATPKNILSNLAIFDFDLTEDDILKLDKIENVKSQGNPDETAF

SEQ ID NO: 7722 - protein, 142 aa, Zea mays
MALRKAFDKPVSLVTAVAVRHLAGTEAARRLGTKLHSFYVGLKGSPDLKAAREVAEYLGTLHHEFHFTDDIDAIEDVIYHTEAYDVTTIRASTPMFLMSHKIKSLGVKMVISGEGSDELFGGYLYFHKAPNKEELHRETCRK

SEQ ID NO: 7723 - protein, 450 aa, Streptococcus mutans UA159
MTKQYDYIVIGGGSGGIASANRAAMHGAKVILFEGKQVGGTCVNVGCVPKKVMWYGAQVAETINNYAADYGFDVTTQAFHFDVLKQNRQAYIDRIHDSYERGFDSNGVERVYGYATFVDAHTVEVAGEHYTAPHILIATGGHALLPDIPGSEYGITSDGFFELDAIPKRTAVVGAGYIAVEISGILHALGSETHLFVRRDRPLRKFDKEIVGTLVDEMKKDGPHLHTFSVPKEVIKNTDNSLTLILENGEEYTVDTLIWAIGRAANTKGFNLEVTGVTLDSRGFIATDAFENTNVEGLYALGDVNGKLELTPVAVKAGRQLSERLFNHKPQAKMDYKDVATVIFSHPVIGSIGLSEEAALDQYGEENVTVYRSTFTSMYTAVTSHRQACKMKLVTVGEDEKIVGLHGIGYGVDEMIQGFAVAIKMGATKADFDNTVAIHPTGSEEFVTMR

SEQ ID NO: 7724 - protein, 629 aa, Salmonella typhimurium LT2
MAIEIKVPDIGTDEVEITEILVKVGDKVEAEQSLITVEGDKASMEVPSPQAGVVKEIKVSVGDKTETGALIMIFDSAEGAADAAPAKAEEKKEAAPAAAPAAAAAKDVHVPDIGSDEVEVTEVMVKVGDTVEAEQSLITVEGDKASMEVPAPFAGTVKEIKVNTGDKVSTGSLIMVFEVAGEAGAAAPAKAEAAPAAAAPAAATGVKDVNVPDIGGDEVEVTEVMVKVGDKVTAEQSLITVEGDKASMEVPAPFAGTVKEIKISTGDKVKTGSLIMVFEVEGAAPAAAPAKQEAAAPAPAAKAEKPAAPAAKAEGKSEFAENDAYVHATPLIRRLAREFGVNLAKVKGTGRKGRILREDVQAYVKDAIKRAERAPAAAGGGIPGMLPWPKVDFSKFGEVEEVELGRIQKISGANLSRNWVMIPHVTHFDKTDITDLEAFRKQQNAEAEKRKLDVKYTPVVFIMKAVAAALEQMPRFNSSLSEDGQRLTLKKYINIGVAVDTPNGLVVPVFKDVNKKSVTELSRELTTISKKARDGKLTAGEMQGGCFTISSIGGLGTTHFAPIVNAPEVAILGVSKSAMEPVWNGKEFVPRLMMPISLSFDHRVIDGADGARFITIINNMLSDIRRLVM

SEQ ID NO: 7725 - protein, 474 aa, Salmonella typhimurium LT2
MSTEIKTQVVVLGAGPAGYSAAFRCADLGLETVIVERYNTLGGVCLNVGCIPSKALLHVAKVIEEAKALAEHGIVFGEPKTDIDKIRTWKEKVITQLTGGLAGMAKGRKVKVVNGLGKFTGANTLEVEGENGKTVINFDNAIIAAGSRPIQLPFIPHEDPRVWDSTDALELKEVPKRMLVMGGGIIGLEMGTVYHALGSEIDVVEMFDQVIPAADKDIVKVFTKRISKKFNLMLETKVTAVEAKEDGIYVSMEGKKAPAEAQRYDAVLVAIGRVPNGKNLDAGKAGVEVDDRGFIRVDKQLRTNVPHIFAIGDIVGQPMLAHKGVHEGHVAAEVIAGKKHYFDPKVIPSIAYTEPEVAWVGLTEKEAKEKGISYETATFPWAASGRAIASDCADGMTKLIFDKESHRVIGGAIVGTNGGELLGEIGLAIEMGCDAEDIALTIHAHPTLHESVGLAAEVFEGSITDLPNPKAKKK

SEQ ID NO: 7726 - protein, 160 aa, Glycine max
MAEEHRCQAPRFCANNCGFFGSPATQNMCSKCYRDFQLKEQQSSNAKMVLNQSLVPSPPPAVISQPSSSSSAAVDPSSAVVDDAPREAEEVKAPQQNRCMTCRRRRRVGLTGFKCRCGMMLCGTHRYPEQHACEFDFKGMGREQIAKANPVVKGEKLDKI

SEQ ID NO: 7727 - protein, 372 aa, Streptococcus mutans UA159
MNTIKTRAAVAWAPNEPLKIEELDLMMPQKGEVMVHITATGVCHTDAYTLSGKDAEGVFPCVLGHEGAGIVEAVGEGVTEFQVGDHVIPLYTAECGKCEFCLSGKTNLCSAVRETQGRGVMPDGTVRFFKDGQPIYHYMGTSTFAEHTVVSEYSLVKIQDNAPLEEVCLLGCGVTTGMGAVLNTAKVEEGATVAIFGLGGIGLAAIIGARMAKASRIIAIDINPDKFDKARKLGATDLVNPNNHAKPIQEVIIDITNGGVDYSFECIGNVEVMRAALECCHKGWGESTIIGVAPAGAEIHTRPFQLVTGRVWRGSAFGGVKGKTQLPGIVGQYMAGEFALSDFITHTMPLEQINDAFDLMHEGKSIRTVIHY

SEQ ID NO: 7728 - protein, 332 aa, Candida albicans SC5314
MFSKVATRSFSSSASNAYKVAVLGAGGGIGQPLSLLLKLNHKVTDLALYDIRGAPGVAADVSHVPTNSTVKGYNPDQIEEALTGSDVIVIPAGVPRKPGMTRDDLFNTNASIVRDLAKAAADYAPNAAVCIISNPVNSTVPIVAEVFKSKGNYNPNKLFGVTTLDVLRAARFVSEVAGTNPVNENVPVVGGHSGVTIVPLLSQTKHKDLSGETRDALVHRIQFGGDEVVQAKDGAGSATLSMAQAGARFAGAVLDGLAGEKDVIECTFVDSPLFKDEGVDFFSTKVTLGVDGVKTVHPIGEISDYEEAQVKEAKDTLIKNIKKGVDFVAQNP

SEQ ID NO: 7729 - protein, 521 aa, Chlamydomonas reinhardtii
MRKEATRLVSALLRAGNNGVSTSWAVGGTRLKSAMPQPDEKKDEDLHAKEGKVLHPHLLNENVVKTQYAVRGELYLRAEQLRKEGKEIIFTNVGNPHALGAKPLTFTRQVLALCAAPFLLDHPKVEDMFPADAIARAKKILASFKGGVGAYTDSRGNPLVREEVARFIEKRDGVPSNPDHIFLTDGASVAVRLCLNAMIRHDRDSVLVPIPQYPLYSASIRLYGGTLVGYFLDERRGWGLSVEELQRALQESREEGKLVRGLVFINPGNPTGQCLSKENLQELIKLAYQEKIVLMADEVYQENVYQDERPFVSAKKVMWEMGEPYRSHVELLSFHTVSKGTAGECGLRGGYVEMTNIHPGAIEEVYKCASINLSPNTMGQIALSVLVNPPKPGDPSYDQYTKEKASELVSLRRRRHMVTDGFNALDGVTCNFTEGAMYSFPQIKLPAKALEAAKAAGKAGDVFYCLKLLEATGISTVPGSGFGQEEGTFHLRTTILPREEVMTTFVEKFDKFHKDFMKQYS

SEQ ID NO: 7730 - protein, 187 aa, Hordeum vulgare subsp. vulgare
KYPYIAGMGIYVISKHVMLQLLREQFPGANDFGSEVIPGATSTGMRVQAYLYDGYWEDIGTIEAFYNANLGITKKPIPDFSFYDRSAPIYTQPRHLPPSKVLDADVTDSVIGEGCVIKNCKIHHSVVGLRSCISEGAIIEDALLMGADYYETEADKKLLAEKGGIPIGIGKNSHIKRAIIDKNARIG

SEQ ID NO: 7731 - protein, 834 aa, Pseudomonas aeruginosa UCBPP-PA14
MNLTRREFAKANAAAIAAAAAGLPILVRASNLVTEADVTSLVWNKAPCRFCGTGCSVMVATRDGQVVATHGDIKAEVNRGINCVKGYFLSKIMYGSDRLTRPLLRMKDGKFDKQGEFQPISWEQAFDIMAEKFKAALKAKGPESVGMFGSGQWTVWEGYAANKLFKAGLRSNNIDPNARHCMASAVMGFMRSFGMDEPMGCYDDIEATDSFVLWGSNMAEMHPVLWSRVTDRRLSAPQVKVAVLSTFEHRSFELADLPMVFKPQTDLIILNYIANHIIESGAVNRDFVERHVRFAHGAEDIGYGLRPDDPLEKKAKNADKANTWSDIDFKAFAEFVKPYTLERTARESGVPAERLKALAELYADPKRKVVSFWTMGFNQHTRGVWANNLIYNIHLLTGKISEPGNSPFSLTGQPSACGTAREVGTFSHRLPADLVVTNPKHRETAEKIWKVPAGTIQEKVGFHAVQQSRMLNDGVLNVYWTQVSNNMQAGPNVMQEVLPGWRNPDNFVIVSDVYPTVSAQAADLILPSAMWVEKEGAFGNAERRTQFWHQLVKAPGEAKSDLWQLVEFSKRFTTDEVWPAELLAKAPELKGKTLYDVLFRNGQVDRFPASDLAKGYANDEVDAFGFYIQKGLFEEYAAFGRGHGHDLAPFDAYHEARGLRWPVVDGKETRWRYREGYDPYVSKGSGVQFYGYPDKKAIVFALPYEPPAEAPDQDYPFWLATGRVLEHWHTGSMTARVPELYKAVPDALVYMHPEDARQLKLRRGSEVKVVSRRGEIRARVETRGRNKPPQGLVFVPFFDANKLINKVTLDATDPISKQTDYKKCAVRIELLNLA

SEQ ID NO: 7732 - protein, 181 aa, Hordeum vulgare
KYPYIAGMGVYIFKKEILLNLLRWRFPTANDFGSEIIPAAAREINVKAYLFNDYWEDIGTIKSFFEANLALAEQPSKFSFYDASKPMYTSRRNLPPSMISGSKITDSIISHGCFLDKCRVEHSVVGIRSRIGSNVHLKDTVMLGADFYETDAERGDQLAEGKVPIGIGENTSIQNCIIDMN

SEQ ID NO: 7733 - protein, 677 aa, Magnetococcus sp. MC-1
MPTQIHHTTCPLDCPSACALEVTLQQGQLKGIKGDAQHPFTQGVICGKVARYGAVQNGPRITQPMKRVGPKGLGHFEPISWDEAMQTVVAQLQSRISRYGAETVWPYWYGGSMGLLQRKALERLTHRAGFSRMKGTICSFVGVSGWQAGVGTFYGPSAEDMAASSDLVILWGINAVSTHINLMNFVKKARARGARLVVVDPYRNRTAKLADEHLNPRPGTDGALAAAMMHVLLAEGLANRDYLARMSDFDGEVEAHLSHKTPEWAAHITGLSAETIRAFARQYGQAAAPYIRMGLGMSRQNNGAVNIHAVSCLPAMVGAWEKPGGGAMMMSHGAFGVNIQAITAPHLVDGTPSRELDMSRLGAVLGDAQLAPPVTAMLIMSVNPAVTAPDLGAVYRGLTRDDLFTVVHEQVMSDTAKFADILLPATTFLEHEDLYSSYGQYTLQHAEALLPPPGACRCNHDWVNDLAQRLGFTEEVFQRNLSETVAQVLADSKLPPREQWSQRWHNVTPHEADRYHRNGFGHADGKFHFRPAWGNTAMPALPDHWAVNRRDLPSDRAYPLDFMTPPAHAVLNSTFTLSADHEQKLGEPTLMINPVDAAERGIVEGDWVVAYNALAFLRFKAHVSEDVRPGLTLCESNFAAHAFKEGISLNALSHANAVLPHGGVAFHDNRVQVEKVD

SEQ ID NO: 7734 - protein, 189 aa, Cupressus sempervirens
DEHGEVLAEIRRSDLEPYLGLHYPATDIPQASRFLFMQNKVRMISDCRADPVRIIQAEELPQRLCLVGSTLRAPHGCHAQYMANMGSIASLAMAVIVNNGNDEAGSSGRNTFKLWGLVVCHHTSPRAVPFPPLRSACEFLMQTFSLQINMEMQLATQLTENNILRTQTLLCDMLLRDAPIGIVTQSPSI

SEQ ID NO: 7735 - protein, 632 aa, Neurospora crassa
MRPSFPSSFLLSLLSLLCFSPYTAIANASSSPADSISNSRSDYHEQLILRPLPLSTLLASFNFRSNTSLSAFEAHNFRFFPRSLGQILEHAGTRELHLRFSLGRWDAESWGARPWNGAREGGTGVEMWAWLEADTDEEADRKWLTLTNALSGLFCASLNFIDSTRTTRPVMSFQPEGNHIDANATNMHLLYGVLPHEVVCTENLTPFLKLLPCKGKAGIASLLDGHKLFDSSWQTMAIDIRPVCPEDGECVLQIEQSIDMVLDIDRSKRPRDNPIPRPPPAHEMKCNTSKPYHAHDTCFPTDSAANQDWSLSQIFGKPIKGTCPLTDPNVSPVCIQVPDSRIVFASEGAVEKKNPDQTSRCFDFPAENDFEIFLPAPEAEDGSVVIEHVVKPETPLLYAERSFTGHGQERGGVQTILRNPSPDQEVEFIYMESLPWFMRIYLHTISARVDGQPGKADSLIQEVYYRPAVDRARGTQLEVRMTVPPASTVFLTYDFEKSILRYTEYPPDANRGFDVAAAVITILNRDNKSGGNGRNSRFAAYNLRTTTLLCNLPTPDFSMPYNVIIFTSTAIALAFGGMFNILVRRFVAANEGPESGLKKGVNKLKAKVAGFLKKGKKESAPAVAAEEEKKME

SEQ ID NO: 7736 - protein, 89 aa, Zea mays
SYGSTLRSKSVERIKPIEKHSLLGASGEISDFQEILRYLDELILYDNMWDDGNSLGPKEVHNYLTRVMYNRRNKFNPLWNALVLGGVKN

SEQ ID NO: 7737 - protein, 192 aa, Cupressus sempervirens
DDHGEVISEIRRPDLEPYLGLHYPATDVPQASRFLFMKNKVRMICDCYANPVEVVEDKRLPRELILCGSSLRAPHGCHAEYMSNMGSIASLVIAVTINAKEEDVDTDAQQQQQKGRRLWGLVVCHHTSPRFVPFPLRYACEFLMQVFAIQLNKEVDLADQLREKHILRTQTLLCDMLLRDAPMGIIREKPNI

SEQ ID NO: 7738 - protein, 520 aa, Brassica napus
MESSISQTLSQVIDPTTGILIVVSLFIFIGLITRRRRPPYPPGPRGWPIIGNMSMMDQLTHRGLANLAKKYGGLCHLRMGFLHMYAVSSPDVAKQVLQVQDSVFSNRPATIAISYLTYDRADMAFAHYGPFWRQMRKVCVMKVFSRKRAESWASVRDEVDKMIRSVSSNVGKSINVGEQIFALTRNITYRAAFGSACEKGQDEFIRILQEFSKLFGAFNVADFIPYFGWIDPQGINKRLVKARNDLDGFIDDIIDEHMKKKENQNSVDAGDVVDTDMVDDLLAFYSEEAKLVSETADLQNSIKLTRDNIKAIIMDVMFGGTETVASAIEWALTELLRSPEDLNRVQQELAEVVGLDRRVEESDIEKLTFLKCTLKETLRLHPPIPLLLHETAEDTEIDGYFVPKKSRVMINAFAIGRDKNSWVDPETFRPSRFLEPGVPDFKGSNFEFIPFGSGRRSCPGMQLGLYALELAVAHILHCFTWKLPDGMKPSELDMSDVFGLTAPKATRLYAVPSTRLICSV

SEQ ID NO: 7739 - protein, 392 aa, Trichodesmium erythraeum IMS101
MYSINPAKRVQALPPYVFARLDELKARAREQGLDLIDLGMGNPDGATPKPVVEAAIAALQDSTNHGYPPFEGTASFRKAITDWYFRRYSVKLDPDGEALPLLGSKEGLTHLALAYINPGNLVLAPNPAYPAHFRGPLIAGGKVHSILLKPENDWIIDLADIPDSVAEQAKVFYFNYPSNPTGATAPREFFQDIVTFAKKYEILLVHDLCYAELAFDGYQPTSLLQIPGGKDIGVEFHTMSKTYNMAGWRIGFVVGNSNVIQGLRTLKTNMDYGVFSALQLAAKTALQLPDEYLSQVQERYRQRRDFLIQGLGKLGWNVQKTMATMYLWVPCPPGIGSTDFALSVLQKTGVVVTPGNAFGSGGEGYVRISLIAECKRLDEALNRFKKAGIYYQ

SEQ ID NO: 7740 - protein, 520 aa, Brassica napus
MESSISQTLSQVLDPTTGILIVVSLFIFIGLITRRRRPPYPPGPRGWPIIGNMSMMDQLTHRGLANLAKKYGGLCHLRMGFLHMYAVSSPDVAKQVLQVQDSVFSNRPATIAISYLTYDRADMAFAHYGPFWRQMRKVCVMKVFSRKRAESWASVRDEVDKMIRSVSSNVGKSINVGEQIFALTRNITYRAAFGSACEKGQDEFIRILQEFSKLFGAFNVADFIPYFGWIDPQGINKRLVKARNDLDGFIDDIIDEHIKKKENQNSVDAGDVVDTDMVDDLLAFYSEEAKLVSETADLQNSIKLTRDNIKAIIMDVMFGGTETVASAIEWALTELLRSPEDLKRVQQELAEVVGLDRRVEESDIEKLTFLKCTLNETLRLHPPIPLLLHETAEDTEIDGYFVPKKSRVMINAFAIGRDKNSWVDPETFRPSRFLEPGVPDFKGSNFEFIPFGSGRRSCPGMQLGLYALELAVAHILHCFTWKLPDGMKPSELDMSDVFGLTAPKATRLYAVPCTRLICSV

SEQ ID NO: 7741 - protein, 176 aa, Vibrio harveyi
MKHTVEVMISEQEVQERIRELGKQITERYQGSEDLVMVGLLRGSFVFMADLARAIELTHQVDFMTASSYGNTMESSRDVRILKDLDDDIKGKDVLIVEDIIDTGNTLNKIREILSLREPKSIAICTLLDKPSRREVEVPVDYVGFAIPDEFVVGVGIDYAQKYRDLPFIGKVVPQE

SEQ ID NO: 7742 - protein, 513 aa, Brassica napus
QTLSQLLDPTTAILIIVSLFIFIGLITRRRRSYPPGPRGWPIIGNMLMMDQLTHRGLANLAKKYGGLCHLRMGFLHMYAVSSPHVARQVLQVQDSIFSNRPATIAISYLTYDRADMAFAHYGPFWRQMRKVCVMKVFSRKRAESWASVRDEVDKMIRSVSSNVGKSINVGEQIFALTRNITYRAAFGSACEKGQDEFIRILQEFSKLFGAFNVADFIPYFGWIDPQGISKRLVKARNDLDGFIDDIIDEHMKKKENQNTVDDGDVGDTDMVDDLLAFYSEEAKLVSETTDLQNSIKLTRDNIKAIIMDVMFGGTETVASAIEWALTELLRSPEDLKRVQQELAEVVGLDRRVEESDIEKLTFLKCTLKETLRLHPPIPLLLHETAEDTEIDGYFVPKKSRVMINAFAIGRDPKSWPDAETFRPSRFLEPGVADFKGSNFEFIPFGSGRKSCPGMQLGLYALELAVAHILHCFTWKLPDGMKASELDMNDVFGLTAPKATRLFAVPSTRLICAV

SEQ ID NO: 7743 - protein, 487 aa, Zea mays
MGSSSGAPLLVAHPSRGKEDLGDQRRLRWCCGVSSEGRWAEATAEAGRLAALAAPMIAVALLQLMMQVISTIMVGHLGEVPLAGAAIAGSLTNVSGFSVLMGLACGLETICGQAFGAEQYHKVALYTYRSIVVLLIASVPMAILWVFLPDVLPLICQDPQIAIEAGRYALWLIPGLFAFSVAQCLSKFLQSQSLIFPLVLSSLTTLAVFIPLCWFMVYKVGMGNAGAAFAVSICDWVEVTVLGLYIKFSPSCEKTRAPFTWEAFQGIGSFMRLAVPSALMVCLEWWSYELLVLLSGMLPNAALETSVLSICISTVILVYNLPYGIGTAASVRVSNELGAGNPDSARLVVVVALSIIIFTAVLVSVTLLSLRHFIGIAFSNEEEVVNYVTRMVPLLSISVITDNLQGVLSGISRGCGWQHLGAYVNLGAFYLVGIPVALVAGFALHLGGAGFWIGMIAGGATQVTLLTIITAMTNWRKMADKARDRVY

SEQ ID NO: 7744 - protein, 282 aa, Zea mays
MAGGGDHSQTNGGHVDQRALEEGRKEEFADQGCAAMVVSVPFIQKIIAEIFGTYFLMFAGCGAVTINASKNGQITFPGVAIVWGLAVMVMVYAVGHISGAHFNPAVTLAFATSGRFPWRQLPAYVLAQMLGATLASGTLRLMFGGRHEHFPGTLPTGSEVQSLVIEIITTFYLMFVISGVATDNRAIGELAGLAVGATILLNVLIAGPVSGASMNPARSVGPALVSGEYTSIWVYVVGPVVGAVAGAWAYNLIRFTNKPLREITKSTSFLKSTSRMNSAASA

SEQ ID NO: 7745 - protein, 396 aa, Erwinia carotovora subsp. atroseptica SCRI1043
MFENISAAPADPILGLTDLFRADDRADKINLGIGVYKDETGKTPVLTSVKKAEHYLLENETTKNYLGIDGLPAFGQCTQELLFGKQNAIIADKRARTAQTPGGTGALRVAADFIANQTSAKRIWISNPTWPNHNNVFSAAGLEVCQYDYYDAANHALDFDGLLNSLNAVEAGDVVLFHGCCHNPTGIDPTAEQWATLAELSVAKGWLPLFDFAYQGFARGIEEDAEGLRLFAAKHAELIVCSSYSKNFGLYNERVGACTLVAADAATADKAFSQVKAAIRANYSNPPSHGATIVATILGNDALKAIWEQELTAMRERIQRMRQLFVNTLQEKGAQQDFSFIINQNGMFSFSGLTKEQVLRLRDEFGVYAVNSGRVNVAGMTPENMAPLCEAIVAVL

SEQ ID NO: 7746 - protein, 590 aa, Oryza sativa
MKFAKKYEKYMKGMDEELPGVGLKRLKKLLKKCRSDLQSHENDGSSAGRCPGHCSVCDGSFFPSLLNEMSAVIGCFNEKAKKLLELHLASVTIFVRINVSIIVLVFGFKTVLNGYINNYIHYSKQGQEFKAQAQSLHIEILQSPWLCELMAFYMNLRRSKKNNGAMELFGDCSLVFDDDKPTISCNLFDSMRVDISLTCSICLDTVFDPVALSCGHIYCYLCSCSAASVTIVDGLKSAERKSKCPLCRQAGVFPNAVHLDELNMLLSYSCPEYWEKRIQMERVERVRLAKEHWESQCRAFLGIFLETGPKARMFEEILIPREAAAVRSSPKQPQGDHIELHQKRHGRRLDYEERKRKRAAREVHKRSRDARQLLGAKGKRFAKKRYAEKAQMKKTLKMHDESTSRQKVDDVQEGALPPYLLDRDQTQRAKVLSNTIKQKRMEKAGKWEVPLPKVRPVAEEEMFKVLRTGKRKTKQWKRMVTKATFVGPGFTRKPPKYERFIRPTGLRFTKAHVTHPELKCTFNLDIISVKKNPNGQMYSTLGVLTRGTIIEVNVSELGLVTPAGKVVWGKYAQVTNNPENDGCINAVLLV

SEQ ID NO: 7747 - protein, 629 aa, Psychrobacter sp. 273-4
MNAAIDHRGPDAGDAWLDENIGLVLGHQRLAIQDLSPAGAQPMHSACGRYVLAFNGEIYNHLQLREQLMIEGHAPAWRGHSDTETMLACFVAWGIEKTLQAMVGMFAIVLWDRQQKVLTLARDRMGEKPLYWGWQGQSLYFSSELKGLKAHPSFKTDINRDAITLLLRHNCIPAPYSIYQGIEKLRPGHWVQLPLSDIQQAKTAQSKAYWRFNDIVEAGLADPFTGSPEQAVDALESALMQSIGGQMQSDVPLGAFLSGGIDSSTVVALMQAQSSRPVKTFTIGFDDAGYNEATHAKAIAKHIGTEHTEMYMRPEDALAVIPKLSSIYCEPFSDSSQIPTFLVNQLAHQHVTVALSGDGGDELFGGYNRYLMAQQVWSKSRKLPRPMRQLAAVSLTALSPKSWDTLVNTLSPVIPKRLNLRTPGDKAHKLAGVLNIDSEQAFYQNLTSHWQDPAQLVIGAQEPATLISDSSCWPTTDSFQHAMMAMDAQTYMTDDILVKVDRAAMANSLETRVPMLDHRIAELAWRMPLDYKIRNGEGKWLLKQVLYRHVPRELIERPKMGFGIPLHDWLRGSLRDWAEALLDRNLLQQQGYFNPAPIRKIWNEHLSGVFNHQHQLWDILMFQAWLETQ

SEQ ID NO: 7748 - protein, 455 aa, Streptococcus mutans UA159
MAVEIIMPKLGVDMQEGEIIEWKKQEGDEVKEGEILLEIMSDKTNMEIEAEDSGVLLKIVKGNGQVVPVTEVIGYIGQAGEVLEIADVPASTVPKENSAAPAEKTKAMSSPTVAAAPQGKIRATPAARKAARDLGVNLNQVSGTGAKGRVHKEDVESFKAAQPKATPLARKIAIDKGIDLASVSGTGFGGKIIKEDILNLFEAAQPVNDVSDPAKEAAALPEGVEVIKMSAMRKAVAKSMVNSYLTAPTFTLNYDIDMTEMIALRKKLIDPIMEKTGFKVSFTDLIGLAVVKTLMKPEHRYLNASLINDATEIELHQFVNLGIAVGLDEGLLVPVVHGADKMSLSDFVIASKDVIKKAQTGKLKATEMSGSTFSITNLGMFGTKTFNPIINQPNSAILGVGATIQTPTVVDGEIKIRPIMALCLTIDHRLVDGMNGAKFMVDLKKLMENPFTLLI

SEQ ID NO: 7749 - protein, 973 aa, Agrobacterium tumefaciens str. C58
MPPSHVLKRRSKTMALVTEFDYGTPKSNATDMVTLTIDGRQVTVPTGTSIMRASREAGIDVPKLCATDMVDAFGSCRLCLIEVEGRNGTPASCTTPVAAGLVVHTQTERLKQIRKGVMELYISDHPLDCLTCAANGDCELQDMAGAVGLRDVRYGYEGDNHVKSRTGGGDINARWMPKDESNPYFTYDPSKCIVCSRCVRACEEVQGTFALTIEGRGFESRVSPGAHEAFLDSDCVSCGACVQACPTATLTEKSVIEIGQPEHSMVTTCAYCGVGCSFKAEMRGEELVRMVPWKDGQANRGHSCVKGRFAYGYATHRDRILNPMIRENIGDPWREVSWDAAFAYVASEFRRIQGKYGRESIGGITSSRCTNEETFLVQKLVRAGFGNNNVDTCARVCHSPTGYGLGQAFGTSAGTQNFDSVEQSDVVLVIGANPTDGHPVFGSRLKKRLRQGAKLIVIDPRRIDLVRTPHVEAAFHLPLLPGTNVAVLTALAHVIVTEGLFNEAFIRERCDWSEFEDWAAFVAEPQHSPEETERFTGVPAEDLRGAARLYATGGNGAIYYGLGVTEHSQGSTTVMAIANLAMVTGNIGRPGVGVNPLRGQNNVQGSCDMGSFPHELPGYRHISDDATRDVFEKLWGVKLNNEPGLRIPNMLDAAVDGSFKGIYIQGEDILQSDPDTKHVSAGLAAMECVVVHDLFLNETANYAHVFLPGSTFLEKDGTFTNAERRINRVRKVMSPKNGYADWEVTQKLAQAMGLTWNYTHPSEIMDEIAATTPSFASVSYAYLEEKGSVQWPCNEKFPEGSPIMHVDGFVRGKGKFIRTEYVATDERTGPRFPLLLTTGRILSQYNVGAQTRRTENVVWHEEDRLEIHPHDAEQRGVKDGDWIKLVSRSGDTTLRALITDRVAPGVVYTTFHHPGTQANVITTDFSDWATNCPEYKVTAVQVSPSNGPTEWQEEYDALARQSRRIAGKLEAAE

SEQ ID NO: 7750 - protein, 581 aa, Streptococcus mutans UA159
MAVEIIMPKLGVDMQEGEIIEWKKQEGDEVKEGDILLEIMSDKTNMEIEAEDSGVLLKIVKGNGQVVPVTEVIGYIGSAGETIETNAAPAASADDLKAAGLEVPDTLGESAAPAAQKTPLADDEYDMIVVGGGPAGYYAAIRGAQLGGKVAIVEKSEFGGTCLNKGCIPTKTYLKNAEILDGIKIAAGRGINFASTNYTIDMDKTVAFKDTVVKTLTSGVQGLLKANKVTIFNGLGQVNPDKTVTVGSETIKGHNIILATGSKVSRINIPGIDSPLVLTSDDILDLREIPKSLAVMGGGVVGIELGLVYASYGTEVTVIEMADRIIPAMDKEVSLELQKILSKKGMNIKTSVGVAEIVEANNQLTLKLNDGSEVVAEKALLSIGRVPQLSGLENLNLELERGRIKVDDYQETSISGIYAPGDVNGRKMLAHAAYRMGEVAAENAIWGNVRKANLKYTPAAVYTHPEVAMCGITEEQARQEYGNVLVGKSSFSGNGRAIASNEAQGFVKVVADAKYHEILGVHIIGPAAAEMINEASTIMENELTVDELLRSIHGHPTFSEVMYEAFADVLGEAIHNPPKRR

SEQ ID NO: 7751 - protein, 623 aa, Psychrobacter sp. 273-4
MCGLLGLIDYTKTTSEDIFSEMLSCLVKRGPDSEGIDLFYDDSCSVLLGHRRLAIQDLSNHGHQPMKYDNLVTIYNGEVYNFKEIQQQLLEKGYFFESDSDTEVILKAFHCWGIKSVDKFRGMFAFAIYDINKREITIFRDRVGVKPLYYSQTEDSFIFSSELKPFISFPNFDKSIDFEAVSSYLQFGYIHAPKSIFSSAKKLLPGHYLKFDIASKKLSIDCYWDVTDYFEDKTNVTDITAITDELESIIIESFNLRMISDVPVGTFLSGGVDSSLVTAILQKYSDIPINTFTIGFEDKNYDESIYAKAIADHLGTNHTEYICKKEDALEIIKELPKIFDEPFADSSAIPTTLVSKLAKEKVSVILSGDGGDELFCGYSSYTLMEKRFASISKIPFKNSIKKLSDFIPFPLVLLNGINENLYTKFMKFRNLLEHDDIANAFKVSNSVFCKDEIDKIISQEYFFNEDSISHVSTLEKMMISDFKGYLPDDLLVKVDRSTMSVSLEGREPLLDHKIIEFAARMPISLKKNKSILKDILKRYVPEELFLRKKQGFGIPINSWLRNDLKYLLDQYLNEDIIKEYGVFDPKYVTDLLRLFHAGKNDDRKIWTLLMFQMWFSEHLATSK

SEQ ID NO: 7752 - protein, 402 aa, Helicobacter pylori 26695
MLAKMSFMQNVKNIQEVEVSHKRVLIRVDFNVPLDENLNITDDTRIRESLPTIQYCIDNKAKDIILVSHLGRPKGVEEKLSLKPFLKRLERLLNHEVVFSQNIVQLKQALNENAPTRIFLLENIRFLRGEEENDENLAKDLASLCDVFVNDAFGTSHRKHASTYGTAKFAPIKVSGFLLKKEIDSFYQAFNHPLRPLLLIVGGAKVSSKLTLLKNILDLIDKLIIAGAMSNTFLKALGYDVQDSSVEDALINDALELLQSAKEKKVKVYLPIDAVTTDDILNPKHIKISPVQDIEPKHKIADIGPASLKLFSEVIESAPTILWNGPLGVHEKQEFARGTTFLAHKIADTYAFSLIGGGDTIDAINRAGEKDNMSFISTGGGASLELLEGKILPCFEVLDKRH

SEQ ID NO: 7753 - protein, 193 aa, Escherichia coli
GIDTANMFEFWDWVGGRYSLWSAIGLSIVLSIGFDNFVELLSGAHAMDKHFSTTPAEKNLPVLLALVGIWYNNFFGAETEAILPYDQYMHRFAAYFQQGNMESNGKYVDRNGNVVDYQTGPIIWGEPGTNGQHAFYQLIHQGTKMVPCDFIAPAITHNPLSDHHQKLLSNFFAQTEALAFGKSREVVEQEYRD

SEQ ID NO: 7754 - protein, 312 aa, Escherichia coli
MKVAVLGAAGGIGQALALLLKTQLPSGSELSLYDIAPVTPGVAVDLSHIPTAVKIKGFSGEDATPALEGADVVLISAGVRRKPGMDRSDLFNVNAGIVKNLVQQVAKTCPKACIGIITNPVNTTVAIAAEVLKKAGVYDKNKLFGVTTLDIIRSNTFVAELKGKQPGEVEVPVIGGHSGVTILPLLSQVPGVSFTEQEVADLTKRIQNAGTEVVEAKAGGGSATLSMGQAAARFGLSLVRALQGEQGVVECAYVEGDGQYARFFSQPLLLGKNGVEERKSIGTLSAFEQNALEGMLDTLKKDIALGQEFVNK

SEQ ID NO: 7755 - protein, 193 aa, Escherichia coli
GIDTANMFEFWDWVGGRYSLWSAIGLSIVLSIGFDNFVELLSGAHAMDKHFSTTPAEKNLPVLLALIGIWYNNFFGAETEAILPYDQYMHRFAAYFQQGNMESNGKYVDRNGNVVDYQTGPIIWGEPGTNGQHAFYQLIHQGTKMVPCDFIAPAITHNPLSDHHQKLLSNFFAQTEALAFGKSREVVEQEYRD

SEQ ID NO: 7756 - protein, 417 aa, Methanocaldococcus jannaschii DSM 2661
MIMFLTLDDFNFEDKRVVLRVDINCPIDPNTGEILDDKRIREIKSTITELINKGAKVVILAHQSRPGKKDFTTLKNHAKVLSDVIGKEVEYIDEVIGSTAREAIINMKCGDVILLENVRFYSEEVLSDWKKWENITPKKQAETNLIKRLAPLFDYFVNDAFAAAHRAQPSLVGFSYYMPMIAGRLMEREVGVLSKVLENPEKPCVYVLGGAKADDSIRVMKNVLENGTADKVLTSGIVANIFLVAMGYDLGVNMDIIENLGLKSQIEIAKELLNKFEDKIVVPVDVALNINEERVEADLNKDEKVEHLINDIGEKTIELYSEIINEAKTIVANGPAGVFEKEAFAKGTEELLKAIANSKGFSVIGGGHLSAAAELFGIADKIDHVSTGGGATLDFLAGEKLPVIEMLKESYKKYKGQ

SEQ ID NO: 7757 - protein, 274 aa, Crocosphaera watsonii WH 8501
MTVAASKKLSYDWTIIIYMASIHLVALLAFLPGNFSWQAVGVTLLLYWVTGALGITLGFHRLVSHRSFKSPKWLEYLLVFFGTLACQGGPIQWVGLHRIHHKYSDTEPDPHDSNKGFWWSHMAWMLHQIPADNDVPRYTKDINEDPFYNFCQSFMIPIQIVLGLALYFLGGWSFVIWGIFVRLVMVFHFTWFVNSATHKFGYQSHESNDNSRNCWWVALLTFGEGWHNNHHAYQYSARHGLAWWEIDITWMTIQVLQFLGLAKNVKLAPVADKK

SEQ ID NO: 7758 - protein, 179 aa, Haemophilus influenzae R2846
MKKHHVDVLISENDVHARIAELGAQITKFYQEKQIDSLVVVGLLRGSFMFMADIVRQINLPVEIEFMTTSSYGTGMTTNHDVRITKDLDGDIKGKHVLIVEDIIDTGYTLEKVRDILNLREPASLTICTLLDKPSRREVEVPVEWVGFEIPDEFVVGYGIDYAQRHRNLGYIGKVVLEE

SEQ ID NO: 7759 - protein, 94 aa, Zea mays
KEQFSDGVGYGWIDALKDTAEKQVTDEMMKNPKPEWGNDIPDTKEAYWYRCMFDEHFPPHCASTVMRWTPTWSKQTDPSGRAIATHNAKYDSAA

SEQ ID NO: 7760 - protein, 181 aa, Cupressus sempervirens
DDHGEVVAEMRRPDLEPYLGLHYPATDIPQSSRFLFLKNRVRTICDCRAPAVKVRHDESLGQVLSLQGSTLRAPFGCHAQYMANMGSIASLVMAVTVSDSEEGGRRLWGLVVCHHTTPRFVPYPLRYACEFLMQVFGIQLNKELELASRLRERHIFRTQTLLCDMLLRDAPVGIVTTTPNI

SEQ ID NO: 7761 - protein, 187 aa, Cycas revoluta
DEHGEVVAEIRRSDLEPYLGLHYPATDIPQASRFLFMQNRVRMICDCRATPVKVIQAAELNLPLCLVGSTLRAAHGCHSQYMANMGSIASLVLAVIINANDEEGWSGRSSVKLWGLVVCHHTSARAIPFPVRYACEFLMQAFGLQLNMELQLAAQMTEKHILRTQTLLCDMLLRDAPIGIVTQSPSI

SEQ ID NO: 7762 - protein, 203 aa, Zea mays
  unsure (1)..(203): unsure at all Xaa locations
LLPKLCCCICKKTRRNIRPNGQNTYFRGRGKASSDDVALACSEDEEDGNGESCSKEASSAEESSXEKKQKRLPKWPTPRSSPARACNDEVASDEKDDVGISRENFSTSPLRAWGKNGTRSQTRHSSFSGSNGRMVKGGRMIKLVECLRNSDDNEGEAPNLEKSYLCCGPTLSIKQLCQFVASQTSHKDEEVEMYALKPSCSKP

SEQ ID NO: 7763 - protein, 192 aa, Dacrydium cupressinum
DEHGEVISEIRKSDLEPYLGLHYPATDIPQASRFLFMKNRVRMICDCHAPPVRVVEDKRLPRELNLCGSTLRALMGCHAQYMSNMGSIASLVIAVIVNEKDEEEGDSEDNIQQKGRKLWGLVVCHHTSPRFVPFPLRYACEFLVQVFGIQLNKEVELAAQVREKHILRTQTLLCDMLLRDAPTGIVTQKPNI

SEQ ID NO: 7764 - protein, 451 aa, Zea mays
  unsure (1)..(451): unsure at all Xaa locations
MASALLAGQGGARHHGWGETRAPLAPIPPNPNPSQPHPRADGSKSKPRAAASSPAAGYVTFRPASLGPREARALRDRLAGELTQVRALLSRIDTWQQQGPPPAGLRGEMRKRCGQILTRLRKDKRSVWFNAPVEVERLGLHDYHAVIKRPMDLGTVKEGLAAGRYASHDDFAADVRLTFTNALRYNPVGHEVHTFAGALLAYFERMYKEALAXFEEERKRLEPPRPVAAELPPPPAVEPVEAKAKTRAGNVRMRKPKAREPNKREMSLEEKNMLRLGLVSLPEEKMHNVLQIVRKRNNNPEMLGDEIELDIDEMDVETQWELDRFVTNFNKALKKSQRAAMLNGGVADVTSTAVAEDDTAPVGDVPTLVGNDDAESEEPVKSTTVAEQVDEYVDIGDEMPAATYQSMEIEKDAEGTTGSGGSGSGSSSSSGSESRSSGDSASGAGNAHSLT

SEQ ID NO: 7765 - protein, 197 aa, Lotus japonicus
MSASRFIKCVTVGDGAVGKTCLLISYTSNTFPTDYVPTVFDNFSANVVVDGSTVNLGLWDTAGQEDYNRLRPLSYRGADVFILAFSLISKASYENIAKKWIPELRHYAPGVPIILVGTKLDLRDDKHFLADHPGAVPITTAQGEELRKLIGAPAYIECSSKTQQNVKAVFDAAIKVVLQPPKQKKKKREAQKSCSIL

SEQ ID NO: 7766 - protein, 178 aa, Salmonella typhimurium LT2
MKHTVEVMIPEAEIKARIAELGRQITERYKDSGSEMVLVGLLRGSFMFMADLCREVQVPHEVDFMTASSYGSGMSTTRDVKILKDLDEDIRGKDVLIVEDIIDSGNTLSKVREILGLREPKSLAICTLLDKPSRREVDVPVEFVGFSIPDEFVVGYGIDYAQRYRHLPYVGKVVLLDE

SEQ ID NO: 7767 - protein, 267 aa, Arabidopsis thaliana
MEERHKCKLCWKSFANGRALGGHMRSHMLIHPLPSQPESYSSSMADPGFVLQDRESETESSKKPSRKRSRLNRRSISSLRHQQSNEEGKSETARAADIKIGVQELSESCTEQEPMSSVSDAATTEEDVALSLMLLSRDKWEKEEEESDEERWKKKRNKWFECETCEKVFKSYQALGGHRASHKKKIAETDQLGSDELKKKKKKSTSSHHECPICAKVFTSGQALGGHKRSHASANNEFTRRSGIIISLIDLNLPAPSEEEEMASSVF

SEQ ID NO: 7768 - protein, 431 aa, Streptococcus mutans UA159
MTLACNLAAAGKKTALIEARDWGGTTVNRGSTPKKALLALAELHHHQESFLHRGLETVSHVKWEDALLTRDWLVSDESARAKERAIKAGVETYEAYAFFEDAHHLKVNGQVLSTATIVLATGSVPRKIDIEGASYIDSSANLMRLHQQPKVIALIGAGVIAMSLISSFTELGTKVHVIQHNDRVLGNFDSELVDILVNRLKSRGAEFHMEAEAERVERSTSGYQVTLTNGEIVIVDGIYDVAGRIANIGGLQLEKAGIEYTERGISVDDHLTTSQPHIFAMGDCCDAPVPKLNSYADFQAKYLSQLLNDESKEAIQYPIAPAATVYSIPKIGQVGVSVNQARQHPQDYDVTQLNMSNWQNYKRVHDDLAVIKLVVSKSDQHVAGAEIVSDTADILVNYLAILLNRRVSFQELQDIIFAYPSLATDLYGLWK

SEQ ID NO: 7769 - protein, 532 aa, Trichodesmium erythraeum IMS101
MKNGSISPVVLIILDGWGYREEKYGNAIAVGKTPNIDSLWQAYPRTLIQASGKAVGLPEGQMGNSEVGHLNIGAGRVVPQELVRISDAIEDGLIVQNQAIKKICQDVIERNSKLHLVGLCSSGGVHSHVNHLLGLLDVAKAKGISDVCVHAITDGRDTNPKSGLHVLKQIEYHTNQIGIGRIATVSGRYYAMDRDKRWDRIQKAYEVMTQDGYGTGCSASDLLQKSYAEGITDEFVLPVRVAPGAVEPGDGVIFFNFRPDRARQLTQAFVAPDFNGFERQTIQPLTFLTFTQYDSSFPVLVAFEPQNFNNILGQVISQHGLRQFRTAETEKYAHVTYFFNGGLEQPFEGEDRELVQSPMVSHYDEAPEMSAEDLTEVAIAAVKKQIYSLIVINYANPDMVGHTGAMDAAVNAVQTVDHCLGKLLQGISKVGGTAIIIADHGNAEYMWDEDGNPWTAHTTNLVPFILIEGEVSKIPGHGTKVPLRENGCLADIAPTILEILNLPQPAEMTGKSIIKKAEYELKPNRTPVRVGL

SEQ ID NO: 7770 - protein, 424 aa, Staphylococcus aureus subsp. aureus Mu50
MEITMPKLGESVHEGTIEQWLVSVGDHIDEYEPLCEVITDKVTAEVPSTISGTITEILVEAGQTVAIDTIICKIETADEKTNETTEEIQAKVDEHTQKSTKKASATVEQTFTAKQNQPRNNGRFSPVVFKLASEHDIDLSQVVGSGFEGRVTKKDIMSVIENGGTTAQSDKQVQTKSTSVDTSSNQSSEDNSENSTIPVNGVRKAIAQNMVNSVTEIPHAWMMIEVDATNLVNTRNHYKNSFKNKEGYNLTFFAFFVKAVADALKAYPLLNSSWQGNEIVLHKDINISIAVADENKLYVPVIKHADEKSIKGIAREINTLATKARNKQLTTEDMQGGTFTVNNTGTFGSVSSMGIINHPQAAILQVESIVKKPVVINDMIAIRSMVNLCISIDHRILDGLQTGKFMNHIKQRIEQYTLENTNIY

SEQ ID NO: 7771 - protein, 321 aa, Candida albicans SC5314
MEVLHQLTTNHTSSLSNLINNHPTSFSSILKEVDITNHSLTYIEKLWASYYIYMNNDILATGLLFFITHELMYFGRCLPWFIIDKTPWFNRYKIQPTKIPTNQEQWECFKTVLKQHFLVEALPIWLFHPVCAKLGITYDVPFPNWKIQAIQIAIFFICEDFWHFVFHSLFHQGWFYKNIHKVHHKYAAPFGLAAEYAHPVEVMALGVGTVGFPILYAYLATVYTNMPPLHLFTLTTWIVLRLFQAVDSHSGYDFPWSLNKFFPLWAGAAHHDEHHHYFIGNYASSFTLWDWLFQTECGTYARKRRERNSQASAESKHKKTL

SEQ ID NO: 7772 - protein, 176 aa, Desulfovibrio desulfuricans G20
MTVTGMDVVYTAEQVQERVRELAVQINAEYEDKPLVVVCVLKGAFMFFSDLLKHLTVRPEIDFVRVASYGNSTTRSRNISFTKDLEVSIDGKHVLVVEDIVDTGHTVDFLYRQLAARGAASIRLCAIVDKAERREVDVTVDFPGFALDKGYIIGYGMDYAEQYRELDAIYDAHVAN

SEQ ID NO: 7773 - protein, 139 aa, Zea mays
ACLQILENIFDQGNGTPSKQRIKEITAELSHHGQISETNVYNWFQNRRARSKRKQAASLPNNAESEAEVDEESLTDKKNPSIFSATSAITSLGNVKFRKSVTKSLAWCWFVQESIISRGRWRAPGASPISNTGKALTCL

SEQ ID NO: 7774 - protein, 493 aa, Prochlorococcus marinus
MQTNFLFMTTALQTPQRRSRSKLQDASLVNGPMLLLRSIRGFSSNRSMLWLATVPLALFGLGIFNLSAHAADLPELNAAFLANNLWLLIATILVIFMNAGFAMVEAGMCRSKNAVNILAKNLFVFALAVTSYWFIGYSLMYGGSVADGWLYFGGLFFDPTVTADMVTDAGLVPTVDFLFQSAFAGTAATIVSGLVAERVKFGEFVVFAIVLTAFIYPIAGSWKWNGGWLDSLGFVDFAGSSIVHSVGAWAGLVGAMLLGPRIGKYSDGKPQAMPGHNMAIATLGALILWIGWYGFNPGSQLAMDQWVPYVAVTTTLAAAAGAIGATIVSTLTSGKPDLTMIINGILAGLVSITAGCGDMTLAGAWFAGLVGGIIVVFSVAALDAAEIDDPVGAFSVHGVCGVWGTLVIGLWGTAVQGDGAGMGLFNGGGINLLLVQALGAAAYAIWTLVTCWIAWSIIGGLFGGIRVSEEEETQGLDISEHGMESYPDFASAK

SEQ ID NO: 7775 - protein, 478 aa, Gloeobacter violaceus PCC 7421
MLMKCKWKWGLGTLAAALATAAPAFAQDAPKIDTGDTAWVLVSAALVLLMTPGLAFFYGGLVRGKNALNTLMMSFVALGVIALVWTLVGYSIAFGPGNGYFGSFAWLGLNGVGQDPNTAQAATVPHLAFMIFQMMFAVITPALISGAIVDRMKFKTYVVFIMIWSVVVYSPVAHWVWSLGNPDPTDAAKMLPGWLGAIGALDFAGGTVVHLTAGISALVAAIILGPRKGFPNQPMTPHNVPFVLLGAGLLWFGWFGFNAGSALAANGLASLAFVTTNVATAAALSTWLLLDTFIGGKPTAVGAATGAVVGLVAITPAAGFVSPLSSIAIGGIAAIISFAAIQLKKKLNYDDSLDVFACHGMGGLTGAILTGVFADKSLNSLGDNGLLLGNGAQLIEQLIGVGAVAVYAAVCTTVILLALKFTLGLRPSEEAEQEGLDTAEHGEEAYTGSIGGLGAMEEAMSSTSQGQGFTRPATQQQE

SEQ ID NO: 7776 - protein, 336 aa, Mesorhizobium loti MAFF303099
MTTTAEHLKPLLWEPKNLVRAIEAAGVALWSWNVDSDALAMDDRAYDLWGIPRTTDVKFEDLSAHIHPADRDRVRAAFNATRAIVGPYEIDFRIMIGDELKWISARGQGDDEGMVQRLMFGIFIDVTGRKQAEESRELLAGEMSHRVKNLLTIASGLTAITSRSTTTTNDMARELTQRLTALGRAHDLVRPVPGQTEAASALLGDLLTVLLAPYDDLGAFSGRIRVSVPRMSVGESSATILALIIHELATNSLKYGALSAEAGTLDVSCSAHDDAVTIIWTESGGPLVETPAGPPGYGSRLVERSVTGHLRGSIAYDWSKQGLVVTLKVQPERLAQ

SEQ ID NO: 7777 - protein, 473 aa, Staphylococcus aureus subsp. aureus Mu50
MSEKQYDLVVLGGGTAGYVAAIRASQLGKKVAIVERQLLGGTCLHKGCIPTKSLLKSAEVFQTVKQAAMFGVDVKDANVNFENMLARKEDIINQMYQGVKHLMQHNHIDIYNGTGRILGTSIFSPQSGTISVEYEDGESDLLPNQFVLIATGSSPAELPFLSFDHDKILSSDDILSLKTLPSSIGIIGGGVIGMEFASLMIDLGVDVTVIEAGERILPTESKQASQLLKKSLSARGVKFYEGIKLSENDINVNEDGVTFEISSDIIKVDKVLLSIGRKPNTSDIGLNNTKIKLSTSGHILTNEFQQTEDKHIYAAGDCIGKLQLAHVGSKEGVVAVDHMFEGNPIPVNYNMMPKCIYSQPEIASIGLNIEQAKAEGMKVKSFKVPFKAIGKAVIDSHDANEGYSEMVIDQSTEEIVGINMIGPHVTELINEASLLQFMNGSALELGLTTHAHPSISEVLMELGLKAESRAIHV

SEQ ID NO: 7778 - protein, 531 aa, Picea abies
MWDLNHIPEATKEPQVVVPMEAACSAEGNLSVGNANFRDENVSGSSSSSSVAIANTAMSVDCEEHSMSRACPSEQAEMNARSSQENGNGLGSEAQVQTGKLFGFSFSNIVKGNCTEASSGVSNGRSGCTNRVTRQFFPHGREFESQVMIPGRPQLPRAHWVGLTFRQAESFRSPTPKEATQPIKKSRRGPRSRSSQYRGVTFYRRTGRWESHIWDCGKQVYLGGFDTAHAAARAYDRAAIKFRGVDADINFNIDDYEDDVKQMSKLTKEEFVHVLRRQSTGFPRGSSKFRGVTLHKCGRWEARMGQFLGKKYVYLGLFDNEVEAARAYDKAAIRCNGKEAVTNFSPELYESELALTEDKGHDPDLDLSLGNSVPKDGSLVSKDNNDGPMRSESDLCTLSEPDWKTSCLIKPTVPNLLDGLNQSAQSLSCEVPSLQRYQQSPGWVWQLPTNRPAAPHPPPMIESAASSGFSPQIYSSTTSPSPEWLQKRGFHFLFQPALMQTKNILHSPTAPALINTYGKKPSDHSLNLSLG

SEQ ID NO: 7779 - protein, 455 aa, Magnaporthe grisea 70-15
MGNITAATRRIAGRRAHKCTIPTTTNYLPLPLSSSLPPPFLPSTSSQSQQHRNASTSTSTSTSTSPSSALPPSSIKHTSTTTGKPRRPRTAIFFPGQGVQKVGMLTPWLENFPSTARPIIQEIDDCLGYKLSDIIRDGPNKLLTATPHAQPAIMATSILILRVLERDFGFSPLEHKVNFVLGHSLGEFAALVAGGYLTFADSLRLVQRRAQAMAAATRAAREGRPDVEYGMVAIVTEPEYLPRLVQAIREFLGHSSEGAKAESSASAAPIEHVSIANVNSKNQIVLSGELGRIKTLVAHVRQFLGHDPRAVRLNSDSPFHSPIMRPAVAVVRDMLAAGGEGGGMVTFPAKIPCVSNISARPFESEAQLKDLLARQCLETVRWWDSIRYLDQREKVRRWIGIGPGKVGRNLVGKEVGMRGKGIVKGAGVWGITEPSEVEEVLRGLEETEFVVDELD

SEQ ID NO: 7780 - protein, 633 aa, Picea abies
MMTVDTSSIEPVGKIAPRSSEETESVCVEAAAATVTHIQSNNETRRRAPFRSEMTESGTSISSVVNSIACNENINSLEHEASSKAVELDGDVLSSNSTQVPRSNEGNHKIFGFSLKIETQNLTSRGNLLNVKANDEQQKDPACVTRHFFPLHNGQPSEVLMPTECTGGNPFTESHWTTVTSRLPESTEPRKKQAENNKPIKKSRRGPRSRSSQYRGVTFYRRTGRWESHIWDCGKQVYLGGFDTAHAAARAYDRAAIKFRGVDADINFTLTDYQEDLDQTSKLSKEEFVHILRRQSTGFSRGSSKYRGVTLHKCGRWEARMGQFLGKKYIYLGLFDSEEDAARAYDKAAIRCNGKDAVTNFDPSSYENEILEEGRESQTSTGFDQNLDLSLGIGHVTTQLKISPSYKSRVEEDSQLNRIEAVTYSNLSQDSKILSCLTSKGAENAVPEFQSLPRGHAVYWNSQTLQVPDAMKHKQSHTREDNAYEQTAISGSQLYPDHLSNCKRLNMEGLKEQSLGVPSSTVSFWPMKQQSGWTWQLHASGPTTPVFTTNRSPASGFSPQIHTAFVPSTHGCHKMGVHWAAQSTDPCMVQTPSPHLATRLTSGPDSGDHPVGLTLDLPGKKIKRSSVQRDKVD

SEQ ID NO: 7781 - protein, 1128 aa, Oryza sativa
MSSSRPTQCSSSSSRTRQSSRARILAQTTLDAELNAEYEEYGDSFDYSKLVEAQRTTGPEQQARSEKVIAYLHHIQRAKLIQPFGCLLALDEKTFNVIALSENAPEMLTTVSHAVPSVDDPPKLRIGTNVRSLFTDPGTTALQKALGFADVSLLNPILVQCKTSGKPFYAIVHRATGCLVVDFEPVKPTEFPATAAGALQSYKLAAKAISKIQSLPGGSMEVLCNTVVKELFDLTGYDRVMAYKFHEDDHGEVFAEITKPGLEPYLGLHYPATDIPQAARFLFMKNKVRMICDCRARSIKIIEDESLHLDISLCGSTLRAPHSCHLQYMENMNSIASLVMAVVVNENEDDDEVGADQPAQQQKRKKLWGLLVCHHESPRYVPFPLRYACEFLAQVFAVHVNKEFELERQVREKSILRMQTMLSDMLLRESSPLSIVSGTPNIMDLVKCDGAALLYGGKVWRLQNAPTESQIRDIAFWLSDVHRDSTGLSTDSLHDAGYPGAAALGDMICGMAVAKINSKDILFWFRSHTAAEIRWGGAKHDPSDKDDSRRMHPRLSFKAFLEVVKMKSLPWNDYEMDAIHSLQLILRGTLNDDIKPTRAASLDNQVGDLKLDGLAELQAVTSEMVRLMETATVPILAVDSNGLVNGWNQKVAELTGLRVDEAIGRHILTVVEESSVPVVQRMLYLALQGKEEKEVKFEVKTHGSKRDDGPVILVVNACASRDLHDHVVGVCFVAQDMTVHKLVMDKFTRVEGDYKAIIHNPSPLIPPIFGADEFGWCSEWNAAMTKLTGWHRDEVINKMLLGEVFDSTNASCLVKNKDAFVSLCILINSALAGDETEKAPFSFFDRNGKYIECLLSVNRKVNADGVITGVFCFIQVPSHELQHALHVQQASQQNALTKLKAYSYMRHAINNPLSGMLYSRKALKNTGLNEEQMKEVNVADSCHRQLNKILSDLDQDSVMNKSSCLDLEMVEFVLQDVFVAAVSQVLITCQGKGIRVSCNLPERYMKQTVYGDGVRLQQILSDFLFVSVKFSPVGGSVEISCSLTKNSIGENLHLIDLELRIKHQGKGVPADLLSQMYEDDNKEQSDEGMSLAVSRNLLRLMNGDVRHMREAGMSTFILSVELASAPAK

SEQ ID NO: 7782 - protein, 690 aa, Mesorhizobium loti MAFF303099
MFEVCEGTRGHRLPRRSARLHLLGLIAAAVIPVWLFAAYLLFQFAMHERSRFEQDALQTARQVSLVVEAEVANLRTIVDGLSKSAALANGDLEAFRGEALRAVQGTTYNLALRDLGHNQLLNTDVGFGADLPHVEPISAPDREKLKVSGILVSDVFQGQGSKDYRVAISVKVPSPTGEDLLLSISVPTSRIRDVMMPAVPDGWTVGVGDRDGNYVARSRSHEEMTGKPGLPEYLEKIVGRSGSFISRNYQGTTLLAGYFRSSYSGWFYTANVPLSDVQAPLWRSLAAIGGIGIVALLLSTALAYVVGKHLTGATTELAARADALGKGCPVQPLSTSVREFATIAQALVDAERAIAQRRNELETVLDTVPAAVWFTYDPKALLVIRNRFATELMGLPTKVRQSFGVPDPVINTVAVKDGHTVSREDRPLSRAMRGELTDNEEFSYTLPSGRERFLLSSARPIRGATGHIIGAVQISLDITDRKRGEEQRKLLVKELNHRVKNTLAVVQAIASQTIRNATSLPEAGRTLTSRLVSLSKAHDILTQKNWSGANLHDLIIESIKPHAAIERFQITGEKVWLPPNLALSFALALHELTTNAIKYGALSNAKGRVTISWNLVNRGTEARFNLEWRETGGPAVGSIERRGFGTQLLERVFAPNSAGRVLMNFKRRGLSCVFEVDVSEHNETDAGPIA

SEQ ID NO: 7783 - protein, 311 aa, Haemophilus influenzae R2866
MKVAVLGAAGGIGQALALLLKLQLPAGTDLALYDIAPVTPGVAVDVSHIPTAVNVKGFSGEDPTPALEGADVVLISAGVARKPGMDRSDLFNINAGIVRGLIEKVAVTCPKACVGIITNPVNTTVAIAAEVLKKAGVYDKRKLFGVTTLDVLRSETFVAELKGLNVSRTSVPVIGGHSGVTILPLLSQVQYAKWNEDEIEPLTKRIQNAGTEVVNAKAGGGSATLSMAQAAARFARSLVKGLSGETVVECTYVEGDGKYARFFSQPVRLGKEGVEEILPIGPLSNFEQQALENMLPTLRADIELGEKFING

SEQ ID NO: 7784 - protein, 447 aa, Bifidobacterium longum DJO10A
MEQRVIDTLRKVFELNGFIGIETRAVETGASLLKKGETSKEIYLLSRLQEVGHESDTPIEERLGLHFDLTVPLSRYVVEHSGALAFPFKRWQIQKVWRGERPQEGRFREFVQADIDVIGAGDLPDHYEVELPLVMVSALEELRAYGLPKATVHANNRKLSEGFYRGLGLTDVEGVLREIDKLDKIGADEVARLLTETCGATEAQARACLELAELNASDGAELAAKFDALCEAHGIVKDSEAYTLARQGLDTLAMIVDEAAAIRPGSVIADLKIARGLDYYTGSVYETFLDGAASLGSICSGGRYDNLASQGNRKYPGVGLSIGLSRLVSYMLHTAGAHANRVSPAAVLVAVWNEEDRPAANRIANQLRARGIATDVAPTAAKLGKQIKYADKLGIPYVWFPATAAEGAEGAEPAGDEVKNIVTGEQVAADCTSWEPDTVVAQQTVEI

SEQ ID NO: 7785 - protein, 828 aa, Erwinia carotovora subsp. atroseptica SCRI1043
MKLSRRHFMKANAVAAAAAVAGITIPIAVRAATEQSDAIHWDKAPCRFCGVGCGVLVGTQNGRIVASQGDPEAPVNRGLNCIKGYFLPKIMYGQDRLTQPLLRMRNGQFDKEGEFTPISWDKAFDIMAEKFKTALKEKGPNAIGMFGSGQSTIWEGYASAKLFKAGFRSNNIDPNARHCMASAVVGFMRTFGMDEPMGCYDDIEQTDAFVLWGSNMAEMHPILWSRITDRRLSNSNVTVAVLSTYQHRSFELADNGMVFTPQTDLAILNYIANYIIQNNAVNEAFFTRHVNLRRGVTDIGYGLRPTHPLEKAAKNPGSDASEPMSFEEYKAFVADYTLEKTVAISGVPADQLEALAKLYADPKKKVISYWTMGFNQHTRGVWANNLVYNIHLLTGKISQPGCGPFSLTGQPSACGTAREVGTFAHRLPADMVVTNEKHRAIAEKLWQLPTGTIPEKIGLHAVAQDRALKDGTLNAYWVMCNNNMQAGPNINQERMPGWRDPRNFIVVSDPYPTISALAADLILPTAMWVEKEGAYGNAERRTQFWRQQVKAPGESKSDLWQVVSFAKRFTVEDVWPEELLAQKPAYRGKTLYDVLFANDVTTRFPLSELAENQLNDESREFGFYLQKGLFEEYAAFGRGHGHDLAPFDAYHKVRGLRWPVVDGKETQWRYSEGHDPYVKAGEAYRFYGKPDGKAVIFALPYEPAAEAPDEEYDLWFSTGRVLEHWHTGSMTRRVPELHRAFPEAVLFIHPQDAKARDLRRGEKVRIISRRGEVISVVETRGRNKPPRGLVYMPFFDAAQMTNVLTLDATDPLSKETDFKKCAVKLAKV

SEQ ID NO: 7786 - protein, 202 aa, Phytolacca americana
KRRNGLLKKAYELSILCEAEVALIVFSSRGRVYEYSNNNIRSTIERYKKASSDGSNSASFIEINAQYYQQESAKLRQQIQVMQNSNRNLVGECLSSLNVKELKQLENRLERGMSRIRSKKHELLLADIEFLQKREKELEHENSFIRAKINEVERLQQLNMMPSEDLSAMNAFVTRSDHILAQNMLDTSSAFSNASKKLLHLG

SEQ ID NO: 7787 - protein, 209 aa, Triticum aestivum
  unsure (1)..(209): unsure at all Xaa locations
SARGLTTFNEVDMTNLMKLXRSDYKDXFVTKDGGKLDLMSCFDKAAVSALQNQPIVNAVIDGDDIIYRDYVDVSVTVGTSKGLVVPVIRDADTMNFADIEKGINNLAKKATEGALSIDDMAGGTFTISNGGVYGSLLSTPIINPPQSAILGMHSIVQRPVVVNGDILARPMMYLALTYDHRLIDGREAVFFLRRIKDVVEDPRRLLLDI

SEQ ID NO: 7788 - protein, 293 aa, Zea mays
  unsure (1)..(293): unsure at all Xaa locations
HQLSFFLLPPQLLRPLDLIAHHPRKRLDRRRSRPWXPYKHRPTSGANSGYWTTNSGAPVWNNNNALTVGQRGPILLEDYHLIEKLAQFDRERIPERVVHARGASAKGFFEVTHDVSQLTCADFLRAPGVQTPVIVRFSTVVHERGSPETLRDPRGFAVKFYTREGNFDLVGNNMPVFFIRDGMKFPDMVHAFKPSPKTNMQENWRIVDFFSHHPESLHMFTFLFDDVGIPLNYRHMDGFGVNTYTLISRDGKAHLVKFHWKPTXVGVKCLFXDEAVTVGGTCHTHGHKGLDRF

SEQ ID NO: 7789 - protein, 42 aa, Pseudomonas sp. M19
VLNLDKCIGCHTCSITCKNVWTSREGMEYAWFNNVESKPGIG

SEQ ID NO: 7790 - protein, 110 aa, Pinus taeda
VFSPMKHFGMTEPGKKCGILGLGGVGHMGVKIAKAFGLHVTVISSSDKKKEEAMEVLGADAYLVSKDTEKMMEAAESLDYIMDTIPVAHPLEPYLALLKTNGKLVMLGVV

SEQ ID NO: 7791 - protein, 292 aa, Magnetococcus sp. MC-1
MKVRKAVFPVAGLGTRFLPATKVVPKEMLSVVDTPLIQYAVEEAWDAGIEEVILITGRGKSLLMDQFDHMYELEDTLRRQGKEVLLSVSHEPIPFPGTVVATRQQDPLGLGHAVWCARYLVGDEPFAVILPDDLVHAQKPVLKQMVERFEELQSSIVAVMEVAPDQTNKYGILDSEPEQNGVWRIKGLVEKPDPSVSPSNLAIIGRYILTPEIFCLLESIPRGAGGEIQLTDAMAALLKHQSIYGMRFEGTRFDCGDKAGFQMASLALSMERPELKDQMLAFIQENLPKWQA

SEQ ID NO: 7792 - protein, 110 aa, Pinus taeda
VFSPMKHFAMTEPGKKCGILGLGGVGHMGVKIAKAFGLHVTVISSSDKKKEEAMEVLGADAYLVSKDTEKMMEAAESLDYIMDTIPVAHPLEPYLALLKTNGKLVMLGVV

SEQ ID NO: 7793 - protein, 386 aa, Escherichia coli K12
MTRKQATIAVRSGLNDDEQYGCVVPPIHLSSTYNFTGFNEPRAHDYSRRGNPTRDVVQRALAELEGGAGAVLTNTGMSAIHLVTTVFLKPGDLLVAPHDCYGGSYRLFDSLAKRGCYRVLFVDQGDEQALRAALAEKPKLVLVESPSNPLLRVVDIAKICHLAREVGAVSVVDNTFLSPALQNPLALGADLVLHSCTKYLNGHSDVVAGVVIAKDPDVVTELAWWANNIGVTGGAFDSYLLLRGLRTLVPRMELAQRNAQAIVKYLQTQPLVKKLYHPSLPENQGHEIAARQQKGFGAMLSFELDGDEQTLRRFLGGLSLFTLAESLGGVESLISHAATMTHAGMAPEARAAAGISETLLRISTGIEDGEDLIADLENGFRAANKG

SEQ ID NO: 7794 - protein, 490 aa, Leptospira interrogans serovar lai str. 56601
MRKFDKTLFHEFRRIYKFMPESYDLTVIGAGPGGYVAAIRAAQLGMNVCIIEKDKPGGICLNWGCIPTKALLESAHLLEKLHSAKEYGINLSDPKPDFAAIIRRSRNVADGMASGVEFLLNKNKITRKKGTAVFKDPNTIWLPDSSKEEITSKYFILATGARARELPGLPFDSHTVLSSKTAMIQDKIPESLLIVGAGAIGVEFADFYSTMGTKVTLVEMMDQILPVEDKEISTFLEKSFVKRGIRVLTGVGVSDPKIVNGKVKVLLKGKNLPEAVESFEAEKILVSIGLVPNTDSMHLEEIGIFLQKGFVKTDTKYKTSVPHIYAIGDCNGPPLLAHVASMEGIKAVEAISIHAGNPHHLSYIPIDYNAIPGCTYCHPEVASIGFTEKKATDMGYTISVGKFPFVASGRAKAMGDTGGFTKVIVDKTSGEILGAHLIGPGVTELLPAVSLGITQELTAKEIASTIFAHPTLSETVMESFGAALGEAINL

SEQ ID NO: 7795 - protein, 335 aa, Staphylococcus aureus subsp. aureus Mu50
MKMIGFEKPFKLEEGNLFKVYEQRKPTPENDDILVKVNSISVNPVDTKQRQMKVTQAPRVLGFDAIGTVEAIGPDVTLFSPGDVVFYAGSPNRQGSNATYQLVSEAIVAKAPHNISANEAVSLPLTGITAYETFFDTFKISHNPSENVGKSVLIINGAGGVGSIATQIAKRYGLTVITTASRQETTEWCEKMGADIVLNHKEDLVRQFKEKEIPLVDYIFCTYNTDLYYNTMIELIKPLGHITTIVAFNEDQDLNALKLKSITFTHEFMFARPIHRTPDMIKQHEYLEDITKNIELGHYQPTTTQVFEGLSPENLYQAHQLLEKQSMIGKLVINI

SEQ ID NO: 7796 - protein, 2238 aa, Streptomyces cinnamonensis
MASEEQLVEYLRRVTTELHDTRRRLVQEEDRRQEPVALVGMACRFPGGVASPEDLWDLVAAGKDAIEDFPTDRGWDLEALYDPDPAAYGTSYVRHGGFVDDAGSFDADFFGISPREALAMDPQQRLMLETSWELFERAGIEPVSLKGSRTGVYAGVSSEDYMSQLPRIPEGFEGHATTGSLTSVISGRVAYNYGLEGPAVTVDTACSASLVAIHLASQALRQRECDLALAGGVLVLSSPLMFTEFCRQRGLAPDGRCKPFAAAADGTGFSEGIGLLLLERLSDARRNGHKVLAVIRGSAVNQDGASNGLTAPNDAAQEQVIRAALDNARLTPSEVDAVEAHGTGTKLGDPIEAGALLATYGQHRARPLLLGSLKSNIGHTHATAGVAGVIKTVMAIRNGLLPATLHVEELSPHVDWDAGAVEVVTEPTPWPETGHPRRAGVSAFGISGTNAHLILEEAPPEEDVPAPVVVESGGVVPWVVSGRTPEALREQARRLGEFVAGDTDALPNEVGWSLATTRSVFEHRAVVVGRDRDALTAGLGALAAGEASAGVVAGVAGDVGPGPVLVFPGQGAQWVGMGAQLLDESAVFAARIAECERALSAHVDWSLSAVLRGDGSELSRVEVVQPVLWAVMVSLAAVWADYGVTPAAVIGHSQGEMAAACVAGALSLEDAARIVAVRSDALRQLQGHGDMASLSTGAEQAAELIGDRPGVVVAAVNGPSSTVISGPPEHVAAVVADAEARGLRARVIDVGYASHGPQIDQLHDLLTERLADIRPTNTDVAFYSTVTAERLTDTTALDTDYWVTNLRQPVRFADTIEALLADGYRLFIEASAHPVLGLGMEETIEQADMPATVVPTLRRDHGDTTQLTRAAAHAFTAGADVDWRRWFPADPAPRTIDLPTYAFQRRRYWLADTVKRDSGWDPAGSGHAQLPTAVALADGGVVLNGRVSAERGGWLGGHVVAGTVLVPGAALVEWVLRAGDEAGCPSLEELTLQAPLVLPESGGLQVQVVVGAADEQGGRRDVHVYSRSEQDASAVWQCHAVGELGRASVARPVRQAGQWPPAGAEPVEVGGFYEGVAAAGYEYGPAFRGLRAMWRHGDDLLAEVELPEEAGSPAGFGIHPALLDAALHPLLAQRSRDGAGAGAHGGQVLLPFSWSGVSLWASEATTVRVRLTGLGGGDDETVSLTVTDPAGGPVVDVAELRLRSTSARQVRGSAGPGADGLYELRWTPLPEPLPVPAPANGRDVAADLSGCAVLGELVAEPGPGIDLEGCPCYPGVGALADNASPPSMILAPVHSDTTGGDGLALTERVLRVIQDFLAAPSLEQKQTRLAFVTRGAADTGSTTGGSAAPAEAVDPAVAAVWGLVRSAQSENPGRFVLLDTDAPLDQASVAPLVDAVRSAVEADEPQVALRGGRLLVPRWARAGEPVELAGPAGARAWRLVGGDSGTLEAVVAEACDDIVLRPLAPGQVRVAVHTAGVNFRDVLIALGMYPDPDALPGTEAAGVVTEVGPGVTRLSVGDRVMGMMDGAFGPWAVADARMLAPVPPGWGTRQAAAAPAAFLTAWYGLVELAGLKAGERVLIHAATGGVGMAAVQIARHVGAEVFATASPGKHAVLEEMGIDAAHRASSRDLAFEDAFRQATDGRGVDVVLNSLTGELLDASLRLLGDGGRFVEMGKSDPRDPELVALEHPGVSYEAFDLVADAGPERLGLMLDRLGELFAGGSLVPLPVTAWPLGRAREALRHMSQARHTGKLVLDVPAPLDPDGTVLVTGGTGTIGAAVAEHLARTGESKHLLIVSRSGPAAHGAEELVSRIAEFGAEATFVAADVSEPDAVAALIEGIDPAHPLTGVVHAAGVLDNALIGSQTTESLTRVWAAKAAAAQQLHEATRESRLGLFVMFSSFASTMGTPGQANYSAANAYCDALAALRRAEGLAGLSVAWGLWEATSGLTGTLSAADRARIDRYGIRPTSAARGCALLAAARAHGRPDLLAMDLDARVPAASDAPVPAVLRTLAAAGAPATARPTAAAAADGATDWSGRLAGLTEEARLELLTELVCTHAAGVLGHADAGAVQVDAPFKELGFDSLTAVELRNRIAAATGLKLPAALVFDYPQARVLAAHLAERLVPEGAGAMGGVSGAEGVRDAYGAGGPGGDMTAQVLLEVARVEHTLSAAVPHGLDRAAVAARLEALLARCTATTAATGAAGAAVEGDGDSDGDGAVDQLETATAEQVLDFIDNELGV

SEQ ID NO: 7797 - protein, 260 aa, Vibrio cholerae O1 biovar eltor str. N16961
MTDTNVLANSATDNQETTHFGFETVRKDEKVHKVAQVFHSVAAKYDIMNDLMSGGIHRLWKRFTIDCSGARPGQRILDLGGGTGDLTAKFSRIVGEKGHVILADINNSMLNVGRDKLRDSGVVGNVHYVQANAEELPFPDNYFDCITISFCLRNVTDKDKALRSMFRVLKPGGRLLVLEFSKPILEPLSKLYDTYSFHILPKMGQLIANDADSYRYLAESIRMHPDQETLKGMMEEAGFEQTTYYNLTGGIVALHRGYKF

SEQ ID NO: 7798 - protein, 501 aa, Emericella nidulans
MGQNDDQKTYRYNESPVYTTSNGCPVMDPQASQRVGPNGPLLLQDFNLIDLLAHFDRERIPERVVHAKGAGAYGEFEVTDDISDITVIDMLKGVGKKTKTFVRFSTVGGEKGSPDSARDPRGFACKFYTEEGNWDWVFNNTPVFFLRDPSKFPMFIHTQKRNPQTNLKDATMFWDYLSTHQEAVHQVMHLFSDRGTPYSYRHMNGYSGHTYKWIKPDGTFNYVQLHLKTGQGNKTFTDAEATRLAAENPDWHTQDLFNAIARGEYPSWTCYVQTLSPEQAEKFRWNIFDLTKVWPQSEVPLRRFGRFTLNKNPENYFAEVEQAAFSPSHLVPGVEPSADPVLQARLFSYPDTHRHRLGTSNYQSIPVNCPLRAFTPFHRDGAMSVNGNHGANPNYPSTFRPLQYKPVKASQEHEKWAGSVVTEQLPVTDEDFVQANGLWKVLGRQPGQQENFVGNVAGHLCNAHPRVRQATYGMFRRVNADLGKRIEKATEKKATEARARL

SEQ ID NO: 7799 - protein, 466 aa, Vibrio vulnificus CMCP6
MAHANHFDVIVIGSGPGGEGAAMGLTKAGLKVAVVEKESSVGGGCTHWGTIPSKALRHAVSRIIEFNSNPLFCKNNSSLHATFSTILGHAKSVIDKQTRLRQGFYDRNQCQLIFGTARFTDAHTISVTQNDGTEEVYTADKFVIATGSRPYQPADVDFNHERIYDSDSILSLKHDPRHIIIYGAGVIGCEYASIFRGLGVKTDLINTRDRLLAFLDNEVSDALSYHFWNSGVVIRNDETYERIEGTEDGVIVHLQSGKKMKADCLLYANGRTGNTDKLNLPAVGLQGDSRGQLKVDGNYQTEVEHVYAVGDVIGYPSLASAAYDQGRFVAQAITKGKADGYLIDDIPTGIYTIPEISSVGKTEQELTAAKVPYEVGRSSFKHLARAQIAGKDIGSLKILFHRETKEILGIHCFGERAAEIIHIGQAIMEQKGEANTIEYFVNTTFNYPTMAEAYRVAALNGLNRLF

SEQ ID NO: 7800 - protein, 763 aa, ASPERGILLUS NIDULANS FGSC A4
MGPTQLPASTSPTLTLAHPTVAETQQIWSQTSDIWTDALSVPQYLEEYAYLLTVPLARDHGITQWILVDSLDKPTVPANDLNGREGTRRILASCETFRKRALLANRLASDDTKNRCTDILVHGVASVFCDPQLRGRGYASRLFKELSHILPQWQAGEVEKPRGVGSVLYSDIDPAFYKRQGWVPFPSYHLEFEPVQLEHTAEPLYAENLASLCQRDEEILRASMSSPSTMGDRGKTRFAIIPDHDHMLWHHAKEEFGAHKLFGGSKKPEIKGAIAGPAGNRVWAIWMHRFYRHPQGNDSAANTLYILRLVTETPSPASESIRAVLRAAQSEAANWGLGKVKLWNPPRDLEEAIRASGVKFEKKKREQDSVPCLNWFGEESPDEMEWVLNENVQSTRVPSDIKLAINMSSTTHSPIPPTMKSWLYSSTQPSVISNLSFTASAPSPPLPSYANQLLIKVFTTSLNPADHKVPQHATIPFTGGRTLICGLPASPGLDFAGKIVSVHPKNRTEFEPGQLVYGCLARPRTFGTTGEYILADANDVAHLPEGVSVDDAACLGVAVRTAYQSLKNYLDLSKFEGGSGPRVFINGGSGGCGVFAIQIAKMLGCQVTTTCSGRNIELVRDLGADEIIDYTTTNVTETLKTKGLVYDHVIDHIGLPGNLYAECHHFLKPSGVWVQVGAGSILTAFWRAITPRFLGGGRRWFVPLMMANSKEDLVEVGNLLKEGKLRTVKDGNRVWEFGDVKKAYELLASGRARGKIVIRVAED

SEQ ID NO: 7801 - protein, 377 aa, Saccharomyces cerevisiae
MPHSVTPSIEQDSLKIAILGAAGGIGQSLSLLLKAQLQYQLKESNRSVTHIHLALYDVNQEAINGVTADLSHIDTPISVSSHSPAGGIENCLHNASIVVIPAGVPRKPGMTRDDLFNVNAGIISQLGDSIAECCDLSKVFVLVISNPVNSLVPVMVSNILKNHPQSRNSGIERRIMGVTKLDIVRASTFLREINIESGLTPRVNSMPDVPVIGGHSGETIIPLFSQSNFLSRLNEDQLKYLIHRVQYGGDEVVKAKNGKGSATLSMAHAGYKCVVQFVSLLLGNIEQIHGTYYVPLKDANNFPIAPGADQLLPLVDGADYFAIPLTITTKGVSYVDYDIVNRMNDMERNQMLPICVSQLKKNIDKGLEFVASRSASS

SEQ ID NO: 7802 - protein, 252 aa, Lactococcus lactis subsp. lactis
MCYNKSMTKVNEERVQEIFNSISSDYDKMNAIISFKQHDLWRAKTMKRMGDLTGLSILDLCCGTGDWTFDLSESVGPSGKVIGLDFSENMLEIAKAKLKEEAKKNIEFLQGNAMALPFEKGSFDVVTIGYGLRNTPDYLTVLKEIFRVLKPGGRVVCIETSHPTLPIYKQAFELYFKNVMPFLGKVFAKSLKEYQWLQKSAEDFPDAKTLEELFRKAGFVAVEYQKHGGGAIASHFATKSQKPKSNIRIGKK

SEQ ID NO: 7803 - protein, 430 aa, Enterococcus faecium
MSFQRPKGTNDILPGESEKWQFVEETARLLFRDYQYNEMRTPIFEHYEVISRSVGDTTDIVSKEMYDFYDKGERHVTLRPEGTAPIVRSFVEHKLFGPEYAKPFKTFYMGPMFRYERPQKGRLRQFHQIGVEAFGSENPATDVESMVMALDFFKQLGITQIRLVINSLGDKETRQAYRQALIDYLLPFESELSEDSKRRLHENPLRVLDSKDKRDQKFVAEAPSILDYLSEPAQKHFDTVVSMLDALAVPYEIDSNMVRGLDYYTHTIFEIMSDAPKMGAQATICAGGRYDNLVEELGGPSTPGFGFAMGIERLLLTMEAEEVVIPAFNELDAYVVALGDETNIEALKVVQAIRNFGFSADRDFMNRKAKAQFKTADKANAKLVLVIGEDELASQTINVKAMASRKEKSFPLEEIYEHFDEVYDEMTLFE

SEQ ID NO: 7804 - protein, 398 aa, Oryza sativa
  unsure (1)..(398): unsure at all Xaa locations
MASAVTISSVGAQAGMISKPRNHGFTSYSGLKAASSVSFESGSSFLGRNASLRASVAPRIVPKAKSGSQISPEASYKVAVLGAAGGIGQPLGLLIKMSPLVSELHLYDIANVKGVAADLSHCNTPSQVLDFTGPSELANCLKGVDVVVIPAXGVPRKPGMTRDDLFNINASIVKSLVEAVADNCPEAFIHIISNPVNSTVPIAAGFXETKGVYNPKKLFGVTTLDVVRANTFVAQKKNLKLIDVDVPVVGGHAGITILPLLSKTMPSVTFTDEETEQLTKRIQNAGTEVVEAKAGAGSATLSMAYAAARFVESSLRALAGDPDVYECTFVQSELTELPFFASRVKLGKNGVESIISADLEGVTEYEAKALEALKSELKASIEKGIEFVHKQQTAAASV

SEQ ID NO: 7805 - protein, 312 aa, Magnetococcus sp. MC-1
MGKVAFLFPGQGSQAVGMGQALHGADASCAALFEEANTVLGEDLRGLMFDGPEADLTLTRNTQPALVVTAMAAYTLLRQQSDLQADFVAGHSLGEYAAICAAGGLSFADAIRLTRLRGDAMQKAVPVGVGAMAAMLNMEAALVEEVCQAASQALGQVCVPANYNTPAQIVISGDKAAVEHAVALAKERGAKRCVMLSVSAPFHCPLMQPAADAMAQALAQTPMQDLSIPLVANVNAGITTDAETVRQQLVAQVCGSVRWEASIRAMIAQGVDRFVEIGTGKVLTGMLKRIDGSVRGVAVNGPEDMAALAELL

SEQ ID NO: 7806 - protein, 175 aa, Nicotiana tabacum
MASTLKYSMIIFFASALFLQGTLGNFICEDLPTNVCGFAIATSGKRCLLENSAGEDGKVEYQCKTSEVIVGNMKEHIETDECVDACGCDRNSVGISSDALLDSQFTFKLCSPACYQKCANIVDLYFNLAAGEGVYLPDLCNKQRTNPHRAMIELSSNGAALEDVADAPAPSPVSF

SEQ ID NO: 7807 - protein, 351 aa, Pseudomonas aeruginosa UCBPP-PA14
MFPKNAWYVACTPDELAGKPLGRRICDEPMVFYRGEDGRVAALEDFCPHRGAPLSLGFVEDGVLVCGYHGLAMGEDGRTRAMPGQRVRGFPCIRRFPVQERHGFVWVWPGAEEQADAALIPRLEWAESPDWAYGGGLYHIHCDYRLMIDNLMDLTHETYVHASSIGQKEIDEAAPTTRVEGDEVITSRHMQNVMAPPFWRMALRGNGLADDVAVDRWQICRFTPPSHVLIEVGVAHAGHGGYQAPAERKAASIVVDFITPESATSIWYFWGMARNFQAHDQALTESIREGQGKIFGEDLEMLESQQRNLLRHPRRDLLKLNIDAGGVQARRIIERLLADERQAAAPNRAQA

SEQ ID NO: 7808 - protein, 533 aa, Pisum sativum
MWDLNGSPSKRKDQESEGCSSPKTSLDGDEDKAKRVGVGGSVSNSSSSAIVIEEDSEEDNNNNNNRSMVKKKNSKIFGFSVTQEQEQEQEEEESLDSENFPVTRNFFPMDQEAENMVVASSGGNGTSSCSSTFPRAHWVGVKFCQSETLGSGKSMEVSSSSQPMKKSRRGPRSRSSQYRGVTFYRRTGRWESHIWDCGKQVYLGGFDTAHAAARAYDRAAIKFRGVEADINFNIEDYEEDLKQMSNLTKEEFVHVLRRQSTGFPRGSSKYRGVTLHKCGRWEARMGQFLGKKYVYLGLFDTEVEAARAYDKAAIKCNGKEAVTNFEPSIYDSELNTAEPASSGSDHNLDLSLGNSSSKHMNNTQSFGNNTSNVANHDQSNWQNGGNINKPKLVNILPKPYNRPNNMEPYGRDLHGENEALRMLSQTHLQSSSPNGIHRYGSLSRSTTNVHSFAHTNHQPPNFHFPSSSYGGRVGSDLSLSTNNHQQQQQQWQPGSHYLSSAAAASSGFPPQIRTPSSQTWLHKNGFHTLMRPS

SEQ ID NO: 7809 - protein, 221 aa, Glycine max
SRGRPTRPRTRGRTRGRTRGLHCASLAATISSVCSINEATHKSRTLQKRVNSDAPIKLSTEFLSHDSLEPTTKPCFCGRRHFIEAATLGTTLFPIQPSRATNPPREYTALLKKFHPPRPDWYEEFYASVMNSATKDYEAEVAMYKSQIFGNLKGKGLRILEIGIGTGPNLSYYASGSGVEVVGIDPNPKMEKYARSSAASAGLPTSNFEFIQAVCMLFSLV

SEQ ID NO: 7810 - protein, 121 aa, Glycine max
KVVWVAQLFCWIGQFIGQAVFKKGAPVLWATLPQAFLRAPFFGLLRVLQFVGIDPYPGSNPRGRAGINANSNQGQAKNQKNLFYPEQVSSKGNVMDPSTSPKVKTHRFFPDPLFTKKKKKK

SEQ ID NO: 7811 - protein, 169 aa, Sinapis alba
MASPDVEYRCFVGGLAWATDERSLETAFSQFGELVDSKIINDRETGRSRGFGFVTFKDEKSMKDAIEGMNGQDLDGRSITVNEAQSRGSGAGGGGRGGGGGYRGGGGYGGGGGGYGGGRREGGGYSGGGGGYSSRGGGGGGYGGGGRRDGGGYGGGEGGGYGGGGGGGW

SEQ ID NO: 7812 - protein, 512 aa, Psychrobacter sp. 273-4
MKIRSQVGMVLNLDKCIGCHTCSVTCKNVWTSREGMEYAWFNNVESKPGIGYPKEWENQTKWKGGWIRNANGTINPRIGGKFRVLANIFANPDLPEIDDYYEPFDFDYQHLHTAPISNHQPIARPRSLISGKRMQKIEWGPNWEEILGTEFEKRRKDKNFDNIQADIYGEYENTFMMYLPRLCEHCLNPTCVAACPSGAIYKREEDGIVLIDQEKCRGWRMCISGCPYKKIYYNWKSGKSEKCIFCYPRIEAGLPTVCSETCVGRIRYLGVLLYDADKIAEAASTPNEKDIYPAQLDLFLDPNDPVVIAQALKDGVPQSVIDSAQRSPVYKLAVEWKLALPLHPEYRTLPMVWYVPPLSPIQNAAEAGKVGMDGLIPDVDSLRIPLRYLANLLTAGDEEPVRLALKRLLAMRSYKRMQLVEKQEVQSILDDVGLTKIQVEEMYRYLAIANYEDRFVIPTAHREEALSDAFAERGGCGFTFGEGCSGSTDNSMFGQRKTNRRDFIDTVQKWES

SEQ ID NO: 7813 - protein, 251 aa, Yersinia pestis CO92
MVDQEKETTHFGFRTVAKEQKEGMVAEVFHSVAAKYDLMNDLMSFGVHRIWKRFTVDCSGVRRGQRVLDLAGGTGDLTAKFSRLVGEQGEVILADINESMLRMGREKLRDKGIVGNVSYVQANAEALPFPDNFFDCITISFGLRNVTEKEKALRSMFRVLKPGGRLLVLEFSKPLLEPLSKAYDAYSFHILPKIGELVAQDAESYRYLAESIRMHPDQETLKGMMADAGFENVTYSNLTGGIVALHRGFKF

SEQ ID NO: 7814 - protein, 352 aa, Desulfovibrio desulfuricans G20
MSNPMNFAFLRKSPLPPNGRKVGIIGAGPSGLAACGYLACLGYEVVVYDKLPQPGGLMVFGIPRKRIPPERIRAGVRRMERQFGVVFRTKTKICCSAPLHEEEGDHFSCDIRGLGELVEEHDAVMICTGSWKSRKLGIPGENLAGVHSGLEFLFPIRAAKYASPNVTMPDVRGKRVAVVGAGHSAVDVVDSAHALGAAKIYMIYRRTAREAPCGSFEIDRICEMGAEWLERRTPLRVEGECGVQRLELANGMTGEAEHLDVDMLITAIGEIPTPPFQQELGLENVRKGEVRWLHMTSIENVFVAGDVLTGPSKIGKAVYSGLRASRSLTNWLDLKAQNREGEYRYDEDRIVP

SEQ ID NO: 7815 - protein, 215 aa, Glycine max
PNTALDREFVFRKTFAGEFPNATMVYFQLVFAAITLILIAGALLGRMNFYAWMLFVPLWVTFSYTICAFSIWSTDGWLFKMGLIDYSGGFVIHLSSGVAGFVAACWVGPRAVKDRERFPPNNILLMLAGAGLLWMGWSGFNGGDPYAASIDASLAVLNTHVCTAMSLLTWLFLDILFFGKPSVIGATQGMITGLVCITPCCRVVQGWAAIIMGND

SEQ ID NO: 7816 - protein, 124 aa, Streptomyces chrysomallus
MSIEKPEVDFPGGEPPADLAIKDIWEGDGPVAQAGQTVSVHYVGVAFSTGEEFDASWNRGTPLQFQLGAGQVISGWDQGVQGMKVGGRRELIIPAHLAYGDRGAGGGKIAPGETLIFVCDLVAV

SEQ ID NO: 7817 - protein, 191 aa, Glycine max
MGLLDLEKHFAFYGAYHNNAFNVAIHMLFVWPILFTGQMILYFTPPLLTLGFLPSVLLLNWGFFSTLFYALFYVALDYKAGSLAAFLTFFCWVASSFVSSSLGFSLAWKVVLAAQLFCWTGQFIGHGVFEKRAPALLDNLAQAFLMAPFFVLLEVLQFVGYEPYPGFKTRVKARIDADIKQWQAKKQKKHS

SEQ ID NO: 7818 - protein, 357 aa, Picea abies
MGSLESERTVTGYAARDSSGHLSPYTYTLRNKGPEDVIVRVIYCGICHSDLVQMHNEMGMSNYPMVPGHEVVGVVTEIGSEVKKFKVGEHVGVGCIVGSCRSCSNCNGSMEQYCSKRIWTYNDVNHDGTPTQGGFASSMVVDQMFVVRIPENLPLEQAAPLLCAGVTVYSPMKHFGMTEPGKKCGILGLGGVGHMGVKIAKAFGLHVTVISSSDKKKEEALEVLGADAYLVSKDAEKMQEAAESLDYIMDTIPVAHPLEPYLALLKTNGKLVMLGVVPEPLHFVTPLLILGRRSIAGSFIGSMEETQETLDFCAEKKVSSMIEVVGLDYINTAMERLVKNDVRYRFVVDVAASNLDK

SEQ ID NO: 7819 - protein, 201 aa, Moorella thermoacetica ATCC 39073
MINKLVLATKNAGKAREFRELLQDLGVEIETLLDFPGFNLPPETGSTFVDNALFKARLTASMTGLPALGDDSGLEVDFLEGAPGVYSARFAGEPTDDRRNNAKLLQLMEGVPWERRTARFRCVLALVTEDGDTHLAEGTLEGLIATEPRGHQGFGYDPLFYLPEYDLTLAELGGEVKNKLSHRARAVKKMWPILRRLWPAK

SEQ ID NO: 7820 - protein, 457 aa, Erwinia carotovora subsp. atroseptica SCRI1043
MQQYLTEARKLSALAVPVIIAQVSQTSMGVVDTIMAGAYSATDMAAVAVGTSIWLPAILFGHGLLLALTPVVAQLNGSGRRDRISHQVRQSFFLAAIISVLTMLVLYQGEYAINLMSNDSPELAAKAIGYLHALLWGVPGYLFYQVLRCQCEGLSKTYPGMMIGFIGLLINIPINYIFIHGKFGMPELGGVGCGVATASVYWIMMLLMMLYTQRASWLRDIRLHRPAFRPDFTVLKRLFGLGLPIALALLFEVTLFAVVALLVLPLGVVNVAGHQIALNFSSLMFVLPLSVGVATTIRVGHRLGEGSVDNARIAAHTGIMAGVALACCTAIFTTLLREPIALLYNQDPLVVAMASQLMLLAAVYQISDAVQVIGTGVLRGYKDTRSIFYITFVAYWVLGLPSGYLLALTDVIVPRMGPAGFWCGFIIGLTAAAVMMVTRIRFLQRQPAARILARAAR

SEQ ID NO: 7821 - protein, 467 aa, Glycine max
  unsure (1)..(467): unsure at all Xaa locations
MASSFLSAASHAVSPSCSLSTTHKGKPMLGGNTLRFHKGPNSFSSSRSRGRISMAVAVNVSRFEGIPMAPPDPILGVSEAFKADNSDVKLNLGVGAYRTEELQPYVLNVVKKAENLMLERGDNKEYLPIEGLAAFNKATAELLLGADNPAIKQQRLHPXVATVQGLSGTGSLRLGAALIERYFPGAKVLISAPTWGNHKNIFNDASVPWSEYRYYDPKTVGLDFEGMIEDIKSAPEGSFILLHGCAHNPTGIDPTPEQWEKIADLIEEKNHIPFFDVAYQGFASGSLDEDAASVRLFVARGIEVLVAQSYSKNLGLYAERIGAINVISSSPESAARVKSQLKRIARPMYSNPPVHGARIVADVVGNPVLFNEWKAEMEMMAGRIKNVRQQLYDSITSKDKSGKDWSFILKQIGMFSFTGLNKNQSDNMTNKWHVYMTKDGRISLAGLSLAKCEYLADAIIDSYHNVS

SEQ ID NO: 7822 - protein, 425 aa, Oryza sativa
  unsure (1)..(425): unsure at all Xaa locations
IRGAGRGAVRXRGGTRRGRXASLFGHVXEPASKDPILGVTEAFLADXSPDKVNXGVGAYRDXNXKPVXTRXTCAPAGRRXIAGNLNMEYLPMXGGSIKMIEESLKLAYGEDSDFIKDKRIAAVQALSGTGACRLFADFQRRFLPNSQIYIPTPTWSNHHNIWRDAQVPQRTFTYYHPESRGLDFAGLMDDIKNAPNGSFFGRLPGPPSPPGVDPTEEQWREISYQFKIKNRFPFFDMAYQGFASADPERDAKAIRIFLGDGHQIGCAQSYAKNMGLYGQRAGCLSILCEDEMQAVSVKSQLQQIARPMYSNPPVHGALVVSIILNDPELKSLWLKEVKGMADRIIGMRKALRENLEGLGSPLSWDHITNQIGMFCYSGMTPEQVVRLTNEYHIYMTRNGRISMAGVTTGNVAYLANAIHEVTKTK

SEQ ID NO: 7823 - protein, 298 aa, Saccharomyces cerevisiae
SIPETQKLEYKDIPVPKPKANELLINVKYSGVCHTDLHAWHGDWPLPTKLPLVGGHEGAGVVVGMGENVKGWKIGDYAGIKWLNGSCMACEYCELGNESNCPHADLSGYATADAVQAAHIPQGTDLAEVAPVLCAGITVYKALKSANLMAGHWVAISGAAGGLAKAMGYRVLGIDGGEGKEELFREKDIVGAVLKVSVSEAAIEASTRYVRANGTTVLVGMPAGAKCCSDVFNQVVKSISIVGSYVGNRADTREALDFFARGLVKSPIKVVGLSTLPEIYEKMEKGQIVGRYVVDTSK

SEQ ID NO: 7824 - protein, 385 aa, Cytophaga hutchinsonii
MKAAVFHKPGHISVDTVEDPKIEKSDDIILKVTSTAICGSDLHIYDGFFPQARPLIMGHEFMGIVEEVGNAVTHLKAGDRIVVPFPIACGHCYFCNHDMQPNCEHSNPEHYGPEGDVLSGKGGGLFGYTDLYGGYAGGQAQYVRVPYADYSPRLVPESLSDEQVLFLTDIFPTGWSAIDWAQLKGGETVAIFGSGPVGLMAQKAAWLKGAGRVIAIDPLNYRLAKAKMVNNVETLNPHEVDVIEAIRAMTNGRGADVCVDAVGVEAERTFFDKVKAVVRFEKGTDKVLENCFKAVRRGGTVTVVGVYGTPYDNFPLHTMFDKGLTVRLGQAPVQKYIDHLFTLVQNEKVVLNDIVTHVLPLSHASHAYDIFKNKQEDCVKVILKP

SEQ ID NO: 7825 - protein, 492 aa, Suaeda maritima subsp. salsa
MDPYKFRPSSANNSPYFTANSGAPVWNNNNSLTVGHRGPILLEDYHLVEKLANFDRERIPERVVHARGASAKGFFEVTHDVSHLTCADFLRSPGVQTPVIVRFSTVIHERGSPETIRDPRGFAVKFYTREGNFDLVGNNFPVFFIRDGMKFPDMVHSLKPNPKSHIQENWRIMDFFSHHPESLHMFTFLFDDIGIPANYRHMEGSGVNTYTLINKAGKTYYVKFHWKPTCGVKSLLEDEAIKVGGANHSHATQDLYDSIASGNYPEWKLFIQTIDPADEDKFDFDPLDVTKTWPEDILPLQPVGRLVLNKNIDNFFAENEQLAFCPSIVVPGVHYSDDKLLQTRIFSYSDTQRHRLGPNYLQLPVNAPKCSHHNNHYDGFMNFMHRDEEVDYFPSRYDPVRHAERYPIPSNVLNGCREKQCIPKENNFKQPGERYRSMDPARQERFICRVVDALSDPRVTHEIRSIWISYWSQADKSLGMKVASRLNVRPTM

SEQ ID NO: 7826 - protein, 284 aa, Saccharomyces cerevisiae
SIPETQKLEHKDIPVPKPKANELSINVKSGVCHTDLLPLVGGHEGAGVVVGMGENVKGWKIGDYAGIKWLNGSCMACEYCELGNESNCPHADLSGYTHDGSFQQYATADAVQAAAEVCAGITVYKALKSANLRVAISGVAGGLGSLAVQYAKAMGYRVLGIDGGEGKSIGGDVFIDFTKEKDIVSAVLKAINVGAHGVIAIEASTRYVRANGTVVLVGLPAGAKCSSDVFNHVVKADTREALDFFARGLVKSPIKVVGLASLPEIYEKMEKGQIAGRYVVDTSK

SEQ ID NO: 7827 - protein, 214 aa, Shigella flexneri 2a str. 301
MPIALPHALAEPSLLEQLLPKLDGIYLPSSPSNVQPHLYGENGDEPDADPGRDLLSMAIINAALERRIPIFAICRGLQELVVATGGSLHRKLCEQPELLEHREDPELPVEQQYAPSHEVQVEEGGLLSALLPECSNFWVNSLHGQGAKVVSPRLRVEARSPDGLVEAVSVINHPFALGVQWHPEWNSSEYALSRILFEGFITAWQHHIAEKQRL

SEQ ID NO: 7828 - protein, 235 aa, Methanococcoides burtonii DSM 6242
MKGIILAGGTGSRLYPLTKVTNKHLLPVYDKPMIYYPLQTLLDAGINDIMIVSGRGHAGHFLELLGSGSDFGARFTYEIQDEAGGIAQALNLTRDFADDDDITVILGDNIFQDIIRDAVQSFKTGAQIFLKQVPDAARFGVAEIDESSRQVLSIEEKPEVPKSDYAVTGLYVYDSSVFEIIQTLKPSGRGELEITDVNNEYIRQGLMKYSEIEGQWTDAGTFDSLLRAGLMVQKG

SEQ ID NO: 7829 - protein, 610 aa, Pseudomonas aeruginosa UCBPP-PA14
MCGLAGWVDYTRKLDDEFPAIFAMTDTLALRGPDAEGIWKHRNALLGHRRLAVIDLSGGVQPMSYRFPTGQEVTLVYTGEVYNHDALRERLRRAGHEFRTRSDTEVVLHAYLQWGERCCEYLTGMFAFAVFDGRDGHLLLVRDRLGIKPLYYARHREGLLFGSEIKSILAHPEFAARLDAVGLVDLLTLSRGTSQTPFREVQELLPGHLLSWRPNSQAKLRRYWEVRRQEHADDLQSTVQRTRELVTRALGSQLHADVPVCSLLSGGLDSTALTGIAQRIAKAEHGGDINSFSVDFVGQAEQFRSDDLRPDQDQPFALLAAQYIGSRHRTVLIDNAELVCERAREEVFRAKDVPFTFGDMDTSLHLMFGEIRRHSTVAISGEGADELFGGYGWFRDPQAVAAARFPWASRVRLPAGFIDAGFNRRCDLLQYQQASYDDGLRQVEHLAGDSPEERRMREFSHLHLKRWMVLLLERKDRLSMCNGLEVRVPYTDHELVEYVYNVPWSIKSRDGEEKWLLKRACADYVPEAVLKRRKSPYPTSANLGYERFLRGSVRRLLEDAANPVFGIVSREFLAAELEHPEGYFNTQVSRHNLETALALEGWLRLYGLSA

SEQ ID NO: 7830 - protein, 554 aa, Vibrio vulnificus YJ016
MCSVFGILDIKSDAAALRPIALEMSKKLRHRGPDWSGIYASDRAILAHERLAIVGLNSGAQPLYSPDKKLILAVNGEIYNHKEIRARYEGKYDFQTDSDCEVILALYQEMGADLLEELNGIFAFVLYDEEKDQYLVGRDHIGIIPLYQGYDEHGNYYVASEMKALVPVCKTISEFPPGSYYSSTDAGPQRYYIRDWNEYAAVQGNTSSKEELTAALEAAVKRQLMTDVPYGVLLSGGLDSSITSAVAKRYAAMRIEDDEQTEAWWPQLHSFAIGLDGAPDLKAAREVAAKIGTVHHEMTYTIQEGLDAIRDVIYHIETYDVTTIRASTPMYLMGRKIKAMGIKMVLSGEGADEIFGGYLYFHKAPNAQEFHEETVRKLLALNMFDCARANKSLAAWGVEGRVPFLDKEFIDVAMRLNPADKMCGNGKMEKHILRECFEHYLPDSIAWRQKEQFSDGVGYGWIDTLKAVAEEKVTDQQMEAAKFRFPYNTPTTKEGYVYREIFEELFPLPSAAECVPGGPSVACSSAKAIEWDESFKNCIDPSGRAVKAVHNEAY

SEQ ID NO: 7831 - protein, 527 aa, Shigella flexneri 2a str. 301
MSPEINGHAARGSLRPDVHKLHISDRRETGVIMNFHHLAYWQDKALSLAIENRLFINGEYTAAAENETFETVDPVTQAPLAKIARGKSVDIDRAVSAARGVFERGDWSLSSPAKRKAVLNKLADLMEAHAEELALLETLDTGKPIRHSLRDDIPGAARAIRWYAEAIDKVYGEVATTSSHELAMIVREPVGVIAAIVPWNFPLLLTCWKLGPALAAGNSVILKPSEKSPLSAIRLAGLAKEAGLPDGVLNVVTGFGHEAGQALSRHNDIDAIAFTGSTRTGKQLLKDAGDSNMKRVWLEAGGKSANIVFADCPDLQKAASATAAGIFYNQGQVRIAGTRLLLEESIADEFLALLKQQAQNWQPGHPLDPATTMGTLIDSAHADSVHTFIREGEGKGQLLLDGRNAGLAAAIGPTIFVDVDPNASLSREEIFGPVLVVTRFTSEDQALQLANDSQYGLGAAVWTRDLSRAHRMSRRLKAGSVFVNNYNDGDMTVPFGGYKQSGNGRDKSLHALEKFTELKTIWISLEA

SEQ ID NO: 7832 - protein, 254 aa, Triticum aestivum
  unsure (1)..(254): unsure at all Xaa locations
MDVKCRRLEGKVAVVTASTQGIGLAIAERLGLEGAAVVISSRKQKNVDEAVEGLRAKGITVVGAVCHVSNAEQRKHLIDTAVKNFGHIDIVVSNAAANPSVDSILEMKESVLDKLWDINVKASILLLQDAAPHFRKGSSVILTSSIAGXNPDAALTMYGVTKTALFGLTKALATEMGPNTRXVNCIAPGFVPTRYAGFLTTNETIKNELIDRGILKRLGSVEGMASRVTCLASDDASFITAETIVVDGGTQSRL

SEQ ID NO: 7833 - protein, 319 aa, Bacillus cereus ATCC 14579
MKRIGVLTSGGDSPGMNAAIRAVVRKAIFHDIEVYGIYHGYAGLISGHIEKLELGSVGDIIPRGGTKLYTARCLEFKDPEVRLKGIEQLKKHGIEGLVVIGGDGSYQGAKKLTEQGFPCVGVPGTIDNDIPGTDFTIGFDTALNTVIDAIDKIRDTATSHERTYVIEVMGRHAGDIALWAGLADGAETILIPEEEYDMDDVIARLKRGSERGKKHSIIVVAEGVGSAIDIGKHIEEATNFDTRVTVLGHVQRGGSPSAQDRVLASRLGARAVELLIAGKGGRCVGIQDNKLVDHDIIEALAQKHTIDKDMYQLSKELSI

SEQ ID NO: 7834 - protein, 275 aa, Bdellovibrio bacteriovorus HD100
MNPLLKSQKIGFLGAGNMAQAMIKGLIEGGFPAKNIFASNRSEGKLHKLAETFKINPVFSNDELVDTCDIIILAIKPQDLLQALEPVTRSFDEHKIVISVAAGIRMEKLERYVQGARLARVMPNTPSLIGRGVIGYLLNDDDDSGLDSTVEDLFQPLGRVIQVHDEDQFEALMVSCSSGTGFVFEMMMYWQDWIEEHGFSVEEARMMTIETFVGASLLAAQAREGVEDLQARVTSKKGVTAAGLQSMRELEIERALRISFEKAAMRNKEMAREIK

SEQ ID NO: 7835 - protein, 221 aa, Gossypium herbaceum
DVYYWECKGYTPLFPRILGHEASGIVESVGEGVNDLKPGDHVLPIFTGECKECRHCLSEESNNMCELLRINCDRGVMLADGKTRFSINGKPIYHFVGTSTFSQYTVVHVGQVAKISPTAPLDKVCPISCGICTGFGATVNVAKPKKGQTVALFGLGAVGLAAAEGARVCGASRIIAVDVNPRRFEEAKRFGITEFVNPKDYDKPVQEVIVEMTGGGVDRSV

SEQ ID NO: 7836 - protein, 221 aa, Gossypium raimondii
DVYYWECKGYTPLFPRILGHEASGIVESVGEGVNDLKPGDHVLPIFTGECKECRHCLSEESNNMCELLRINCDRGVMLADGKTRFSINGKPIYHFVGTSTFSQYTVVHVGQVAKISPTAPLDKVCPISCGICTGFGATVNVAKPKKGQTVAVFGLGAVGLAAAEGARVCGASRIIAVDVNPRRFEEAKRFGITEFVNPKDYDKPVQEVIVEMTGGGVDRSV

SEQ ID NO: 7837 - protein, 353 aa, Candida albicans SC5314
MTVKSKFTHLTKEEPDPIIKTLTQYHQDQSPNKLDVSIGVYKSPDGLLYTFPSIIEAKEIYHNEKNYGHNYTTMSGIKEFINGSQQLLFGKDVITSDGEKKIASIQTIAGTGAIHMGLLFFMEAGYKNFYLGLPSWSNYIPMIETVGGKVNTYEYYNTANGEINFDTVKKTLIEAPKNSVFIFQTCCHNPTGADFNNDQWIEVVKLIKQYDHLVLMDTAYLGFSSGDLIKDSWILRYMYEEAEIEFVVAQSFSKNMGLYGERLGAVHVIVQDENYVDHAQSTLVANFRHECSFAPSFGARLAQIIFENDKLYQQWTKEVNQVTQRLQNLRQLVYQTLIKLETPGNWKTVINKK

SEQ ID NO: 7838 - protein, 405 aa, Magnetococcus sp. MC-1
MNPEMARLNPYPFEKLAVLFEGITPNGALSPLNISIGEPKHPTPAFVTQRMMEALQDGDMAKYPTTRGERALRESMAAWLTRRFELQAGSVDPDRHVLSANGTREAIFSVALAVVDRAKGGVVLTPNPFYQIYEGACFMAGVEPVHIDATEETHLRPPFTQLDAELLARTQMVYLCSPSNPTGAVHPLEELQELIRLADTYDFVICADECYSEIWYDAPPPGLLQACAAMGRHDFARCLVFHSLSKRSNMPGARTGFIAGDAQLLDHYFKLRTYTGCATPPFIQKAAIAAWDDEQHVEENRRAYRAKLEESMAILSPVLPVTRPEASFYLWLKVPGGGALFARTLYEKYNVVVLPGGYLGRQGAHGNPADGYIRIALVATLEQNREAMHRIAQCAQEMIGQSQAV

SEQ ID NO: 7839 - protein, 369 aa, Synechocystis sp. PCC 6803
MKSRAAVAFEVGKPLQIVEIDVAPPQQGEVLVKITHTGVCHTDAFTLSGDDPEGLFPVVLGHEGAGIVVEVGEGVTSVQLGDHVIPLYTAECGKCLFCRSGKTNLCVAVRATQGKGVMPDGTSRFSYNGQSLYHYMGCSTFSEYTVVAEVSLAKINPEANHEHVCLLGCGVTTGIGAVHNTAKVQPGDSVAVFGLGGIGLAVVQGARQAKAGRIIAIDTNPAKFELAKQMGATDCINPKDHDQPIQQVIVEMTGWGVDHSFECIGNVEVMRSALECAHRGWGQSVIIGVAGAGQEISTRPFQLVTGRKWMGTAFGGVKGRSQLPGMVEQSMRGEIQLAPFVTHTMELKDINQAFDLMHDGKSIRSVIHY

SEQ ID NO: 7840 - protein, 312 aa, Oryza sativa
MGRPPCCVKAEVKKGPWTPEEDLMLVAYVQEHGPGNWRAVPTNTGLMRCSKSCRLRWTNYLRPGIKRGNFTDQEEKLIVHLQALLGNRWAAIASYLPERTDNDIKNYWNTHLKKKLKKMSATGGGGDYGEGGGAGEVKTRAAAPKGQWERRLQTDIHTARQALRDALSLDPSPPAKPLDSSSGATAPPSSQAATSYASSAENIARLLEGWMRPGGGGGKTTTTPSSGSRSSAASVLYGEASHSGGATAPTPDGSTVTSKTKDEETAGAPSSSPPPAFSMLESWLLDDGMGHGEVGLMDVVVPLGDPTNADPL

SEQ ID NO: 7841 - protein, 441 aa, SYNECHOCOCCUS SP. WH 8102
MATHDIFMPALSSTMTEGKIVEWLKQPGDKVGRGESVLVVESDKADMDVESFQDGYLAAVLMPAGSTAPVGETIGLIVETEAEIADAQAKATSAAPAASAPAPTPAPAAVQAPAPTPAPTQAPAAPAPVAASAAPVANGRVVASPRAKKLASQMGVDLSTVRGSGPHGRIQAEDVEQAGGQPISVPRVAEGTAAAVAASAAPSAAAPSAPAGNSFGRPGDTVAFNTLQGAVNRNMEASLAVPCFRVGYTITTDKLDAFSKLVKPKGVTMTALLAKAVAVTLARHPQVNAATTAAGMTYPAEVNVAIAVAMEDGGLITPVLRNADRTDLYEMSRQWKDLVKRSRSKQLQPEEYSTGTFTLSNLGMFGVDRFDAILPPGTGAILAVAASRPTVVAGKDGSIAVKRQMQVNLTADHRVIYGADGAAFLKDLAELIEHRPESLAL

SEQ ID NO: 7842 - protein, 329 aa, Magnaporthe grisea 70-15
MLNTPSDGELTLAVLGCGTMGIAILSGILTSLQDMAASGVLSASASGTSTPVHPEVPDRLPSRFIACVRRPESAKKVKVALAEHLSVVKVVQNDNLASARQAGVVILACKPQMIGDLLSKPGIAEALRGKLLISICAGVTVPQIEGHLEQALGSKDVENPCRVVRAMPNTASMIRESMTVVATTEPPLPPQVSSLVTWIFKRIGDVVYLPASTMDASTALCGSGPAFFALMLEAAVDGAVAMGLPRAEALRMAAQTMKGTAALVQHGDHPALLRDKVSTPGGCTIGGLLVLEEGIVRGTVARAVREATVVASQLGQGVQGVNGTRPMRH

SEQ ID NO: 7843 - protein, 561 aa, Enterococcus faecium
MYTKLLQAIYRDSDLSEKTASMIEQKVSVYQQKKGQAGKLHWDEEDIFLITYGDQFFEEQQPTLRTFKKFYQKYLADTFRVVHFLPFFPYTSDDGFSVVNYQAINDRLGTWEDIEEMRSETRLMFDFVCNHMSAESTWFQEYLNLNDTYKDFFIDLPLDTDTSSVTRPRTSPLLTTFIDKNGKEKHVWTTFSEDQVDLNFKNPEVLLKMIDILLFYLEKGASFIRLDAVGFLWKELGTSCIHLPETHKIIQLFRAIADEAAPGTVLITETNVPHKDNISYFGNGENEAQMVYQFSLPPLTLQAIRSGNTSKLKEWLKTIDFASKKTTFFNFLASHDGIGLNPVRGILPEKTILELVEQLKKEGARVNYKKNPDGTTSPYEINATYLDALSSPTDTTEWRSKRFLAAHSFLVTLPGVPAIYIQSVLGSRNDYKGVEKTGENRKINRQKFLLADIEKELQTDPLRTAVYGELTQMLSIRKKEKAFHPNSLIYLLDSADSFISFIREAKEEKVLVIHNFSNQSAGYLLPKGDYLDLFSGQIIHCSQERKLIFQPYEYMWLKIIK

SEQ ID NO: 7844 - protein, 424 aa, GIBBERELLA ZEAE PH-1
MLSTLRVASRRAARPAQYNLAAIRAASNWANVPQGPPDAILGITEAFKADKFDKKINLGVGAYRDDAGKPYVLPSVREAEMKVVESKLNKEYAGITGVPEFPPAAAKLAYGANSPALDRITITQTISGTGALRVGAAFLAKFFPGEKKIYIPQPSWANHKAVFNHAGLEVEQYRYYDKKTIGLDFEGLIADVKSAPNGSVFLFHACAHNPTGVDPTQEQWKQISDVVKEKGHFAFFDMAYQGFASGDTDKDAFAVRYFVEQGHNIALCQSFAKNMGLYGERIGAFSMVCADADEKKRVDSQLKILIRPLYSNPPIHGARIAAEILNSPTLYKQWLGEVKEMADRIITMRALLKDNLEKLGSKHDWSHITSQIGMFAYTGLTSEEMTRLAEEFSVYATKDGRISVAGITSENVGRLAEAIYKVKG

SEQ ID NO: 7845 - protein, 114 aa, Klebsiella pneumoniae
SLYDIAPVTPGVAVDLSHIPTDVKIKGFSGEDATPALEGADVVLISAGVARKPGMDRSDLFNVNAGIVKNLVQQIAKTCPQACIGIITNPVNTTVAIAAEVLKKAGVYDKNKLF

SEQ ID NO: 7846 - protein, 353 aa, Zea mays
MSPLPISDLQGDSSRFKGHGMLAPFTAGWQSNDLHPLIIERSEGSYVYDINGNKYLDSLAGLWCTALGGSEPRLVKAATEQLNKLPFYHSFWNRTTKPSLDLAQEILSMFTAREMGKVFFTNSGSEANDSQVKLVWYYNNALGRPNKKKFIARSKAYHGSTLISASLTGLPALHQKFDLPAPFFDLPAPFVLHTDCPHYWRYHLPGETEEDFATRLATNLENLILKEGPETIAAFIAEPVMGASGVIPPPKTYFDKVQAVVKKYDILFIADEVITAFGRLGTMFGCDYYNIKPDLVSLAKALSNAYVPIGATLVSPEISDVIHSQSNKLGSFAHGFTYSGHPVACAVAIEALK

SEQ ID NO: 7847 - protein, 380 aa, SYNECHOCOCCUS SP. WH 8102
MSEGLSTRVIHHGESFAGDTGTVMPPIFPTSTFAHGNAGGFDYTRSGNPNFRILDSVLASVEGCAHATVFASGVSAITAVVSQLKQGDLVLCEENLYGCTVRLFEQVFAKFGLKTAWVDFTQPAALEQIQAQTPAMVWLESPTNPLLKVIDLEAVCAITQPLGIPVVVDNTFATALVQRPLDLGATLSLTSTTKYINGHSDALGGAVCTNDHEWHQKMVFSQKALGLQPSPFDCWLITRGIKTLPLRLKQQMANAAALADQLADHAKVNWVRYPHRSDHPQHQVATRQMRAGGAIVTVSFNACQEQTYALCKQLRWFTMAESLGGIESLICHPATMTHAAVSAEVKAKLGIDDGLVRFSVGCEDLADLQADLEQALELLA

SEQ ID NO: 7848 - protein, 253 aa, Glycine max
MALLFKDPSKISAYRDRRFPGTQEEFEHALLTSTTVYVGNMSFYTTEEQVYELFSRAGEIKKIIMGLDKNTKTPCGFCFVLYYSREDTEDVCKYISGTILDDRPIRVDFDWGFQDGRQWGRGRSGGQVRDEYRTDYDPGRGGYGKLVQKELEVQRQLVDYGTGSLGSFPPVIPTSYGRHGGGHGHGGSHRHGRDYYRKRHRDDDRHIHESSKRNSDHESRRNTDHESRPEKNPRFRESGDSDDDEEDDRKRRA

SEQ ID NO: 7849 - protein, 366 aa, Bacillus coagulans
MKMKLAVLPGDGIGPEVMDAAIRVLKTVLDNDGHEAVFENALIGGAAIDEAGTPLPEETLDICRRSDAILLGAVGGPKWDHNPASLRPEKGLLGLRKEMGLFANLRPVKAYATLLNASPLKRERVENVDLVIVRELTGGLYFGRPSERRGPGENEVVDTLAYTREEIERIIEKAFQLAQIRRKKLASVDKANVLESSRMWREIAEETAKKYPDVELSHMLVDSTSMQLIANPGQFDVIVTENMFGDILSDEASVITGSLGMLPSASLRSDRFGMYEPVHGSAPDIAGQGKANPLGTVLSAALMLRYSFGLEKEAAAIEKAVDDVLQDGYCTGDLQVANGKVVSTIELTDRLIEKLNNSAAGPRIFQ

SEQ ID NO: 7850 - protein, 180 aa, Medicago sativa
MALISSAAVTTVNRASSAQANLVAPFTGLKSSAGFPVTKKTNNDITSIASNGGRVNCMQVWPPVGKKKFETLSYLPPLTEEQLAKEVEYLIRKGWIPCLEFELEKGFVYRENHRSPGYYDGRYWTMWRLPLFGATDSSQVLKELADCKAEYPDSFIRIIGFDNVRQVQCISFIAHTPKNY

SEQ ID NO: 7851 - protein, 506 aa, Cytophaga hutchinsonii
MSKQNYDSKFCGSLPISFVNQIQDYGFLLVCDPALIVLQVSDNAEAFTRISYQSFIDKNLKELLTADSFQLLQEKLSSKAQKRFTCTLEFYGGVRTSFLTLIHVKEEYILFEFEPSDDTDIKGFREVYQQIHEASAAIQQSQELGESLSIAVKELKTFSGFDKVMIYKFDEDWNGHVLAEAMEPGMESYLGITFPASDIPKQARELYLKNPYRLIPDREYKPSKLYPVINPASSGFVDLGVCNLRGVIKVHLEYLTNMNVKSSMSTRILKDNTLWGLIACHHREKKFLNFDQCSVFEMFSNVVSTRLSALETEQNLTKTTENQALMNSIIEELYSQTMLINAIDNCAALIMQLLDCTGLVHIRESKVKSFGACPSASSIHELVIWLQMKNFTTLYATAALTEAYEDAAAIASVASGLLAFPVIPDKGEYILCFRAEILQRIDWGGNPNEAIRFNEDMKTYHPRHSFEIWKEEIKSTSQPFQEYEMNFAKELQRIFIETRLKEQNRR

SEQ ID NO: 7852 - protein, 464 aa, Haemophilus influenzae R2866
MNFRLLSQYHADIKKLIKISLPILLAQIAQNSMGLADTIMAGRVSSTDMAAISIGASIWMPLMLFGQGLLLALPPTISYLNGSGQRHRIAHQVRQGIWLVLGVSIPLGLLIYFCEIPLQYMQMESKMSDLARDYLYAMLWGLPAYLMLINFRCLNDGIAKTKPAMVITFLGLLINIPLNYIFIYGKFGIPAFGAVGCGIATAIVNWAMCLMMIFYSYTNTQERSLKVFSQLIEMPNLKTLKKLLRLGLPIAIAICCEVALFALTSLMLSPLGATIVASHQITLNTSSFIFMFPMSIGMAATILVGQALGTGSPQNAKKIGYAALLLGLTVTIITALITIFFRYEIASIFVTDEIVIAMAANLLLFAALYQFSDTIQMVVGGILRGYKDTKMILYITLFSYWVIGVPLGYTLGRTDWLIPHIDAKGFWIAFVVSLTFAAFLLSLRMKKMQAMSDNAILQRLEKLK

SEQ ID NO: 7853 - protein, 181 aa, Lactuca sativa
MASISSSAIATVNRTTSTQASLAAPFTGLKSNVAFPVTKKANNDFSSLPSNGGRVQCMKVWPPIGLKKYETLSYLPPLSDEALSKEIDYLIRNKWIPCLEFELEHGFVYREHHHSPGYYDGRYWTMWKLPMFGCTDSAQVMKEVGECKKEYPNAFIRVIGFDNIRQVQCISFIVAKPPGVL

SEQ ID NO: 7854 - protein, 310 aa, Prochlorococcus marinus subsp. marinus str. CCMP1375
MVSSVIEATAPLRRPVSADKALAASEKLQVKTKKELRYPRKFKRRWGTVGFMGAIHALTIFALLPRFWSLQNIAALLILYWVTACLGVTLGYHRLLSHRAFKVPHWLERFFATCGALSCQHGPIDWVGLHRHHHTFSDTDADHHNSKKGFWWSHMGWMFEPIPALQTVPNFSGDLIQDPYYRFLNKNFLLLQIPLGALLYWIGHGSESGGWSMVLWGIPFRLVVVYHVTWLVNSATHCWGNVAFDSGDGSKNNWWVAALTFGEGWHNNHHAYPSSARQGLFKGQIDLTWQHIRLLHALGLAKKIRLPMKP

SEQ ID NO: 7855 - protein, 180 aa, Stellaria longipes
MASSIMSSAAVATRSNGAQASMVAPFTGLKSNASFPVSRKTNLDITSIASNGGRVRCMQVWPPINMKKYETLSYLPDLSSEQLLSEIEYLLKNGWVPCLEFETEHGFVYREHTSSPGYYDGRYWTMWKLPMFGCTDATQVAAEVQEAKKAYPDAHIRIIGFDNVRQVQCISFIAYKPEAF

SEQ ID NO: 7856 - protein, 345 aa, Streptococcus pneumoniae TIGR4
MKSAVYTKAGQVGLASIERPQIIEADDVIIRVVRACVCGSDLWRYRNPETKAGHKNSGHEAIGIVEEAGEAITTVKPGDFVIVPFTHGCGECDACLAGFDGSCDNHIGNNLGGDFQAEYIRFHYANWALVKIPGQPSDYTEGMLKSLLTLADVMPTGYHAARVANVQKGDKVVVIGDGAVGQCAVIAAKMRGASQIILMSRHEDRQKMAMESGATAVVAERGQEGITKVREILGGGADAALECVGTEAAIEQALGVLHNGGRMGFVGVPHYNNRALGSTFMQNISVAGGAASATTYDKQFLLKAVLDGDINPGRVFTSSYKLEDIDQAYKDMDERKTIKSMIVIE

SEQ ID NO: 7857 - protein, 168 aa, Saccharum sp.
MALTVMASSATAAAPFQGLKSTASLPVARRSTTSLAKVSNGGRIRCMQVWPAYGNKKFETLSYLPPLTQEQLLKQVDYLLRNNWVPCLEFSKEGFVYRENSTSPCYYDGRYWTMWKLPMFGCTDASQVYKELQEAIASYPELRAILGFDNIRQTQWLTFIAYKPAGSE

SEQ ID NO: 7858 - protein, 677 aa, Shewanella oneidensis MR-1
MAELKEVFVPDIGGDEVQVIEICAAVGDTLAAEESILTVESDKATMDIPAPFAGVLAELKVAVGDKVSEGTLIALIQAAGASAQAAAPVAQAAAPAPAPVQAAPAPVVAAPATGATKLVEAKVVEISVPDIGGDTDVSVIEVLVAAGDKIEVDAGLITLETDKATMDVPSPFAGVVKEVKVAVGDKVSQGSLVIMLEVGGAAPAAAPQANAPAASAPVAQAAPAAAVAPVAAVPVVAVKEIQVPDIGDASNVDVIEVLVSVGDMISADQGLITLETDKATMEVPAPFAGKLLSLTVKVGDKVSQGSVIATIETTSVATVSAGAATAPVAQAAAPAPVAQEAAPAPVAAAPSRPPVPHHPSAGAPVSTGAVHASPAVRRLAREFGVDLTQVTGSGRKGRIMKEDVQAYVKYELSRPKATAATSVATGNGGGLQVIAAPKVDFSKFGEVEEIPLSRIQKISGPNLHRNWVTIPHVTQFDEADITEMEEFRKQQNDAAAKKKADYKITPLVFMMKAVAKTLQQFPVFNSSLSSDGESLIQKKYFHIGVAVDTPNGLVVPVVRDVDKKGIIELSRELADISIRARDGKLKSADMQGSCFTISSLGGIGGTAFTPIVNYPDVAILGVSKSEIKPKWNGKEFEPKLMLPLSLSYDHRVIDGAMAARFSVTLSGILSDIRTLIL

SEQ ID NO: 7859 - protein, 475 aa, Shewanella oneidensis MR-1
MSNEIKTQVVVLGAGPAGYSAAFRAADLGLETVIVERFSTLGGVCLNVGCIPSKALLHVAKVIEEAKAVAAHGVVFGEPTIDLDKLRSFKQKVISQLTGGLGGMSKMRKVNVVNGFGKFSGPNSLEVTAEDGTVTVVKFDQAIIAAGSRPIKLPFIPHEDPRIWDSTDALELKEVPGKLLVMGGGIIGLEMGTVYSSLGSEIDVVEMFDQVIPAADKDVVRVFTKQIKKKFNLILETKVTAVEAREDGIYVSMEGKSAPAEPVRYDAVLVAIGRTPNGKLIDAEKAGVKIDERGFINVDKQLRTNVPHIYAIGDIVGQPMLAHKGVHEGHVAAEVIAGMKHYFDPKVIPSIAYTDPEVAWVGLTEKEAKEQGIAYETATFPWAASGRAIASDCSEGMTKLIFDKDTHRVIGGAIVGVNGGELLGEIGLAIEMGCDAEDLALTIHAHPTLHESVGLAAEIYEGSITDLPNPKAKKK

SEQ ID NO: 7860 - protein, 530 aa, Glycine max
  unsure (1)..(530): unsure at all Xaa locations
MVSACVTLKANTHLVKSRKDNTFRQDGGFLGERIKGGLNYSPWIINQLASTSSLRTQEKVNKAKPGVVSAVLTSSNIKESVAFQMPSFLRRKADPKNVVSVILGGGPGIQLFPLTKRAATPAVPVGGCYRLIDIPMSNCINSGLNKIFVLTQFNSASLNRHISRTYFGNGINFGDGCVEVLAATQTQGEAGNNWFQGTADAVRQFTWVFEDAKHTNIENVLILAGDHLYRMNYMXLVQSHVDRNADITVSCAAVGESRASDYGLVKADARGRIIQFSEKPNGADLKAMQVDTSVLGLPLHEAKRSPYIASMGVYVFKTDVLLKLLKWRYPTSNDFGSEIIPAAVRENNVQAYFFIDYWEDIGTIKSFYDANLALTEENPMFKFYDPKTPIYTSPRFLPPTKIDKCRIVDAIISHGCFLRECTVQHSIVGERSRLDYGVELQDTVMMGADYYQTESEIASLLAEGKVPIGIGRNTKIRNCIIDKNAKIGKDVIIMNKDGVQEADRPEDGFYIRSGITVILEKATIEDGTVI

SEQ ID NO: 7861 - protein, 402 aa, Caulobacter crescentus CB15
MADINTPALGESVTEATVARWTKKVGEAVKKDEILVELETDKVSLEVASPADGVLSAIGAAEGATVVPGTVLGVVAEGATASAAPAAAPAPKAEAPKPAPAAPAPAAAPAAAPVSPAPARIAAESGLDLSKVAGTGKDGRVTKGDALAALEARASAPAPAAAAAAPRALHEREERVKMTRLRQTIARRLKEAQNSAAMLTTFNEVDMSAVMALRAQYKDVFEKQHGVKLGFMSFFVKAVVAALKAIPDVNAEIDGQDVIYKNHYDIGVAVGTDKGLVVPVVRDADALNLAGIEKTIGDLGKRARNGQLAIEDMQGGTFTITNGGIYGSLMSTPILNAPQSGILGMHAIKERPMVINGKIEIRPMMYLALSYDHRIVDGAGAVTFLVKVKEAIEDPQRLLLEL

SEQ ID NO: 7862 - protein, 475 aa, Caulobacter crescentus CB15
MARPEGDRPMAQYDVVIIGGGPGGYNAAIRAGQLGLKVAIVEGRGKLGGTCLNVGCMPSKALLHASELYAAATGPEFAKLGIEVKPKLNLSQMMAQKAESVEALTKGVEFLMKKNKVEYVKGWGRIDGVGKVVVKAEDGSETTLETKNIVIATGSEPTPLPGVSVDNKRIIDSTGALSLPEVPKRLVVVGAGVIGLELGSVWKRLGAEVTVVEYLDRILPGTDTEVANAFQKILVKQGFKFQLGAKVTGAEAGAKGVKLSFEPVAGGEAQTIEADYVLVAIGRRPYTQGLGLETVGVTPDKRGMIANDHFKTGVAGVWVIGDVTSGPMLAHKAEDEGVACIEMIAGKAGHVNYGIIPGVVYTSPEVATVGKTEDELKAEGVAYKVGKFPFLANSRAKINHETDGFVKILADAKTDRILGAHMIGPNVGDMIAEYCVAMEFGGASEDVARTCHPHPTRSEALRQAAMGVEGWTMQA

SEQ ID NO: 7863 - protein, 369 aa, Xanthomonas campestris pv. campestris str. ATCC 33913
MKSRAAVAFGPGKPLEIVEIDVAPPQAGEVLVRITHTGVCHTDAFTLSGDDPEGIFPSVLGHEGGGIVEQIGEGVTGVKVGDHVIPLYTAECRKCKFCLSGKTNLCQAVRATQGKGLMPDGTTRFSYNGEPIFHYMGCSTFSEYTVVPEISLAVVNPEAPLEKVCLLGCGVTTGIGAVHNTAKVKPGESVAVFGLGGIGLAVIQGAVQAKAGRILAIDTNPGKFDLARSMGATDCINPKDYDKPIQEVIVELTDGGVDFSFECIGNVNVMRSALECCHKGWGESVIIGVAGAGQEISTRPFQLVTGRVWRGSAFGGVKGRTQLPGMVEQSMKGEIDLDPFITHTMPLEQINEAFDLMHEGKSIRTVIHF

SEQ ID NO: 7864 - protein, 319 aa, Oryza sativa (japonica cultivar-group)
MAAAQGSGVPAALALSSGHTMPSVGLGVWRMDSPAIRDLIHSALRIGYRHFDCAADYQNEAEVGDALAEAFQTGLVKREDLFITTKLWNSDHGHVVEACKDSLKKLRLDYLDLYLIHFPVATRHTGVGTTASALGDDGVLDIDTTISLETTWHAMEDLVSMGLVRSIGISNYDIFLTRDCLAYAKIKPAVNQIETHPYFQRDCLVKFCQKHGILVTAHTPLGGSTANTEWFGSVSCLDDPVIKSLAEKYGKTPAQLVLRWGLQRNTVVIPKTSKEERLQENFAVFDFAISDEDMEKMRSIDRKYRTNQPAKFWGIDLFA

SEQ ID NO: 7865 - protein, 97 aa, Rhodobacter capsulatus
KDRLTQPMLRKTNGVYDKEGEFTPVSWDEAFDIMAEKWKATLKDKGPDGIGMFGSGQWTVWEGYAAAKLMKAGFRSNNLDPNARHCMASAVAGFMRT

SEQ ID NO: 7866 - protein, 144 aa, Zea mays
MAMAALRETSRCLASRGRSAAWRPVLLAQSRGITYKLFVGGLSQFATEASLAEAFSRYGQVIEATVVRDKVTDVPKGFGFVKFASPEEANNAREEMNGKARFAPWKLLALNGRVIYVDIAKARQDRAADALPIARGPPKPISND

SEQ ID NO: 7867 - protein, 392 aa, Gloeobacter violaceus PCC 7421
MVPPVKHRLSERALAVVPSLIRDASRYCDELGALNLAQGLPDFAAPAFLKEAAQRAIAADRNQYCDPWGLAQLREAIAAKCTRDNALAVDPATQVTVCCGATEGINLALMALLDPGDEVVVFSPFYENYRPNLATVEAKPRYVPLSAPDWRVDEAVLERAFAGTAPRAVIVNNPANPTGKVWSRQELELVARYCERHDAYAITDEIYEYILYDGAEHISLASLAGMAERTVTVSGLSKTFCVTGWRLGYVIASEPLTAAIRRLHDFLTICAPAPMQHAAVAALEAPADYYADLRRLYQAKRDRLVTALYRSGFEPVRPAGAYYVWTDAGVLGAKNALAAAGRLAVEAGIAAVPGDCFLPPGHPNCNLRFCYAKSDETLAAAVERLDRWSGHG

SEQ ID NO: 7868 - protein, 604 aa, Mesorhizobium loti MAFF303099
MARLDRGPRMTELPQADVAAVKKPAMVLGGNLDYQDFFENGAIALHLVSADGLILHANKAELDLLGYPAEDYVGRHITEFYPDRDVITNILSRLSRGEQIARYPARLRARDGSIKHVELTSSGHFRDGKLVNTRCFTVDVTDLERTRTELRQQDNAYHQILDGLPVAIYTTDQNGIITYYNRAAADLAGREPQVGKDKWCVTFKLFTTDGKELPHDECPMAVALKENRPVRNQQAIAQRPDGSFFPFMPYPTPLRDEQGGLVGAVNMLLDLTDRQRAEETRQHLSAIVESSFDAIVSKDLNTIIKSWNRGAEKLFGYTASEAIGKSVTMLIPDDHQDEEPRILERLRRGERVDTYETIRRRKDGSLVPVSLTISPVRNATGQIVGASKIARDITSARENEQRIRMLMREVNHRVKNQYSVILSMIRETNKRSETPKQFEAQVRQRIMALSRSHDLLVSADWKGATIRELLAAQAQPFPRGEMIDMSGPSFVLGPNAVQYLGIAFNELATNSAKYGVLSGDDGQISVTWNISGSGTSRLFHLTWAETDGPQVTTIRQGGFGTVVLERVAPEAVGGRGNLEYGSHGITWNLEAPLAGLDRSVANQD

SEQ ID NO: 7869 - protein, 276 aa, Vibrio vulnificus YJ016
MLNMIKKCLFPAAGYGTRFLPATKSMPKEMMPVVNKPLIEYGVEEAIEAGMNGMCIVTGRGKHALMDHFDKNYELEHQISGTSKEALLGDIRQLIDSASYTFIRQREMKGLGHAILTGKELVGDEPFAVVLADDLCVNQDEGVLAQMVALFNQFRCSIVAVQEVPEDETHKYGVISGEMIKDGICRVDNMVEKPEPGTAPSNLAIIGRYILTPDIFELIEQTEPGKGGEIQITDALLKQAKSGCVLAYKFKGQRFDCGSVEGYIEATNYCFENLYK

SEQ ID NO: 7870 - protein, 310 aa, Zea mays
  unsure (1)..(310): unsure at all Xaa locations
METMAKYNRSNPAVKRILQEVKEMQSNPSPDFMALPLEEDIFEWQFAILGPRDSEFEGGIYHGRIQLPXDYPFKPPSFMLLTPSGRFEIQKKICLSISNYHPEHWQPSWSVRTALVXALIAFMPTNPGGALGSLDYKKEDRRXLGIKSREAPPKXGSPERQKLIDEIHEQMLSKAPPVPQTLPNVPNEESNELPASDPSGEHADKVDEGDNTSGSVSDSSSGLPVPESESGVTENTGETSAVEVANHHVPEASHRENIPRVSSSHQNPAVAIQKPKHDRLLTLAAFGLTLAIMALVIKKFLKINGLGRFH

SEQ ID NO: 7871 - protein, 205 aa, Fucus distichus
MSRNDSPFDMQIKLLMIGDTGVGKTCLLLRYANDSFSQTFITTIGIDFKIKNIDLDSKRIKLQIWDTAGQERFRTITTSYFRGAQGILLVYDVTDKKSFNSIRNWVAQIQQHADVAVNKILIGNKCDMDEDREVSKEEGANLAAEYGIQFFETSAKNDINVEKGFITIAREVKDRLMADGPGGGGGHGRTVDINGQASKKKTGCC

SEQ ID NO: 7872 - protein, 164 aa, Triticum aestivum
  unsure (1)..(164): unsure at all Xaa locations
DHVRLHPAAVDDWHKKGGTVLKTTRGGFDLGKIVDGIVARGYTQIYAIGGDGTMRGALAIFEEFKRRGLNISITGIPKTVDNDIGIIDRSFGFQTAVEVAQQAIDAAHVEAVSAVNGVGIVKLMGRSTXHIALHATXSSRDVXCCLIQSGFTWKQGGCSILYNG

SEQ ID NO: 7873 - protein, 390 aa, Methanococcoides burtonii DSM 6242
MTKETTLSKDYNSIVEKDSKYVMQTYTRQPLALESGQGSIVRDIEGREFIDCVAGIAVNNVGHCHPKIVEALSKQAGKLIHTSNLYYTDVQANFAEELVNISGMGRAFFCNSGTEAVEAAMKLARVATGKKEFIATENSFHGRTMGSLTVTYKSTYRKPFEPLIQGERFVPYNSAQAIRDTVTEDTAAVIVEPIQGEGGINVPSDEYLREVREICDENEMLLIFDEVQTGFGRTGKWFCKDHSKVKPDIMTMAKAIGGGFPMGAIVARDGISFEKSQHAATFGGGPLACAAALASINVIRDEKLVERSAEMGQYFMNELNSLDNDSIVEVRGRGLMIGVEINRACADIVDLARDNGILLNCTSEKVIRIAPPLIITKEQIDKVVEIIGQI

SEQ ID NO: 7874 - protein, 695 aa, Psychrobacter sp. 273-4
MNKNIDHTDPAKDMNMERGNGGETHQRAGDDTKILTTQQGVPISDNQNSLKAGPRGPTLLEDFVLREKIHHFDHERIPERIVHARGSAAHGYFELTESLEEYTTAKILTETGKQTPLFTRFSTVAGSKGSKDTPRDVRGFAVKIYTEEGNWDLVGNDMPIFFIQDAMKFPDLVHAVKPEPDRGFPQAASAHDTFWDFVSLSPETMHNVIWLMSDRGIPRSLRMIEGFGIHSYRLINKAGKSTFMRFHWKPVLGVQSTTWDEAVKISGADPDYHRRDLFESINNGDFPEWEFGVQLFTEEEASKFPFDHLDATKMIPEEMVPVKIVGKMVLNRYPDNFFAETEQVAFCPSHVPPGIDFSNDPLLQGRLFSYLDTQLSRLGSPNFAQIPINAPKCPFANNQQDGHMQMQVPKTRVLYEPQSLDPTRPRESVKRGFASFAETLDDGVKGRIRAESFADHYSQPRMFYRSQTTIEQAHIASAYAFELGKVDTAHVRSRTLGHLRNIDEDLASRVAKALGMELPEAADAAAPIQDMEISPAVRTIGLSPKSLKGRMIGILVAEGSKHSEIEKYEKAAQAQGASVKIIAPNKEVTLDDDTIIQADERVAGGPSVMFDAVVSIIMPDQAKKLAKDSATLDWFTDAYVHCKAISYCGATDEFILSKLPIEKDAFVTPLSDLDVFIENAKSRLWEREPKVRDLA

SEQ ID NO: 7875 - protein, 409 aa, Magnaporthe grisea 70-15
MTPSATNGDAAAASSRFHASSTKSAIAAENEYAAHNYHPIPVVFARAQGVNVWDPEGKHYLDLLSAYSAVNQGHCHPELIKALAEQAGRLTLSSRAFYNDVFPVWAAKVRDLFGYDMVLPMNTGAEAVETAIKIARKWAYKVKGVPQGKAHVFSVADNFHGRTIRYNNISDLEIVLEAHGAETAAFIVEPIQGEAGVVVPDDDYLAKVHALCKKHNVLFICDEIQTGIARTGKMLCCNWAGIKPDIVTLGKAISGGMYPVSCVLADKDVMMVVEPGTHGSTYGGNPLGCAVSIRALELVEEGKLADQADHLGRIFREGVEAFKSPIVQQVRGKGLLNAVVIDESAAGGRTAWDLCMLLKSKGLLAKPTHGNIIRFAPPLIITEEELKKALSIIGEALTELPTAEKGDGH

SEQ ID NO: 7876 - protein, 279 aa, Thermosynechococcus elongatus BP-1
MFMTQATVAKPPIAWPTATFIIFVHLGALLAFLPSMFSWQAVLLALVLHWLTAGIGITLGWHRLVSHRSFQVPKWLEYFLVFCGTLSMQGGPIWWVGLHRHHHLYSDQPNDHHDSRKGFWWSHIEWMFHEVPAEAEIPRFTKDIADDPVYRFLDRYFLPIQVVLAIVLYLWGGWPFVVWGIFVRLVTVYHTTWLVNSATHTFGYRTFETTDHSTNCWWVALLTFGEGWHNNHHAYQYSARHGLQWWELDLTWLTIRFLQLLGLAKKVRLVEAPAASCQD

SEQ ID NO: 7877 - protein, 415 aa, Colwellia maris
MTNKIIIPTTGDKITFIDGKLSVPNNPIIPYIEGDGIGVDVTPPMLKVVNAAVAKAYGGDRKIEWLEVYAGEKATKMYDSETWLPEETLNILQEYKVSIKGPLTTPVGGGMSSLNVAIRQMLDLYVCQRPVQWFTGVPSPVKRPSEVDMVIFRENTEDIYAGIEYKAGSDKAKSVIKFLIEEMGASNIRFTENCGIGIKPVSKEGSQRLVRQAIQYAIDNNKDSVTLVHKGNIMKFTEGAFKDWGYELAIEEFGASLLHGGPWCSLKNPNTGKEIIIKDVIADAMLQQVLLRPAEYSVIATLNLNGDYLSDALAAQVGGIGIAPGANLGDEVAVFEATHGTAPKYAGKNKVNPGSVILSAEMMLRHMGWLEADLLLKGMSGAIQAKTVTYDFERLMDDATLVSCSAFGDCIIDHM

SEQ ID NO: 7878 - protein, 339 aa, Magnaporthe grisea 70-15
MSLPSTYKAAIFKAQGQQLTLEDQPMKEPGRGEILVKVEACGVCHSDSFVQNNAFGGGFPRIPGHEIIGRVAAVGPEVSGWEAGQRVGSGWHGGHDGTCKACNKGLHQMCEAKTINGIIKDGGYAEYCIIRSEAAVRIPDHVDAAKYAPILCAGVTTFNSIKRQGIAAGETVAIQGLGGLGHLAIQYSQRMGYRVVAISRGSDKEKAARELGAHEYIDAAKEDPAAALQKLGGAALIVATAPHANAISPLIGGLGLMGKLLLLAVPGDLSVNTNIMIGQGCSVTAWPSGNALDSEEAINFTELQNVDCKVETFPLEKAQEAFNVMMDGSVRFRSVLTMT

SEQ ID NO: 7879 - protein, 300 aa, Xanthomonas campestris pv. campestris str. ATCC 33913
MAADRTAAGTAVRRRQCRGGVRRQRTHVLSSATAGGPHPRNLIGMTVSIPTTPNTRLQGKRCLITAAGAGIGRESALACARAGAHVIATDIDAAALQALAAESDAITTQLLDVTDAAAITALVAAHGPFDVLFNCAGYVHQGSILDCDEPAWRRSFSINVDAMYYTCKAVLPGMLERGRGSIINMSSVASSIKGVPNRFVYGVTKAAVIGLSKAIAADYVAQGVRCNAICPGTIKTPSLGQRVQALGGDEQAVWKSFTDRQPMGRLGDPREIAQLVVYLASDESSFTTGQTHIIDGGWSN

SEQ ID NO: 7880 - protein, 501 aa, Mycobacterium tuberculosis
MSFVVTIPEALAAVATDLAGIGSTIGTANAAAAVPTTTVLAAAADEVSAAMAALFSGHAQAYQALSAQAALFHEQFVRALTAGAGSYAAAEAASAAPLEGVLDVINAPALALLGRPLIGNGANGAPGTGANGGDGGILIGNGGAGGSGAAGMPGGNGGAAGLFGNGGAGGAGGNVASGTAGFGGAGGAGGLLYGAGGAGGAGGRAGGGVGGIGGAGGAGGNGGLLFGAGGAGGVGGLAADAGDGGAGGDGGLFFGVGGAGGAGGTGTNVTGGAGGAGGNGGLLFGAGGVGGVGGDGVAFLGTAPGGPGGAGGAGGLFGVGGAGGAGGIGLVGNGGAGGSGGSALLWGDGGAGGAGGVGSTTGGAGGAGGNAGLLVGAGGAGGAGALGGGATGVGGAGGNGGTAGLLFGAGGAGGAGGFGFGGAGGAGGLGGKAGLIGDGGDGGAGGNGTGAKGGDGGAGGGAILVGNGGNGGNAGSGTPNGSAGTGGAGGLLGKNGMNGLP

SEQ ID NO: 7881 - protein, 240 aa, Triticum aestivum
  unsure (1)..(240): unsure at all Xaa locations
ARGGTAHRAHASTEGVTKYLKPAVAGFLMQKELDYLVGAVANPTKPFAAIVGGSKVSTKIGVIESLLSKVDILILGGGMIYTFYKAQGHAVGKSLVEEDKLELANSLIEKPKLTGVSLLLPTDIVVADNFAADAESKIVPASAIPDGWMGLDVGPDSIKKFSETLDTTKTVIWNGPMGVFEFEKFAAGTDAIAKKLADITXKGVTTIIGGGDSVAAVEKAXLVSKMSHISTGGGASLELL

SEQ ID NO: 7882 - protein, 288 aa, Agrobacterium tumefaciens str. C58
MKGIILAGGSGTRLHPMTLAVSKQILPVYDKPMIYYPLTTLMLAGIREILIISTPHDMPLFQNLLGDGSKWGLSIEYAVQPSPDGLAQAYMIGADFVAGSPSCLILGDNIYYGHGLPDLLESGTSVNDGATVFAYHVNDPERYGVVHFDSEMRALSIEEKPLKPKSNWAVTGLYFYDADVVDIAANLKPSPRGEYEITDVNRVYLDRGKLKVSIMGRGYAWLDTGTPDSLLEAGEFVRTLEKRQGFKIACPEEIAMTKGFITHADFALLAENAGKGDYGVYLRKLAAP

SEQ ID NO: 7883 - protein, 274 aa, Zea mays
  unsure (1)..(274): unsure at all Xaa locations
QKLASVADLYVNDAFGTAHRAHASTEGVTKFLKPSVAGFLLQKELDYLVGAVSSPTRPFAAIVGGSKVSSKIGVIESLLEKCDILLLGGGMIFTFYKAQGLSVGASLVEEDKLDLATSLLAKAKEKGVSLMLPTDVVIADKFAPDANSXQIVPASAIPDGWMGLDIGPDSIAAFNAALETTXQTVIWNGPXMGVFEYDKFAIGTEAVAKKLAELSRKGVTTIIGGGDSVAAVEKVGVADVMSHISTGGGASLELLEGKELPGVTALDEAATVTV

SEQ ID NO: 7884 - protein, 562 aa, Pisum sativum
APPGTERETLMNQAMATPLSLSCCSPTLTRSTLFFTKTFPFSRSFSTPLPLSTKTLISLSPPHRTFAVRAESQNGADPARQYDFDLFTIGAGSGGVRASRFASNFGASSAVCELPFSTISSDTTGGVGGTCVIRGCVPKKLLVYASKFSHEFEESNGFGWRYDSEPKHDWSSLIANKNAELQRLTGIYKNTLKNAGVKLIEGRGKIVDAHTVDVDGKLYSAKHILVSVGGRPFIPDIPGKEYAIDSDAALDLPSKPQKIAIVGGGYIALEFAGIFNGLKSEVHVFIRQKKVLRGFDEEIRDFVAENMALRGIEFHTEESPVAITKAADGSLSLKTNKGTEEGFSHIMFATGRSPNTKDLGLESVGVKVAKDGSIEVDEYSQTSVPSIWAIGDATNRVNLTPVALMEGVALAKTLFQNEPTKPDYRAIPSAVFSQPPIGGVGLTEEQAAEQYGDIDVFTANFRPMKATLSGLPDRVFMKLIVSAETNVVLGLHMCGEDAAEIAQGFAVGIKAGLTKADFDATVGIHPTAAEEFVTMRTPTRKVRKNQASQGKSDSKAKAVAGS

SEQ ID NO: 7885 - protein, 155 aa, Zea mays
  unsure (1)..(155): unsure at all Xaa locations
GIGILEAGRVGLDGVNTGATGGFMDGNYVIIGWQIAAIVGASSYAFVMSAIIAKIIDLIPGLKLRASEEAELLGMDDDQHGEFSYDYVEVRRDFLAWSPQRGEPXXDGDVLEPTHGIHEHQSMMNPSESDDARKTPSLNTPDVIAPDAVINEKHA

SEQ ID NO: 7886 - protein, 111 aa, Shewanella oneidensis MR-1
MTELEIIDLVVGDGKEAVKGALITTQYRGFLQDGTQFDSSYDRGQAFQCVIGTGRVIKGWDQGIMGMKVGGKRKLLVPAHLAYGERQVGAHIKPNSDLTFEIELLEVLTRD

SEQ ID NO: 7887 - protein, 490 aa, Xanthomonas campestris pv. campestris str. ATCC 33913
MPRFPDQLLYIGGRYVPARGGHTFEVVNPATGEVLANVHNADADDLDAAVDSAKAGQRHWAALTVVERSRILLRAVALLRERNDALAELETLNTGKPLSETRSVDIVTGADVLEYYAGVAQALQGVQVPLREGSFFYTRHEPLGVVGAIGAWNYPIQIALWKAAPALAAGNAMIFKPSEVTPLTALKLAEIFTEAGLPDGVFNVLPGDGASVGHALTEHPEIEKISFTGGTATGRKVMASASSSSLKDVTMELGGKSPLIVCADADLDLAADIAMMANFYSSGQVCTNGTRVFVPRALRTAFEARLLARVQRIHIGDPLDERTTFGPMVSAAHMQRVLEHIEQGKAEGARLLFGGERLRDGALAQGCYVAPTIFSDCTDVMTIVREEIFGPVLSLLTYDDEDEAITRANATSYGLAAGVVTPDLSRAHRLIHRLEAGICWINTWGESPAPMPVGGYKQSGVGRENGLATLQAYTRTKSVQVELERYASVF

SEQ ID NO: 7888 - protein, 448 aa, Enterococcus faecium
MQIYDYIVIGGGSGGIASANRAGMHGAKVLLIEANELGGTCVNVGCVPKKVMWQASTILETIERDASSYGIQADLKNVDFAGLVERREKYIDFLHGAYQRGLDSNHVEAIKGYATFIDSQTIEVNGETYRAPKILIATGGRASKMTIPGGEYAIDSNGFFELTELPKRAIVLGAGYIAAELSGVFRGLGSEVMWAYRKERPLRTFDKMLSDNLIQMYQEAGIKTYAHHIAKEITKNNDEYTVLFENGETLTGDCVLFAGGRVPNTEKLGLENTNVELDKKGFIKVDKYQNTTDEHIFAVGDVIGKLDLTPVAIAAGRRLSERLFNGKKDSYLDYKLVPTVVFTHPPIATIGLTEEEALEKYGENELKVYRSRFTPMYFALNDYRQKCEMKLICVGKEERIVGLHAIGVGVDEMLQGFAVAIKMGATKEDFDNTVAIHPTGAEEFVTMR

SEQ ID NO: 7889 - protein, 352 aa, Haemophilus somnus 129PT
MSINFVKEGNIMSKYVRSVCLVEPKKVDIKTVLYPKKGECDVLIKVESIGICGSDIGAFRGTNPLVTYPRILGHEIVGTVIESGVGMPKNINIGDRVILEPYIYCGHCYPCSISRTNCCEALKVLGVHIDGAMQEIVRHPAHMLIKAPDIPIHELALAEPLTISLHAIRRTKVKAGEHVAIIGAGAIGLMAALVAKAYGATPILIDILDKRLDYAKSIGIPNIINPAKENDLEAIKSITNGRMAEVVIEASGANIAVQNTLKYTSFAGRIALTGWPKNETPLPTNLITFKELNIYGARTSKGEFEEALKLLESRKIEPKNIISKVITFDEIPHYIEELSENPDDYLKIIAVF

SEQ ID NO: 7890 - protein, 338 aa, Synechocystis sp. PCC 6803
MMKFEDFWYVVAESRNLKPGKVLARQILGQWLAIFRDQHGMAIALEDRCVHRHSRLSCGLIKQGNLHCPYHGWIYDHRGQVIGVPAEDQQFKPRENLRTKCYPTMEQEGFIYVCLGEPIQPPFALPQYGKKGWQRIRLIHRFANNVTNCVENFIDIPHTASVHPGIFRTAQRQAIKMIVDRHQGQVKAEYYNENNNLGWWGKFLNSQGNEISHTDRFIMPNVTSVEYKFSSQRHLFITSQSVPITEQSTLVYTDVAFNYGMWNFFAIPLVWWTAKRIIAQDLKILAIQQEVIAKYGTNFNHTPADTIHIFVESIRTAIAKGEDPRQLPDKTVEVTFYV

SEQ ID NO: 7891 - protein, 278 aa, Oryza sativa (japonica cultivar-group)
MQKADTKQLLHCIMSKTRMDGKVAIVTGGASGIGEAAARLFASCGATVVIADVQDELGEAVAASVAGGGCRYVRCDVTDEAQVEAAVAAAVAEHGRLDVMVSNAGVLLPTGPVVDMDLAALDRVMSVNFRGAAACVKHAARAMVSRGTRGAIVCTASVASCQGGFGPAAYTASKHAVLGLVRAAAGELGRHGVRVNCVSPGGVATPLSCGLTGMSPEEMEAAAEPHNVLRGKVLKAADVAEAMLFLASDQAAFVSGHNLVVDGATTAVNYAVLQSVGL

SEQ ID NO: 7892 - protein, 170 aa, Synechocystis sp. PCC 6803
MDVTIYLRWSAYATIASFIFMVLAFVFRWGFRFRLVGVTSFMTVLTIGIFGLGLGMFDRPTVEGSVKFNRVYDNGANQIVISVPVTVSATEVEATLKQAANNYFSLGRISTDGKEQMVIRARTLIHPQPGLTKPLYLGSAYRTLGTKENDQIEIKLDRKALRELERNQAA

SEQ ID NO: 7893 - protein, 243 aa, Cytophaga hutchinsonii
MSATVKPYQEMESGKREQVELMFNNISPKYDLLNRVLSLGIDKIWRKQALNLLKQDKPAHILDVATGTADLAIEAATRLKPTSVVGIDIAEDMLQIGRGKIAKKNLDKIIRLEKGDSEKINFPDNTFDAVIVSFGVRNFEHLEIGLAEIHRVLKPAGSIMVLEFSKPQNAPFKQVYQFYFKNILPTVGKLISKDSAAYTYLPDSVNAFPDGKAFCSILEKTGFTIKHYKPYTFGVCTAYVGKK

SEQ ID NO: 7894 - protein, 259 aa, Zea mays
MFPSLIHHASHGRPDVAVAEDAPRSGCGLGLPGHGGGPSVVLTADPKPRLRWTADLHDRFVDAVAQLGGPDKATPKAIMRTMGVKGLTLFHLKSHLQKYRLGRQSGKELTEQSKDASYLMEAQSGTTLSPRGSTPDVKESQEVKEALRAQMEVQRRLHEQVEVQKHMQIRMEANQKYIDTILDKAFKIVSEQLSGFSISDQDLPILTSARAMLSPADHLSSSVFPQLSVSSVSLHNPGPGGGKGLPHVADSHVFCPEAT

SEQ ID NO: 7895 - protein, 391 aa, Lactococcus lactis subsp. cremoris
MDLLKKFNPNLDKIEISLIRQFDQQVSSIPDIIKLTLGEPDFYTPEHVKQAGIAAIENNQSHYTGMAGLLELRQAASEFLLKKYGLSYAAEDEILVTVGVTEAISSVLLSILVAGDEVLIPAPAYPGYEPLITLAGGSLVEIDTRANDFVLTPEMLDQAIIEREGKVKAVILNYPANPTGVTYNREQIKDLAEVLKKHEVFVIADEVYSELNYTDQPHVSIAEYAPEQTIVLNGLSKSHAMTGWRIGLIFAARELVAQIIKTHQYLVTSASTQSQFAAIEALKNGADDALPMKKEYLKRRDYIIEKMSALGFKIIEPDGAFYIFAKIPADLEQDSFKFAVDFAKENAVAIIPGIAFGQYGEGFVRLSYAASMDVIEQAMARLTDYVTKKRG

SEQ ID NO: 7896 - protein, 2412 aa, ASPERGILLUS NIDULANS FGSC A4
MMAEPSRPATARFPPSRQVRGTRLNTIIEDARETQYADNRGPSPTDNGPKSPTPRLKLKTTGLSLPLVRQQRKFLSPLSAGSVSSCSDVDWQNQMRTFDELYDATDDESDFSDECMSFTSTRPTSLTTPTTRADSVTSSNSRRRYPALSIPTSSIWPSLNGAPKSSPVPPTPPQRIPVSPAALSLLSRSVPAMHATPSLDGSVSSDQVSNLSTPSTPSLRSLPDTDWNSREIHVLPDLDDSQHPNIANPETEEVPSIEIPIEDADDDWRRFIGEFPQIPGQTTSQAGYVGVEPAREDTPSDPGVALPEGALATLQFIPLEGTPEPWSETSEPNEEMWQVAAPPEPRRLDDETPVSELSEYSFTGLSIPSPGGFFNSLAPRARHTWSLPKLNQPPTSATAERFYNLPFNREEGEIIEQVIDLPERLNDEQLTAIYAPPTAIKIPESPAHPPTEGSISPVSERVHEISRPATAYDPDEQDENYAEELHKKALSSLDRTSVWLAAQASYLAALRETNPVNNLPDEDERPQDVDESPQHVSPALERNASVCFTGMFPEPPSSLPAANASKDSIYWRGFRFLLDQSRSRDTFVHRSTRFDAVQSFRLGLSGLHNKCLLGNYELVLPDRPAYSGPFAKAPRHSVLPGILQQKAEFSMIEKEQLVLSQISQPMWAMEALRYLQGGNLVVSPARKRFSKRATAAAPHKTPKRRQVRVLDLGGHATAEWAWHLAHDYPHVKVYTVYTEHQQVNKAIKGPPNHRHIQVPQLWKLPFPDNKFDVISARSLPAFLKTERPAGDCLDEYDLCLKECRRCLKPGGYLEYLVMDAEIARAGPYASATSIEFSFSLKIRGYDPVPTKQFVGRLRKQGFVGIKRGWMYLPMGTEPPKPQVPRETPDPRVKSLIEDYEAVQGPLGSTADIASITGLLGGWIWEQWLLKLQVEMGRDKSKLLEGIGTIGDISYETMLYDFYFMRASHVNKSVPPRAPPRLKTQSHCQPIFTKNLHNQNALFQTLTNQVVTIELKNDIRIRGTLKSVDQYLNIKLDDIDVLDLDKYPHLSSVKNMFIRGSVVRLHRADGPPKSTTKQARITQFTTQGERPGSRVTAPRPRLLKREGSSNASGGGDEGLFLEDKKSRDARLGQEKNIERERSRSPDIWGSRSGDKENENAGAARSLEEGMEEGIDRYNESENAVKRRKVDLEAPHARSVERLSSKAQKISGPFIDESDSENEGLEAFREYADGEADVAPEKDVKESEAHSDENQTAGKRDLAADISPLVREATSHMQEDEYPDFDDIEAGGVEDEGLDFECEAAVDEETFGFDANDTTADTIHADEKPTCPVCQGSLEGFDEMKVMAHVNDCLDGRPSAISPMQESPKVSTPEQKAVAADRAAIAKPAQRDPAQYQTSRAGTAFSKIMAGNAEDAAWAEAAASDVASRGFSISVDAFRYGAVESCNAYFLSHFHSDHYIGLSKSWRHGPIYCSRATANLVRQQLKVDPKWVVDLDFEKKTEVPGTGGVQVTMIEANHCPGSAIFLFEKAVSSGASTRIQRVLHCGDFRASPQHVQHALLRPDVVDPKTGKRWQQRIDACYLDTTYLSPKYAFPRQSDVINACAELCVRIDQGQYDSLGHMPFQTATPTTKSKNPISKFMSAATAAVKPSTQPEPKGRLLVVIGTYSIGKERICLAIARALKSKIYATPAKQRVCACLEDPELSALLTDDPLQAQVHMQTLFEIRAETLCDYLDSMKPHFTRVIGFRPTGWTYRPPAGRTLENPPVSTVLYSSHWKTPFSVRDLTPQRGSTRESACFGVPYSEHSSFRELTMFCCALRIGRIIPTVNVGSQKSRERMKAWFEKWEAEKRKTHNTKRRIALELRSVGLLSQHNRNSELRNTRPAFIYRQRHPVIMITDFLTPENITPERIALALLGLLAAYYVVPYLQTWRLSDIPAPGLAAWTNFWLLLQTRLGHRFISVDNAHKKYGKLVRIAPRHISIADDAAIQAVYGHGNGFLKSDFYDAFVSIRRGLFNTRDRAEHTRKRKTVSHTFSAKSIGQFEQYIHHNIENLVKQLTRISNLQRNPKNGYATVDALNWFNFVAFDIIGDLAFGAPFGMLDKGQDIAEMRKSPDSPPQYVQAVEVLNRRGEVSATLGCYPALKPFAKYLPDRFFRDGLEAVENLAGIAIACVNERLKPEVMANNTRVDLLARLMEGKDANGNKLGRAELTAEALTQLIAGSDTTSNTSCAILYYCLRTPGVIDKLHKVLDEAIPQDVEVPTHAMVKEIPYLQWVIWETMRIHSTSAMGLPREIPEGNPPVEISGHIFKPGDILSVPTYTIHHSKEIWGADADEFIPERWAPERLTARQKAAFIPFSTGPRACVGRNVAEMELLVICSTVFRMFDWELQQKGPMETREGFLRKPLGLTVGVKRRTIV

SEQ ID NO: 7897 - protein, 386 aa, Oryza sativa
MNSLQSFLALNPPATAAALGGLGLGGARLRPSRVTACLATPTPTPPPPTSAPLAPAAAARRELSAASRAVVEDEARFIVGTYNRSRVILVPRPRLPARLVEASFADRVFFANTGTEANEAAIKFARKYQRVARPDGDAPTEFMSFTNCFHGRTMGSLALTSKVQYREPFAPVMPGATFAEYGNLEEAKKVIQSGKIAAVFVEPMQGEGGIHSATKEFLQGLRDACDEAGALLVFDEVQCGLGRTGYLWAYEAYGVVPDIMTLAKPLAGGLPIGVVLVTEKVASAINYGDHGTTFGGGPLVCQAALTTLDKIQKPGFLAEVAKKGENFKQLLSTKLSGNAHVKEIRGIGLIVGIELDVPAGPLVDACLDRGVIVLTAGKGNVVRQCC

SEQ ID NO: 7898 - protein, 468 aa, Enterococcus faecium
MVVGDFAVELDTVVIGAGPGGYVAAIRAAEMGQKVAIIEREYIGGVCLNVGCIPSKALIAAGHHYQESLDSEMFGVTSENVKLDFAKTQEWKENKVVHTLTSGVGFLLKKHKVETIEGEAFFVDDHTLRVIHPDSAQTYSFNNAIIATGSRPIEIPGFKFGGRVLDSTGGLALKEVPKKFVIIGGGVIGAELGGAYANLGAEVTILEGSPQILPTYEKDLVKLVEDDFKKKGVTVVTNAMAKEAVDNGDSVTVKYAVDGKEESVTADYVMVTVGRRPNTDDMGLEQAGVEVGERGLITVDKQGRTNVPNIYAIGDIVPGAALAHKASYEAKIAAEAISGKKVAVDYKAMPAVAFTDPELASVGMTIKEAKDAGIEAKAYKFPFSGNGRALSLGKTEGFIRLVTTIEDNVLIGAQIGGVGASDMVSELALAIESGMNAEDIALTIHPHPSLGEIVMDASELALGLPIHI

SEQ ID NO: 7899 - protein, 556 aa, Mesorhizobium sp. BNC1
MYRYDEFDHAFVKARVAEFRDQVERRLAGELTEEQFKPLRLMNGVYLQLHAYMLRIAIPYGTLAPRQMRMLAHIARHYDKGYGHFTTRQNLQFHWPALKDIPDILEKLASVEMHAIQTSGNCIRNVTADHFAGAAADEVTDPRPYAEILRQWSSLHPEFSYLPRKFKIAVTGAQRDRAAVQVHDIGLHLKKNAEGKRGFTVYVGGGLGRTPMVAKKIRDFLPEEDLLSYTTAILRVYNLNGRRDNKFKARIKILVHETGTEELRAQVEREYEALKDSELKLPESDIRAIQAYFAPPSLPARPEGDAVIAAASAADAGFATWLARNLHTHKNPDYASVTVSLKGIGEVPGDMSADQMDAVADLAEHYAMSEIRVSHEQNLVLPHVARADLKAVYDRLVEIGLATANVGLVTDIIACPGLDYCALANARSIPVAQQISTRFADQARQEAIGDLKIKISGCINACGHHHVGHIGILGVEKKGAELYQITLGGSGDENTAVGEIIGRGFGPDEIVDAVETIVETYVGLRQDKSETFLAAYGRLGPAPFKEALYGSEAKAA

SEQ ID NO: 7900 - protein, 547 aa, Enterococcus faecium
MAYQFKLPDIGEGIAEGEIVKWFVKPGDTINEDDTLLEVQNDKSVEEIPSPVTGTVKNVIVPEGTVANVGDVLVEIDAPGHEDNEGDSGVAAESQTPAKPAAEPTVDTESAGSSSEGVFQFKLPDIGEGIAEGEIVKWFVKPGDTINEDDTLLEVQNDKSVEEIPSPVTGTVKNVIVPEGTVANVGDVLVEIDAPGHNSAPSTSAPSAEAPKEKVETSGSASVVEAADPNKRVLAMPSVRQFAREKDVDISQVTATGKGGRVTKEDIENFLAGGPSSAPAKSEAPEAAAPKEAAPAAESKPAAPAKPFKSNLGDLEERVAMTPTRKAIAKAMVNSKHTAPHVTLHDEVEVSKLWDNRKRFKEVAAANGTKLTFLPYVVKALTATVKKYPVLNASIDDANQEIVYKHYYNIGIATDTDHGLYVPNVKDADRKGMFAIADEINEKAKLAHDGKLSAEDMRNGTITISNIGSVGGGWFTPVINYPEVAILGVGTIAQQPIVNAEGEIVVGRVMKLSLSFDHRIVDGATAQQAMNNIKRLLADPELLMMEG

SEQ ID NO: 7901 - protein, 402 aa, Buchnera aphidicola (Schizaphis graminum)
MPDIGLEEVEVTEILVKIGEEIKLDQGLITVEGDKASMEIPSPISGIVKDITIKIGEKVKTSSIIMIFKVNNLNSIKNEKDLNYIKTEKKLNENFLEEKKDIKKIVLVHATPVVRRLARHLNVDLKNITPSGPKNRILKEDIELYIRNNTSNKSSFNIEKNNTTNFHKDLFNEIPITNIQQIIGKNLHQNWVNIPHVTQFDEVNITLLEEFRHKYNTEKKQKNNMCSKITILPFIIKSVAYGLLEFPIFNSSLSVNKKTIFLKKYVNVGIAVDVQNALFVPVLKNVDKKNIANLSSELIFLSKKAHENKLDASDMKDGCFTISNLGGIGGSWFSPIINSPEVAILGVSKALIKPLWNGKEFIPSLMLPLSLSYDHRVINGADAARFLTFIGKMLSDIRFLIM

SEQ ID NO: 7902 - protein, 301 aa, Glycine max
  unsure (1)..(301): unsure at all Xaa locations
MVPQSVITQVSDSSGVNAISNVSSSGYGFYDWLFKCHGFXHNATLIIPSFLFVFYLALQARHSLLKVSLARSYIIISYNLCLCLVTLLNLAWCFLQAWECTSGRELTWNLLSLFTTSGMLFLEVSLLAFLLQGNNAGGLEAMKRTFGISTLVVGLDILLKAIYLFVFGIPLFVDSNDHTHHGKWNLWVVHKLLLTAVYGFIMFMYHSGWKETLPAKIAFYKYVAIMFIFNAIATLACGLAGTHAAFAFWLYRVTVVFYHAFYLPFLYTTFLADFFQEENFHLENVYYSEMKDAGFFDTDWE

SEQ ID NO: 7903 - protein, 488 aa, Agrobacterium vitis
MKNSVQLITYVDRLSGGGFPELRALLDGRLQGLFGGVHALPFFNPIDGADAGFDPTDHTIVDPRLGSWDDVRALAGSVEIMADLIVNHVSAQSSWFQDFIAKGSDSEFADMFMTFGKAFPRGASEQDLLNIYRPRLGCRFQRPRLQIGSQRMLWTTFTPQQIDIDVHSAHGALYLETILDRFAEANVTAIRLDAAGYAIKKAGTSCFMIDETYAFLAKLAEKARDRGMEVLVEIHSYYRDQIEIASKVDRVYDFALPPLILHSLFTGDATALARWLEISPHNAITVLDTHDGIGVIDVGAHSDGRPGLLEPQAIDHLVEEIHRRSEGQSRLATGAAASNLDLYQVNCTYYDALGRNDDDYLIARAIQFFAPGIPQVYYVGLLGGINDMELLGKTGVGRDINRHFYEDREIDLALESPLVKRLSDLIRFRNTHPAFNGSFEVATDDTGSLVLSWNLNTEFAQLVVSFSQGKATITASGCYDFTFSGAIA

SEQ ID NO: 7904 - protein, 578 aa, Arabidopsis thaliana
MCGILAVLGCIDNSQAKRSRIIELSRRLRHRGPDWSGLHCYEDCYLAHERLAIIDPTSGDQPLYNEDKTVAVTVNGEIYNHKILREKLKSHQFRTGSDCEVIAHLYEEHGEEFIDMLDGMFAFVLLDTRDKSFIAARDAIGITPLYIGWGLDGSVWFASEMKALSDDCEQFMSFPPGHIYSSKQGGLRRWYNPPWYNEQVPSTPYDPLVLRNAFEKAVIKRLMTDVPFGVLLSGGLDSSLVAAVALRHLEKSEAARQWGSQLHTFCIGLQGSPDLKAGREVADYLGTRHHEFQFTVQDGIDAIEEVIYHIETYDVTTIRASTPMFLMSRKIKSLGVKMVLSGEGSDEILGGYLYFHKAPNKKEFHEETCRKIKALHQFDCLRANKSTSAWGVEARVPFLDKEFLNVAMSIDPEWKLIKPDLGRIEKWVLRNAFDDEERPYLPKHILYRQKEQFSDGVGYSWIDGLKDHANKHVSDTMLSNASFVFPDNTPLTKEAYYYRTIFEKFFPKSAARATVPGGPSIACSTAKAVEWDATWSKNLDPSGRAALGVHVAAYEEDKAAAAAKAGSDLVDPLPKNGT

SEQ ID NO: 7905 - protein, 431 aa, Glycine max
MWRCINGRIARRFLSTSSASARGWWDHVRPAPKDPIVRVNEAFLADPFPHKINLGIGTYKGDDGKAFIPQSVREAETKIQRCKLEESNASAVRSKFVQECVRLAYGNDSNVVREGLFAGVPTLSGTGACRLFAEFQRHFYPDSQMYLPDPTWSNHHNIWRQAEIPVKTFHYYHPDTKGLDFAALLNDVKNAPDCSFFLLHPCAHNPTGVDPTEEQWREISYQFQVKNHFPFFDMAYQGFSSGDLDKDAIALRIFLEDGHLIGCAQSFAKNMGLSEHKAGCLSVLCQSIKQVAALKSQLQLMSHAMYSSIPFQGISLVTMILSEPDTEALWRKEIKVMAKRIQTMRTTLRHCLENLHSSFNWEHITDQVGMFCFSGLTPDQVQQMEKLFHIYMTPDGRMSMSGVTSSNVDYLANAIHQVTRIDEEALRSCYV

SEQ ID NO: 7906 - protein, 1121 aa, Ceratodon purpureus
MSAPKKTYSSTTSAKSKHSVRVAQTTADAALEAVYEMSGDSGDSFDYSKSVGQSAESVPAGAVTAYLQRMQRGGLIQTFGCMVAVEEPNFCVIAYSENASEFLDLMPQAVPSMGEMDVLGIGTDIRTLFTPSSGAALEKAAATQDISLLNPITVHCRRSGKPLYAIAHRIDIGIVIDFEAVKMNDVSVSAAGALQSHKLAAKAITRLQALPGGDIGLLCDTVVEEVRELTGYDRVMAYKFHEDEHGEVVAEIRRMDLEPYLGLHYPATDIPQASRFLFMKNRVRVIADCCASPVKLIQDPDIKQPVSLAGSTLRAPHGCHAQYMGNMGSIASLVMAVIINDNEEDSRGAIQRGRKLWGLVVCHHTSPRTVPFPLRSACEFLMQVFGMQLNMEVELAAQLREKHILRTQTLLCDMLLRDAPIGIVSQTPNIMDLVKCDGAALYYGKRFWLLGTTPTENQIKDIAEWLLEYHKDSTGLSTDSLADANYPGAHLLGDAVCGMAAAKITAKDFLFWFRSHTAKEVKWGGAKHDPAEKDDGRKMHPRSSFKAFLEVVKRRSLPWEDVEMDAIHSLQLILRGSFQDIDDSDTKTMIHARLNDLKLHGMDELSVVANEMVRLIETATAPILAVDSTGMINGWNAKIAHVTGLPVSEAMGRSLVKDLVLDESVVVVERLLYLASQGEEEQNVEIKLKTFGTQTEKEAVILIVNACSSRDVSDSVVGVCFVGQDVTGQKMFMDKFTRIQGDYKTIVKNPHPLIPPIFGGDEYGYCFEWNPAMEALTGWKHDEVVGKLLVGEIFGMEMMCCRLKSQDSMTKFMISLNNAMDGTNTDKFSFSFCNREGKFVEALLSTNKRTNADGVITGVFCFLQIASSELQQALTVQRATEKVAIAKLKELAYIRQEIKNPLCGITFTRQLLEDTDLSDDQKQFLDTSAVCEQQLQKVLNDMDLESIEDGYLELDTAEFEMGTVMDAVISQGMTTSREKGLQIIRETPREISTMRLFGDQIRLQQVLSDFLINAIRFTPSSEGWVKIKVVPTRKRLGGNVHVMHLEFRVSHPGGGLPDELVLEMYDRAKGMTQEGLGLNMCRKLVRLMNGDVQYVRENAQCYFVVYVELPMAQRDDAASQM

SEQ ID NO: 7907 - protein, 356 aa, Enterococcus faecalis V583
MNNLFIFVCFCFMWLMIFGVILYYVGLVNHRYIHHTLILGLVTIISGTLCWLFVGYSLSFFGNIQYSIFYSPLASSEIVSILIQLLFCLYSVIMIIGSVLERGNWKYIVLFVPLWIVFVYAPICFSLWGHGNWLGKMGVLDYSGGLVVHTTAGIGSLVLAITSPIRLKNSLIFKSQEMIAFVGMLFITLGWFGFNMAPSGKIGEEAIQVWLNTLISILGGSISWTFTQWILIKKVSIYSIMNGIIGGLVGSTCSVGYVSPAFSLLISVIVCTLCPIVIHIMHLSIANFDDAADSFGMNAVGGIAGSILTGVMAEKGDFFLQLFGTFLISIWSLSLSLLIHYLLKKIVNDCYSQCIK

SEQ ID NO: 7908 - protein, 310 aa, Burkholderia fungorum LB400
MLALLFPGQGAQTDGFLHRLPRHRAVRDTLEEASQVLGADVLTLDTPDALRSTVAVQIGLTVAGVAITRALADEQLVAEISAGLSVGAYAAAVGCGAIHFADALKMVRRRAELMETAYPSGYGLAAISGLTEYQVETLAARHADENRQHVYIGNVNAPRQIVVAGANDALDAFAARALAAGARKAARLAVSVPSHCELLAQATDGLVAYAKEIPFHAPHSTYVGNRGGRPLYTADAIRDDLATNMRYTVRWFDALAVMQEMGARVLIEAPPGQVLTDIAREYFPDSTALAASTFPFDRLVATARRRLDAG

SEQ ID NO: 7909 - protein, 100 aa, Zea mays
SSTSCRCRCPSPPRWPSRSHTLVTQLFCWTWQFLGHGLFEKKGPSVSDLPEVFLMEPFLIFLQILNKLFGYEPYPGFCKNVDRKIEADLMASESSSRGRT

SEQ ID NO: 7910 - protein, 210 aa, Catharanthus roseus
MYQSNAHNSDHLTFLPPLVDYQFLNNDFDFSEIFTDFNYANYNYNTSTSDNFSGFQFNENCEEIISPNYASEDLSDIILTDIFKDQDNYEDEVVAGEQEEELITTPTSRGGGGGGCEQRSNEEWIRYRGVRRRPWGKFAAEIRDPKRKGSRIWLGTYETAEDAALAFDQAAFQLRGSRARLNFPNLIGSANAPVRVSPRRRSSSCHLRPQ

SEQ ID NO: 7911 - protein, 178 aa, Oryza sativa
  unsure (1)..(178): unsure at all Xaa locations
MAPTVMASSATSVAPFQGLKSTAGLPVSRRSNSAGLGSVSNGGRISCMQVWPIEGIKKFETLSYLPPLTVEDLLKQIEYLLRSKWVPCXLEFSKVGFVYRENHRSPGYYDGRYWTMWKLPMFGCTDATQVLKXELEEAKKAYPDAFVRIIGFDNVRQVQLISFIAXYSPRGCEESGGN

SEQ ID NO: 7912 - protein, 324 aa, Candida parapsilosis
MSTATASPAVKLNSGYEIPLVGFGCWKLTNDVASDQIYRAIKSGYRLFDGAEDYANEQEVGEGIKRAIKEGIVKREELFITSKLWNSFHDKKNVEVALMKTLSDLNLDYVDLFYIHFPIAQKPVPIEKKYPPGFYCGDGDKWSIEEVPLLDTWRALEKLVDQGLAKSIGISNFSAQLIYDLIRGCTIKPVALQIEHHPYLTQPKLVEYVQLHDIQITGYSSFGPQSFLEMDLKRALDTPVLLEEPTVKSIADKHGKSPAQVLLRYQTQRGIAVIPRSNSPDRMAQNLSVIDFELTQDDLQAIAELDCNLRFNEPWDFSNIPVFV

SEQ ID NO: 7913 - protein, 227 aa, Nicotiana tabacum
ERVPERVVHARGASAKGFFEVTHDITHLTCADFLRAPGVQTPVIVRFSTVIHERGSPETLRDPRGFAVKFYTREGNFDLVGNNFPVFFIRDGMKFPDMVHALKPNPKSHIQENWRVLDFFSHVPESLHMFTFLFDDIGIPQDYRHMDGSGVHTFTLINKAGKSTYVKFHWKPTCGVKSLLEEEAARIGGANHSHATQDLYDSIAAGNYPEWKLFIQTMDPDHEDRFD

SEQ ID NO: 7914 - protein, 475 aa, Mesorhizobium sp. BNC1
MFKNYIAGEWVEAEGTENINPSDTSDVVGVYSRATRENVLDAISAAKAAFASWSRSGPLQRHSVLRKAADEIMARKDELGSLLAREEGKTLPEAIGEVVRASQIFDFFAGESLRLSGEIIPSVRPGIGVEITREPVGVIGIITPWNFPIAIPAWKIAPAICYGNAIVFKPADLVPASSWAIVDILQRAGLPAGVLNLVMGKGSVVGQAILESPDVAAVTFTGSTQTGKHVAAASIEHNRRFQLEMGGKNPMVVLDDADLSIAVEAATNSAFFSTGQRCTASSRLIVTEGIHDRFVEAMTQRLSSLVVDNALKPGTHIGPVVDESQLQQDLDYIEVGQKEGARLHFGGRRLERETNGFYLEPALFTEASNDMRIAREEIFGPVAAVIRVKDYEEALAVSNDTPYGLSAGIATQSLKFATHFKQNAEAGMVMVNLPTAGVDFHVPFGGRKRSSYGPREQGRYAAEFFTTVKTSYSLA

SEQ ID NO: 7915 - protein, 327 aa, Klebsiella pneumoniae
MAARRARAAENVPRRALNRDAVAQGGIMKILFTFPGQGGQRPGMLAALPDREAILTQARAVLGDEVDTLDSADALQHTRAVQLCLLIAGVAWARELQRQGVDPQMVSGLSIGAFPAAVIAGALDFASALRLVALRGDLMEQAYPEGYGLTAIMGLTRPRVEALMQGHEVYLANLNAETQFVIAGRDEAMAEVAQLALRAGASKVQRLAVSVPSHCALLDKPAAALAKAFADVTLTRAQRAYLSGSTARVLWDPQRIADDLAMNMARPVHWQEAMVAADERDARLAIEMPPGGVLTCLTRQAGWRGETIALERSGLDVARHLAQRLSD

SEQ ID NO: 7916 - protein, 178 aa, Porphyromonas gingivalis W83
MRTIKLKDKEFEIYIPATRIHEAIKRMAAEIKRDLHEDNPLFVCIMNGSFMFAAELMQALDESYQVDFARYSSYCGMQSTFVLKEIMPVTADMRGRTVVIVEDLIDSGYTMSCVKENFYELGAKEVRIAAMLTKPAALKCDIHTDYVGLEIGNDFIVGHGLDYDDLGRMYQDIYKIKE

SEQ ID NO: 7917 - protein, 159 aa, Prochlorococcus marinus subsp. marinus str. CCMP1375
MLINVKETVVETADGEKKNLGDYLGNVLLIVNVASLCGNTPQYKGLEKLFEKYKKNGFCVLAFPCNDFAGQEPGTIEEIKEFCSVKYGTTFEIFNKVHAKGLTTEPYTTLNKVEPKGDVSWNFEKFLVGKDGNVIARFEPSVEPSSEELITAIEVALSS

SEQ ID NO: 7918 - protein, 197 aa, Glycine max
MSASRFIKCVTVGDGAVGKTCLLISYTSNTFPTDYVPTVFDNFSANVVVDGSTVNLGLWDTAGQEDYNRLRPLSYRGADVFILAFSLISKASYENIAKKWIPELRHYAPGVPIILVGTKLDLREDKQFFIDHPGAVPITTTQGEELRKLIGAPAYIECSSKTQQNVKAVFDAAIKVVLQPPKQKKKKRKAQKACSIL

SEQ ID NO: 7919 - protein, 180 aa, Streptococcus agalactiae NEM316
MLENDIKKVLYSEEDIILKTKELGAKLTADYAGKNPLLVGVLKGSVPFMAELLKHIDTHVEIDFMVVSSYHGGTTSSGEVKILKDVDTNIEGRDVIFIEDIIDTGRTLKYLRDMFKYRQANSVKVATLFDKPEGRLVDIDADYVCYDIPNEFIVGFGLDYAENYRNLPYVGVLKEEIYSK

SEQ ID NO: 7920 - protein, 1528 aa, ASPERGILLUS NIDULANS FGSC A4
MAPVTSAGEAVARIAYQASEVVLSVQPSLQSDSWFTKTLKSLKAAGARSVVPEGVPDVVSVRYNEDPFLSAFHPLQSGKVVSAVTSSSTLLTSIPHLYRLANSPVVIHVALEPYPFPDYSAISSIRQCGFTFLHSETLQEAQDIALTAHALARKSGKGVIHFFDPANSANDDAIEQEDAQTLKSILDLSRSAVSHSEGHGVDTLYAETGRVATVSDETVESSTAAQVEETATPTQPSQTPSSRSVANSSVGSSERDSSVDSRATSSAATTVDGSVRPVSATDIFSWASQIWKALSEITGRNYRAIEYTGPSDAKSAIFVFGSTGVFVDVLSKEDVPAELTNIGLITARLYRPWVGAEIANSIPRSIEKIAVLEQVRKTTRWGPSFMDLLSSLTPAAVGGRSPQIVGYRLGYVEPSTAVQALRGIIQNLSSPSPIQSLEIGSSNVPTLQTPLEQPRIENAYLKILNQLFGERLYLANQLSSNNAGISSTIAASPEYGFGSLIARKEHRQRFIREVEAASKSNSFATDVVSKWLADWALNATDATKANRLAPDVIARLSNDGSALSKQLLQTKKLFYSESQWLIGSDAWAYDLGNSGVHHVLASGADVNMLVIDSQPYSERSAADPTRRKKDIGLYAMNFGNAYVASVAVYSSYTQVLQAMAEAEQFKGPSIVVAYLPYNQENDSALTVLQETKKAVDLGYWPLYRWNPANEDKGEPKFALDSERVKRELEEFLRRDNQLTQLMNRQPKFSSVLSESYGTEVRAIQKRKAKDSYEKLLEGLFGAPLTILFASDGGNAATLAKRLGNRGRARGLKTLVMAMEDYPFEDLPTEENVVFITSTAGQGEFPQNGRALWEYVKNTGDLDLSTINYSVFGLGDSHYWPRKEDKIYYNKPAKDLDARIAFLGGRKLTDIGLGDDQDPDAFQTGYSEWEPRIWQALGVDKVEGLPEEPAPLTNEDIKIQSNYLRGTIAEGLLDESTGAISASDQQLTKFHGTYMQDDRDVRDERKAQGLEPAYSFMIRCRLPGGVATPSQWLQMDAISSAYGNETMKLTTRQTFQFHGVVKRNLRGAMRAINKALMTTIAACGDVNRNVMCSSLPELSYYHREVHAVSKKISDHLLPATTAYHEIWLQDENDKKVQVAGDAVVDQEPLYGPTYLPRKFKITIAIPPHNDTDVYAHDIGLIAIKGADGHLEGFNILAGGGMGTTHNNKKTYPQTGRMFGYVPADQAHIVCEKIMLVQRDYGDRKNRKHARLKYTIDDMGVEAYKEKVEALLPDGLRFAEPRPFKFASNVDTFGWQKDENGLNHFTFFIENGRIEDTADFRMRTGLRELASLDKGEFRLTGNQHLILSNIKDEDLPAIKELMAKYKLDNTSFSGLRLSSSACVAFPTCGLAMAESERYLPVLITKLESTLEEVGLARDSIVMRMTGCPNGCARPWLAEVAFVGKAYGAYNMYLGGGYHGQRLNKLYRSSIKEDEILDIMKPLLKRYALERNTDGEEPERFGDWLIRAGVIKETTDGRNFHEGVAEEEDEE

SEQ ID NO: 7921 - protein, 483 aa, Microbulbifer degradans 2-40
MSPLKVVEAETMADRLKNDFQFIEVGRQDPTKKDISTRKHEFVEIYQPFSQEQVADQSHRCLECGNPYCEWKCPVHNYIPNWLKLVSEGNIVEAAELCHQTNSLPEVCGRVCPQDRLCEGACTLNDGFGAVTIGNAEKYITDTAFAMGWRPDMSKVTWTKKRVAIIGAGPAGLGCADILVRNGVKPVVFDRNPEIGGLLTFGIPEFKLEKTVMSRRREIFTDMGVEFRLNTEVGKDIQMEEILEEYDAVFMGMGTYTYMKGGFPGEDLSGVYDALPFLVSNVNRNLGFEKDPADFISVKDKKVVVLGGGDTAMDCNRTSIRQGAEKVTCAYRRDEANMPGSVREVQNAREEGVEFLFNRQPIAIVGEGRVEGVKVVTTQMGEPDENGRRRPEPIPGSEEIIPADVVLIAFGFRPSPEPWFETHGINLNNWGGVVAPAEQKFKYQTTNDKVFAGGDMVRGSDLVVTAIWEGREAAEGILDYLDI

SEQ ID NO: 7922 - protein, 364 aa, Arabidopsis thaliana
MGKGGMSQGEGSKVEEENMAAWLVGINTLKIQPFLLPSVGPHDVRVRMKAVGICGSDVHYLKTMRCADFVVKEPMVIGHECAGIIEEVGEEVKHLVVGDRVALEPGISCWRCNLCREGRYNLCPEMKFFATPPVHGSLANQVVHPADLCFKLPENVSLEEGAMCEPLSVGVHACRRAEVGPETNVLVMGAGPIGLVTMLAARAFSVPRIVIVDVDENRLAVAKQLGADEIVQVTTNLEDVGSEVEQIQKAMGSNIDVTFDCAGFNKTMSTALAATRCGGKVCLVGMGHGIMTVPLTPAAAREVDVVGVFRYKNTWPLCLEFLTSGKIDVKPLITHRFGFSQKEVEDAFETSARGSNAIKVMFNL

SEQ ID NO: 7923 - protein, 437 aa, Haemophilus influenzae
MEILMKSGDLNKYDLVKNALVLVLAGGRGSRLHELTDKRAKPALYFGGNRRIIDFALSNCINSDLNRIGVVTQYAAHSLLLHLQTGWSFLPQERGEFVDMLPARQQIDDSTWYRGTADAVYQNMAIIKNHYRPKYILILAGDHIYKQDYSVMLMDHVNSGAKCTVGCIEVPRSEAHEFGVMAVNENLKVKAFVEKPKDPPAMVGKPDVSLASMGIYVFDADYLYKMLEQEVNTPQTSHDFGKDVLPKCLEEGALYAHPFSRSCMGRNTEGEIYWRDVGTLDSFWQSNIDLVSENPQLDIYDQSWPIRGNPIQAYPSKFFYKHSNVHPVDNSLIGGGCVITDASISNSVLFDHIKIDAFSKVDHCVVLPQVKIGKNCVLKNCIIDRECEIPDGMQIGVDMEEDKKRFRISSTGKVILVTSKMLKILEGHEIGEEGHLD

SEQ ID NO: 7924 - protein, 456 aa, Nicotiana tabacum
MASKIGTAGNRSGTTGMPSFISQIPVSNPMGTEANNTNTSRMSDFGVLEQYLGFRIGDGANVNRSPLFNSTSATNPAVGFEVSGTINRTLAPSNTSLPTATPRSQTMLLQSNLVSASGTHHENWGESNMADSGSRTDTSTDMDGDDKNQLIEAGQSSDKSKEKVLDQKTLRRLAQNREAARKSRLRKKAYVQQLENSRLKLSQLEQDLQRARQQGKYISNIADQSNGVGANGPLAFDAEYSRWLEEHNKHINELRTAVNAHASDPELRSIVNNVTAHFDEVFRVKGNAAKADVFHVLSGMWKTPAERCFMWIGGFRPSELLKLLVNQLEPLTEQQLAGIYNLQQSSHQAEDALSQGMEALQQSLAETLANGSPAPEGSSGDVANYMGQMAMAMGKLGTLEGFLRQADNLRQQTLQQMHRVLTTRQSARALLAINEYFSRLRALSSLWLARPREQLV

SEQ ID NO: 7925 - protein, 60 aa, Methanosarcina acetivorans C2A
MVKEKYTRFERARIVGARALQIAMGAPVLVDDDGRLDPLGVAIAELKAEIIPITVKRKKS

SEQ ID NO: 7926 - protein, 175 aa, Trichodesmium erythraeum IMS101
MKILDSQGRLFGKISILDLGAVLIIFMVLVGIFVFPGTNKNSVAQVGNVITKPVEVDAIALGLKGRYPEKLLKEGEKTQLIIRNQPYGEVDLKSVEFLTRKVAVPQPDGTVRALPDPRDKELFSRNVLLTLKGQGRVTNDGPVLGNIKVKIGMTIELEGRDYNFNASVIDVRVQE

SEQ ID NO: 7927 - protein, 439 aa, Oryza sativa
  unsure (1)..(439): unsure at all Xaa locations
MASAERRIRMWWRTAGRPKHLWGRRSMLYMGHSRIYMDRYYDPIELHGQPPPLLMIPGGGGGGGGGGISPYLVQSQHGHGGGVDGMEMEEGGGFMGEQPQCHPLLYNLSVLKDRVQQLHPLVGLAVAHNAHAHGPLDVSAADAIIQEIVAAASSMMYAFQLLCDLGTAPTTAPSQETAAASAVVVKNNDHAADAGQMEDDHLMQQQWQQNGSRQHDYSSHAHAPPVFHSETAAPAGATSATDTIIELDAAELLAKYTHYCQVCGKGFKRDANLRMHMRAHGDEYKSKAALSNPTKLLAKGGDETMAAAARKYSCPQEGCRWNRRHAKFQPLKSVICAKNHYKRSHCPKMYVCNRCGRKHFSVLSDLRTHEKHCGDHRWLXSCGTSFSRKDKLIGHVSLFAGHQPVMPLDAPRAGKRQRSSSASVAGNIEDTTGIGMGAA

SEQ ID NO: 7928 - protein, 484 aa, Rhizobium sp.
MKKLTNATGAPVADNFNIQTAGPRGPALLQDIWLLEKLAHFDRELIPERRMHAKGAGAYGTFTVTHDITRYTKASIFSSVGKETPLFVRFSSVAGERGSADAERDIRGFAVKFYTDEGNWDIVGNNTPVFFFRDPLRFSDLNHVVKRDPSPALRNATSNWDFWTLLPEALHQVTSVMSDRGLPTSFRHMHGFGSHTFSLIDRDNKRVWVKFHFVCQQGIENLSDAEAEAVVGKDRESNLRDLYEVIEQGNFPRWKLCIQVMEEEQALNYRHNPFDLTKVWPHAARVIEVGIMELNRNSRKANFAEIEQAAFSPANVVPGVSFSPDRISRARLFSYGDAQRYRLWLNFNHIPVNAPRCPASSYHRSYHRDGAMHADGNLGGTASYFPNSVGEWQDSPERAEPPLPLEGFDQHYDHRLEEDHYEQPGNLFRLLDPARNELLFDNTARAMNGVPQRIRQRHMTIAPKPSPAYGFGVAEALERLVPLG

SEQ ID NO: 7929 - protein, 186 aa, Acinetobacter sp. ADP1
MKTFSCFRFLHMTIEMSVMISTEEIQAKVKQLGEQINAHYANSHKDLVLIGLLRSSFIFMADLCRAIAKPHELDFMTVSSYGAGTVSSRDVKILKDLDGEIRGKDVLVVEDIIDSGNTLSKVLEILQTRGPNSIELCTLVSKPSRREIELEVKFLGFEVEDRFIVGYGLDYNQKYRHLPFIGEIGL

SEQ ID NO: 7930 - protein, 264 aa, Haemophilus influenzae R2866
MDKSLKANCIGEFLGTALLIFFGVGCVAALKVAGASFGLWEISIMWGMGVALAVYATAGLSGAHLNPAVTIALWKFACFDGKKVIPYIISQMLGAFFAAALVYALYRNVFIDYETAHNIVRGTQESLSLAGTFSTYPHPSLSIGGAFAVEFVITAILMALIMALTDDGNGVPRGPLAPLLIGILIAVIGGAMGPLTGFAMNPARDFGPKFFAYLAGWGELALTGGREIPYFIVPMVAPVLGALAGAWLYKKAIGGNLPCNCGCE

SEQ ID NO: 7931 - protein, 253 aa, Streptomyces coelicolor A3(2)
MTELPEPSGKVALVTGASRGIGYGVAEALVARGDRVCITGRNEDALKEAVDRLGPDRVIGVAGKAHDEAHQAVAVERVMEAFGRVDFLVNNAGTNPVFGPIADLDLNVARKVFETNVISALGFAQRTWHAWQKDNGGAIVNIASVAGLSPSPFIAAYGVSKAALINLTAQLAHEFAPRVRVNAIAPAVVKTKFAAALYEGREEEAAAGYPLGRLGVPSDIGGAAEFLTSEQSAWVTGQTLVVDGGIFLNAGVA

SEQ ID NO: 7932 - protein, 349 aa, Yarrowia lipolytica
MTTIPKTQKAVIFETSGGPLMYKDVPVPVPADDEILVNVKFSGVCHTDLHAWKGDWPLDTKLPLIGGHEGAGVVVAKGKNVTTFEIGDYAGIKWINKACYTCEFCQVSAEPNCPKATMSGYTHDGSFQQYATANAVQAAHIPKNCDLAQIAPILCAGITVYKALKTAGLKAGEWAAVTGAGGGLGSLAVQYAKAMGYRVLAIDTGADKEKMCKELGAEVFIDFAKSKDLVKDVQDATKGGPHAVINVSVSEFAVGQSVEYVRTLGTVVLVGLPAGAVCKSPIFQQVARSIQIKGSYVGNRADSQEAIEFFARGLVKSPIIIVGLSQLESVYKLMEEGKIAGRYVLDTYK

SEQ ID NO: 7933 - protein, 449 aa, Porphyromonas gingivalis W83
MRYDLAIIGGGPAGYTAAERAAKGGLKTLLIEKNALGGVCLNEGCIPTKTLLYSAKVLHQIATASKYAVSGTADGLDLGKVIARKGKIIRKLTAGIRSRLTEAGVEMVTAEATVTGCDADGIIGITAGEAQYKAANLLLCTGSETFIPPIPGVEQTEYWTNREALQNKEIPTSLVIIGGGVIGMEFASFFNGIGTQVHVVEMLPEILNGIDPEHAAMLRAHYEKEGIKFYLGHKVTSVRNGAVTVEYEGESKEIEGERILMSVGRRPVLQGFESLGLVLAGKGVKTNERMQTSLPNVYAAGDITGFSLLAHTAVREAEVAVDQILGKTDETMSYRAVPGVVYTNPEVAGVGETEESLRKAGRAYTVRRLPMAFSGRFVAENEQGNGECKLLLDEENRLIGAHLIGNPAGELIVTAAMAIETGMTDRQIERIIFPHPTVGEILKETLAGG

SEQ ID NO: 7934 - protein, 337 aa, Thermosynechococcus elongatus BP-1
MVLLGRSAAELKAWVEAQGQPGYRGQQLHQWLYRKGARSLQEITVFPKQWRAALADVEIGRSEIRYRHDAQDGTVKLLLALADGETIETVGIPSSDRLTVCVSSQVGCPMACDFCATGKGGYRRNLACHEILDQVLTIQSEMGRRVSHVVFMGMGEPLLNLPAVLQAITCLNRDIGIGQRHITISTVGIPQQIQRLAQHQLQTTLAVSLHAPNQALREQLIPSAKHYPLSQLIADCRAYVQQTGRRITFEYTVLAGVNDRPQHAEELAQLLRGFQSHVNLIPYNPIAEAAYQRPTDQHLRQFLSQLQALGVTASIRRSRGLDRQAACGQLRQAQLIA

SEQ ID NO: 7935 - protein, 391 aa, Streptococcus agalactiae NEM316
MTLEKRFNKYLDRIEVSLIRQFDQSISDIPGMVKLTLGEPDFTTPDHVKEAAKSAIDANQSYYTGMSGLLALRQAAADFAKDKYNLTYNPDCEILVTIGATEALSASLIAILEAGDVVLLPAPAYPGYEPIVNLVGADIVEIDTRENDFRLTPEMLETAIIQQGEKLKAVLLNYPTNPTGITYSRQEIASLAEVLKKYDIFVISDEVYSELTYTGQQHVSIAEYLPNQTILINGLSKSHAMTGWRVGLVYAPEAFIAQIIKSHQYMVTAASTISQFAGVEALSVGKNDTLPMRQGYIKRRDYIIDKMSKLGFKIIKPSGAFYIFAKIPDSYPQDSFKFCQDFAYQQAVAIIPGVAFGKYGEGYIRLSYAASMEVIETAMARLKVFMESYEG

SEQ ID NO: 7936 - protein, 205 aa, Cytophaga hutchinsonii
MYTKKNKQFVLMGLTYSLMMFVSSCLGINSDVKNRPSATDSMATVDKTQSIYSIKVTTLDGQPFDLSTLKGKKILIVNTASKCGYTPQYEELQQLHALHGDSVAVLGFPCNDFGGQESGSESEIGAFCTKNYGVTFQMFEKVHIKGNEQHPLYKWLTDPALNGWNKDAPTWNFCKYLINEKGELVNFFGSGVKPMSKTVLDAIRK

SEQ ID NO: 7937 - protein, 382 aa, Deinococcus radiodurans R1
MWASQRASSVPGSVFSLMDAAKMRARGRGLNVTDLSIGSSDQHPPLSVLDELRAATHDPATYRYPLFSDTQPLRDAAAAYLARRFGVRLNADTEVLPLIGAQEGLAHLLLAVTDPGDTLLLPDPCYPPYWGAAAVAGLNVVTLPLLPERGFLPDLSRVPANVRPRVLLLNYPNNPTSAIASAEFFREAAAWCRERGTLLVHDHPYAELTFGDYRAPSALEAGMEGVVELHSLSKTHHLGGFRVGFAAGDAGAVAALARVKGAIDFHPYLGIQRAAAHALGLPDEVGRVGARIFEERRDALLSALRDLGWEVQTPQASMYAWAQVPGLRDSVAFAVRAAEETGVVVSPGQAFGERGEGFVRFALVQPPEVLRGAAAKLGEVGV

SEQ ID NO: 7938 - protein, 447 aa, Arabidopsis thaliana
MSQHMNLLLPSFETDKEEYDERKTTDHGGIGGSVWRFKGNKAAKEAASVSMKGTLARLFDCCSKDVKKTILPLGHGDPSVYPCFQTSVDAEEAVVESLRSGAANSYAPGVGILPARRAVANYLNRDLPHKIHSDDIFMTVGCCQGIETMIHALAGPKANILLPTLIYPLYNSHAIHSLVEIRKYNLLPDLDWEIDLQGVEAMADENTIAVVIMNPHNPCGNVYTYEHLKKVAEVARKLGIMVISDEVYNQTIYGENKFVPMGIFSSITPVVTLGSISKGWLVPGWRIGWIAMNDPKNVFKTTRVVESIKEHLDISPDPSTILQFALPNILEKTKKEFFEKNNSILSQNVDFAFDALKDIPCLTCPKKPESCTYLVTKLDLSLLEDITNDFDFCMKLAQEENLVFLPGEVLGLKNWVRFSIGVERSMLEDAFMRLKGFFARHTKTQLT

SEQ ID NO: 7939 - protein, 506 aa, Antirrhinum majus
MSTLVYSTLFILSTLLLTLLTRTRRKTRPPGPLALPLIGHLHLLGPKLHHTFHQFSQRYGPLIQLYLGSVPCVVASTPELAREFLKTHELDFSSRKHSTAIDIVTYDSSFAFAPYGPYWKFIKKLCTYELLGARNLSHFQPIRALEVNSFLRILYEKTEQKQSVNVTEELVKLTSNVISNMMLGIRCSGTEGEAEVARTVIREVTQIFGEFDVSEIVWFCKNLDLQGIRKRSEDIRRRYDALLEKIISDRERLRLRGGGGGGGGEVKDFLDMLLDVMESEKSEVEFTREHLKALILDFFTAGTDTTAITTEWAIAELISNPNVLKKAQEEMDKVIGSQRLLQESDAPNLPYLNAIIKETFRLHPPIPMLTRKSISDVVVNGYTIPAKTLLFVNLWSMGRNPNYWENPMEFRPERFLEKGTGSIDVKGQHFELLPFGTGRRGCPGMLLGMQELFSIIGAMVQCFDWKLPDGVKSVDMTERPGLTAPRANDLVCQLVPRIDPVVVSGP

SEQ ID NO: 7940 - protein, 410 aa, Nicotiana tabacum
MQSTAISFSPSISLPSKNRHNLLSLSPSRLPLRFGSANGFSTTAPHKLNSVRCSSSSSKLNGSGWISDPLPVPERDSGGVTVRVTSSEPEISAGEEEPPKSKPLADTLVLGSLFGLWYIFNIYFNIYNKQVLKTFHYPVTITLAQLAVGTILVIFMWTSNLYKRPKISGAQLAAILPLAVVHTLGNLFTNMSLGKVSVSFTHTIKAMEPFFSVVLSAMFLGEFPTLWVISSLVPIVGGVGLASLTEASFNWAGFWSAMACNLTNQSRNVLSKKFMVRKEESLDNITLFSIITIMSFILLAPFAFFMEGVKFTPAYLEASGLNVNQIYTRSLLAALCFHAYQQVSYMILERVSPVTHSVGNCVKRVVVIVTSVLFFRTPVSPINTIGTGVALAGVFLYSRVKGIKPKPKTA

SEQ ID NO: 7941 - protein, 496 aa, Zea mays
ITMDPTKFRPSSSHDTTVTTTNAGAPVWNDNEALTVGPRGPILLEDYHLIEKVAHFARERIPERVVHARGASAKGFFECTHDVTSLTCADFLRAPGVRTPVIVRFSTVIHERGSPETIRDPRGFAVKFYTREGNWDLLGNNFPVFFIRDGIKFPDVIHAFKPNPRSHVQEYWRVFDFLSHLPESLHTFFFLFDDVGVPSDYRHMEGFGVNTYTFVSAAEKAQYVKFHWKPTCGVRCILTHEEAALVGGRNHSHATQDLYDSIAAGSFPEWTLYVQVMDPDTEEQYDFDPLDDTKTWPEDLLPLRPVGRLVLDRNVDNFFNENEQLAFGPGLVVPGIYYSDDKMLQCRVFAYADTQRYRLGPNYLMLPVNAPRCAHHNNHYDGAMNFMHRDEEVDYYPSRHAPLRQAAPPTPLPPRPVAGRREKATIRKPNDFKQPGERYRSWDADRQDRFVRRFADSLGHPKVSQELRSIWIDLLAKCDASLGMKIATRLNMKPNM

SEQ ID NO: 7942 - protein, 411 aa, Nicotiana tabacum
MQSTAISFSPSISLPKKPHNPSSSASLFRFNPLSAQSSRPTLRFGCLNGSVARKINPIRCSADSLNRNGWISVPPPAPERESDGVEVRATSVPESAGEAPKSKPLTDTLVLGSLFGLWYLFNIYFNIYNKQVLKAFHYPVTVTLVQFRVGSVLVILMWTLNLYKRPKISGAQLVAILPLAVVHTLGNLFTNMSLGKVAVSFTHTIKAMEPFFSVVLSAMFLGEFPTIWVMSSLVPIVGGVALASLTEASFNWAGFWSAMASNLTNQSRNVLSKKFMVRKEDSLDNITLFSIITIMSFFLLAPYAFFAEGVKFTPAYLEAAGVNVNQLYTRSLIAALCFHAYQQVSYMILQRVSPVTHSLGNCVKRVVVIVTSVLFFRTPVSPINGLGTGVALAGVFLYSRVKRIKPKAKTE

SEQ ID NO: 7943 - protein, 394 aa, Pseudomonas syringae
MLKMSGLSASEARGDGAWVEDTQGGRWLDFGSFGVHLLGHSHSGVVSALVEQIQRFGLSDENLSNEPIVLAAERLLVMAGPEKDKVIFGNTGSEVVEAALKLARIVTGRRRVIAFEQAYHGRTAAALSVSHGYMRHAGLLTEGDVVFCPIDDLDAVANALEAGDIAAIIIEPIQGEGGIRPVENEFLRGLGDLAQAFDCRLIFDEIQTGLGRIGSLRVDVPCDILLLGKVLGGGVFPISAALFTSKRFDAAARDPVVHASSFAGSALAGAVVNAVLDVVSAPDFTLRVQRLGDRVLSYLGQRLADNPLITDIRGQGLMIGVEFKRLDHVGEMIIEAAKRDLLLAFCLTDPKVLRLYPPAVISDADLETGLEHFCQSVEAITRTEFDKEIPLCQQ

SEQ ID NO: 7944 - protein, 417 aa, Yarrowia lipolytica
MSLTNKLSIKDLDLKNKRVFIRVDFNVPLDGTTITNNQRIVAALPSIKYAIDQGAKAVILASHLGRPNGQRVEKYSLKPVQAELSKLLGKPVTFLDDCVGPKVEEEVSKAKDGEVILLENLRFHPEEEGSHKDADGKKIKADPAKVEEFRKSLTSLADVYVNDAFGTAHRAHSSMVGIELPQRAAGFLVAKELEFFAKALEHPERPFLAILGGAKVSDKIQLIDNLLDKVNALIIGGGMAFTFKKTLENVKIGNSLFDEDGSKIVAGLVEKAKKNNVKLVFPVDYVTADKFSKDAKVGHATDAEGIPDGWQGLDCGPKSIEEFQKVIGESKTILWNGPPGVFEFDNFAKGTKAVLDACVKAVDNGATVIIGGGDTATVAKKYGAEDKLSHVSTGGGASLELLEGKTLPGVAALSEKK

SEQ ID NO: 7945 - protein, 102 aa, Zea mays
MEYLNLFEIHGIIRKTRTVMVHRFCRDCMDKSMRLGNNECPACSTHCASRRSLRDDPNYDALIAALYPDIDKYEEEVMSYVYKPYYQLVVYCLASYSFRCSH

SEQ ID NO: 7946 - protein, 293 aa, Yersinia pestis CO92
MKGIILAGGSGSRLHPITRGVSKQLLPIYDKPMIYYPLSVLMLAGIRDVLIISTPEDLPSFQRLLGNGDEFGINLSYAAQPSPDGLAQAFIIGEAFIDNEPCCLVLGDNIYFGQGFSPKLKAVAARQQGATVFGYQVMDPERFGVVEFDDNFRALSIEEKPSQPKSNWAVTGLYFYDNQVVDFAKQVKPSARGELEITSINQMYLDRGELTVELLGRGFAWLDTGTHDSLIEASTFVQTVEKRQGFKIACLEEIAWRNGWLDDDGVKRAATALAKTGYGKYLLDLLHARPRQY

SEQ ID NO: 7947 - protein, 351 aa, Yarrowia lipolytica
MTTIPKTQKAVIFETSGGPLMYKDVPVPVPADDEILVNVKYSGVCHTDLHAWKGDWPLDTKLPLIGGHEGAGVVVAKGKNVTTFEIGDYAGIKWINKACYTCEFCQVAAEPNCPKATMSGYTHDGSFQQYATANAVQAAHIPKNCDLAQVAPILCAGITVYKALKTAGLKAGEWAAVTGAGGGLGSLAVQYAKAMGYRVLAIDTGADKEKMCKELELGAEVFIDFAKSKDLVKDVQEATKGGPHAVINVSVSEFAVNQSVEYVRTLGTVVLVGLPAGAVCKSPIFQQVARSIQIKGSYVGNRADSQEAIEFFARGLVKSPIIIVGLSELESVYKLMEEGKIAGRYVLDCSK

SEQ ID NO: 7948 - protein, 470 aa, Pisum sativum
ASGSDENDVVIIGGGPGGYVAAIKAAQLGFKTTCIEKRGALGGTCLNVGCIPSKALLHSSHMYHEAKHSFANHGVKVSNVEIDLAAMMGQKDKAVSNLTRGIEGLFKKNKVTYVKGYGKFVSPSEISVDTIEGENTVVKGKHIIIATGSDVKSLPGVTIDEKKIVSSTGALALSEIPKKLVVIGAGYIGLEMGSVWGRIGSEVTVVEFASEIVPTMDAEIRKQFQRSLEKQGMKFKLKTKVVGVDTSGDGVKLTVEPSAGGEQTIIEADVVLVSAGRTPFTSGLNLDKIGVETDKLGRILVNERFSTNVSGVYAIGDVIPGPMLAHKAEEDGVACVEYLAGKVGHVDYDKVPGVVYTNPEVASVGKTEEQVKETGVEYRVGKFPFMANSRAKAIDNAEGLVKIIAEKETDKILGVHIMAPNAGELIHEAAIALQYDASSEDIARVCHAHPTMSEAIKEAAMATYDKPIHI

SEQ ID NO: 7949 - protein, 241 aa, Tradescantia virginiana
  unsure (1)..(241): unsure at all Xaa locations
VQLKRMENKINRQVTFSKRRGGLLKKAHEISILCDAEIALIIFSTKGKLYEYATNSKMDNILERYERYSYAEKALTSSDPDIQGNWCQEYAKLKSKVEALCKSQRHLMGEQLETLNLKELQQLEQQLEGSLKHVRSRKTQVMLDSISELQRKEKSLEEQNKNLEKEILEKQKIKALAQQAHWEHQNQPAPRGSPPRPFVIAESHPTLNIGHFQGRTNAVEAEENQQPXMRICSSLLPPWML

SEQ ID NO: 7950 - protein, 153 aa, Glycine max
ISCPDDTTANRAGAGMVVPFTDLKSMVGFHTRKTSHDITCIASNGRRVQCMQVWPPVDKKKVETLSYLPDLDDAQLAKEVQYLLRKGWIPCLEFESQHGFPYREHNRSPRYYDGRYWTMWKLPMFDCTDACQVLKELQEAKTPYPIDLIRIIG

SEQ ID NO: 7951 - protein, 567 aa, Oryza sativa
MASSALICDTEQWKGLQAHVGEIQKTHLRHLMHDVERCKAMTAEYEGIYLDYSRQRATGETMEKLFKLAEAAKLKEKIEKMFRGDKINSTENRSVLHVALRAPRDEVINSNGVNVVPEVWGVKDKIKQFSETFRSGSWVGATGKALTNVVSVGIGGSFLGPLFVHAALQTDPEAAESAKGRQLRFLANVDPVDVARSIKDLDPETTLVVVVSKTFTTAETMLNARTLKEWIVSSLGPDAVAKHMIAVSTNLELVEKFGIDPKNAFAFWDWVGGRYSVCSAVGVLPLSLQYGFPIVQKFLEGAASIDKHFRSSSFEKNIPVLLGLLSVWNVSFLGYPARAILPYSQALEKFAPHIQQLSMESNGKGVSIDGVQLSFETGEIDFGEPGTNGQHSFYQLIHQGRVIPCDFIGVVKSQQPVYLKGEIVSNHDELMSNFFAQPDALAYGKTPEQLHSEKVPEHLIPHKTFQGNRPSLSLLLPSLSAYEIGQLLAIYEHRIAVQGFLWGINSFDQWGVELGKSLASQVRKSLHASRVEGKPVLGFNSSTTSLLTRYLAVEPSTPYNTTTLPKV

SEQ ID NO: 7952 - protein, 293 aa, Streptomyces nogalater
MKGIILAGGTGSRLHPTTLAVSKQLLPVGDKPMIYYPLSVLMLAGVTDILIISTPHELPRMRRLFGDGAQLGLRLAYAEQEKPRGIAEAFLIGADHVGSDAVALALGDNIFHGSSFQGVLRKEAEELDGCVLFGYPVKDPQRYGVGEANASGRLVSIEEKPVRPRSNRAITGLYFYDNEVVDIARRLRPSARGELEITDINRTYMERGRARLVDLGRGFAWLDTGTPESLLQASQYVSALEERQGIRIACIEEVALRMGFINAQACYELGARLSGSGYGQYVMAIAEECTGRV

SEQ ID NO: 7953 - protein, 525 aa, Glycine max
  unsure (1)..(525): unsure at all Xaa locations
FPFSCHRSKHQPFPYSSSVSSLSPFSRSRFLSSTPFSMASDSPFPVTAQNINPKVLKCEYAVRGEVVTLAQNLQKDLQANPGSHPFDEILYCNIGNPQSLGQQPITFFREVLALCDHPAILDKSETQGLFSTDAIQRAWQIVDQIPGRATGAYSHSQGVKGLRDTIAAGIEERDGFPANPDDIFMTDGASPAVHNMMQLLIRSENDGILCPIPQYPLYSASIALHGGCLVPYYLDEATGWGLEIPELCTRSNWRXHKSKGINVRALVVINPGNPTGQVLGEANQRDIVEFCKQEGLVLLADEVYQENVYVPEKKFHSFKKVSRSMGYGENDITLVSFQSVSKGYHGECGKRGGYMEVTGFSAEVREQIYKVASVNLCSNISGQILASLVMSPPKVGDESYDSFMAEKENILASLARRAKTLEDAFNKLEGVTCNKAEGAMYLFPQIRLSEKAIKAAEAANATPDNFYCKRLLNATGVVVVPGSGFGQVPGTWHFRCTILPPEEKIPAIVTRLTEFHEKFMDEFRD

SEQ ID NO: 7954 - protein, 188 aa, Triticum aestivum
  unsure (1)..(188): unsure at all Xaa locations
MVPTEMAWSDTSAVPLQGLKSTDGLPXVSRRSNGASXSAAVSNGGRIRCMQVWPIEGIKKFXETLSYLPPLSREALLKQVDYLIRSKWVPCLEFSKVGFIFREHNASPGYYDGRYWTMWKLPMFGCTDATQVINEVEEVKKESPDAYVRIIGFHNMRQVQCVSFIAFNPPGCEESRQGLNSSLPTGHI

SEQ ID NO: 7955 - protein, 146 aa, Schizosaccharomyces pombe
FIDGKCDAIGEGDVIWLETPLNPLGIAFDIPFYKELAKKKGAILVVDSTFAPPPIQDALVLGADYVVHSATKYLAGHSDVLAGVTASKDRSKILDLKADRAYLGTILHPQQAFLLLRSLRTFPLRIAEHSENGFLVALHLNKLATD

SEQ ID NO: 7956 - protein, 460 aa, Triticum aestivum
  unsure (1)..(460): unsure at all Xaa locations
MATTNWTLPDHPTLPKGKTVAVVVLDGWGEASPDQYNCIHVAQTPVTDSLKNGAPEKWRLVKAHGTAVGLPXXDDMGNSEVGHNALGAGRIFAQGAKLVDAALASGKIWEDEGFNYIKESFDKGTLHLIGLLSDGGVHSRLDQVQLIVKGASERGAKRIRLHILTDGRDVLDGSSVGFVETIEKDLAQLREQGVDARIASGGGRMYVTMDRYENDWSVVKRGWDAQVLGEAPYKFPNALEAVKTLRAEPKANDQYLPPFVIVDESGKSVGPIVDGDAVVTFNFRADRMVMLAKALEFPDFDKFDRVRVPKIKYAGMLQYDGELKLPSKYLVSPPLIERTSGEYLVKNGVRTFACSETVKFGHVTFFWNGNRSGYFDETREEYVEIPSDSGITFNEQPKMKALEIAERTRDAILSGKFDQVRINLPNGDMVGHTGDIEATVVACKAADEAVKMVLDAVEQV

SEQ ID NO: 7957 - protein, 438 aa, Aspergillus fumigatus
MPISKIHARSVYDSRGNPTVEVDVATETGLHRAIVPSGASTGQHEAHELRDGDKTQWGGKGVLKAVKNVNETIGPALIKENIDVKDQSKVDEFLNKLDGTANKSNLGANAILGVSLAVAKAGAAEKGVPLYAHISDLAGTKKPYVLPVPFQNVLNGGSHAGGRLAFQEFMIVPDSAPSFSEALRQGAEVYQKLKALAKKKYGQSAGNVGDEGGVAPDIQTAEEALDLITEAIEQAGYTGKIKIAMDVASSEFYKADVKKYDLDFKNPESDPSKWLTYEQLADLYKSLAAKYPIVSIEDPFAEDDWEAWSYFYKTSDFQIVGDDLTVTNPGRIKKAIELKSCNALLLKVNQIGTLTESIQAAKDSYADNWGVMVSHRSGETEDVTIADIAVGLRSGQIKTGAPCRSERLAKLNQILRIEEELGENTVYAGSKFRTAVNL

SEQ ID NO: 7958 - protein, 351 aa, Clostridium perfringens
RSFGENSGYEYSRTGNPTRESLEKLIADIEYGKRGFAFASGLAAITAVLSLFKSGDKLLITNNLYGGTFRVIDKIFSNFGIGYEIIDDFTNIEEKIDKSVKAIYIETPTNPLLDVIDIKIASDKAKKYNLLTIVDNTFMTPYFQNPLNLGADIVIHSATKYLGGHSDLVAGLVVVKDEELGEKIHFIQNSTGGILQPFDSFLLIRGIKTLSVRMDRHELNANFIAEKLGDLEGIDNVYYPGLKTHIGHDIQKKQASGFGGIISFTLNKKYNYEKFFNSLELITFGESLGGVESLACHPASMTHAAMPLELRERIGITDRLIRISVGIEDKEDILEDIQKALVKAGDKNEIL

SEQ ID NO: 7959 - protein, 397 aa, Wolbachia endosymbiont of Drosophila melanogaster
MSDLAKRMSLIKPSPTIAVTDKANKLKNEGKKICVLAAGEPDFDTPDHIKKAAIQAISEGKTKYTAVDGTRELKEAIINKLRKDNNLEYTLNQICVGTGAKQVLFNLFMATINSGDEVIIPAPYWVSYVDMVSLFGGLPVVVECKQNFKLTVELLKSRITKKTKWLILNSPNNPAGAVYTCDELKDIAQILLEYPHMNVVTDDIYEHIIYDEKFFTIAQVEPKLYDRVFVVNGVSKAYAMTGWRIGYIAGRSDVVKAISTLQSQSTSNPNSIAQAAAAAALNGDHSFLKERTRIFKSRRDFMVKELNSAPGLSASVPQGAFYLFVSCEGLLSKSTKSGKIINNDLDFTEYLLGDHLVAVVPGIAFGLENFIRISYATSQEQLEIGCDSITKACQELK

SEQ ID NO: 7960 - protein, 412 aa, Wautersia eutropha
MMSLSHASVPHTNPTAPHTLAALLAAGGLAGKRVFIRADLNVPQDAAGDITDDTRIRASVPAIAACLQAGAAVMVTSHLGRPQEGAPDPRHSLAPVGRRLSELLGRQVPLLSGWTEGGFQVPPGQVVLLENCRMNTGEKKNSDELAQKMAALCDVYVNDAFGTAHRAEATTHGIARYAPVACAGPLLAAEIDALGKALGQPARPLVAIVAGSKVSTKLTILKSLADKVDNLVVGGGIANTFMLAAGLKIGKSLAEPDLLADARAIIDIMAARGASVPIPVDVVCAKEFSATAAAAVKDVRDVADDDMILDIGPKTAAMLADQLKAAGTIVWNGPVGVFEFDQFGNGTRVLAQAIAESKAFSIAGGGDTLAAIAKYGIADRVGYISTGGGAFLEFLEGKKLPALDVLEQRAAS

SEQ ID NO: 7961 - protein, 266 aa, Triticum aestivum
  unsure (1)..(266): unsure at all Xaa locations
REQKLELHRGGGRSRTSGSPGLQDSAPATFYGGGDASGTMGGACGYGNLYSTGYGSNTAALSTALFNNGLSCGACFEVRCDPGGTEAGAPHACLPGSTVVTATNFCPPNFAEYSDAGGWCNPPRAHFDMSQPVFQRIALYRAGIVPVSYRRVACQKKGGIRFTINGHSYFNLVLVTNVGGPGDVHAVSVKSTRSGWQXLSRNWGQNWQSNALLDGQGLSFRVTXGNGQSVVSNNAVPXGWSXGQTLTGPISTESARIHSAEQYYLE

SEQ ID NO: 7962 - protein, 235 aa, Tradescantia virginiana
VQLKRMENKINRQVTFSKRRTGLLKKAHEISVLCDAEVGLIIFSTKGKLYEYSTDNSMAKILERYDRYATAERAVLEANLNLEVGSHYEYRKIKAKVDALQKSQRHLMGEQLDTMTNKELQQLEQQLETALKHIRSRKNQMMLESVAALQKKEKALREQKSILEKKLIEKQKDMEISQIHQYQAHEDNTSPTSLVLTNSLPTTLNTNGCITHAIEEEHAPTLPHTNNNNLPPWMV

SEQ ID NO: 7963 - protein, 431 aa, Deinococcus radiodurans
MGERKCGGWPPKVFLHSLSPGGAGGSTKAVVWHGIGDIRLDDVPEPKIEAPTDAIVRLTASAICGTDLHFIRGTMSDMVPGTILGHEGVGIVEAVGPEVRNFVPGDRVVIPSSASCGYCPPCREGNTSQCDNANPNGPSAGTAFYGGPKSSGPLNGMQAEKVRVVYANSSLVKLPDNVSDDQAIMISDIFPTAYFGAEIAGVKTGSVVVVLGCGPVGQFSIISAKLLGATRVIAVDRLDDRLDMARKNGAEVINFEKEDPVEAVKKLTGGLLADCVIDAVGVDAQHAHAGPAKPDAEKEQKFEQEVQEVAPDAKPEKDGQWTPGDAPSQASEWAIEMTKKAGQIGIIGVYSPQMTTYPIGKAMNKNLTIRMGNCNHRAIIPGLVDLVAAGVVDPARVLTEHEHLGSAIEAFEAFDKRQPGWIKVELEPQAG

SEQ ID NO: 7964 - protein, 226 aa, Paeonia suffruticosa
SQVTFSKRRGGLLKKAHEISVLCDAEVALIVFSTKGKLFEYSTDSSMEKILDRYEQYSIAERQLVEEPGSQGNWSLEYSKLRAKIELLQRNQRRFMGEDLDSLSPKDLQNMEQQLDVSLKNIRSRKNQLMYESISELQKKERAIQEQNNLLAKQIKEKEKTMAQQAQWEQQIHHGPNASAYLLSPHELTTLNMGGNYQGEPTEMRRNELDLTLEPIYTCHLGCFGA

SEQ ID NO: 7965 - protein, 574 aa, Mesorhizobium sp. BNC1
MGDVDTSVNRPDAKHGFRQKLRARLTGPKSIGFYLFLLILVTIVPALAISAVLLQRNDAAQRAVVETLAEAMAGSIAEAVDRELSGMVTTLRVLSTTRSLTTGNLHDFYERSRMALAGTGSYLIVLDGNLRQLLNTRVPFGASLGPTANPASAKQALQTRAAVVSGVFFGQVSQKWVFNVILPILRENQPPLLLVLTRNAETMADTLSQEMLRGGWNASLLDREGIVIASSFMSSSIGKPFFLDVHNGREPQTGRISESVDSQSYVAIVDESAYSGWKVVVWAPTAAVEEPTRRALRSLFSSSLVIIAIGTLAAWLIGRQIARSIRRLAYDARRLGAGQAVDAVRYPIAEVATVSAALSEAATDRKTAENEIRLLMREVAHRAKNQLTVVSSMAKQTARSSRSLPVFLDSFQKRLYGLARSTDLLIAGGATGVELRELLMAQIEPFRPEDMKRLDISGPPFRLSNQAAQTIGLAVHELATNAAKYGAFGARTGRLSVTWTIDGEVLVLTWREHLTLLRRRSMRRGFGTEIIERMLGGTLDAEISRTFHRDGLECIFRIPLKRLAPERTQPASPF

SEQ ID NO: 7966 - protein, 253 aa, Cytophaga hutchinsonii
MTGTAWPIIIFFVAHWYLSLFSQTFFLHRYSAHAMFKMNKFWEKFFFIFLYLTQGSSYLVPRAYGALHRMHHAYSDTEKDPHSPLYSRNAFVMMWKTKDIYNAVLRREAQVEDKFNKNLPEWAFIDNIGDMWISRIIWGTLYVLFYIYFVPADMWYLYLLLPIHFLMGPVHGAIVNWFGHKLGYQNFDNKDASRNTLALDVLLGGELFQNNHHMYGSRPNFAMKWFEFDPTYPVIKVLHYVRIIRLVNPDAKA

SEQ ID NO: 7967 - protein, 781 aa, Mesorhizobium loti
MEYGPAPEARNEADAWLAARDFGKALFIDGAWKAASGGKTFDTSEPSSGKLLAKVSDASAADIDAAVAAATKALPKWSASSGYARAKVLYAIGRAMQRHQRLFAVLESIDNGKPIRESRDIDVPLAIRHFIHHAGWAQALDRDFPGHKGVGVVGQIIPWNFPLLMLAWKIAPALAAGCTVVLKPAEFTPLTAILFAEICERAGVPKGVVNIVQGGPEAGAAIVNHPGIQKIAFTGSSEVGKIIRKATAGSGKKLSLELGGKSAFIVFEDADLDSAVEGLVDGIWFNQGQVCCAGSRLLVQEGIAEALIAKVKTRMSRLRVGSPLDKNTDIGPLVDLTQLDRVKGLVAEGAKQGAVCWQPDAALPSSGYYHLPTLATGVSPANILAQEEVFGPVLATMTFRNTEEAIELANNTRYGLAASVWSENVNLALHVAPQLKAGVVWVNGTNMFDAACGFGGYRESGFGREGGREGMFEYLTAKLPLGPVIKPAAVSAQPVEQADGAAIDRTAKLFIGGKQVRPDGNYSLAVATAKGKLAGEVGFGNRKDIRDAVSAARACKGWPEATAYNRSQVLYYLAENLSGRAGEFAARLTELTGATPKAAREEVDQSIERLFLYAGLADKFEGRVHQPPARAVTLALHEPVGVVGIVAPDASPLLGLISLVAPALAMGNTVVAVPSERYPLLATDLYQVIEYSDVPAGAINIVTGRSAELAGVLAKHDDVDGLWVFADAETCARAEAESIGNLKRVWSGNGRSLDWASDEAAGDAFLRRAVEVKNVWVPYGD

SEQ ID NO: 7968 - protein, 267 aa, Zea mays
  unsure (1)..(267): unsure at all Xaa locations
VNPRLVLLPGSPPSASDTWPTRGNPTVEVDLVAGDGRLHRSAVPSGASTGIYEALELRDGDKAVYGGKGVLQAVRNINEVIAPKLIGVDVRNQSDVDAVMLDIDGTQNKSKLGANAILGVSLSVCRAGAGAKGVPLYKHIQELAGGEERVMPVPAAKGRNGGSHAGNNLAMQELMSLPGGATTFAVALRMGSEVYHVLKSIIKTKYGQHACNVGDEGGSAPNGQDNREGLILLMDAIEKAGYTXKIKIGMDVAASEFLTKDGXYDLN

SEQ ID NO: 7969 - protein, 469 aa, Synechocystis sp. PCC 6803
MTSLLTSSAQAPVANAPFPAGGLDQSKFDCRAVWYPLAYEEDLDKRKPTRFTLLGEDLVIWWEANSQQWRVYADQCPHRLAPLSEGRINKAGQLECPYHGWTFAGSGQCQAIPQQHTGGQAHTSKRACVRSLPTQVAQGLLFAFPGETDQAEKVALPLVDVLDGDQSEWVCLNTFRDLPYDAFTLMENVLDSSHIPYTHHKTVGKRSNVSPVDLEIIHGDRQGFTGIWEEGPRKGTLGKQTTTFIAPGLMWHDLTSKQFGRTLTVVYATPIRPGECRLFARFPFKFPSKFPRLVIGFTPRWYSHLGQNRVLEDDQIFLHFQERFVQGKGGSPNYEKDCYLPTKADLFVAEFHRWIEQYQVKPFGDSPLPDRQSVEQLMDRYHSHTEHCHSCRNALANIEKIQTGSLAIAIICLVCLPVASLGLAPNFALGLGLTVLTGLGFALWAGLGKFKQSFYQGNPIPPRNILDKG

SEQ ID NO: 7970 - protein, 535 aa, Cytophaga hutchinsonii
MSNQTIQTPTTNGMPSGIPFIVGNEAAERFSFYGMRAILAVFMTSYLHMTESTATEWAHTFNSAVYFTPILGAFLADIFIGKYRTILYLSVLYCFGHLVLALNESKDGLFWGLTLISIGAGGIKPCVSAHVGDQFGIKNKHLIERVFSIFYFAVNFGSLFSTLLIPYLLEHYGPAYAFGLPGILMFVATFIFWSGRNKFVHVPPFGKAYFKTVFGKEGLSAIGRLIFIYAFIAIFWALYDQHASTWVYQSKSAFLNKDINLFGLVEFTLLPSQIQAANPVLVLVLIPAFAFFIYPALNKIITLKPLIKILLGMFMCVLAFLVAAYIEKRISSGIETSVWWQFLAYLILTMAEVMVSITALEFSYTQAPNQMKSTVMGIFMFSISLGNILVAVISNYNNLHEEVKTVEIGTKTYISIKDYTPVKGEKIEFEDGTGLFILQQNSKTSLMDTIPLGGTYLVGDVDAVSNRFTLEDNGWHAIQTIKKSELPKGYKVVFHRFKHQSYFYMYALLMFVTAVLFIGVALKYKGKTYIQGEAV

SEQ ID NO: 7971 - protein, 222 aa, Schizosaccharomyces pombe
MTYLSRSYSFYAAYHSNPVNIKIHQVCIPLLLLTALVLLHNFVITLINSKLQINVAHLVGLAYQIFYVTLDPLDGLLYSPVLYLFSYILPSKLFTIFSRSLVNRSAAVVHVICWILQFIGHGVFEKRKPALLDNLIQSLFIAPLFAFLETGPFVGYYPSVVSKIRANIKLKDVGENYPNLSEFLFPPSMVEDAVSGVVEDASQLSYCIRPLRLSDIDDGIVF

SEQ ID NO: 7972 - protein, 484 aa, Proteus mirabilis
  unsure (1)..(484): unsure at all Xaa locations
MEKKKLTTAAGAPVVDNNNVITAGPRGPMLLQDVWFLEKLAHFDREVIPERRXHAKGSGAFGTFTVTHDITKYTRAKIFSEVGKKTEMFARFSTVAGERGAADAERDIRGFALKFYTEEGNWDMVGNNTPVFYLRDPLKFPDLNHIVKRDPRTNMRNMAYKWDFFSHLPESLHQLTIDMSDRGLPLSYRFVHGYGSHTYSFINKDNERFWVKFHFRCQQGIKNLMDDEAEALVGKDRESSQRDLFEAIERGDYPRWKLQIQIMPEKEASTVPYNPFDLTKVWPHADYPLMDVGYFELNRNPDNYFSDVEQAAFSPANIVPGISFSPDKMLQGRLFSYGDAHRYRLGVNHHQIPVNAPKCPFHNYHRDGAMRVDGNSGNGITYEPNSGGVFQEQPDFKEPPLSIEGAADHWNHREDEDYFSQPRALYELLSDDEHQRMFARIAGELSQASKETQQRQIDLFTKVHPEYGAGVEKAIKVLEGKDAK

SEQ ID NO: 7973 - protein, 287 aa, Bacillus cereus ATCC 10987
MWSEHVTLEYPYHFEEVLKRLSFDPLNVIQLDEKVIYVPLCIDEEQIVVRLQGIGTVQNPQFWISSQTGDSEKVMKRMRAIFHWNEPFQDIQNHFLNTSLRPLFETYAYTPIILEFDYFACLLRCIIHQQINLKFATVLTEQFVKRYGTEKNGVFFFPTPEIVANISIEELREQKFSQRKAEYMVGLAKCIIGGKLDLTRIENETEEGVAAQLLPIRGIGAWTVQNFLMFGLGRKNMFPKADIGIQRAVQGVFQLDDKPDDAFLENVKQECEPYCSYAALYLWKSIE

SEQ ID NO: 7974 - protein, 989 aa, Pichia pastoris
MPEPSISDLSFTSFVTNDDNLFEETFNFYTKLGFHATRSYVKDNRSDFELTGISTDSIKEIWLESFPLSEVVEASGGRELRKPLQESVGYESEALLGYSPYQSGGVVIKLRLSNHDLEKNNDLPGEVTFFTASIDKLKAKLIEIGAEIIPSKIDLVEFSTRDPMGDVISFSSYPSLNSKKITSPDFFLHPKKEVRSEESIVEQVKSEEGKKKIAIITSGGDAPGMNAAVRAVTRAGIFYGCKVYACYEGYTGLVKGGDMLKELQWQDVRGLLSIGGTIIGTARCKEFRERWGRLQACYNMVSNGIDALVVCGGDGSLTGADLFRKEWPELIKELLGEDKITKEQYETHRNLTIVGLVGSIDNDMCGTDSTIGAYSSLERIIELVDYIDATAASHSRAFVVEVMGRHCGWLGLMSGIATGADYIFIPERPPSESNWKDDLKKVCLRHREKGRRKTTVIVAEGAIDDQLNPITSEEVKDVLVEIGLDTRITRLGHVQRGGAPCAFDRFLATVQGVDAVRAVLESTPAIPSPVISILENKIVRQPLVESVAQTKTVSAAIEAKDFDKALQLRDQEFATSYENFLSVSKYDDGSYLVPESSRLNIAIIHVGAPTSALNPATRVATLNSLAKGHRVFAIRNGFAGLIRHGAVRELNWIDVEDWHNTGGSEIGTNRSLPSDDMGTVAYYFQQYKFDGLIIIGGFEAFTALYELDAARAQYPIFNIPMCCLPATVSNNVPGTEYSLGSDTCLNTLSGYCDAVKQSASASRRRTFVVEVQGGYSGYLASYAGLITGALAVYTPENPINLQTVQEDIELLTRTYEEDDGKNRSGKIFIHNEKASKVYTTDLIAAIIGEAGKGRFESRTAVPGHVQQGKSPSSIDRVNACRLAIKCCNFIEDANFQVKHNANLSADERHLRFFYDDGVKTSAVSGKSSVIDDNTSVVIGIQGSEVTFTPVKQLWENETHHKWRKGKNVHWEQLNIVSDLLSGRLSIRTT

SEQ ID NO: 7975 - protein, 585 aa, Raphanus sativus
MCGILAVLGCSDDSQAKRVRVLELSRRLRHRGPDWSGIYQNGGNYLAHQRLAIIDPASGDQPLFNEDKSIVVTVNGEIYNHEELRKGLKNHKFHTGSDCDVIAHLYEEHGENFVDMLDGIFSFVLLDTRDNSFMVARDAVGVTSLYIGWGLDGSLWVSSEMKGLHEDCEHFEAFPPGHLYSSKSGGGFKQWYNPPWFNESVPSTPYEPLAIRRAFEDAVIKRLMTDVPFGVLLSGGLDSSLVASITARHLAGTKAAKRWGPQLHSFCVGLEGSPDLKAGKEVAEYLGTVHHEFHFTVQDGIDAIEDVIYHVETYDVTTIRASTPMFLMSRKIKSLGVKMVLSGEGSDEIFGGYLYFHKAPNKQEFHQETCRKIKALHKYDCLRANKATSAFGLEARVPFLDKEFINTAMSLDPESKMIKPEEGRIEKWVLRRAFDDEERPYLPKHILYRQKEQFSDGVGYSWIDGLKAHAAENVNDKMMSNAAYIFPHNTPLTKEAYYYRMIFERFFPQNSARLTVPGGATVACSTAKAVEWDASWSNNMDPSGRAAIGVHLSAYDGSKVALPLPPHKAIDDMPMMMGQEVVIQT

SEQ ID NO: 7976 - protein, 93 aa, Zea mays
KVNQIGSVTESIEAVRMSKKAGWGVMASHRSGETEDTFIADLSVGLATGQIKTGAPCRSERLAKYNQLLRIEEELGAEAVYAGANFRTPVEPY

SEQ ID NO: 7977 - protein, 498 aa, Zea mays
  unsure (1)..(498): unsure at all Xaa locations
MDPYKHRPSSAFNAPYWTTNSGAPVWXNNDSSLTVGARGXPSCWEDYHLVEKLANFDRERIPERVVHARGASAKGFFEVTHDITHLTCADFLRAPGVQTPVIVRFSTVIHERGSPETLRDPRGFAVKFYTREGNWDLVGNNFPVFFIRDGIKFPDMVHALKPNPRTHIQDNWRILDFFSHHPESLHMFSFLFDDVGIPADYRHMDGXSGVHTYTLVSRAGTVTYVKFHWRPTCGVRSLMDDEAVXLAGANHSHATKDLTDAIAAXGNFPEWTLYIQTMDPEMEDRLDDLDPLDVTKTWPEDAFPLQPVGRLVLNRNIDNFFAENEQLAFCPGLIVPGIYYSDDKLLQTRIFSYSDTQRHRLGPNYLLLPANAPKCAHHNNHYDGFMNFMHRHEEVDYFPSRXYDAARNAPRYPIPTAHIAGRREKTVISKENNFKQPGERYRAMDPARQERFITRWVDALSDPRLTHEIRTIWLSNWSQADRSLGQKLASRLSAKPSM

SEQ ID NO: 7978 - protein, 585 aa, Hordeum vulgare subsp. vulgare
MCGILAVLGCADDTQGKRVRVLELSRRLKHRGPDWSGMHQVGDCYLSHQRLAIIDPASGDQPLYNEDKSIVVTVNGEIYNHEQLRAQLSSHTFRTGSDCEVIAHLYEEHGENFIDMLDGVFSFVLLDTRDNSFIAARDAIGVTPLYVGWGIDGSVWISSEMKGLNDDCEHFEIFPPGHLYSSKEGGFKRWYNPPWFSEVIPSVPYDPLALRKAFEKAVTKRLMTDVPFGVLLSGGLDSSLVAAVTVRHLAGTKAAKRWGTKLHSFCVGLEGSPDLKAAKEVANYLGTMHHEFTFTVQDGIDAIEDVIYHTETYDVTTIRASTPMFLMSRKIKSLGVKMVISGEGSDEIFGGYLYFHKAPNKEELHRETCQKIKALHQYDCLRANKATSAWGLEARVPFLDKEFINEAMSIDPEWKMIRPDLGRIEKWVLRKAFDDEEQPFLPKHILYRQKEQFSDGVGYSWIDGLKAHTESNVTDKMMSNAKFIYPHNTPTTKEAYCYRMIFERFFPQNSAILTVPGGPSVACSTAKAVEWDARWSGNLDPSGRAALGVHLSAYEQEHLPATIMAGTSKKPRMIKVAAPGVAIES

SEQ ID NO: 7979 - protein, 1015 aa, Escherichia coli
MDVSRRQFFKICAGGMAGTTVAALGFAPKQALAQARNYKLLRAKEIRNTCTYCSVGCGLLMYSLGDGAKNAREAIYHIEGDPDHPVSRGALCPKGAGLLDYVNSENRLRYPEYRAPGSDKWQRISWEEAFSRIAKLMKADRDANFIEKNEQGVTVNRWLSTGMLCASGASNETGMLTQKFARSLGMLAVDNQARVCHGPTVASLAPTFGRGAMTNHWVDIKNANVVMVMGGNAAEAHPVGFRWAMEAKNNNDATLIVVDPRFTRTASVADIYAPIRSGTDITFLSGVLRYLIENNKINAEYVKHYTNASLLVRDDFAFEDGLFSGYDAEKRQYDKSSWNYQLDENGYAKRDETLTHPRCVWNLLKEHVSRYTPDVVENICGTPKADFLKVCEVLASTSAPDRTTTFLYALGWTQHTVGAQNIRTMAMIQLLLGNMGMAGGGVNALRGHSNIQGLTDLGLLSTSLPGYLTLPSEKQVDLQSYLEANTPKATLADQVNYWSNYPKFFVSLMKSFYGDAAQKENNWGYDWLPKWDQTYDVIKYFNMMDEGKVTGYFCQGFNPVASFPDKNKVVSCLSKLKYMVVIDPLVTETSTFWQNHGESNDVDPASIQTEVFRLPSTCFAEEDGSIANSGRWLQWHWKGQDAPGEARNDGEILAGIYHHLRELYQSEGGKGVEPLMKMSWNYKQPHEPQSDEVAKENNGYALEDLYDANGVLIAKKGQLLSSFAHLRDDGTTASSCWIYTGSWTEQGNQMANRDNSDPSGLGNTLGWAWAWPLNRRVLYNRASADINGKPWDPKRMLIQWNGSKWTGNDIPDFGNAAPGTPTGPFIMQPEGMGRLFAINKMAEGPFPEHYEPIETPLGTNPLHPNVVSNPVVRLYEQDALRMGKKEQFPYVGTTYRLTEHFHTWTKHALLNAIAQPEQFVEISETLAAAKGINNGDRVTVSSKRGFIRAVAVVTRRLKPLNVNGQQVETVGIPIHWGFEGVARKGYIANTLTPNVGDANSQTPEYKAFLVNIEKA

SEQ ID NO: 7980 - protein, 325 aa, Arabidopsis thaliana
MHSLNETVIPDVDYMQSDRGHMHAAASDSSDRSKDKLDQKTLRRLAQNREAARKSRLRKKAYVQQLEDSRLKLTQVEQELQRARQQGVFISSSGDQAHSTGGNGGALAFDAEHSRWLEEKNRQMNELRSALNAHAGDTELRIIVDGVMAHYEELFRIKSNASKNDVFHLLSGMWKTPAERCFLWLGGFPSSELLKLLANQLEPMTERQVMGINSLQQTSQQAEDALSQGMESLQQSLADTLSSGTLGSSSSDNVASYMGQMAMAMGKLGTLEGFIRQADNLRLQTLQQMLRVLTTRQSARALLAIHDYSSRLRALSSLWLARPRE

SEQ ID NO: 7981 - protein, 204 aa, Zea mays
  unsure (1)..(204): unsure at all Xaa locations
MEFGSGPWLLFRGQLPGHLTEDNGFDVFVNGRRGGGGXAMRRANIADYFVGPGLDDLIEQLTQNDRRGPPPAAQSSIDAMPTSSIDAMPTVKITQRHLSGDSHCPICKEKFEMGSEEAREMPCKHLYHSDCIVPWLEQHNSCPVCRYELPPQGSATGASCSRARSTDQSQSSSSSSSSGRTSGRQRRRNPFSFLWPFRSSSSSR

SEQ ID NO: 7982 - protein, 157 aa, SYNECHOCOCCUS SP. WH 8102
MAISVSNVTVTTPDGSSKSLGDYSGKVLLIVNVASRCGFTKQYAGLQGLNAAYADKGLAVLGFPCNDFGAQEPGSLEEIKSFCSTTYGADFELFEKVHAMGSTTEPYSTLNQMDPTGDVAWNFEKFLVGKDGTVIARYKSGVDPEELKAPIEAALAA

SEQ ID NO: 7983 - protein, 572 aa, Streptococcus pyogenes SSI-1
MTYTENFQKWLDFEQLPDYLRQELLSMDEKTKEDAFYTNLEFGTAGMRGYIGAGTNRINIYVVRQATEGLAKLIETKGEEAKKRGVAIAYDSRHFSPEFAFESAQVLAQHGIKSYVFETLRPTPELSFAVRHLNAYAGIMVTASHNPAPFNGYKVYGQDGGQLPPADADALTDFIRAIENPFAVELADLDESKSAGLIQVIGEDVDMEYLREVKDVNINQDLINNFGKDMKIVYTPLHGTGEMLTRRALAQAGFESVVVVESQAKADPDFSTVKSPNPESQAAFALAEELGREVDADVLVATDPDADRLGVEIRQPDGSYKNLSGNQIGAIIAKYILEAHKTAGTLPENAALAKSIVSTELVTKIAESYGATMFNVLTGFKFIAEKIQEFEEKHNHTYMFGFEESFGYLIKPFVRDKDAIQAVLLVAEIAAYYRSRGLTLADGIDEIYKEYGYFAEKTISVTLSGVDGAAEIKKIMNKFRENGPKQFNNTDIVLLEDFQKQTATKNDGTISNLTTPPSNVLKYTLADDSWIAVRPSGTEPKIKFYIATIGDTLDIAQEKIANIETEINTFVG

SEQ ID NO: 7984 - protein, 194 aa, Zea mays
  unsure (1)..(194): unsure at all Xaa locations
MPTKRSVGTLGDKDLSGKKVLLRADLNVPLDDGQRIADDNRIRASVPTIKFLMGKDARVVLASHLGRPKGVTPKYSLKPLVPRLSELLGVDVVMANDCIGEEVEKLAAALPDGGVLLLENVRFYKEEEKNDPEFAKKXLASVADLYVNDAFGTAHRAHASTEGVTKYLRAAVAGFFMQKELDFLLEQLPPEKAF

SEQ ID NO: 7985 - protein, 470 aa, Zea mays
  unsure (1)..(470): unsure at all Xaa locations
MESRRGGSSAAAAEDAGGAMPSFGPTQHAIRAGADVNSMQPSRVTDFGALAQSAGFRIEDLANLNANALFNLKPNSHTIDNSPLQFGNYGKSISSHINTTEATTAATRIDPQLSAQQTGAQPILVALPTGNMENWGESAMADSPMTDTSTDPDTDERNQMFEQGLVAVPTASDSSDKSRDKLDQKTLRRLAQNREAARXSRLRKKAYIQNLESSRLKLTQLEQELQRARQQGIFISTSGFYVHVVXSVGALAFDMEYARWLEEHNKHVNELRLAVNAHAGDNDLRGIVGSVMAHYDEFFRLKGVAARSDVFHVLSGMWKTPAERCFMWLGGFRSSEVLKLLAGHLEPLTDQQLVGISNLQQSSQQAEDALSQGMEALQQSLAETLASGSLGPAGPSGNVANYMGQMAMAMGKLGTLENFLRQADNLRLQTLQQMQRILTTRQSARALLAISDYFSRLRALSSLWLARPRE

SEQ ID NO: 7986 - protein, 631 aa, Bacillus sp. RC607
MKKYRVNVQGMTCSGCEQHVAVALENMGAKAIEVDFRRGEAVFELPDDVKVEDAKNAIADANYHPGEAEEFQSEQKTNLLKKYRLNVEGMTCTGCEEHIAVALENAGAKGIEVDFRRGEALFELPYDVDIDIAKTAITDAQYQPGEAEEIQVQSEKRTDVSLNDEGNYDYDYIIIGSGGAAFSSAIEAVALNAKVAMIERGTVGGTCVNVGCVPSKTLLRAGEINHLAKNNPFVGLHTSASNVDLAPLVKQKNDLVTEMRNEKYVNLIDDYGFELIKGESKFVNENTVEVNGNQITAKRFLIATGASSTAPNIPGLDEVDYLTSTSLLELKKVPNRLTVIGSGYIGMELGQLFHNLGSEVTLIQRSERLLKEYDPEISEAITKALTEQGINLVTGATYERVEQDGDIKKVHVEINGKKRIIEAEQLLIATGRKPIQTSLNLHAAGVEVGSRGEIVIDDYLKTTNSRIYSAGDVTPGPQFVYVAAYEGGLAARNAIGGLNQKVNLEVVPGVTFTSPSIATVGLTEQQAKEKGYEVKTSVLPLDAVPRALVNRETTGVFKLVADAKTLKVLGAHVVAENAGDVIYAATLAVKFGLTVGDLRETMAPYLTMAEGLKLAVLTFDKDVSKLSCCAG

SEQ ID NO: 7987 - protein, 477 aa, Schizosaccharomyces pombe
MIRVFIVVKEGEDPTSLVFHFTGTPNARENCDMITNELRNAIQRQREGSQSKPQGANVDRVNSTNLEKDIDLQESLLTNNPDLLQTFKEAVMKGHLSNEQFWSTRLHLLRAHAVERSQQRGPYNVLSTIKPKTVDNQMKVSLTGQQIHDMFEQHPLLRKVYDKHVPPLAEGEFWSRFFLSKLCKKLRGDRITPMDPSDDIMDKYLKDNEEVTKVSDEPIASHLFDLEGNDQNANVIAELRPDITMRIDKEALPFMKNINQLSERLLEKSLGNSKRFNNENEETYLKESGFHDLEEEASDSKVVLKIKGQDQLLENNFVPSKNQVGLEPLPSLEALQHLYQEDSISLNHIEHDSDSLAEAAMQLTQSMREKHEFETHGTASNLPIDIKNEIVLCHTVTIEFLHQFWNALLNTTFPDKKAMAPLQNALLNSKKRVEAIASQAQEQNVDPKLVYELVSCTLTSIDTSISEYQRRMSYPPA

SEQ ID NO: 7988 - protein, 347 aa, Rubrobacter xylanophilus DSM 9941
MKALVYHGPGEKSWESKEDPRIERPTDAVVRIDTTTICGTDLHILKGDVPEVAEGRTLGHEAVGTVVDAGPGVENFEEGDRVLVSCISACGRCAYCRRGMYGQCLQGGGWILGHLVDGTQAEFARIPFADNSLYEVPEGLSDEQVVFISDILPTGYEVGVLNGKVEPGDTVAIVGAGPIGLASMLTARLYGPSRIIAIDLADSRLEQARRFGADTTINNSAQDAVEMVMELTGGLGADVVMEAVGVPATFELCTGLVRPGGHVANIGVHGAPATLHLERLWARDVTITTGLVDTYSTPTLLRLVAEGRLDPTPFATHRFALGEILDAYETFADAARTQALKVVLSAE

SEQ ID NO: 7989 - protein, 534 aa, Glycine max
MNAIATAAVLSLPFSFSKSSKLDTKKGLKGRFRVFAVYGEEIDKKNAWSALFDVEDPRSKVPQYKGKFLDVYQALEVARYDIQYCDWRARQDLLTIMLLHEKVVEVLNPLARDYKSIGTMKKELAELQEELAQAHQQVHISEARVSSALDKLAYMEELVNDKLLQERSTTEVSQTSSSPSTSFKPVDIEKRRSPRKSLDISGPVQSYHPHLKNFWYPVAFSTDLKDDTMIPIECFEEPWVIFRGKDGKPGCVQNTCAHRACPLHLGSVNEGRIQCPYHGWEYTTDGKCEKMPSTRQLNVKIKSLPCFETEGMIWVWPGNDPPTATLPSLLPPSGFEIHAEIVMELPIEHGLLLDNLLDLAHAPFTHTSTFAKGWSVPSLVNFLTPASGLQGYWDPYPIDMEFRPPCMVLSTIGISKPGKLEGQSTRECSTHLHQLHVCLPSSKQKTRLLYRMSLDFAPLLKHIPLMKYLWRHFAEQVLNEDLRLVVGQQERMNNGANVWNFPVAYDKLGVRYRMWRDALERGAKQLPFSPQHID

SEQ ID NO: 7990 - protein, 71 aa, Glycine max
  unsure (1)..(71): unsure at all Xaa locations
PGAGMVVPFTGLKSMVGXPTRKTTIDFTSIVTTGEKFQCMXQVWPPFGKKNFKTFSYLPNLDDPQWAKEVE

SEQ ID NO: 7991 - protein, 1016 aa, Escherichia coli
MQVSRRQFFKICAGGMAGTTAAALGFAPSVALAETRQYKLLRTRETRNTCTYCSVGCGLLMYSLGDGAKNAKASIFHIEGDPDHPVNRGALCPKGAGLVDFIHSESRLKFPEYRAPGSDKWQQISWEEAFDRIAKLMKEDRDANYIAQNAEGVTVNRWLSTGMLCASASSNETGYLTQKFSRALGMLAVDNQARVCHGPTVASLAPTFGRGAMTNHWVDIKNANLVVVMGGNAAEAHPVGFRWAMEAKIHNGAKLIVIDPRFTRTAAVADYYAPIRSGTDIAFLSGVLLYLLNNEKFNREYTEAYTNASLIVREDYGFEDGLFTGYDAEKRKYDKSSWTYELDENGFAKRDTTLQHPRCVWNLLKQHVSRYTPDVVENICGTPKDAFLKVCEYIAETSAHDKTASFLYALGWTQHSVGAQNIRTMAMIQLLLGNMGMAGGGVNALRGHSNIQGLTDLGLLSQSLPGYMTLPSEKQTDLQTYLTANTPKPLLEGQVNYWGNYPKFFVSMMKAFFGDKATAENSWGFDWLPKWDKGYDVLQYFEMMKEGKVNGYICQGFNPVASFPNKNKVIGCLSKLKFLVTIDPLNTETSNFWQNHGELNEVDSSKIQTEVFRLPSTCFAEENGSIVNSGRWLQWHWKGADAPGIALTDGEILSGIFLRLRKMYAEQGGANPDQVLNMTWNYAIPHEPSSEEVAMESNGKALADITDPATGAVIVKKGQQLSSFAQLRDDGTTSCGCWIFAGSWTPEGNQMARRDNADPSGLGNTLGWAWAWPLNRRILYNRASADPQGNPWDPKRQLLKWDGTKWTGWDIPDYSAAPPGSGVGPFIMQQEGMGRLFALDKMAEGPFPEHYEPFETPLGTNPLHPNVISNPAARIFKDDAEALGKADKFPYVGTTYRLTEHFHYWTKHALLNAILQPEQFVEIGESLANKLGIAQGDTVKVSSNRGYIKAKAVVTKRIRTLKANGKDIDTIGIPIHWGYEGVAKKGFIANTLTPFVGDANTQTPEFKSFLVNVEKV

SEQ ID NO: 7992 - protein, 87 aa, Glycine max
SARDLLVLIDDIYKYVDDVVEGRVAPDNKIGRFISEAVGSLPKLSPSVFDKLVNDSLQDHLLLLYLSSITRTQLSLAEKLNTAAQIL

SEQ ID NO: 7993 - protein, 1015 aa, Aquifex aeolicus
MNYMDISRRGFLKLSVGSVGAGILGGLGFDLTPAYARVRDLKITKAKVTKSICPYCSVSCGILAYSLSDGAMNVKERIIHVEGNPDDPINRGTLCPKGATLRDFVNAPDRLTKPLYRPAGSTEWKEISWDEAIEKFARWVKDTRDRTFIHKDKAGRVVNRCDSIVWAVGSPLGNEEGWLMVKIGIALGLSARETQATICHAPTVASLAPTFGRGAMTNNWVDISNSDLVFVMGGNPAENHPCGFKWAIKAREKRGAKIICIDPRFNRTAAVADIFVQIRPGTDIAFLGGLINYVLQNEKYQKEYVRLHTTGPFIVREDFGFKDGLFTGYDPKTRSYDTTTWDYEFDPATGYPKMDPEMKHPRCVLNILKEHYSRYTPEVVSQICGCSKEDFLRVAEEVAKCGAPNKFMTILYALGWTHHSYGTQLIRTACMLQLLLGNIGCPGGGINALRGHSNVQGMTDLAGQNKNLPTYIKPPKPEEQTLAQHLKNRTPRKLHPTSLNYWANYPKFFISFLKCMWGDAATPENDFAYDYLYKPEGGYNSWDKFIDDMYKGKIEGVVTAALNFLNNTPNAKKTVRALKNLKWMVVMDPFMIETAQFWKAEGLDPKEVKTEILVLPTAVFLEKEGSFTNSARWVKWKYKATDPPGDAKDEFWIFGRFFMKLKEFYEKEGGAFPEPILNLVWPYKNPYYPTAEEILTEINGYYTRDVDGHKKGERVRLFTDLRDDGSTACGGWLYCGVFPPEGNLAKRTDLSDPLGLGTYPNYAWNWPANRRVLYNRASCDEKGRPWDPERPLLRWDPERDMWVGDIPDYPATAPPEKGIGAFIMLPEGKGRLFAAKSYVTFKDGPLPEHYEPYESPVTNILHPNVPHNPVAKVYKSDLDLLGTPDKFPHVATTYRLTEHYHFWTKHLYGPSLLAPVMFIEIPEELAKEKGIQNGDLVRVSTARASIEAIALVTKRIKPLKVAGKTVYTIGIPIHWGFEGLVKGAITNFITPNVWDPNSRTPEFKGFLANIEKVKT

SEQ ID NO: 7994 - protein, 456 aa, Zea mays
  unsure (1)..(456): unsure at all Xaa locations
MASLQSFLAVKPAAGWAAPSRRARVAAFLAPPPPTTAAAVGAARRELSAASLAVVDGEARYLVGTYKRSRVVFEHGRGCKLYDTDGREYLDMAAGIAVTALXGHADPDVCATIAEQAGKVVHVSNVFYTKPQVELAKRLVEVSFADRAFFASTGTEANEAAIKFSRKFQRAAHPESGDPPTEFLAFSSSFHGRTMGAVALTSKSQYREPFAPVMPGVTFVDYGDLEAAKKFVRSGRVAAVFVEPVQGEGGIHSATREFLQGLRDACDEAGALLVFDEVQCGFGRTGHLWAHEAYGVEPDIMTLAKPLANGIPIGVVLVKEKIAAAINYGDHGTTFGGGPLACQTAITVFDKITRPGFLAEVSRKGESFKQLLRAKLSGNPHVREVRGVGLLVGVELDVPAGPLVDACLDAGVVVLTAGKGNVVRLVPPLIVSEKELEHAADVIRDCLPALDVVAAA

SEQ ID NO: 7995 - protein, 372 aa, Pseudomonas sp.
MIKSRAAVAFAPNQPLQIVEVDVAPPKAGEVLVRVVATGVCHTDAYTLSGADSEGVFPCILGHEGGGIVEAVGEGVTSLAVGDHVIPLYTAECRECKFFKSGKTNLCQKVRATQGKGLMPDGTSRFSYNGQPIYHYMGCSTFSEYTVLPEISLAKIPKNAPLEKVCLLGCGVTTGIGAVLNTAKVEEGATVAIFGLGGIGLAAIIGAKMAKASRIIAIDINPSKFDVARELGATDFVNPNDHAKPIQDVIVEMTDGGVDYSFECIGNVRLMRAALECCHKGWGESVIIGVAPAGAEINTRPFHLVTGRVWRGSAFGGVKGRTELPSYVEKAQQGEIPLDTFITHTMGLDDINTAFDLMDEGKSIRSVVQLSR

SEQ ID NO: 7996 - protein, 523 aa, Glycyrrhiza echinata
MLVELAITLLVIALFIHLRPTLSAKSKSLRHLPNPPSPKPRLPFVGHLHLLDKPLLHYSLIDLSKRYGPLYSLYFGSMPTVVASTPELFKLFLQTHEASSFNTRFQTSAIRRLTYDNSVAMVPFGPYWKFIRKLIMNDLLNATTVNKLRPLRSQEIRKVLRVMAQSAESQVPLNVTEELLKWTNSTISRMMLGEAEEIRDIARDVLKIFGEYSLTDFIWPLKKLKVGQYEKRIDDIFNRFDPVIERVIKKRQEIRKKRKERNGEIEEGEQSVVFLDTLLDFAEDETMEIKITKEQIKGLVVDFFSAGTDSTAVATDWALSELINNPRVFQKAREEIDAVVGKDRLVDEADVQNLPYIRSIVKETFRMHPPLPVVKRKCVQECEVDGYVIPEGALILFNVWAVGRDPKYWDRPTEFRPERFLENVGEGDQAVDLRGQHFQLLPFGSGRRMCPGVNLATAGMATLLASVIQCFDLSVVGPQGKILKGNDAKVSMEERAGLTVPRAHNLICVPVARSSAVPKLFSS

SEQ ID NO: 7997 - protein, 418 aa, Saccharomyces cerevisiae
MSATLFNNIELLPPDALFGIKQRYGQDQRATKVDLGIGAYRDDNGKPWVLPSVKAAEKLIHNDSSYNHEYLGITGLPSLTSNAAKIIFGTQSDAFQEDRVISVQSLSGTGALHISAKFFSKFFPDKLVYLSKPTWANHMAIFENQGLKTATYPYWANETKSLDLNGFLNAIQKAPEGSIFVLHSCAHNPTGLDPTSEQWVQIVDAIASKNHIALFDTAYQGFATGDLDKDAYAVRLGVEKLSTVSPVFVCQSFAKNAGMYGERVGCFHLALTKQAQNKTIKPAVTSQLAKIIRSEVSNPPAYGAKIVAKLLETPELTEQWHKDMVTMSSRITKMRHALRDHLVKLGTPGNWDHIVNQCGMFSFTGLTPQMVKRLEETHAVYLVASGRASIAGLNQGNVEYVAKAIDEVVRFYTIEAKL

SEQ ID NO: 7998 - protein, 318 aa, Pichia stipitis
MPSIKLNSGYDMPAVGFGCWKVDVDTCSEQIYRAIKTGYRLFDGAEDYANEKLVGAGVKKAIDEGIVKREDLFLTSKLWNNYHHPDNVEKALNRTLSDLQVDYVDLFLIHFPVTFKFVPLEEKYPPGFYCGKGDNFDYEDVPILETWKALEKLVKAGKIRSIGVSNFPGALLLDLLRGATIKPSVLQVEHHPYLQQPRLIEFAQSRGIAVTAYSSFGPQSFVELNQGRALNTSPLFENETIKAIAAKHGKSPAQVLLRWSSQRGIAIIPKSNTVPRLLENKDVNSFDLDEQDFADIAKLDINLRFNDPWDWDKIPIFV

SEQ ID NO: 7999 - protein, 413 aa, Bradyrhizobium japonicum USDA 110
MCRTCITVHRNPRLRHRAHCAGVQSANDASRSPALPRSLRPRLFVTTRLRPPSCLSIGQTSLRLGARRCAALASVAVMASFFGLSGAARAATLVVTSTADSGAGSLRGEIVSATSGDTILFQVSGTITLLSELPIITKNITIDGNGNNPTISGAGTYRPFFIGDAGTTGSTYSVTLKSLTIANAVAQGGAGLGSGAGAGLGGAVFVSSNGALTLSNVAVSNTQAKGGGVVDNFGEVGGGGGMGGKSYPLTPAGGGGLFVGSDANSSGTAGGSSGGVHNGGSGPQTGGAGGFASGGGGGSSGGGPVAGGAGGFGGGGANAGGATTGGSGGYGGGGGSAAGLSTSTGGAGGFGGGGGGGITAAGSGGFGAGNGGSGGTGSNSGGGGLGAGGAIFVQSGGTVAVQGDLSNALTHSR

SEQ ID NO: 8000 - protein, 363 aa, Pichia stipitis
MTANPSLVLNKIDDISFETYDAPEISEPTDVLVQVKKTGICGSDIHFYAHGRIGNFVLTKPMVLGHESAGTVVQVGKGVTSLKVGDNVAIEPGIPSRFSDEYKSGHYNLCPHMAFAATPNSKEGEPNPPGTLCKYFKSPEDFLVKLPDHVSLELGALVEPLSVGVHASKLGSVAFGDYVAVFGAGPVGLLAAAVAKTFGAKGVIVVDIFDNKLKMAKDIGAATHTFNSKTGGSEELIKAFGGNVPNVVLECTGAEPCIKLGVDAIAPGGRFVQVGNAAGPVSFPITVFAMKELTLFGSFRYGFNDYKTAVGIFDTNYQNGRENAPIDFEQLITHRYKFKDAIEAYDLVRAGKGAVKCLIDGPE

SEQ ID NO: 8001 - protein, 110 aa, GIBBERELLA ZEAE PH-1
MSDAPVAKKAEGSNSKSVEGKKKFEVKKWNAVALWAWDIVVDNCAICRNHIMDLCIECQANQASATSEECTVAWGICNHAFHFHCISRWLKARSVCPLDNRDWEFQKYGR

SEQ ID NO: 8002 - protein, 455 aa, Emericella nidulans
MSAPTADIRARAPEAKKVHIADTAINRHNWYKHVNWLNVFLIIGIPLYGCIQAFWVPLQLKTAIWAVIYYFFTGLGITAGYHRLWAHCSYSATLPLRIWLAAVGGGAVEGSIRWWARDHRAHHRYTDTDKDPYSVRKGLLYSHLGWMVMKQNPKRIGRTDISDLNEDPVVVWQHRNYLKVVFTMGLAVPMLVAGLGWGDWLGGFVYAGILRIFFVQQATFCVNSLALWLGDQPFDDRNSPRDHVITALVTLGEGYHNFHHEFPSDYRNAIEWHQYDPTKWSIWAWKQLGLAYDLKKFRANEIEKGRVQQLQKKLDRKRATLDWGTPLDQLPVMEWDDYVEQAKNGRGLVAIAGVVHDVTDFIKDHPGGKAMISSGIGKDATAMFNGGVYYHSNAAHNLLSTMRVGVIRGGCEVEIWKRAQKENVEYVRDGSGQRVIRAGEQPTKIPEPIPTADAA

SEQ ID NO: 8003 - protein, 213 aa, Cardamine flexuosa
MVRGKTQMKRIENATSRQVTFSKRRNGLLKKAFELSVLCDAEVSLIIFSPKGKLYEFASSNMQDTIDRYLRHTKDRVSSKPVSEENMQYLKFEAANMMKKIEQLEASKRKLLGEGIGTCSIEELQQIEQQLEKSVKCIRARKTQVFKEQIEQLKQKEKALAAENGKLSEKWGSHETEVWSNKNQESGRGDEESSPSSEVETQLFIGLPCSSRK

SEQ ID NO: 8004 - protein, 288 aa, Lilium longiflorum
MEGKEEDVKLGANKYSERQPIGTAAQTQDRDYKEPPPAPFFEPGELKSWSFYRAGIAEFVATFLFLYITILTVMGVSKNATNKCVTVGIQGIAWSFGGMIFALVYCTAGISGGHINPAVTFGLFLARKLSLTRAIFYIIMQCLGAICGAGVVKGFQKGLYESNGGGANVVNHGYTKGDGLGAEIIGTFVLVYTVFSATDAKRNARDSHVPILAPLPIGFAVFLVHLATIPITGTGINPARSLGAAIIYNKSHAWHDHWVFWVGPFIGAALAAVYHQIVIRAIPFKSRS

SEQ ID NO: 8005 - protein, 412 aa, Zea mays
  unsure (1)..(412): unsure at all Xaa locations
MLSTLRVASRRAARPAQYNLAATRAASNWANVPQGPPDAILGITKAFKADKFDKKINLGVGAYRDDAGKPYVLPSVREAEMKVVESKLNKEYAGITGVPEFPPAAAKLAYGANSPALDRITITQTISGTGALRVGAAFLAKFFPGEKKISGPQPSWANHKAVFNHAGLEVEQYRYYDKKTIGLDFEGLIADVKSAPNGSVFLFHACAHNPTGVDPTQEQWKQISDVVKEKGHFAFFDMAYQGFASGDTDKDAFAVRYFVEQGHNIALCQSFAKNMGLYGERVGAFSMVCADADEKKRVDSQLKILIRPLYSNPPIHGARIAAEILNSPTLYKQWLGEVKEMADRIITMRALLKDNLEKLGSKHDWSHITSQIGMFAYTGLTSEEMTRLAEEFSVYXHQDXRISVAGITSENV

SEQ ID NO: 8006 - protein, 499 aa, Oryza sativa (japonica cultivar-group)
MGALALALVVVVVVHVAVNAFGRRRLPPSPASLPVIGHLHLLRPPVHRTFHELAARLGPLMHVRLGSTHCVVASSAEVAAELIRSHEAKISERPLTAVARQFAYESAGFAFAPYSPHWRFMKRLCMSELLGPRTVEQLRPVRRAGLVSLLRHVLSQPEAEAVDLTRELIRMSNTSIIRMAASTVPSSVTEEAQELVKVVAELVGAFNADDYIALCRGWDLQGLGRRAADVHKRFDALLEEMIRHKEEARMRKKTDTDVGSKDLLDILLDKAEDGAAEVKLTRDNIKAFIIDVVTAGSDTSAAMVEWMVAELMNHPEALRKVREEIEAVVGRDRIAGEGDLPRLPYLQAAYKETLRLRPAAPIAHRQSTEEIQIRGFRVPAQTAVFINVWAIGRDPAYWEEPLEFRPERFLAGGGGEGVEPRGQHFQFMPFGSGRRGCPGMGLALQSVPAVVAALLQCFDWQCMDNKLIDMEEADGLVCARKHRLLLHAHPRLHPFPPLL

SEQ ID NO: 8007 - protein, 563 aa, Xylella fastidiosa 9a5c
MCSIFGIFNLQPSDNLQRLRHQALECSQRQRHRGPDWSGVYVDVGAILVHERLAIVDPAGGAQPLLSEDGTLALAVNGEIYNHAVLKGTLQQPYVFQTHSDCEVINALYREETPTSFLNRLNGIFAFALWDKTTGRGLIARDPMGVVPLYWGHDQDGRLRVASEMKALIEHCPDVAQFPPGHWYDTTTGTLVKYYERSWKNYSAVEGVQVSLQELREAFERAVHRQLMTDVPYGVLLSGGLDSSLVAAVAARYARHRIETNDQSEAWWPRLHSFAIGLKDSPDLSAANVAAEALNTVHHGFEYTLQEGLDVLPEVIRHIETYDVTTIRASTPMFLLARRIKAMGVKMVLSGEGSDEIFGGYLYFHKAPNAREFHEELVRKLNALYYYDCLRANKAMMAWGVEPRVPFLDREFLDVAMRMDAQHKMVDKTSDGPQQMEKGILRAAFDGYLPPSILWRQKEQFSDGVGYGWIDGLKAHAETQVSDHALATAETRFQVNPPQTKEAYYYRSIFERFFPSPAAAETVPGGKSIACSSPAAIAWDASFATMADPSGRAVSGVHQQALL

SEQ ID NO: 8008 - protein, 273 aa, Exiguobacterium sp. 255-15
MPKEMLPIVDKPTIQYIIEEAIESGIEDILIITGKGKRAIEDHFDSVPELEANLIAKNKSELLHLVEATTNINIHFIRQSKPKGLGDAILQAKAFIGNEPFVVMLGDDIVQAEVPCTRQLIEQYEITNSSIIGVQPVADEDTQRYGIVDPSTSISENLHKVKSFVEKPAPGTAPSNLAILGRYLLTPEIFKYLETQEIGSGGEIQLTDAITRLNEMQRVFAYEFDGKRYDVGEKLGFIQTTLEFALKREDLGDDVAKMMEELLKARSVTASLV

SEQ ID NO: 8009 - protein, 283 aa, Triticum aestivum
  unsure (1)..(283): unsure at all Xaa locations
MRFLFYFLLFLSTLQQCFGTITILETNDTLVDRLAAFGPRIDQIITGYLSAPSNDMYGCSAVKNITQKNWIAVLERGQCSFLQKVQAMQESGAIAVVVGDRHFNGWVTMYAPGDTXNIHIPSVFVAQYQYKSLLNLLVQKNNSLLIEITGDDLLAWPLLDMLLIVVLSPAVMMLFIYLTWQLRQRQHKQNDMAPSQFVAKLPTYIFRREKVIDTDHMDCAICLEDYSDGEQLRVLPCKHEFHAKCVDAWLTSHKKYCPICKFDTCQKPNDKSRPNERTPLLSA

SEQ ID NO: 8010 - protein, 80 aa, Escherichia coli
SSVDILVPDLPESVADATVATWHKKPGDAVVRDEVLVEIETDKVVLEVPASADGILDAVLEDEGTTVTSRQILGRLREGN

SEQ ID NO: 8011 - protein, 246 aa, Bradyrhizobium japonicum USDA 110
MTIHLETQSDLEEAVHALVKRDPRLKPVLAAAGMPALRRREPGFPGLAHIVCGQQLSTASAAAIWGRLSAALDPFDHEAVGRARTDRLGRLGLSAAKIKTLKHLAREITAERLNLDVLAEEDADAAHHTLISLPGIGPWTADVYLLFCLGHGDAWPAGDLAVQEGIKIGLGLQARPTEKQMVPLAEPWRPLRGAAAHLWWSYYRAVKKREGVLAGEANAVLNNVAVAKPSQVKEKMPARKKPGPSP

SEQ ID NO: 8012 - protein, 486 aa, Oryza sativa
STSSSSTSTSPMATTPAPVSLSAAASTVPARLLVGRGAAAAPVARRRARMVVVRAKIREIFMPALSSTMTEGKIVSWSAAEGDRVAKGDAVVVVESDKADMDVETFHDGIVAAVLVPAGESAPVGAPIALLAESEDDLQAALAKAQELSKAHPQQAPPPSDAAAPPPPPPPPAAAPAAPAPVAAGTKGIATPQAKKLAKQHRVDLAKVAGTGPFGRITPADVEAAAGIEPKPKVVPAASAAPVPLSAPAIGAVPQAAELPPVPGATVVPFTGMQAAVSKNMVESLAVPAFRVGYPIVTDKLDELYEKVKSKGVTMTVLLAKAAAMALAQHPVVNASCRDGKSFTYNTNINIAVAVAIDGGLITPVLEDADKLDIYLLSQKWKELVKKARAKQLQPNEYSSGTFTLSNLGMFGVDRFDAILPPGQGGIMAVGASKPTVVADKDGFFSVKSKMLVNVTADHRIVYGADLAAFLQTFAKIIEDPESLTL

SEQ ID NO: 8013 - protein, 175 aa, Draba nemorosa var. hebecarpa
MVRGKTQMKRIENATSRQVTFSKRRNGLLKKAFELSVLCDAEVSLIIFSPKGKLYEFASSNMQDTIDRYLRHTKDRISSKPVSEENMQHLKHEAANMMKKIEQLEASKRKLLGEGIGTCSIEELQQIEQQLGKSVKCIRARKTQVFKEQIEQLKQKEKALAAENEKLSEKWGSNE

SEQ ID NO: 8014 - protein, 1124 aa, Pisum sativum
MSTTRPSQSSNNSGRSRNSARIIAQTTVDAKLHATFEESGSSFDYSSSVRVSGSVDGDQQPRSNKVTTAYLNHIQRGKQIQPFGCLLALDEKTCKVVAYSENAPEMLTMVSHAVPSVGDHPALGIGTDIRTVFTAPSASALQKALGFAEVSLLNPILVHCKTSGKPFYAIIHRVTGSLIIDFEPVKPYEVPMTAAGALQSYKLAAKAITRLQSLASGSMERLCDTMVQEVFELTGYDRVMAYKFHEDDHGEVIAEIAKPGLEPYLGLHYPATDIPQAARFLFMKNKVRMIVDCNAKHVKVLQDEKLPFDLTLCGSTLRAPHSCHLQYMANMDSIASLVMAVVVNDSDEDGDSADAVLPQKKKRLWGLVVCHNTTPRFVPFPLRYACEFLAQVFAIHVNKEIELEYQILEKNILRTQTLLCDMLMRDAPLGIVSQSPNIMDLVKCDGAALFYRNKLWLLGATPTESQLREIALWMSEYHTDSTGLSTDSLSDAGFPGALSLSDTVCGMAAVRITSKDIVFWFRSHTAAEIRWGGAKHEPGDQDDGRKMHPRSSFKAFLEVVKARSVPWKDFEMDAIHSLQLILRNASKDTDIIDLNTKAINTRLNDLKIEGMQELEAVTSEMVRLIETATVPILAVDVDGTVNGWNIKIAELTGLPVGEAIGKHLLTLVEDSSTDIVKKMLNLALQGEEEKNVQFEIKTHGDQVESGPISLIVNACASKDLRENVVGVCFVAQDITAQKTVMDKFTRIEGDYKAIVQNPNQLIPPIFGTDEFGWCCEWNAAMIKLTGWKREEVMDKMLLGEVFGTQMSCCRLKNQEAFVNFGIVLNKAMTGLETEKVPFGFFSRKGKYVECLLSVSKKIDAEGLVTGVFCFLQLASPELQQALHIQRLSEQTALKRLKVLTYMKRQIRNPLAGIVFSSKMLEGTDLETEQKRIVNTSSQCQRQLSKILDDSDLDGIIDGYLDLEMAEFTLHEVLVTSLSQVMNRSNTKGIRIANDVAEHIARETLYGDSLRLQQVLADFLLISINSTPNGGQVVIAASLTKEQLGKSVHLVNLELSITHGGSGVPEAALNQMFGNNVLESEEGISLHISRKLLKLMNGDVRYLKEAGKSSFILSVELAAAHKLKG

SEQ ID NO: 8015 - protein, 407 aa, Pyrobaculum aerophilum str. IM2
MVRIAVIPVGGEAVRLRPLTVETSKAMIRFLNRPLVELSILHLARQGIEEFYFGVRGYHNYRDIYDYFREGSWFAVKYGVNIKIRYMPRVETRGNAEAVLATLEYYDINEPVLVIQGDNIFNLDVKEMYSFHSSKKAFITIALKEETGDLSEFGVAAVDDNMRILKFVEKPKRREEAPSNLVNTGLYLLSEDFKSFFKGELGGKLYSEGRLDFGGDVIPAVIEAGLPVYGYHTKGYWFDVGTPERYLKAVQYLLRHLTAYELEAEEIAPSVFAQGKSEQSKALKEKIAEAIKNGQIKAEGRLLLGRHVQIGDNSYLRDTVIDNYVIIGDNSVIEDSVVMDRSYIGRGVVIRRSIIGRHVQIGDGAVIEDAVVADNVIVGDGAHLRRVKVWPHKTVERGVRLEGFSLI

SEQ ID NO: 8016 - protein, 391 aa, Cytophaga hutchinsonii
MLTNRQLFLNNLAQTSDAPLLIEVEKASGVYMYGKQGEKYIDLISGIGVSNIGHCHPKVVQAIQEQSQKYMHLMVYGEFVQAPQVRLATKLIETLPPSLDSVYLVNSGSEATEGALKLAKRYTNRREIISCKNAYHGSSHGALSVMGNEFFKQSYRPLLPGIKHIRYNHTEDLDVITEQTAAVIIETIQGEAGVRIADKPYMQALRKRCDYTGTLLILDEIQCGFGRTGTFWAFETYGIVPDILLAAKGMGGGMPIGAFISSKKIMQTLSSDPVLGHITTFGGHPVSCAASIACMEVIQEEKLMDTVLKKESLIRKQLNHPGIKEIRSAGLMMAVEFESYSVLKRIIDQAIEKGVLTDWFLFCDNSMRIAPPLIISDDQIEQACSIISSCK

SEQ ID NO: 8017 - protein, 946 aa, Candida albicans
MISIVNGTSTLSLVAGSVETLNQAINFYTNILGLSVHSEQNDWTYLSNDDNKMIVKIQLDTKSGLSLDQVNDRRTEIIAKLNVTDWRSLDTTSVLKVQNLVALIETLTTFNYTLQITPNELYPNEVYCVGPIGYIIGFTACDEPLTLVPPLQKSHPKPGLVSNLMSKSGSQSRNIEETKAVRRNIAVMTSGGDSQGMNAAVRAVVRATIFHGSKAFAVQEGYAGLVKGGPEYIKEMKWQDVRGFLSEGGTNIGTARCMEFKERWGRLKGCKNLIDAGIDGLIVCGGDGSLTGADLFRHEWPSLIQELKDKGEITNEQFERHKHLYICGMVGSIDNDMAMTDATIGGYSALERICRAIDYIDATANSHSRAFVVEVMGRHCGWLALMAGIATSADYIFIPEKPASSKDWQDQMCDIVGKHRAQGKRKTIVIVAEGAITSDLKPITSDEVKDVLVDRLGLDTRITVLGHVQRGGTAVAFDRTLATLQGVEAVKAILELTPDVPSPLIAIDENKICRRPLVEAVRITKSVASAIEAKDFEKAMSLRDHEFKEHLANFMAMNTANHEKPTLPREKRKKIAIINIGAPAGGMNSAVYAMATYCMSRGHTPYAIHNGFAGLSRHESVKSIEWIDIEGWNSIGGSEIGTNRQTPEETDIGMIAHYFEKYQFDGLIIVGGFEAFVSLEQLERSRAMYPSFRIPMVLIPATISNNVPGTEYSLGADTCLNSLMEYCDIVKQSASATRGTAFIIDVQGGNSGYIATFASLISGAQASYVPEEGISLQQLEMDINSLREAFAVEQGMTKSGKLIIKSSNASKVLTPHTLADIFNDECHGDFDTKTAIPGHVQQGGLPSPIDRSRGDRFAIRAVQFIEDHCDVLAPYRYELDFPIDDKKILNTAAVLGIKSSRLRFTSIRHLFDFETELGRRMPKTIYWNTIRDISDQLVGRTRLDKP

SEQ ID NO: 8018 - protein, 502 aa, Zea mays
MKSSRFLFLCAMFCLMARLGAANVVLMGNNLTLSFADIEASFSPGVKGSGVNGIVYASEPLNACSPLTIKAVKGPPSPFALIVRGGCTFDEKVKNAQDAGFKAAIVYDNENSGVLVSMAGSSSGIHIYAVFVSKASGEVLKKSSGHTDVEVWILPTFDNSAWSIMAISFISLLAMSAVLATCFFVRRHRIRRDHPRIPEAREFHGMSSQLVKAMPSLIFTKVQEDNCTSSMCAICLEDYSVGEKLRVLPCRHKFHAACVDLWLTSWRTFCPVCKRDATSGVSELPATEATPLLSSAVRLPSQPSSFRSSVAASPPRPISRHPSSHSVSRAYSVSSTPHSPNPFRSHTNLPGVIHASRSTTDLANMSSPHPRISHLSSSTHSLVGSHLSPPISIRYPLPHSRHESPSPHVSSPYISNSGYGSSSYYYLGGSSQHGSYLRRCGESGPSLSTMVPRSSQQQFQSEANVAAGASSAQSSRQSYLRRCGDSDASLSDMASAQSLPGC

SEQ ID NO: 8019 - protein, 408 aa, Buchnera aphidicola str. APS (Acyrthosiphon pisum)
MISKKTLITRDNFDKLILPIYNPIPFIPIKGKGSRIWDQKGKEYIDFSGGIAVTSLGHCHPILNKTLKNQSKMLWHLSNIFTNEPALRLAKKLLSSSFASRIFFANSGAEANEAAFKLARYYSSKIYNFKKNKIISFYNSFHGRTFFTVSVGGQSKYSNNFGPKPAGIVHASFNDINSVKNLIDHDTCAVVVELIQGEGGVIPANLTFVQALKELCKQYNVLLIFDEIQTGIGRTGKLFYYEYYAITPDILTIAKSLGGGFPISAMLTTNEVASVIAPGIHGTTYGGNPLACAVAESVIDIINTKKVLSGVEKKSKKIISELNIINKRFKLFTEIRGRGLLIGIVLKPNVSRNIHKILNFSLSEGVIFLTAGNNVIRLAPSLIIKELDIIEGMKRFYRALEKYLSRKE

SEQ ID NO: 8020 - protein, 960 aa, Agrobacterium tumefaciens str. C58
MALVTEFDYGTPKSNATDMVTLTIDGRQVTVPTGTSIMRASREAGIDVPKLCATDMVDAFGSCRLCLIEVEGRNGTPASCTTPVAAGLVVHTQTERLKQIRKGVMELYISDHPLDCLTCAANGDCELQDMAGAVGLRDVRYGYEGDNHVKSRTGGGDINARWMPKDESNPYFTYDPSKCIVCSRCVRACEEVQGTFALTIEGRGFESRVSPGAHEAFLDSDCVSCGACVQACPTATLTEKSVIEIGQPEHSMVTTCAYCGVGCSFKAEMRGEELVRMVPWKDGQANRGHSCVKGRFAYGYATHRDRILNPMIRENIGDPWREVSWDAAFAYVASEFRRIQGKYGRESIGGITSSRCTNEETFLVQKLVRAGFGNNNVDTCARVCHSPTGYGLGQAFGTSAGTQNFDSVEQSDVVLVIGANPTDGHPVFGSRLKKRLRQGAKLIVIDPRRIDLVRTPHVEAAFHLPLLPGTNVAVLTALAHVIVTEGLFNEAFIRERCDWSEFEDWAAFVAEPQHSPEETERFTGVPAEDLRGAARLYATGGNGAIYYGLGVTEHSQGSTTVMAIANLAMVTGNIGRPGVGVNPLRGQNNVQGSCDMGSFPHELPGYRHISDDATRDVFEKLWGVKLNNEPGLRIPNMLDAAVDGSFKGIYIQGEDILQSDPDTKHVSAGLAAMECVVVHDLFLNETANYAHVFLPGSTFLEKDGTFTNAERRINRVRKVMSPKNGYADWEVTQKLAQAMGLTWNYTHPSEIMDEIAATTPSFASVSYAYLEEKGSVQWPCNEKFPEGSPIMHVDGFVRGKGKFIRTEYVATDERTGPRFPLLLTTGRILSQYNVGAQTRRTENVVWHEEDRLEIHPHDAEQRGVKDGDWIKLVSRSGDTTLRALITDRVAPGVVYTTFHHPGTQANVITTDFSDWATNCPEYKVTAVQVSPSNGPTEWQEEYDALARQSRRIAGKLEAAE

SEQ ID NO: 8021 - protein, 355 aa, Streptomyces cyanogenus
MKALVLSGGSGTRLRPFSHSMPKQLIPIANKPVLEHVLRNVRDLGVTEIGVIVGDRAEQIQAVIGDGSALGVEITYIPQEAPLGLAHCVELARPFLGDDDFVMYLGDNMLPEGVERIADEFTAGRPAAQVVVHKVPDPRAFGVAELAADGRVERLVEKPQEPKSDLALIGVYFFTPAIHKAVAAIEPSARGELEITDAIQWLVANGDRFKANEYKGYWKDTGRIEDVLECNRKLLDDLKPATEGEVDAASTLIGTVVVEAGPKSSAPAIEGPVVIGAGSVVKDSHIGPHTSIGRDVRLTGTSIEYSIALDDATISHVRDLHSSVIGRSASVGPSDRSTRHHRLVVGDHTRVEVAA

SEQ ID NO: 8022 - protein, 165 aa, Brassica oleracea
APVDVRDLTMDEKRRLSEELQDLPYDKLETVVQIIKKSNPELSQQDDEIELDIDSVDIQTLWELYRFVIGYKEGLSNKKEDQGFGSERDAESVHNSIQEPTTLATGTETSRANESGKAIRMSSPGRQKNNAGGSSSSNSSSSDTGSGSSDSDSDSSSGRGSDTGN

SEQ ID NO: 8023 - protein, 203 aa, Zea mays
MGFPVGYSESEMLLPRVLLQVLLLLGHFHRFLLWAFHAVGLGDLIDLGCNYPPPPPSASTAHEMMEHQHQHQGRDDVASPLQHQRPEFRPVAAALIEEALPVVRFDELGGAPCGGGDCAVCLSGIGGGDEVRRLGNCRHAFHRACLDRWMAHDQRTCPLCRAPLIPWAADADYDMSYPSPLPPTPLRRPHELLLLLTGLGGFQ

SEQ ID NO: 8024 - protein, 484 aa, Nostoc punctiforme PCC 73102
MTIDYDVVIIGGSLAGYYAALAATQLRATVALVEPKVDYGFTHHHALTEIGKLAQKLNDAASFGIHATKTDISEDCHISMAWQEAMLYAQCVAANLKEQHSPAILAALGVDVIVGSGQFQSSPQLAFAVNNRLLHARTYLLASGSRPEIPEIEGLQSTGYLTLSNIWQSLQGETLPKNWVIIGGIPQSIEIAQTLARFGCSVTLVVKHPYALSHIDHEIAILLQAQLEVEGVRVLTDKQVTQVRLIEAKKWIQAGDKAIETDEILVATGQQPNIESLNLAMVGVKWHRRSLVVNDKLQTTNHRIYACGDVIGGYDFANIANYEAKIALNNALFFPRLRVNYRSIPWAMFSVPMVAQVGLTEAQAKRLFSRDEVLVLRQYFKTVAAAQLRDETTGMCKLIVLHNGEILGASILGAEAGELINLIALAMSQKIKVKDLANLSPVYPSFSEILEQAAREWSKQKLNSDIAWQEFLEGFFHFRRNWNL

SEQ ID NO: 8025 - protein, 396 aa, Glycine max
MQSAAFTFSPSLPLRNPSPNYWRRPSLSLRLSAKHGNSNSDDVNSNGVSSTFFTRRSWTLPPSSSFKFRPLPPRAAESAVPESAPVENPLFKTLELGALFGLWYLFNIYFNIYNKQVLKAFHYPVTVTVVQFAVGTVLVAFMWGLNLYKRPKLSGAMLGAILPLAAVHTLGNLFTNMSLGKVAVSFTHTIKAMEPFFSVVLSAMFLGEFPTPWVVGSLVPIVGGVALASVTEASFNWAGFWSAMASNVTNQSRNVLSKKAMVNKEDSMDNITLFSIITVMSFFLLAPVAIFMEGVKFTPAYLQSAGVNVRQLYIRSLLAALCFHAYQQVSYMILQRVSPVTHSVGNCVKRVVVIVSSVIFFQTPVSPVNAFGTAIALAGVFLYSRVKRIKAKPKTA

SEQ ID NO: 8026 - protein, 320 aa, Mesorhizobium sp. BNC1
MEQGEPLMTIAFTFPGQGSQAVGMGRDLAEAFPEARDVFQEVDEALGQSLSKLMWEGPEEELTLTANAQPALMAVSLAAIRVMEKAGLPLKDKVAYVAGHSLGEYSALAAAGTFSLLDTARLLRIRGNAMQAAVPVGEGAMAAIIGLETADVEDVCLKAANGSVCQIANDNGGGQLIISGAKAAVEEAARLAGERGAKRAIMLPVSAPFHSALMEPAAVRMRDALAEVEKHAPSVPVIANVTVSPLSDPQEIAERLVEQVTGRVRWRETVEWFAQNGVDTLYEIGSGKVLTGLARRINRDLNALAVNTPADIEATLKALL

SEQ ID NO: 8027 - protein, 462 aa, Arabidopsis thaliana
MMLRAVFRRASIRGSSSASGLGKSLQSSRLVASSQFHSVSATETLVPRGNHAHSFHHRSCPGCPDCSRTVINGFQGTALQRWVRPFSSDSGDVVEAVVPHMGESITDGTLAAFLKKPGDRVEADEAIAQIETDKVTIDIASPASGVIQEFLVKEGDTVEPGNKVARISTSADAVSHVAPSEKAPEKPAPKPSPPAEKPKVESTKVAEKPKAPSPPPPSKQSAKEPQLPPKDRERRVPMTRLRKRVATRLKDSQNTFALLTTFNEVDMTNLMKLRSQYKDAFLEKHGVKLGLMSGFIKAAVSALQHQPVVNAVIDGDDIIYRDYVDISIAVGTSKGLVVPVIRDADKMNFADIEKTINGLAKKATEGTISIDEMAGGSFTVSNGGVYGSLISTPIINPPQSAILGMHSIVQRPMVVGGSVVPRPMMYVALTYDHRLIDGREAVYFLRRIKDVVEDPQRLLLDI

SEQ ID NO: 8028 - protein, 472 aa, Arabidopsis thaliana
FASSGSDDNDVVIIGGGPGGYVAAIKAAQLGLKTTCIEKRGALGGTCLNVGCIPSKALLHSSHMYHEAKHVFANHGVKVSSVEVDLPAMLAQKDTAVKNLTRGVEGLFKKNKVNYVKGYGKFLSPSEVSVDTIDGENVVVKGKHIIVATGSDVKSLPGITIDEKKIVSSTGALSLTEIPKKLIVIGAGYIGLEMGSVWGRLGSEVTVVEFAADIVPAMDGEIRKQFQRSLEKQKMKFMLKTKVVGVDSSGDGVKLIVEPAEGGEQTTLEADVVLVSAGRTPFTSGLDLEKIGVETDKGGRILVNERFSTNVSGVYAIGDVIPGPMLAHKAEEDGVACVEFIAGKHGHVDYDKVPGVVYTYPEVASVGKTEEQLKKEGVSYNVGKFPFMANSRAKAIDTAEGMVKILADKETDKILGVHIMSPNAGELIHEAVLAINYDASSEDIARVCHAHPTMSEAIKEAAMATYDKPIHM

SEQ ID NO: 8029 - protein, 137 aa, Glycine max
  unsure (1)..(137): unsure at all Xaa locations
KNKLLRTNNEKLTAGSMISCAAVTTVNRAGGDMVATFTGLMSMAGLPTTKTNDDISSIASNGGRVQCMQAXPPVGKKKFETLCYLPDLDDAQLAKEVEYLLRKGWIACWXFELDHRFWYREHNTSAEYYYXRYWTMW

SEQ ID NO: 8030 - protein, 360 aa, Physcomitrella patens
MSPSVDCLASLYCAEDVSGTAWNESEMCGAADRVFESQPAVFMDFPVEDDEAIATLLMKEAQFMPEADYLERYQSRKLSLEARLAAIEWILKVHSFYNYSPLTVALAVNYMDRFLSRYYFPEGKEWMLQLLSVACISLAAKMEESDVPILLDFQVEQEEHIFEAHTIQRMELLVLSTLEWRMSGVTPFSYVDYFFHKLGVSDLLLRALLSRVSEIILKSIRVTTSLQYLPSVVAAASIICALEEVTTIRTGDLLRTFNELLVNVESVKDCYIDMRQSEIGPYCVRMGLKRKILHASEPQSPVGVLEAADVSSPSGTVLGFSSRESSPDVTDSPPSTNSQRKRRKLCLHNESCLHVESASL

SEQ ID NO: 8031 - protein, 987 aa, Candida albicans
MPSSSDAINRISYISLVTSDNDKFNQTFQFYSQLGFRLTKSFSKVSSYGSGLGANHPEFQLGVSHDSLKEVWLESYPLQNVDSNGNLRPWQEMEVYDGDNCERLNESTVIKVRLLGETPLKSISQKQFVFFTTQLNKIEKILTDANVKYGKVVDNVILAEDPLNNIISFSNTQNELCKTRFQSPEEYVEKTTAEILAKRKKSQLGSKFGSFEEISPSEVGGGNGLRKKKIGVMTSGGDAPGMNPAVRAVVRAGIYYGCDVYAVYEGYEGLVKGGDLLKKMEWSDVRSYMSLGGTSIGTARCKEFRERAGRLQGAYNMIKNGIDALVVCGGDGSLTGADLFRSEWPSLVKELVDTGKLTKEEVSPYEHLTIVGLVGSIDNDMSGTDVTIGAFSALERITEMVDYIGATAASHSRAFVVEVMGRHCGWLALLSGLATGADFVFIPERPPKAGLWKEQLKEVCLRHREYGRRKTTVIVAEGAIDDELNPITSEEVKQVLADLGLDTRNTILGHVQRGGTAVAFDRRLATLQGVEAVKAVLEMTPDTPSPMIGILKHKIVRIPLVDAVKQTKAVAEAISNKDFDKAMSLRDNSFYDDYRYFRDISIYDDGSKQLSEDKRLNIAIVHVGAASAGLNAATRAVALYSLSRGHKLYAVQDGFAGLVKGDLKNLTWMDVEGWHSLGGSEIGTNRSLPSQNIGKVAYNLQKFNIQGLLIVGGFEAFTSLHELSEQKANYPIFEIPMVVVPATVSNNVPGTEYSLGADTCLNQLVSYCDAVQQSASSTRRRVFVVEVQGGHSGYVASYCGLITGALATYTPESNINLRELQGDIDLLQKVFATDRGEDHNGTLIVRNEQASAVYSTQLIADILKENANKRFETRTAIPGHVQQGFTPSANDRVMAVKFSLKAMEFIETRNGCYGKHDRKFSDEEISEHSQVVIGIHGDVVKFTCIKHLYDNEANVALRKGKTVHWTDMIDVANILNGKSLLKKQERY

SEQ ID NO: 8032 - protein, 310 aa, Malus x domestica
MSTGTLSSGYEMPVIGLGLWRLEKDELKEVILNAIKIGYRHFDCAAHYKSEADVGEALAEAFKTGLVKREELFITTKIWNSDHGHVVEACKNSLEKLQIDYLDLYLVHYPMPTKHNAIGKTASLLGEDKVLDIDVTISLQQTWEGMEKTVSLGLVRSIGLSNYELFLTRDCLAYSKIKPAVSQFETHPYFQRDSLVKFCMKHGVLPTAHTPLGGAAANKDMFGSVSPLDDPVLNDVAKKYGKSVAQICLRWGIQRKTAVIPKSSKIQRLKENLEVLEFQLSDEDMQLIYSIDRKYRTSLPSKTWGLDVYA

SEQ ID NO: 8033 - protein, 479 aa, Oryza sativa (japonica cultivar-group)
MSSSATVVPLAYQGNTSASVADWLNKGDNAWQLVAATVVGLQSVPGLVVLYGGVVKKKWAVNSAFMALYAFAAVWICWVTWAYNMSFGEKLLPIWGKARPALDQGLLVGRAALPATVHYRADGSVETAAVEPLYPMATVVYFQCVFAAITLILVAGSLLGRMSFLAWMIFVPLWLTFSYTVGAFSLWGGGFLFHWGVIDYCGGYVIHVSAGIAGFTAAYWVGPRAQKDRERFPPNNILFTLTGAGLLWMGWAGFNGGGPYAANSVASMAVLNTNICTAMSLIVWTCLDVIFFKKPSVVGAVQGMITGLVCITPAAGVVQGWAALVMGVLAGSIPWYTMMILHKRSKILQRVDDTLGVFHTHGVAGLLGGLLTGLFAEPTLCNLFLPVADSRGAFYGGAGGAQFGKQIAGGLFVVAWNVAVTSLICLAINLLVPLRMPDDKLEVGDDAVHGEEAYALWGDGEMYDVTKHGSDAAVAPVVV

SEQ ID NO: 8034 - protein, 307 aa, Agrobacterium tumefaciens str. C58
MMKENTMDLNRTVRKAVIPVAGNGTRFLPATKAMPKEMLTIVDRPVVQYAVDEAMQAGIEHIIFVTSRNKTAIEDYFDSAPELINTLTRSGKTVQVLQLEKMLPVAGTVSYTRQQVPLGLGHAVWCARELVGKEPFALLLPDMVSYGARGCIAGLMELYDEVGGNILGVEECLPEEVSSYGVVGVGQKVNHGFSVTEMVEKPEPSKAPSNYYLNGRYILQPEIFDILARQERGAGNEIQLTDGMKRLAEKQPFHAQKYSGRTFDCGSKQGFIAANVAFSLMRSDMEAQVLASVKELIANHESRVQAA

SEQ ID NO: 8035 - protein, 429 aa, Bradyrhizobium sp. WM9
MVGVHGPRRMKAIETLESNVRSYSRSFPAVFGRARGSIMFAEGDRKVIDFLSGAGALNYGHNNREIKAAISEYLESDGVVHGLDMATPAKVEFMEHFSSVILRERNLSYRFQFTGPTGANAVEAALKLSRKITGRHNVISFTNGYHGQSLGAIAASGNRFYRKASSIPLSGTTFMPYDGYLGSADSPADYVRKVLMDESSGIDLPAAILVETVQGEGGINVAGKEWLQSIQALAKEVGAIFIVDDIQMGCGRTGEFFSFEFAALSPDIVVMSKSLSGYGLPLSMLLIKEAIDAWEPGEHTGTFRGNNLALVSGKAALTLYWRNQTFSQQVQRLGAFMRGRLDAIAHQHGNKFAVRGRGMVCGFDCKTTEIAEVTAHKAFEKGLIIERCGPTDQVVKFLPALTIDQETLGRGLDIFEESLTETLNSARGS

SEQ ID NO: 8036 - protein, 181 aa, Vigna radiata
MASSMISSPAVTTVNRAGAAGMVAPFTGLKSLGGFPTRKTNNDITSVANNGGRVQCMQVWPTIGKKKFETLSYLPDLTEEQLGKEVDYLLRSGWIPCLEFELSHKDAFPHRENNRSPGYYDGRYWTMWKLPMYGCTDSSQVLKELREARTLYPDGFVRIVGFDSVRQVQCISFIAYKPPGY

SEQ ID NO: 8037 - protein, 408 aa, Wolbachia endosymbiont of Drosophila melanogaster
MTNQTVRGTKDLLFDEWYKFKYIEQTANRISSLYGFLPAQTPIFECTEVFTKTLGDSSDIITKEMYSFNDKGGKSITLRPEFTAAIVRLLIEKKLQTPIKLFSTGPAFRYERPQKGRQRQFHQINFEVFGIEDPKADIELISLAQHLLTEFGINKNVKLEINSLGDGETITKYREALILYFTKYQNDLSEDSKNRLIKNPLRILDSKDEKDKSIISDAPKISNYYTKESSDFFEQILNGLTILDIPYTVNNKLVRGLDYYCHTVFEFVTEDLGAQGAVFAGGRYDNLVSSVGGKHTPAIGFAGGIERIMELINYSPKEERPIYLIPIGREAEKHALTLANELRRNGLYVIYEYSGTLRTRMKKANQANAKAALIFGDEELSSKTLKIKNMDTGEEKIIARDNTIENIY

SEQ ID NO: 8038 - protein, 560 aa, Arabidopsis lyrata subsp. petraea
MASSTALISDTEAWKDLKGHVEDIKKTHLRDLMTDANRCQSMMMEFDGLLLDYSRQRAPVETMDKLLNLAKAAQLTEKISRMFNGEHINSTENRSVLHVALRAPKDAVIKADGKNVVQEVWNVLDKIKEFSEKIRSGSWVGATGKPLKDVIAIGIGGSFLGPLFVHTALQTDPEALESAKGRQLRFLANIDPVDVARNIIGLNPETTLVVVVSKTFTTAETMLNARTLREWITAALGASAVAKHMVAVSTNLALVEKFGIDPNNAFAFWDWVGGRYSVCSAVGVLPLSLQYGFSVVEKFLKGASSIDQHFQSTPFEKNIPVLLGLLSVWNVSFLGYPARAILPYSQALEKFAPHIQQVSMESNGKGVSIDGLPLPFETGEIDFGEPGTNGQHSFYQLIHQGRVIPCDFIGIVKSQQPVYLKGEVVSNHDELMSNFFAQPDALAYGKTPEQLQKENVSENLIPHKTFSGNRPSLSLLLPELTAYNVGQLLAIYEHRVAVQGFVWGINSFDQWGVELGKVLATQVRKQLHSSRTQGTALEGFNYSTTTLLKRYLETSSEPQM

SEQ ID NO: 8039 - protein, 345 aa, Oryza sativa
MEHLERRGLAQGAYDGADPLDIGGFGDATGVDDAAEDVGDDLPLLDEVPAQDDLLRVVLIVADRGGGGGGRGSGISRGVAIRRGRGGHRDGDARCRLLPPELISLLSRAPTTETSSPPSAAMQQRRPASGRPSGTDGSDFSYRMVVDSRYQRVADGKSRLGRLILVQALHQVAGGALLLLALSKGAEMNKFAVMSVAAGLLAIVLGEIGDAHELVSISSYARRRRTMAVLLRMYTSLSSIAVAFSVACIIRSELFFKITKQNTESITSHELLEVVRVALDCNLQETCNEAAIGSQIHDNHDSILLLPFVELDWKLESIDYIAVSSCCFAQAVTAVQSSIWTRAWF

SEQ ID NO: 8040 - protein, 328 aa, Streptomyces cyanogenus
MKALVLSGGTGTRLRPLTHSLPKQLIPLAGRPVVAHVLDSVRDLGVRETGIVVTDGGEQIEQALGDGSRSGLSLTYFRQDTPRGFGHALSLARDFLGDDDFVVYRGDTLVTESIADRAAAFAAERPAAGVVVPEAAPDVELVHFFTPAVHEAVAALAADRPGDAVTPAGAAQWLRAHGGDVRTGTYTGYWRRIASAEDVLAAHRTLLDGLAPAMDGDVDAQSRITGHVVIEPGAKVVRSWIEGPAVVSAGALVEESHIGPHATIGRDCSVHGTHVDDSLVLEGATVSPVGRLHGSLIGRFAHVSAAGRDGAPRRSLVVGDHARVEVAE

SEQ ID NO: 8041 - protein, 560 aa, Arabis gemmifera
MASSTALFCDTEAWKDLKGHVEDIKKTHLRDLMSDANRCQSMMMEFDGLLLDYSRQRAPVETMDKLLNLAKAAQLTEKISRMFNGEHINSTENRSVLHVALRAPKDAVIKADGKNVVPEVWNVLDKIKEFSEKIRSGSWVGATGKPLKDVIAIGIGGSFLGPLFVHTALQTDPEALESAKGRQLRFLANIDPVDVARNIKGLNPETTLVVVVSKTFTTAETMLNARTLREWITAALGASAVAKHMVAVSTNLALVEKFGIDPNNAFAFWDWVGGRYSVCSAVGVLPLSLQYGFSVVEKFLKGASSIDQHFQSTPFEKNIPVLLGLLSVWNVSFLGYPARAILPYSQALEKFAPHIQQVSMESNGKGVSIDGLPLPFETGEVDFGEPGTNGQHSFYQLIHQGRVIPCDFIGIVKSQQPVYLKGEVVSNHDELMSNFFAQPDALAYGKTPEQLQKENVSENLIPHKTFSGNRPSLSLLLPELTAYNVGQLLAIYEHRVAVQGFVWGINSFDQWGVELGKVLATQVRKQLHSSRTQGTALEGFNYSTTTLLKRYLETSSEPQM

SEQ ID NO: 8042 - protein, 312 aa, Enterococcus faecium
MKVKKAVIPAAGLGTRFLPATKAMAKEMLPIVDKPTIQFIVEEALKSGIEDILIVTGKAKRPIEDHFDSNIELETNLSEKGKTELLKLVEETTDVNLHFIRQSHPKGLGHAVLQARAFIGNEPFVVMLGDDIMEDEVPLTQQLIDDYERTHASTIAVMQVPHDETSKYGIINPGEVLEDGLYNVKNFVEKPDPSKAPSDLAIIGRYLLTPEIFDVLSEQQPGAGNEIQLTDAIDTLNKTQRVFARKFTGKRYDVGDKFGFMKTSIEYGLTHPEVGAPLREYILSLGKTLEAEGSKIDHNPKGITEIKEEKKK

SEQ ID NO: 8043 - protein, 265 aa, Glycine max
MPKQRLEGKVALITGAASGIGEETVRLFAEHGALIVAADIQDEQGHQVAASIGSERVTYHHCDVRDENQVEETINFTLEKHGRIDVLFSNAGIIGSLSGILDLDLNEFDNTIATNVRGVAATIKHTARAMVAKSTRGSIICTTSVAAMIGGTGPHGYTTSKHALLGLVKSACSELGAYGIRVNSISPFGVATPLACKAFNFEPEQVEANSCSQANLKGVVLKARHIAEAALFLASDDAAVYISGHNLVVDGGFSMVNRSYSFTPA

SEQ ID NO: 8044 - protein, 138 aa, Triticum aestivum
  unsure (1)..(138): unsure at all Xaa locations
MSLSNKLSITDVDLKGKRVLIRVDFNVPLDSALKVTNTQRIAGATPTIKYAIENGCKSVILMSHLGRPDGKVQPKYSLKPVVPELEALLGRSVEFASDCVGPXVEDIVNKAQXGQVVLLENXRFHLKEEGSTRTRWNK

SEQ ID NO: 8045 - protein, 186 aa, Bacillus subtilis
MLFFVDTANIDEIREANELGILAGVTTNPSLVAKEANVSFHDRLREITDVVKGSVSAEVISLKAEEMIEEGKELAKIAPNITVKIPMTSDGLKAVRALTGLGIKTNVTLIFNANQALLAARAGATYVSPFLGRLDDIGHNGLDLISEVKQIFDIHGLDTQIIAASIRHPQHVTEAALRGAHTAQCR

SEQ ID NO: 8046 - protein, 287 aa, Glycine max
  unsure (1)..(287): unsure at all Xaa locations
MEKRFISVDRWAEGSEAYFLTHLHSDHTHGLTPSWHHAPLFCSAVTAKLLPFKFPGFDLSLLRILHPGTTHTVTLPSLTLHVTVMDACHCPGSIMLLFXRGDFGCILYTGDFRWEATCERATKSRYVLRDALRHVPAVDVVHLDNTYSNPIYDFPPRHVAAQQIIDIIASHPDHEVIIGINTLGKEDLLVEISRALQIMIWVWPQRLRTMHLLGYDDIFTTNTSLTRVRAVPVYSFSINTVEELNYVCPTIGIMPSGLPWIKKSHQKNELQTGSFLTSRYKRGKLSA

SEQ ID NO: 8047 - protein, 607 aa, Oryza sativa
PTATAAALDGIGIGGARLRPSRVTACLATPTPTPPPPTSAPLAPAAAAHRELSAASRAVVEDEARYIVGTYNRSRVVLVAGRGCKLYDADGREYLDMAAGIAVNAVGHADPDWVAAVSAQAATFVHASNVQYTVPQASLERVTPTAHHASFADRVFFANTGTEANEAAIKFARKYQRVARPDGDAPTEFMSFTNCFHGRTMGSLALTSKVQYREPFAPVMPGATFAEYGNLEEAKKVIQSGKIAAVFVEPMQGEGGIHSATKEFLQGLRDACDEAGALLVFDEVQCGLGRTGYLWAYEAYGVVPDIMTLAKPLAGGLPIGVVLVTEKVASAINYGDHGTTFGGGPLVCQAALTTLDKIQKPGFLAEVAKKGENFKQLLSTKLSGNAHVKEIRGIGLIVGIELDVPAGPLVDACLDRGVIVLTAGKGNVYVVSKTIQSPNFFADEVLPVQAEDIVGVADEVSRVVVRDAEDVFGVVDEVAGRRRRGIACGGARYRGGSGCRRRGIVHAMPRKIWVSPTMLRAVADEDLGVTDTDEVSRAPRAMPTRIWVSPMRLPAVADEDLVSPTPTSLSPQGRGRFRVSPRRRTGCRGSRAAAAAAATDDEGGGEA

SEQ ID NO: 8048 - protein, 456 aa, Rhodococcus opacus
MVVDVTELRARARRHLGPHFTRKDTWESDFPVFVRGEGSYLIDTEGDRFLDGLAGLFCVNIGHGRDDIAKAASEQIGTLAYASNWGSAHIPAIEASALIADLAPGDLGTTFFVNSGSEAVETAVKFARQYHRSQGNPQRTKIISREMAYHGTTLGALSVTQLPKIKDPFGPLLPGVRSVPNTLGYLGDCGPANELDCIAAIEAVIEEEGAETIAAVFAEPVQNGRGALVPPDGYWAALRALCDKHGILLVSDEVICSFGRLGHWFGHGLTGVVPDMITFAKGSTSGYAPLGGLIVREQLVRELYDSPKGGVFTHGATWGGHPVSTAVAVANITAMRDENVLGNVSARGPKLRSALDSLMSSHRCVKDVRGTGFFYAIELMADSDSGREFTEQESLTVLRKVLPEAFARTKVILRGDDRGATMLMISPPLVADDEVLSELLHGIDSMLTDIEKAIQP

SEQ ID NO: 8049 - protein, 849 aa, GIBBERELLA ZEAE PH-1
MAMLASKAAFPAGMGSSSHTPVASQPAMPLPRRTPMMPSSGAYGSPTESEFTEHDPAESVKNWDEDQVCEYLRTVKCGEYEKIFRKNHINGENLLEMDKDVLKEMGVEKVGDRVRLFLSIKKLRTRAYANEKKRNRDSFGGLDIQITAPNDSPRLHSSRGVPASSSKRYSRQLDLYGALDNGKTSSRPNSPLPGTDVRNLRARGKTYASIPVNAQGQRIVTTNPDLPANRLVTTHTRNNSSMDGSLMAALPQGQEVIRVISTGGVTKVVKISGCNTCEEVMRVTLRKFALREDHERNYCFWVLAGIDPDPGQCRRLGDTELWRIIKDQRRPERNRLILRRVPAGEPGEAELHRAAAIAMEEEQQKHARALETVDKRRSLRPFGGLRPPSELIASDLTSYFPDHTREDIDRTARLSMRRSTRMSKVNSRLSVASNLSFASSIQDAPPIPTIADSWLNANTQLAKVRTRDSHIRVPQAAYNRDSVTSSVLDTLQEESSLEPDRKSYVSFTESGSDSAPVSVTDPEGNTTATSYYDGDTSTGSGSFQEIRQALTNDGDDVDEELHSFLAGESWGDDKWMKGALIGQGSFGCVYLALHAVTGELLAVKQVETPAPGANSQGDNRKKGMIDALKREISLLRDLRHPNIVQYLGCSSTADYLNIFLEYVPGGSVQTMLNSYGALPEPLVRSFVRQILTGLSYLHNQDIIHRDIKGANILVDNKGTIKISDFGISKKLEATNILNGANNSKHRPSLQGSVFWMAPEVVKQTSYTRKADIWSLGCLVVEMMTGSHPFPDCSQLQAIFKIGGGKAAPTIPEHASEAAKEFLAQTFEIDHNLRPSADQLILSPFLIPIT

SEQ ID NO: 8050 - protein, 728 aa, Aspergillus fumigatus
MRLTFIPSLIGVANAVCPYMTGELNRRDEISDGDAAAATEEFLSQYYFNDNDAFMTSDVGGPIEDQNSFSAGERGPTLLEDFIFRQKIQRFDHERVPERAVHARGAGAHGVFTSYGDFSNITAASFLAKEGKQTPVFVRFSTVAGSRGSSDLARDVHGFATRFYTDEGNFDIVGNNIPVFFIQDAILFPDLIHAVKPRGDNEIPQAATAHDSAWDFFSQQPSTMHTLLWAMSGHGIPRSFRHVDGFGVHTFRFVTDDGASKLVKFHWKSLQGKASMVWEEAQQTSGKNPDFMRQDLHDAIEAGRYPEWELGVQIMDEEDQLRFGFDLLDPTKIVPEEFVPITKLGKMQLNRNPRNYFAETEQVMFQPGHIVRGVDFTEDPLLQGRLFSYLDTQLNRHGGPNFEQLPINQPRVPVHNNNRDGAGQMFIPLNPHAYSPKTSVNGSPKQANQTVGDGFFTAPGRTTSGKLVRAVSSSFEDVWSQPRLFYNSLVPAEKQFVIDAIRFENANVKSPVVKNNVIIQLNRIDNDLARRVARAIGVAEPEPDPTFYHNNKTADVGTFGTKLKKLDGLKVGVLGSVQHPGSVEGASTLRDRLKDDGVDVVLVAERLADGVDQTYSTSDAIQFDAVVVAAGAESLFAASSFTGGSANSASGASSLYPTGRPLQILIDGFRFGKTVGALGSGTAALRNAGIATSRDGVYVAQSVTDDFANDLKEGLRTFKFLDRFPVDH

SEQ ID NO: 8051 - protein, 434 aa, Eremothecium gossypii
MAVEFNLSSKQTVEYEQEYSAHNYHPLPVVFHKASGAHVWDPEGKEYLDFLSAYSAVNQGHCHPEIVQALVDQASRLTLSSRAFSNDCFAAFAKYVTEYFGYGMVLPMNTGAEAVETALKLARRWGYMKKGIAADEAIILGASGNFHGRTFGAISLSTDEEDTRKHFGPFLKNTTAELPDGSGEQIRFGELADLERAFKHAGERIAAVILEPIQGEAGIVVPPEGYLEGVQRLCREHNALFICDEIQTGIGRTGKMLCYEHSEGVRPDIVVLGKAISGGILPVSCVLADKDIMLCFEPGSHGSTYGGNPLSSRVAVAALEVIRKENLVERARVLGEKLRAKLESLQAESNGIISEVRGKGLLSAIVIDPSKANGRTAWDLCLLMKDAGVLAKPTHEHIIRLAPPLVISEEDLMHGVDVIKSSLEKLPTVEKAAH

SEQ ID NO: 8052 - protein, 691 aa, Desulfovibrio vulgaris subsp. vulgaris str. Hildenborough
MALDRRGFLKFIGGATAGILATPVVWKGLDDVSIWSQNWSWIPRNIKGANSYVPTVSKLCPTGIGVRVRLVDGRPVRVIGNPEHPLSKGGVSSIAAAEVQMLYSPARMKRPLKRSPDGAYVMISWEEAEAMLLDGLKAAKGGDALACISGDDNGTINELLSAFVQQSGSKSFFLMPGEAQPAAKAWDLMGGEGQIGYDIEKSDFVLAIGANVLEAWGTAIRNRHAFGASHPHGAEPTAQFVYAGPVLNNTATGADDWLPIRPGTESAFALGLAHLLIKAGASSSAPDFDAFRSLAASFSPEKVAAQTGVDAKALTALAQALAKAKHPLVIVGSEFSQGAGAAPVMAGIALNMLLGSVNRDGGLRALPVARKVVPAGMDRKAMLQQDLTLWASAIASGKAKAPKAMLVYEANPVYALPQGSAFKDTLAKVPFKVAFTSFLDETAMQCDLVIPVSMGLERLDDVCTPYGCGEVVYSLATPVTAPLFDTKPAGDALIALGGKLGLDLGVASFEDMLKAKAAAHGADFDKLAEGTAFTSRATVGANLSFRPDVLSKALDVKAPALPLALAPVMKLNMGTSKTAIPPFNTKTIRRWEVQGKEGYVMLNGATARKLGLAQHDRVVLSNPTGKVTVRVNIFEGVMNDTVAMPLGFGHTAFDEFSKGKGENVMHLLAPSTEPVTGLAVWTGAGVNIAKA

SEQ ID NO: 8053 - protein, 1137 aa, Oryza sativa
MSSSRSNNRATCSRSSSARSKHSARVVAQTPMDAQLHAEFEGSQRHFDYSSSVGAANRSGATTSNVSAYLQNMQRGRFVQPFGCLLAVHPETFALLAYSENAAEMLDLTPHAVPTIDQREALAVGTDVRTLFRSHSFVALQKAATFGDVNLLNPILVHARTSGKPFYAIMHRIDVGLVIDLEPVNPVDLPVTATGAIKSYKLAARAIARLQSLPSGNLSLLCDVLVREVSELTGYDRVMAYKFHEDEHGEVIAECKRSDLEPYLGLHYPATDIPQASRFLFMKNKVRMICDCSATPVKIIQDDSLTQPISICGSTLRAPHGCHAQYMASMGSVASLVMSVTINEDEDDDGDTGSDQQPKGRKLWGLMVCHHTSPRFVPFPLRYACEFLLQVFGIQINKEVELAAQAKERHILRTQTLLCDMLLRDAPVGIFTQSPNVMDLVKCDGAALYYQNQLWVLGSTPSEAEIKNIVAWLQEYHDGSTGLSTDSLVEAGYPGAAALGDVVCGMAAIKISSKDFIFWFRSHTAKEIKWGGAKHEPIDADDNGRKMHPRSSFKAFLEVVKWRSVPWEDVEMDAIHSLQLILRGSLQDEDANKNNNAKSIVTAPSDDMKKIQGLLELRTVTNEMVRLIETATAPILAVDITGSINGWNNKAAELTGLPVMEAIGKPLVDLVIDDSVEVVKQILNSALQGIEEQNLQIKLKTFNHQENNGPVILMVNACCSRDLSEKVVGVCFVAQDMTGQNIIMDKYTRIQGDYVAIVKNPSELIPPIFMINDLGSCLEWNEAMQKITGIKREDAVDKLLIGEVFTHHEYGCRVKDHGTLTKLSILMNTVISGQDPEKLLFGFFNTDGKYIESLMTATKRTDAEGKITGALCFLHVASPELQHALQVQKMSEQAAMNSFKELTYIRQELRNPLNGMQFTRNLLEPSDLTEEQRKLLASNVLCQEQLKKILHDTDLESIEQCYTEMSTVDFNLEEALNTVLMQAMPQSKEKQISIDRDWPAEVSCMHLCGDNLRLQQVLADFLACMLQFTQPAEGPIVLQVIPRMENIGSGMQIAHLEFRLVHPAPGVPEALIQEMFRHSPGASREGLGLYISQKLVKTMSGTVQYLRESESSSFIVLVEFPVAQLSTKRCKASTSKF

SEQ ID NO: 8054 - protein, 190 aa, Gleditsia triacanthos
KFHEDDHGEVVSEIRRSDLEPYLGLHYPATDIPQASRFLFKQNRVRLICDCHANPVRVIQSEELRQPLCLVISTLRSPHGCHTQYMANMGSIASLVMAVIVNGTDTTKLWGLLVCHHTSPRHVPFPLRYACEFLMQAFGLQLYSDMQLASQMAEKRILRTQTLLCDMLLRDSPFGIVTQSPNIMDLVKCD

SEQ ID NO: 8055 - protein, 279 aa, Zea mays
  unsure (1)..(279): unsure at all Xaa locations
MSRRYDKSHRRLFSPEGASLXRVEYATGGDLADARVSTSRILGGATGVAPGSAQKKVTSKLLQTSRSAEKMXTKIDSHLACAVAGIMSDAXILINTDRLHAQRYALSYQEPIPVEQLVQXLCDTKQGYXTQFGGPPPLLGSPFLFAGWDKHHGFQLYMSDPSGNYGGWKGPPAVGANSPGPRSPWLKQDYKDALTREXEARRCSALKVLSKTMDSTSLTAEKLEAGPRYFCSPTPGEVQYQVCSPEALGKLLAKSGLTQPCTRGIMYWFAVACDAFYCS

SEQ ID NO: 8056 - protein, 114 aa, Brownea sp. 'Lavin 6225'
RVMAYKFHEDEHGEVVAESKRPDLEPYYGLHYPSTDIPQASRFLFKQNRVRMIVDCHATPVRVIQDEGLMQPLCLVGSTLRAPHECHAQYMSNMGSVASLAMAVIINGNDEEAV

SEQ ID NO: 8057 - protein, 186 aa, Gymnocladus dioica
MAYKFHEDDHGEVIAEITKPGLEPYLGLHYPATDIPQAARFLFMKNKVRMIVDCHARHVKVLQDEKLPFELTLCGSTLRAPHTCHLQYMENMNSIASLVMAVVVNDNDEDVDSSDSIQPQKRKRLWGLVVCHNTTPRFVPFPLRYACEFLAQVFAIHVNKELELENQIVEKKILRTQTLLCDMLMR

SEQ ID NO: 8058 - protein, 115 aa, Casuarina equisetifolia
ACLNCINSGIRRMGVITQYQSHTLVQHIQRGWSFFNEEMNEFVDLLPAQQRMKGENWYRGTADAVTQNLDIIRRYKAEYVVILAGDHIYKQDYSRMLIDHVEKGARCTVACMPVP

SEQ ID NO: 8059 - protein, 364 aa, Arabidopsis thaliana
MGKGGMSQGEGSKVEEENMAAWLVGINTLKIQPFLLPSVGPHDVRVRMKAVGICGSDVHYLKTMICADFVVKEPMVIGHECAGIIEEVGEEVKHLVVGDRVALEPGISCWRCNLCREGRYNLCPEMKFFATPPVHGSLANQVVHPADLCFKLPENVSLEEGAMCEPLSVGVHACRRAEVGPETNVLVMGAGPIGLVTMLAARAFSVPRIVIVDVDENRLAVAKQLGADEIVQVTTNLEDVGSEVEQIQKAMGSNIDVTFDCAGFNKTMSTALAATRCGGKVCLVGMGHGIMTVPLTPAAAREVDVVGVFRYKNTWPLCLEFLTSGKIDVKPLITHRFGFSQKEVEDAFETSARGSNAIKVMFNL

SEQ ID NO: 8060 - protein, 184 aa, Gymnocladus dioica
HGEVVSEIRRSDLEPFLGLHYPATDIPQAARFLFKQNRVRMICDCHANPVKVIQSEESRQPLCLVNSTLRSPHQCHAQYMENMGSIASLVMAVIVNGNDTTKLWGLLVCHHTSPRHVPFPLRYACEFLMQAFGLQLYMEMQLASQMAEKRTLKTQTLLCDMLLRDALFSIVTQSPNIMDLVKCD

SEQ ID NO: 8061 - protein, 156 aa, Haemophilus influenzae
NRTNTPVLVDGKDVMPEVNAVLAKMKDFCQRIISGEWKGYTGKAITDVVNIGIGGSDLGPYTVTEALRPYKNHLNMHFVSNVDGTHIAETLKKVNPETTLFLVASKTFTTQETMTNAQSARDWLLKAAKDESAVAKHFAALSTNAKDVEKFGIDTN

SEQ ID NO: 8062 - protein, 394 aa, Oryza sativa
MGSFGRLARRAVETEAPVMVKMQELLRGNKDVMSLAQGVVYWQPPEAAMNKIKEIVWEPSISKYGSDDGLPELREALLEKLRRENKLTKSSIMVTSGANQAFVNVVLTLCDAGDAVVMFAPYYFNSYMSFQMTGVTDILVGASNPETLHPDVDWLEKVLQENNPIPKLVSVVNPGNPSGAFIPKPMLERISELCRNAGAWLVVDNTYEYFMYDGMEHYCLEGNHIVNLFSFSKAYGMMGWRVGYIAHPNEADGLHAQLLKVQDNIPICASIIGQRLALYALEAGPEWIRERVRDLVKNRELLMEAMSPLGKDSVKGGEGAIYLWAKLPEKCSDDFEVVRWLANKHGVAVIPGSASGGPGYIRVSFGGLKESDTRLAAERLRRGLQELVTEGMVQ

SEQ ID NO: 8063 - protein, 430 aa, Rubrobacter xylanophilus DSM 9941
MTEIVAVRGREILDSRGNPTLEVEVVTAAGFVGRAAVPSGASTGQNEAVELRDGEGGRYGGKGVLRAVANVEGELAEAVVGMDVTDQRALDLAMIEADGTENKGRLGANAMLGVSLAAARAAAEYAGLPLYRYLGGPGAHVLPVPCANILNGGAHAANNVDFQEFMVVPVGFESYREALRAVAEIYAALKKLLAERGLAGGIGDEGGFAPDLSSNGEALGLLSEAVERSGYSLGEQVCFALDPAASEFYEGGRYELSGEGRSLERGEMVDYYVRLCGEYPIISIEDGLAEDDWEGWEMISARLGGRVQLVGDDLFVTNPKILRKGIERGIANSILVKVNQIGTLTETFETMDLAHKSGYTAMVSHRSGETDDTTIADLAVAVNAGQIKTGAPARGERVAKYNQLLRIEESLGEAAVYPGLGAFNPRMREG

SEQ ID NO: 8064 - protein, 313 aa, Triticum aestivum
  unsure (1)..(313): unsure at all Xaa locations
AFVPYFLDEETGWGLEVDELKKQVDEARSKGITVRALVVINPGNPTGQVLAEENQKKIVEFCKNEGLVLLADEVYQENIYVEDKQFHSFKKIARSMGYTDDDLPLVSFQSVSKGYYGECGKRGGYMEVTGYNADVREQIYKVASVNLCSNISGQILSSLIMNPPKVGDESYESFMVERDGIISSLARRAKALEEAFNSLEGITCNKAEGAMYLFPRLHLPQKAIGAAQAAGAAPDAYYALRLLQATGIVVVPGSGFGQAPGTYHFRCTILPQEDKXPAIISRFKEFHEKFMDEFRDVSRDEAPTGATIESGGD

SEQ ID NO: 8065 - protein, 484 aa, Synechococcus sp. PCC 7002
MTFSFDSWFRGLSPRLSYPFRRQGRLLLLACMLPLLWQGVAIAQGSLGEIPPAVQVTLDTLWVVFAAMLVFFMNAGFAMLESGFCRAKNTVNILAKNLIVFALSSLAFWAIGFALMFGDGNAVLGWNGFFLTGADNSPLTGSAYSGIFSSLSWAGIPLYTKFFFQLAFAGTAATIVSGAVAERIKFASFVIFSLFLVGFSYGITGHWVWGGGWLATLGFYDFAGSTVVHSVGGWAALMGVILLGPRLEKFAGDRINAIPGHNMSTATLGGLILWLGWFGFNPGSTMAADPDAISHIIVTTNMAAAAGAIAATITSWIQFGKPDLSMIINGVLAGLVGITAACAYVNVPSAIVIGAIAGVIVVFSVLTFEGLRFDDPVGALSVHLVCGIWGTLAVGLFSVGGDIYPWYAADAGPSAGLLFGGGVAQLLSQFIGVVVVGMFTAGFSFAIWLVLELSMGLRVSKEEELEGLDIGEHGMEAYHRFFRE

SEQ ID NO: 8066 - protein, 167 aa, Amorphophallus albus
GTADAVRQFIWVFEDPRNKNIEHVLILSGDQLYRMDYMDLVQRHMDTRADITVSCVPVDDSRASDFGLMKIDKVGRIVHFSEKPKGSVLDAMKVDTTIPGLSPYEAKNFPYIASMGVYAFRTEILLNLLRWRYPTSNDFGSEIIPSAVNEYNVQAYLFKDYWEDIGT

SEQ ID NO: 8067 - protein, 405 aa, Ralstonia metallidurans CH34
MTADSGKRRFARIDRLPPYVFNITAELKMAARRRGEDIIDMSMGNPDGATPPHIVAKLVDAAQRPDTHGYSASKGIPRLRRAISHWYRERYDVDIDPDKEAIVTIGSKEGLAHLMLATLDRGDTVLVPDPSYPIHIYGAVIAGADIRSVPLTPGIDFFAELERAIRGSYPKPKMIVLGFPSNPTAACVELDFFERVIALARKHDIFVVHDLAYADIVFDGWKAPSIMQVPGAKDIAVEFFTLSKSYNMAGWRIGFMVGNPDLVAALTRIKSYHDYGTFTPLQVAAIAALEGDQQCVKEIAAQYQSRRDVLARGLIESGWPVDIPKASMYIWARIPEPYRALGSLEFAKQLLAKAKVSVSPGIGFGDYGDEYVRFALIENESRIRQAVRGIKAMFRADGLVTAPGG

SEQ ID NO: 8068 - protein, 326 aa, Candida albicans
MTGSSSQFQQLEKLGEGTYATVYKGRNRATGALVALKEISLDSEEGTPSTAIREISLMKELDHENIVTLYDVIHTENKLTLVFEYMDKDLKKYMEVHGQQSALDLKVVKSFMFQLLKGIMFCHDNRVLHRDLKPQNLLINNKGELKLGDFGLARAFGIPFNTFSNEVVTLWYRAPDVLLGSRAYTTSIDIWSAGCIFAEMCTGKPLFPGTANEDQLIKIFRLMGTPNERTWPGISQYTNYKNNWQIFVPQDLRLIVPNLDSMGLNLLQSLLQMRPESRITARQALQHPWFHEITMPNAVPQHLSDPYQQQQQQQQHPHQPIIDQQY

SEQ ID NO: 8069 - protein, 497 aa, Azotobacter vinelandii
MTTPTRNDWEERARSLIIEGRAFVDGQYLPAADGATFDCLSPIDGRLLAQVASCAAADADLAVAAARRSFESGRWSRLAPAKRKAVMIRLAELLEIHREELALLETLDMGKPIKYSLSIDVPAAARALRWSGEAIDKLYGEVAATPDDELGLVTREPVGVVAAIVPWNFPLLMACWKLGPALASGNSVVLKPSEKSPLTAIRLAQLAFEAGIPPGVLNVLPGYGHSVGRALALHMDVDCLVFTGSTRVAKQLMVYAGESNMKRIWLEAGGKSPNIVFADAPDLAAAAEAAASAIAFNQGEVCTAGSRLLVERSIKEAFLPLVLEALKTWQPGHPLDPATNVGALVDRQQLDTVLGYIEAGLGEGASLLAGGRRILEETGGTYVEPTVFDGVSNAMKIAREEIFGPVLSVIVFDTPEEAVQIANDTSYGLAAAIWTRDLSKAHRTARALRAGSVWINQYDGGDMTAPFGGFKQSGNGRDKSLHAFDKYTELKATWIKL

SEQ ID NO: 8070 - protein, 341 aa, Crocosphaera watsonii WH 8501
MPLTQETLLGKSVDELTTWIKQQGQPGYRGKQLHQWLYQKGVRSLTEISVFPKAFREDFKDYPIGRSNINHCTIAPDKTRKYLLSLADGLIIETVGIPTAKRLTVCVSSQVGCPMNCDFCATGKGEYDRNLSSAEIVDQILTVQEDFQERVSHVVFMGMGEPLLNTKEVVKAVKILNQDVGIGQRSLTISTVGIPKKILELAHHQLQVTFAVSLHAANQKLREQLIPSAKFYPLPKLLADCRKYVEITGRRVSFEYILLGGVNDLPEQAIELAKCLKGFQSHVNLIPYNPIEEVDYQRSNAESINIFKTILEEKNIAVSVRYSRGLEANAACGQLRAMSGV

SEQ ID NO: 8071 - protein, 165 aa, Amorphophallus albus
GTADAVRQYLWLFEEHNVMEFLVLAGDHLYRMDYERFIQAHRETDADITVAALPMDEKRATAFGLMKIDEEGRIIEFAEKPKGEQLKAMKVDTTILGLDDERAREMPYIASMGIYVVSKDIMLELLREKFPGANDFGSEVMPGATSIGMRVQAYLYDGYWEDIGT

SEQ ID NO: 8072 - protein, 581 aa, Triticum aestivum
  unsure (1)..(581): unsure at all Xaa locations
MCGILAVLGCADDTQGKRVRVLELSRRLKHRGPDWSGMHQVGDCYLSHQRLAIIDPASGDQPLYNEDKSIVVTVNGEIYNHEQLRAQLSSHTFRTGSDCEVIAHLYEEHGENFIDMLDGVFSFVLLDTRDNSFIAARDAIGVTPLYIGWGIDGSVWISSEMKGLNDDCEHFEIFPPGHLYSSKQGGFKRWYNPPWFSEVIPSVPYDPLALRKAFEKAVVKRLMTDVPFGVLLSGGLDSSLVAAVTVRHLAGTKAAKRWGTKLHSFCVGLEGSPDLKAAKEVANYLGTMHHEFTFTVQDGIDAIEDVIYHTETYDVTTIRASTPMFLMSRKIKSLGVKMVISGEGSDEIFGGYLYFHKAPNKEELHRETCQKIKALHQYDCLRANKATSAWGLEARVPFLDKEFINEAMSIDPEWKMIRPDLGRIEKWVLRKAFDDEEQPFLPKHILYRQKEQFSDGVGYSWIDGLKAHAESNVTDKMMSNAKFIYPHNTPXTKEAYCYRMIFERYFPQSSAILTVPGGPSVACSTAKAIEWDAQWSGNLDPSGRAALGVHLSAYEQDTVAVGGSNKPGVMNTVVPGVAIET

SEQ ID NO: 8073 - protein, 496 aa, Cytophaga hutchinsonii
MKYDVCIIGAGPAGYAAAMRALDLNKSVILIEKDKIGGAGLYNGAISSKTFWELAKDIQTARKRLAQYSPDQHFSVTYQQVLRQVREGIANRRFHLEGQIESLAKQQTSRFRYIKGSAKLVSHNTVEVSTGTEEEIIEAENVVIATGSKPRKLPNIPIDEKIIVTSDGVENFENFPKSLVILGAGVIGCEWATIFSNFGYTSVNIIDKAERILPFEDDDVTDVVEANMKKQGITVHKKSNLLSMRIVDGEVEYILEYTDGRKEMHRVEKVLVSVGRIPNTQNLGLERVGVNILANGQIENTDGQTNIPNIYVAGDISSDVALVNVAELEGRHVIEKMFGLSDSVITYNNVSTIMFVQPEVAGVGMNEKKALQNKMSYKVVKIRYDMIPRAIAMRNNDGFFKILVTNDADMKIIGMRAVGVHASSAIQAVALLISMDKGVEELADMIHPHPSIIEGIQECIRMLLGKSVLKPEFFKGMLSCKSCDENGCVNDIIYLR

SEQ ID NO: 8074 - protein, 486 aa, Azotobacter vinelandii
MKEIKHFINGEYVGSASGKLFDNVNPANGEVIARIHEAGEAEVDAAVKAARAALKGPWGKMSVAERTEILHRVAAGITARFDEFLEAECQDTGKPKSLASHIDIPRGAANFSVFADLVKNVPTEAFEMATPDGSGALNYGVRRPKGVIGVISPWNLPLLLMTWKVGPALACGNTVVVKPSEETPSTTALLGEVMNAAGVPAGVYNVVHGFGGNSAGAFLTAHPDVDGITFTGETGTGETIMRAAAKGVRQVSLELGGKNAGIVFADADLDKAIEGTLRSAFANCGQVCLGTERVYVQRPIFDAFVARLKAGAEALVIGEPNDPKANFGPLVSHKHREKVLSYYQKAKDEGATIVTGGGVPDMPQHLAGGAWVQPTIWTGLKDDSPVVTEEIFGPCCHIRPFDTEEEAIELANSLPYGLASAIWTENASRAHRVAGRIEAGIVWVNSWFLRDLRTAFGGAKQSGIGREGGVHSLEFYTELKNICVKL

SEQ ID NO: 8075 - protein, 208 aa, Enterolobium cyclocarpum
RVMAYKFHEDEHGEVVSEVKKPGLESYMGLHYPATDVPQATRFLFMKNKVRMIVDCRAKHVKVLQDENLPYDLTFCGSTLRAPHSCHVQYMQNMDLVASLVMAVVINDRDEDGDSSDSVQPQKRKRLWGLVVCHNYTPRFVPFPLRYACEFLAQVFAIHVNKEIELEYQIIEKNIMRTQSLLCDMLMRDEPLGIISQSPNIMDLVKCD

SEQ ID NO: 8076 - protein, 207 aa, Cyclolobium nutans
VMAYKFHEDDHGEVIAEITKPGLEPYLGLHYPATDIPQAARFLFMKNKVRMIVDCHAKHVKVLQDEKLPFDLTLCGSTLRAPHSCHLQYMANMDSIASLVMAVVVNDSDEDGNSSDAVQPQKRKRLWGLVVCHNTTPRFVPFPLRYACEFLAQVFAIHVNKEIELEYQIIEKNILRTQTLLCDMLMRNAPLGIVSQSPNIMDLVKCD

SEQ ID NO: 8077 - protein, 404 aa, Neisseria meningitidis MC58
MDKFPKSAKLDHVCYDIRGPVHKKALQLEEEGNKILKLNIGNPAPFGFEAPDEILVDVIRNLPTSQGYCDSKGLYSARKAIVHYYQTKGLRDITVDDVYIGNGVSELITMSMQALLNDGDEILIPAPDYPLWTAAATLAGGTVRHYLCDEENGWFPNLADMEAKITPKTKAIVVINPNNPTGAVYSREILLEIAELARKHGLIIFADEIYDKILYDGAVHHHIAALAPDLLTVTFNGLSKAYRVAGFRQGWMVLNGPKHHAKGYIEGLDMLSSMRLCANTPMQHAIQTALGGYQSINEFILPGGRLLEQRNRAWELVNQIPGVSCVKPMGAMYMFPKIDTEMYRIRDDMKFVYDLLVREKVLLVQGTGFNWIKPDHFRIVTLPYVHQIEEAMGRLARFLQTYRQ

SEQ ID NO: 8078 - protein, 206 aa, Cyclolobium nutans
MAYKFHEDDHGEVIAEVTKPGLEPYLGLHYPATDIPQATRFLLMKNKVRLIVDCCAKHVKVLQDKKIPFELTLCGSTLRAPHSCHIQYMLNMNSIASLVMAVVVNDSDEDGDSSDAVQPQKRKRLWGLVVCHNTTPRFVPFPLRYACEFLAQVFAIHVNKEIELEYQIIEKNILRTQTLLCDMLMRNAPLGIVSQSPNIMDLVKCD

SEQ ID NO: 8079 - protein, 494 aa, Zea mays
MPAQKRPLPSSASPGSDADVEEAPGADADGCGGADQRSPKVTLNGVEERDGGPLQAKDQRHDSDADDEEEGDREGGGGGDGSGSGGDDDCDSQSSQSDGVMDEFTLVKLVDVRKEVQCPICLGIIRKTRTVMECLHRFCRDCIDKSMRLGNNECPACRTHCASRRSLRDDPNYDALILALYPDIDKYEEEELAFSEEERTRNKRIQESIAETFRRQTEALVKKRSTVKATDAASTRKTRRNMRPRRRGRISSPDIAPTDFDDDDREENGDDGSKESSSVDDHSPDVRPKRSRRWPMPRRSPAKAIGNTDNSIEDNDDSGGARDFMTASPLRGEMLAWGKNGTRSQTRHGNSSGSSGRMGRSGRVAKLVDQFRNADDFDNELNLYLVLLPLDGQSVPKLEKPYLSCLPTLSVRHLCQFVALQLSRQPKEVEIYIRKSKDACLSANYTCKYETKPEQPNGLERLWEEKSLSDLYPSLATRQGDLELLYSLKAQGQG

SEQ ID NO: 8080 - protein, 357 aa, Pseudomonas fluorescens PfO-1
MLDHVTQQHRNPPTTLRTTSKSRTTMKAFLIDGYGKNPGRIGEAPAPAVGAHDVLIEVHASSVNVLDSKISKGEFKLILPYAFPLILGNDLAGVVVEVGPQVTRFKPGDEVYARPPEARIGTFAQLIAVNENAVALKPANTDMAQAASLPLVALTAWQVLVETARLQKGQKVLIHAGSGGVGTVAIQLAKHLGAFVATTTSTANVEWVKALGADLVIDYTQQDFASVLHDYDVVLNSLGADVLEKSLKVLKPGGQLISISGPPTVQFAREHGLSWPLQQVMRLLSLGIRRKARKQDVSYAFVFMRANGAQLQHITALVEDGIIKPVVDRSFLFESTAEALKYVERGRAKGKVVVALK

SEQ ID NO: 8081 - protein, 546 aa, Mycobacterium bovis AF2122/97
MSFVTAAPEMLATAAQNVANIGTSLSAANATAAASTTSVLAAGADEVSQAIARLFSDYATHYQSLNAQAAAFHHSFVQTLNAAGGAYSSAEAANASAQALEQNLLAVINAPAQALFGRPLIGNGANGTAASPNGGDGGILYGNGGNGFSQTTAGVAGGAGGSAGLIGNGGNGGAGGAGAAGGAGGAGGWLLGNGGAGGPGGPTDVPAGTGGAGGAGGDAPLIGWGGNGGPGGFAAFGNGGAGGNGGASGSLFGVGGAGGVGGSSEDVGGTGGAGGAGRGLFLGLGGDGGAGGTSNNNGGDGGAGGTAGGRLFSLGGDGGNGGAGTAIGSNAGDGGAGGDSSALIGYAQGGSGGLGGFGESTGGDGGLGGAGAVLIGTGVGGFGGLGGGSNGTGGAGGAGGTGATLIGLGAGGGGSIGGFAVNVGNGVGGLGGQGGQGAALIGLGAGGAGGAGGATVVGLGGNDGDGGDGGGLFSIGVGGDGGNAGNGAMPANGGNGGNAGVIANGSFAPSFVGFGGNGGNGVNGGTGGTGGSGGILFGANGANGPS

SEQ ID NO: 8082 - protein, 129 aa, Brassica oleracea
VSCSAGPVGDDMFHWQATIMGPTDSPFSGGVFLVSIHFPPDYPFKPPKVSFAPRFTTDINSNGSICLDILKEQWSPALTISKVLLSICSLLTDPNPDDPLVPEIAHTYKTDRVKYESTARSWTQKYAMG

SEQ ID NO: 8083 - protein, 254 aa, Exiguobacterium sp. 255-15
MIMRLDGKVIIVTGAASGMGKAMAEIFAAEGAHVVVSDIHGEAARQVAQSITENGGTALAVETNVAEETAVQQLIDQTITTYGKLDVLVNNAGIMDGMEGVGDISDERWERVFSVNTTAVMRAMRLAVPLFQKQGHGVILNNISIGGLNGARAGAAYTASKHAVVGLTKNTAYLYAKEGIRCNGIAPGAVETNIGQSMTNINEFGMGRTMLGMGLNPRSAKPEEIARLALFLVSEESSFVNGAIVIADGGWSAY

SEQ ID NO: 8084 - protein, 315 aa, Zea mays
AVTHPSHLHLGAKAIQQESLLSLFGIQPAEAIRLTSFFFFFFFPVAGLTEVTMAFAVSDELLGTFVPIAVYWLYSGLYVVLDGLGMDDYRLHPKGEEARNIVSRWTVVRGVLVQQAFQIAVSLLLFTVLGDDNGTVRKQPPALVMALQFIIAMFVMDTWQYFMHRYMHINRFLYKHVHSKHHTLVVPYAFGALYNHPLEGLILDTVGGALSFLISGMTPRTGIFFFSFATIKTVDDHCGLWLPGNILHVFFSNNSAYHDIHHQLYGNKYNFSQPFFVMWDKILGTYMPYTLETRKGGGFEARPVKLDRAQQIKAD

SEQ ID NO: 8085 - protein, 300 aa, Synechococcus sp. PCC 7002
MTHYSNVLDPIPSTPPQPNPRPRNYSRLTRLSYATGPVWIILCHLGMAIAFFTGLSWGAVLWIVFWYWLRMLGTTAIYHRLLTHKAYQASPWVKWIGSFITASAGQMGPSWWKAHHEDHHRFSDHPGDPHSSKEGFWWAHYRWLISPNTFPKKLPADIERDPILKLIDRFHFVPLIALGALSYGVGGLEYLAAFFISTTLLFHGVAFVNSVCHKWGDRPFQTTDHSRNNSWVAVLALGEGWHNLHHAFGWSVRHGITIQKGKVKYLPDFTYSFIRLLERMGLASKLKQPTVTDLQNAANP

SEQ ID NO: 8086 - protein, 242 aa, Pinus resinosa
MGRGRVELKRIENKINRQVTFSKRRNGLLKKAYELSVLCDAEVALIIFSSRGKLYEFGSAGMLKTLERYQKCSYVLQDATVSDREAQNWHQEVGKLKARVELLQRSQRHLLGEDLGPLSIKELQQLERQLEVALTHVRSRKTQVMLEMMDELRRKERILQEVNKSLRKKLQEAEGQAFNAMQPPPHAWDSHAVANNAYAMQHPSNAVDCEPTLQTGYQYAPPESSMPRHEQAQNNYMQGWMV

SEQ ID NO: 8087 - protein, 635 aa, Lotus japonicus
MCGICCVIGVPAGAESIRSTVLDRAKRIRHRGPDWTGVYAKGKNIIVHERLSIVDVETGNQPLKSADGKQVLVCNGEIYNHLQLRQSLKAPVQFATNSDSECILHLYNERGVGFVNSLNGIFGFVLIDEAKDTFIVARDHEGIIPLYYGWDETGALWVASELKALHDVCVRFEEFPPGHVLHGKVGSAGKLEKWYQPVWHDEAYVPAATAACDIKGLRESLEAAVERQMMTDVPYGVLLSGGLDSSVISAVAVRVAAKRAAAKADSKHTELGHVDPKSVVHSFSVGLKGSPDLKAAREVAAFIGTEHHEFVFTVDDGINALRDVIYHLETFDTTTIRASTAMYLMSRKIKALGVKMVLSGEGSDEVFGGYLYFHKAPDRVEFHKETVRKLKALNKFDCLRANKSTMAWGLEARVPFLDKEFLDFAMTLDPTHKMCGKHAGGRIEKWIVRKAFEGYLPPAILWRQKEQFSDGVGYSWIDSLKAFADAKVSDAQLAAAAFKFPENTPLTKESYLYRSIFETHYPEPAARACVPGGPSVACSTPAAIAWDAAFQKMADPSGRAVAGVHADAYAVAADDKTPDTSADAKHGTAAEHKASGATRAPFIAAANGIKCSAEAALPHALPKPVALASGKAEAE

SEQ ID NO: 8088 - protein, 591 aa, Solanum dulcamara
MGTPKEEATDEVFSENLEQKPDPDPATSKSELKETTSKSISGELQKRLSQCDKGINMSQSNQEAISLSRVQENQSENVQKQLGLKSEADASGSSQLSSLPKDSDAKSRGSESSVKDKVVSVLSGMASDSSDQMQTSNMEVFVSQSDQQRVSYQIKREKALDKLQPRRNPDTSVHGLTSDQGMTLSKAPEKPSEDGYNWRKYGQKLVKGNEFTRSYYKCTYPNCLAKKQVERSHDGHITDIHYIGKHEHPETLSVPQMSPELVLPLQMIQQDIPIITALEAEGEKSTTPRETCEPSKPSEVPLALDVVSACGGVKVTPLKQHKLENEVDKDDVPDSKRQKKDIVATDYTPPVKSHSEPRHIVQTMSEVDIINDGQRWPKYGQKIVKGNPNPRSYYRCSVAGCPVKKHVERASHDPKLVITTYEGHHVHDFPTSKAIGQISAAPDTGTAGVREDSRIESGESKHVVESKSESGENKHIREPKTEAGGNKRVGESIPESGENKHIREPKTEAGENKHIGESRIESGGNKHVEKSKLELGGNKHVGESIPKPGGNKHVGESIPESGGNKHVGESIPESGENKHVGLDMAVHIGAN

SEQ ID NO: 8089 - protein, 727 aa, Schizosaccharomyces pombe
MTPVQVPNLDVSVTSSLITTAPVTGNAATISTFTPGSPEPSMNGEEKESSYFPISENDDGTLDLFGDSELEKEQKGDNQETDYSSQYLHPTPPYTNFDDESPSSPTHPSVSNITVDGDSKKHSLQLQEEEKSSESLDSHTHPPKRVRNEDDSLTFSKTSPVSPSSLKDGASNTVTNDASNKIKSEASESASPSALQALDSTAAGSSKEHSSPHDETVKKEENDKDQYPPMTKEQHKYIHAMLRQLRRGRDSIPFRAPVDPVKQNIPDYPTIIKNPIDLGTMQKKFSSGVYSSAQHFIDDMNLMFSNCFLYNGTESPVGVMGKNLQATFERQLKQLPSAYVTSYSRPGRRPRSMTAPKGGARTRRQAAMYSNSSSGIRETMYDLKPHRRKDAAEMKFCQSVLKELLKKQHEAYAYPFYKPVNPTACGCPDYFKVIKHPMDLGTMQNKLNHNEYASMKAFEADMVLMFKNCYKFNSAGTPVHLMGKKLESIFQKLWANKPDFDSETYMGMSSVNTDYYYGDNEVFDSGDEFLEDDGEEFEAVNRQIHKLQSTLQAMKSRARSSSVSRRSRSRSLSVDIYPPITYEMQNELAEQCNYLSADQLSHVAEILRAALPHLRNTDEIEIDVSAMPPDVFYKVYYYVCKGDEIGAEALATASHTHQEKKKGRALSETEQAEKIRQLRAQLDRFSGIAQNKNTVTGNIAAYNTKSLGSDDSSSEDDGESSESSDSA

SEQ ID NO: 8090 - protein, 129 aa, Triticum aestivum
MAPGKRGSKAKGAPAPAAAAAAGAAGGEFPGCLRLMPPSTVAISVHAKPGSKMATITEIGEEAVGVQIDAPARDGEANAALVDFISSVLGVKKREVSIGSGSKSREKVVLVQDATLKGVFEALKKACGP

SEQ ID NO: 8091 - protein, 335 aa, Azotobacter vinelandii
MKTQNKDLPGWLLAAGLGLAAPFGMAVQDEVTPAQVVAALEDTFGVTPGERRNHIKGTCASGEFVGLPAVAAWSRSALFSGQPVPVVARFSLPGGNPKVPDTARSVRGMALEFRLPGGALQHMTMLDTPVFGAAQPKTFLDQILALKPDPATGKPDPAKLAAFRASHPDSRAQARFLAEHNPPPSFANSSYFGIHTFKFVDATGKATLVRWRFVPEDGEKSLSDEELETLPADFLEERLIQRTAQGPVRWDMLVSIGQPGDPENDPTVAWPENREQVKAGTLVLTAAMPQKGAACEKVNFDPLVMAEGIAPTDDPILRFRSPAYAVSFAKRQAGQ

SEQ ID NO: 8092 - protein, 420 aa, Agrobacterium tumefaciens str. C58
MSEKRVQPLARDAMAYVLAGGRGSRLKELTDRRAKPAVYFGGKARIIDFALSNALNSGIRRIGVATQYKAHSLIRHLQRGWDFFRPERNESFDILPASQRVSETQWYEGTADAVYQNIDIIEPYAPEYMVILAGDHIYKMDYEYMLQQHVDSGADVTIGCLEVPRMEATGFGVMHVNEKDEIIDFIEKPADPPGIPGNEGFALASMGIYVFHTKFLMEALRRDAADPTSSRDFGKDIIPYIVEHGKAVAHRFADSCVRSDFEHEPYWRDVGTIDAYWQANIDLTDVVPDLDIYDKSWPIWTYAEITPPAKFVHDDEDRRGSAVSSVVSGDCIISGAALNRSLLFTGVRANSYSRLENAVVLPSVKIGRHAQLSNVVIDHGVVIPEGLIVGEDPELDAKRFRRTESGICLITQSMIDKLDL

SEQ ID NO: 8093 - protein, 200 aa, Myrospermum sousanum
RVMAYKFHEDEHGEVVAESKRPDLEPYIGLHYPATDIPQASRFLFKQNRVRMIVDCHASPVGVIQDEGLMQPLCLVGSTLRAPHGCHAQYMANMGSIASLVMAVIINGNDEDTVCSRSSMRLWGLVVCHHTSARCIPFPLRYACEFLMQAFGLQLNMELQLASQSLEKRVLKTQTLLCDMLLRDSPIGIVTQSPNIMDLV

SEQ ID NO: 8094 - protein, 549 aa, Buchnera aphidicola str. APS (Acyrthosiphon pisum)
MKNINFNNTQSYQDLKNHFRKIKNIHLRDLFASDLNRFKKFSIIFENEMLIDFSKNRITDETLIYLLNLAKETDVKSGIKLMFSGAKINKTENRSVLHIALRNRTNRPIILNNCNIMLEVNALLEKMKNFSKMVIHGEWKGYTGKSISNVVNIGIGGSDLGPYMVTEALRPYKNHLNMYYVSNIDGTHLTEVLKKINPENTIFLIASKTFTTDETITNAHSAKKWFLHYSQDQSALDKHFFALSANIKNALNFGININNIFKFWDWVGGRFSLWSSAGLSIMLSIGFDNFEKFLDGAHAMDNHFYHTNYKENIPILLALISIWYTNFFGSETEAIFPYDQYMHRFSAYFQQSNMESNGKSINRNGQRINYQTGPIIWGEPGTNGQHAFYQLIHQGTRLIPCDFIAPVFSHNDLNNHHMKLISNFFAQTQALAFGQSRDSILHRLILSKKNQDDIKRILPFKICKGNQPTNSILIRKITPYNLGALIALYEHKIFVQGYILNIFSFDQWGVELGKELSQNIYNYLNINVKNKSYDASTEGLINFYKSFMI

SEQ ID NO: 8095 - protein, 400 aa, Brucella suis 1330
MAFLADALSRVKPSATIAVSQKARELKAKGKDVIVLGAGEPDFDTPENIKQAAIAAINRGETKYTPVSGIPQLRQAIVSKFKRENGLDYKPEQTIVGTGGKQILFNAFMATLNPGDEVIIPAPYWVSYPEMVAINGGTPVFIDTKIEDNFKLTAADLEKAITPKTKWLIFNSPSNPTGAAYTQAELKSLTDVLVRHPHVWILTDDMYEHLVYGDFVFTTPAQVEPSLYDRTLTMNGVSKAYAMTGWRIGYAAGPIELIKAMDMIQGQQTSGACSIAQWAAVEALNGTQDFIPANKKIFQARRDLVVSMLNQATGLQCPTPEGAFYVYPSCAGLIGKKTEAGKVIETDKDFVTELLETEGVAVVHGSAFGLGPNFRISYATSDELLEKACIRIQRFCASLR

SEQ ID NO: 8096 - protein, 156 aa, Haemophilus influenzae
NRANTPVLVDGKDVMPEINAVLAKMKDFCQRIISGEWKGYTGKAITDVVNIGIGGSDLGPYMVTEALRPYKNHLNMHFVSNVDGTHIAETLKKVNPETTLFLVASKTFTTQETMTNAQSARDWLLKAAKNESAVAKHFAALSTNAKDVEKFGIDTN

SEQ ID NO: 8097 - protein, 444 aa, Haemophilus influenzae Rd
MTNNNKTMEILMKSGDLNKYDLVKNALVLVLAGGRGSRLHELTDKRAKPALYFGGNRRIIDFALSNCINSDLNRIGVVTQYAAHSLLLHLQTGWSFLPQERGEFVDMLPARQQIDDSTWYRGTADAVYQNMAIIKNHYRPKYILILAGDHIYKQDYSVMLMDHVNSGAKCTVGCIEVPRSEAHEFGVMAVNENLKVKAFVEKPKDPPAMVGKPDVSLASMGIYVFDADYLYKMLEQEVNTPQTSHDFGKDVLPKCLEEGALYAHPFSRSCMGRNTEGEIYWRDVGTLDSFWQSNIDLVSENPQLDIYDQSWPIRGNPIQAYPSKFFYKHSNVHPVDNSLIGGGCVITDASISNSVLFDHIKIDAFSKVDHCVVLPQVKIGKNCVLKNCIIDRECEIPDGMQIGVDMEEDKKRFRISSTGKVILVTSKMLKILEGHEIGEEGHLD

SEQ ID NO: 8098 - protein, 511 aa, Streptomyces lavendulae
MKAMDRVDRAVERFPMYIDGQAVQAHDGAVLRTFEPATRRHLADLPSGGAEDVRRAVSAARRAFDEGPWPRMAPGERAGLLRKAAQRLREEAEPLAELEARDNGSTLRKALGADVPGAAAAFEWSAWWAEHVPERQPEAPGSGSYVVWRPVGVVAAIVPWNLPLLLAAWRIAPAIAAGNTCVIKPASFASLSTLRLVELLHECGLPPGVVNVVTGPGGVAGEQLVRSPGVDLVAFTGSDETGAAVREGAAAAGTSARLDLGGKSPNIVLADADLDRAVTGVTWGAFLHNGQVCMAGTRAVVHADVHDDFLRLLSERVGRLRVGDPLDPATDLGPLVSRNQARTARRFTELGLSQGAELVCGGRAPAADELPPGLDAGAYFLPTVLASVGADDAVAQEEIFGPVLAVVRAGSDDDAVRIANGSRYRLSAGVWSADPARARAVAERLRADRVWINDYRLVDLELPGTAGPRSAVWDRLTNELDAYRHKHVVHGGGAGAGGVPAPPTPYALLGG

SEQ ID NO: 8099 - protein, 502 aa, Xylella fastidiosa Ann-1
MHNGFDALQLHANRLRGVTIPDLLAAELKRPEQYARQVGPLYFNFARQKYDCVALEALFALARNHNVTGAFQRMFCGEQVNVTEGRAVLHTALRGDLSGTSVAVAAYTAAAKVRERMYALIAGLDASEVTDIVSVGIGGSDLGPRLVVDALRPISQGRFRVHFVSNVDGAAMRRTLDMLDPSRTAGILISKTFGTQETLLNGRILYDWLGGSERLYAVSANPERAAHAFDIVSTQVLPIWDWVGGRYSLWSAVGFPIALAIGSQRFEELLAGAAEFDAYALRVPLEENVAVLHGLTAVWNRNFLGCATYAVMAYDQRLALLPAYLQQLVMESLGKRVKCDGTPVDRDTVPVWWGGVGTDVQHSFFQALHQGTNIVPADFIGTIRNDDLYTENHFALNANLLAQIEVLANGQLSDNPHRVYPGGNPSTLILLDALTPQALGGLIAMYEHSVYVQSVIWGINAFDQFGVELGKHLAVQLLPALKGESVEVADPVTRAVLLRLRG

SEQ ID NO: 8100 - protein, 253 aa, Bradyrhizobium japonicum USDA 110
MDRPGETTHFGFRDVPLGDKQTLVNDVFHSVASRYDLMNDLMSGGLHRVWKDIMINALDPPRGDRPFALLDVAGGTGDISFRAAKAAGPGFHATVCDINSDMLAVGRERAAKRHLETQVDFVEGNAEALAFADRSFDAYTIAFGIRNVPQIDLALREAYRVLRPGSRFLCLEFSTVEMPGLDKLYDLFSFKVIPPLGRMITGDAESYQYLVESIRKFPKPNAFADMIRDAGFARVNWQTLSGGIVALHSGWRL

SEQ ID NO: 8101 - protein, 262 aa, Lycopersicon esculentum
MEKGDKNHFVLVHGACHGAWCWYKVVTILRSEGHKVSVLDMAASGINPKHVDDLNSMADYNEPLMEFMNSLPQLERVVLVGHSMGGINISLAMEKFPQKIVVAVFVTAFMPGPDLNLVALGQQYNQQVESHMDTEFVYNNGQDKAPTSLVLGPEVLATNFYQLSPPEDLTLATYLVRPVPLFDESILLANTTLSKEKYGSVHRVYVVCDKDNVLKEQQFQKWLINNNPPDEVQIIHNADHMVMFSKPRDLSSCLVMISQKYY

SEQ ID NO: 8102 - protein, 435 aa, Deinococcus radiodurans R1
MHFGGRVPLFLSCCRLHLSGVPMKPRVLGMILAGGQGSRLAPLTQKRSKPAVPFGSKYRIIDFAINNFINSGMFSVYVLTQYKAQSLTEHIQRGWRFGTFLSDYFITLVPAQMYRFEELGDAWYRGTADAVYQNMHLIDNFEADYVAIFSGDHIYKMNVEHMLEKHIETRADVTIAAYPMPQSQAHQFGVMQVDERWRVTEFHEKVPDPPTIPGQADLSLTSMGNYIFSRRALEELLEASISGQETGYDFGHNVIPRALSDGYHVQAYDFHKNPIPGQERPNTYWRDVGTLDAYFEANMDLVSVNPEFDIYNPEWPLRTSSEFSPPAKFVHESEGRKGQAFNSIMAGGAIISGGTVRDSVLGRNVRTHSYSLVESCVLFDDVQVGRHSHLRRVIVDKDVVIPPGTTIGLNREHDEQRGFTVTEHGVVVVPKGYVF

SEQ ID NO: 8103 - protein, 201 aa, Chlamydomonas reinhardtii
MLLTRKNVAVRPARAARRDVRAMSLLGNLFGGGSKPTSSTSNFHQLSALDIDKKNVDFKSLNNRVVLVVNVASKCGLTAANYKEFATLLGKYPATDLTIVAFPCNQFGGQEPGTNAEIKAFASARGFSGAGALLMDKVDVNGANASPVYNFLKVAAGDTSDIGWNFGKFLVRPDGTVFGRYAPTTGPLSLEKYIVELINSR

SEQ ID NO: 8104 - protein, 503 aa, Oryza sativa
  unsure (1)..(503): unsure at all Xaa locations
MATAIPQRQLFVAGEWRAPALGRRLPVVNPATESPIGEIPAGTAEDVDAAVAAAREALKRNRGRDWARAPGAVRAKYLRAIAAKIIERKSELARLETLDCGKPLDEAAWDMDDVAGCFEYFADLAESLDKRQNAPVSLPMENFXCYLRKEPIGVVGLITPWNYPLLMATWKVAPALAAGCTAVLKPSELASVTCLELADVCKEVGLPSGVLNIVTGLGSEAGAPLSSHPGVDKVAFTGSYETGKKIMASAAPMVKPVSLELGGKSPIVVFDDVDVEKAVEWTLFGCFWTNGQICSATSRLILHKKIAKEFQERMVAWAKNIKVSDPLEEGCRLGPVVSEGQYEKIKQFVSTAKSQGATILTGGVRPKHLEKGFYIEPTIITDVDTSMQIWREEVFGPVLCVKEFSTEEEAIELANDTHYGLAGAVLSGDRERCQRLTEEIDAGIIWVNCSQPCFCQAPWGGNKRSGFGRELGEGGIDNYLSVKQVTEYASDEPWGWYKSPSKL

SEQ ID NO: 8105 - protein, 343 aa, Vibrio parahaemolyticus RIMD 2210633
MKIKALSKLKPEQGIWMTEVDKPEVGHNDILIKIKKTAICGTDVHIYNWDEWSQKTIPVPMVVGHEYVGEVVAIGQEVRGFEIGDRVSGEGHITCGHCRNCRGGRTHLCRNTIGVGVNREGAFAEYLVIPAFNAFKIPDEISDDLASIFDPFGNAVHTALSFDLVGEDVLITGAGPIGIMAAAVAKHVGARHVVITDVNEYRLELARKMGVTRAVNVAEEKLEDVMAELGMTEGFDVGLEMSGNPAAFNSMLTTMNHGGRIALLGIPPSDMGIDWNQVIFKGLVIKGIYGREMFETWYKMASLIQSGLDLSPIITHHYKIDDFQEGFDVMRSGMSGKVILDWE

SEQ ID NO: 8106 - protein, 534 aa, Pyrobaculum aerophilum str. IM2
MSWEEVYKKNLIEKIKRDKHPFKLLEELETLARRHYSDIPEEEFIRLYWLGVVHDRPRTGYLMLRLRIPGGILKPHQLRRIGELSYKYGKNYAEITVRQDIQLHWIELKYLPEVLAQLKDVGILTIGTEGDTVRNITTCPLAGLTVNELFDVRDDVYKIDKAFLLDPIYADLPRKFKITITACPYMCSVPEIQDLALIGVTKDGKYGYTVLIGGGLSLAPRVGRHMPVFVPREMVIEFVKAVLDVWREEPRYRLSRVRARIKFMIDDLGVDKFRELVENRLGQRLEDYPSKPESLGKTDHIGVERLKDGTYAVGVAIPAGIVTGEFLIKLADLAEAVGVKEVRLTQRQNLILAGVPEDKVEIVKEFCQKWGYAVEQTPLVAMSVACTGDPYCNYSISDTKGLLLELIKSLKERFGEIQDLPPIHIVGCPHACAWYWIGNIGLMATTAKMPDGRFVKAYDVLVGGDYGKRTAIGKVLFKKVPADKIKDCITYLVEYYINKRAPGEDFPTFIARIDLRELADYISGKLGVQLALGK

SEQ ID NO: 8107 - protein, 200 aa, Schizosaccharomyces pombe
MTTELRRKLVIVGDGACGKTCLLIVFSKGTFPEVYVPTVFENYVADVEVDGRHIELALWDTAGQEDYDRLRPLSYPDSHVVLICFSVDAPESLDNVQEKWISEVLHFCSNLPILLVGCKVDLRNDPKTIEELSKTSQKPITFEEGQVVAQKIGAYKYLECSAKLNEGVNEVFETAARASMLKFKPASVPKTKKKKHCILL

SEQ ID NO: 8108 - protein, 291 aa, Crocosphaera watsonii WH 8501
MMKTAWVFPGQGSQTVGMGADLTATPMAKDRFIEAETILGWSVLDKCQGDETELGKTLYTQPCLYVVESILIDLLKDKGQRVDLVTGHSLGEYSALYAAEVFDFATGLNLVKRRSELMSEAAGGKMVALMKFDRSQLEEAIASIPGVVLANDNSEQQVVISGTPEAVDQLCSQVKSKRAIALKVSGAFHSPLMAEAATKFKQLLDEAKFTDAKVPVLSNVDPTPSTSATILKERLSKQMTGSVRWREIMLALPQQEITQVLEVGPGKVLAGLLKRACSEIEVGNIRSLEDF

SEQ ID NO: 8109 - protein, 389 aa, Neisseria meningitidis Z2491
MSKKLHPQTLAIRGGKEQTEYREHNQALFLTSSFMWDNAQHAADLFSKKIKGFTYTRTANPTTAAFEKRIAALEGAERAVATSTGMSAIQAAFFTFLQAGDHVISSRSLFGTTVGFINNIVTKFGIEVSHVSPTDINEWKAAVKANTKLLFLETPSNPLGEVADLEALAELAHGIGALLVVDNSLLSPVGSQPLKHGADISVSSATKAIDGHGRVMGGVLAGSEELMAQVAVYCNSCGLAMSPFNAWQLLSGVETLSLRMEKQFDNALKIAQWLQAQPQVQAVYYTGLPDHPQAELIRKQQNGGGIVIGFEVADQAAAWKVVDGVELFSRTANLGDVRSTITHPWTTTHGRMQPEEKLAANIRPGLVRLSVGLEYVGDLIDDLKQALAR

SEQ ID NO: 8110 - protein, 557 aa, Oryza sativa (japonica cultivar-group)
MEEDGGGGAGWGWATWRVAAVAAAAAVWVTMHVAARMADALWWRPRRLEAHFAAQGVRGPPYRFLLGSVREMVALMAEASSKPMSPPTSHNALPRVLAFYHYWRKIYGHRFLIWFGPTPRLTVAEPELIREIFLTRADAFDRYEAHPVVRQLEGDGLVSLHGDKWALHRRVLTDAFYPDNLNRLIPHVGKSVAALAAKWGAMAEAGGSGEVEVDVAEWFQAVTEEAITRATFGRSYDDGRVVFAMQGQLMAFASEAFRKVLVPGYRFLPTKKNRLSWRLDREIRRSLMRLIGRRSDEAEQGEKADDGSFRDLLGLMINAGAAAATRGNAGGEKNSPAAAIPVEDMLEECKTFFFAGKQTTTNLLTWATVLLAMHPDWQERARREVFDVCGAGELPSKEHLPKLKTLGMIMNETLRLYPPAVATIRRAKVDVQLSDGCMIPRDMELLVPIMAIHHDTRYWGPDASQFNPARFANGASKAAKHPLAFIPFGLGSRMCVGQNLARLEAKLTMAILLQRFEIRTSPNYVHAPTVLMLLYPQYGAPLIFRPLSSHPPDSTGP

SEQ ID NO: 8111 - protein, 294 aa, Escherichia coli O157:H7 EDL933
MEGLTVEFSVLSNNLKMPMMGFGVFQVTDKNVCKQSVLNAIRTGYRLIDTAAVYGNEDAVGEAVREAISEGLCTREELFITSKLWVQDMLNQDTAAAGIEASLKKSGLEYFDLYLLHQAMRDYFSAWRALEDAYEEGKLKAIGVSNFYPHVLANFCETVRVKPMVNQVELHPYFAQPEALATMKYYNVQPEAWAPLGGGRHKPFENNLLQSIADAHQKSISQVILRWNIQRGVVVIPKSTHQQRIEENFAIWDFSLTEKEMAQISSLDLGYVGESVKHFNPEFVRGCLAVKIHD

SEQ ID NO: 8112 - protein, 477 aa, Neisseria meningitidis MC58
MNEYSQLIKHPDISLPPVSDGIKVDNPATGETLAFVRKTDSDKLKNLIQKAAAAQKLWAAKTALERADVLWRWYFQIKENKEALARLMTMEQGKSLTEARGEIDYAASFVRWFAEEARRIDGDVLTSVKASQKLVVLKQPVGVTAAITPWNFPSAMIARKAAPALAVGCAMIVKPASLTPLSAYALASLAYEAGIPQDLLPVVSGSASEIGHEFATNPIIRKISFTGSTEVGAKIFADSAADIKKLSLELGGNAPFIVFDDADLDKAVEGALASKFRNSGQTCVCTNRVYAQSAIYDEFCRKLSEKAAALKLGNGLEDGVNQGPLIEEKAVEKVEQHIADALAKGASCLTGGKRSALGGTFFEPTVLSGVTAQMAVAREETFGPLCPVFRFETEAEVIEAANNTEYGLAAYLFTADTARQWRVGEALEYGMVGINTGLISNEAAPFGGVKRSGLGREGSKYGADEYLELKYLCMDVG

SEQ ID NO: 8113 - protein, 209 aa, Austrosteenisia blackii
DRVMAYKFHEDDHGEVIAEITKPGLEPYLGLHYPATDIPQAARFLFMKNKVRMIVDCHAKHVKVLQDEKLPFDLTLCGSTLRAPHSCHLQYMANMNSIASLVLAVVVNDNEEDGDSSDAVQPQKRKRLWGLVVCHNTTPRFVPFPLRYACEFLAQVFAIHVNKEIELEYQIIEKNILRTQTLLCDMLMRDAPLGIISQSPNIMDLVKCD

SEQ ID NO: 8114 - protein, 250 aa, Sphingomonas paucimobilis
MANRLAGKVALITGGASGLGAAQAKRFAEEGAKVVIGDLNEEMAKGVVAEIRAAGGDALFIRLDVTDAASWNNAIAAAVEAFGGLTTLSNTAGIIHPGGFEEESIEGWNKMVAVNQTAIFLGIKAAIPELVKSGNGSIINISSLIGMFPTAGNASYCATKAAVRIMSKAAALEFVDRGVRVNTIVPGGMNTPITANVPPDVLKQQTSQIPMGKLGDPIDIANGALFLASDEAKYITGVDLPIDGGWSVGV

SEQ ID NO: 8115 - protein, 205 aa, Austrosteenisia blackii
RTSSMRMIMGKVIAEIKKPGLEPYLGLHYPATDIPQATRFLFMKNKVRQIVDCRAKHVKVLQDKNIPFDLTLCGSTLRAPHSCHLQYMKNMNSSASLVMAVVVNDNNEDGDSSDAFQPQKRKRLWGLVVCHHTTPRFVPFPLRYACEFLAQVFAYLVNKELEIAYQIVEKNILRTQTLLCDMLMRDAPLGIVSQSPNIMDLVKCD

SEQ ID NO: 8116 - protein, 450 aa, Escherichia coli O157:H7 EDL933
MNAFRQEIIMNKYQAVIIGFGKAGKTLAVTLAKAGWRVALIEQSNAMYGGTCINIGCIPTKTLVHDAQQHTDFVRAIQRKNEVVNFLRNKNFHNLADMPNIDVINGQAEFINNHSLRVHRPEGNLEIHGEKIFINTGAQTVVPPIPGITTTPGVYDSTGLLNLKELPGHLGILGGGYIGVEFASMFANFGSKVTILEAASLFLPREERDIADNIATILRDQGVDIILNAHVERISHHENQVQVHSEHAQLAVDALLIASGRQPATASLHPENAGIAVNERGAIVVDKRLHTTADNIWAMGDVTGGLQFTYISLDDYRIVRDELLGEGKRSTDDRKNVPYSVFMTPPLSRVGMTEEQARESGADIQVVTLPVAAIPRARVMNDTRGVLKAIVDNKTQRILGASLLCVDSHEMINIVKMVMDAGLPYSILRDQIFTHPSMSESLNDLFSLVK

SEQ ID NO: 8117 - protein, 193 aa, Austrosteenisia blackii
MAYKFHEDDHGEVVSEIRRSDLEPYLGLHYPATDIPQASRFLFKQNRVRMICDCHAKPVKVIQSEELRQPLCLVNSTLRSPHGCHTQYMANMGSIASLVMAVTVNGNDTRRLWGLLVCHHTSPRYVPFPVRYACEFLMQAFGLQLYMEIQLASQMAEKRILKTQTLLCDMLLRDAPFGIVSQSPNIMDLVKCD

SEQ ID NO: 8118 - protein, 132 aa, Platycyamus regnellii
RVMAYKFHEDDHGEVIAEITKPGLEPYMGLHYPATDIPQAARFLFMKNKVRMIVDCHAKHVKVLQDEKLPFDLTLCGSTLRAPHSCHLQYMANMDSIASLVMAVIVNDNEEDGDSSEAVHPQKRKRLWGLVV

SEQ ID NO: 8119 - protein, 174 aa, Glycine max
  unsure (1)..(174): unsure at all Xaa locations
MVPSVISSPAETTVNRAGAGMADPLTALKSMDGCPTXNTLIDFTSFASNGGRAQNMQAWPPVDNKKYETLYYLPDLDPAQPAKDGXYLLRTGWTPRLELELEHGFWCREHNRPPEHYDGRYWTMWKLPIMTYTDAYHASKDLXEANTAYPNGFIRIIRFNTVRQVHHMNLIDYK

SEQ ID NO: 8120 - protein, 137 aa, Platycyamus regnellii
RVMAYKFHEDDHGEVIAEVKKPGLEPYMGLHYPATDIPQATRFLFMKNKVRMIVDCRAKHVKVLQDKKIGFDLTLCGSTLRAPHSCHLQYMENMNSSASLVMAVVVNDNDEDGDSSDAVQPQKRKRLWGLVVCHHTT

SEQ ID NO: 8121 - protein, 262 aa, Zea mays
  unsure (1)..(262): unsure at all Xaa locations
MASPALISDTDQWKALQAHVSAIHKTHLRDLMTDADRCKAMTAEFEGVFLDYSRQQATTETVDKLFKLAETAKLKEKIDKMFKGEKINTTENRSVLHVALRAPRDAVINSDGVNVVPEVWAVKDKIKQFSETFRSGSWVGATGKPLTNVVSVGIGGSFLGPLFVHTALQTDPEAAECAKGRQLRFLANVDPVDVARSIKDLDPXTTLVVVVSKTFTTAETMLNARTIQXRGLSLLLDLRLFPKHMIAGRTNLRLGQEFRNLT

SEQ ID NO: 8122 - protein, 485 aa, Candida tropicalis
MAPTFTNSNGQPIPEPFATQRVGQHGPLLLQDFNLIDSLAHFDRERIPERVVHAKGSGAYGVFEVTDDITDVCAAKFLDTVGKKTRIFTRFSTVGGELGSADTARDPRGFATKFYTEEGNLDLVYNNTPVFFIRDPSKFPHFIHTQKRNPETHLKDANMFWDYLTTNEESVHQVMVLFSDRGTPASYREMNGYSGHTYKWSNNKGEWFYVQVHFISDQGIKTLTNEEAGSLAGSNPDYAQEDLFKNIAAGNYPSWTCYIQTMTEAQAKEAEFSVFDLTKVWPHGKYPMRRFGKFTLNENPKNYFAEVEQAAFSPAHTVPHMEPSADPVLQSRLFSYADTHRHRLGTNYTQIPVNCPVTGAVFNPHMRDGAMNVNGNLGNHPNYLASDKPIEFKQFSLQEDQEVWHGAATPFHWKATPADFKQATELWKVLKKYPNQQEHLAHNVAVHASAADAPIQDRVIAYFTKVHPDLGDLIKKEILELSPRK

SEQ ID NO: 8123 - protein, 250 aa, Sphingomonas paucimobilis
MSNRMAGKVALVTGAASGLGAAQARLFAKEGAKVVVADLNVEMGNKVVAEIQESGGEALFVRLDITDAASWAGAVEAAVGAFGKLTTLSNTAGIIHGAMIQDETLEGWSKMIAVNQTALFLGLKIVAPEIAKSGNGAILNISSLVSVICEPGLISYAATKSAVRAMTKVAALEYVGQGVRVNTIVPGGVKTPIQANVTPEQVEWYKAQIPMGDLGEPNDIAYGALYLLSDEAKYVTGTELFIDGGWSSAA

SEQ ID NO: 8124 - protein, 250 aa, Sphingomonas paucimobilis
MSDLSGKTIIVTGGGSGIGRATVELLVASGANVAVADINDEAGEAVVAASGGKPAYFRCDIAQEEDVKALVAQTLAAFGGLDGAFNNAAIPQAGLPLAEVSLERFRQSMDINVTGTFLCMKYQILAMIERGTKGSIVNTASVAGVVGVPMHGEYVGAKHAVVGLTRVAAADYGKHGIRVNALVPGAVRTPMLQRAMDNDAGLEPYLNSIHPIGRFSEPHEQAQAAVWLLSDAASFVTGSCLAADGGFTAI

SEQ ID NO: 8125 - protein, 135 aa, Platycyamus regnellii
VKVIQSEELRQPLYLVNSTLRSPHGCHTQYMANMGSIASLVMAVIVNGNDTTRLWGLLVCHHTSPRYVPFPVRYACEFLMQAFGLQLYMEIQLASQMAEKRILKTQTLLCDMLLRDAPCGIVTQSPNIMDLVKCD

SEQ ID NO: 8126 - protein, 547 aa, Zea mays
  unsure (1)..(547): unsure at all Xaa locations
MNTVALLSLAPQLLIKPSLTCFSRKGVGRYGGIKVYAVLRDDGAEFAKNNNLEALFHVDXPGPRVPIKKGKFLDVNEALEVVRFXIQYCDWRAXRHDLLTIMXVLHNKVVEVLNPLAREFKSIGTLRKELAELQQELAKAHNQVHLSETRVSSALDKLAHMETLVNDXRLLPPDGASSTSTAQPTSLVPSTSSTARVRAKKPPRRGLNVSGPXVKPYNPSLKNFWYPVAFSSDLKDDTMVPIACFEEQWVIFRGKDGRPGCVQNTCAHRACPLHLGSVNEGRIQCPYHGWEYSTDGKCEKMPSTKMLNVRIQSLPCFEQEGMVWIWPGDDPPKATIPSLLPPSGFTVHAEIVMELPVEHGLLLDNLLDLAHAPFTHTSTFAKGWSVPSLVKFLTPASGLQGYWDPYPIDMEFRPPCMVLSTIGISKPGKLEGKSXRQCSTHLHQLHVCLPSSRNKTRLLYRMSLDFAPWLKHVPLMHLLWSHFAEKAFLNEDLRLVLGQQERMINGANVWNWPVSYDKLGVRYRLWRDTVERGSERLPFSNQAESGS

SEQ ID NO: 8127 - protein, 140 aa, Poecilanthe falcata
YRVMAYKFHEDDHGEVIAEITKPGLEPYLGLHYPATDIPQAARFLFMKNKVRMIVDCHAKHVKVVQDEKLPFDLTLCGSTFRAPHSCHLQYMANMDSIASLVMAVIVNDNEEDGDSSEAVQPQKRKRLWGLVVCHNTTPG

SEQ ID NO: 8128 - protein, 339 aa, Erwinia carotovora subsp. atroseptica SCRI1043
MTIIKSYAAPEAGAALELYEFDAGELQAEDVEVVVDYCGVCHSDLSMIDNEWGMSSYPLVAGHEVIGRVHALGDAAKNKGLKIGQRVGIGWTARSCGHCDACISGSQTNCQQGSVPTILNKGGFADKIRANWQWAIPLPDSIDIESAGPLLCGGITVFKPLLMHHVTATSRVGVIGIGGLGHIAIKLLHAMGCEVTAFSSNPSKEQEVLAMGADKVVNSRDPQALTALAGQFDLIINTVSVDLEWQPYFNALAYNGKFHTVGAVMKPFSVPAFTLIAGDRSVSGSSTGSPHELRSLMKLSARANVKPQTELFPMSKINDAIQHVRDGKARYRVVLKADF

SEQ ID NO: 8129 - protein, 442 aa, Avena fatua
MGAGAEPVEVEEGAAGKEEIGAAGKEEKTAVSCSICLDAVVAAAGGDRSTARLQCGHEFHLDCIGSAFNAKGVMQCPNCRKIEKGNWLYANGSRPSQDVNMDEWAHDEDLYDVSYSEMPFRFHWCPFGRLAQLPSFFEEGESSPPVTFHDFMGQHVFPEHLSVPAAPGAHPCPYVAYLQPLPSLASSSSSHVPERTMDSSVYHDHWNHLAGPSDGRPLQSVQPTDFHHNHWGHLPHSYAQSNSNNGVTEQPGVPFGTMRAARVDGDSQRRGSVFSPSYFSNGSGSRSRAPNVPPLVPQFMRAHSSLNEQYLQNPSSSLFAGAHRSGGMRPAPPPPQPENPTFCLFPPGSSGHSSMETDDAGGNRFYAWERDRFAPYPLMPVDCETSWWSSQQSHGASESTPAPAPAPAPRRLFGQWIGLGRSSPENRSPEGTSYRQMHSPRM

SEQ ID NO: 8130 - protein, 195 aa, Poecilanthe falcata
RVMAYKFHEDDHGEVVSEIRRSDLEPYLGLHYPAKDIPQAARFLFKQNRVRMIFDCHAKPVNVIQSEELRQPLCLVNSTLRSPHGCHTQYMANMGSVASLVMAVIVNGNDTTRLWGLLVCHHTSPRYVPFPVRYACEFLMQAFGLQLYMEIQLATQLAEKRILKTQTLLCDMLLRDAPFGIVNQSPNIMDLVKCD

SEQ ID NO: 8131 - protein, 398 aa, Arabidopsis thaliana
MRSSDHMAFAGVLPIVFLLILSSADLAASQSQPGPTNQPYNYGRLSPAMAVIVVILIAALFFMGFFSIYFRHCSGVPDAGVSPAGGARSRATVNAAARGLDVSVVETFPTFLYSDVKTQKLGKGELECAICLNEFEDDETLRLLPKCDHVFHPHCIDAWLEAHVTCPVCRANLAEQVAEGESVEPGGTEPDLELQQVVVNPEPVVTAPVPEQLVTSEVDSRRLPGVPVDLKRVKFSRSHTTGHSVVQPGECTERFTLRLPEDVRKRIMKDWKLNRTNSLLVLPRGGSSRRGKPIDRSRARSDRWLFRKTPSFLWRSRDDGSIRLGATGSVRASAVPNSTGSDSVRAGDRWAFLRNASFLWRNSSVHVPRGGVNKDGEGTSVKSTGASGSTSGSVRLPV

SEQ ID NO: 8132 - protein, 209 aa, Anabaena variabilis ATCC 29413
MKIMGFYSQVILPRLLDWSLSDPTLATYRQELLTDVTGEVLEIGFGTGLNLAYYPSHIHEITTVDVNPGMNTLAQKRIDDSGIKVQQLLLSGENLPMADNTFDSVVSTWTLCSIANVEQALQEVYRVLKPGGKFFFLEHGLSNKPNVQVWQNRLTPIQKILADGCHLNRNIQKLVEKSFNHVELKRFTPENFPDLMAHFYKGCATKKAI

SEQ ID NO: 8133 - protein, 486 aa, Xylella fastidiosa 9a5c
MMHHNVHQSEILADPCDLQRAERWLQRDLRVLWHPCTQMREHPDTLPLVPIVRGEGAWLVGHDGRRYLDAVSSWWTNLFGHADPRISAAIAAQARTLEQVMLAGFSHEPAVRLAEALLRLAPRQDGREPLSKVFYADNGSAGVEVALKMAFHYFRNRGEEQRTRFIALHNGYHGETIGALAVGDIPLYRRVYAPLLTEVLFAPSPDAYLAEPGQSAAEYALQAAEALEVLFKRYSGQICALILEPLLQCAGGMRMHHPVYLHRVRELCDAHGALLICDEIATGFGRTGTLFACEQACPVILTDTDDKQLGIMPDLLCLSKGLTGGFLPLAAVLTTQQLYEEFLDDSRERAFLHSHSYTGNPLACIAALTTLDIFENDCIIERNQVTAARMTQLAASLSGHPHVADVRQAGMVVAFELTRDGNKRTPFPLQARLGLHVYRAALARGVILRPLGDVVYWMPPYCVDEEQLHLLAETTRVAIDEAIACV

SEQ ID NO: 8134 - protein, 501 aa, Pseudomonas syringae pv. syringae B728a
MVCLTAAGLITVPTVYAADTLTRDNGAVVGDNQNSQTAGAQGPVLLQDVQLLQKLQRFDRERIPERVVHARGTGVKGEFTASADISDLSKATVFKSGEKTPVFVRFSSVVHGNHSPETLRDPHGFATKFYTADGNWDLVGNNFPTFFIRDAIKFPDMVHAFKPDPRTNLDNDSRRFDFFSHVPEATRTLTLLYSNEGTPAGYRFMDGNGVHAYKLVNAKGEVHYVKFHWKSLQGLKNLDPKEVAQVQSKDYSHLTNDLVGAIKKGDFPKWDLYVQVLKPEELAKFDFDPLDATKIWPDVPEKKIGQMVLNKNVDNFFQETEQVAMAPANLVPGIEPSEDRLLQGRVFSYADTQMYRLGANGLSLPVNQPKVAVNNGNQDGALNTGHTTSGVNYEPSRLEPRPADDKARYSQLPLSGTTQQAKITREQNFKQAGDLYRSYSAKEKTDLVQSFGESLADTDTESKNIMLSYLYKADPDYGTRVAEVAKGDLSKVKSLAASLKD

SEQ ID NO: 8135 - protein, 494 aa, Bacillus anthracis str. A2012
  unsure (1)..(494): unsure at all Xaa locations
MLTTNIELKPKVKAFLDEEIKMFINGEFVPSISGKTFETYNPATEDVLAVVYEAQEEDIDVAVKAARSAFESGPWVEMTTAERAHLIYKLADLIEEHGEELAQLEALDNGKPYQVALDDDIAATVENYRYYAGWATKIIGQTIPISKDYLNYTRHEPVGVVGQIIPWNFPLVMSSWKMGAALATGCTIVLKPAEQTPLSLLYTAKLFKEAGFPNGVVNFVPGFGPEAGAAIVNHHDIDKVAFTGSTVTGKYIMRQSAETIKHVTLELGGKSPNIILEDADLEEAINGAFQGIMYNHGQNCSAGSRVXVHRKHYETVVNELVKMANNVKLGAGMEKDTEMGPLVSKKQQERVLHYIEQGKAEGATVAAGGERAFEKGYFVQPTVFTDVTDDMTIVKEEIFGPVVVVLPFDSTEEVIERANRSSYGLAAGVWTQNIKTGHQVANKLKAGTVWINDYNLENAAAPFGGFKQSGIGRELGSYALDNYTEVKSVWVNIK

SEQ ID NO: 8136 - protein, 411 aa, Methanococcus maripaludis S2
MDAIILCAGKGTRLHPITESRPKPMIPIAGKPIIEHIIEKIENHVEKIYLIVGYQKEKIIDYFKDNPKIEYILQEKQLGTGHAVLTAKNFIKGDFLVLNGDVIFEDSIDEILNYENAVSLSNVDNPENFGVIELGYDNKIINLLEKPKKEEITSNLINAGIYKLQNSVFGILENLAPSERGEIELTDALKKLIENGKLHGVELKGYWNDIGHPWDVLSANNHFLNKIISKVSGKIENTVSITGNVIIEEGAVIKPNSVIEGPAIIKSGSIVGPLAYVRPNTVLMKNTFVGNSSEIKGSIIFENTKIPHLSYVGDSIIGANCNFGCNTITANLRFDDKPVIVNIKGKPVKSVRKLGAIIGDCVKTGIQVSFMPGVKIGSNSLIGANCLIDRDIEQESFVYKKDELVITKKRN

SEQ ID NO: 8137 - protein, 227 aa, Lactobacillus gasseri
MKTIGITASIKNKQLVVDRSIIDTVVKLGYLPLVFAPVSLKTMPLPNVNFDALILSGGPDITPIFYNEEPLPELRETDPHRDQFELNLIKTTHDSNLPILGIGRGMQMLNVAFNGTLFQDIYVQNSGAGIQHIQKNDLSLESHHVNVTEESELAKAVGTHPYVNSNHHQAIKTIANNFNIVATAPDGIIEAIESTDQTMLGIQWRPDKLLDDPKQEKIFTNFFNKLK

SEQ ID NO: 8138 - protein, 464 aa, Zea mays
MASEAKDVGILAMDIYFPPNCVLQEELETHDGVSKGKYTIGLGQESMAFCTEVEDVISMSLTAVKSLLKNYNIDPKCIGRLEVGSETVIDKSKSIKTWLMQIFEESGNTDIEGVDSSNACYGGTAALFNCVNWVESKSWDGRYGLVVCTDSAVYAEGPARPTGGAAAIAMLIGPNAPICFESKYRGSHMAHVYDFYKPDLASEYPVVDGKLSQTCYLMALDSCYNLFCKKYEKHEGKQFSISDADYVVFHSPYNKLVQKSFARLYYNDFLRNCSTVDGESREKLAPYAGLSSEESYQSRDLEKASQQVAKNLYESKVQPTTLIPKQVGNMYTASLYAALASVVHSRHETLAGQRIVMFSYGSGLTSTMFSFMINEGHHPFSLLNIANILDISKKLKARHVVPPEKFVEALKLMEHRYGARDFVTSQDTSLLSAGTYYLTHVDSKYRRFYDVKGDGVATAMSNGH

SEQ ID NO: 8139 - protein, 221 aa, Bacillus pseudofirmus
IYKRYDMMNSVISFQRHKAWRKDTMKRMKVQPGDHALDVCCGTADWTIALGEAVGHNGKVEGLDFSKNMLLIGEEKVKEHKMKHVSLRHGNAMELPYADETFDVVTIGFGLRNVPDYMQVLKEMHRVVKKGGKVVCLETSQPTIPVFKNLYFFYFRRVMPVFGKVFAKSYDEYSWLQESTMSFPNREKLAEMFREAGFERVDVKPYSGGVACMHLGVKGKN

SEQ ID NO: 8140 - protein, 228 aa, Zea mays
  unsure (1)..(228): unsure at all Xaa locations
MATSPALLFPSPSSASSAPSSARVEAVVLFNVCDSYVRRPDQADRVIGTLLGSLLSDGTVHVRNSYXSPIHLTVDTGFTRGEASIKAYISSNLSSXDSQLAAQFQEIPLDLKMIEAEKAGFEILKSTMVEKLPNDLEGMESSMGKLYILIDEIYKYVDDVVEGRVAPDNRIGRFISDSFASVPKLSPAAFDKLFNDKIQDNLALVYLSSITRTQISIAEKLNTAAQVL

SEQ ID NO: 8141 - protein, 215 aa, Ustilago maydis 521
MSDREDGGEETFYDDEEPVYDGDDLGEEQFDDGADGAANGIVHSSAGGDPSTSMAGQANAERITTPYMTKYERARILGTRALQISMNAPVLVPTEGETDPLEIAMKELAAKKIPLVVRRYLPDGSYEDWTVSELIVSDSSLIALPVHAMTLELASIRTHLYLQTQLVLALATHTTHYPKRSYAVDACISTRFSGPEPGLLERTQENTAEICGSTR

SEQ ID NO: 8142 - protein, 162 aa, Oryza sativa
MSFPLVCFCRQIPRPIVALFKLLQAVALAFVLILCFLGLYEFPYTVEDHAPLIHGRRRDPLGDDGLQPEAVKRGLPLVEYMQLADLSADCHDGESGYPATCRVCLERLEATDEVRRLGNCTHAFHIGCIDRWIDLGEVTCPLCRSHLLPRQRRGLLGSRRFG

SEQ ID NO: 8143 - protein, 385 aa, Neisseria meningitidis MC58
MKFATKAIHSSYDCDEHNRALMPPIYQNSMFALHEIGENVPYRYSRLSNPTRQILEDTVADLEHGAAGFAFSSGMAGIDAVWRTFLRPGDTIVAVADIYGGAYDLLVDVYQKWGVNVVFADLGNPDNLDELLKAHKVKLVWLETPSNPLLRLVDIKVLAAKAKAAGALVGIDNTFATPYLQQPLDMGCDFVFHSATKYLCGHSDVLMGIVVAKTKELAQPLHDMMVHTGAVAGPLDCWLVLRGIKTLALRMNAHCQNALEIARRLEAHPAIEKVFHPGLPSHEHYELAKTQMPKGIGGVVTVYLKNDTREAANSVIKNMKLVKMASSLGGVESLVNHCYSQSHSGVPHDVKMEMGIKVGLLRFSIGIEDADDIWNDISAALDTTL

SEQ ID NO: 8144 - protein, 192 aa, Zea mays
  unsure (1)..(192): unsure at all Xaa locations
IDVAATDFCTGKKYDLEFKSTKKXGQNFKTADDMIEIYSQLCSEYPLVSIEQPFDKDDWEHSKKXTTLELCQVAGDDLLMSDPERIKRAVNEYTCNALVLKANQVGTVTEAIEVVKQAKDAHWGVMVSHRSGDTEDSFIADLAVGASAGQIKAGAPCRGECLTNYNQLLRIEGELGSEGVYAGENWRTVNTS

SEQ ID NO: 8145 - protein, 366 aa, Pseudomonas aeruginosa PAO1
MSKMMKAAVFIQPGRIELVDKPIPDVGPNDALVRITTTTLCGTDVHILKGEYPVAPGLTVGHEPVGIIEKLGSAVVGYREGQRVIAGAICPNFNSYAAQDGVPSQDGSYLVESGRCACHGYKATAGWRFGNLIDGTQAEYVLVPDAQANLAPIPDGLSDEQVLMCPDIMSTGFKGAENANIRIGDSVAIFAQGPIGLCATAGARLLGASTIIAIDGNAHRLDIARGMGADVTLNFRECDVIEEILKLTGGRGVDASIEALGTQSTFETALRVLKPGGTLSSLGVYSEDLTIPLSAFAAGLGDHRINTALCPGGKERMRRLLNIVASGRVNLGPLVSHEYRLDDIVAAYDLFANQRDNVLKVAIKPH

SEQ ID NO: 8146 - protein, 264 aa, Haemophilus influenzae Rd
MDKSLKANCIGEFLGTALLIFFGVGCVAALKVAGASFGLWEISIMWGMGVALAVYATAGLSGAHLNPAVTIALWKFACFDGKKVIPYIISQMLGAFFAAALVYALYRNVFIDYETVHNIVRGTQESLSLAGTFSTYPHPSLSIGGAFAVEFVITAILMALIMALTDDGNGVPRGPLAPLLIGILIAVIGGAMGPLTGFAMNPARDFGPKFFAYLAGWGELALTGGREIPYFIVPMVAPVLGALAGAWLYKKAIGGNLPCNCGCE

SEQ ID NO: 8147 - protein, 125 aa, Triticum aestivum
  unsure (1)..(125): unsure at all Xaa locations
MAPTVMASSATSVAPFQGLKSTAGLPVSRRSNGASLGSVSNGGRIRCMQVWPIEGIKKFETLSYLPPLXTEGLLKQVDYLIRSXKWVPCLXFNKVGFIFREXNASPGXYDGRVGNVGKLNVSGGT

SEQ ID NO: 8148 - protein, 490 aa, Escherichia coli O157:H7 EDL933
MSRMAEQQLYIHGGYTSATSGRTFETINPANGNVLATVQAAGREDVDRAVKSAQQGQKIWAAMTAMERSRILRRAVDILRERNDELAKLETLDTGKAYSETSTVDIVTGADVLEYYAGLIPSLEGSQIPLRETSFVYTRREPLGVVAGIGAWNYPIQIALWKSAPALAAGNAMIFKPSEVTPLTALKLAEIYSEAGLPDGVFNVLPGVGAETGQYLTEHPGIAKVSFTGGVASGKKVMANSAASSLKEVTMELGGKSPLIVFDDADLDLAADIAMMANFFSSGQVCTNGTRVFVPAKCNAAFEQKILARVERIRAGDVFDPQTNFGPLVSFPHRDNVLRYIAKGKEEGARVLCGGDVLKGDGLDNGAWVAPTVFTDCSDEMTIVREEIFGPVMSILTYESEDEVIRRANDTDYGLAAGIVTADLNRAHRVIHQLEAGICWINTWGESPAEMPVGGYKHSGIGRENGVMTLQSYTQVKSIQVEMAKFQSIF

SEQ ID NO: 8149 - protein, 177 aa, Callerya atropurpurea
YPATDIPQAARFLFMKNKVRMIVDCHAKHVKVLQDEKLPFDLTLCGSTLRAPHSCHLQYMANMDSIASLVMAVVVNDSEEDGDSSEAVQPQKRKRLWGLVVCHNTTPRFVPFPLRYACEFLAQVFAIHVNKEIELEYQILEKNILRTQTLLCDMLMRDAPLGIVSQSPNIMDLVKCD

SEQ ID NO: 8150 - protein, 302 aa, Thermus thermophilus
  unsure (1)..(302): unsure at all Xaa locations
XKAWVLKRLGGPLELVDLPEPEAEEGEVVLRVEAVGLNFADHLXRLGAYLTRLHPPFIPGXEVVGVVEGRRYAALVPQGGLAERVAVPKGALLPLPEGLSPEEAAAFPVSFLTAYLALKRAQARPGEKVLVQAAAGALGTAAVQVARAXGLRVLAAASRPEKLALPLALGAEEAATYAEVPERAKAWGGLDLVLEVRGKEVEESLGLLAHGGRLVYIGAAEGEVAPIPPLRLXRRNLAVLGFWLTPLLREGALVEEALGFLLPRLGRELRPVVGPVFPFAEAEAAFRALLDRGHTGKVVVRL

SEQ ID NO: 8151 - protein, 296 aa, Yersinia enterocolitica (type 0:9)
MKCLKAVIPVAGLGTRMLPATKAIPKEMLPVVDKPLIQYIVNECVAAGVKEIVLVSHSSKNAIENHFDTSFELEAALESRVKRQLLKEIKSICPPDVTIMQVRQGHAKGLGHAVLCAQPMVGDNPFIVLLPDVLLDDSTADLSKENLASMIKRFEETGRSQIMVEPVPQADVSKYGIADCGHVDLAPGESTLMTAVVEKPSVEDAPSNLAVVGRYVLSKDIWPLLKKTPRGAGDEIQLTDAIAMLMEQEPVEAFHMTGKSHDCGDKLGYMKAFVTYGVRHSTEGENFTAWLKQQID

SEQ ID NO: 8152 - protein, 297 aa, Yersinia enterocolitica (type 0:9)
MTKLKAVIPVAGLGMRMLPATKAIPKEMLPIVDKPLIQYVVNECVAAGIKEIILITHSSKNAVENHFDTSYELEAMLEARVKRQLLDEVQSICPPGVTIMHIRQGHAEGLGHAVLCAKPLVGNEPFAVLLPDVLIDDAKSDLTKDNLAQLVKRFDETGVSQVLVHSVEPEALSNYSVISCEKSDLAPGESSRIKAMVEKPQSPVDLQSNLSAVGRYVLSADIWPLLEQTKPGAWGRIQLTDAIDALTENAPVDAVALTGQSYNCGEKLGYMQAYVAYGLRHPKQGAEFKAWLKKYIN

SEQ ID NO: 8153 - protein, 487 aa, uncultured bacterium 561
MNIELTNPTLFRTEAYVNGEWIGADNGARLPVTNPATGALITDVAKTGAAETRRAIAAAETAMLSWRQKPAKQRAQVMRRWFDLIMANQEDLARIMTLEQGKTLAESRGEVAYGASYIEWFAEQAKRIDGDVIPAPSGDKRIICIKQPVGVCAAITPWNFPNAMITRKAAPALAAGCTIVIKPASETPLSALALAELAHQAGIPPGVLNVLAGSSSDIGAELTSNPTVRKLSFTGSTPIGKMLEAQCVPTLKKTSMELGGNAPFIVFDDADIDSAVQGALISKYRNSGQTCVCSNRLLVQAGIAEEFTAKLVAATESLKLGNGLDENVDLGPLVNAKAVNDVHELVQGSISAGAKLVLGGAPSNLGVCFYQPTILTGVRPEMPVFRNEIFGPVAPIISFETEAEAIELANDTEFGLASYFYTRDIGRVWRVAEALEYGIVGINEGIISNEMAPFGGVKESGSGREGSKYGIDDYLEIKYMLMGGLNQ

SEQ ID NO: 8154 - protein, 189 aa, Pseudomonas fluorescens PfO-1
MPDMLKRWCAVPALLMALTGLAQAADCPDLLQGSLPKLRAKESIDLCQRYADKPLVVINTASFCGFAPQFEGLEALNQRYKAQGLEMLGVPSNDFKQESKDSAETAKVCYANYGVTFTMTEPQKVRGDDATHLFQVLARQSSAPKWNFYKYVIDRQGKVIANFSSLTKPDDPEFLAAIEKAIASQSLKP

SEQ ID NO: 8155 - protein, 454 aa, uncultured bacterium 561
MLLGQAMTAMIYPTTNPAATEVMVVSRGEGPYIYDQAGKQYLEGMAGLWCTSLGYGNQEIIETATRQMEQLSFSHMFSGKTHPSAIELADKLAAMAPIDDARVFLGASGSDANDTLVKLIRYYAVASGQPDRVKIIARDKGYHGVSVASAALTGLHANHAHFQLPFDALGVLRTGAPHYYRCAEAGETEADFVARRASELEALILDEGPDTIAAMIAEPVNGAGGVIIPPEGYFEAVQAVLDKYGIMLWDDEVICGFGRLGAAFGAEKLNMKPRMMACAKALTSAYVPLSAAIVAGDIADAIAGPAADMGVFGHGYTYSGHPLGCAVASKVLDIYVRDRLFEHAATLGAYMSKRLDEFSDHPLVGEVSAMGLLGALELVANKDSKQPFEGMRVAQFCAKAAEDNGLIIRPLGGNRMALCPPLIIQEAHVDEIMDKLSRALDSTLDFVTAEGLTV

SEQ ID NO: 8156 - protein, 488 aa, Streptomyces coelicolor
MPENNQKPLTTVAGPPVPDNQNSLTSGPRRPMLLQDVWFLEKLAHFDREVIPERRMHAKGSGLFGTFTVTHDITRYTSAKIFSEIGKKTPLFTRFSTVAGERGAADAERDIRGFAVKFYTDEGNWDLVGNNTPVFFFRDPLKFPDLNHAVKRDPRTNLRNAENNWDFWTNLPEALHQVTIVMSDRGIPASYRHMHGFGSHTYSLINAEGERFWVKFHHRTQQGIKNLTDAEAEALVGKDRESHQRDLFDAIEDGDFPKWKLFIQVMPEADAENYRFHPFDLTKVWSKKDYPLIEVGEWELNRNPDNYFADVEQAAFSPANVVPGIEASPDRMLQGRLFSYGDAQRYRLGVNHHHQIPVNAPKNPVNSYHRDPAMRVDGNQGATPGIEPNSYGRWQEQPAYRDPAQAVGAVADRFNYREDDDNYFEQPGNLFRQMSPEQQQVLFENTARAIDGASAQTIERHIGNCTQADPAYGAGVRKAIEALAAGNL

SEQ ID NO: 8157 - protein, 589 aa, Zea mays
MRVGGGRDDDDEVSRKLKSMDVDKLENGGREESPRPAVKYHGWKAMPFIIGNETFEKLGTLGTSANLLVYLTQVFHMRSVDAATLLNGLNGTTSLAPIIGAFLSDAYLGRYLALAIASVASLIGMFLLTMTAGANSLHPPECSVGETCEKATSYQFAVLFVAFAFLVLGSAGIRPCSMPFGADQFDPNTESGKRGINSFFNWYYFTFTAAMMISATVIIYVQSNVSWPIGLGIPTALMFLACVLFFVGTRLYVRVTPEGSPFTSVVQVLSAALKKRSLKQPKDPKQDLFDPPHTSAIVTKLAHTDQFRCLDKAAIVASPDEVRSGGGAPADPWRLCSVQQVEEVKCLIRIVPVWSTGIIYYVAVVQQSTYVVLSALQSDRHLGGAGFQIPAASFTVFAMLAQTLWIPFYDRLLLPKLRKITGKEEGFTLLQRQGIGIALSTVAMVISAIVEDRRRAIALSQPTLGTTITGGAISAMSSLWMVPQLMILGLSEAFNLISQIEFYYKEIPEHMRSVAGALAFCNLALGNYLSGFLVTIVHRTTGSGQNWLAQDLNKGRLDLFYWTIAGIGVFNLIYFVICARWYRFKGTSN

SEQ ID NO: 8158 - protein, 167 aa, Streptococcus pyogenes MGAS8232
MPNLYDFTVKAQNGNDLSLAAYKEKVVLIVNTATKCGLTPQYQALQALYDTYHDKGFEVLDFPCNQFLNQAPGDAEEINHFCSLTYHTTFPRFAKIKVNGKDADPLFTWLKEEKSGPLGKRIEWNFTKFLIDQNGQVIKRYSSKTDPKLIEEDLKALLDKIQCYHHL

SEQ ID NO: 8159 - protein, 308 aa, Pseudomonas fluorescens PfO-1
MTSKLEQLKQFTTVVADTGDFEAIARVKPVDATTNPSLLLKAAAIPAYAELLNASVRDCKGDVGLASDRFGVAVGQEILKVIPGRISTEVDARLSFDQDAVLKRAHRLIELYDKAGVGRDRVLIKIASTWEGIRAAEILEKEGIQTNLTLLFSFAQAAACADAGVFLISPFVGRIYDWYKKANGNDYTGADDPGVQSVTRIYNYYKANDYKTVVMGASFRNLSQIEQLAGCDRLTISPDLIEKLAADTGKLERKLAPGHAGEARLSLNEAQFRWLSNEDAMATEKLAEGIRQFARDQEKLEALLQAKL

SEQ ID NO: 8160 - protein, 197 aa, Chara foetida
DEHGEVIAEIRRADLEPYLGLHYPATDVPQAARFLFMKSRIRMIADCSAPQVKVLQDKSHVQLISLSGSTIRGVHGCHAQYMKNMGSAASLVMAVIINDAEDEGGGSGGGGASASITPRGRKLWGLVVCHHATPRVVPFPLRAACEFLMQVFGLQLNMEVELAAQIREKHILRTQTLLCDMLLRDAPTGIVTQSPNI

SEQ ID NO: 8161 - protein, 178 aa, Glycine max
  unsure (1)..(178): unsure at all Xaa locations
MAYSMISSPSVTTVNRACAGMAAPYTGLKFMAGFPTRMTNNDITCIASLCGILQCMQVWSPICKTNSETLSYLPDLDDSHSPEELXYLLRKGWIPCLQFELEHGFVYREHNRSPGYYDGRYWTMWKLPMFGCTDASQVLKELQEAKTAYPNGFIRIIGFDNVRQVQCISFIAYQLPGF

SEQ ID NO: 8162 - protein, 190 aa, Dicksonia antarctica
DEHGEVVAEIRKSDLEPYLGLHYPATDIPQASRFLFMKNRVRMICDCRAIPVKVIQDRELRQPLSLAGSTLRAPHGCHGQYMANMGSAASLAMAVTVNDNEEESSSRNHLFKQRKLWGLVVCHHTTPRAVPFPLRSACEFLMQVFGLQLNMEVELSAQLREKHILRTQTLLCDMLLRDAPIGIVSKSPNI

SEQ ID NO: 8163 - protein, 442 aa, Streptomyces spectabilis
MSTTAMPASTHHTIALEQSHRLPGGQSMTDLSGLVVDRARNAEVWDKDGKRYIDFFTGVGVCNIGHSHPRFLAEVGEQLSACAVGTFYTDARSRYYELLAAQLPERLGRIHMFSTGSEAVEAAVKLARAATGKHEVVSFWGGFHGKTQGALSLHGGPRKHRSGPFPPGSHQVPYAYCYRCPLQLEHSTCGQRCVDLAEQSIENGSVGDIAAIIVEPVQGTNGNIIPPAGYLRAVRRLADRHGALLILDEVITGFGRTGSLFAFEQDPEVRPDVVVLGKAMASGVPASAIVSRAELVEGTSFGQPSAAASTFGGNPLASAAALATLRILLDERLPERSRLLGETVARRLASWKEEFPFVGNAANVGLMVGVELVEPGTRRPLPKDVTRRIFQGLLAEGVLAMAYDSRIRIYPPLSIPADHLDEGLTAFESVFRSLRSLRSTQT

SEQ ID NO: 8164 - protein, 483 aa, Vibrio vulnificus CMCP6
MVFADRKRPNVPRTLSIFIFFLNIGVNVHRYKKEASNLIKLATPVLIASVAQTGMGFVDTVMAGGVSATDMAAVSVAASIWLPSILFGIGLLMALVPVVAQLNGAGKREQVPFEIQQGAVMALLISIPIIGVLFQTQWILGYMNVDAVMATKTIGYIHAVMFAVPAFLLFQTLRSLTDGLSLTKPAMVIGFIGLLLNIPLNWMFVYGKLGAPALGGVGCGVATAIVYWIMFLLLLFYVTTSHRLRQVQLFTTFHPPQLNAQVKLFKLGFPVAAALFFEVTLFAVVALLVAPLGSTVVAAHQVAINFSSLVFMLPMSIGAATSIRVGHMLGEKSTEGARIASHVGILVGLSTAVFTALLTVILREQIALLYTDNRVVITLAMQLLIFTAIYQCTDAIQVIAAGALRGYKDMRAIFNRTFIAYWLLGLPTGYVLGLTDWIVEPMGAQGFWIGFIVGLSSAAAMLGVRLHWLHRQNDEIQLNYEAR

SEQ ID NO: 8165 - protein, 375 aa, Candida albicans SC5314
MASTDTNNSKTVSSSTSSPSTPTKTATTKTTATPPIQSSLEVPSLANNSNGSSSTSTSSTNASSTGANDSNYDPFAGLSFRVGVAENKNTTFRNKMEDVHTYIANFAERVDWGYFAIFDGHAGKDTARWCGNNLHTLLEEEIDRNSDEGSPPPTPITGKDDLREDLYKCFVKADELIEKSGQGKSGCTAAVAVLRWESDNEEPVSHTKSQDGGKFDFKPTKNHKRLLYTSNVGDSRIVLCRAGQAYRLSYDHKATDTHEINRIEDNGGLVLKNRVNGVLAVTRSLGDTYMKSLVIGVPFTTATEITADDEFIIIACDGLWDVVSDKHACKLAAESFKQGYSPSQVAKKLCQFAIELSTTDNVTVMVVQLDNDVFS

SEQ ID NO: 8166 - protein, 459 aa, Neisseria meningitidis MC58
MLLDLNRFSFPVFLKEVRLLTTLALPMLLAQVAQVGIGFVDTVMAGGAGKEDLAAVALGSSAFATVYITFMGIMAALNPMIAQLYGAGKTDEVGETGRQGIWFGLFLGVFGMVLMWAAITPFRNWLTLSDYVEGTMAQYMLFTSLAMPAAMVHRALHAYTSSLNRPRLIMLVSFAAFVLNVPLNYIFVYGKFGMPALGGAGCGLATMAVFWFSALALWIYIAKENFFRPFGLTAKFGKPDWAVFKQIWKIGAPIGLSYFLEASAFSFIVFLIAPFGEDYVAAQQVGISLSGILYMIPQSVGSAGTVRIGFSLGRREFSRARYISGVSLVLGWMLAVITVLSLVLFRSPLVSMYNNDPAVLSIAATVLLFAGLFQPADFTQCIASYALRGYKVTKVPMFIHAAAFWGCGLLPGYLLAYRFNMGIYGFWTALIASLTIAAIALVWCLELCSREMVRSHKAV

SEQ ID NO: 8167 - protein, 467 aa, Pyrobaculum aerophilum str. IM2
MYDVVVLGGGSAGVAAAVKAAQLGAKVAVVNSGPLGGTCVNVGCVPSKFLIRAAQLKRYAERPFFKGISAKVEVAFDALLQHMKEVVEELRREKYEEVLKYYDVDIIEGYGYLKDAKTVKVGEREVRGEKIIVATGARPRVPEIPGLKEAMARGMAFTNEEFFKLDHMPSSIVFIGGGAIAAELSQALARLGIEVAVIYRSSFLKYEEEIASKFVEELLANEGVRLIKAAVTAVEIRGREVEVRHSGGSVRAEALFVAAGRAPNIEPLGGLLKLGPNGGVLVNERMETSLPGVYAAGDVTGGLEGARFLENAAARQGVVAAVNAMGGNAKFNPLAVPRVVFTDPAVASVGLREEDMIKGGIGCRCRAAPIEAVAAGWTKGQTTGFIKINTYPETWKVSVKRGKIAGALVVAPEAEELINVFAMAIQLGLTVEDLIEWLPSFPSYGEALRLAALAFYTDPTKLSCCGG

SEQ ID NO: 8168 - protein, 214 aa, Schizosaccharomyces pombe
MCQEDEYDYLFKTVLIGDSGVGKSNLLMRFTRNEFNIESKSTIGVEFATRNIVLDNKKIKAQIWDTAGQERYRAITSAYYRGAVGALIVYDITKQSSFDNVGRWLKELREHADSNIVIMLVGNKTDLLHLRAVSTEEAQAFAAENNLSFIETSAMDASNVEEAFQTVLTEIFRIVSNRSLEAGDDGVHPTAGQTLNIAPTMNDLNKKKSSSQCC

SEQ ID NO: 8169 - protein, 1164 aa, Arabidopsis thaliana
MVSGGGSKTSGGEAASSGHRRSRHTSAAEQAQSSANKALRSQNQQPQNHGGGTESTNKAIQQYTVDARLHAVFEQSGESGKSFDYSQSLKTAPYDSSVPEQQITAYLSRIQRGGYTQPFGCLIAVEESTFTIIGYSENAREMLGLMSQSVPSIEDKSEVLTIGTDLRSLFKSSSYLLLERAFVAREITLLNPIWIHSNNTGKPFYAILHRVDVGILIDLEPARTEDPALSIAGAVQSQKLAVRAISHLQSLPSGDIKLLCDTVVESVRDLTGYDRVMVYKFHEDEHGEVVAESKRNDLEPYIGLHYPATDIPQASRFLFKQNRVRMIVDCYASPVRVVQDDRLTQFICLVGSTLRAPHGCHAQYMTNMGSIASLAMAVIINGNEEDGNGVNTGGRNSMRLWGLVVCHHTSARCIPFPLRYACEFLMQAFGLQLNMELQLALQVSEKRVLRMQTLLCDMLLRDSPAGIVTQRPSIMDLVKCNGAAFLYQGKYYPLGVTPTDSQINDIVEWLVANHSDSTGLSTDSLGDAGYPRAAALGDAVCGMAVACITKRDFLFWFRSHTEKEIKWGGAKHHPEDKDDGQRMNPRSSFQTFLEVVKSRCQPWETAEMDAIHSLQLILRDSFKESEAMDSKAAAAGAVQPHGDDMVQQGMQEIGAVAREMVRLIETATVPIFAVDIDGCINGWNAKIAELTGLSVEDAMGKSLVRELIYKEYKETVDRLLSCALKGDEGKNVEVKLKTFGSELQGKAMFVVVNACSSKDYLNNIVGVCFVGQDVTGHKIVMDKFINIQGDYKAIIHSPNPLIPPIFAADENTCCLEWNTAMEKLTGWPRSEVIGKLLVREVFGSYCRLKGPDALTKFMIVLHNAIGGQDTDKFPFPFFDRKGEFIQALLTLNKRVSIDGKIIGAFCFLQIPSPELQQALEVQRRQESEYFSRRKELAYIFQVIKNPLSGLRFTNSLLEDMDLNEDQKQLLETSVSCEKQISKIVGDMDVKSIDDGSFLLERTEFFIGNVTNAVVSQVMLVVRERNLQLIRNIPTEVKSMAVYGDQIRLQQVLAEFLLSIVRYAPMEGSVELHLCPTLNQMADGFSAVRLEFRMACAGEGVPPEKVQDMFHSSRWTSPEGLGLSVCRKILKLMNGGVQYIREFERSYFLIVIELPVPLMMMMPSS

SEQ ID NO: 8170 - protein, 424 aa, Erwinia carotovora subsp. atroseptica SCRI1043
MAKNIQAIRGMNDYLPAETALWQRIENSLKQVLSGYGYNEIRLPIVEQTPLFKRAIGEVTDVVEKEMYTFDDRNGDSLTLRPEGTAGCVRAGIEHGILYNQEQRLWYVGPMFRYERPQKGRYRQFHQLGCEVFGLQGPDIDAELILMTARWWRILGIADHVKLELNSIGSLDARARYREALVAFLEQHKDQLDEDCLRRMYTNPLRVLDTKNPQIQVLLNDAPVLTDYLDDESRAHFETLGELLTQSGIPYTVNPRLVRGLDYYNRTVFEWVTTSLGAQGTVCAGGRYDGMVEQLGGHATPAVGFAMGLERLVLLVQSVNPDFKAQSGVDAYLISSGAGTQIAAMQLAEKLRDALPQLKLMTNYGGGNFKKQFARADKWGARVALVLGENEVAAGQVVVKNLSNGEQDTLAQADVASRLATLLD

SEQ ID NO: 8171 - protein, 145 aa, Synechococcus elongatus PCC 7942
MLAECHPRSLLIGDAVMPRIRPAEIVEAWQKHGEPLLVPAGSVIFNAEEQGTTMYGLLEGEVVLKRGDQELERITAGDVFGEGAIAQDQHQRFSTAVAATDCKLATLDRERFLFLIHNSPVFALDVIASLSTRLRAIKGSLEPSQ

SEQ ID NO: 8172 - protein, 233 aa, Zea mays
  unsure (1)..(233): unsure at all Xaa locations
AADRAEVRPGGMLVQRRDGEAAGPXIRIRVSHGATFREVVVPAQATFGELKRILVQTTGLEPERQRLFFRGKEKSDREFLHAAGVKDGAKLLLLEKPAPANIEQKVEPVIMDESVMKACAAVARVRAEVDRLSAKVCDLEKNVLAGRKVEDKEFVVLTELLMIQLLKLDGIEAEXEARAXXKAEVXRVXSLVETLDXLKARNXPLXDHNKAVXXXXQWEXFENXCHFXSXPXF

SEQ ID NO: 8173 - protein, 282 aa, Methanococcus maripaludis S2
MIKKAIIPAAGFGTRLLPITKAQPKEMLPVLGKPIIQYVIEDLANAGIEDILVITGRGKYAIENHFDKNFELEERLKKDGKCEPLKKILDINEFANIYYTRQGKQNGLGDAVHCGKEFICEDYTIVMVGDTIYSGNVPKKLLEAHKKYRCSVIALERVPKEDVYKYGVISGKELENGIFEINDLVEKPTVEDAPSNLIITGAYLLSSKIFDHLENTQPGRGGEIQLTDAMKSLLKEEKIIGVEVDFKRYDIGDIKGWLEANVELGIENIDGFKEYIRELCDK

SEQ ID NO: 8174 - protein, 477 aa, uncultured bacterium 561
MREYKQFYIDGEWVAPSAPSDFEVFDPATEEVCATISLGNETDVDKAVAAAKAAFETFSQTSVEERVALLERICEIYQRRLGDIAEAIRLEMGAPIKLASTAQAFAGLGHIAEAAKVLKTYAFTEDLGEHRVVKEPIGVCGLITPWNWPLNQVSCKVAPAIAVGCTMILKPSEIAPLSSYIYAEILHEAGVPAGVFNLVNGDGPTVGTALSVHPDVDMMSFTGSTRAGSLVAQNAAPTVKRVTQELGGKSPNIILEDADLEAAVTRGVLHMYNNTGQSCNAPSRMLVPRDKLAAAEAIAAKVTETMVTIGDTADDKTTMGPVVSKVQWDKIQGLINKGIEEGAKVVCGGAGLPDGIDRGYYVRPTVFSEVNNNMTVAREEIFGPVLTMIPYDSEEEAIKIANDTPYGLAGYVQGENIDHARQVASKIRAGNIHLNGASGGMDVPFGGFKQSGNGREWGSHGFTDYLEIKAIEGYSAA

SEQ ID NO: 8175 - protein, 148 aa, Methanococcus maripaludis S2
MNNVVIGGTFDILHKGHENLLMHASKFGKLFIGITSDDFIKSYKKHDVNPLNVRKNNLKKFLDTKKIDYEIMVINDVYGDSISEKYDIIVVTPETKENAETINKIRVKNGLKPLIIEIYDFLMAKDNVPISTTRIRNGEIDTQGNLKR

SEQ ID NO: 8176 - protein, 314 aa, Zea mays
MATATTSAYHCNAVLHLPRPPQFRRLLPPLPSLVTRRAASVGLGVARLGSRARARASSVPPPPPFFETVEEEEEEEEERGWSDAEAGFSDEAEDEQEWSGGNGAARGEDLGADAGEDLSGWARQWPRPRELFVCNLPRRCDVQDLLELFTPHGTVLSVEISRDAESGISRGTASVTMRSLAEARAAIDALDGFDMDGREVFVKLASDVISNRKNVNLAHITPTKDHIFETPHKVYVGNLAWSVQPQDLRELFTQCGTVVSTRLLTDRKGGRNRVYGFLSFSSAQELEEALKLDRTVFFGRDIVVKEAHVERQTR

SEQ ID NO: 8177 - protein, 246 aa, Glycine max
MYKNKNKHTHPPQRYSHHFEELHNFVFLDMGSLALETEDVISDIYLSLGLKESDKGVGGPRVLSLLSSLLERSVQRNETLLEAKHVKDVVTVFHGLRAPTLSVRKYIDRIFKYSGCSPSCFVVAHIYVDRFIQHTEIKLTSLNVHRLLITSIMLAAKFIDDAFYNNAYYAKVGGVSTSELNRLEMSFLFGIDFRLQFSVDTFGRYCRQLEKEAAEVVQIERPMQACRIKESWSNKDDPTCASTIAR

SEQ ID NO: 8178 - protein, 1204 aa, Nostoc punctiforme
MEFLTNQVSQTQEILLHRIASRIRQSLELQEILSATVAEVRSFLGTDRIKIYQFQADGHGLVIAESIQEDRLPPLLGLNFPADDIPPYARELFVRARQRCIVDLTTQEIGISPLDCPETGKPLEQQDIRYRPVDPCHLEYLTAMGVKSSVVVPIVLKNQETGKDSSPNVMESSQLWGLLVSHHSQARVVTQQELLLIQSVVDQVAIAISQSILLTQVREQARQEAIINKVTEQLHSTPVAQLQTALEETVAAFNGSGGRLYLLPDDEQTAKLYTFGLQPNQLDIGQEQTPSPLTQELSLVDRAWVSPMERNNEVLLLANLREGSDVLRKGRPIEEHRLWQKYLFASICPPENLENPSHKSWSVNWMRAIYALTPPVNELSYDSNLWAIADLYKEPLLRSVAPCFQTTQVRGLLIVPLQHGSTIVGCLTIFRDEVDIETIWAGCVDTDSRQLMPRQSFAAWRELRTGQAQQWSESEIKLAQALGERFATAVKQHRLYEQVQALNANLEQQVRDRTLELQQTNTDLQHSTIELQRSVERQQALARIIANMRQSLDVTTIFRTTTQEVCQLLECDRLSVYRFNADWGGEFVGDYETANPRWGRSIKLGVGMVWDDTYLQETQGGRYRNNETFVVDDIHSQGFTQCHIEILEQFHVQAFMIAPIFVGQELWGLLGAYQHSSTRHWQASEIEFFTQIATQLGVALQQAEYLEQVRAQTRKLALVAEQQQTLASVITKIRESLDLNAIFETTTQELRRVLNCDRVVIFRFYSESNYDGGEVIAEDVAERFLSTLTAKVYDRCLGQEHIEKFCQGYVHAVTDIYNSELNECYVSMLSRFQVRANLVIPMLKQGQLWGLLGIHQCQKSREWQDSEIEFVRQIAAQLGVALQHVVLLNQTQQQAIQLAQALEHLQQTQAHLLHSEKMSSLGLLVAGVAHEINNPVNFISGNLSHLHEYTQSLIKMLNIYQQIYPQPHPEIEKQAILSDLEFIAEDLPKLFSSLKIGAERIGEIVLSLRNFSRLDQAQVKPVDIHEGLDSTLLILQHRLKANSLHLGIEIVKQYASLPLIECFAGQLNQVFMNLLANAIDAVEEPCRQPAKSDKDKHYPRITIKTQLIANDWVQIYIKDNGVGMTKAVQAKLFDPFFTTKPVGQGTGLGLSISYQIVEKHGGKLQCLSQPGEGAQFVIEIPIKQSERELANVLIDKKESDTDNS

SEQ ID NO: 8179 - protein, 165 aa, Glycine max
MEPYKRGTCSAFNSAFWTTNSGAAIWNNNFLLTVGASGPILLEDYHRAEKIASFDRERIPERVVHAMGASAEGFFEVTHDIFDLTCADSLRAPGVQTPDFDRLSTGIHERGSPETLKDPRGLAVKLHTREGFFDLAGNNLTMFFVRDGMKFADMGDALRPQPQNH

SEQ ID NO: 8180 - protein, 477 aa, Zea mays
MQRLASSRRLLQAALAPARANSSLSAAAVAAPAPANGAFPKMPAFDYTPPPYDGPRAEEIFRKRAQFLSPSLFHFYDRPLNIVEGKMQYLFDEDGRRYLDAFGGIATVCCGHCHPDVVEAIVNQAKRIQHSTVLYLNHAIADFAEALASKMPGDLKVVFFTNSGTEANELALMIARLYTGCNDIISLRNGYHGNAAGTMGATAQSNWKFNVVQTGVHHALNPDPFRGAFGSDGEKYARDVQEIIEFGTTGRVGGFISEAIQGVGGIVELAPGYLPVAYSMVRKAGGLCIADEVQAGVARTGSHFWGFEGHGVIPDIVTMAKGIGNGIPIGAVVTTPEIAQVLTRRSYFNTFGGNPVSTAGGHAVLKVLEKEKLQENAFVVGSYLKEQLNNLKDKHEIIGDVRGKGFLLGVELVTDHEKKTPAKAEISRVMNHMKDMGVLVGKGGFYGNVFRITPPLCFTKEDSDFFIEVMDIALSKL

SEQ ID NO: 8181 - protein, 437 aa, uncultured bacterium 561
MDRKTLEAHWMPYTGNRQFKKDPRIITSAEGVWYTDDKGRKVLDGHSGLWTSGLGHGRKEISAAVSQQINTLDFAPSFQFGHPPAFELADRIKGLMPEDLDYVFFTNSGSESADTSLKMARAYWRLMGQPTKTRFVGRMKGYHGVNFGGISVGGIAANRKFFGQGVEADHLRHTMLPQNRFCRGMPQDGAELADELNEMIALHDASTIAAVIVEPMAGSAGVIPPPVGYLQKLRDICDANDILLIFDEVITGFGRCGAMTGADAFGVVPDILNVAKQITNGAIPMGAVIARAGIYDTFMAHGGPDYALEFAHGYTYSAHPVACAAGLAALDVLTGEALPQRVADEAPFFEALLHDALSDKPHVSDVRNYGFAGAITLEPYPGEPLRRPFEVAMKMWEKGFLVRYGGDTIQLAPMFVMERPEMESLVGALADSLQELA

SEQ ID NO: 8182 - protein, 308 aa, Glycine max
  unsure (1)..(308): unsure at all Xaa locations
RVSWGHKKSFIFVDRGFYSIETSLLLLALKDPTEHTAIDNLMVQQLDGTVNEXGWCKQKLSKGTLLGMRQTIFEFIFDSLNQRYPSFSFLSLYMPVPAFNVINGGSHAGNKLAMQEFMVLPVGASSFKEAMKMGVEVYHNLKSVIKKKYGQDAINVGDEGGFAPNIQENKEGLELLKTAIAKAGYTGKVVIGMDVAASEFYKEDKTYDLNFKEDNNDGSQRISGDALKDLYKSFVSEYPIVSIEDPFDQDDWEHYAKLTAEVGANVQIVGDDLLVTNPKRVQKAIDTKACNALLLKVXQIGSVTESIE

SEQ ID NO: 8183 - protein, 751 aa, ASPERGILLUS NIDULANS FGSC A4
MLSHYTGYKPGDVPGNLPDPYYWWEAGAMFNALIDYWFYTGDSRWNNITSQALIWQAGESGSFMPANQTRTEGNDDQGFWAFAAMSAAERNFPMPRDKHETPGPDWLAMAQATFNTQAWRWDAQNCGGGLRWQIFTWNAGYMYKNTISNGCFFNLAARLARYTGNQTYADWATKVWNWTHAVGFMTDDYSFYDGASIDGNCTNFDHVQWTYNAGVYLLGAAAMYNYTNGDPLWKQRTEGIINAAHIFFADSPSSKDIMYERACESINTCKVDQRAFKGFLARWMAQSTQFAPFTYDMVMPKLRSSALAAAKTCTGGSDGAECSLKWTEQKYTGGPAGGDVGIQMAALEVLQSTLIQKVEPPVTRKEGGLSMGDPAGGSEPPVPTPALLVREIETGDRFSRTRQGSMGSITPLEIPTHCKAGVIYNPGPNFTVKVEDVPVPQPGADDILIRLNVTGLCQSDLHYMLDDLGISMSTFGVRSPGHEGAGVVVKVGENVKNFKVGDRAGIKPMMDTCGACTSCWSDKETYCAGAVHTGLMYVVSPARYATPIPEGIPDEIAAPIMCKSRLQAGDWAVFPGGGSQGGVGIQGVQLASAMGMRPIVVDTGEEKKNLALKMGAEAFIDFKTVPDAAAAVVEIADGIGGHGVFVTAQAAYPTALAYLGTRIGGDLMCIGIAPAGTMSIPVDPNLLLFRNTRIQGTLVGSRHDTIKALDFARRGKLKQICEVWPVERLPEAVDRLRKGLVAGRMVVDFNQ

SEQ ID NO: 8184 - protein, 293 aa, Bacillus cereus ATCC 14579
MKKVRKAIIPAAGLGTRFLPVTKAMPKEMLPIVDKPTIQYIVEEAIESGIEDIIIVTGKGKRAIEDHFDHSFELEQSLLEKGKHEMLEKVQASSKINIHYIRQKEPKGLGHAVWCARKFIGNEPFAVLLGDDIVQAETPCLRQLMDQYEGTQSSVIGVQTVPENETHRYGIIDPVEQNDRRYQVRQFVEKPEQGTAPSNLAIMGRYVLTPEIFMFLENQQTGAGGEIQLTDAIQRLNEVQRVFAYDFKGTRYDVGEKFGFIKTTIEMALQNEELNVELMKYMKELVKKEEVHS

SEQ ID NO: 8185 - protein, 181 aa, Triticum aestivum
  unsure (1)..(181): unsure at all Xaa locations
AKLANLHVTATCGARNMDLVKGLGADEVMDYRTPEGASLLSPSGAKYDGVVHCTVGVSWSSFRPLLSDAGGRVIDITPNLWAILRYILHGVTFSKKRLVPLLVSPNKADLEFLVALLXDGKLKTXIDSRFPLGDAGKACRQYRHRLANFVTHRLTSHSCYNTLYITKVPRHKTLATFSKKK

SEQ ID NO: 8186 - protein, 218 aa, Mesorhizobium loti MAFF303099
MKFFVDTADIKDIRELNDLGLLDGVTTNPSLILKSGGKIADVTKQICDIVQGPVSAEVVATEYKDMMAEAEVLAKIAPNVCIKVPLTLDGLKACKTIRTQMNRMVNVTLCFSANQALLAAKAGASFISPFVGRIDDTGSDGMELIQEIRQIYDNYDYQTEILTASVRTVNHVKQAALIGADVITAPPATLKALVNHPLTDKGLAAFLADWAKTGQKIG

SEQ ID NO: 8187 - protein, 686 aa, ASPERGILLUS NIDULANS FGSC A4
MKVAVALTLVAGVLSAPTPTFWGPGWGDGSASAEGSAGLSGSAGLSGSAGIGGSAGLGGSAGLGGSAGASGSASGSADASASGSADAEGSGDAEGSAGLGGSAGLGGHAGLGGSAGIGGSGSATGEAGASASGAAGLGGHAGLGGSAGIGGSGSATGEADASASGSAGLGGHAGLGGSAGIGGSAGIGGSGSAGLGGSAGVGGSGSASASAGLGGHAGLGGSAGLGGSAGIGGSGSATGEAGASASGAAGLGGSAGGSAGLGGSGSGSAGIGGSAGGSAGLSGSASGSAGGSASGSAEGSAGLGGSGSAEGFTSGSASGSASGSASGSASGSASGSASGSASGSASGSGSLGGSGSFDGLFPSATPIWSTSFSTSFSTAGIPTPTGASPVAGEDCGCEEQEAVPTDVSPFANGGSKSELIPTGLGGFDLSSLGSLFGSGDASASATPSATATGSTTGSGSALGGFNWGSLFGSSSDSDSSSSSSSSSSGLGSFGSLLGKLPRALGKSRSGSSTSNDVTDNSGCKELTFIFARGTTEIGNMGTVVGPKVGEALKSLTGNKAAIQGVDYPADAAGNAALGGSGGPKMASLVETALKQCPDTKIVLGGYSQGAMVVHNAASKLSSGQVVGAVTFGDPFKSQKPDNIDQFKTFCASGDPVCLNGANVMAHLSYGNDAQTAAQFLVSAAGL

SEQ ID NO: 8188 - protein, 189 aa, Mesoplasma florum L1
MKLHPLVKNVLFTEEQIKERTIEVAKEIKSFYEQNDKEDQSLLVIGLLKGCIPFYQTFCMNFDFLIDMDFMVVSSYLGGTKSSGEPKINLDVNMSVKDRNILIVEDIVESGLTLEFVQNYLLNKGAKSVKILTMLDKPTERKVDIKPDWTCFSIAKHFVIGYGLDYQEKLRNLPYVAVCDTDKLADWKW

SEQ ID NO: 8189 - protein, 453 aa, Mesoplasma florum L1
MSRIEKIIAREVLDSRGTPTVEVELWTEFGGYGIAKAPSGASTGENEALELRDGDKARYNGKGVLKAVANVNDKIAPALIGHDVQDQLGLDRVMIKLDGTEFKKKLGANGMLAVSLAAAHAAASELEVPLYRYIGGVQAKRLPVPMLNVINGGEHADSAIDFQEFMIMPVGAPTFKEALRWSSETFQALKSLLHDKGDITAVGDEGGFAPHFSWAYAKQDLASFKAKTPAEIALDLLVEAITKAGYKVGKDGIMIAMDCASSELYFEDKKYHFKKIEKVTGQEWAFTTEEMIAYLEKLVNNYPIISIEDGLSEKDWDGFVQLTEKIGDRVQIVGDDLFTTNPRFIKEGISKDAANSTLIKLNQIGTLSETVEAITMTQKAGWTAVVSHRSGETEDATIADLAVAFNAGQIKTGSMSRSDRIAKYNRLLQIEDQLGEDAIYDGYATFYNLKINK

SEQ ID NO: 8190 - protein, 599 aa, Schizosaccharomyces pombe
MPSIISSTNPQYINKCVNNGTMASSTNVPDRTVGSKSFASSVSKNDGRLMQQMLRAFVNKALDDKAEGNFAGYEDLRRQFAAKSDTKDAPSSLQLQNLLSALTCNVSRLDSSNSSLVMSVLDSVWVSRDESFVRCYTRFLGNLISAQSNYLPLVMTMLIQHMLYRPDSLAIHYEHAHMALKYVLELVPRAHSFLYSSILEEFPYKDESLLAQMTYISNVLSICEYVPSIKGPVLHAIIDKIIQIDVEIQVEVDDDDEEEDEVVTDDDGTSNADSEVITASTLYERHTAISSEMTSSTILTPPSLTDTRQLMQQLDQLLYTLFSYLDSNLKSTSRDRYLVYNSLIKSFVNTVLKTFRCRYTQFLIFWASQLDPEFTDIFLGVLTEVCLDPSQPYTLRLSGAMYIGSYVARAKALEKNTIQIIVNMMTRWVEAYLDQCENELSDDLLSKHSVFYAINQSIFYIFCFRWRELCVSDESESMEPRPNEWIPGLEILHRSVLSRLNPLRYCSPNIVLQFAKVANHLNFMYVYSIIEQNRKGIFREGFDTMDAYFPFDPYRLTKSSIIVQPFYNEWQQIPGLDDDEEEEDTDYESSTVMLGESPF

SEQ ID NO: 8191 - protein, 265 aa, Digitalis lanata
PTCGVKCLLEEEAIKVGGANHSHATQDLYDSIAAGNYPEWKLFIQTIDPDHEDRFDFDPLDVTKTWPEDILPLQPVGRMVLNKNIDNFFAENEQLAFCPAIVVPGVYYSDDKLLQTRIFSYSDTQRHRLGPNYLQLPANAPKCAHHNNHHEGFMNFMHRDEEVNYFPSRYDPCRHAERFPHPPVALNGKRDRICIEKENNFKQPGEKYRSFPPDRQERFIKRWVDALSDPRLTHEIRSIWVSYWTQADKSLGQKLASRLNIRPTM

SEQ ID NO: 8192 - protein, 349 aa, Escherichia coli O157:H7 EDL933
MKIKAVGSYSAKQPLEPMDITRREPGPNDVKIEIAYCGVCHSDLHQVRSEWAGTVYPCVPGHEIVGRVVAVGDQVEKHAPGDLVGVGCIVDSCKHCEECEDGLENYCDHMTGTYNSPTPDEPGHTLGGYSQQIVVHERYVLRIRHPQEQLAAVAPLLCAGITTYSPLRHWQAGPGKKVGVVGIGGLGHMGIKLAHAMGAHVVAFTTSEAKREAAKALGADEVVNSRNADEMAAHLKSFDFILNTVAAPHNLDDFTTLLKRDGTMTLVGAPATPHKSPEVFNLIMKRRAIAGSMIGGIPETQEMLDFCAEHGIVADIEMIRADQINEAYERMLRGDVKYRFVIDNRTLTD

SEQ ID NO: 8193 - protein, 310 aa, Zea mays
MSKLGLCNTVTQVIIKILVWCKKKKKKKNPISPRALSLSLSLSLSVGDEPGRPAPPPLAQVSIGRFARSCLDPSPAPSNFCYRIPHRGMLAKGRKVAGRREEMSANYAFGPQDDDAIIKHRLLTRTTTTRGEPPLKKLQKKFMSFATEIEKDADNISDCERLYKAFLHEINTFELPLLKSKAVVDANIREKESFNELQVEIERQILHAKTDIEDLKKQLEQSKIERQHKEECEAIRKLICLQPPRSETEKLIADLEKEITDLKAENVACIRTLGLRKKQFALLLHVGEELQISIEDEQKSIADELRAIAG

SEQ ID NO: 8194 - protein, 182 aa, Mycoplasma capricolum
MKVKRPILLAILDGWGLAEPDKGNAVDNANMIFVKQLKQTYPWLKAHASGKWVGLPENQMGNSEVGHIHLGAGRINLESLAKLNHETKTNNIAKNDEIVKTFEYVKKNNSALHLMGLFSNGGVHSHFDHMIAIYKAAIVYGITNIKFDLITDGRDTKPKLAYDFIKNLLELIKQNNNIGIIS

SEQ ID NO: 8195 - protein, 775 aa, Oryza sativa (japonica cultivar-group)
MAVKWDYTFDLAEIACDAIQYVGKNDSFALSQGRTVAGESWRRWHRETNLVLISIMPSGDEAGREEGVVVIVSGGRGGRRRRHCVSEVGQPSAGSPLSSPPLVVPLWLTALVGVRRGVVAPGRAEAGAPLVLALGLSVTVVPAAACCFCASGMDADSPRRPTTVPSNTPQVSGLIPWYQGLIPRYHPVSWVPSIRYRSIPNWYQSAAPPRRRRRRMEAVGVAPAPAGVPEKKLLEVKESRKAAPAAPSTSMAAKWAMKKKLVGGDAGYVLEDVPHLTDYLPELPTYPNPLQDNPAYSVVKIPLFHSPTTLGTKRLTFLHTTCAPSSSCRQYFVNTDDTVTQKIVVHKTSARGTHFRRAGPRQRVYFQSDEVNAAIVTCGGLCPGLNTVIRELVCGLYDMYGVTSVVGIEGGYKGFYSRNTVALTPKSVNDIHKRGGTVLGTSRGGHDTGKIVDSIKDRGINQVYIIGGDGTQKGASVIFQEVRRRGLKCSVVGVPKTIDNDIQVIDKSFGFDTAVEEAQRAINAAHVEAESAENGIGVVKLMGRNSGFIAMYATLASRDVDCCLIPESPFYLEGKGGLLEFIEKRLKDNGHMVIVVAEGAGQDLIAKSMNFVDTQDASGNKLLLDVGLWLSQKIKDHFKKKRNFPITLKYIDPTYMIRAVRSNASDNVYCTLLAHSALHGAMAGYTGFTVAPVNGRHAYIPFYRITEKQNKVVITDRMWARVLCSTNQPCFLSHEDVEHLKHDDDEHHLHNTQLLEGESSPVKDSSKCNGTAAPV

SEQ ID NO: 8196 - protein, 436 aa, Rubrobacter xylanophilus DSM 9941
MRPGELHERHRAALPAWLSLYYERPIELVRGEGFRVWDSEGNEYLDFFGGIVTTISGHAVPEIVEAVKEQAERILHSSTLYLIESQVRLAEKLISLSPISGEQKVFFVGSGSEANEAALLFATQYRGSSEVIALRGSYHGGSFGTMGITGQSSWRPTPRTALDVSYAMPPHRSYSPLYGRFGDPEELARACAEDVRSLIETSTTGRVAAFIAEPIQGVGGFIELPPAYLSRVKEILEEHGVLFVSDEVQTAFGRTGSHFWGIERSGVEPDLITMAKGLGNGLAIGAVMGRAEVIDSLSPKLHISTFGGNPVSTAGALANLEYILENDLQRNAEEVGSYLKERLLGLAAEHASVGEVRGRGLMLAVELVREGAPDPQAAAAFMEACRERGVLVGKGGLKGNAIRISPPLTVTREAAEEAARVFDEALSSVEAGERVV

SEQ ID NO: 8197 - protein, 481 aa, Streptococcus mutans UA159
MPIINKTMLITYADSLGKNLKELNENIENYFGDAVGGVHLLPFFPSTGDRGFAPIDYHEVDSAFGDWDDVKCLGEKYYLMFDFMINHISRQSKYYKDYQEKHEASAYKDLFLNWDKFWPKNRPTQEDVDLIYKRKDRAPKQEIQFADGSVEHLWNTFGEEQIDLDVTKEVTMDFIRSTIENLAANGCDLIRLDAFAYAVKKLDTNDFFVEPEIWTLLDKVRDIAAVSGAEILPEIHEHYTIQFKIADHDYYVYDFALPMVTLYSLYSSKVDRLAKWLKMSPMKQFTTLDTHDGIGVVDVKDILTDEEITYTSNELYKVGANVNRKYSTAEYNNLDIYQINSTYYSALGDDDQKYFLARLIQAFAPGIPQVYYVGFLAGKNDLELLESTKEGRNINRHYYSSEEIAKEVKRPVVKALLNLFTYRNQSAAFDLDGRIEVETPNEATIVIERQNKDGSHIAKAEINLQDMTYRVTENDQTISFE

SEQ ID NO: 8198 - protein, 448 aa, Rhizobium sp. NGR234
MWHWHRFQEHEARRSDAIVLLRKIMSNESKSNSLYAFESLESNVRFYSRSFPVVFEKAAGAILHDESGREFIDFLSGSGVLNYGHNDPYFLDEATQYLRSNGIIHGLDMATPAKREFMECFDAIILRPRGLTYKFQFCGPTGANAVEAALKLARKATGRHSIVSFTNGFHGMSLGALAVTGNRYYRDAAGFPPAGVAFMPYDGYWGADNDTSEYLDKVLADASSGVDVPAAIILETVQGEGGINAARKEWLQSIQRICRSHGILLIVDDIQAGCGRAGNFFSFEFAGLSPDVVVLSKSISGCGLPLSLLLLKPELDVWRPGEHNGTFRGNNLAFVTGAAALRKYWTNDALSARVMETGRIIAERLRQVAQTNRARSLSVRGRGMMLGLNCGTGKLAERIVRKAFEEGLVVERCGAEDQVIKLLPPLTTDEQTLRRGLDILHKSVAASI

SEQ ID NO: 8199 - protein, 187 aa, Triticum aestivum
  unsure (1)..(187): unsure at all Xaa locations
MAGGGGGFLNLERHFAFYXGAYHSNPVNVFIHALFVWPIFLTALLLLHLTAPFPRAAAVFTAVYGAFYVSLDRRSGALAAVLCLLCWAASSALAARLGFSLGWKVVLVAQLFCWTMQFIGHGVFEKQAPALVDNLVQALMMAPYFVLLEILHKFVAYEPYPGFHANVQKLIDAKRKEWAXKKAKKMS

SEQ ID NO: 8200 - protein, 396 aa, Pirellula sp. 1
MCHPREAFVYRDAFGGLRESFFLSTFDTICCGMIGETAGADRVNSLCRELIPGFMMTTEAATIPVRPSQANLEADVLSPIQPDTPTSSYPDAGASSYSDPTKRSIRWDYTIFFVSLHLLTLLVLLPYFFSWAGVAAFVVGVIVFGQMAIPIGYHRMLSHRSFRSPKWFERTLVTLAMCTAQETPAHWVAWHRMHHSHSDHAEDPHSPRISFMWAHVRWLVHESRTRMATFSMYEKYARDILSDPYYRWIEKLPSPAGMFYLAHAFVYALLAVGISGLVYGNNADAYQMAASVFVWGVIARTVWVWHITWSVNSITHVFGYRNYQTTDDSRNNWFVSLLTAGEGWHNNHHADPASASVQHRWWEIDPNYYVIRLFGVLGLATHIIRPRHVRKSGAES

SEQ ID NO: 8201 - protein, 556 aa, Mesorhizobium loti MAFF303099
MYRYDEFDHDFVQARVAEFSDQVQRRLSGEISEDQFRPLRLMNGVYLQLHAYMLRIAVPYGTLNGKQLRMLGHIARKYDKGYGHFTTRQNIQFNWPALSDIPAILADLASVEMHAIQTSGNCIRNVTADHFAGAAADEVADPRPYAEILRQWSSVHPEFSFLPRKFKIAVTGAERDRAAIQTHDIGLHLKKNAAGELGFAVYVGGGQGRTPMVARKIRDFLPEADLLSYCTAILRVYNLYGRRDNKYKARIKILVHETGVEEITRQVEAEWQDLKDAELKLPDADIRAIQAYFAPPELADRPEGDQAVKLARLDSKGFSEWLDQNVVTHRHPDYAAVTISLKGIGEVPGDASDSQMEAIADIAEKYAFDELRVSHEQNLILPHVARADLKAVYDALVDIGLATANSNLISDIISCPGLDYCALATARSIPIAQEISQRFASLERQREIGELKLKISGCINACGHHHVGHIGILGVEKKGSELYQVTLGGSADENTSVGEIIGRGFSSEEITDAIEQIVETYLGLRLNPQEKFIDAYRRVGPAPFKEALYAGETKAA

SEQ ID NO: 8202 - protein, 181 aa, Zea mays
MASSMLSSAAVVTSPAQATMVAPFTGLKSSAAFPVTRKANNDITSIASNGGRVSCMKVWPPVGKKKFETLSYLPDLTEVELGKEVDYLLRNKWIPCVEFELEHGFVYREHGSTPGYYDGRYWTMWKLPLFGCTDSAQVLKEVQECKTEYPNAFIRIIGFDNNRQVQCISFIAYKPPSFTGA

SEQ ID NO: 8203 - protein, 383 aa, Pyrobaculum aerophilum str. IM2
MEFKFPDLGEGLVEGEVIKWHVKEGDFVKEGDPLVDVMTEKATVTLPAPTTGRVVKILVREGEVVKVGQTLCVIEPAEGPAAGPQTEAPARPREVAAMPAARRLAKELGIDLSKVKGTGPGGVITVEDVKRYAEETAKATAPAPAPKAVEKAEEAEVVPVRGIRRAVAEKMSKAKRLIPHAYHLEEVDFTELIKLRERVKAEAEKRGIRLTLLPFIAKAVAMALREYPMLNSEYDEEKNAIVVKKEVNLGIGVDTEQGLVVVVVKNADKKGLLEMAKEINELAQKAREGKLELQDVRGSTFTISNIGAVGGLGGLSILNYPEAGILAVGQARKKPWAVGDRIEIRDIALLAVSFDHRVVDGAYVARFMNRVKELLENPWLLLL

SEQ ID NO: 8204 - protein, 452 aa, Pyrobaculum aerophilum str. IM2
MKVVVVGGGPAGYVAAIRARQLGLDVTLVEAERLGGECTNYACIPSKALLHAAEAYRRAVSSPWITGTVSFRWKEAVQWKEKVVEKLRRGIEFLLSAAGVEVVRGLAKPGPGKTVEIDGRRLQYDFLILATGSEPVGLKELPFGRRVIGTREIFSLEEPPASVAIIGGGASGVEIASLFSMIGAEVHVVEAMERILPGLDPEISRQMERALSSRGVKIYTSSRVVKGEEGEGSVKLRISSPGGEREIEAELAVVAVGRRPRPGPFSAMGLEVDGRGAVRVDESMRTSVPWVFAAGDVTGPPYFAHKAYAQAKVAAEAIAGLKSAYSPRSVPAVIFSDPEVVSVGMTEEEAVAKGYRPKAVRMSLSALGKAVAAESEGGFAKLIYDAESRIILGVHIVGRGVSELAGEASALVEFYATVDDLALTIHPHPTLSELFAELAEAALGKPVHIAKL

SEQ ID NO: 8205 - protein, 709 aa, Pseudomonas aeruginosa PAO1
MSEQNNEQRSQAAGTDTVDRGNSNAKLEQLEAYREDATGEALSTNTGTRIADNQNTLKAGERGPSLLEDFIMREKITHFDHERIPERVVHARGSAAHGYFEAYEDLSDLTKAGFLAEAGKRTPVFVRFSTVQGPRGSADTVRDVRGFAVKFYTDEGNFDLVGNNMPVFFIQDAIKFPDFVHAVKPEPHNEIPTGASAHDTFWDFVSLTPESAHMVMWLMSDRAIPIAYRNMQGFGVHTFRLVNAAGESVLVKFHWRPKSGTCSLVWDEAQKLAGKDPDFNRRTLWEDIEKGDYPEWELGLQVIPENQQDSFDFDLLDPTKLVPEELVPVRVVGRMVLNRNPDNFFAETEQVAFHVGHVVPGIDFTNDPLLQGRLFSYTDTQLLRLSGPNFNEIPINRPLCPFHNNQRDAPHRQTINRGRASYEPNSIDGGWPKETPPAARNGGFSTYHEPVSGSKLRKRADSFADHFSQAALFWHSMSEAEQAHIVAAYSFELSKVERQSIREREVNQILLNIDPQLAARVAANVGVQLAAPANPTPQPKPSPALSQMNLLSGDIRSRKVAILIADGVAESDVSDLRDALRQEGADAKLIAPSASPVQAENGAELSPEGTWDGLPSVAFDAVFVPGGAASSQAIGADGRGLHYLLEAYKHLKPVAFAGDAQALASQLSLPGDPGVVLGATATDVFPGLRQALMQHRIWQREAATKAIPA

SEQ ID NO: 8206 - protein, 412 aa, Archaeoglobus fulgidus DSM 4304
MQYEKVKPPENGEKIRYENGKLIVPDNPIIPYFEGDGIGKDVVPAAIRVLDAAADKIGKEVVWFQVYAGEDAYKLYGNYLPDDTLNAIKEFRVALKGPLTTPVGGGYRSLNVTIRQVLDLYANVRPVYYLKGVPSPIKHPEKVNFVIFRENTEDVYAGIEWPRGSEEALKLIRFLKNEFGVTIREDSGIGIKPISEFATKRLVRMAIRYAIENNRKSVTLVHKGNIMKYTEGAFRDWGYEVAKQEFGEYCITEDELWDKYGGKQPEGKIVVKDRIADNMFQQILTRTDEYDVIALPNLNGDYLSDAAAALIGGLGIAPGSNIGDGIGVFEPVHGSAPKYAGQNKVNPTAEILTGALMFEYIGWKDASEMIKKAVEMTISSGIVTYDIHRHMGGTKVGTREFAEAVVENLQSL

SEQ ID NO: 8207 - protein, 263 aa, Zea mays
MDRHKCKLCSRSFSNGRALGGHMKAHLASLPLPLPPKLHSCFSSSDSEQEQSLRENPKKTLRILDPEDRESETESNKNPTRQRSKRNWKSTMPKLSLGHPEAEPLSSVSDTSPEEDLAMCLMMLSRDTWQEHKLANAGPPKTRCSSGSEIKLKNKVRSKHLCHACHKSFRSSRALGSHRTLCSPRLEAQNNSIISNNNIKVFECPFCYKLFGSGQALGGHKRSHLIPSSSSTVNHSVKLKQSFIDLNLPAPAEDDDLSVVSDA

SEQ ID NO: 8208 - protein, 254 aa, Comamonas testosteroni
MTNRLQGKVALVTGGASGVGLEVVKLLLGEGAKVAFSDINEAAGQQLAAELGERSMFVRHDVSSEADWTLVMAAVQRRLGTLNVLVNNAGILLPGDMETGRLEDFSRLLKINTESVFIGCQQGIAAMKETGGSIINMASVSSWLPIEQYAGYSASKAAVSALTRAAALSCRKQGYAIRVNSIHPDGIYTPMMQASLPKGVSKEMVLHDPKLNRAGRAYMPERIAQLVLFLASDESSVMSGSELHADNSILGMGL

SEQ ID NO: 8209 - protein, 146 aa, Triticum aestivum
MASSMLSSAAVATSPAQATMVAPFTGLKSSAAFPVTRKSNTDITSIASNGGRVSCMKVWPPVGKKKFETLSYLPDLTDVELAKEVDYLLRNKWIPCVEFELEHGFVYREHGSTPGYYDGRYWTMWKLPLFGCTDSAQVLKEVQECK

SEQ ID NO: 8210 - protein, 197 aa, Glycine max
MSASRFIKCVTVGDGAVGKTCLLISYTSNTFPTDYVPTVFDNFSANVVVNGSIVNLGLWDTAGQEDYNRLRPLSYRGADVFILAFSLISKASYENVSKKWIPELKHYAPGVPIILVGTKLDLRDDKQFCIDHPGAVPITTAQGEELRKLINAPAYIECSSKTQENVKAVFDAAIRVVLQPPKQKKKKGKAQKACSIL

SEQ ID NO: 8211 - protein, 147 aa, Triticum aestivum
  unsure (1)..(147): unsure at all Xaa locations
RAEFGTSRDEIYGPYDNSFLQSNVPKQHTKSPIVTGTSVIAVKFRDGVIIAADNLASYGSLARFTNVKRLRKFADTSVVGFGGDVSDMQYLDRLLGSLAIDEAYNSTGHTLNAKNIHTYLSKXMYKRRXEFNPLXNQILVAXLDDER

SEQ ID NO: 8212 - protein, 537 aa, Neurospora crassa
MYKIGNIYFIAAVAVIGGALFGFDISSMSAIISTQPYLCQFNQLGHNEKGLCLGPTNDVQGGITAAMPGGSWLGALCSGFVSDTFGRKRSIQIGSVIWIIGSVIVCASVNIPMLVVGRIINGFSVGICSAQVPVYISEIALPSKRGRLVGFQQWAITWGILIMFFICYGCSFMKGTAAFRVPWGLQAIPAALLFLGLVFLPESPRWLCKKDRWDEAKDVLTLVHGKGNPNSPWVHREMQEIREMVEFERANADVSYFELFKPNMINRTSIGVFTQIWSQLTGMNVMMYYITYVFTMAGLADGSENAVLLPSGIQFVINVVMTIPALLWMDRWGRRPTLLVGAFFMCLWLCVNAGLFAVYSRPARPGEFTSPAESMAITGAPAKAVIASTYLFVASFAPTWGPVSWTYPPELYPLRLRGKAVALCTSANWAFNFALAYFVPPAFANITWKTYVIFATFCAAMFIHVFFMFPETANKPLEEVEEIFDDTKPGAIKYIGTPAWKTRNTRNLTLKQEHNDTLSSEEKIGLEEHAHKETTGR

SEQ ID NO: 8213 - protein, 194 aa, ASPERGILLUS NIDULANS FGSC A4
MASATTFYDFEPVDKKGEAYPLNQLKGKVILVVNTASKCGFTPQFKGLETLYQSIKAKRPDDFVILGFPCNQFGGQDPGSNDQIQEFCQLNYGVTFPVLGKTEVNGDNANPLWTWLKESQPGLLGLKRIKWNFEKFLISADGKVVGRWASTTKPEGLESRILEEIEKAEKQGLLASKAMQPEAAGTDGETAKLA

SEQ ID NO: 8214 - protein, 251 aa, Hordeum vulgare subsp. vulgare
MGRSPCCEKEHTNKGAWTKEEDQRLIAYIRANGEGCWRSLPKAAGLLRCGKSCRLRWMNYLRPDLKRGNFTDDEDELIIRLHSLLGNKWSLIAGQLPGRTDNEIKNYWNTHIKRKLLSRGMDPHTHRPLTAVIDAAAPTRPAQIAVPARAAPTTMFALPTKQQQPPVPVESSDDDGSSGATSTGEPRCPDLNLDLSVGPPAADTPTSHPVCLCRHLGFRGGEACSCRQADSAGSQGGGFRYFRPLEEGQYI

SEQ ID NO: 8215 - protein, 158 aa, Streptococcus pneumoniae R6
MTSLYDFSVLNQNNQATPLDSYRGKVLLIVNTATGCGLTPQYQGLQELYERYQDQGFEILDFPCNQFMGQAPGSAEEINTFCSLHFQTTFPRFAKIKVNGKEADPLYVWLKDHKSGPLGKRIEWNFAKFLIGRDGQVFERFSSKTDPKQIEEAIQTLL

SEQ ID NO: 8216 - protein, 190 aa, Oryza sativa (japonica cultivar-group)
MEADKSGEGEKAGGKTISFRCSDGQAFHMPVAAAMLSTAIRKMFDKYPSIDHGGVIELPHQISSGIFPKVKEYCTKHAKVDDKGNPTVSTNTGAAAAASSSSTDDEEEDLKNWDKEFVNMEVKPLHDLLLVAHLLDIKGLFHITCRKVADMLKGKTSEEMRQILNIRNDFTEEEDKAIKEQNPWVFPDPE

SEQ ID NO: 8217 - protein, 292 aa, Zea mays
MAVDLMGCYAPRRANDQLAIQEAAAAGLRNLELLVTSLSTQAAAPHRAADQPFGEIAGQAVSKFRKVISILDRTGHARFRRGPVEPSPPAAPPVVPGPPVSVAQPPQSLTLDFTKPNLAVSAATSVTSTSFFSSVTAGEGSVSKGRSLMSSGKPPLSGHKREPCAGAHSEATTNGSRCHCSKRRKNRVKRTIRVPAISSKVADIPSDEYSWRKYGQKPIKGSPYPRGYYKCSTVRGCPARKHVERATDDPAMLVVTYEGEHRHTPGAVQGPSPLATASPVPVAVSAGNGLVV

SEQ ID NO: 8218 - protein, 189 aa, Nymphaea alba
DQHGEVIAECKKPDLEPYLGLHYPATDIPQASRFLFMKNNLRMICDCTAPSVKVIQDKQLEQPLSLCGSTLRSPHGCHAQYMANMGSIASLVMSVVINDHDEEPAIDNSQKGTKLWPLVVCHHTRPRFIPFPLRYACEFLIQVFAVQLNKEVELAAQLREKHILRMQTVLCDMLLRDAPVGIVTRSPNV

SEQ ID NO: 8219 - protein, 951 aa, Vibrio vulnificus CMCP6
MKLIKRSDSVTKEQKQLGISRRVFMRNSSLAAGGAIAGASLFAPGMIRKAEAKSVDASAPIEVKRTICSHCSVGCGIYAEVQNGVWTGQEPAFDHPFNAGGHCAKGAALREHGHGERRLKYPMKLENGKWKKLSWDQAIEEIGNKVLEIREQSGPDSVYWLGSAKHNNEQAYTFRKMASMWGTNNVDHQARICHSTTVAGVANTWGYGAMTNSFNDMHNCKSMLFIGSNPAEAHPVAMQHILIAKEKNSCKIVVADPRRTRTAAKADHYVSLRPGTDVAFIWGVLWHVFNNKWEDKEFIRQRVFGMDEIRAEVAKWNPKEVERVTGVSEEDVYQTAKLLSEHRPGCIVWCMGGTQHTTGNNNTRAYCVLELALGNLGKSGGGANIFRGHDNVQGATDLGVLSHTLPGYYGLAEGSWKHWAKVWGIDFDWLKNRFDQNKYNGKQPMFNMGIPVSRWIDGVLENKDSIEQNDNIRAMFYWGHAVNSQTRGVEMKKAMEKLDMMVIVDPYPTVAAVMNDRTDGVYLLPATTQFETHGSVTASNRSIQWRDQVIEPLFESKPDHEIMYLLTKKLGFADQLFKNVRVVNNQPVIEDITREFNKGMWTIGYTGQSPERLKAHQQNWHTFHKTTLEAEGGPANGETYGLPWPCWGTPEMKHPGTHILYDTSKPVAQGGGTFRTRFGVEFEGKSLLADGSYSKDSDIQDGYPEFSDKLLKQLGWWDDLTAEEKVLAEGKNWKTDLSGGIQRVAIKHGCIPFGNGKARTIVWEFPDRVPLHREPLYTPRRDLIADYPTWDDAASIYRLPTLYKSIQDQDKSQEYPIILTSGRLVEYEGGGEETRSNPWLAELQQEMFVEVNPKDANDLGFKDGDMVWVEGAEKGRIHVKAMVTRRVRPGMAFIPFHFGGKFQGEDLRNKYPEGTDPYVIGESANIATTYGYDPVTQMQETKVTLCNIRKA

SEQ ID NO: 8220 - protein, 408 aa, Pyrobaculum aerophilum str. IM2
MLLNEIIDLIPNINKCLKKGKTLIIRIDINSPIVNGKIIDDFRIRAHSYTLRLASDAGARAVVLAHQGRPGQDDFTSLEIHKPYIEKYLERPIKFVDDIIGPEARRQIKELKDGEILLLENVRILSEEVIEKVPEAQAETLLVRKLAPLADYYVFDGFAVAHRSQPSVVGFPIVLPSCAGPVFERELRALGAVFEKRGRGVTLIAGGAKMPDTLKAVEQLLKNGFVEKVAVGGLVGFVFALGKYGVLNSALKQEVEKGGFLPYIERARQLLAKYGAQIYTPVDFAVNQNGRLDVDIYSLAQPPLDIGRSTTIAFKEVIEQSEIVIFSGPMGYIEDERFATGTIELLKAASNRRLILGGGHTIMAAEKAGVLDKAYHVSTGGRAFIQTIGGEEMPAVKALLTSAKKFSL

SEQ ID NO: 8221 - protein, 193 aa, Oryza sativa
  unsure (1)..(193): unsure at all Xaa locations
XMESNGKAVTRSGDYVKYTXGAVFWGEPGTNSQHSFFQLLHQGTKLIPADFIRAVETHNPVQGGLHQRMLASNFLAQTEALMVGKTPEQVKAEGAPEELIPHKTFLGNRPTTSILADKISPATLGALIAYYEHMVFTEGAIWNINSFDQWGVELGKALAKKVQKDLETEGAGSGHDSSTSGLIAAFKAKSGLK

SEQ ID NO: 8222 - protein, 415 aa, Pseudomonas aeruginosa PAO1
MKAVVFHDIGDIRLEDVAEPRLQEPTDAIVRLTASAICGTDLHFVRGSVGGMRPGTILGHEGVGIVEALGDEVRNLQVGDRVVIPSTIACGNCVYCRAGYYAQCDVANPGGSQAGTAFFGGPRANGGFHGLQAEKARIPYANIGLIRLPSSISDDQAILLSDIFPTGYFGAELAGIAPGNTVAVFGCGPVGQFAIASALLLGAARVFAIDRHPDRLHMARQQGAEVIDFEREDPVQALRWLTAGIGVDRAIDAVGVDAEHSHGTATPAPRQEGTSWSPGNAPAQALEWAVQGLAKAGTLSIIGVYAEDSRQFPIGLAMNRNLTIRMGNCHHRKYIPLLLEHVLSGRIDPAKILTQVKPIGDAIEAFEAFDRRETGWIKVELVPQKRQVEGSEERLDERAVDELARRPTPESGARG

SEQ ID NO: 8223 - protein, 283 aa, Methanocaldococcus jannaschii DSM 2661
MIRKAVIPVAGFGTRLLPITKAQPKEMLPVVNKPIVQYVVEDLVEAGVKDILFVTGKGKQAIENHFDVNYELECKLEKSGKYELLKIIKEIDRLGNIFYVRQKEQKGLGDAILYGEEFVGEEYFIAMVGDTIYSKNIVKDLIKAHEKYGCSVIALERVPKEDVYKYGVIDGEEIEKGVYKIKNMVEKPKVEEAPSNLIITGAYLLSPKIFEKIRETPPGRGGEIQITDAMNLLLKEEDIIGVEINCKRYDIGDALGWLKANVEIGAERFPEFREFLKEFVKNL

SEQ ID NO: 8224 - protein, 124 aa, Triticum aestivum
RVKSLFSAIGKVWTAEEKYFDAVTGLSGSGPAYIFLAIEAMADGGVAAGLPRDLALGLAAQTVLGAATMVSETGKHPGQLKDQVTSPAGTTIAGVHELEKGSFRGTLINAVVAATTRCRELSKN

SEQ ID NO: 8225 - protein, 306 aa, Xanthomonas axonopodis pv. citri str. 306
MSLALLCPGQGGQHAEMFARVADAPAAAAVFASAQRVLGVAPQALAADPGRYANAIAQPLVCAGTLAHWQALCAQLPTPLLVLGYSVGELAAHAVAGSMSIDTCLQLAATRARLMDAASPQQAGLMAVIGVPLRALETLCQTHGAALAIINGDDHAVLGGPRAALQALGEAASAQGARVTLLPVGVPAHTPWLSAAAEGFAIELATAQLAAPRLRVLAGIDARAVGTQALVVDTLSRQIAQTVRWYDVLVQAAERGARVFLELGPGSALARMAREVLPACEARSVDEFHSTDGVLEWVMAACERAA

SEQ ID NO: 8226 - protein, 553 aa, Escherichia coli
ASIFGVFDIKTDAVELRKKALELSRLMRHRGPDWSGIYASDNAILAHERLSIVDVNAGAQPLYNQQKTHVLAVNGEIYNHQALRAEYGDRYQFQTGSDCEVILALYQEKGPEFLDDLQGMFAFALYDSEKDAYLIGRDHLGIIPLYMGYDEHGQLYVASEMKALVPVCRTIKEFPAGSYLWSQDGEIRSYYHRDWFDYDAVKDNVTDKNELRQALEDSVKSHLMSDVPYGVLLSGGLDSSIISAITKKYAARRVEDQERSEAWWPQLHSFAVGLPGSPDLKAAQEVANHLGTVHHEIHFTVQEGLDAIRDVIYHIETYDVTTIRASTPMYLMSRKIKAMGIKMVLSGEGSDEVFGGYLYFHKAPNAKELHEETVRKLLALHMYDCARANKAMSAWGVEARVPFLDKKFLDVAMRINPQDKMCGNGKMEKHILRECFEAYLPASVAWRQKEQFSDGVGYSWIDTLKEVAAQQVSDQQLETARFRFPYNTPTSKEAYLYREIFEELFPLPSAAECVPGGPSVACSSAKAIEWDEAFKKMDDPSGRAVGVHQSAYK

SEQ ID NO: 8227 - protein, 436 aa, Saccharomyces cerevisiae
AVSKVYARSVYDSRGNPTVEVELTTEKGVFRSIVPSGASTGVHEALEMRDGDKSKWMGKGVLHAVKNVNDVIAPAFVKANIDVKDQKAVDDFLISLDGTANKSKLGANAILGVSLAASRAAAAEKNVPLYKHLADLSKSKTSPYVLPVPFLNVLNGGSHAGGALALQQFMIAPTGAKTFAEALRIGSEVYHNLKSLTKKRYGASAGNVGDEGGVAPNIQTAEEALDLIVDAIKAAGHDGKVKIGLDCASSEFFKDGKYDLDFKNPNSDKSKWLTGPQLADLYHSLMKRYPIVSIEDPFAEDDWEAWSHFFKTAGIQIVADDLTVTNPKRIATAIEKKAADALLLKVNQIGTLSESIKAAQDSFAAGWGVMVSHRSGETEDTFIADLVVGLRTGQIKTGAPARSERLAKLNQLLRIEEELGDNAVFAGENFHHGDKL

SEQ ID NO: 8228 - protein, 331 aa, Zea mays
TGPEFPGRPTLLPTRPVTLKAIFKSHVLRVHKSKFAQFIMFYACSLHPEIGDGFANFLTDIFIDKDKNEDAITRVSAVSYVGSYLSRARFISVNIVVSVLKRLVDWCDYYCGHQLDNGVTSNPIKHQLFYASCQAVMYVLCFRLRSIMDYPNLKQQLFRMRIRDILVHPLQPLKVCLPSIVNEFLRQATAASLFHAPAISMHEDAVESDLSKAFGGLNRLDMFFPFDPYLLKESDRYIRPNFEFWSLVKTTYSNDNSDEDDEELGDIDAPGMNVGSLDDHFEIDFNSDDDIEYKMNKMSITPQRTFYHPLATNSESNRMPARIRPSVSPPS

SEQ ID NO: 8229 - protein, 473 aa, Neotyphodium uncinatum
MTVDTITSTSNGNQDVPKEFFPKEFETQLLHVGRFPDILGSCAVPVYSSAAFEFNSVAHGARLLNLTQFGNIYSRFTNPTVNVLQNRLAGLEGGVAACAVASGSAAVVVTVMALAGVGDNFVSSFHVHAGTFHQFESLAKQMGIECRFVKSRDPADFAAAIDDKTKFVWLETISNPGNVILDLEAVSMVCHTKGIPLICDNTFGCAGYFCRPINHGVDIVVHSATKWIGGHGTTVGGVIVDGGTFDWGQHPDRFPQFHDPRTRLWERFSRRAFAVRCQFEILRDTGSTLSAPAAQQLLVGLESLAVRCERHAQNAAKIADWLREHPLVAWVSYVGHPNHPDHQGALKYLKRGFGSVICFGLRGGFEAGALFCDALKMVITTTNLGDAKTLILHPASTTHEHFSSEHRAEAGVTDDMIRLSVGIEQIKDIKADFEQAFEQVLRGKKSLRKPCIGKILLQDEINEDLFGPSACRT

SEQ ID NO: 8230 - protein, 436 aa, Saccharomyces cerevisiae
AVSKVYARSVYDSRGNPTVEVELTTEKGVFRSIVPSGASTGVHEALEMRDGDKSKWMGKGVLHAVKNVNDVIAPAFVKANIDVKDQKAVDDFLISLDGTANKSKLGANAILGVSLAASRAAAAEKNVPLYKHLADLSKSKTSPYVLPVPFLNVLNGGSHAGGALALQEFMIAPTGAKTFAEALRIGSEVYHNLKSLTKKRYGASAGNVGDQGGVAPNIQTAEEALDLIVDAIKAAGHDGKVKIGLDCASSEFFKDGKYDLDFKNPNSDKSKWLTGPQLADLYHSLMKRYPIVSIEDPFAEDDWEAWSHFFKTAGIQIVADDLTVTNPKRIATAIEKKAADALLLKVNQIGTLSESIKAAQDSFAAGWGVMVSHRSGETEDTFIADLVVGLRTGQIKTGAPARSERLAKLNQLLRIEEELGDNAVFAGENFHHGDKL

SEQ ID NO: 8231 - protein, 376 aa, Perilla frutescens
MASSIALPSISLSKSAFADSDSFRSSVCLGFRNDIRRVSRLNFEKSRVFMSVAVGSEAAVVDDALFKDYKPSTAFLFPGQGAQTVGMGLEAQKVPAAAELYKRANDILGFDLLDTCINGPKEKLDSTVLSQPAIYVTSLAAVEVLRARDGGQQIIDSVDVTCGLSLGEYTALAFAGAFSFEDGLKLVKLRGEAMQDAADAAQSAMVSIIGLDSAKVQALCDAANEDVDEANKVQIANFLCTGNYAVSGGLKGIEAVEAKAKSFKARMTVRLAVAGAFHTGFMEPAVSRLEGALASTVISKPRIPVISNVDAEPHADPETIKKILARQVTSPVQWETTVKTLLSRGLTKSYELGPGKVIAGIVKRMDKGAAIENIGA

SEQ ID NO: 8232 - protein, 541 aa, Oryza sativa (japonica cultivar-group)
MSAAHLLRHSRKLRSLHNALDCERSGLVRYFSTASGSFPTKGNGAEKRIGGARFPQRKQPGKELETSKLSLGLNGSYTCRRSPNNFIPNTITGLNGSLSCGQIASARSFSSSADLPPHQEIGMPSLSPTMTEGNIARWLKKEGDKVSPGEVLCEVETDKATVEMECMEEGYLAKIIHGDGSKEIKVGEIIAVTVEEEGDIKKFKDYKPSTLAAPVAPSELKAQSEPTEPKVEEREPSKASELKAPRTEEPSRSGDRIFSSPLARKLAEDNNVPLSSVKGTGPDGRILKADIEDYLAKGCRKEALAAPGLSYTDVPNAQIRKVTANRLLSSKQTIPHYYLTVDTRVDNLIKLRGELNPLQESSGGKKISINDLVIKAAALALRKVPQCNSSWMNDFIRQYHNVNINVAVQTEHGLFVPVIRDADKKGLGMIAEEVKQLAQRARDNSLKPDDYEGGTFTISNLGGPFGIKQFCAIINPPQSAILAIGSAERRVIPGSANGQYEFGSFMSATMSCDHRVIDGAIGAEFLKAFKGYIENPTSMLL

SEQ ID NO: 8233 - protein, 469 aa, Pseudomonas fluorescens PfO-1
MNSVTDRPAAVSLNRPARVRLELKNLLGLALPIMIAQLATTAMGFVDAVMAGRVGPKDLAAVALGNSIWVPVFLLMTGTLLATTPKVAQRFGAGTHSEIGPIVRQALWLALVVGLMATTMLFSAEPILHLMKVDPELIGPCMQYLHGIASGLPAVAFYHVLRCTSDGLGRTRPAMVLGLCGLALNIPLNYVFIYGHFGVPAMGGVGCGWATAIVMWVMALGLAGYERWAPAYKSSELFSRFDWPQWAVIKRLLAIGLPIGVAVFAESSIFAVIALLIGSLGATVVAGHQIALNVSSLVFMIPYSLGMAVTVRVGQALGREEPREARFAAGVGMGTALAYACLSASMMLLMREHIAAIYTSDPMVIHIAAMLIVYSALFQFSDAIQVTAAGALRGYQDTRVTMILTLFAYWGIGLPVGYALGLTDWLGEPRGPSGLWEGLIVGLSCAALMLSIRLTRSARKRIRISRSMG

SEQ ID NO: 8234 - protein, 444 aa, Escherichia coli K12
MGLVKQGARVAVIERYQNVGGGCTHWGTIPSKALRHAVSRIIEFNQNPLYSDHSRLLRSSFADILNHADNVINQQTRMRQGFYERNHCEILQGNARFVDEHTLALDCPDGSVETLTAEKFVIACGSRPYHPTDVDFTHPRIYDSDSILSMHHEPRHVLIYGAGVIGCEYASIFRGMDVKVDLINTRDRLLAFLDQEMSDSLSYHFWNSGVVIRHNEEYEKIEGCDDGVIMHLKSGKKLKADCLLYANGRTGNTDSLALQNIGLETDSRGQLKVNSMYQTAQPHVYAVGDVIGYPSLASAAYDQGRIAAQALVKGEATAHLIEDIPTGIYTIPEISSVGKTEQQLTAMKVPYEVGRAQFKHLARAQIVGMNVGTLKILFHRETKEILGIHCFGERAAEIIHIGQAIMEQKGGGNTIEYFVNTTFNYPTMAEAYRVAALNGLNRLF

SEQ ID NO: 8235 - protein, 406 aa, Vibrio vulnificus CMCP6
MSDTASQVHGAVQTLTQSSDTLFLLLGAIMVFLMHAGFAFLEVGTVRHKNQVNALVKILADFGISTLAYFFIGYWVAYGAHFFADAETLAQGNGYELVKFFFLLTFAAAIPAIVSGGIAERARFYPVLIATFFTVGIVYPLFEGIIWNGNFGIQAWFEATFGVGFHDFAGSVVVHGVGGWIALVAVIFLGMRRGRVRAGKHTNFAPSNIPFLALGAWILCVGWFGFNVMSAQTLNGISGLVAMNSLMAMAGGIVAALIAGKNDPGFIHNGPLAGLVAVCAGSDLMHPLGALVTGSVAGVLFVYLFTYLQNKTKIDDVLGVWPLHGVCGAWGGIAAGIFGQSSLGGLGGVSFTVQLLGTLLGISVALIGAGIVYGAINRLSGLRLSQEDEFNGADLAIHKISSVNAE

SEQ ID NO: 8236 - protein, 364 aa, ASPERGILLUS NIDULANS FGSC A4
MPYPEEAEGFQVDSPETYTDFKKRFFKLKPFGDYDVDIKIEACGVCGSDVHTISVIGGWGSQKFPLCVGHGPEIIGRAVRVGPKVTLIKEGQRVGVGAQSYSCGECKQCKNENETYCPVLMIDTYGAEWPDTGIVSQGGYSSHVRTHEHWVFPIPDVLETNLVAPMLCAGLTAYSPLVRNGAGPGKKVGIVGLGGIGHFGVMFAKALGAETWAISRSRAKEADARKLGADGYIATAEEGWEKPHRCSFDLIINCANSSKGFDLEKYLSMMDVHGRWISVGLPEEEGQVIKAQNLISNGVLIGASHLGSRREMLEMLQLAADKGLRGWVEELQIGSEGLKEAMERMKKGDVHYRFTMTGYDKVFG

SEQ ID NO: 8237 - protein, 907 aa, Sinorhizobium meliloti 1021
MHGAEILPKTTIDDVTTSDTPDYRAVLDALAVPVYATDAEGIVTYCNAAAAAVAGREPELGKDRWCVSWQLRRPDGSPLPHDECPMARTLKEGQPVRGEEVVAVRPDGASVPLLPHPTPIFDDTGALTGAVNVLMDLSGAKDMERSSRYLAAIVESSDDAIVAKNLDGIITSWNRGAQRLFGYAAEEVIGESITILIPPERLSEEPGILERIRRGELVDHFETKRRRKDGTLVDISLTVSPVRDATGRIIGASKIARDITETKSAAEALAARFREQAALYRLTERVQRTKRIEEVYEATLDAIQGALNCDRASILLFDEAGTMRFVAARGLSEHYQRAVDGHSPWITGANEPEPIFVENVDDAEFSRELKESIVGEGIAALGFFPLVTEGRLIGKFMTYYDRPHRFADSEIGMALTIARQLGFSIQRMRAEYARRQAEEQLRRNEANERARAAELAAIMEAVPALIWIARTPDCRVISGNNSSYEILRLPHDSNLSMSAPPGEHPTNFRVFSEGRALSPEELPVQRAARGEEVQNFEEEVRFDDGSSRHIFGNATPLRDVTGEVVGAVAAAVDITGRKQAEEALQESERRLQLALDAGHMGAWEWNLETGEVIWSPGLEALHRIEPGSFGGTLADFKRDIHPDDLPLIEREMARAIETDGDYHVVYRAQLPDGTIRWMEAFGQLSPRNGPKRRLTGVCMDITERREAEAQRNLLVAELSHRVKNTLAIVGSIARQTFSTNPDAKAAHRSFDARIRALAQTHTRLAEASWSGVSLKTVLFDELSPYHDDSRTNVTLAGPPAMLPPKHALTLGMAAHELATNAAKHGALSVRSGKVDIEWMIDVASERLRICWSETGGPAVVAPKHNGFGRLLLERVLASDLGGEVHLEFAPQGLVCTIDVPYPRGAPG

SEQ ID NO: 8238 - protein, 381 aa, Zea mays
QDEHNKGIFDMELEDLAEDEDNLGQKGTKVHFGGNMCAEKLDGLMVVVCEHLKSRVEEPERLIKEFVTLKAIFKSHVLRVHKSKFAQFIMFYACSLHPEIGDGFANFLTDIFIDKDKNEDAITRVSAVSYVGSYLSRARFISVNIVVSVLKRLVDWCDYYCGHQLDNGVTANPIKHQLFYASCQAVMYVLCFRLRSIMDYPNLKQQLFRMRIRDILVHPLQPLKVCLPSIVNEFLRQATAASLFHAPAISMHEDAVESDLSKAFGGLNRLDMFFPFDPYLLKESDRYIRPNFEFWSLVKTTYSNDNSDEDDEELGDIDAPGMNVGSLDDHFEIDFNSDDDIEYKMNKMSITPQRTFYHPLATNSESNRMPARIRPSVSPPS

SEQ ID NO: 8239 - protein, 384 aa, Zea mays
MAAADASSLPPSAITCRAAVAWGPGQPLVMEEVEVAPPGPMEIRVKVVSTSVCRSDVTAWQSKAQLDLFPRVFGHEASGVVESVGEGVTEFQVGDHVLTVFIGECKSCKHCVSGKSNMCQKLGLERKGVMHSDQKTRFSVKGKPVYHYCAVSSFSEYTVVHSGCAVKVGLTVPMDRVCLLSCGVSAGLGAVWNVANVSKGSSVAIFGLGTVGLSVAQGAKLRGASKIIGVDTNPEKQEKGKSFGVTDFINPDELSEPVQQVIKRITDGGVDYSFECVGDSGVVSTALQSCSDGWGVTVTLGLPKGKLEVSTHYAFLLSGRTLKGSMFGGWKPKSDLPSLVDKYAAKEIQVDGLVTHDIPFNEINKALELMLENKCLRCVIHMPR

SEQ ID NO: 8240 - protein, 178 aa, Sinorhizobium meliloti 1021
MNHGDQYRVLVVEDEFLVALQIEADLVAAGYSVIGPFTSLAQSISAARAHPFDIATLDLNLRGEFAYPLVDELMEREVPVLLLTGYTALDLPERFRALPRLAKPFDGTQLRRSKASTRLMAARPAREPAGARLQMGHGAERLRHKVAERRTLFSTAADLTFLWAGNGKAAPVVRRRRA

SEQ ID NO: 8241 - protein, 431 aa, Neisseria meningitidis MC58
MAQKIQSVKGMNDLLPVKQKDFKLTAAFWQAFEDTVGRWTRAYGYQQIRTPIVEQTGLFVRSIGEETDVVGKEMYTFSDSNDSLSLSLRPEGTASCLRAVVEHNLLYNSPQKLWYMGPMFRRERPQKGRYRQFHQVGIEALGFEGPDIDAEIIAMSADLWEKLGIREYLTLEINSLGNREERAAHRAALVEYLTRYEDKLDEDSKRRLKTNPLRVLDTKNPDLQEICNAAPRLVDYLGEDSQNHYVRFKAMLDGLGIQYIENPRLVRGLDYYNQTVFEWTTDKLGAQATVCGGGRYDGLIEELGGKPAPSIGFAMGIERLLLLVSEYGSLEVNAAPDVYAMHQGEGADLQVMKYAQALRAQGFNVMQHSGYQSLKAQMKKADNSGARFALIVAQDELANGTVTLKDMNGAHGQQTVAAEDLTPTLQQWKNA

SEQ ID NO: 8242 - protein, 420 aa, Methanocaldococcus jannaschii DSM 2661
MWGENIATADLFANATDIHSIVQALTTLANASDVFFLVVMGVLVFMMQWGFAMLEGGQVRKKNVNNVMMKNMVDWLIGCVAWLFIGGILCSKGFDLSAFIDWWKQILGTNWPNNGLDLASWFFGLVFCATAATIVSGGVAERIKFSAYVLISLIITGLLYPLFVYLGPWGASIVPWHDYAGSLVVHGLGGFLALGAIAALGPRIGRFVDGRPVPILGHNIPMAVFGAFALAIGWYGFNVGSSLALGDISGLVCATTTMAMAGGGIGALIASRNDVLFTANGIVAGLVAICSGTDVVSPIGGLIIGLIAGLQVPIVYKLVEKAGLDDVCGVVPVHGTAGVIGAILTGILGLKIFGGAGGVSLIDQIIGAVFCIIYGTGLGYILAKIVGIALGGLRVSEEEEKMGLDMAEHKMPAYPEETVI

SEQ ID NO: 8243 - protein, 268 aa, Bifidobacterium longum DJO10A
MLNNGTVIPQVGLGVFQTPDGDTTVNAVQTALENGYRHIDTAMIYHNEASVGEGIRRAGVPRSDFFLTTKLWNDDIRARCGKDAFQESLDRLGVDYVDLYLIHWPADGWQQAWDDLQEIYASGRAKAIGVSNFQKHHIDELLTHSDVVPAVDQVESSPQFTNQELIGQLRAKGIHTEAWSPLGGTGGNLLSNPVLAGIGAKYGRSAAQVVIRWHIQRGIVVLPKSTHAERIKQNFEVFDFNLSVDDMTAISAINTGKRNGADPDNFNF

SEQ ID NO: 8244 - protein, 495 aa, Pseudomonas fluorescens PfO-1
MAASLLTLSVNAAPLTRDNGAAVGDNQNSQTAGANGPVLLQDVQLIQKLQRFDRERIPERVVHARGTGAHGTFTTTNDLSDLSKAKVFTAGQVTPVFVRFSAVVHGNHSPETLRDPRGFATKFYTADGNWDLVGNNFPTFFIRDAIKFPDMVHAFKPDPRTNLDDDSRRFDFFSHVPEATRTLTELYSNSGTPASYREMDGNSVHAYKLVNAKGDVHYVKFHWKSLQGIKNLDPKQVEKVQGRDYSHMTHDLVENIQKGNFPKWDLYIQVLNPQDLSKFEFDPLDATKIWPGVPERKVGQMVLNRNPANVFQETEQVAMAPSNVVPGIEPSEDRLLQGRIFAYADTQMYRLGANALQLPINAAKTAVNNGNQDGAMNAGASTSGVNYEPSRLQPREETAGARYSQTALQGSTQQAKIQREQNFKQAGDLYRSFSKKERQDLIESFGGSLASADDESKHIMLSFLYKADPEYGAGVTKVAKGDLSRVKALAAKLAD

SEQ ID NO: 8245 - protein, 369 aa, Escherichia coli O157:H7 EDL933
MKSRAAVAFAPGKPLEIVEIDVAPPKKGEVLIKVTHTGVCHTDAFTLSGDDPEGVFPVVLGHEGAGVVVEVGEGVTSVKPGDHVIPLYTAECGECEFCRSGKTNLCVAVRETQGKGLMPDGTTRFSYNGQPLYHYMGCSTFSEYTVVAEVSLAKINPEANHEHVCLLGCGVTTGIGAVHNTAKVQPGDSVAVFGLGAIGLAVVQGARQAKAGRIIAIDTNPKKFDLARRFGATDCINPNDYDKPIKDVLLDINKWGIDHTFECIGNVNVMRAALESAHRGWGQSVIIGVAGSGQEISTRPFQLVTGRVWKGSAFGGVKGRSQLPGMVEDAMKGDIDLEPFVTHTMSLDEINDAFDLMHEGKSIRTVIRY

SEQ ID NO: 8246 - protein, 421 aa, Shigella flexneri 2a str. 301
MSNNEFHQRRLSATPRGVGVMCNFFAQSAENATLKDVEGNEYIDFAAGIAVLNTGHRHPDLVAAVEQQLQQFTHTAYQIVPYESYVTLAEKINTLAPVSGQAKTAFFTTGAEAVENAVKIARAHTGRPSVIAFSGGFHGRTYMTMALTGKVAPYKIGFGPFPGSVYHVPYPSDLHGISTQDSLDAIERLFKSDIEAKQVAAIIFEPVQGECGFNVAPKELVAAIRRLCDEHGIVMIADEVQSGFARTGKLFAMDHYADKPDLMTMAKSLAGGMPLSGVVGNANIMDAPAPGGLGGTYAGNPLAVAAAHAVLNIIDKESLCERANQLGQRLKNTLIDAKESVPAIAAVRGLGSMIAAEFNDPQTGEPSAAIAQKIQQRALAQGLLLLTCGAYGNVIRFLYPLTIPDAQFDAAMKILQDALSD

SEQ ID NO: 8247 - protein, 566 aa, Kluyveromyces lactis
MSELETGTAAHGTPVENKSVSSSQASTPTNVGSRDDLKVDDDNHSVDAIELPKKPRSAYITVSILCLMVAFGGFVFGWDTGTISGFVNQTDFIRRFGQEKADGSHYLSNVRTGLIVSIFNIGCAIGGIILSKLGDMYGRRIGLMIVVLIYVVGIIIQIASIDKWYQYFIGRIISGLGVGGISVLSPMLISETAPKHIRGTLVSFYQLMITFGIFLGYCTNYGTKTYSNSVQWRVPLGLCFAWAIFMITGMLFVPESPRFLVEKDRIDEAKRSIAKSNKVSYEDPAVQAEVDLICAGVEAERLAGSASIKELFSTKTKVFQRLIMGMLIQSFQQLTGNNYFFYYGTTIFNSVGMDDSFETSIVLGIVNFASTFVAIYVVDKFGRRKCLLWGAAAMTACMVVFASVGVTRLWPDGANHPETASKGAGNCMIVFACFYIFCFATSWAPIAYVVVAESYPLRVKAKCMAIATASNWIWGFLNGFFTPFITSAIHFYYGYVFMGCLVAMFFYVFFFVPETKGLTLEEVQEMWEEGVLPWKSSSWVPSSRRNAGYDVDALQHDEKPWYKAML

SEQ ID NO: 8248 - protein, 559 aa, Nicotiana tabacum
MGSSGDAWKLKDHPKLPKGKTVAVIVLDGWGEAKPNEFNAIHVAETPVMYSLKNGAPEKWRLIKAHGNAVGLPTEDDMGNSEVGHNALGAGRIFAQGAKLVDLALASGKIYEGEGFKYVKECFEKGTLHLIGLLSDGGVHSRLDQVQLLLKGAAKHGAKRIRVHALTDGRDVLDGSSVGFMETLENSLAQLREKGIDAQVASGGGRMYVTMDRYENDWDVVKRGWDAQVLGEAPHKFKDPVEAVKKLRQEPNANDQYLAPFVIVDDNGKPVAAILDGDAVVTFNFRADRMVMLAKALEYENFDKFDRVRVPKIRYAGMLQYHGELQLPSHYLVSPPEIARHSGEYLVRNGVRTFACSETVKFGHVTFFWNGNRSGYFNEKLEEYVEIPSDSGITFNVKPKMKALEIAERTRDAILSGKFDQVRVNLPNGDMVGHTGDIKATIEACKSADEAVKMILEAIEQVGGIYLVTADHGNAEDMVKRNKKGEPALDKNGNIQILTSHTCEPVPIAIGGPGLAPGVRFRQDLPTGGLANVAATFMNLHGSEAPSDYEPSLIEVVDN

SEQ ID NO: 8249 - protein, 308 aa, Oryza sativa
MASFRLMIAAVSLSLVQLSMGSRRLMELYIPPASDQLTYHHGSVLSGDIPVSILWYGKFTPTQMSIIADFVVSLTGAPNAATPSVGQWWGTIEQLYLSNAATNSQTSTRVLLDEQVSDEQCSLGKSLTLAQIDQLAARLGTKRGGVALVFTDEDVTVEGFCSSRCGKHGSDASAGTTHIWVGNSAKQCPGQCAWPFAQPVYGPQGTPLVAPNNDVGADGMVMILASMVAGTVTNPYGDGFYQGPQDAPLEACSACPGVYGSGAYPGNAGKLLVDATTGASYNANGANRRKYLLPALYNPATSSCDTLV

SEQ ID NO: 8250 - protein, 356 aa, Eucalyptus gunnii
MGSLEKERTTTGWAARDPSGVLSPYTYSLRNTGPEDLYIKVLSCGVCHSDIHQIKNDLGMSHYPMVPGHEVVGEVLEVGSEVTKYRVGDRVGTGIVVGCCRSCSPCNSDQEQYCNKKIWNYNDVYTDGKPTQGGFAGEIVVGERFVVKIPDGLESEQAAPLMCAGVTVYSPLVRFGLKQSGLRGGILGLGGVGHMGVKIAKAMGHHVTVISSSDKKRTEALEHLGADAYLVSSDENGMKEATDSLDYIFDTIPVVHPLEPYLALLKLDGKLILTGVINAPLQFISPMVMLGRKSITGSFIGSMKETEEMLEFCKEKGLTSQIEVIKMDYVNTALERLEKNDVRYRFVVDVVGSKLD

SEQ ID NO: 8251 - protein, 552 aa, Vibrio vulnificus YJ016
MSLMAMHPRAGQKALQEDLHNIPALVANYFLLQPDPTNPAHKVEFGTSGHRGCADKSTFNEHHILAIAQAVAEVRAEQGTTGPLFVGKDTHALSEPAFSTVVEVLIANGVTVIVQEQNGYTPTPGISHAILTYNLQHEEKADGIVITPSHNPPQDGGIKYNPTHGGPAEGELTQRIEDRANVLIAEGLQGVKRMPLAQAKASSLFVEQDLVKPYVDDLVNVIDMAAIQKAGLKLGVDPLGGSGIDYWRQIGTAYNLDLTLVSEAIDPSFQFMSLDKDGVVRMDCSSPYAMAGLLALKDQYDLAFGNDPDYDRHGIVTPTKGLMNPNHFLAVCIDYLYRHRQGWAADVAVGKTLVSSAMIDRVVADLGRELCEVPVGFKWFVDGLYNGKFGFGGEESAGASFLRQDGTPWSTDKDGIILCLLAAEITAVTGKNPQQYYDELAAKHGESQYSRIQAVANGPQKEVLKKLSAEMVKAETLAGDEITARLTHAPGNGAAIGGLKVTTANGWFAARPSGTEDIYKIYCESFKGAEHLKQIELEAQEIVNQVFAEAGL

SEQ ID NO: 8252 - protein, 491 aa, Rhizobium sp. NGR234
MTLTSALTRHLKCPELFRNLANEPHPSVAGQRQRFSVFNPSTGELLAEVPDMGAADAHAAIERADAAQEPWSGLTARARSDILWKWHRFILEHSDDLAAILTAEMGKPLGEAKSEVQHAAAYLQWYAEEANRIYGETISAPSTDRRMLVIKQPIGVVGAITPWNFPASMVARKISPALAAGCTVVLKPAEQTPLVAGAMFALAKLAGFPDGVLNLVYASEGDAIGRELCTNPKVRKISFTGSTEVGRLLMRQCSDQIKRISFELGGNAPFIVFDDADIDAAVDGAIQAKFRNAGQTCVSANRIYVQSGVYAEFAEKFTERVRTLKVGDGFDPNVAIGPLINQEALKKIELHISDAVQKGARVRSGGRRTGSSGTFFEPTVVTDVSKTMRLAEEETFGPLAPLLRFDDADHVVREANDTIYGLAAYFYASNLKRVWRVAEALEYGMVGINTGRMSSEAAPFGGVKQSGIGREGSRHGLEDYLDMKYLCVGGL

SEQ ID NO: 8253 - protein, 387 aa, Xylella fastidiosa Ann-1
MSTEVKVPVLPESVSDATIASWHKKAGEIVKRDENIVDLETDKVVLEVPSPVDGVLKEIKFDTGSTVTSNQVLAIIEEGSIVAAPSQVIDQKPVAVSAPAAKSNVDSLPPGARFTATTEGIDPAHIEGSGRRGAVTKEDIINFAKQNGAARSSGTRLEERVPMTRIRQRIAERLMQSKNSTAMLTTFNEINLAKVSNIRKELQEEFQKAHGIKLGFMSFFVKAAANALQRFPLVNASIDGTDIIYHGYSDISIAVSTDKGLVTPVLRNVERMSFADIEHRIADYAKKARDGKLSLEELQGGTFTVTNGGTFGSLLSTPIVNPPQSAILGMHTIKERPIAENGHIVIAPMMYVALSYDHRIIDGKDSVQFLVDIKNQLEAPGRMLFGL

SEQ ID NO: 8254 - protein, 414 aa, Escherichia coli
SKVVVPAQGKKITLQNGKLNVPENPIIPYIEGDGIGVDVTPAMLKVVDAAVEKAYKGERKISWMEIYTGEKSTQVYGQDVWLPAETLDLIREYRVAIKGPLTTPVGGGIRSLNVALRQELDLYICLRPVRYYQGTPSPVKHPELTDMVIFRENSEDIYAGIEWKADSADAEKVIKFLREEMGVKKIRFPEHCGIGIKPCSEEGTKRLVRAAIEYAIANDRDSVTLVHKGNIMKFTEGAFKDWGYQLAREEFGGELIDGGPWLKVKNPNTGKEIVIKDVIADAFLQQILLRPAEYDVIACMNLNGDYISDALAAQVGGIGIAPGANIGDQCALFEATHGTAPKYAGQDKVNPGSIILSAEMMLRHMGWTEAADLIVKGMEGAINAKTVTYDFERLMDGAKLLKCSEFGDAIIENM

SEQ ID NO: 8255 - protein, 478 aa, Xylella fastidiosa Ann-1
MSEHYDVVVIGAGPAGYHAAIRAAQLGLKVACVDAALGKDGKPALGGTCLRVGCIPSKALLDSSRQYWNMGHLFNEHGISFKDAKMDVATMIARKDKIVKQFTGGIAMLFKANKITPYYGFAQLQPGNVVKVKQHEGKNIELKGTNVILASGSDSVELPFATFDGETIVDNIGALDFTKVPKRLAVIGAGVIGLELGSVWKRLGAEVTILEAMPNFLAAVDADVSKTAAKEFKQQGLDIKLNAKVSRTEISSKNNKKEVIVTYTDASGKQTLTVDKLLVAVGRKAATKGLLADGTGVQLNERGQIMVDEHCHTGVDGVWAIGDCVRGPMLAHKGFEEGIAVAELIAGLPGHVNFETIPWVIYTEPEIAWVGKTEQELKADSIPYKAGSFPFAAVGRAVAMAEPSGFVKVLAHAETDRVLGLHLIGVNVSELVHEGVLAMEFSGSADDLARICHAHPTLSEAIHDAAMAVSKRAIHKAN

SEQ ID NO: 8256 - protein, 338 aa, Glycine max
AVAWRAGEALVMEEVEVSPPQPMEIRIKVVSTSLCRSDLSAWESHAIFPRIFGHEASGIVESVGQGVTEFKEGDHVLTVFIGECMSCRQCTSGKSNTCQILGLERRGLMHSDQKTRFSLKGKPVYHYCAVSSFSEYTVVHSGCAVKVSPLAPLEKICLLSCGVAAGLGAAWNVADVSKGSTVVIFGLGTVGLSVAQASKLRGASRIIGVDNNPQKCENAKAFGVTEVVDPNSYKEPIAQVIKRITDGGADFSFECVGDTDTITTALQSCCDGWGLTVTLGVPKVKPEMSAHYGLLLMGRTLKGSLFGGWKPKSDLPSLVEKYLNKEGECLRCVIHMPR

SEQ ID NO: 8257 - protein, 252 aa, Oryza sativa
  unsure (1)..(252): unsure at all Xaa locations
YRLCNFISDGILFIYFAGDTYRRYIPQSDYFSRGLYTFDIGXNDLAGEFYWKTEDQVAASIPTILLEFETGLKKLYEQGARKFWIHNTGPLGCLPQNGAFFGXSRSQLDELRCVAKHNRVAKLFNLQLHALCTKLRGEFAGASITYVDIYTIKYSLIANYSRYGFENPIQACCGYGGPPLNYDSRVPCGQTASLNGNLVTAKGCKDSTEFVNWDGIHYTEAANFHIASQILTGRYSDPPFADKMPFLIKPKF

SEQ ID NO: 8258 - protein, 666 aa, Neurospora crassa
MASPPIPIQSSGRRRGSAARRESRDFHDTIFDTVSLLGTSYLSTAPIAQEILARDLAELEDDEQHERDEECRSDDEEDVEPPIDVGSLPVGHLVSRPGGVAYGTLRPIIASEMQGSPIVCETDVVESRAAERSLLRDNHLLPPKHPRSPDDPLWKKMYRRLFSTKVPVSDKAFEETPLLQEYPLPPSPTISEEINQWERAVAQNMLKTTWQREAQTITKYSRSLIVTFLLHYSVTVTSVFTVGRIGRLELGAVSLATMTANITCYAPVQGLSTCLDTLCAQAFGSGHKKLVGLQLQRMTYLLWLLLLPIATLWWFSGGVLHRIIPDPDTAALAGMYLRVLILGTPGVAAFESGKRFVQAQGLFHATTFVLLIGAPLNVLANWFFVWRMGWGFTGAASAVVFTQNLLPFLLFLYVRFIQGMECWNGLSRHAFSNWGPMIRLALPGMIMVEAQYFAFEVLTLAASQFGSAHLAAQSVLVTVTSTTFNIPFPLSIAASTRVANLIGAKLSDAARTSAKVALCCGIVVGLFNMTLLSSLRFKIPYLFTKDEEVAAIVSKVLPICAVLQLVDALAAISHGLLRGIGRQGIGGFTNLFSYYLIALPISFSTGWALGWQLQGLWFGVAIGLAVVSTVELWYLHQADWEHAVQEAENRLRSDEACHQSQRRESK

SEQ ID NO: 8259 - protein, 461 aa, Neurospora crassa
MAFRTALRRVAAVNAAPATRLAGAGAGAATAARRSYATASQLTHPDPTEDSPSGKMVREHVPYMVTTYSRPPPVFVKGKGSYLWDLEDRKYLDFTSGIAVNSLGHCDEEFSKIIAEQAQELVHASNLYYNPWTGALSKLLVESTKASGGMHDASSVFVCNSGSEANEAGIKFARKVGKVLDPSGSKVEIVCFQNAFHGRTMGSLSATPNPKYQAPFAPMVPGFKVGTYNDIAAIPSLVTEKTCSVIVEPIQGEGGVMPATEEFLVALGKRCREVGALLHYDEIQCGLARTGTFWAHSSLPKEAHPDILTTAKAIGNGFPIAATIVNEHVASKIKVGDHGTTFGGNPLACRLAHYIVGRLADKQLQEGVKAKSEVFLRGFEKLRNKFPSLVKEVRGKGLILGLQLSEDPTPVIKAARERGLLVITAGTNTLRFVPSLLVTEGEIEEGLKILEESFEAVMVKA

SEQ ID NO: 8260 - protein, 503 aa, Hordeum vulgare subsp. vulgare
MVAPAKIPQRQLFIDGEWRAPALGRRLPVINPTTEVSIGEIPAGTSEDVDAAVAAARAALKRNRGRDWSRAPGAVRAKYLRAIAAKMIERKSDLARLEALDCGKPLDEAAWDMDDVAGCFEFFAGHAEALDKRQNAAVALPENFKCHLKKEPIGVVALITPWNYPLLMAVWKVAPALAAGCTAVLKPSELASVTCLELGDVCKEVGLPSGVLNIVTGLGNEAGAPLSSHPDVDKVAFTGSYATGQKIMVAAAPTVKPVTLELGGKSPIVVFDDVDIDKAVEWTLFGCFWTNGQICSATSRLLIHKNIAKEFVDRMVAWSKNIKVSDPLEEGCRLGPVVSEGQYEKIKKFVANAKTEGATILTGGVRPKHLEKGFFIEPTIITDINTSMEIWREEVFGPVLCVKEFSTEEEAIELANDTHYGLAGAVISGDRERCQRLAEEIEAGCIWVNCSQPCFCQAPWGGNKRSGFGRELGEGGIDNYLSIKQVTEYTSDAPWGWYKAPAN

SEQ ID NO: 8261 - protein, 506 aa, Hordeum vulgare subsp. vulgare
MAAPPAIPRRGLFIGGGWREPTLGRRIPVINPATEDTIGDIPAATAEDVELAVAAARSAFLLDGGSRWARASGATRAKYLNAIAAKIKEKISYLALLETVDSGKPKDEAVADMDDVAACFEYYAALAEALDGKQHAPISLPMEEFKTYVLKEPIGVVGLITPWNYPLLMATWKVAPALAAGCTAVLKPSELASLTCLELGAICEEIGLPSGVLNIITGLGPDAGAPIASHPHVDKIAFTGSTATGKTIMTAAAQMVKPVSLELGGKSPLVIFDDVADIDKAVEWAMFGCFFNGGQVCSATSRLLLHEKIAERFLDRLVEWAKNIKISDPLEEGCRLGSVISKGQYEKIKKFISTARSEGATILHGGDRPKNLGKGFFIEPTIITGVSTSMQIWREEVFGPVICVKVFKTESEAVELANDTHYGLAGGVISDDLERCERIAKVIHSGIVWINCSQPTLVQAPWGGNKRSGFGRELGEWGLENYLSVKQVTRYCKDELYGWYQRPSKL

SEQ ID NO: 8262 - protein, 262 aa, Glycine max
MALAANATPSLAFASSSLLNHNPQFGAAPKRFVSSSSSSLCLAAGLSSKARAFSFSASAAALDGEELAVEETWKLARPTEVYVCNLPRSCDTEQLLHMFNPHGTVLSAQVCRSAETGESRGSAYVTMASINSARKAIAALDASDFGGREVRVRFSAEMNPKRRNLETMNSSPKRVIYYEGPHKLYVGNLSRSAGPQDLKQLFGRFGIVASVRVLQDLRKGNRRVYAFVSYHSESERDAAMSLNGTEFFGRVLVIREGVERED

SEQ ID NO: 8263 - protein, 355 aa, Crocosphaera watsonii WH 8501
MDVRTCGINLNHWYVVAQSREITTKPIEVKLWYRSIVLYRDSTGKIHGLDNRCPHRQVKLSEGKVVGNSLECAYHGWQFNGQGSCTFIPYLNSNLNGKFSKNQALPRSQIESYPVQEDDGFVWIFLGEKHLLESKQVQPMSIPEWQHLNYIGTVSVIDCQAHFSFLIENLMDMYHGHLHDDYQAWTDAKLKELLTTEEGVKGLYEAQSYYKIDKIWSISQLFFPRFRSLHPEPLMVNYCYPHWQSTLGKDFTIYCLFCPISLTHTKAYLIHFTSLNAFWRLHKLPKWFRQFIKDRLYGTAQTMLDGLVEQDIIMIEQEQQAYDQQLREPTYEINPTIPAVQKFIKKQAEKESIII

SEQ ID NO: 8264 - protein, 556 aa, Ricinus communis
GEFTWKLADHPKLPKGKTIAMVVLDGWGEAKPDQYNCIHVAETPTMDSFKKTAPERWRLIKAHGTAVGLPTEDDMGNSEVGHNALGAGRIYAQGAKLVDLALASGKIYEGEGFKYVKECFDKGTLHLIGLLSDGGVHSRLDQLQLLLKGAAEHGAKRIRVHVLTDGRDVIDGTSVGFAETLEKDLENLREKGVDAQVASGGGRMYVTMDRYENDWNVVKRGWDAQVLGEAPYKFKSAVEAIKKLREEPKANDQYLPPFVIVDENGKPVGPIVDGDAVVTINFRADRMVMLAKALEYENFDTFDRVRFPKIHYAGMLQYDGELKLPSHYLVSPPEIERTSGEYLVHNGVHTFACSETVKFGHVTFFWNGNRSGYFNPEMEEYVEIPSDVGITFNVQPKMKAIEIAEKARDAILSGKFQQVRVNIPNGDMVGHTGDVEATVVGCKAADEAVKMIIDAIEQVGGIYVVTADHGNAEDMVKRDKSGKPMADKSGKIQILTSHTLQPVPIAIGGPGLTPGVRFRSDIPTGGLANVAATVMNLHGFEAPSDYEPTLIEAVDN

SEQ ID NO: 8265 - protein, 939 aa, Wolinella succinogenes
MSEALSGRGNDRRKFLKMSALAGVAGVSQAVGSDQSKVLRPATKQELIEKYPVSKKVKTICTYCSVGCGIIAEVVDGVWVRQEVAQDHPISQGGHCCKGADMIDKARSETRLRYPIEKVGGKWRKTSWDSAMDKIAKQLQDLTQKYGPDSVMFIGGSKCSIEQSYYFRKFAAFFGTNNLDTIARICHAPTVAGVSNTLGYGGMTNHLADMMHSKAIFIIGGNPAVNHPVGMVHILRAKEAGAKIIVVDPHFSRTATKADHYVRLRNGTDVAFMYGMIRHIVKNGLEDKEFIRQRLFGYEEILKECEQYTPEVVEEVTGVPAQQLIEITEIFAKAKPASLIWGMGLTQHTTGTSNTRLAPILQMILGNIGKRGGGTNVLRGHDNVQGATDMGNLADSLPGYYGLDKNAWNHFCGIWKVDFEAMQKRFKTPDMMHKKGFSVSTWRYGVTEEENIPHNAGTKLRSLIVVGSGISTIARVDTTKDALDKMDLVVFFDPYFNDAAALTNRKDNLYILPAATQMETSGRVAATNRSYQWRSMVMKPLFECRPDEEILFDLAKRLGFYEEYTRSLGDGKGNFVWPDDATREVAKAIRTVGFQGRTPERLKAHAENWHMFDKFTLRGKGGPVKGEYYGLPWPCWSEKHPGTPNLWDDSIPVMDGGLGFRVRWGDVSPTGESLLASQDSSLPGSKFKGGHSMITDKNVEAITGIALTEEEKAKVAGKTWATDTTNILVEKALAAGLSPMGNGRARAIVWEWTDQIPKHREPIYTIRHDLISQYPTFKDKPNHFRANIRYESRQKEKDWTKEFPLNMLSGRLVAQFGTGTETRSAHYLAEVQPEMFVEIHPETATDLGVKHGDMVWVHGTNGAKILVKARHSYKVNKTSVFLPQNFGGMYQGESLVPYHIAGTEPYVIGESCNTITSDAYDINTSTPETKCGLCRIEKA

SEQ ID NO: 8266 - protein, 345 aa, Synechococcus sp. PCC 7942
MFLKNYWYPVALAQKVGDRPLSVTLCGEAIALYRDSAGQIHALSDRCVHRGAALSGGWVENDCLVCPYHGWQYDAQGHCRKIPANTEQQRIPFAAKVPHYDAIERYGLVWLFYGDLPEADRPPLPPLPEYDDPAWRTVQGEVTYTTHYTRVTENLMDFAHAPFTHSGSFGAASDPLIEPYKVEQLPDGLRAQTQFTKSAYRGIWKLFNRGDAPRTVTTTITLYMPCIVRTETDLGNGFRFIGYGANLPIDAETTKTFWLTVRTFFTGAWADGDTVRRSLKIIEEDKRIVETQRPKMIPLDDRSETHVAADALQIGYRNLLRQARDRGWAIAESQPADQELVPAAK

SEQ ID NO: 8267 - protein, 426 aa, Bifidobacterium longum DJO10A
MYARQILDSRGNPTVQVVLDTEDGAQGLGLVPSGASTGEAEAWERRDGDKSVYGGKGVLNAVKAVNEVIAPKVIGMDAADQRALDDLMIELDGTPNKGKLGANAILGVSLAALYASAESAGLPLYRYIGGTNGHILPVPNMNIMNGGAHADFATDIQEYMISPYGFDTYSEALRAGVEVYHTLKNVLKKEGLNTGLGDEGGFAPKMKSNEDSLKYIMDAISAAGYEPGKQIGICLDVASSEFYNKETGKYRFDGEERDSAYMLDYYENLINEYPIVSIEDPFNEEGWEDWAAITARLGDRLQFVGDDLLVTNPARLQKAIDLGAANSLLVKLNQIGSVTETLDAIELATANGYTSMVSHRSGETPDTTISDLAVAKNTRQIKTGAPARGERVAKYNRLLEIEEELGSTAQYAGYSAFKACKKYLAK

SEQ ID NO: 8268 - protein, 334 aa, Synechococcus sp. PCC 7942
MANLDVALLPNHWYAIAASTDLGSTPIAASLLDQQLVVYRTTAGQVVVLDDRCPHRGASLACGQVKGNAIACPYHGWQFDLDGHCAQIPSQQASARIPQAAKVASYPVQERYGLIWVFTGDRDRAAQTPLWELPEYDQAGWRVVQGQFDWAADYRRVTENGMDVAHSPFVHANSFGASGNEVIADFELEKSDLGAQIWIPIEPKANYRGSFNLLGRKQETPKAGRSGAAFHLPNITRIDIEFGNFHLILVGIHQPISATTTRSHWLHVRNFLTAGWADGGTRKRTAKLFQEDQKIIEGIAPLRDRNEISVASDRLQLYYRQLWQQHHSSLVAQG

SEQ ID NO: 8269 - protein, 315 aa, Zea mays
PRVRFGIDPNNAFAFWDWVGGRYSVCSAVGVLPLSLQYGFPIVQKFLEGASSIDNHFYSSSFEKNIPVLLGLLSVWNVSFLGYPARAILPYSQALEKLAPHIQQLSMESNGKGVSIDGAQLSFETGEIDFGEPGTNGQHSFYQLIHQGRVIPCDFIGVVKSQQPVYLKGETVSNHDELMSNFFAQPDALAYGKTPEQLHSEKVPENLIPHKTFKGNRPSLSLLLPTLSAYEVGQLLSIYEHRIAVQGFIWGINSFDQWGVELGKSLASQVRKQLHGTRMEGKPVEGFNHSTSSLLARYLAVKPSTPYDTTVLPKV

SEQ ID NO: 8270 - protein, 72 aa, Arabidopsis thaliana
MGKQPVKLKAVVYALSPFQQKIMTGLWKDLPEKIHHKVSENWISTILLVAPVVGTYSYAQYFKEQEKLEHRF

SEQ ID NO: 8271 - protein, 205 aa, Olea europaea
SGGVTSMDDFLKKFFPAIYERKLHAKENNYCKYDDQLLQLFTSSLYLAALVASFGASKACNVLGRKPTIGLASILFILGAIASGIAPNKALLIIGRILFGFGVGFGNESVPLFLSEVAPMQHRGAVNILFQLFVTIGILIANLVNYAVSSIHPNGWRIALGLAGVPAIFLFIGSLIITETPSSLIERGKEFEGKEVLRKIRGVDD

SEQ ID NO: 8272 - protein, 171 aa, Triticum aestivum
MAAAPPQPAAPAPASGGDAFRLGFIGAGNLAESIARGVAASGVLPASAVRTAPHRRPERGAAFASLGATILASNAQVVDDSDVIVISVKPQIVKQVLVELKPLLSEEKLLVSIAAGIKMKDLQDWSGQRRIIRVMPNTPSAVGQAASVMCLGETATENDENRVKSLFSAIG

SEQ ID NO: 8273 - protein, 528 aa, Ustilago maydis 521
MVNITYGVLQAPDGSSATSSAIANGTDIIVSYGPNGESVASYSPGDISWVLTCTALVWLMIPGLGYLYSGLARRKNALHLLLLTLAALAVVSFQWFFWGYSLTFSQTSGAFLGNLRNFGYMGVLENPVPQAYNKVPEIVYAIYQCMFANLVPAIAIGAACERGRVWPFLVFTFVWTTLVYDVIACWVWNPTGWAFKWGVLDYAGGGPVEINSGITGLVISYYLGPRTGYGTERLLFKPHNVSYIFLGTAFLWFGWIGFNGGSVFAANLRAAMAISTTNLAASSAGLTWMFLDWRLERKWSVVGFCTGAIAGLVAITPAAGFVGMPAALLVGVVSSAVSNFATVLKGPMRVDDVMDIFSVHALAGIVGTLLTGIFAQASVANNDGNTVIAGGWLDSNWIQLAYQLAYCVAVTCWCGGVTFAIMFVIDHIPYIGPFRSSEMGEVVGMDEDQCGEWAYDYAFINRDLEGNYKPDHGQTLDINEKMPNVHQTDSLRSETHADSSQDNSNSQLAAAEHQSPSTAEPAVEMKQA

SEQ ID NO: 8274 - protein, 180 aa, Pseudomonas aeruginosa UCBPP-PA14
MLLSALALAGLPLSGWAADCPELLQGQLTKLRSKESIDLCQRYAGKPLVVVNTASHCGFTPQFKGLEALYQRYKGQGLEVLGVPSDDFKQEAADTAETAKICYGNYGVTFAMTQPQHVRGDEAIPLFRQLAEQSGQAPRWNFYKYVVDRQGRVVAQFSSKTTPDDPQLQAAIEKAIASQP

SEQ ID NO: 8275 - protein, 198 aa, Oryza rufipogon
GQTPVFPRIFGREAGGIVESVGEGVTDLAPGDHVLPVFTGECKECAHCKSAESNMCDLLRINTDRGVMIGDGKSRFSINGKPIYHFVGTSTFSEYTVMHVGCVAKINPAAPLDKVCVLSCGISTGLGATINVAKPPKGSTVAIFGLGAVGLAAAEGARIAGASRIIGIDLNANRFEEARKFGCTEFVNPKDHDKPVQQ

SEQ ID NO: 8276 - protein, 398 aa, Vibrio parahaemolyticus RIMD 2210633
MTFMFSNLPTPVLDPILSLSVAYRNDERPNKVDLGIGVYKNSAGETPIMKAIQMAQDVVVETQKTKSYVGLAGCEEFNQSMIDLLLTGTSAMDRVAAIQTPGASGALRMLGDLMKVAQPDTTVWISNPSYVNHKPVMEAAGLKVKFYHYFSPETKQVDTAKMLDDLAKAGPTDVVLLHGCCHNPTGADIDFSAWQAITELSQKNGFTPFVDIAYQGFGDGLEADAKGLRYMADNVEEMLITTSCSKNFGLYRERTGAAIVVGKNTQDITNAKGKLLTLARSTYTMPPDHGAALVKTILQDANLTSVWKQELSEMQQRLVSLRQSLCNELRNNHNTDQFDFIESHKGMFTVLGFSENQMAQLREDYGIYGVGDGRINIAGLTETHIPYVADAIKKISQP

SEQ ID NO: 8277 - protein, 270 aa, Secale cereale
ERIPERVVHARGASAKGFFEVPHDVSQLTCADFLGAPGVQTPVIVRFSTVVHDRGSPETLRDPRGFAVKFYTREGNFDLVGNNMPVFFIRDGMKFPDMVHAFKPSPKTNMQENWRIVDFSSHHPESLHMFTFLFDDVRIPLNYRHMDGFGVNTYTFISSDGKAHLVKFHWKPTCGVKCLLDDDAVTVGGTCHTHATKDLTDSIAAGNYPVWKVFIQTVDADHEDKFDFDPLDVTKTWPEDIIQLQPVGRMVLNKNIDNFFAENEQLAFCS

SEQ ID NO: 8278 - protein, 470 aa, Pelobacter carbinolicus
MADEIFDLIVLGAGPGGYVGAIRAAQLGMKVAVVESRPTLGGVCLNEGCIPSKALLDSSEHFALARDKFDMHGIEIPAPKLNLAKMMERKEGVVSDLTGGIAFLFKKNKVTWIKGRGKLLGAGGDGLQQVEVTGKNAGVVKGKNVLLATGGKVAQVPGITVDNDVIIDNVGALSIDKVPEHLMIIGAGYIGLELGSVWLRLGSKVTVVEMLPKMLPKTDADTTQALQRSLKKQGMTFNMGTTVGGIEVSGGKATVKLVKNDKEKEVVCDKVLMSIGRKPNTDGLGLEELGVEMGERGTIKVDDNYATNVPGIYAIGDLIPGPMLAHKASEEAVVFVERLVGKNSEVHYGTIPGVCYTWPEVASVGKTEQQLQEEGTPVKVGKFNFVGNGRARAMAETEGFVKIIAHAENGQVLGVHIFGPRASDMIAEAVAVMSYGGTAHDIGAMFHGHPTLSEAVKEAALDVDGAAVHC

SEQ ID NO: 8279 - protein, 1423 aa, Eremothecium gossypii
MAFLKRLNVSSHSRSSSGSSGRTPQNTSGGSKATAVKPLPQIPVEMGGIESEVIKNGEGGQSVVILCDDVGSGSYTSVLLSPSDPHMFSADGQRLSVEEQAEKTLYSWDVTDPEQWTMQRVMSWFKAHDFDEQWILFFKRNHISGKKFLQLLAHDNFNKYESFLSATKNSSYNRFQHLLKRTLEENVSNSHRRQRSNKSNDSKGSADCSLRYRRRRSVASEQRTLTAAEGVTPRKTVEVADDRAGSSKNHRKAKSASVLYRRSFISLRSSSSSNIKNDVDDDCKTLPAMKISIPPRPFSSIERSTSSSPASTLKSQSSPLSPGNHNMFRKDHKSSSSDSSLFNNLFGSADEITKAVGGTAPQGEQIAVKKYNDTLPSPMRVSPRHIDDKSTIWDKLKKRALPSTEQYTPSRIKQLTSGRNSSYIQTLQESPDECSANNEDPPATATLEAPIIDDLVLEEKHYPSQKQDSSAQYVLVTKDNRIFLPLNIAPYKTTQELKDGMTAFLGISSKAYTIHLTDLGCDPGVSLSDDVIAAIGQRKLNTRHLKFYVKDATRMHLRLKNDSFTSDHNITTEMSRSKGSLRSAASSFISSNDDTNSFSDITSIDEHGNITGRRVYPQTPSHYYDQSAATHSPEVDYWNIKERLSEGTSPMNISLLRSTTKAASLPSSIDEIKKSSFKVIRKASVTDIDFNKGRESPYIRPKLAPKREAPRPPRTSSQVSLASSSSIQSSLVEQKSISNSPTKPQRQHAGTYVKNKTRPPPPPSIGSTMTVDTKVMTSVSDSPVSNEPPNRPYGPFSTQKLVPQGFKGVGVHPGTRKVEEQMHTNPVTQYIQKQRSRNSISKMGNNPSLYSPPRLKKRISTRRMVSSTSAADIFDENEISFADAPDLSDYDSENSESSDDIIWSTTNTTSLDASKISVSDSTTGDDSNFSVASSVELQSSIKNDAKTSEDSIVDSIKEEGDSVCNLVGRKMTLRPTTEVVYQNLEMFFPGTDLDKPILEGLTPPASPDSEANKMPDQDLTPLSKVSTISSESSMRQSTPRLLITKKSDSPQPMPVRNLKPPKRTKTIRSIAREASEARKKSLYNNLKRQNTKMWGTRVVEVTDKRMVSINKSKNSKGEYREFAWIKGEMIGKGSFGAVYLGLNVTTGEMMAVKQVEVPKFGSQDETTVNNAEALISEVSTLKDLDHLNIVQYLGFENKNCIYSLFLEYVAGGSVGSLIRLYGHFDEQLIRFLTTQVLEGLAYLHLRGILHRDMKADNLLLDNDGVCKISDFGISRKSNNIYSNSEMTMRGTVFWMAPEMVDTTQGYSAKVDIWSLGCVVLEMFAGKRPWSNLEVVAAMFQIGKSKSAPPIPEDTLPHISQDGRAFLDDCFMIDPEERPTADTLLSHPFCQVPKEFNFRDTDLYNFIKQNDKLNNSKLTRNSQR

SEQ ID NO: 8280 - protein, 191 aa, Triticum aestivum
MELVKVLVRRWPTVLRLPAVRGTPPSHLGCSSPHYSLRRRRLDSRRGAEMSYLLPHLHSGWAVDQAILAEEERLVMIRFGHDWDETCMQMDEVLSGVAETIKNFAVIYLVDITEVPDFNTMYELYDPSTVMFFFRNKHIMIDLGTGNNNKINWAMKDKQEFVDIVETVYRGARKGRGLVIAPKDYSTKYRY

SEQ ID NO: 8281 - protein, 244 aa, Cynodon dactylon
AMGDKPGPNITATYGDKWLDAKATFYGSDPRGAAPDDHGGACGYKDVDKAPFDGMTGCGNEPIFKDGLACGSCYEIKCKEPAECSGEPVLIKITDKNYEHIAAYHFDLSGKAFGAMAKKGEEDKLRKAGELMLQFRRVKCEYPSDTKIAFHVEKGSSPNYLALLVKYAAGDGNIVGVDIKPKGSDEFLPMKQSWGAIWRIDPPKPLKGPFTIRLTSESGGHVEQDDVIPEDWKPDTVYKSKIQF

SEQ ID NO: 8282 - protein, 388 aa, Pseudomonas aeruginosa PAO1
MRALTFHGSHDVRIDRVAEPRLQEPDDLLLRVTATAICGSDLHLYRGKIPMVEQGDILGHEFMGVVEEVGSAVTAVRPGDRVVVPFVIACGECFFCRLNLHAACETTNPGRGAILNKKQIPPGAALYGYSHLYGGVPGGQAEYVRVPKANSGPFVIPDVMEDERVLFLSDILSTGYQAVRNAGVRQGSSVAIYGAGPVGLMAAACARMLGAERIFIVDHHPYRLDFAARTYGAIPIDFDQEDDPAAAIIERTDGHRGVDAVIDAVGFEAKGSVTETVLTALKLEASSGKALRQCIAAVRRGGTVSVPGVYAGFIHGFLFGDAFDKGLTFKMGQTHVQALLPALLEHIGNGDLHPEAIISHRLRLDDAPEGYALFDEKREDCRKVVLRP

SEQ ID NO: 8283 - protein, 423 aa, Magnaporthe grisea 70-15
MAITKIHARSVYDSRGNPTVEVDVVTDTGLNRAIVPSGASTGQHEACELRDGDKSKWGGKGVTKAVENVNNIIGPALIKENIDVKDQSKVDEFLIQLDGTPNKTKLGANAILGVSLAVAKAGAAAKKPYVLPVPFMNVLNGGSHAGGRLAFQEFMIVPSAAPSFTEAMRQGAEVYQQLKGLAKKKYGQSAGNVGDEGGVAPDIQSAEEALELITAAIEAAGYTGKMNIAMDVASTEFYKEDEKKYDLDFKNPDSDKSKWITYEELAAMYSDLCKKYPIVSIEDPFAEDDWEAWSYFYKTQDIQIVADDLTVTNPLRIKKAIDQKAANALLLKVNQIGTLTESIQAAKDSFADGWGVMVSHRSGETEDVTIADIAVGLRAGQIKTGAPARSERLAKLNQILRIEEELGSNAVFAGESFRKAINM

SEQ ID NO: 8284 - protein, 224 aa, Aristida longiseta
IENKISRQVTFAKRRNGLLKKAYELSLLCDAEVALIIFSGRGRLFEFSSSSCMYKTLERYRSCNYNPQEAKAPQESEINYQEYLKLKTRVEFLQTTQRNILGEDLGPLSMKELVQLENQIEISLKQIRSRKNQMLLDQHYDLKNKEQKLQDLNKDLRKKLQETSGENALHISWEEGGHSGASGNAIEPNQGFLQHPENDSSLQIGYHQQAYMDQLSNEDMGAHH

SEQ ID NO: 8285 - protein, 277 aa, Pseudomonas fluorescens PfO-1
MQHIVNRQGLNLPKLGLGTWPMLGDECTRAVEQALELGYRHIDTAAAYNNEDAVGQALANTPTPREQIHVTTKVWWDQLQPDAMRHSLDRSLKALRSEYVDLFMIHWPTTDWDLPHTLETLASFKEQGLARNIGVANFPLPLLRKVVEEYGIPLSAIQIEYHVLLGQNALLDYARQHDLALTAYTPLARNKVSEIPQIQQIAEKHGVLPTQVALKWLLDQDNVAAIPKASSKTNQLANLASLQVELDDDDRALIAALSKRERQVSPDFAPVWDAFDR

SEQ ID NO: 8286 - protein, 264 aa, Synechococcus elongatus PCC 7942
MISSLGIIGGGVMGEALLARLLAQGQVAATAVTVSEPFAARCEFLNDRYGVRCVDDNAEAAQADWVLLAIKPQVFDPAVAGLADLRSDRLILSILAGVPLAKLEAAFPHEAVIRAMPNTPATVGAGVTAIAAGQQVTADQLSQAQEFFAAVGRVVTVPESQLDAVTGLSGSGPGYVALIVEALSDGGVAAGLPRAIATELAIQTVRGTAELLQETGWHPGELKDRVCSPGGTTIAGVATLEQNGLRSALIEAVKAAALRSQQLG

SEQ ID NO: 8287 - protein, 407 aa, Bifidobacterium longum DJO10A
MNVFGTPLRVMDHGQGAHIWDVDGNEYLDFLAGIAVNSLGYAHPKWVKAVADQAAKVAHISNYFASEPQIELASKLVKLAGAPEGSKVYFGNSGAEGNEAALKLAKLYGRTLPGALPSIGGKPARILAMTHGFHGRTMGALSATWKPGIRKPYDPLVPNIEFVRAGDKVALHDAFAQTGLGRYGKGPVAAVILELIQGEAGVQPLGADYVKFVRELCDINHALLIIDEVQTGIGRTGKWFAFQRDDLSGGVTPDMVTFAKGVAGGFPMGGMIAFGEKLAALFTPGSHGSTFAGNPLGAAAGLATLDVIEDENLVANAEARGEQLRDGIMATGNPLFVSVRGRGLLDAVELKHPCSHAVMNYCLEHGLIVNAVAPNALRFAPPLIVTAQDVDQALAILKDVPTDLPDD

SEQ ID NO: 8288 - protein, 116 aa, Pinus pinaster
TVFTVILYGSPLSVIRLVIHTKSVEFMPSFYFSLFAFLGSVLWMVYGALSGDILIMAPNFVGIPLGLSQMALYCIYWNNSPVRVEATKLEAGGELKSIEQNIKEDIELYTEDIEKA

SEQ ID NO: 8289 - protein, 285 aa, Microbulbifer degradans 2-40
MSETNLVNDAKIAFIGAGNMAAAIIAGLVKQGVAPANIEVCAPSEGNRARLASEYGVVHSADNNAAAAKADILVLAVKPQMMREVCAQLAEHRNPNCVVLSVAAGITCQSLANWLATPAQPAENIAVVRTMPNTPSHIGLGACGLFASSAVAQTQKDQAQAIMAAVGLAVWVNSEDEINIVTAVSGSGPAYFFLVFEAMIDAAEKMGLDRQTATQLTLQTALGAAKLAQTSEDDAVTLRKKVTSPNGTTERAIASFEQNKLRDTFAAAMQACSDRAQQLATELAK

SEQ ID NO: 8290 - protein, 73 aa, Zea mays
IAGYKVKLFSQLSPAGKNILELGVGTGPNFKYYASEDGVNVIGVDPNKHMENYARAAVVSDGLASSSFTFRRG

SEQ ID NO: 8291 - protein, 406 aa, uncultured bacterium 106
MDKMGMTEKNFIEDLNLNGLRVLTRVDFNVPLNKDLQITDNGRIEAALTTIRYIVEQRGKAILMSHLGRPGGERVESLSLKPAAEELSLLLGQPVTFAKDCIGEEVEALIEGMQNGEVLLLENLRFHKAETKNEPEFCGALGKLGDVYVNDAFGTAHRAHASTAGVTGFIPESAVGYLIRKELQFLGGAVMNPARPFTAILGGAKVSDKIKVIDKLLNKVQTLIIGGGMSCTFLKAQGYKIGASLLEEDSLDFAKELIQKAQEKGVELLLPVDAVIADSFDKSASTRSVSVEEGASDGWLILDIGPKSAEIFCDSVRKSGTVLWNGPMGVFEMEPFALGTFAIAQCLAEVTDKGVVTIIGGGDSAAAIQQFGLSERITHVSTGGGASLEFLEGKELPGVTAIQQSK

SEQ ID NO: 8292 - protein, 245 aa, Pinus radiata
MGRGKVELKRIENKINRQVTFAKRRNGLLKKAYELSVLCDAEVALIIFSNRGKLYEFCSSSSMMKTIEKYQKCSYGSLETNCSINEMQNSYQDYLELKARVEVLQRSQRNLLGEELGPLNSKELEQLEHQLENSLKQIRSAKTQFMFDQLAHLQHKEQMLVEANRELRKKLEESNTRIPLRLGWEAEDHNNISYRRLPTQSQGLIFQPLGGYPNMQIGYNPAGSNELNVSPADQHPNGFIPGWML

SEQ ID NO: 8293 - protein, 242 aa, Pinus radiata
MGRGRVELKRIENKINRQVTFSKRRNGLLKKAYELSVLCDAEVALIIFSSRGKLYEFGSAGMLKTLERYQKCSYVLQDATVSDREAQNWHQEVGKLKARVELLQRSQRHLLGEDLGPLSIKELQQLERQLEVALTHVRSRKTQVMLEMMDELRRKERILQEVNKSLRKKLQEAEGQAFNAMQPPPHAWDSHAVANNAYAMQHPSNAVDCEPTLQIGYQYAPPESSMPRHEQAQNNYMQGWMV

SEQ ID NO: 8294 - protein, 289 aa, Streptococcus pneumoniae R6
MKGIILAGGSGTRLYPLTRATSKQLMPVYDKPMIYYPLSTLMLAGIKDILIISTPQDLPRFKDLLLDGSEFGIRLSYAEQPSPDGLAQAFLIGEDFIGDDSVALILGDNIYHGPGLSKMLQKTVSKEKGATVFGYQVKDPERFGVVEFDENMNAISIEEKPECPRSNYAVTGLYFYDNDVVEIAKSIKPSARGELEITDVNKAYLDRGNLSVEVMGRGFAWLDTGTHESLLEASQYIETVQRMQNVQVANLEEIAYRMGYISREDVLELAQPLKKNEYGQYLLRLIGEV

SEQ ID NO: 8295 - protein, 319 aa, Geobacillus stearothermophilus
MKRIGVLTSGGDSPGMNAAIRSVVRKAIYHGVEVYGVYHGYAGLIAGNIKKLEVGDVGDIIHRGGTILYTARCPEFKTEEGQKKGIEQLKKHGIQGLVVIGGDGSYQGAKKLTEHGFPCVGVPGTIDNDIPGTDFTIGFDTALNTVIDAIDKIRDTATSHERTYVIEVMGRHAGDIALWSGLAGGAETILIPEADYDMNDVIARLKRGHERGKKHSIIIVAEGVGSGVDFGRQIQEATGFETRVTVLGHVQRGGSPTAFDRVLASRLGARAVELLLEGKGGRCVGIQNNQLVDHDIAEALANKHTIDQRMYALSKELSI

SEQ ID NO: 8296 - protein, 391 aa, Streptococcus mutans UA159
MRIGIDKIGFTSSQYVLNMKDLAEARGEDPQKFSKGLLLNALSIAPITDDVVTLAAGSANEILTAEDKEKIDMVILATESSVDQSKAGAVYVHSLLGIQPFARSFEMKEACYSATAALNYAKLHVEKHPDTRVLVLASDIAKYGIGTPGESTQGAGSIAMLVKKDPRILILHDETLAQTRDIMDFWRPNYTTTPYVNGMYSTKQYLDMLKTTWAEYQKRFDVSLTDFAAFCFHLPFPKLALKGFNKIMDKQVPSDLQEKLKVNFEASILYSKQIGNIYTGSLFLGLLSLLENSQNLVAGDKIALFSYGSGAVAEIFTGTLVKGFKEQLQTNRLDKLKRRTPLSVENYEKIFFEEAQLDDKGNASFKEYQTGPFALKEILEHQRIYGKVNES

SEQ ID NO: 8297 - protein, 596 aa, ASPERGILLUS NIDULANS FGSC A4
MRRAALQALRSSRRAPAWRVGGRTPPISFTSSPSLGLRSYSTPKLSASLQSSMHLRTFSVAAVSAVVASGAWYAYQGDGSQTPAAAGTSSQTRSFTSTAHAEQPSEPSRRALLVDNDQFYTATLSGEQPLQKNTDDSDRRLLEMLTPEQATQKLRKNEESYLVNRGKGVVRYDVVQVPSNSPIEDDHAEKIVEVPASTSAANEGQSSSDWMFWAVFDGHSGWTTSAKLRNVLISYVARELNATYKSASSDPSLVLPSSEAVDAAIKQGFVRLDNDIVHGSVNQVFKSNSRRAAAELLAPALSGSCALLAFYDSQTRDLKVACAGDSRAVLGRRSENGKWTATPLSEDQTGGTPSEMKRLREEHPGEPNVVRNGRILGQLEPSRSFGDAFYKWSKETQEKIKRQFFGRTPHPLLKTPPYVTAEPIITTTKVDPSQGDFLVLATDGLWEMLSNEEVVGLVGQWIEEQKAAAGAGTGNKSWVRSLFGSQPTQLPVEAPKETSTDGQRRPIRQQQYDISGAASRFVVEDKNAATHLVRNAMGGKDKDMLCALLTLPSPYSRRYRDDVTVEVIFFGESPDNRTISINEEASASEDNIKAKL

SEQ ID NO: 8298 - protein, 120 aa, Hyacinthus orientalis
GSNYYACLSMLSLLILTPFAIAERAPSMWAVGWQNAMSQIGPNFIWWVAAQSIFYHLYNQVSYMSLDEISPLTFSIGNTMKRISVIVSSIIIFHTPVQPVNALGAAIAILGTFLYSQAKQ

SEQ ID NO: 8299 - protein, 433 aa, Burkholderia cepacia
MSLNDDATFWRNARHHLVRYGGTFEPMIIERAKGSFVYDADGRAILDFTSGQMSAVLGHCHPEIVSVIGEYAGKLDHLFSEMLSRPVVDLATRLANITPPGLDRALLLSTGAESNEAAIRMAKLVTGKYEIVGFAQSWHGMTGAAASATYSAGRKGVGPAAVGSFAIPAPFTYRPRFERNGAYDYLAELDYAFDLIDRQSSGNLAAFIAEPILSSGGIIELPDGYMAALKRKCEARGMLLILDEAQTGVGRTGTMFACQRDGVTPDILTLSKTLGAGLPLAAIVTSAAIEERAHELGYLFYTTHVSDPLPAAVGLRVLDVVQRDGLVARANVMGDRLRRGLLDLMERFDCIGDVRGRGLLLGVEIVKDRRTKEPADGLGAKITRECMNLGLSMNIVQLPGMGGVFRIAPPLTVSEDEIDLGLSLLGQAIERAL

SEQ ID NO: 8300 - protein, 467 aa, Rhizobium sp. NGR234
MTIDIKDISEKDRNTVLHPFTQLKDFATGKLREPTIVETGKGIRIQDARGNQLIDGFAGLYCVNVGYGRTEVAEAISRQAYRLAYYHSYAAHTTDELAILSDRLVKMAPGKMSKVFYGMSGSDANETQAKLVWYYNNLRGKPTKKKIISRERGYHGCSVVSGSMTGMSFYHDHMDLPLPQICHTGVPHHYWGANPGETEREFSARRAAELDEMIETLGPDNVGAFIAEPVLGTGGITPPPEGYWEAIQAVLKKHDVLLIADEVITGFGRTGSMFGSQHYGIEPDLITVAKGLTSAYFPLSASIVGEKVYKVLEDGADRVGAFSHGYTYSGHPIGAAAANAVLDIVEKEDLPGNAREVGGYFQAQLKEKFAQLPIVGEVRGVGLMGAIEFVGDRENKKRFDPLLKVGARVSKAARDRGLIARAMPHGDILGFAPPLVTTKEEVDEIVAMAEKAVRSVMDELVRDGQKL

SEQ ID NO: 8301 - protein, 578 aa, Clostridium magnum
MAKIVVMPKLGLTMTEGTLVTWKKAEGDQVKVGEILFEVSTDKLTNEVESSDEGIVRKLLVNEGDVVECLNPVAIIGSADEDISSLLNGSSEGSGSAEQSDTKAPKKEVEAVKGGDNLVVIGGGPGGYVAAIRAAQLGAKVTLIEKESLGGTCLNVGCIPTKVLLHSSQLLTEMKEGDKLGIDIEGSIVVNWKHIQKRKKIVIKKLVSGVSGLLTCNKVKVIKGTAKFESKDTILVTKEDGVAEKVNFDNAIIATGSMPFIPEIEGNKLSGVIDSTGALSLESNPESIAIIGGGVIGVEFASIFNSLGCKVSIIEMLPHILPPMDREISEIAKAKLIRDGININNNCKVTRIEQGEDGLKVSFIGDKGEESIDVEKVLIAVGRRSNIEGLDVEKIGVKTEGGSIIVNDKMETNVEGIYAIGDCTGKIMLAHVASDQGVVAAENIMGQNKKMDYKTVPACVYTKPELASVGLTEEQAKEKGIDYKVGKFQLAANGKSLIMNETGGVIKIITDKKYEEILGVHILGPRATDLITEAALALRLEATLEEIITTVHAHPTVGEAMKEAALAVNNQAIHMMNK

SEQ ID NO: 8302 - protein, 145 aa, Triticum aestivum
  unsure (1)..(145): unsure at all Xaa locations
MASSMISSPAVTTVXNRAGAGMVAPFTGLKSMAGFPTRKTNNDITSIASNGGRVQCMQVWPPVGKKKFETLSYLPDLDDAQLAKEVEYXLRKGWIPCLEFELEHGFVYREHNRSPGYYDGRYWTMWKLPMFGCTDASQVLKELQE

SEQ ID NO: 8303 - protein, 334 aa, Streptomyces avermitilis MA-4680
MWAWEVERPGPIEDGPLRFVERPVPVPGPGELLVRVRACGVCRTDLHVSEGDLPVHRPRVTPGHEVVGVVAGRGADAGGYAVGDRVGVAWLRRTDGTCRYCVRGAENLCPASEYTGWDTDGGYAEYTTVPAAFAYRLPTDVDDVALAPLLCAGIIGYRALVRASLPPGGRLGLYGFGGSAHLCAQVALAQGATVHVLTRDPASQRLALALGAASAGGAYDTPPEPLDSAILFAPAGGLVPVALRALDRGGVLSVAGIHLSDTPPLCYERELFYEKELRSVTSNTRADGREFLELAARYGVRATTHTYPLSEAQQALRDLKAGRFDGAAVLVNDV

SEQ ID NO: 8304 - protein, 443 aa, Clostridium magnum
MAKIVVMPKLGLTMTEGTLVTWKKAEGDQVKVGEIFFEVSTDKLTNEVEASDEGIVRKLLVNEGDTVECLKPVAIIGSADEDISSLLNGSSEGSESAEQNDTKAPKKEAEAPKGAVEKQQGKVKASPAAKKLAAENNIDITLVEGTGPQGRITTEDVEKYIEDSKNASKASPMASKVAAELNVDLSTIEKDGRIMKEDVLSLCKGNAPEECKVNPSEDKYTEKIVPMTQIRKIISARMHESWITSPTVTYDIKVDMTSLKRFKDALKDVCKVTYTDLIVKIVSKVLLQFPLLNCSINGNELITRNYVNMGVAVAIDGGLVVPVVKYANEKGLKEISTEVKDLAKKAKSNQLKPENMTGGTFTITNLGMFGIEYFSPIINQPEVAILGVNKITETPVVQNGEIVIKPLMNLSLTANHRAVDGSVAAQFLSKVKEYMEKPELLML

SEQ ID NO: 8305 - protein, 158 aa, Ustilago maydis 521
MVSLTTSDNEQFTVDRDVAERSVLIKQMLEDIGDTEQPIPLVNVSSNVLKKVLEYCSHHRNDPPAPADDAEESRRRTTDISDWDAKFIQVDQEMLFEIILAANYLDIKPLLDVGCKTVANMIKGKTTEEIRKLFNIQNDFSPEEEAQIRKENEWAEDR

SEQ ID NO: 8306 - protein, 189 aa, Dacrydium franklinii
DEHGEVVAEIRRSDLEPYLGLHYPATDIPQASRFLFMQNRVRMICDCSATPVQVIQSEELRQPLCLVGSTLRAPHGCHAQYMANMGSIASLVMAVVINGNDEEGAGTSGRSSMKLWGLVVCHHTSPRAVPFPLRYACEFLMQAFGLQLNMELQLAAQLTEKHILRTQTLLCDMLLRDAPIGIVTQSPSI

SEQ ID NO: 8307 - protein, 456 aa, Haemophilus somnus 2336
MTKHYDYIAIGGGSGGIASINRAASYGKKCAIIEAKYLGGTCVNVGCVPKKVMFYGAQVAEAIAKYAPDYGFDVTLNHFDFAKLVESRQAYIDRIHTSYNNVLAKNNVDVLNGFAKFFDAKTIEVSYANGEKELVTADHILIATGGRPSRPTIPGAEYGIDSDGFFALTELPKRIAVVGAGYIAVELAGVVNSLGAETHLFVRRQTPIRSFDPLIIETLVEVMKQDGIQLHTQAIPQEIIKNADNSLTIKLEDGRTQDVDCLIWAIGREPATDVINLASTGVETNERGFIKVDKYQNTNVEGIYAVGDIIEGGIELTPVAVAAGRRLSERLFNNKPDEHLDYHLVPTVVFSHPTIGTVGLTEPKAIEQYGAEAVKVYTSSFTPMYSAVTSHRQPCRMKLVCVGKEEKIVGLHAIGFGVDEMIQGFAVAIKMGATKADFDNTVAIHPTGSEEFVTMR

SEQ ID NO: 8308 - protein, 301 aa, Sinorhizobium meliloti 1021
MDRVRTVRKAVIPVAGNGTRFLPATKAVPKEMLTIVDRPVVQYAVDEARQAGIEHIVFVTSRNKQVIEDHFDDAPELISSLSRSGKSAQISELEAMLPAAGSVSFTRQQAPLGLGHAVWCARDLIGDEPFALLLPDMVSFGARGCVAGLMDLYHEVGGNVVGVEQCAPEEASKYGIVGKGETVRHGFSVTEMVEKPAAGKAPSNYYLNGRYILQPEIFSILAHQTRGAGNEIQLTDGMLTLSQSQSFHAHPYEGRTFDCGSKQGFIEANVAFALARADIGDIVFESVRDMVLSHESRIRAA

SEQ ID NO: 8309 - protein, 836 aa, Chloroflexus aurantiacus
MPVYRPADRMVLPPVDAEKYQTVCHYCIVGCGYHVYKWPEGRSGGLLPDQNALGVDFTKQVAPLSGDWIAPDHHTVITERDGRRFHIAIVPDKECVVNKGHHSGRGGTLGSSLYRPDGPTHVRLTHPLVYRATEQSPTTWDDAIDLAARVIYGSILRDGNNSIFMKIFDHGGGGGGFENNWAVGKFFFNAVQTINCSIHNRPAYNSEVHASRDMGVPELNFAYVDAELSDTIVLWGANSYETQTNFYLVHMLPNLQGTTVKAKQDARPGEQVGPGRIIVIDPRRTATVVVSERAAGKDRVLHLQLNPGTDIALANAIARVVYERGWHDKDFVANRVEAETVQPFLEQSLQIGKSLDEVLAEAEQITGLSRAQIEQAASWIAETKSDGSRPRSIFLYEKGVIWGMKNYQNIGSIVNLALLTGNFGKPGTGCGRLGGHQEGYVRPGYPGPRPAPYIDDLLSQGQGNVFYVVGCNPAVTTLNAQRMRETLQTRGKLVRDAIDASFGADNATKAQAILDAISQGGLFIIVQDIYPIETARYAHVVFPAAAWGESPITSINGERRLRLYEKFMDPPGIAEPDWKIFGMLAQRIKALAQADGNADIAQRFSGFEWQTAEEVFLEGGQSFADGVKASTERYKGVDYAFLKAAGNNGIQTPVTIVNGQPQGRVRYFENGEPFYTESGKAKMLPTPWPGFPAIVQEQINKYPYFLTNGRNNNWQTFYNDLNIPFHAERVPLSYIEINPQDAQREGIQPGDIVQLYNDYGETTAYAVVSNSVKPGLIFMLFAHPRSTANSLTTPYVDPEVIIPYYKGSAVGLRRLGRLADFDARLTYQPTNFEPVV

SEQ ID NO: 8310 - protein, 238 aa, Avena sativa
IENKISRQVTFAKRRNGLLKKAYELSLLCDAEDALIIFSGRGRLFEFSSSSCMYKTLERYRTCNYNSQEAAPLVENEINYREYLKLKTRVEFLQSSQRNILGEDLGPLSMKELDQIESQIDVSLKHIRSRKNQVLLDQLFDLKSKEQELQDQNKDLRKKLQEMSCGENAVHMSWQDGGGQSSSSGQAVDPYPGPLQHPEHDSSMQIGYHQTYMEQLBNEDHTASHHPNAQPGSSAGWI

SEQ ID NO: 8311 - protein, 448 aa, Pyrobaculum aerophilum str. IM2
MPKWHWPISPDDVPKIVVEPPGPKALEIVKRDEELIMQSFARWYPLVIARGYGPVVEDVDGNLYVDFNSGIAVTNVGHAHPKVVEAIKRQAELFLHYSLTDFYYEIAVKLAERLVSIAPISGRKKVFFTNSGTESVEGVLKIARGYFKGQRPYVIAFLGAFHGRTYGSMSLTASKPVHRRHFSPLVPNVIHAPYPHPVRCPFKASDPEECGEYALAFIEDWIFKRLVDPSEVSLVIIEPIQGEGGYVVPPKNFIQGLRKLTQKHGILFAVDEVQTGFGRTGKWFAVEHFGVEPDLIATAKAIAAGLPLGAIIGRAEVMSLPRGAHANTFGGNPVAAAAALASIEVIEEEGLLHHAQTLGEELKKFFKDEVGEKHDVRGLGLMIGIELLDERKKPAGYLDEVLLKAFKRGVAVIGAGISTVRVAPPLVIPRDMALRAAALITEILRRYR

SEQ ID NO: 8312 - protein, 192 aa, Dacrydium franklinii
DDHGEVISEIRKSDLEPYLGLHYPATDIPQASRFLFMKNRVRMICDCQAPPIRVVEGKRLPRELNLCGSTLRAPHGCHAQYMSNMGSIASLVIAVIVNEKDEEEGDSEGQHQQKGKRLWGLVVCHHTSPRFVPLPLRYACEFLMQVFGIQLNKEVELAAQTREKHILRTQTLLCDMLLRDAPTGIVTRKPNI

SEQ ID NO: 8313 - protein, 222 aa, Chasmanthium latifolium
IENKISRQVTFAKRRNGLLKKAYELSLLCDAEVALIIFSGRGRLFEFSSSSCMYKTLERYRSSNYNSQEVKAPLDSEINYQEYLKLRTRVEFLQTTQRNILGEDLGPLSMKELEQLENQIEISLKHIRTRKSQVLLDQLFDLKTKEQELEDISKGLRKKLHETSGENALHISWEEGGHSGASGNAVEPYQGFQQHRENESSLQIGYRQQAYMEQLNNEDMED

SEQ ID NO: 8314 - protein, 225 aa, Danthonia spicata
IENKISRQVTFAKRRNGLLKKAYELSLLCDAEVALIIFSGRGRLFEFSSSSCMYKTLERYRTCNFNSQEAKAPLDSEINYQEYLKLKTRVEFLQTTQRNILGEDLGPLSSKELEQLENQIEISLKHIRTRKNQALLDQLFDLKSKEQELQDLNKDLRKKLQETSGENAVHISWEEGGHSGASGNAMEPSQGFLQHPENDSDLHMGYHQQAYMDHLNNEDMAAPHH

SEQ ID NO: 8315 - protein, 189 aa, Dacrydium franklinii
DDHGEVIAEMRRSDLEPYLGLHYPATDIPQAARFLFMKNKVRMICDCRGMPVKMIQSKKLEQPLSLSGSTLRAPHGCHAQYMANMGSVASLVMSVTINDNNGNDEDRENGGSRRLWGLVVCHHTSPRFVPFPVRYACEFLMQVFGIQLNKELELAAQLREKHILRTQTVLCDMLLRDAPVGIVTQNPNI

SEQ ID NO: 8316 - protein, 763 aa, Wolinella succinogenes
METTMTRRDFLKSAGAAGAAGLVWSQTIPGTLGALEKQEIKGSAKFVPSICEMCTSSCTIEARVEGDKGVFIRGNPKDKSRGGKVCARGGSGFNQLYDPQRLVKPIMRVGERGEGKWKEVSWDEAYTFIAKKLDEIKQKHGAHTVAFTARSGWNKTWFHHLAQAYGSPNIFGHESTCPLAYNMAGRDVFGGSMNRDFAKAKYIINMGHNVFEGIVISYVRQYMEAIENGAKVVTLEPRLSVMAQKASEWHAIKPGHDLPFVLGFMHTLIFENLYDKKFVQKYCTGFEELKASIEPCTPEKMALECDIPADTIKRLAREFAKAAPKAIFDFGHRVTFTPQELELRRAMMMVNALVGNIERDGGMYFGKNASFYNQFLGEEDPKAKGLKKPKTPAYPKVEVPRIDRIGEKDGEFFLANKGEGIVSLVPKATLNELPGVPCKIHGWFIVRNNPVMTQTNADTVIKALKSMDLVVCVDIQVSDTAWFADVVLPDTTYLERDEEFTAGGGKNPSFGIGRQKVVEPLGDAKPGWKIAKELSEKMGLGEYFPWKDIEDYRLQQVDGDLDLLAKLKKDGSASFGVPLMLQEKKSVAEFVKKFPGAASKVNEEGLIDFPKKIQLFSPKLEEVSGKGGLGYEPFKYKEEDELYFVQGKTPVRSNSHTGNVPWLNNLMEYDAIWIHPKTASKLGIKNGDAIELYNKFSSQKSKALITEGVREDTLFGYFGFGHVSKDLKRAYGKGVNSNALMPSFTSPNSGMDLHVFGVKVKKA

SEQ ID NO: 8317 - protein, 225 aa, Ehrharta erecta
IENKISRQVTFAKRRNGLLKKAYELSLLCDAEVALIIFSGRGRLFEFSSSSCMYKTLERYRSCNYNSQEAAPENEINYQEYLKLKTRVEFLRTTQRNILGEDLGPLSMKELEQLENQIVVSLKQIRDKKNQALLDQLFELKSKEQELRDLNKDLRKKLQETTGDNVLHMSWQDGGGQHSGSSGLTAEHHQGLLHHQDQGNHSLQIGYHQAYMDHLNNEAEMAGHN

SEQ ID NO: 8318 - protein, 229 aa, Eleusine coracana
LENKISRQVTFAKRRNGLLKKAYELSLLCDAEVALIIFSAGRGRLFEFSSSSCMYKTLERYRTCNFNSHEVKAPLDSKINYQDYLKLKTRVEFLQTTQRNILGEDLGPLSNKELEQLEKQIEISLTQIRSRKNQMLLVQLLDLKSKEQELQDLNKDLRKKCQLKKTCGENATHISWEEGGHSGTSRNANEPNQGFLQHAENNYSSLQIGYYQQAYMDQLNNQDIGAAHN

SEQ ID NO: 8319 - protein, 484 aa, Proteus mirabilis
  unsure (1)..(484): unsure at all Xaa locations
MEKKKLTTAAGAPVVDNNNVITAGPRGPMLLQDVWFLEKLAHFDREVIPERRXHAKGSGAFGTFTVTHDITKYTRAKIFSEVGKKTEMFARFSTVAGERGAADAERDIRGFALKFYTEEGNWDMVGNNTPVFYLRDPLKFPDLNHIVKRDPRTNMRNMAYKWDFFSHLPESLHQLTIDMSDRGLPLSYRFVHGFGSHTYSFINKDNERFWVKFHFRCQQGIKNLMDDEAEALVGKDRESSQRDLFEAIERGDYPRWKLQIQIMPEKEASTVPYNPFDLTKVWPHADYPLMDVGYFELNRNPDNYFSDVEQAAFSPANIVPGISFSPDKMLQGRLFSYGDAHRYRLGVNHHQIPVNAPKCPFHNYHRDGAMRVDGNSGNGITYEPNSGGVFQEQPDFKEPPLSIEGAADHWNHREDEDYFSQPRALYELLSDDEHQRMFARIAGELSQASKETQQRQIDLFTKVHPEYGAGVEKAIKVLEGKDAK

SEQ ID NO: 8320 - protein, 180 aa, Glycine max
EFPHIPPIPSDSGITFNEQPLMIALQIAEKARDAILSGKFDQVRVNLPNGDMVGHTGDIEATVVACKAADAAVKMILDAIEQVGGIYVVTADHGNAEDMVKRDKSGKPLLGKDGKIQILTSHTLEPVPIAIGGPGLAPGVRFRNDVPTGGLANVAATVMNLHGFEAPSDYETTLVEVVDN

SEQ ID NO: 8321 - protein, 455 aa, Kluyveromyces lactis
MMMKWTHHRPNTGVSMSQPKIFRKKRQESRYHGGSQSRYQPNRPNNHHNTAGNVNVNRSLGKRNPRGKFNRPSNGPETSGSRFEGHGSIPRGPRAMGSSAESAGDSHSRNIFGKKPLALISFQDVKSSFQPLAQVGEGTYGKVYKAENVHTGKLIALKRLRLEQERDGFPITSIREIKLLQQLNHPNISLIHEIIVSDKNTISMGFQYMENDLSGMLMDKSIQFSDSNIKHLMKQLFVGLQYLHQQQIVHRDIKGSNLLIDNRGNLKITDFGLAKKLTDVSSPASNTNRVITHWYRPPELLLGATDYKYEVDCWGCGCLLVELFAGAAIFPGSNEVDQFQRILSIMGSPTLEQWPKMLDMPWWFMLVPQISKTYKNVFFDEFSKVPQDALDLASKLLRYDQDTRFTTTEALQHHYFTNEPKPQPLLLGPEFKGSHEYEVKKIRRKERERQKETTV

SEQ ID NO: 8322 - protein, 289 aa, Porphyromonas gingivalis W83
MKGIILAGGSGTRLYPITRGVSKQLLPVYDKPMIYYPLSTLMLAGIRDVLIISTPQDLSMFQRLLGDGRDLGVRLEYAEQPSPDGLAQAFIIGREFVGDDCACLVLGDNIFYGHGFSQMLRSAVADAEKGMATIFGYYVNDPERYGVAEVDATGKVISLEEKPEKPKSNYAVVGLYFYPNDVLDVAADVKPSARGELEITSVNQEFMLRKQLRLQQLGRGFAWLDTGTHESLTDASVFVSVIEKRQGLKIACLEEIAYNNGWLTKEDLARVAEPMKQNQYGKYLLGLIK

SEQ ID NO: 8323 - protein, 765 aa, Anabaena variabilis ATCC 29413
MRIDLESPNINVTSLKEAPIHLSGQIQPHGVLLVLEEPDLKILQVSNNTWSILGIKTEDILQKKLEDLLDSFQIERIQAGLSSGNLEFINPTKIWIRKKGDDYAVFDAVFHRNTEGFLILELEPAITQENIPFLSFYHLAKASINQLQKTANLRDFCQIIVQEVRKVTDFDRVMLYKFDDDGHGSVIAEEKLDSLEPYLGLHYPESDIPKPARKLFISNSIRVIPNAQAQAIQMIPSVNPVSDRPVDLTNSILRSAANCHLEYLHNMGVGASLTISLIKDNKLWGLIACHHLSAKYVSYELRKACEFLGRVIFAEISAREETEDYDYRMNLTHIQSLLVEYMSQEDNFVDGLVKHQPNLLDLTSAQGAAVCFGDHCTLIGETPKAEDLVFLVQWLKNNVEEEVFYTDSLPQVYPDAERYKNVASGLLAIPISQRNYVLWFRPEVIQTVNWGGDPNQPFEVNKLDGNVRLCPRKSFELWKETVRLTSLPWRYVEIKAALELRKAIVNIVLRQADELAQLAQDLERSNAELKKFAYVASHDLQEPLNQVANYVQLLEMRYQDELDADANEFITFAVEGVSLMQTLIDDVLAYSKVDTQAIAFQLTEVEKALDKALGNLRQRIAETGATITHDPLPTVMAGSTQLMQLFQNLIANAIKFHSQEAPQIHIGAERLEDEWLFSVRDNGIGIDPQFSDRIFVIFQRLHTRDEYHGTGMGLAICKKIIECHRGRIWVESQLGEGATFYFTIPVGGRERERRNGRKTQNNLFS

SEQ ID NO: 8324 - protein, 704 aa, Microbulbifer degradans 2-40
MTPKKIGVLLVVALCVCAFFYFDLDRYIAVGLMRDWVAQSPVMASTIFALLYFMVAALSLPGTGAMTLLAGAVFGLWWGFLLVSFASTIGATVNMLVSRLLLRDWVTRRFRTSLERVNEGVEREGSFYLFSIRLIPLVPFFVVNPVFGLTNMRATTFYWVSQVGMVPGTLLYVNAGVALGALDSISMGAIFTPQIIGSLVLLALFPWVAKAIVEAVKRKRTLAKYKKPKHFDANLIVIGAGSGGLVAAYIAAAVKAKVILVEKDLMGGDCLNTGCVPSKALIKAAKVAHQTRNAQHLGINAQPEIDFAKVMQHVKGAVKQIEPHDSVERYTSLGVDCVQGEAEIISPYEVRVNGKVLAAKNIIVATGAAPSVRPIEGLDTINYLTTDTVWNLTQLPNRLVIAGGGPIGCEMAQAFARLGSQVTVVQRGDQLLPKEDADVAEFALNTLRNEGVEVLLNAELTAVAAGEGKSVLTISQNENTQHLECDQLLLALGRTPRLQGFGLENIGVAISEQGKLLVDRFLRTSIPTVYACGDVIGPYQFTHAASHQAWYASVNALFGGFKSFSVDYSALPWVTFTDPEIARVGASEMDLKKRGVHYEVTRYSLVELDRAIAEGEAHGFVKVLTEEGKDRILGAVIVGSHGGEMITEFVSAIKHGKGLNAILGTVHSYPTWSEANKAAAGKWKQAHAPQRLLQWVEKFHRWQR

SEQ ID NO: 8325 - protein, 398 aa, Psychrobacter sp. 273-4
MFERIDYYAGDPILGLMDKFAADNNPDKVNLGVGVYYDEDGKMPVLECVKTAEQRIADPISPRPYLPMAGLPGHRKGCQELLFGKDAQVLQDGLVATIATIGGSGALKVGAEFIHEWFPQSKCYVSDPTWGNHIAIFEGSDVEVGKYPYYDTATGGIKFDEMIAFFETLNKDDVLLLHPCCHNPTGVDLTREQWDQVLNVIQARELIPFMDIAYQGFGEDMDSDAYAIRKAVDMGLPLFVSNSFSKNLSLYGERVGGLSVVCPTVDETNRVFGQLNSMVRRIYSSPPSHGGRVVDIVMNDEALHEQWVGEVYAMRDRIKSMRTKLKSVLEEKISGRNFDYLTAQNGMFSFTGLTPEQVAQLQSKYGIYMVSNSRMCVAGLNSSNIDYIANAMVDVLKD

SEQ ID NO: 8326 - protein, 308 aa, Agrobacterium tumefaciens str. C58
MANINSRGGHRSCADQKGKVMKGIILAGGSGTRLHPMTLAVSKQILPVYDKPMIYYPLTTLMLAGIREILIISTPHDMPLFQNLLGDGSKWGLSIEYAVQPSPDGLAQAYMIGADFVAGSPSCLILGDNIYYGHGLPDLLESGTSVNDGATVFAYHVNDPERYGVVHFDSEMRALSIEEKPLKPKSNWAVTGLYFYDADVVDIAANLKPSPRGEYEITDVNRVYLDRGKLKVSIMGRGYAWLDTGTPDSLLEAGEFVRTLEKRQGFKIACPEEIAMTKGFITHADFALLAENAGKGDYGVYLRKLAAP

SEQ ID NO: 8327 - protein, 281 aa, Shigella flexneri
MSQTSTLKGQCIAEFLGTGLLIFFGVGCVAALKVAGASFGQWEISVIWGLGVAMAIYLTAGVSGAHLNPAVTIALWLFACFDKRKVIPFIVSQVAGAFCAAALVYGLYYNLFFDFEQTHHIVRGSVESVDLAGTFSTYPNPHINFVQAFAVEMVITAILMGLILALTDDGNGVPRGPLAPLLIGLLIAVIGASMGPLTGFAMNPARDFGPKVFAWLAGWGNVAFTGGRDIPYFLVPLFSPIVGAIVGAFAYRKLIGRHLPCDICVVEEKETTTPSEQKASL

SEQ ID NO: 8328 - protein, 524 aa, ASPERGILLUS NIDULANS FGSC A4
MSFLLRKLVHNEAMRTDPREIYGWRVYALACSACFGGMLFGVETGIIGGVLTMDTFKAKYGLNELGDTGRANLSANIVSTLQAGCFFGALAASWVADKYGRRLGLIAASFVALVGVIMQVAASGHLEAMYIGRLLCGIGVGFASMVNPLYVSENAPRAIRGGLTGLYQLFITMGIMLAFWINYGSLLHISGAGQYLVPLAMQGLPAILLLVGMLLCNESPRWLAKQDRWEEARATLSRVRNLPSTHPYVENEFQDIVRQLEFERQLISGSSFVDLLKEMWFIPGNRKRALISIWLMICQQMTGTNAINYYAPQIFENLGITGSANGLFATGVYGIVKVVGCACFLVFVADSLGRRRSLLWTSIAQGLAMLYIGLYVRIAPPKEGEPVIPAGYFALVCIFLFAAFFQFGWGPVCWIYVSEIPTTRLRSLNVSFAAATQWLFNFVVARAVPNMLATVGANGYGAYIIFACFCFSMFVFVWFFVPETKGLSLEKMDDLFGISHGSTKESADESPAEKQEEIRIEKTA

SEQ ID NO: 8329 - protein, 303 aa, Haemophilus somnus 2336
MALIKEIKMKVIIPVAGLGTRMLPATKAIPKEMLTLVDKPLIQYVVNECVNAGIKEIVLVTHSSKNAIENHFDTSFELETMLEQRVKRQLLDEVRSICPTGVTIMHVRQGNAKGLGHAVLCGRAIVGKEAFAVVLPDVLLAEFDSNQKTENLAAMLKRFKETGNSQIMVSPVPDKDISSYGIVDCGGVTLNVGESVKISNIIEKPSFEDAPSNLSVVGRYVFSATIWDLLEKTPVGVGNEIQLTDAIGMLIEKEIVEAFHMTGKAFDCGDKIGYMQAFVEYGLQHPQLGENFKTYLKQLVQDL

SEQ ID NO: 8330 - protein, 192 aa, Gnetum gnemon
DDHGEVISEIRRSDLEPYLGLHYPATDIPQASRFLFLRNRVRMICDCYAQPVKVIQDKKLSKDLSFCGSTLRAPHGCHSQYMANMGSVASLVLAVIVNEREEEEGDSENQVEQKGRKLWGLVVCHHTSPRFVPFPMRYACEFMMQVFSIQLNKEVELAFQVREKHILRTQTLLCDMLLRDAPLGIVTQKPNI

SEQ ID NO: 8331 - protein, 389 aa, Bifidobacterium longum DJO10A
MTTQHPDTPETGITPGGTSGAFRDVLSKDHARRGKPPLHFVDMTPEQRVEKAAELGLPKFRVKQLANHYFGHFDVNAAEFTDFPAAKRSEAAAAFFPQLITEVTRQVADEGTTIKTLWKLFDGSLIESVLMRYPTRTTLCISSQVGCGMGCPFCATGKLGLTRNMSTGEIIEQVRVAAKMMRDGEVAGGEGRLSNIVFMGMGEPMGNYNSVLSAVRQISAMPPEGFGISARNITVSTVGVVPGIKKLTAEGIPVRLAVSLHAPSDELRDELVPMNKRFNTAQVLDAAHDYWLASKRRVSIEYALMRGINDQAEHAQLLAKRLNHYGDNWAHVNPIPLNPIEGSKWTASKPEDEQRFLEILHRAGITATLRDTRGQDIDGACGQLAAKER

SEQ ID NO: 8332 - protein, 510 aa, Zea mays
MAALTSALLFAALLVAAQYVLRLLHSFLWVPFRLERRFRRQGIRWPPRSLVSGNAADYRDLLAAARSAPLSSFRHNGVVARATPQYAVWLARYGRPFVYWFGPRPRLVISDTELVKAVMTDSTGGFDKAASGGNNPLARQLIGEGLVGLSGETWARHRRVISPAFNMERVKAWIPEIAAAASPVLDKWEAEGGSRTEFEIDVHKAFHTLSADVISCVAFGSSYEEGKRIFQLQEEQMQLALLAMRTVYIPGFRFVPTKKNRKRQRLNQEIQCSLRKLIEINGTKCEDSKNLLGLMLSASKAGSEYKMGIEEIIHECKTFYFAGKETTANLLTWATLLLALHQEWQVKARDEVLKVCGKHEHPNAENLSDLKIVTMVLKETLRLYPPATFINRTATRDIKLGKLDIPAGTRLDFPIIHIHRDHEVWGMDAEEFNPSRFADGSSYHLGAYFPFGIGPTICVGQNLAMVEAKVALAMTLQRFAFTVSASYAHAPMLVFTLQPQFGAQVLVRKI

SEQ ID NO: 8333 - protein, 235 aa, Leersia virginica
LENKISRQVTFAKRRNGLLKKAYELSLLCDAEVALIIFSGRSRLFEFSSSSCMYKTLERYRSCNYNSQDAAAPENEINYQEYLKLKTRVEFLQTTQRNILGEDLGPLSMKELEQLENQIEVSLKQIRTRKSQALLDQLFDLKSKEQQLQDLNKDLRKKLQETSAENVLYMSWQDGGGHSGSATVLAADQPHHHQGLLHPHPEGDHSLQIGYHHTHHHHQAYMDHLNNEADMVAHH

SEQ ID NO: 8334 - protein, 703 aa, Lycopersicon esculentum
  unsure (1)..(703): unsure at all Xaa locations
MGFHHIIIIRFVFSILLGWLSSSVEATNSTKCNQYCGAAGSYSPRVSYPFGFSEGCGIRLDCTESTGEIRIGEYIIQNVTSETLMVNFSMNCSRPIEDLQQFDRTNFGMTWRNGLLLHNCKVPKSECTIPSEILSTRLNIQSCDSKKENVSCYSEARADYLDYQKLKNTGCGTVISSILIGMDNDTMKSSAMFIEFQTMELAWGLEGDCACHNDANCTNVSLPGNRKGFRCRCKDGFVGDGFSDGDGCRKVSRCNPSRYLSGRCGGTTRIGVLVGGIIAGAGLMAALAVLCYCIRRRSASLKKRMSARRLLSEAAGSNSVHVFQYKEIERATNSFSEKQRLGIGAYGTVYAGKLHSDEWVAIKKLRHRDPDGVEQVMNEVKLLSSVSHPNLVRLLGCCIENGEQILVYEFMPNGTLAQHLQRERSSGLPWTIRLTIATETAHAIAHLHSAMNPPIYHRDIKSSNILLDYNFNSKVADFGLSRFGMTDDSHISTAPQGTPGYVDPQYHQNYHLSDKSDVYSFGVVLVEIITAMKVVDFSRSHSEINLAALAIDRIGKGRVDEIIDPFLEPHRDAWTLSSVHRVAELAFRCLAFHRDMRPSMTEVADELEQIRLSSWASLEDXVCMTSSVNSSCSSPRRRSETSFLCSTTKKGVGSRRLIVPLPLENSLALVEEIKNSSPVSVQDPGLSEESPPSPNRLLGNSGR

SEQ ID NO: 8335 - protein, 346 aa, Mesorhizobium loti MAFF303099
MMPSDPGVLVLAPVGRDAKVASAILAQNDITSHICATLDEAVPLLDQAQCFLVTEEALISSDRNRFASWLNHQPAWSDFPIVLLTMRGTEIDKRLAFLDRYLIVLERPFLASSLANSVRSALRARTRQLEVKSYIEQKQEVADRQKLLIRELHHRVKNTLANVRAMMGATAKSSGSVDDFVRDFSARIVSLADTHSMLTDDYWQMASLHKLLESELRHYDTSDRSRVVLEGPNVALVADIAIPIGMAFHELASNSSKYGALSRPHGRLEVRWSLSNSGDVRILNLEWLEMGGPKVEPPRRHGFGTTLLEKVVTVQCQAKVELNYRPDGLRFTMALPLRDTRLVPAY

SEQ ID NO: 8336 - protein, 395 aa, Neisseria meningitidis MC58
MNTLLNQLKPYPFARLREAMQGISAPEGLEAVPLHIGEPKHPTPKVITDALTASLHELEKYPLTAGLPELRQACANWLKRRYDGLTVDADNEILPVLGSREALFSFVQTVLNPVSDGIKPAIVSPNPFYQIYEGATLLGGGEIHFANCPAPSFNPDWRSISEEVWKRTKLVFVCSPNNPSGSVLDLDGWKEVFDLQDKYGFIIASDECYSEIYFDGNKPLGCLQAAAQLGRSRQKLLMFTSLSKRSNVPGLRSGFVAGDAELLKNFLLYRTYHGSAMSIPVQRASIAAWDDEQHVIDNRRMYQEKFERVIPILQQVFDVKLPDASFYIWLKVPDGDDLALARNLWQKAAIQVLPGRFLARDTEQGNPGEGYVRIALVADVATCVKAAETIVSLYR

SEQ ID NO: 8337 - protein, 192 aa, Ginkgo biloba
DDHGEVVAEIRRSDLEPYLGLHYPATDIPQASRFLFMKNRVRMISDCLAPPVKVIQDKGLPRDLSLCGSTLRASHGCHAQYMSNMGSIASLVLAVIINEKEDEEGDSEGPQQQKGRKLWGLVVCHHTSPRFVPFPLRYACEFLMQVFGIQLNKEVELAAQLREKHVLRTQTLLCDMLLRDAPMGIVTQIPNI

SEQ ID NO: 8338 - protein, 294 aa, Trichodesmium erythraeum IMS101
MTETTAKVRKAVIPAAGFGTRMFPVTKVVKKELFPIIDKDGRAKPIIQIIIEEAISGGIEEVGVVVQESDRQIFTDYFQGVPSYYEKLSPEKQEYCQYLQNLGNKITFLTQEQQAGYGHAVFCAKDWVRDEPFLLLLGDHLYTSEVTKSCTSQFLQVYEQTNKSVLGVRIIPGTEIHHYGCIGGTLVADSLINIDTIYEKPDLNYAREKLHVLGMKKEHFLGVFGIYVLTARIFDYLEENIKQNAREKGEFQLTSCLDKLQKAEGMTGYLVKGRCFDTGMPDVYWQTMIDFRNA

SEQ ID NO: 8339 - protein, 225 aa, Lithachne humilis
IENKISRQVTFAKRRNGLLKKAYELSLLCDAEVALVIFSGRGRLFEFSSSSCVHKTLERYRSCNYNTQEANAPVENEINYHEYLKLKTRVDFLQTNQRNILGEDLGPLSMKELEQLDNQIETSLKQIRSRKNQVLLDQLFDLKSKEQELQDINKDLRKKLQETNGDQKVVHINSWQDGGQGSSSGHAIEPYQGLIQHPENDPSMQIAYHQVYMDQLNHEDMAAQH

SEQ ID NO: 8340 - protein, 222 aa, Panicum miliaceum
IENKISRQGTFAKRRNGLLKKAYELSLLCDAEVALIIFSGRGRLFEFSSSSCMYKTLERYRSSNYSSQEVKTPLDGEINYQDYLKLKTRVEFLQTTQRNILGEDLGPLSMKELEQLENQVEISLKHIRTRKNQMLLDHLFDLKSKEQELQDLNKDLRKKLQETNAENVLHVSWEEGGHSGASGNAIEPYQGFLQHPENDPSLQIGYHQQAYMDQLNNEDMAD

SEQ ID NO: 8341 - protein, 187 aa, Ginkgo biloba
DDHGEVVAEIRRSDLEPYLGLHYPATDIPQASRFLFMKNRVRMICDCCAPPVKVIQDKKLPQPLSLFGSTLRAPHGCHIQYMANMGSIASLVMSVTINENDDDNGQQQKGRKLWGLVVCHHTSPRFVPFPLRYACEFLMQVLGIQLYKEVELAAQLREKHILRTQTVLCDMLLRDAPVGIVAQTPNI

SEQ ID NO: 8342 - protein, 130 aa, Zea mays
FAPDANSQIVPAFAIPDGWMGLDIGPDFVASFNAALDTTKPVFWKGPMGVFEFDKFPVGTEAVAKKLAELSGKGVPTIIGGGDSVPPVEKVGVADVMSPISPGGGASLELLEGKELPGVVALNEPPPGPV

SEQ ID NO: 8343 - protein, 222 aa, Pennisetum glaucum
IENKISRQVTFAKRRNGLLKKAYELSLLCDAEVALIIFSGRGRLFEFSSSSCMYKTLERYRSSNYGSQEVKTPSDGEINYQDYLELKTRVEFLQTTQRNILGEDLGPLSMKELEQVENQIEISLKHIKDKKNQMLLNQLFDLKSKEQELQDLNKDLRKKLQETNAESVLHLSWEEGGHSGTGGNAIEPYQGFLQHPENDPSLQIGYHQQAYIDQLNNEDMAD

SEQ ID NO: 8344 - protein, 192 aa, Triticum aestivum
MATPRTMRAVQYDKYGGGAEGLKHVEVPVPSPKKGEVLLKMEAASINPIDWKIQKGMLRPFLPGKFPFTPVGDLAGEVVELGSGVTNFKPGDKVISISFPSGGGLAEYAVAPASLTVARPPEVSAVEGACLPAAGGSALQLLKLAGVSFDGTSGTTGPKNVLVTAAFGGVGHYAVQLAKLAGLHVTATCGAR

SEQ ID NO: 8345 - protein, 295 aa, Xylella fastidiosa Dixon
MTQRKGIILAGGAGTRLYPITQGIGKQLLPVYDKPMIYYPLSVLMLAGIRQVLVITMLHEQPLFQRLLGDGTQWGMEICYAVQASPDGVAQSYLIGRAFVDDKPSCLILGDNIFYGHGLTDTLCHADARTVGATVFGYWVSDPERYGVAEFDGDGRVINIEEKPAQPRSNYAVTGLYFYDGRAPAFAAELTPSARGELEITDLNRRYLAEGALYLEALGRGFAWLDTGTHQSLQDASNFIGTIQTRQGLQVCCPEEVAFWKGWIDATHLERLAAPLAKNAYGQYLLNLAQRGRSL

SEQ ID NO: 8346 - protein, 222 aa, Setaria italica
IENKISRQVTFAERRNGLLKKAYELSLLCDAEVALIIFSGRGRLFEFSSSSCMYKTLERYRSSNYGSQEIKTPLDGEINYQDYLKLKTRVEFLQTTQRNILGEDLGPLSMKELEQLENQIEIFLKHIRTRKNQMLLDQLFDLKSKEQELQDLNKDLRKKLQETNAESVLHVSWEEGGHSGTSGNAIEPYQGFLQHPDNDPSLQIGYHQQAYMDQLNNEDMGD

SEQ ID NO: 8347 - protein, 484 aa, Pseudomonas fluorescens PfO-1
MSQNKTLTTASGAPVADNQNSRSSGPRGPLLLDDFHLIEKLAHFNRENIPERRVHAKGSGAYGTFTVTRDITQYTSAKLFSAVGKQTPTFLRFSTVGGERGSADTERDPRGFALKFYTEEGNWDIVGNNTPVFFIRDPLKFPDFIHTQKRLPQSNLKSAQMMWDFWSHSPEALHQVTILFSDRGIPDGYRHMHGFGSHTYSLISAQGERHWVKWHYKTKQGIKNLAPADAARLAGTDPDYAQRDLFEAIERGDFPKWSVCIQIMTEAQAAAHYENPFDVTKTWSQKEFPLIEVGELELNRNPLNYFAEVEQAAFGPSNMVPGVGLSPDRMLQGRVFAYADAHRYRVGTNHQQLPVNAPRSPVNTYQRDGSMAFGSNGGAAPNYEPNSYVESPKQAPHYAEPALALSGAADRYDHREDSDYYSHAGALFRLMSDEQKALLVSNIAGAMGGVSSDVIDRQLQHFYKADPAYGEAIAKLLNVQLNEV

SEQ ID NO: 8348 - protein, 466 aa, Vibrio cholerae O1 biovar eltor str. N16961
MGQKNHFDVIVIGSGPGGEGAAMGLTKGGKNVAIIEKESSVGGGCTHWGTIPSKALRHAVSRIIEFNSNPLFCKNNSSIHATFSTILSHAKSVIDKQTRLRQGFYDRNQCTLIFGAAHFIDAHTVAVKKADGSIDTYSADKFVIATGSRPYHPKDVDFGHPRIYDSDSILNLEHDPRHIIIYGAGVIGCEYASIFRGLDVKTDLINTRDRLLSFLDNEVSDALSYHFWNSGVVIRNDETYDKVEGTSDGVIVHLKSGKKMRADCLLYANGRTGNTDKLNLESVGLQADSRGQLVVNANYQTQVEHIYAVGDVIGYPSLASAAYDQGRFVAQAIIHGQAAHLLTEDIPTGIYTIPEISSVGRTEQELTAAKVPYEVGRASFKHLARAQIAGKDIGSLKILFHRETKEILGIHCFGERAAEIIHIGQAIMEQKGEANTIEYFVNTTFNYPTMAEAFRVAALNGLNRLF

SEQ ID NO: 8349 - protein, 297 aa, Glycine max
  unsure (1)..(297): unsure at all Xaa locations
ARELSSLNALQNLSTMKENVQHLISSGIAGSLLQLLFSVTSVLMTLREPASAILARIAQSESILVNEDVAQQMLSLLNLSSPIIQGHLLEALNNIASHPGASKVRSKMKEKGALQLLLPFLKENTTKVRSKVLQLLYTLSKDLTDELTEHLDETHLFNIVNIVSTSTLDSEKAAAVGILSNLPARSNSSTTNSFLTESIASVIIRFTISSDKKLQXXXAEQGAGAVSPLIQLLEDTEREVVEAALHALSTLLQDEIWEGGVNSIAKLSGVQAIXXXLQVEDAKVQXXAIWMLERIFK

SEQ ID NO: 8350 - protein, 164 aa, Zea mays
RLVQTQQADTRKPAFRWLGQAKRKQDNNVMVSVPPSMKAMPNKRAFGTDLTNIDNKRGKLDSAAENKVKLMQGAGNIVKTFERQLVQGKRSDFVYGPFHPAGAKKHETDDQTVKQQERKNIQDWENLAVSFRPQYQNQALNDLFGHYVEAWKSWYVDLTQETAS

SEQ ID NO: 8351 - protein, 463 aa, Triticum aestivum
  unsure (1)..(463): unsure at all Xaa locations
MAATIQSVKARQIFDSRGNPTVEVDVCCSDGTFARAAVPSGASTGVYEALELRDGGSDYLGKGVSKAVDNVNSIIAPALIGKDPTAQTELDNYMVQQLDGTKNEWGWCKQKLGANAILAVSLAVCKAGASVKKIPLYQHIANLAGNKQLVLPVPAFNXSSMGGSHAGNKLAMQEFMILPTGAASFKEAMKMGVEVYHNLKSVIKKKYGQDATNVGDEGGFAPNIQENKEGLELLKTAIEKAGYTGKVVIGMDVAASEFYNDKDKTYDLNFKEENNDGSQKISGDSLKNVYKSFVSEYPIVSIEDPFDQDDWVHYAKMTEECGEQVQIVGDDFLVTNPTRVAKAIKEKSCNALLLKVNQIGSVTESIEAVKMSKHAGWGVMTSHRSGETEDTFIADLAVGLSTGQIKTGAPCRSERLAKYNQLLRIEEELGAAAVYAGLKFRAPGGAILDGTCIRDMITLHLFL

SEQ ID NO: 8352 - protein, 480 aa, Streptococcus pneumoniae TIGR4
MPIQNKTMLITYSDSLGNNLKDLYDNLEEHFGDAIGGVHLLPFFPSTVDRGFAPVDYDEVDSAFGDWEDVKRLGEKYYLMFDFMINHISRQSKYYKDYQEKHEASEFKALFLNWDKFWPENRPTQSDVDLIYKRKDRAPKQEIVFEDGSVEHLWNTFGEEQIDLDVTKEVTMEFIRKTIQHLASNGCDLIRLDAFAYAVKKLDTNDFFVEPDIWDLLDKVRDIAAEYGTELLPEIHEHYSIQFKIADHDYYVYDFALPMVTLYTLYSSRTERLAKWLKMSPMKQFTTLDTHDGIGVVDVKDILTDEEIDYASNELYKVGANVKRKYSSAEYNNLDIYQINSTYYSALGDDDVKYFLARLIQAFAPGIPQIYYVGLLAGKNDLKLLEETKEGRNINRHYYSNEEIAKEVQRPVVKALLNLFSFRNRSEAFDLEGTTEIETPTAHSIVIKRQNKDKSVTAVVEIDLQNQTYRVIENGVEVSF

SEQ ID NO: 8353 - protein, 168 aa, Glycine max
MIFSPSVTTVNRAGAGVVALFTGLMSMAGFPTENTNSDITYIASNCGRVQCVRVWPPFGKKKFETLFYLPDLDDAQLAREVIYLLRKGWIPCLEFELEHGFVYREHNRSPVLYYGLYWTMWKLSMCGCSDASHVLRDLLDAKSAYPCGFMRIIICHNVTQVHRISFIV

SEQ ID NO: 8354 - protein, 492 aa, Hevea brasiliensis
MDPYKNLPSNAYNCSFWTTNSGAPVWNNNSSLTVGARGPILLEDYHLLEKLANFDRERIPERVVHARGASAKGFFEVTHNVSQLTCADFLRAPGVQTPVIVRFSTVIHERGSPETIRDPRGFAVKFYTREGNFDLVGNNFPVFFIRDGMKFPDVVHAFKPNPKSHIQESWRIFDFLSHVPESLHMLTFLFDDLGIPQDYRHMEGSGVNTYTLINNAGKVHCVKFHWKPTCGVKCLLEEEAIKVGGSNHSHATQDLYDSIAAGNYPEWKLYIQTMDPDHEDKFDFDPLDVTKTWPEDILPLQPVGRLVLNKNIDNFFAENEQLAFCPGIVVPGISYSEDKLLQTRIFSYSDTQRHRLGSNYLQLPVNAPKCAHHNNHHDGFMNFMHRDEEVNYFPSRCDPVRHSERFPIPSTICSGRRDKCVIEKENNFEQPGERYRSWAPDRQERFLNRMVGCLSDPRITHELRSIWISYWTQCDRSLGQKLAFRLNVRPSI

SEQ ID NO: 8355 - protein, 722 aa, Psychrobacter sp. 273-4
MIKKIVLIFAVLIGVIGFFYFDLNELLTLEGLKGSMDQFEQYKTQSPWLVIGGFFVVYILVTALSLPGAVILTLAAGALFGLVQGILVASFASSIGATLAFLTSRYLLRDTIKQRFPDRLASIDSGVKKEGGFYLFTLRLVPIFPFFLINLLMGLTAIKVRTFYWVSQIGMLAGTFVFVNAGTQLAKIEQLSGILSFNLLASFALLGLFPLIAKGILTILKKRRIYKNHTKPKKFDRNMIVIGAGAGGLVTSYIAATVKAKVTLIEAGEMGGDCLNYGCVPSKALVKSAKVVEQIRHGKRYGLNNTQPDFAFKNIMSRIHEVIADIAPNDSVERYTSLGVEVLKGYAKLIDPWTVEIALNDGGTQTLTARSIVIATGARPFVPDLPGLEETGYVTSDTLWDKFAKFDKVPSKLVVLGGGPIGCELAQSFARLGSAVTQIERGARLMKKEDVDVSVFAQEALTESGVNILTSQQAIRCETRNGKKYIIVAPKGGNDDQQETAIEYDELICAVGRSARLEGYGLDTLGIDTERTISTDEYLETLYPNIYAAGDIVGPYQFTHVAAHQAWYAAVNGLFGHLKKFKVDYRVIPWSTFIDPEVARVGLNEQEAINKGIDFEITRYDFKDLDRAVTESANHGFIKVITPKGKDKILGVTIVAEHAGDLMAEFVLAMKHNLGLNKILGTIHIYPTWAEGNKYAAGEWKRNHAPKKALQLLEKYHTWRRG

SEQ ID NO: 8356 - protein, 380 aa, Fragaria x ananassa
MSSTEGKVICCRAAVAWEAGKPLVIEEVEVAPPQANVVRVKILYTSLCHTDVYFWEAKGQNPLFPRIYGHEAGGIVESVGEGVTDLKAGDHVLPVFTGECKECDHCKSEESNMCDLLRINTDRGVMLNDGKSRFSIKGKPIYHFVGTSTFSVYTVTHVGCLAKINPQSPLDKVCILSCGISTGLGATLNVRKPKKGSTVAVFGLGAVGLAAAEGARMAGASRIIGVDLNSNRFEEAKKFGITEFVNPKDHKKPVQEVIAELTNGGVDRSIECTGNIQAMIPAFECVHDGWGVAVLVGVPHKDAVFTTHPMNFLNERTLKGTFFGNYKPRTDIPSVVEKYMNKELEVDKFITHQLPFSQINKAFDYMLKGEGIRCIITMEE

SEQ ID NO: 8357 - protein, 193 aa, ASPERGILLUS NIDULANS FGSC A4
MAEIRRKLVIVGDGACGKTCLLIVFSKGTFPEVYVPTVFENYVADVEVDGKHVELALWDTAGQEDYDRLRPLSYPDSHVILICFAVDSPDSLDNVQEKWISEVLHFCQGLPIILVGCKKDLRHDPKTIEELNKTSQKPVTPEQGEEVRKKIGAYKYLECSARTNEGVREVFEAATRAALLTKTHKSKKKCSIL

SEQ ID NO: 8358 - protein, 127 aa, Sorghum bicolor
MGKGRAPCCAKVGLNKGSWTPEEDMRLIAYIQKYGHANWRALPKQAGLLRCGKSCRLRWINYLRPDLKRGNFTADEEETIIKLHAMLGNKWSKIASCLPGRTDNEIKNVWNTHLKKPVFPACGWERT

SEQ ID NO: 8359 - protein, 145 aa, Hyacinthus orientalis
NLGDSRAVLGRKGSDGRAVAERLTSDHNVALEEVRKELTDNHPDDSHIVVYTRGVWRIKGIIQVSRSIGDVYMKKPDFSRDPLFQQFAAPIPLKRAVMTAEPAVRMQKLTPHDLFLIFASDGLWEQITDEAAVEIVFKSPRAGVA

SEQ ID NO: 8360 - protein, 186 aa, Bdellovibrio bacteriovorus HD100
MIRCPLLSQNEISSHTHAAPLRRFPMKKHLYDFTVKAANGQPVSLDQYRDKVVLVVNVASKCGYTPQYKGLEELYQQNKDNGLVILGFPCNQFGAQEPGSNEEIQQFCELNYGVSFPVMGKVDVNGGNADPLYQWLKEEAPGLLGTEMIKWNFTKFLVGKDGAVLKRFAPKDEPKDIADDIKKALA

SEQ ID NO: 8361 - protein, 733 aa, Desulfovibrio vulgaris subsp. vulgaris str. Hildenborough
MWCYAPHDDVLRHASGHHAPCDHSRHDVGHTAEERMAERRSVYSVCGMCSVRCPIMVDVEDGKARWIQGNPHSALKGALCARGAAGIALENDPERPLRPLIRVGARGEGKWREASWDEALDHIASRLKIVTAEHGGRSILWSDRGGPFMDLHQAFVRGLGSPNYCNHDASCARNVQHACRSVTGMGRKEVVYDFRNCKHIVLQTRNILEAINVGEANAVLDALGNGCRLSVIDIRATVSSSKAHDFFMVRPGTDYAFNLAVINVLIGEKLYDAAYVERHVDGFDALSTFVAPYTPAWAEGETGIAAAAITDFARKLAEAAPHVVWHPGWMTARYNDSFMVSRTAYIINALMGAIGAKGGLPLANTAKDVGRKGLKKFVDLLPKPDEKRADGVGWRHTQFDAGPGIVNFAYDAIESGDPYPVKAYICYRHDPLMAMPDPDTLRRKLDHLDLLVSVTFSWSDTAWFADVVLPLSTYLSRESVVAHKGGLKPQFFVRKRAMQPVADSRAEWEIISGLSRRLGIDALAFDSIEDMWNYQLDGTGVSIADFDAKGFVELADKPLYRDIEGFTFPTPSGKIEMVSGKWAKAGLDTLPPYVSPAHPPQDGFRVAFGRCALHTQGHTVNNPLLHEQMPENTAWMHPTRAAALGIACGDLVEVFSARGSAGIMPVTVTPYVHPEALFMIHGFGHRLPVESRAYGRGVADQDLMPGGLSVYDKSGGCVSLQEHFVTVRKAGVR

SEQ ID NO: 8362 - protein, 438 aa, ASPERGILLUS NIDULANS FGSC A4
MPISKIHARSVYDSRGNPTVEVDVVTETGLHRAIVPSGASTGQHEAHELRDGDKSKWLGKGVLTAVKNVNETIGPAVIKENLDVKEQSKIDEFLNKLDGTPNKSNLGANAILGVSLAIAKAGAAEKGVPLYAHISDLAGTKKPYVLPVPFQNVLNGGSHAGGRLAFQEFMIVPDTASSFSEGLRQGAEVYHKLKALAKKKYGQSAGNVGDEGGVAPDIQTAEEALDLITEAIEQAGYTGKIHIAMDVASSEFYKPEEKKYDLDFKNPDSDPSKWLTYEQLADLYKSLAAKYPIVSIEDPFAEDDWEAWSYFYKTSDFQIVGDDLTVTNPLRIKKAIELKSCNALLLKVNQIGTLTESIQAAKDSYADGWGVMVSHRSGETEDVTIADISVGLRSGQIKTGAPARSERLAKLNQILRIEEELGENAVYAGQNFRKSVNL

SEQ ID NO: 8363 - protein, 223 aa, Arabidopsis lyrata
MRIRRREEKENQEYKKGLWTVEEDNILMDYVLNHGTGQWNRIVRKTGLKRCGKSCRLRWMNYLSPNVNKGNFTEQEEDLIIRLHKLLGNRWSLIAKRVPGRTDNQVKNYWNTHLSKKLVGDYSSAVKTTGEDDDSLPSLFITAATTSCHHQQENVYENIAKRFDGVVSASYEDKPKQELAQNDVLMATTNDPSHYYGNNALWVHDDDFELSSLFTRNDEFCFW

SEQ ID NO: 8364 - protein, 190 aa, Triticum aestivum
MSGGGGAYSDTESSESDGDMDEFVLVKLAEIRKEVQCPICLGIIRKTRTVMECLHRFCRDCIDKSMRLGNNECPACRTHCASRRSLRDDPNYDALIATLYPDIDKYEEEELAFGEEERTRNKKVKFICWVITNSYSTVFHIFSCSIYLPSHFYFIIDITFLMEESSHPRGDDSKSSPEALGKRLRKNFLC

SEQ ID NO: 8365 - protein, 390 aa, Thermotoga maritima
MEKMTIRDVDLKGKRVIMRVDFNVPVKDGVVQDDTRIRAALPTIKYALEQGAKVILLSHLGRPKGEPSPEFSLAPVAKRLSELLGKEVKFVPAVVGDEVKKAVEELKEGEVLLLENTRFHPGETKNDPELAKFWASLADIHVNDAFGTAHRAHASNVGIAQFIPSVAGFLMEKEIKFLSKVTYNPEKPYVVVLGGAKVSDKIGVITNLMEKANRILIGGAMMFTFLKALGKEVGSSRVEEDKIDLAKELLEKAKEKGVEIVLPVDAVIAQKIEPGVEKKVVRIDDGIPEGWMGLDIGPETIELFKQKLSDAKTVVWNGPMGVFEIDDFAEGTKQVALAIAALTEKGAITVVGGGDSAAAVNKFGLEDKFSHVSTGGGASLEFLEGKELPW

SEQ ID NO: 8366 - protein, 225 aa, Magnaporthe grisea 70-15
MSNFTSTLHPYYPLGIAIPDYKANTISTREIFAIFATACSGALLLALFFIRAVRPQISTGELSRALWFMLCGSIHLVLEGHFALNHVAGSNAVLSQLWKEYSLSDSRYLTRDAFMVCMETITAFAWGPLSFLLVYLIATAHPAQHFVQTVVSLGQLYGDVLYYATFFHEELLRGIEFSRPEGYYFYGYMVLMNAFWIVIPGLLLAQSGLATVQAFARAGKMAKRD

SEQ ID NO: 8367 - protein, 537 aa, Escherichia coli
MKQKITDYLDEIYGGTFTATHLQKLVTRLESAKRLITQRRKKHWDESDVVLITYADQFHSNDLKPLPTFNQFYHQWLQSIFSHVHLLPFYPWSSDDGFSVIDYHQVASEAGEWQDIQQLGECSHLMFDFVCNHMSAKSEWFKNYLQQHPGFEDFFIAVDPQTDLSAVTRPRALPLLTPFQMRDHSTRHLWTTFSDDQIDLNYRSPEVLLAMVDVLLCYLAKGAEYVRLDAVGFMWKEPGTSCIHLEKTHLIIKLLRSIIDNVAPGTVIITETNVPHKDNIAYFGAGDDEAHMVYQFSLPPLVLHAVQKQNVEALCAWAQNLTLPSSNTTWFNFLASHDGIGLNPLRGLLPESEILELVEALQQEGALVNWKNNPDGTRSPYEINVTYMDALSRRESSDEERCARFILAHAILLSFPGVPAIYIQSILGSRNDYAGVEKLGYNRAINRKKYHSKEITRELNDEATLRHAVYHELSRLITLRRSHNEFHPDNNFTIDTINSSVMRIPRSNADGNCLTGLFNVSKNIQHVNITNLHGRDL

SEQ ID NO: 8368 - protein, 418 aa, Methanocaldococcus jannaschii DSM 2661
MESYIQNLFAERIGGKKFGKEDVIYKFEKIKRAKQEAMKRHPDMELIDMGVGEPDEMADPEVIRVLCEEAKKWENRGYADNGIQELKDAVPPYMEKVYGVKDIDPVNEVIHSIGSKPALAYITSAFINPGDVCLMTVPGYPVTATHTKWYGGEVYNLPLLEENDFLPDLESIPEDIKKRAKILYLNYPNNPTGAQATKKFYKEVVDFAFENEVIVVQDAAYGALVYDGKPLSFLSVKDAKEVGVEIHSFSKAFNMTGWRLAFLVGNELIIKAFATVKDNFDSGQFIPIQKAGIYCLQHPEITERVRQKYERRLRKMVKILNEVGFKARMPGGTFYLYVKSPTKANGIEFKTAEDFSQYLIKEKLISTVPWDDAGHYLRLAACFVAKDENGNPTTEEKYEDMVLEEFKRRLEGMDLEFE

SEQ ID NO: 8369 - protein, 136 aa, Zea mays
MGAKAAHRRGVLDLEAQFAFFRSQHRHPVNAAAHVLLTWPILFTNLLILHFLPLPLPVSPALALALAYAAAYLAVDRRAGAVAGLLFLAAWAASRALAARLGFALSWKLVLVTQLFCWTWQFLGHGLFEASDTNSN

SEQ ID NO: 8370 - protein, 211 aa, Crocosphaera watsonii WH 8501
MGGIFMSSPIYWQDAKEYLRSNDAILADIIALYPSETMINYHDAFLTLVKAIIGQQISVSAANAINQRVESLLGEITPENYLETDPQLLRKCGLSRQKIAYITNITQGFKDGILTPQAWSEMTDKAVIAQLTSIKGIGPWTAQMFLIFHLHRRDIFPLADLGLINAIQLHYGSEKALSKGEIKELSQRWKPYRTVATWYLWRSLDPVPVQY

SEQ ID NO: 8371 - protein, 885 aa, Sinorhizobium meliloti 1021
MAQEVKTTCPYCGVGCGVIARVGDDGAVSVKGDPEHPANFGRLCSKGSALAETLDLDGRLLHPEIGGRRAGWSEALDLVAERFSRSIAEHGPDSVAFYVSGQLLTEDYYIANKLMKGFIGSANIDTNSRLCMSSSVAGHRRAFGSDTVPGAYEDLELAELVVLTGSNLAWCHPVLYQRLSAAKANRPEMKIVVIDPRRTMTADIADMHLAIAPDGDVALFNGLLAHLAASGAVDRNYISNYTSGFDEAVAAASRLDLPALSTATGLTVAQLRAFFRLFETTEKVVTCYSQGVNQSAAGTDKVNAIINCHLATGRIGRPGMGPFSLTGQPNAMGGREVGGLANMLAAHMDIEKSLHRDQVRRFWGAPSVASKPGLKAVDMFRAVADGRIKALWIMATNPVVSMPDADAVEAAIKACPFVVVSDIVRDTDTARHAHVLLPSLGWGEKDGTVTNSERRISRQRPFLAAPGEARPDWWQLAEVGRRMGFAAAFTHGSPAVIFAEHAALSGFENEGRRDFDISAHAEIDGPAYDGLRPFQWPQPQGSAPQKKRFFAEGAFYHPDGRARLVAVEVPRPRSANDAFPFTLNTGRVRDHWHTMTRTGKSARLSGHLAEPFVEIHPRDAQGAGISDADLVTLESPHGAAIVRALVTDRQAEGNLFVPMHWNDQFASKARIDALVAPVTDPVSGQPASKNMPVRASRFAAAAYGFAVSARKPRELDAAYWALARAEGGWRVELAFAETNADWLDWCRKTFAIAAGIEPIGYTDRTSGELRLAFFEGDRLLATLFLSPRPVAVARSWAVSQLGASHHNLAKRFAVTAGRPGADTPDPGATVCSCFSVGVNQITAAVRDGCHSVEAVGERLSAGTNCGSCRAEIRGIINGCLTLAAE

SEQ ID NO: 8372 - protein, 178 aa, Clostridium tetani E88
MEVAMEEKARNILITKEEIQQKVEAMGKKISKDYEGKNLYVLSLLRGSFMFTSDLVRYITVPTRIGFMTTSSYGHGEVSTGKVKVVNDIPDDIKGMDVLIVDDIVDTGITMDFVKNHVKSLGANSVKSCVLLDKPERRKLDLVPEYCCFSIPDVFVVGYGLNYGDFYRNIPYIFNWEE

SEQ ID NO: 8373 - protein, 588 aa, Brassica napus
MSLPETKSQTLLDAWDFQGRPADRSKTGGWASAAMILCIEAVERLTTLGIGVNLVTYLTGTMHLGNATAANTVTNFLGTSFMLCLLGGFIAHTFLGRYLTIAIFAAIQATGVSILTLSTIIPGFQPPRCPTTSSHCVQPSGIQLTVLYLALYLTALGTGGVKASVSGFGSDQFDETEPKEQSQMTYFFNRFFFCINVGSLLAVTVLVYMQDDVGRKWGYGLCALAIVLSLSIFLAGTNRYRFKKLIGSPMTQVAAVIVAAWWNRRLELPSDPSFLYDLDDVIAAEGSMKSKQKLPHTNQFRSLDKAAIKDQEMAMTQNVYNKWTLSTVTDIEEVKQIVRMLPIWATCILFWTVHAQLTTLSVAQSETMDRHIGSFEIPPAAMAVFYIGGLLLTTAVYDRLAIPLCKKLFNYPHGLRPLQRIGLGLLLAAMGMAVAALVEIKRLRTAHAHGPTVKTLPLGFSLLIPQYLIVGIGEALIYTGQLDFFLRECPKGMKTMSTGLLLSTLALGFFFSSVLVTIVEKVTDKAHPWIADDLNKGRLYNFYWLVAVIVALNFLVFLVFSKWYVYKEKRLADLGIELEDEPDIPMGH

SEQ ID NO: 8374 - protein, 429 aa, Mycobacterium leprae [sequence omitted]

SEQ ID NO: 8375 - protein, 187 aa, Triticum aestivum
  unsure (1)..(187): unsure at all Xaa locations
SLPLTKEKAAFSPSDPAMQRHVASGRPSGTDGSDFSYRMVVESRYQRVAEGRSRLARLILVQALHLVAGGLLLLLSLSKGAAVNKFAVLSMAAGFLAIVVGELGRXRTMAVLLRLXTSLSSIAVAFSVXCIIRSELFLKVMKQNTEAITSYEMLDAVRVALGILLQMVVIATTTRLLQNMSPPKRAS

SEQ ID NO: 8376 - protein, 173 aa, Flaveria trinervia
MASIPATVAAVPQTNMVAPFTGLKANAAFPVTKKVNGFSTLPSNGGRVQCMKVWPPVGKKKYETLSYLPELTEAQLAKEVDYLLRNKWVPCLEFELEHGFVYRENASSPGYYDGRYWTMWKLPMFGCTDSAQVMKELQECKKEYPQAWIRIIGFDNVRQVQCVSFIASKPTGF

SEQ ID NO: 8377 - protein, 250 aa, Glycine max
MSRRYDSRTTIFSPEGRLYQVEYAMEAIGNAGTAIGILSKDGVVLVGEKKVTSKLLQTSTSTEKMYKIDDHVACAVAGIMSDANILINTARVQAQRYAYAYQEPMPVEQLVQSLCDTKQGYTQFGGLRPFGVSFLFAGWDKNFGFQLYTSDPSGNYGGWKAAAIGANNQAAQSILKQDYKDDITREEAVQLALKVLSKTMDSTSLTSEKLELAEVFLSPAGKVKYQVCSPENLTKLLVKFGVTQPAADTA

SEQ ID NO: 8378 - protein, 477 aa, Pseudomonas aeruginosa UCBPP-PA14
MNSPALPLSRGLRIRAELKELLTLAAPIMIAQLATTAMGFVDAVMAGRASPHDLAAVALGNSIWIPMFLLMTGTLLATTAKVAQRYGAGDQPGTGPLVRQALWLALLIGPLSGAVLWWLSEPILGLMKVRPELIGPSLLYLKGIALGFPAAALYHVLRCYTNGLGRTRPSMVLGIGGLLLNIPINYALIYGHFGMPKMGGPGCGWATGSVMWFMFLGMLFWVNKASIYRASQLFSRWEWPDRATIGPLVAVGLPIGIAVFAESSIFSVIALLIGGLDENVVAGHQIALNFSALVFMIPYSLGMAVTVRVGHNLGAGLPRDARFAAGVGMAAALGYACVSASLMLLLREQIAAMYSPDPAVIAIAASLIVFSALFQFSDALQVTAAGALRGYQDTRVTMIMTLFAYWGIGLPVGYSLGLTDWFQEPTGPRGLWQGLVVGLTGAAIMLCIRLARSARRFIRQHERLQREDAAAASVLGR

SEQ ID NO: 8379 - protein, 178 aa, Glycine max
  unsure (1)..(178): unsure at all Xaa locations
MASSMISSPAVTTVNRAGAGMVAPFTGLKSMAGFPTRKTNNDITSIASNGGRVQCMQVWPPVGKKKFETLSYLPDLDDAQLAKEVXYLLKKGWIPCLKFQLXHGFMYREHNMSPXYYYGHYWTMXKLPIFGCTDTSQVLKDLQXAKTAYLNNFIHIIXFNIIHQLHIIIFITYXPSYF

SEQ ID NO: 8380 - protein, 722 aa, Moorella thermoacetica ATCC 39073
MLEQKITRRTFLKGSLAAGALATFGGKLIPIEPAKAAAAGQAETRVVPTLCEMCGVKCGVLAHVRDGRVWRLTGNPRDPQSGGRLCARGNAGTKTLYDPDRLKGPMKRVGEGQFQPISWEQAFQEIGSKLKELKEQYGPQSLVWLAHPELISPLEKHFMAAFGSPNYTGHGPTCYSSRNVAFEQMYGGVPGVDYRNVRYYIAFGRNLTGGIKNPDVQKIVAAKAEGAHLVAVDPRLSDFAYFADEWLPIRPGTDLAMVLAMINVLINENLYDAAFVAAYTTGFEELKKGVSGYTPAWAAGITGIEAGTISRIARELAAAKPAAAVDPGWHAVTGSQYGNSVQAGRAIAALNALLGNLGARGGLSLPPTIKLGSPAGIMGPKPPAATAPRWDGAGSEKWPLNKDHGMIQTFPERVKQDQPYPVKAVIIQHLNPVRSSTDSLAFIEALKKLDLVVAIDIQMNDTAYYAHYILPEATYLERYDPLMTVGNKVLLRQPAIKPLFDNKGAEEIIAGIGRAAGLSEYFNFTLEQYNDALLGPLGLTQAQLALTGVAEVEASKPDYSKLKTPSGKIELACPAFVKAGSTLTPAWEPPLVEPRDDSFRLIQGHVPMHTHTTTDNNSYLHAIMPENELWIHTSRAGKLGIKTGDLVEVASKVGKVRVKARVTEAIHPEAVFLAHGFGCRVPLRHLAYNRGANGGDLIPIMTAPVSGAAAQCETLVTVRKAG

SEQ ID NO: 8381 - protein, 314 aa, Zea mays
  unsure (1)..(314): unsure at all Xaa locations
MALAILARRRAAAAVLRRPQTAAGAAVSAWRAYAAAGEESDVVVVGGGPGGYVAAIKAAQLGLKTTCIEKRGTLGGTCLNVGCIPSKALLHSSHMYHEAKSSFAHHGVKFSNLEVDLPAMMAQKDKAVAGLTKGIEGLFKKNKVTYVKGFGKLSSPSEVSVDLIDGGSTIVKGKNIIIATGSDVKSLPGITIDEKKVVSSTGALCLSEIPKKLVVIGAGYIGLEMGSVWNRLGSEVTVVEFAPDIVPSMDGEVRKQFQRMLEKQKFKFMLKTKVVGCDTSGDGVKLTLEPAAGXQQTILEADVXLVSAGRSPLL

SEQ ID NO: 8382 - protein, 367 aa, Eremothecium gossypii
MLRQKLFQGSRRWLASVRQPSIGRYAGKPNAAGKYTVSFIEGDGVGPEISQSVKDIFSAASVPVEWEYCDVTPLLVNGLTTIPEPAVASINKNLVALKGPLATPIGKGHRSLNLTLRKTFGLFANVRPAKSIEGYKTTYSDVDLVLIRENTEGEYSGIEHVVSPGVVQSIKLITREASERVIRYAFEYARTVGRPKVVVVHKSTIQRLADGLFVNVAQELGREYPDIELQTELLDNTVLNVVTKPEAYKDVVAVCPNLYGDILSDLNSGLSAGSLGLTPSANIGHQVSIFEAVHGSAPDIAGQNRANPTALLLSSVMMLNHMGLHEHAGRIEKAVLSTIASSRENRTADLAGTASTSSFTNAVIERL

SEQ ID NO: 8383 - protein, 425 aa, Magnetococcus sp. MC-1
MADKSKNGVANLNEAIRQSLILVLAGGRGSRLKNLTDTEAKPAVPFAGKFRIIDFALSNCVNSGMRRVGVLTQYRAHNLIQHVQRGWGSFRAEFDEFVEVWPAQQQTAAESWYSGTADAVYQNIDLIESHHPKYVVILGGDHIYKQDYSVMLDHHITSGAQVTVACLEVPVAEAREFGVMDVDEQDQIVKFLEKPQTPPELPNRPGWALASMGIYIFDHELLVEQLERDALLEDSSHDFGKDLIPYLVPKVKVMAHRFSHSCVGLDGKKEPYWRDVGTLDAYWEANMDLTHVTPELDLYDPKWPIWTYQVQRPAAKFVFNDDSRRGYAVDSLVSAGCVVSGSAVERSLLFTDVRVNSYSFVSDSVILSHADIGRKCTLIKCIVGPNTVIPDGMVIGKDPQLDAQRFYRTEGGVTLVTQEHIDKLK

SEQ ID NO: 8384 - protein, 233 aa, Glycine max
MKLSVFHHQHHPMILNCPLTLTRTHKRLYNNGSYRWLPCHCSHSSTNKIAAEPVTVSLSIEGRRALLSCLLTTVVGVYACDVAGAVSTSRRALRGAKIPESDYTTLPNGLKYYDLKVGNGAEAKKGSRVAIHYVAKWKSITFMTSRQGMGVGGGTPYGFDVGQSERGTVLKGLDLGVQGMRVGGQRLLIVPPELAYGSKGVQEIPPNSTIELDIELLSIKQSPFGTPVKIVEG

SEQ ID NO: 8385 - protein, 457 aa, Lactobacillus brevis
MRKVSTGFVYFFGALGGLLFGYDTGVISGAILFIQKQMNLGSWQQGWVVSAVLLGAILGAAIIGPSSDRFGRRKLLLLSAIIFFVGALGSAFSPEFWTLIISRIILGMAVGAASALIPTYLAELAPSDKRGTVSSLFQLMVMTGILLAYITNYSFSGFYTGWRWMLGFAAIPAALLFLGGLILPESPRFLVKSGHLDEARHVLDTMNKHDQVAVNKEINDIQESAKIVSGGWSELFGKMVRPSLIIGIGLAIFQQVMGCNTVLYYAPTIFTDVGFGVSAALLAHIGIGIFNVIVTAIAVAIMDKIDRKKIVNIGAVGMGISLFVMSIGMKFSGGSQTAAIISVIALTVYIAFFSATWGPVMWVMIGEVFPLNIRGLGNSFASVINWTANMIVSLTFPSLLDFFGTGSLFIGYGILCFASIWFVQKKVFETRNRSLEDIEATLRAKTGEDAAELSTTK

SEQ ID NO: 8386 - protein, 267 aa, Triticum aestivum
  unsure (1)..(267): unsure at all Xaa locations
MAFAVSDELLGTFVPIAVYWLYSALYNVLDALGTVDCYRLHPKEDEETRNIPSKRTVLRGVLLQQAVQVAVSLIVFKITGDGRRDAREQPPAPVIALQFIVAMFAMDTWQYFVHRYLHTNKFLYKHXHAQHHTILVPYAFGALYSHPLEGLLMDTASGAVGFLASGMTPRTXLFFISLGAIKTVDDHCGLWLPGNVIHAVFANNSAFHNIHHQLYGQKHNFSQPFFVVWDKILGTYMPFTLQSREGGGVKARPVKHALAAHEQHKSD

SEQ ID NO: 8387 - protein, 445 aa, Hevea brasiliensis [sequence omitted]

SEQ ID NO: 8388 - protein, 445 aa, Hevea brasiliensis
MAITIVSVRARQIFDSRGNPTVEADVKLSDGYLARAAVPRGASTGIYEALELRDGGSDYLGKGVSKAVENVNIIIGPALVGKDPTDQVGIDNFMVQQLDGTVNEWGWCKQKLGANAILAVSLAVCKAGAHVKGIPLYKHVANLAGNKNLVLPVPAFNVINGGSHAGNKLAMQEFMILPVGASSFKEAMKMGAEVYHHLKSVIKKKYGQDATNVGDEGGFAPNIQENKEGLELLKTAIAKAGYTGKVVIGMDVAASEFYGSDKTYDLNFKEENNNGSQKISGDVLKDLYKSFVTEYPIVSIEDPFDQDDWEHYAKLTSEIGVKVQIVGDDLLVTNPKRVEKAIKEKACNALLLKVNQIGSVTESIEAVKMSKRAGWGVMASHRSGETEDTFIADLSVGLATGQIKTGAPCRSERLAKYNQLLRIEEELGAEAVYAGANFRTPVEPY

SEQ ID NO: 8389 - protein, 504 aa, Rhodopseudomonas palustris CGA009
MQSRRPVMLVILDGWGWREDPADNAVLQAKTPTFDALWTNGPHAFLRTSGKSVGLPNGQMGNSEVGHLNIGAGRVVMQDLPRISDAIANGEIERAPGLVAFIDKLKASGGTCHLMGLVSPGGVHSLQDHACALAKILAKAGVKTVLHAFTDGRDTPPKSAVDDIVRLRAELPPNVPIATVSGRYYAMDRDNRWERVSKAYGVIADADGPRFADANAVIADGYAAGVNDEFIVPAVIGDYQGMRDGDGVLCFNFRADRVREILAALLDSAFAGFPRKQVKQIAAAAGMTQYSTALDALMGTIFPPQSLVNGLGQVVADAGLHQLRMAETEKYPHVTYFLNGGEEVPYPGEDRIMVPSPKVATYDLQPEMSAPELGDKAVAAIESGKYDLIVLNFANPDMVGHTGSLPAAIKAVETVDTQLGHIVAAIRKAGGALLVTADHGNCEMMRDPETGGPHTAHTTNPVPVLLVGDNGPLADGQLSDLAPTLLKLMELPQPAEMTGKSLIG

SEQ ID NO: 8390 - protein, 494 aa, Zea mays
MDPTKFRPSSSHDTTVTTTNAGAPVWNDNEALTVGPRGPILLEDYHLIEKVAHFARERIPERVVHARGASAKGFFECTHDVTSLTCADFLRAPGVRTPVIVRFSTVIHERGSPETIRDPRGFAVKFYTREGNWDLLGNNFPVFFIRDGIKFPDVIHAFKPNPRSHVQEYWRVFDFLSHLPESLHTFFFLFDDVGVPSDYRHMEGFGVNTYTFVSAAGKAQYVKFHWKPTCGVRCILTDEEAALVGGRNHSHATQDLYDSIAAGSFPEWTLYVQVMDPDTEEQYDFDPLDDTKTWPEDLLPLRPVGRLVLDRNVDNFFNENEQLAFGPGLVVPGIYYSDDKMLQCRVFAYADTQRYRLGPNYLMLPVNAPRCAHHNNHYDGAMNFMHRDEEVDYYPSRHAPLRQAAPPTPLPPRPVAGRREKATIRKPNDFKQPGERYRSWDADRQDRFVRRFADSLGHPKVSQELRSIWIDLLAKCDASLGMKIATRLNMKPNM

SEQ ID NO: 8391 - protein, 311 aa, Oryza sativa (japonica cultivar-group)
MAKNTCKLCYRRFGNPRALAGHMRSHSVAASRSQISSTSSASTSVAVGDDDGGGDAKRPIQGYVLREKPKRRVRLAESDFSDRESETEYYSSPPHGKRANTGSGDVEQVSSVSDATSEEDVALSLMMLSRDTWPATPPPPPPYRLRGAGYDDGSDGGDAPPAPAAAAAQKRTRFQCPACKKVFRSYQALGGHRASHMRGGRGGCCAPPPNPPPSPATPLQPLPECDGGEEEGAKPHPHECPYCFRVFASGQALGGHKRSQLCSAAAAAASGDDIPAMIKSNGFIDLNLPAPFDDVELSAVSDPFLSSKPGS

SEQ ID NO: 8392 - protein, 169 aa, Brassica napus
MSEVEYRCFVGGLAWATGDAELERTFSQFGEVIDSKIINDRETGRSRGFGFVTFKDEKSMKDAIDEMNGKELDGRTITVNEAQSRGGGGGGGRGGGGYGGRGGGGYGGGGGGYGDRRGGGGYGSGGGGRGGGGYGSGGGGYGGGGGRRDGGGYGGGDGGYGGGSGGGGW

SEQ ID NO: 8393 - protein, 467 aa, Psychrobacter sp. 273-4
MIAKKALGLPLKGLRFAIKSGDTLIKTASTQVTRFKTRFDENKAKNSLDEMPVAKRNYASVSEQTELSTNADSIDMREFEFTKAPINWIPATILVATPIAAAIITPWYLFTHQVSAPVWGVFGAFMVWTGISITAGYHRLLSHRAYKAHPIVKNFLLLGSTFAVQGSAFDWVSGHRTHHRHVDDRLEDPYSAKRGFFFSHMGWMLRNYPSGKFDYKNIPDLTKDRTLQIQHKYYGLWVAALNVGAVAAIGWLLGDVWGTLVIVGLLRLVLTHHFTFFINSLCHMFGSRPYTDTNTARDNFFLAIFTWGEGYHNYHHFFQYDYRNGVKWWQYDPTKWLIAGLSKLGLTSELRTVDDTTIKHAEVQMQFKAAQQQIDTATSSGIDIPHAMKSFQDRIKFEYDAFTQTVEEWQALKAKTIELKKTEFADRLHEVEDELKNDYAKIEEKILAHNSNLKTAFRSIDKSAKAA

SEQ ID NO: 8394 - protein, 194 aa, Porphyromonas gingivalis W83
MEKLIFATNNPHKLNEIRHILEGKVEIVGLDEIGCREDIPETADTLQGNALLKAEFVHKRYGLPCFADDTGLEVEALDRAPGVHSARYAGEPTNADANVRKLLEALSSVPHPRKACFRTVIALIDDHGKHFFEGKIEGTIASECRGSGGFGYDPVFIPEGHTLSFAEMGEETKNQISHRALAVAQLRDFLLCAK

SEQ ID NO: 8395 - protein, 424 aa, Brassica oleracea
MATTPMCTEWQFSGNEAAKEAAAAALGAYTSKLMALCDPNGKPILPPSNKAVETSNSAEKAVVKFILSGTGNAYAPSIGLPLAKSAVAEYLNRDLPKKLTAADVFMTVGCKRAIDLAVDILAKPKANVLLPRPGFPWDVVRCIYKKLEVRYYDFIPEQNFEIDFESVKKVTDKNTFAIFIINPHNPNGNTYSEAHLKQLAELAKELSIMVVSDEVFRWTVFGNNPFVPMGKFSSIVPVVTLGSLSKGWNVPGWRTGWLALHDLDGVFRNTKILQAANEFLQINAKPPTVIQAAMPDILERTPKHFFHERGSFLKHKVDIGYSKVKHIPGLTCYMKPEACTFLWTKLDISCFADIEDDQDFCRKLAMEENLVVLPGIAFRQKNWLRHSIDMETQTVEDAFERLKSFCERHSAERGASLKNVNGVN

SEQ ID NO: 8396 - protein, 162 aa, Triticum aestivum
MGFPLVCYCVAIPKPVIAFCKLVAAVRDAFLLLLSLVGLCRSPRRSVDDAPLPEEVKERLPAVEFSLLARPAKQGCHDGDDDVAAAAATCIVCLERLRAADEVRRLGNCAHAFHRGCIDGWIDLGRTTCPLCRSHLLPRARRDGHARQPPHARLVTTNRATR

SEQ ID NO: 8397 - protein, 569 aa, Clarkia epilobioides
MASPALISETEAWKDLKAHLEGIKMTHLRELMGDTERCQSMMVEFDNIFLDYSRQQASPDTISKLYKLADAAHLKQKIDRMYNGDHINTTENRSVLHVALRAPRNSSICSDGKNVVPDVWNVLDKIKDFSDRVRNGSWIGATGKELKDVIAVGIGGSFLGPLFVHTALQTDPEASKNARGRELRFLANVDPIDVARNISGLNPETTLVVVVSKTFTTAETMLNARTLREWISSALGPSAVAKHMVAVSTNLPLVEKFGIDPNNAFAFWDWVGGRYSVCSAVGVLPLSLQYGFAVVEKFLQGAHSIDQHFSSAPFEKNIPVLLGLLSVWNVSFLGYPARAILPYSQALEKLAPHIQQVSMESNGKGVSIDGLPLPFESGEIDFGEPGTNGQHSFYQLIHQGRVIPCDFIGVVKSQQPVYLKGEVVNNHDELMSNFFAQPDALAYGKTPEELKKENVSEHLIPHKTFTGNRPSLSILLPTLDAYRIGQLLAIYEHRVAVQGFVWGINSFDQWGVELGKSLATQVRKQLHASRVKGEPVEEGFNFSTKTLLTRYLQATSDVPADPSTLLPNI

SEQ ID NO: 8398 - protein, 569 aa, Clarkia epilobioides
MATPALISETEAWKDLKAHLEGIKRTHLRELMGDTERSQSMMVEFDNIFLDYSRQQASPDTINKLYKLAEAAHLKQKIDRMNNGDHINSTENRSVLHVALRAPRNSVICSDGKNVVPDVWNVLDKIKDFSERVRNGSWVGATGKELKDVIAVGIGGSFLGPLFVHTALQTDPEASKNARGRELRFLANVDPIDAARNISGLNPETTLVVVVSKTFTTAETMLNARTLREWISSALGVSAVAKHMVAVSTNLPLVEKFGIDPNNAFAFWDWVGGRYSVCSAVGVLPLSLQYSFAVVEKFLQGAHSIDQHFSSAPFEKNIPVLLGLLSVWNVSFLGYPARAILPYSQALEKLAPHIQQVSMESNGKGVSIDGLPLPFESGEIDFGEPGTNGQHSFYQLIHQGRVIPCDFIGVVKSQQPVYLKGEVVNNHDELMSNFFAQPDALAYGKTPEQLKKENVSEHLIPHKTFTGNRPSLSILLPTLDAYRIGQLLGIYEHRVAVQGFVWGINSFDQWGVELGKSLATQVRKQLHASRVKGEPVEEGFNFSTKTLLTRYLQATSDVPADPSTLLPNI

SEQ ID NO: 8399 - protein, 249 aa, Microbulbifer degradans 2-40
MSDEQTTHFGYEKVDVKDKARRVAGVFHSVAAKYDIMNDVMSGGIHRIWKQFTIELSGVRSGHKVLDIAGGTGDLTKKFSRIVGPTGQVVLADINESMLNVGRDKLIDSGVAGNVVYTQADAQYLPFPDNTFDCITIAFGLRNVTDKDLAIASMLRVLKPGGRLLILEFTKPQNALVEKAYDFYSFKILPTMGQIIAQDADSYRYLAESIRMHPDQETLKGMMDAAGFAQTKYHNMTGGIVALHTGIKP

SEQ ID NO: 8400 - protein, 383 aa, Cytophaga hutchinsonii
MKLFDVYPLIPIEPVRALGSRLWDAAGTEYLDLYGGHAVISIGHSHPYYVQKITDQINKIGFYSNSVIISLQQELADKLGVVSGHNDYQLFLCNSGAEANENALKLASFHNGKKKIVAFKKGFHGRTSLAVAATDNPSIVAPVNETDNIIFLPWNDEAALEATFKSHGNEITAVIIEGIQGVGGIHEASMSMLKKIRTLCDEYNAVYIADSVQCGYGRSGKFYSHDFAGVSADIYSMAKGMGNGFPIGAISIAPYLKPKHGLLGTTFGGNHLACAAAIAVLDVIKQENLLEHTTQLGNYIIEQARKIQGVKEVRGKGLMIGIELEIPCAEIRNTLLSEHKMFTGSSSDKFTIRILPALNLKKADADAFLNALKAVLEKSLKSA

SEQ ID NO: 8401 - protein, 476 aa, Clarkia delicata
MATPALISETEAWKDLKAHLEGIKRTHLRELMGDTERSQSMMVEFDNIFLDYSRQQASPDTINKLYKLAEAAHLKQKIDRMNNGDHINSTENRSVLHVALRAPRNSVICSDGKNVVPDVWNVLDKIKDFSERVRNGSWVGATGKELKDVIAVGIGGSFLGPLFVHTALQTDPEASKNARGRELRFLANVDPIDAARNISGLNPETTLVVVVSKTFTTAETMLNARTLREWISSALGVSAVAKHMVAVSTNLPLVEKFGIDPNNAFAFWDWVGGRYSVCSAVGVLPLSLQYSFAVVEKFLQGAHSIDQHFSSAPFEKNIPVLLGLLSVWNVSFLGYPARAILPYSQALEKLAPHIQQVSMESNGKGVSIDGLPLPFESGEIDFGEPGTNGQHSFYQLIHQGRVIPCDFIGVVKSQQPVYLKGEVVNNHDELMSNFFAQPDALAYGKTPEQLKKENVSEHLIPHKLLGIYEHRVAVQG

SEQ ID NO: 8402 - protein, 127 aa, Clarkia delicata
KGEVVNNHDELMSNFFAQPDALAYGKTPEQLKKENVSEHLIPHKLLGIYEHRVAVQGFVWGINSFDQWGVELGKSLATQVRKQLHASRVKGEPVEEGFNFSTKTLLTRYLQATSDVPADPSTLLPNI

SEQ ID NO: 8403 - protein, 300 aa, Clostridium tetani E88
MMKGDIIMKVKKAVIPAAGLGTRFLPATKAQPKEMLPIVDKPTIQHIIEEAVASGIEEILIITGRNKRAIEDHFDKSVELEQQLKDTGKKDMLEMVEDISNMAEIYYIRQKEPKGLGHAINCARTFVGNEPFAVMLGDDVVYGDKPCLKQLIECYNEYKTTILGVQQVVREDVYKYGIVEGKHIENNVYKVKDLIEKPDVDEAPSNIAILGRYIITPKIFEILSTIEPGKGGEIQLTDALKKLSLQEAIYAYDFEGRRYDVGDKLGFLEATIEFALRKDEIKNDFEKYILGIAEQIQSEE

SEQ ID NO: 8404 - protein, 261 aa, Candida albicans SC5314
MPQNEYIEQHIKKHGRRLDYEERKRKKEAREGHRVAKDAQTLKGWRAKQFAKKRYAEKVAMKKKIKAHQESKVKGPSTPKAEDGEALPTYLLDRQTNNTAKAISSSIKQKRLEKADKFQVPLPKVKGISEEEMFKVIKTGKSKSKSWKRMITKHTFVGEGFTRRPVKMERIIRPAALRQKKANVTHPELGVTVFLPILGVKKNPQSPMYTQLGVLTKGTIIEVNVSELGLVTAGGKVVWGKYAQITNEPDRDGCVNAVLLV

SEQ ID NO: 8405 - protein, 320 aa, Vibrio vulnificus CMCP6
MIKKIGVLTSGGDAPGMNAAIRGVVRTALGAGLEVYGIYDGYLGLYEGRIKQLDRSSVSDVINRGGTFLGSARFPEFKEVAVREKAIENLKAHGIDALVVIGGDGSYMGAKKLTEMGYPCIGLPGTIDNDIAGTDYTIGYLTALNTVIESIDRLRDTSSSHQRISIVEIMGRHCGDLTLMSAIAGGCEYIITPETGLDKEKLIGNIQDGISKGKKHAIIALTELMMDANELAKEIEAGTGRETRATVLGHIQRGGRPTAFDRVLASRMGNYAVHLLMEGHGGRCVGIVKEQLVHHDIIDAIENMKRPVRNDLFKVAEELF

SEQ ID NO: 8406 - protein, 492 aa, Gossypium hirsutum
MDPYKHRPSSAFNSPFWTTNSGAPVWNNNSSLTVGPRGQYLLEDYHLVEKLANFDRERIPERVVHARGASAKGFFEVTHDISHLTCADFLRAPGVQTPVIVRFSTVIHERGSPETLRDPRGFAVKFYTREGNFDLVGNNFPVFFIRDGMKFPDMVHALKPNPKSHIQENWRILDFFSHHPESLHMFTFLFDDLGVPQDYRHMEGSGVNTYTLINKAGKAHYVKFHWKPTCGVKCLLEDEAIKVGGANHSHATQDLYDSIAAGNYPEWKLFIQTIDPDHEDKFDFDPLDVTKTWPEDILPLQPVGRLVLNKNIDNFFAENEQLAFCPAIVVPGIYYSDDKLLQTRIFSYSDTQRHRLGPNYLQLPANAPKCAHHNNHHEGFMNFMHRDEEINYFPSRYDPVRHAEMFPIPPAVCTGRREKCIIEKENNFKQPGERYRSWAADRQERFICRWVDALSDPRVTHEIRSIWISYWSQADKSVGQKLASLLNVRPSI

SEQ ID NO: 8407 - protein, 376 aa, Schizosaccharomyces pombe
IMAASRNVAMMVVGRFIVGYGIGLTSLIVPMYITELAPARLRGRLVIIYVVFITGGQLIAYSLNAAFEHVHQGWRIMFGIGAAPALGQLISLFWTPESPRYLLRHHHVEKVYKILSRIHPEAKPAEIAYKVSLIQEGVKVDFPEGNKFQHFFHSLKVLFTVPSNRRSLFIGCFLQWFQQFSGTNAIQYFSAIIFQSVGFKNSISVSMVVGATNFVFTIVAFMFIDRIGRRRILLCTSAVMIAGLALCAIAYHFLPADTTQNTHSGWQYVVIASIIIFLASYASGIGNIPWQQAELFPMEVRALGAGFSTAINWVGNLIISASFLTMMESITPTGTFALFAGFCFVGLVTSYFTYPELAGMFIENIHKLLEKGFWQA

SEQ ID NO: 8408 - protein, 297 aa, Rosa hybrid cultivar
MPSRLINWQVQFFGREWDFMDLYHLTLFLGVPFVCLLAPFQFTWGALWVAISLYLVSGMGVTISYHRNLAHQSFKVPKWLEYSLAYCAVLSLQGSPLEWVSTHRYHHQFTEKLRDPHSPNKGFWFSHLNWLFDYHSRFGSYDGQLMKNVGDLECQLYYRFLHYTYFLHSVLLGVALYVAGGLPFVIWGMGVRVVVISQVTFSINSICHTWGKQIWDTGDASKNNWLFGLLAFGEGWHNNHHAFEYSARQGLERWQIDTSWYVIKFFQVVGLATHVKLPTEIQKKRKALAKNSIMKDK

SEQ ID NO: 8409 - protein, 564 aa, Shigella flexneri
MSTLKITGMTCDSCAVHVKDALEKVPGVQSADVSYAKGSAKLAIEVGTSPDALTAAVAGLGYRATLADAPSVSTPGGLLDKMRDLLGRNDKTGSSGALHIAVIGSGGAAMAAALKAVEQGARVTLIERGTIGGTCVNVGCVPSKIMIRAAHIAHLRRESPFDGGIAATTPTIQRTALLAQQQARVDELRHAKYEGILEGNPAITVLHGSARFKDNRNLIVQLNDGGERVVAFDRCLIATGASPAVPPIPGLKDTPYWTSTEALVSETIPKRLAVIGSSVVALELAQAFARLGAKVTILARSTLFFREDPAIGEAVTAAFRMEGIEVREHTQASQVAYINGVRDGEFVLTTAHGELRADKLLVATGRAPNTRKLALDATGVTLTPQGAIVIDPGMRTSVEHIYAAGDCTDQPQFVYVAAAAGTRAAINMTGGDAALNLTAMPAVVFTDPQVATVGYSEAEAHHDGIKTDSRTLTLDNVPRALANFDTRGFIKLVVEEGSGRLIGVQAVAPEAGELIQTAALAIRNRMTVQELADQLFPYLTMVEGLKLAAQTFNKDVKQLSCCAG

SEQ ID NO: 8410 - protein, 492 aa, Gossypium hirsutum
MDPYKFRPSSSFDSPFWTTNSGAPVWNNNSSLTVGARGPILLEDYHLVEKLANFDRERIPERVVHARGASAKGFFEVTHDISQLTCADFLRAPGVQTPLIVRFSTVIHERGSPETLRDPRGFAVKFYTREGNFDLVGNNFPVFFIRDGMKFPDMVHALKPNPKSHIQENWRILDFFSHHPESLHMFTFLFDDIGVPQDYRHMDGSGVHTYTLINKAGKSHYVKFHWKPTCGVKSLLEDEAIRVGGANHSHATQDLYDSIAAGNYPEWKLFIQIMDPLHEDRFDFDPLDVTKTWPEDIFPLQPMGRMVLNKNIDNFFAENEQLAFCPSLIVPGIYYSDDKLLQTRIFSYSDTQRHRLGPNYLQLPANAPKCAHHNNHHEGFMNFMHRDEEVNYFPSRYDPVRHAEKHPIPSTVLSGKREKCIIGKENNFKQPGERYRSFSADRQERFINRWIDALSDPRVTHEIRSIWISYWSQADKSLGQKIASRLNVRPSI

SEQ ID NO: 8411 - protein, 409 aa, Pseudomonas aeruginosa PAO1
MAIEIKAPTFPESVADGTVATWHKKPGEAVKRDELIVDIETDKVVIEVLAEADGVLAEIIKNEGDTVLSNELLGKLNEGGAAAPAAPAAAAPAAAPAAQAAAPAAAGGDDAILSPAARKLAEEAGIDPNSIAGTGKGGRVTKEDVVAAVEAKKNAPAAPAKPAAPAAEAPIFAAGDRVEKRVPMTRLRAKVAERLVEAQSAMAMLTTFNEVNMKPIMDLRSKYKDLFEKKHNGVRLGFMSFFVKAATEALKRFPGVNASIDGNDIVYHGYQDIGVAVSSDRGLVVPVLRNAEFMSLAEIEGGIANFGKKAKEGKLTIEDMTGGTFTISNGGVFGSLLSTPIVNPPQTAILGMHKIQERPMAVNGQVVILPMMYLALSYDHRLIDGKEAVSFLVAIKDLLEDPARLLLDV

SEQ ID NO: 8412 - protein, 478 aa, Pseudomonas aeruginosa PAO1
MSQKFDVVVIGAGPGGYVAAIRAAQLGLKTACIEKYIGKEGKVALGGTCLNVGCIPSKALLDSSYKYHEAKEAFKVHGIEAKGVTIDVPAMVARKANIVKNLTGGIATLFKANGVTSFEGHGKLLANKQVEVTGLDGKTQVLEAENVIIASGSRPVEIPPAPLTDDIIVDSTGALEFQAVPKKLGVIGAGVIGLELGSVWARLGAEVTVLEALDKFLPAADEQIAKEALKVLTKQGLNIRLGARVTASEVKKKQVTVTFTDANGEQKETFDKLIVAVGRRPVTTDLLAADSGVTLDERGFIYVDDHCKTSVPGVFAIGDVVRGAMLAHKASEEGVMVAERIAGHKAQMNYDLIPSVIYTHPEIAWVGKTEQTLKAEGVEVNVGTFPFAASGRAMAANDTTGLVKVIADAKTDRVLGVHVIGPSAAELVQQGAIGMEFGTSAEDLGMMVFSHPTLSEALHEAALAVNGHAIHIANRKKR

SEQ ID NO: 8413 - protein, 727 aa, Magnaporthe grisea 70-15
MPRSSMLGLWASLVWIAQAGCPYADPAALRPREEHTDDYLAQFSVDDQDKFLTSDVGGPIGDQRSLKAGARGSTLLEDFVFRQKITHFDHERVPERAVHARGAGAHGTFTSYGDFSNITSASFLNSAGKRTPVFVRFSTVAGSRGSADSARDVHGFATRFYTDEGNFDIVGNNVPVFFIQDAIQFPDLVHAVKPSPDKEIPTAATGKRPDYKPNPDATHDSAWDFFSQQSSSLHALFWAMSGYGIPRSYRHMDGFGVHTFRMVADNGESRLVKFHFKTKQGKASLIWEEAQVLSGKNPDFHRQDLWDAIEAGHGPEWEFGVQVVNEEDALRFGFDMLDPTKILPEDLVPVHPLGLLKLDRNPINYFAETEQIMFQPGHLVRGIDFTEDPLLQGRVFSYLDTQLNRHNGPNFEQLPINRPRVTVHNNNRDGSGQNFIHKNIHPYTPSALNEFPKQADDDQGRGFMTAPRRRTQDAALVRELSETFDDHWTQPRLFWNSITPAEQQILVNAIRFETSNIVNTHVRQKVLQQLNRISDELAGRVAQALGMEAPAPEPAFYHENTTIGLSIFGIKLPTIKTLRVGVLASTGNVASLSQAADLKARFMGDGVAVAVLGETQVEGVDVTYSQSDATVFDGIIIAAGAEGLVAKDAPASALFPIGRPQQLVVDSFRWGKPIGLAAASDDSANIFSSLGTTGPGVFSGDDLGVLVTDFKEGLSTYKFVERFPMDS

SEQ ID NO: 8414 - protein, 190 aa, Bifidobacterium longum DJO10A
MVRMRIADVEEDIDHELVSKEQIDAKIHEMAALASEDYRDKNPLLVAVLKGAVNTLVAFTQAMSIPVQIDFMSLSSYGSGTVSSGEVTVRQDLSADVRGRHILIVEDIVDSGHTLAWLVAELKRRGAASVEVFALLSKPSRREVDVDVKYAGYEIPDEFVVGFGLDFDERYRNLDSIAVLKPSVYQGVQA

SEQ ID NO: 8415 - protein, 204 aa, Zea mays
MGRPPCCDNGVGVKKGPWTPEEDIVLVSYIQQHGPGNWRSVPENTGLMRCSKSCRLRWTNYLRPGIKRGNFTPHEEGIIIHLQALLGNKWAAIASYLPQRTDNDIKNYWNTHLKKKVKRLQQPAADSFQTTASNAVTCSPNYYSPSSSHHSLQGMQPMSSYPHTTCSGGAPSNNEATTGYYYRRRLPLSPAWMRASPAAATANC

SEQ ID NO: 8416 - protein, 1011 aa, Mycobacterium tuberculosis H37Rv
MSFLLVEPDLVTAAAANLAGIRSALSEAAAAASTPTTALASAGADEVSAAVSRLFGAYGQQFQALNARAATFHAEFVSLLNGGAAAYTGAEAASVSSMQALLDAVNAPTQTLLGRPLIGNGADGVAGTGSNAGGNGGPGGILYGNGGNGGAGGNGGAAGLIGNGGAGGAGGAGGAGGAGGAGGTGGLLYGNGGAGGNGGSAAAAGGAGGNALLFGNGGNGGSGASGGAAGHAGTIFGNGGNAGAGSGLAGADGGLFGNGGDGGSSTSKAGGAGGNALFGNGGDGGSSTVAAGGAGGNTLVGNGGAGGAGGTSGLTGSGVAGGAGGSVGLWGSGGAGGDGGAATSLLGVGMNAGAGGAGGNAGLLYGNGGAGGAGGNGGDTTVPLFDSGVGGAGGAGGNASLFGNGGTGGVGGKGGTSSDLASATSGAGGAGGAGGVGGLLYGNGGNGGAGGIGGAAINILANAGAGGAGGAAGSSFIGNGGNGGAGGAGGAAALFSSGVGGAGGSGGTALLLGSGGAGGNGGTGGANSGSLFASPGGTGGAGGHGGAGGLIWGNGGAGGNGGNGGTTADGALEGGTGGIGGTGGSAIAFGNGGQGGAGGTGGDHSGGNGIGGKGGASGNGGNAGQVFGDGGTGGTGGAGGAGSGTKAGGTGSDGGHGGNATLIGNGGDGGAGGAGGAGSPAGAPGNGGTGGTGGVLFGQSGSSGPPGAAALAFPSLSSSVPILGPYEDLIANTVANLASIGNTWLADPAPFLQQYLANQFGYGQLTLTALTDATRDFAIGLAGIPPSLQSALQALAAGDVSGAVTDVLGAVVKVFVSGVDASDLSNILLLGPVGDLFPILSIPGAMSQNFTNVVMTVTDTTIAFSIDTTNLTGVMTFGLPLAMTLNAVGSPITTAIAFAESTTAFVSAVQAGNLQAAAAALVGAPANVANGFLNGEARLPLALPTSATGGIPVTVEVPVGGILAPLQPFQATAVIPVIGPVTVTLEGTPAGGIVPALVNYAPTQLAQAIAP

SEQ ID NO: 8417 - protein, 152 aa, Musa acuminata
MAAIASVKARRIFDSRGNPTVEVDVCLTDGTCARAAVPSGASTGVYEALELRDGGSDYLGKGVLKAVANVNTIIGPALIGKDPTEQVEIDNFMVQHLDGTSNEWGWCKQKLGANAILAVSLAVCKAGASVKKIPLYQHIANIAGNKNLVLPV

SEQ ID NO: 8418 - protein, 540 aa, Uncultured proteobacterium
MSSIMNIDPELQSLANQIATRRVTECFEGDANRASDFRCTSNGLVLDYSKHHIDAPSRQRLLEIAQQSALAADFEALTRGDAINITEERAALHTLLRGTRKEESPELYAEVHATNSKLAQLVAKIHSGAWSGFGANRFTDVVNIGIGGSDFGPKMVCRALRTETDLMKSHFVANVDPQDLDETLASLDPQSTLFIICSKSFTTEETLTNALRARAWLLAAGAKDTDVNKHMVAVTTNLEGASRFGISPENCFPMWDWVGGRYSLWSAVGLSIALQSGWETFLRLLTGAHEMDIHTLGSHDKNNLPLMMALLEFWNTVYLKTDTHVVLPYAQALEKLPDFLQQLSMESNGKRVDLSGSALTLPSAPVLWGSAGTIGQHSYYQLLHQGNRRFTADIILPLSHKEKDLDAQRKLAANALAQSRALLVGRDKSAAQRLAAERGQPESFAPHYEMPGNHSHSLIYFESLTPEILGALIAAYEHKTFFLSRLLGINAFDQWGVELGKVIGRQILTMLEHGEGLEVIDPATAIVVEAWRAANAKNTS

SEQ ID NO: 8419 - protein, 285 aa, Zea mays
  unsure (1)..(285): unsure at all Xaa locations
MSTVDTLIDDCANEPIHIPGSIQPHGLLLTLSEPALEVLQASSNLTVALGLGAESASGQALASVLGSKAAAQVSRALADLDADEEEVHQLTLDGYAYDILLHRHQGLLFLELERTMALEHRAVGQLARTLRRLQSAKTLESLYQTCVTEIRSLTGYDRVTLYRFEQEGHGKVIGEALSEGMQPYLGLCFPASDIPPQARELYRLNWIRVIPDAEYQPVPILPALRPDNGQPLDLSFAVLRSVSPVHCHYLKKIGGVXSSMSISLLKDDQLWGLITCVTVIRCAGP

SEQ ID NO: 8420 - protein, 454 aa, Vibrio cholerae O1 biovar eltor str. N16961
MEKVMATHFDYLCIGGGSGGIASANRAAMYGAKVALIEAKDLGGTCVNVGCVPKKVMWHGAQIAEAMHLYAEDYGFDVDVKNFNWAKLVESRQAYIGRIHQSYDRVLGNNKVHVIKGFAKFVDAKTVEVNGELYTADHILIAVGGRPSIPNIPGAEYGIDSNGFFELSEQPKRVAVIGAGYIAVEIAGVLNALGTETHLFCRKESPLRSFDPMIIETLVEVMNSEGPQLHTHSVPKQVVKEADGSLTLHLENGQTYNVDTLIWAIGRHPATDAINLAATGVATNEQGYIKVDEFQNTNVAGIYCVGDIMEGGIELTPVAVKAGRQLSERLFNNKLNAKMDYQLVPTVVFSHPPIGTIGLTEPQAIAQYGAENVKVYKSSFTAMYTAVTSHRQPCKMKLVCAGPEETVVGLHGIGFAVDEMIQGFGVAMKMGATKADFDSVVAIHPTGSEEFVTM

SEQ ID NO: 8421 - protein, 437 aa, GIBBERELLA ZEAE PH-1
MSPHAEKTVSRFHATSTDKAIAIEEEYAAHNYHPLPVVFSRAEGVNVWDPEGNHYYDFLSAYSAVNQGHCHPELIKTLTEQAGRLTLSSRAFYNDVFPKWAEKVRSVFGYDMVLPMCTGAEAVETAIKIARKWAYKVKGVPQEKAWIFGVSENFHGRTMTAITLSVDPESRENYGPYVPNVGAINPTTGKAIRYNNIADLEEVLEAHGKETAAFICEPIQGEAGVVVPDDDYLAKVQALCTKHNVLFICDEIQTGIGRTGRMLCSEWANIKPDLVTLGKAISGGMYPVSCVLSSKEVMLVVEPGTHGSTYGGNPLGSAVSIRALEIMEEEDLTAKADKLGNMFRDGLKALNTPILKVIRGKGLLNAVVIDESAANGRTAWDLCLLLKSKGLLAKPTHGDIIRFAPPLVISEEDLKKGLNIIAEAIKELPTVEPAKHH

SEQ ID NO: 8422 - protein, 417 aa, Trichoderma viride
MSLSNKLSITDVDVKGKRVLIRVDFNVPLDENKNITNPQRIAGAIPTIKHALDNGAKAVILMSHLGRPNGAVNAKYSLKPVVPKLEELLGKPVTFAPDCVGPEVEAIVNKADNGAVILLENLRFHIEEEGSSKDKEGNKTKADKAKVEEFRKGLTALGDVYVNDAFGTAHRAHSSMVGVDLPQKAAGFLMKKELDYFAKALESPQRPFLAILGGAKVSDKIQLIDNLLDKVNTLIICGGMAFTFKKVLDNLAIGDSLFDKAGAETVPKLVEKAKAKNVKIVLPTDFITADKFDKDANTGLATDKDGIPDGWMGLDCGDESIKLYKEAIDEAKTILWNGPAGVFEFEKFAGGTKATLDAVVEGCKNGKIVIIGGGDTATVAAKYGVEDKLSHVSTGGGASLELLEGKELPGVTALSSK

SEQ ID NO: 8423 - protein, 400 aa, Anabaena variabilis ATCC 29413
MSKKTVASLSAADISGKRALVRVDFNVPLDDQGNITDDTRIRAALPTIQDLTQKGAKVILASHFGRPKGVDEKLRLTPVAKRLSELLGQEVVKTDDSIGDEVAAKVAALQNGQVLLLENVRFYKEEEKNDPEFAKKLAANADFYVNDAFGTAHRAHASTEGVTKFLSPSVAGYLVEKELQYLQSAIENPQRPLAAIIGGSKVSSKIGVIETLLEKCDKLIIGGGMIFTFYKARGLNVGKSLVEEDKLELAKSLEAKAKERGVSLLLPTDVVLADNFAPDANSQTVSIDNIPDGWMGLDIGPDSVKVFQEALADTKTVIWNGPMGVFEFDKFAAGTEAIAHTLAEIGKTGTTTIIGGGDSVAAVEKVGLADQMSHISTGGGASLELLEGKVLPGIAALDEA

SEQ ID NO: 8424 - protein, 433 aa, Streptococcus sobrinus
MSIITDVYAREVLDSRGNPTLEVEVYTESGAFGRGMVPSGASTGEHEAVELRDGDKSRYGGLGTQKAVDNVNNIIAEAIIGYDVRDQQAIDRAMIALDGTPNKGKLGANAILGVSIAAARAAADYLEIPLYSYLGGFNTKVLPTPMMNIVNGGSHSDAPIAFQEFMIMPVGAPTFKEGLRWGAEVFHALKKILKERGLETAVGDEGGFAPRFDGIEDGVETILKAIETAGYEAGEKGIMLGFDCASSEFYEDGVYDYTKFEGEKGAKRSAAEQIDYIEGLVNKYPIITIEDAMDENDWEGWKALTERLGNRVQLVGDDFFVTNTDYLARGIKEGAANSILIKVNQIGTLTETFEAIEMAKEAGYTAVVSHRSGETEDSTIADIAVATNAGQIKTGSLSRTDRMAKYNQLLRIEDQLGEVAQYKGINSFYNLKK

SEQ ID NO: 8425 - protein, 308 aa, Glycine max
MADKYNLKNPAVKRILQEVKEMQSNPSDDFMSLPLEENIFEWQFAIRGPRDTEFEGGIYHGRIQLPSEYPFKPPSFMLLTPNGRFETQTKICLSISNHHPEHWQPSWSVRTALVALIAFMPTNPNGALGSLDYKKEERRTLAVKSREAPPKFGTPERQKLIDEIHEYMVSKAPPVPQPSASEASEENPRNEEAETHANSLNPESLPAGEVIPDQEVDGIVEEQEVVLANANPAGVEASREVHPSGSSYQLLQKSDARVQNLKPETRIQKSDDRLFTLAAIGLTIAIVVLLLKKFIKSTEYGAVFMDES

SEQ ID NO: 8426 - protein, 366 aa, Oryza sativa
  unsure (1)..(366): unsure at all Xaa locations
SIKLPSSSSSGGGECDLFSGRWVYDEAAYPLYRESACRVMSEQSACEKYGRTDLRYQHWRWQPHGCDLPRFDAEKFLGKLRNKRLVFVGDSLNRNQWASMLCLIDTGAPELHTSINSSRSLTTFKIHEYNASVDFYWSPLLVESNSDHPLRHRVADRTVRAASINKHAAHWTNADVLVFNSYLWWQRPAMKVLXEEGNEYAVSKVIDSLRAYELAVRTWADWMEFHVDRARTQLFFMTMSPTHLRSDEWEDAAAAAAGGNHGCYGETEPIAAEEYRGTSGTDMAFARAVEAEARRLGERSVAVRLINVTRLSERRKDAHPSVHRRYWDPVTDEQRRNPSSYADCIHWCLPGVPDVWNQLLYAHIVS

SEQ ID NO: 8427 - protein, 503 aa, Ustilago maydis 521
MQALRALQRSGLQKAVAAASSSSSTLSHRSFHSSRRALEFSKFNMPAMSPTMTEGGIAAWKKQPGEAFSAGDVLLEIETDKATMDVEAQDDGVLAKILVGDGAKAVQVNSLIAIMAEEGDDLSGADAFAAKASSEGGEAKPAAKEEPKEEPKEEPKEESKPKDEPKQQESTPSSSSSSSSSSSFGSQSSGDRIFATPVARRLAQDKGIALNKIKGTGPEGRIIKADVENYKPEAAVAAPAASSAAPAKSAGAPAPAPAASEGGDYTDIPVSNMRRTIAARLTESKSSIPHYYVSIDVEMDKVLKLREVFNKAAAEKAGKDVEKAKAAKLSVGDFITKAAGVALKEVPEVNSAWYGDFIRQHNKADISIAVSTPTGLITPIVKDVGGSGLATISAATKSLAAKARAGKLAPQEYQGGSFTISNMGMFGITHFTAIINPPQSCILAIGGTEARLVPDAESEQGFRKAMIMQATISADHRTVDGATAAKWMKAFKDALENPLSFML

SEQ ID NO: 8428 - protein, 488 aa, Mycobacterium bovis AF2122/97
MADPGGFLKYTHRKLPKRRPVPLRLRDWREVYEEFDNESLRQQATRCMDCGIPFCHNGCPLGNLIPEWNDLVRRGRWRDAIERLHATNNFPDFTGRLCPAPCEPACVLGINQDPVTIKQIELEIIDKAFDEGWVQPRPPRKLTGQTVAVVGSGPAGLAAAQQLTRAGHTVTVFEREDRIGGLLRYGIPEFKMEKRHLDRRLDQMRSEGTEFRPGVNVGVDISAEKLRADFDAVVLAGGATAWRELPIPGRELEGVHQAMEFLPWANRVQEGDDVLDEDGQPPITAKGKKVVIIGGGDTGADCLGTVHRQGAIAVHQFEIMPRPPDARAESTPWPTYPLMYRVSAAHEEGGERVFSVNTEAFVGTDGRVSALRAHEVTMLDGKFVKVEGSDFELEADLVLLAMGFVGPERAGLLTDLGVKFTEHGNVARGDDFDTSVPGVFVAGDMGRGQSLIVWAIAEGRAAAAAVDRYLMGSSALPAPVKPTAAPLQ

SEQ ID NO: 8429 - protein, 433 aa, Ustilago maydis 521
MMLTAATIRTAVRASQAPLLGAMSLPAVRQFKSTWAHVKAGPPDPILGVTEAFKRDQDPRKINLGVGAYRDENGKPYVLPSVRQAEELVITAKGDKEYLPITGLADFTKNAAVLAYGKDSAPIKENRIAITQSISGTGALRIGGAFLQRHYPEAKTIYLPTPSWGNHTPIFRDSGLEVKQYRYYDKKTVGLDFKGMIEDIKAAPAGSIVLLHACAHNPTGVDPTVEQWKEISNVVKEKGHFPFFDMAYQGFASGDTDKDAFAVRHFVAEGHQICLSQSFAKNMGLYGERVGAFSIVCADPDERARVDSQIKIIVRPMYSNPPMHGAKIAGTILADQQLYQQWLGEVKGMADRINGMRSTLKDLLVQDFNSKLNWDHITNQIGMFAFLGISPEQVAKLVNEHHVYLTGDGRISVAGITDHNVKHLAESLHKVTS

SEQ ID NO: 8430 - protein, 551 aa, ASPERGILLUS NIDULANS FGSC A4
MSSFLEFDSQLTTRQQELKTSHVEGSQTPEDKTQHRPKDASSVRDTVPDREVSGPVLGPMHDMGPAQTSDGQPLSNRTLIHDLTLPPVPNLDIPASPPGSPNSAANAKFQHFLSLKKQGIHFNDKLANSVSLKNPSLLSQMMQHAGIDDRAQYSSSLPTEMWNTSDLPSWGYKEELLKAQRELNAKVDETRAKGQRDTIEFVSDTGRSYSASHPKSKPRVKRNWTKTCQLEAASMSNSFKCDLERITRFLVDRSCRPGYYDFPPSINTGPLQYRATKTTSLLDIFYKLTFVMNHFPGTWGRPRDDVYGPYDSSYLQTTGPKTHTQSPAVTGTSVIAVKFNGGVAIAADNLASYGSLARFTDVKRLRKFGDAAVIGFSGDVSDMQYIDRLLESIDIRENYSVHGNQLNAKNLHTYLSKVFYKRRSDFNPLWNHILVAGFDSEKKPFLSSADLLGTTFSAPHLATGFGAHLAIPILRRLFPEERPIEEISKEDAVSALKDCLKVLWYRDARSMDKYSLALITQEGIEMHEDQQVEAQNWAFAESIKGYGAQAV

SEQ ID NO: 8431 - protein, 411 aa, Xylella fastidiosa 9a5c
MSAVSESVLSLSRYYLPVYRPCQVVLVRGQGSRVWDEQGRDYLDLAAGIAVCCLGHCDPDLVAALVEQAGRLWHTSNVFYSEPSLRLAQELVDVSRFAERVFLCSSGTEANEAAIKLVRKWAAAQGRLPEHRTIVTFHGSFHGRTLAAVTATAQPKYQEGYEPLPGGFRYVDFNHIEALEAAMVGGDVAAVMLEPIQGEGGVMPVVSGYLAQVRALCDRYGALLVLDEIQCGMGRTGTLFAYWQEEVVPDIVTLAKGLGGGFPIGAMLAGPKVAEVMQFGAHGTTFGGNPMAAAVARVALRKLASVEIAANVQRQSVALRAGLEEISEAFGGVFTQVRGRGLMLGAVLAPLYAGQASAILEVAVEHGVLLLQAGPDVLRFVPALNVSDEELADGLVRLRAALGDYVSRFGG

SEQ ID NO: 8432 - protein, 479 aa, Caulobacter crescentus CB15
MREYTKFYIDGAWVDPAAPNTLDVINPATEEVCGVISMGSEADVDKAVRAARKAFASFSQTSREERIDILERIIAEYQKRFEDMAKAITEEMGAPAWLAQRAQAAMGIGHVQTAAAVLKGYKFEEDRGTTRIVKEPIGVCAFITPWNWPVNQIACKVGPAIATGCTMVLKPSEIAPFSGYIWTEIMHAAGVPAGVFNLVNGDGPTVGAALSRHPEVDMVSFTGSTRAGIEVAKNAAPTVKRVHQELGGKSPNIILDDADFSRAVAGGVASVMMNSGQSCNAPTRMLVPGARMDEVIAIAKAAAESHTVGDPNGNHKMGPVVSETQWNKIQGLIQKGIDEGATLVTGGVGRPEGLDKGYYVKPTVFANVTNEMTIAKEEIFGPVVSILGYDTVDEAVTVGNDTEYGLAAYVSGGDQDEVRKVASRLRAGQVTLNGAGPDLMAPFGGYKMSGNGREWGDHAFGEFLETKAILGYSAKVAAE

SEQ ID NO: 8433 - protein, 323 aa, Magnaporthe grisea 70-15
MGKKKRSHPDVEELLARPWCYYCERDFEDLKLLISHQKAKHFKCDRCGRRLNTAGGLAVHMNQVHKESLDKVENALPNRDGLDIEIFGMEGVPEDMLAQHRTRIITNYYEAQEARRAATGNPPPGQSGGQGPAKKIKIETPEEIKKRLAEHKARRALGQTNGNPGSDVPNPAQSASPGSFTTPFNAPPQYGQPGYNMQQYPGYPASTLPTRPPGVGAAAPQALPQRPPYGAPGFPPPAGAGMPSTLDDLVSGAAQSAGGRSGDDIDKMIRLAEAGVKPAGEGAADSKGKKDKSSRMMVANSTFSLEELMVQQWTTSAGAAIAV

SEQ ID NO: 8434 - protein, 289 aa, Yersinia enterocolitica
MKGIVLAGGAGTRLHPITRGVSKQLLPVYDKPMIYYPISVLMLAGIQDILIISTPEDLPSFKRLLGDGSQFGIRLQYAKQPSPDGLAQAFIIGEEFIAGERCALVLGDNIYFGQSFGKQLREVASRNDGATVFGYQVVDAERFGVIEFDENFNALSIEEKPQKPKSDWAVTGLYFYDKDVVEMAKEIKPSERGELEITTLNEMYLAKGKLRVELLGRGFAWLDTGTHDSLIDASLFIHTIEKRQGFKVACLEEIAYQNQWLSREKLNELAEALNKTYYGQYLLKLAKES

SEQ ID NO: 8435 - protein, 470 aa, Cicer arietinum
LDPIYSGSKGGVIMFSRALRLYKRQGIRVNVLCPEFVETDMGTMIGPKFLSMMGGFVPMEMVVKGAFELITDENKAGDCLWITNRRGLEYWPTPSEEAKYLLRSTRSRRRTEYKAPPIKLPESFEKIVVQTLTHNFRNATSVVRAPLRLPIKPNYVLVKIIYAGVNASDVNFSSGRYFGGNNSDTASRLPFDAGFEAVGVIAAVGDSVTDLKVGMPCAFMTFGGYAEFTMIPSKYALPMPRPEPEGVAMLTSGLTASIALEKAGQMESGKVVLVTAAAGGTGQFAVQLAKLAGNTVVATCGGGAKAKLLKELGVDRVIDYHSEDIKTVLRKEFPKGIDIIYESVGGDMLKLCLDALAVHGRLIVIGMISQYQGENGWTPSKYPGLCEKLLSKSQTVAGFFLVQYSHMYQEHLNKLFDLYSSGKLKVAVDPKRFIGLHSVADAVEYLHSGKSVGKVVVCVDPTFGHQVAKL

SEQ ID NO: 8436 - protein, 349 aa, Xylella fastidiosa Dixon
MGFAALSATGPLERFAFGRRAPRPDDVVIDILYCGVCHTDLHLARNHGGFTTYPIVPGHEIIGCVREIGKTVTRFKRGDLVGVGCMVDSCQHCQPCLKGWEQDCIEGSIFTYNSTDRRDGSITYGGYSDVIVVRDKFVLSLPDGLDPAGAAPLLCAGITTWSPLRRWNVGKDSKVAVVGLGGLGHMALKLAKALGADVTLFTRSSGKEGDAFRLGADRVVLSSDLEQMKAVYSRFDIIIDTVPYDHDVNPYMPTLVLEGVLVLVGYLGPLSMPVNAGGVVRGRRAISGSFIGGVPETQQMLDFCGQHGIVSDVEIIPIQKINEAYERMLKSDVKYRFVIDMTSLTSSGA

SEQ ID NO: 8437 - protein, 984 aa, Staphylococcus aureus subsp. aureus Mu50
MQEHLVVTLDGKDYLVEPGTNLLEFIKSQDTFVPSICYNESMGPIQTCDTCTVEIDGKIERSCSTVIDRPMTVNTVNNDVKDAQKEALDRILEKHMLYCTVCDYNNGDCEIHNTMDAWGLQHQTYEYKEKPYEKDYGPFYRYDPNQCILCGRCVEACQDIEVNETIRIDWDREHPRVIWDNDVPINESSCVSCGQCATVCPCNAMMEVNMEGNAGYMTDTEPGSLAAMIDLTKKAEPGYGPLFAISDSEAEMRKERIKKTKTVCTYCGVGCSFEVWTKDREILKVQPSHDSPANKIVTCVKGKFSWGHINSDQRLTKPLVRKNGEFHEVEWDEALNVIADNFTSIKEKYGPDALSFISSSKATNEESYLMQKLARQVIGTNNVDNCSRYCQAPATKGLFRTVGHGGDSGSIEDLEKAAMSVLIGTNTAEAHPVIASRMKRAQKLFGQKIHVFDIRKHEMAERADRFYQPKPGTDLAWLSAVTKYIIDHDLHDKAFIDEWVDDFDEYYKSLETFTMAFAEEATGIPESELIKFAEECAKAESVVICWAMGITQQDIGSDSSTAISNLLLVTGNYRRPGTGAYPLRGHNNVQGCSDMGSMPDKITGYQSIEADDIRAKFEKEYGVKLNPKAGKDNHEMVEGIHDGEVHSLYLYGEDTGIVDSNINFVQAAFEKLDFMVVQDEFLTFTATYADVVLPASPSLEKDGTFTNTERRIQRLYQALEPLGDSKPDWKIFQAIANRLGFDWNYKHPSEIMDEVARLTPLYAGVSYDRLEGFNSLQWPVQPDGTDEPILYLEGFNFDNGKAKLFPLSFDNYFKQDEIYDIHVNNGRLLEHFHEGNMTYQTPMIKYKVPRAFVEISPELAEDRGIHEGAEVKLISETGEAVLQVHVTDRVKGKEIYIPLNNDAMENGDLGAINLLTNSDVDQYTDTPSYKRTSCRLEVITKRGKSPLNPNNFRVNKKRHPQYSVQVQKKWERSDYVFPGNQVDK

SEQ ID NO: 8438 - protein, 431 aa, Methanococcoides burtonii DSM 6242
MTDKTYGLDTIALHGGHEPDATGSRAVPIYQTAAYVFNDAEHAANLFALKAFGNIYTRLMNPTTDVLEKRVAAIEGGTGALGVASGMSAITLAALAVTQLGDEIVSANNLYGGTYQLFNHTFPKLGRKVNFVDSTKPDDFEKAITEKTRAIYVEIIGNPKLDIPDLEKIAEIAHNAGIPLIVDNTVGVGIVKPIDYGADIVVLSATKFLGGHGTSIGGIIVDSGNFSWDNGKFPEFTDPDPSYHGLKFWESFGNIPGMGNLAFILRVRTQLLRDLGPAMSPFNAFQFIQGVETLSLRVKRHGENALAVARHLNSHPLVEWVNYPGLEDHPSHELAQKYLNGSYGAILGFGVKGGLEAGKKFIENVELLSHLANIGDAKTLVIHPASTTHQQLTKEEREQTGVTDDFIRMSVGLEDIDDIIADIDQALERSQ

SEQ ID NO: 8439 - protein, 320 aa, Oryza sativa
  unsure (1)..(320): unsure at all Xaa locations
MDRDQMTNTMRDQAANLTSMNPLFYPFMADDALLGMAPPPPQQLLPSVSIQHMDWSPDTMLDNLTFIEEKIRQVKDVIRSMAGRRASSSSAATPEQQLVNADLTCLIVQLISTAGSLLPSLKNSSFLSRTTPPPAAAAGAAQAVSLAAGESSSSARNNETNREDEEEQMGSPDYDELFKVWTNGGAMDECVGAAGDEQDARENPAAAAEEEKYEVLQLEEDEILAPHTHFCGICGKGFKRDANLRMHMRGHGDEYKXAAALAKPPPPPEGEEQPPQPERRYSCPHAGCKRNRMHASFQPLKTILCVKNHYKRSHCEKRHV

SEQ ID NO: 8440 - protein, 1051 aa, GIBBERELLA ZEAE PH-1
MNLVEKATSLRVNKHKHVGTSKKFIQPSVGPIVSEDRGHKIPTNATICSSFDQVGESVLDSNWLRPSHRIAYARSTTFNTPLIPLAVFARIIPRVCIDSSTRLFASRQYLGQTSTPRSKLGLWAIASDVLMEDDEYTTSKMEEIKLEEGANDAQVKQETNTPMSITNGDHESSRSPTASQDGLKSRSESADTPSSNRPSKLSRKASQKLAASREPVLFDHLPDMTTESCKFFQRIPDCLYGSKHLGSTDNDALDCECRDEWHDGKNLACGEDSDCINRATKMECSAEGGNCAGGCQNQRFQRKQYANVSVIKTEKKGFGLRADSDLQPNDFVFEYIGEVINEPTFRRRMIQYDEEGIKHFYFMSLNKSEFVDATKKGNYGRFCNHSCNPNCYVDKWVVGDKLRMGIFTSRKIQSGEELVFNYNVDRYGADPQPCYCGEPNCVGFIGGKTQTERATKLPAATVEALGIDGGDGWDTSVAKKPRKKKPDEDDEEYVNSIRPRSLSEDDARKVMAALMQCKEKWIAVKLLDRIMQCDEERVIHCVMRMHAYQILKTTLNTFIDDHNVVLQVLDILDKFPRLTRNKVQDSKIEATIEGLTQSEHEDVASKSKHLLNEWSKLEVAYRIRRRKFDPNAPAANSFEERRGAGREEETVQSTSKTASPTPIDAPKGPRNSMPQRNNAFFQNGGRSRRPPFNASLPQGWFTAKDAAGNTYFYTKQGATTWQRPTQPATEPAAKAPSKAMKEQLAIQSIINQVTEKGTPKHTSVSTPKAAETPPKEVKEEKWRSLPVDKRMKIYENTLFPHIKHVLDKFHHKLPKEELKRFGKDIAKKLVASDFKNNRVEDPGAPLSDKQVKKIKQYVKDFLDRAVKKYGEHKRKADEDADTQMKDDQGPSAAGSGAGSVVDGSDGTALAKVDGTSMGEVDVTAVSDREGTGSLGSPDRKRKRDLDTSGSPYVTSTDGPNMKRLREDELEAPSPPPPPPPPPQSDMDEVVTAEQEALREQEEALMRENEEAQRLEDEASHTKGLEDVLDASNEISRLNKEARKPGSQKMPA

SEQ ID NO: 8441 - protein, 141 aa, Triticum aestivum
  unsure (1)..(141): unsure at all Xaa locations
MAPTVMASSATSVAPFQGLKSTAGLPVSRRSNGASLGSVSNGGRIRCMQVWPIEGIKKFETLSYLPPLSTEALLKQVDYLIRSKWVPCLEFSKVGVHLXREHNASPGYYDGRTGQCWKLPXFGCTNATQXXNXVEEAKKGT

SEQ ID NO: 8442 - protein, 328 aa, Cytophaga hutchinsonii
MKKIAVYTSGGDAPGMNACIRAAVRAGHYHNLEVYGIVRGYDGMINGNFIELDNRAVSNIIQKGGTILKSARSEEFRSPEGRRKAFDQIQKFGIDGLVAIGGNGTFTGAELFYNEYQIPCVGAPGTIDNDLYGSDFTIGYDTAVNTCLAAIDKIRDTADAHERVFFIEVMGRDTGYIAVRSAISGGAEMAIIPEFPYDKNVVINRLKHGTSDTKASHIIIVAEGHQEGRASMIARDIKEALPQLDCRVTTLGHVQRGGGPSAADRVLASRLGLATVEGLLEGRANVMAGIIDHKVVYTPFIDTITKRKPINEDLLSLAEKLNGRSYKV

SEQ ID NO: 8443 - protein, 303 aa, Streptomyces fradiae
MNDRPRRAMKGIILAGGSGTRLRPLTGTLSKQLLPVYDKPMIYYPLSVLMLAGIREIQIISSKDHLDLFRSLLGEGDRLGLSISYAEQREPRGIAEAFLIGARHIGGDDAALILGDNVFHGPGFSSVLTGTVARLDGCELFGYPVKDAHRYGVGEIDSGGRLLSLEEKPRRPLEPGRHRLYLYTNDVVEIARTISPSARGELEITDVNKVYLEQGRAAHGAGAVVAWLDMGTHDSLLQAGQYVQLLEQRQGERIACIEEIAMRMGFISAEQCYRLGQELRSSSYGSYIIDVAMRGAAADSRAQ

SEQ ID NO: 8444 - protein, 338 aa, Streptococcus agalactiae NEM316
MKAVVVNQASTGVEVVEHDLPKVGHGEALVKVEYCGVCHTDLHVAHGDFGQVPGRILGHEGIGIVEEIGEGVTSLRVGDRVSIAWFFEGCGHCEYCTTGRETLCRSVKNAGYSVDGGMSEYAVVTADYAVKVPEGLDPAQASSITCAGVTTYKAIKEAGAAPGQWIAVYGAGGLGNLAVQYAKKVFNAHVVAVDINADKLQLAKEVGADLTVNGKEIKDVAAYIQEKTGGCHGVVVTAVSKVAFNQAIDSVRAGGTVVAVGLPSEYMELSIVKTVLDGIRVVGSLVGTRKDLEEAFAFGAEGLVVPVVEKVPVDTAPQVFDEMERGLIQGRKVLDFTK

SEQ ID NO: 8445 - protein, 290 aa, Methanococcoides burtonii DSM 6242
MDVKKAVIPAAGLGTRFLPATKSMPKEMLPIIDKPVIHYVVEEAIASGIDDIIFVTGRSKRAIEDYFDESPELQMHLKEHHKDSLLKMVEDISSMVDIHYIRQKEPRGLGDAIMTAKKHISGDPFAVLLGDDIIVNDVPCTKQLIEVFQKYRCSTIAVEEVPREKVSSYGIISGKPIDDSLCILEDIIEKPSVEEAPSNIGAIGRYVFTPEIFDCINKTSTGVGGEIQLTDGIRLLNEQQKVYAYRFAGQRYDTGDKLGYVKAIVDFALKNEEMAPSIREHIKNVLGSGF

SEQ ID NO: 8446 - protein, 327 aa, Rhodopseudomonas palustris CGA009
MDAMVLTAPGTSLQWQSRDTPQPGDGEVLVTVSACGVCRTDLHVVDGELPNIRYPIIPGHEIVGRVAAVGAGVTTHQIGDRVGIPWLGHTCGLCRYCRGGMENLCDAPLFTGYTRDGGFASHAIADARYAFPLGEAGDDVAIAPLLCAGLIGWRSLAIAGDAERLGIYGFGAAGHIVAQVARWQGRQVYAFTRGGDVAAQDFARSLGAVWAGASEEQPPQPLDAAIIYAPVGSLVPAALKAVRKGGRVVCAGIHMSDIPSFPYDLLWEERQLVSVANLTRQDGVDFLEVAQQASIRTETHAFPLREANTVLNKLRAGELLGAAVLVP

SEQ ID NO: 8447 - protein, 183 aa, Zea mays
PSNLAFLCEVNEAEPLFFVCARNVPGPCKVRSVWDYVGLHFVLLFTLQNHGNPTSHKPELVLNNFTTRLGHRVGRMIQSLFPQDPNFRGRRVVTFHNQRDYIFFRHHRYIFETKEKKVASKEKTSGSKSGSEKQQVICRLQECGPRFTLKLLTLQHGTFDTRSGEYEWVHKPDMDTSRRRFFL

SEQ ID NO: 8448 - protein, 547 aa, Pseudomonas aeruginosa UCBPP-PA14
MSELIRVPDIGNGEGEVIELLVKPGDKVEADQSLLTLESDKASMEIPSPKAGVVKSIKAKVGDTLKEGDEILELEVEGGEQPAEAKAEAAPAQPEAPKAEAPAPAPSESKPAAPAAASVQDIKVPDIGSAGKANVIEVMVKAGDTVEADQSLITLESDKASMEIPSPASGVVESVSIKVGDEVGTGDLILKLKVEGAAPAAEEQPAAAPAQAAAPAAEQKPAAAAPAPAKADTPAPVGAPSRDGAKVHAGPAVRMLAREFGVELSEVKASGPKGRILKEDVQVFVKEQLQRAKSGGAGATGGAGIPPIPEVDFSKFGEVEEVAMTRLMQVGAANLHRSWLNVPHVTQFDQSDITDMEAFRVAQKAAAEKAGVKLTVLPILLKACAHLLKELPDFNSSLAPSGKALIRKKYVHIGFAVDTPDGLLVPVIRDVDRKSLLQLAAEAAELADKARNKKLSADAMQGACFTISSLGHIGGTGFTPIVNAPEVAILGVSKATMQPVWDGKAFQPRLMLPLSLSYDHRVINGAAAARFTKRLGELLADIRTLLL

SEQ ID NO: 8449 - protein, 640 aa, Corynebacterium glutamicum
MCGLLGILTANGNAEAFVPALERALPCMRHRGPDDAGTWHDADAAFGFNRLSIIDIAHSHQPLRWGPADEPDRYAMTFNGEIYNYVELRKELSDLGYTFNTSGDGEPIVVGFHHWGESVVEHLRGMFGIAIWDTKEKSLFLARDQFGIKPLFYATTEHGTVFSSEKKTILEMAEEMNLDLGLDKRTIEHYVDLQYVPEPDTLHAQISRLESGCTATVRPGGKLEQKRYFKPQFPVQKVVKGKEQDLFDRIAQVLEDSVEKHMRADVTVGSFLSGGIDSTAIAPLAKRHNPDLLTFTTGFEREGYSEVDVAAESAAAIGAEHIVKIVSPEEYANAIPKIMWYLDDPVADPSLVPLYFVAAEARKHVKVVLSGEGADELFGGYTIYKEPLSLAPFEKIPSPLRKGLGKLSKVLPDGMKGKSLLERGSMTMEERYYGNARSFNFEQMQRVIPWAKREWDHREVTAPIYAQSRNFDPVARMQHLDLFTWMRGDILVKADKINMANSLELRVPFLDKEVFKVAETIPYDLKIANGTTKYALRRALEQIVPPHVLHRKKLGFPVPMRHWLAGDELFGWAQDTIKESGTEDIFNKQAVLDMLNEHRDGVSDHSRRLWTVLSFMVWHGIFVENRIDPQIEDRSYPVEL

SEQ ID NO: 8450 - protein, 526 aa, Vibrio vulnificus CMCP6
MSPKCRKLLKFDEVITMSAKKPLALVILDGYGYREDTASNAIANAKTPVMDALIANQPNTLISASGMDVGLPDGQMGNSEVGHTNIGAGRVVYQDLTRITKSILDGEFQQTAALVEAIDTAVKAEKAVHIMGLMSPGGVHSHEDHILAAVEMAAERGAEKIYLHCFLDGRDTPPRSAEGSLQRFQDLFAKLGKGRVASLVGRYYAMDRDNNWDRVQVAYDLLTQAKADFTYDSAVAGLAAAYERGENDEFVKATEIKAEGQESAAMQDGDAVIFMNYRADRARQITRTFVADFAGFERAVFPAVNFVMLTQYAADIPLAIAFPPASLENTYGEWLSKQGQTQLRISETEKYAHVTFFFNGGVETEFAGEERQLVASPKVATYDLQPEMSSTELTEKMVAAIKSGKYDTIICNYPNADMVGHTGVYEAAEKAIEALDASVGQVVEAIKEVGGQLLITADHGNAEMMVDPETGGIHTAHTSLPVPLIYVGDKAVEFKEGGKLSDLAPTMLSLAGLEIPAEMTGQVLVK

SEQ ID NO: 8451 - protein, 134 aa, Glycine max
MSGAAAAAAARVLPKAVTFVTGNAKKLEEVRAILGSSVPFQSLKLDLPELQGEPEDISKEKARMAASQVNGPVLVEDTCLCFNALKGLPGPYIKWFLEKIGHEGLNNLLIAYEDKSAFAMCIFSLALGPEEEPI

SEQ ID NO: 8452 - protein, 368 aa, Xanthomonas campestris pv. campestris str. ATCC 33913
MKTRAAVAWGPHQPLSIEEVDLQPPRPGEVLVRLVATGICHGDAHALAHAPASSFPAILGQEGSGVVEEVGIGVTSVRVGDHVIPLDMPECGVCKFCRSGRTNLCQAIRSSQERGLMPDGSSRFSLDGRPILHHMGTSTFSEYTVLPEIAVARIHPDAPLDQVCLLGCTVTTGVGAVLNSIHVRPGDCVAVFGLGGIGLSVIQGAVLAQAGRIIVVDIAPGKFALARALGATDCLDPRDYGAPIQQVIVDLTDGGADHSFECIGDVGAMRAALECCHKGWGESVILGVADGAQEISTRPFQLVTGRVWRGSAFGGVKGRSELPGYVERYLRGDLQLAPLITRTLALDDINQALADLRAARGIKSIVLY

SEQ ID NO: 8453 - protein, 382 aa, Alopecurus myosuroides
MFIPSINSDTATTMKLICILPVLLLASVKPAISSLRRYDSIFSFGDSFTDTGNDIVVIPPVIPAAQPPYGMTFFGRPTGRYSNGRLIIDFIAEELELPFVPPFLSHNGSFRQGANFAVAGATALDAVFFRDIPDVGLLVPNTSTSVQLRWFESLKPSLCSPAQECPGFFHNSLFFVGEFGFNDYSFAVFGNTIPQLRSIVPDVVKTISVAIEVLIKQGAMTVVVPGIPPLGCTPASLVFFPSADPADYEPRTGCLKDLNEIAVHHNFLLQESLENVRRNHPSVAVVYADFFTPVIEMVESPHKFGLTRNALRCCCGGGGKYNFNTSGPSCGMPGATVCEDPSAYLFWDGHLTEEAYRYIAQDWLNSIHNGSNLMGLQRIANI

SEQ ID NO: 8454 - protein, 985 aa, Ustilago maydis 521
MATLLSSPLATAPKFDLFQPPSSPKCYANDELPADFDKSFGSSMSISDSLDGHTSHAFPTLVLPPQPLLFGGSLGLAQSLASSNRTQSSYHSSALAEPSQHHHQYLARPSPRHTHSLGAAMGTTLNTRPHGLAAKMSSPTDMDISPAPVAAQVSHVRPSPSEALPKLMDSIHVGAPSDATATNDRLHPVLRGSSRARPVATERKSSLQLAHAMSSRHFGAEITLNSQRIFAHQQDLLSSPDKEPPPKRRPNSLPTRQSEANERISQLSSALMGVASAKPSTALPAPFSNRDACFGAPSTSSNPSTSFAARNRLSDSGLVLDRRLSKRSSRPGSAESFFEDVENELGANHPLPQDDDDDEDADDINPSPSPSMNSLSGAIAGYFYDPLSPEKLASRLGMPPVDGPNLLAAMSNTDASPSVVSSPPASSPCTRMPPPKRTTSLGTRAFERANTVAVVPRAASASSSSSGIGALRTTLGKRANPYVKRPSLINDQPAIQSAYPVLGINGQTNRVSRPTAPAPRRCVSAFDQSSVLASAAASKPSANASSISVDSPISPDRRRSQLSGHSEVTDANGSPIAPAMRARTRPHYLRRGSKDDSSPLAYGTGMKRSSSRGNDTMVDDLALGDPAYANSPASAESLPGFGASEKEGKILPCFNVKDDGLMRITPQTMTDLLAGKYTNAIMSYQVVDCRFGYEYQGGHIPGAINLSTVQRVVGHFLQPGLGRHANGEPLPPRSQSGKPDKFGNRRKHVLVFHCEFSCKRAPTMALALRQADRGLAHDYPNCHFPEIYILQGGYCNFFQSYAQLCQPQQYVRMDDPRFLASRSTELHGFRKQFSRHRSFTYGEGKRQSIGTNAASRGGAAARQSIKEEEDSTSIMEESPCPGGASMKLSARAMSAVQVAHRLDATTLTAVDESAAPALAVGAGDTSFGSVGDSSFEDGIGDSPCAAAGSRKPAMILLAQMGALGGARRPLLRAGTTGNILSRHMS

SEQ ID NO: 8455 - protein, 444 aa, Arabidopsis thaliana
MATITVVKARQIFDSRGNPTVEVDIHTSNGIKVTAAVPSGASTGIYEALELRDGGSDYLGKGVSKAVGNVNNIIGPALIGKDPTQQTAIDNFMVHELDGTQNEWGWCKQKLGANAILAVSLAVCKAGAVVSGIPLYKHIANLAGNPKIVLPVPAFNVINGGSHAGNKLAMQEFMILPVGAASFKEAMKMGVEVYHHLKSVIKKKYGHDATNVGDEGGFAPNIQENKEGLELLKTAIEKAGYTGKVVIGMDVAASEFYSEDKTYDLNFKEENNNGSQKISGDALKDLYKSFVAEYPIVSIEDPFDQDDWEHYAKMTTECGTEVQIVGDDLLVTNPKRVAKAIAEKSCNALLLKVNQIGSVTESIEAVKMSKKAGWGVMTSHRSGETEDTFIADLAVGLSTGQIKTGAPCRSERLAKYNQLLRIEEELGSEAIYAGVNFRKPVEPY

SEQ ID NO: 8456 - protein, 526 aa, Erwinia carotovora subsp. atroseptica SCRI1043
MKIRSQVGMVLNLDKCIGCHTCSVTCKNVWTSREGMEYAWFNNVETKPGVGYPHAWEDQEKWKGGWIRKISGKLEPRMGNRISVLSKIFANPDVPEIDDYYEPFDYDYQNLRKAPEGKHQPVARPRSLITGQRMKKIEMGPNWEDDLGGEFSKRSKDKNFDPVHFNDVQKEMYGQFENTFMMYLPRLCEHCLNPACVATCPSGAIYKRGEDGIVLIDQDKCRGWRMCLTGCPYKKIYFNWKSGKSEKCIFCYPRIESGQPTICSETCVGRIRYLGVLLYDADRIEQAAAVENEKDLYQSQLDVFLDPHDPKVIEQALKDGIPNSVIEAAQQSPVYKMAMDWKLALPLHPEYRTLPMVWYVPPLSPIQSAADAGQLAHSGVLPDVESLRIPVQYLANLLTAGDTEPVLLALKRMLAMRHYKRAETVEGKIDTSALEQVGLTEAQAQEMYRYLAIANYEDRFVIPSSHRELAREAFPESKGCGFSFGDGCHGSDTKFNLFNSKRIDAIDVSNKTRDMNSKIMRETNHD

SEQ ID NO: 8457 - protein, 569 aa, GIBBERELLA ZEAE PH-1
MDSSNQNQDQPQAAPEAQQLPDTSAQQGMPPMDVGASMNGNGIPHVPNHVLNPMNPEALTMLGDPSLMADPSLLGMQMPMADPSFMMQPGMNLSNGQTQGFSLPVVPPPTTVSAEEVALYDRQIRLWGMAAQAKIQSANILLITIKALANEIAKNLVLAGVGSLTLLDSATVTEADRGAQFLLPDDEDVIGKNRAQVASVALRKLNPRVHVHVDEEGVKTKGPSYFAAYDIVIATDLDPESFNIINTATRLNCKAFYAAGCHGLYGFIFSDLIEHDYVIKRDLGNVSTTTGPETRTRSIVDVQTRKEGPKTIESVTKRELYSTWFLASDVAVLPAEYTQSKRRLKSVTPALSCLRALWEFMQLQNGRVPSNREDLKMFTQIATQKHKALGLPSETLRPEFLRSFLQNLVSEISPVSAILGGQLAQDVINVLGQTQQPIQNMVVFDGNTMEALMYPLHPEGPLGASLLTDHTVPNGGAPMLMGGGMDGLPLGIDPTAMGALPHHNNPIMLAGGMPQTGNFIAMPGGSLADPTQLNGAPAPQRPIQEQAAQATAEQPVQEAQANLNASETN

SEQ ID NO: 8458 - protein, 243 aa, Ralstonia metallidurans CH34
MSETHFGFEKVDESEKAGKVAGVFHSVASKYDVMNDLMSGGMHRLWKVFTIAQANVRPGQKVLDIAGGTGDLAKAFAKQAGPTGEVWLTDINESMLRVGRDRLLNKGVVTPVALCDAERIPFPDNYFDLVTVAFGLRNMTHKDAALAEMRRVIKPGGKVMVLEFSKVWKPLEKFYDVYSFKVLPWLGERVAGDAPSYRYLAESIRMHPDQGSLVRMMEQVGLEQVEYFNLTAGVVALHVGRKY

SEQ ID NO: 8459 - protein, 515 aa, Methanocaldococcus jannaschii
MCGINGIIRFGKEVIKEEINKMNKAIKHRGPDDEGIFIYNFKNYSIGLGHVRLAILDLSEKGHQPMGYNVDEDKIIYRDDELDRADIIIVYNGEIYNYLELKEKFNLETETGTDTEVILKLYNKLGFDCVKEFNGMWAFCIFDKKKGLIFCSRDRLGVKPFYYYWDGNEFIFSSELKGILAVKEINKKENINKDAVELYFALGFIPSPYSIYKNTFKLEARQNLIFDLDKREIRKYYYWELPDYKPIYDKKKLIEEGKKLLYDAVKIRMRSDVPVGAFLSGGLDSSTVVGVMREFTDLSKLHTFSIGFEGKYDETPYIKIVVDYFKTQHHHYYFKERDFEELIDKYSWIYDEPFGDYSGFPTYKVSEMARKFVTVVLSGDGGDEVFGGYMTHLNGYRMDFIRKLPKFLRVVGSKLPVKKDLNGIANLYLLKEAFRLSLINPEEFYAESIKEDAIRPEIYKKWTIEKLRYCLNKGDNKLGEALRIFDLLFNTLCDNFLVKVDRASMLTLWKLEVHF

SEQ ID NO: 8460 - protein, 229 aa, Glycine max
  unsure (1)..(229): unsure at all Xaa locations
MWMILLRKRQVVVVVVLSLLQCSVRVDSVFCFSVQVVVHKNSPRETHFRRAGPRQKVYFESEDVYACIVTCGGLCPGVNTVIREIVCGLYHMYGVHKVLGIEGGYRGFYSCNTIPLTPKVVNDIHKRGGTILGTSQGEGGNDTLKIVDSIQDRGINQVYILGGDGTQRGASVIFEEIRRRGLKGSVVGIPESVDNDIPVIDKSXFXFDTAGEEAQRAINAAHVEAESTE

SEQ ID NO: 8461 - protein, 245 aa, Corynocarpus laevigatus
ALSIAGAVQSQKLAVCAISQLQSLPGGDIKLLCDTVVESVRELTGYDRVMVYKFHEDEHGEVVAESKRADLDPYIGLHYPATDIPQASRFLFKQNRVRMIVNCHASSVRVIQDEELRQPLCLVGSTLRAPHGCHAQYMANMGSIASLAMAVVINGTDEEGTGGRNSMRLWGLVACHHTSARCIPFPLHYACEFLMQAFGLQLNVELQLALQLSEKHVLRTQTLLCDMLLRDSPTGIVTQSPSIMD

SEQ ID NO: 8462 - protein, 181 aa, Brassica napus
MASSMLSSAAVVTSPAQATMVAPFTGLKSSSAFPVTRKANNDITSIVSNGGRVSCMKVWPPVGKKKFETLSYLPDLTEVELGKEVDYLLRNKWIPCVEFELEHGFVYREHGSTPGYYDGRYWTMWKLPLFGCTDSAQVLKEVQECKTEYPNAFIRIIGFDNNRQVQCISFIAYKPPSFTGA

SEQ ID NO: 8463 - protein, 487 aa, Salmonella enterica subsp. enterica serovar Dublin
MKKINHWINGQNVAGDDYFQTTNPATGDVLAEVASGGEAKLNQAVAAAKEAFPKWANLPMKKRARLMRRLGDLIDQNVPEIAAMETADTGLPIHQTKNVLIPRASHKFEFFAEVCQQMNGKTYPVDDKMLNYTLVQPVGVCALVSPWNVPFMTATWKVAPCLALGNTAVLKMSELSPLTADRLGELALEAGIPAGVLNVVQGYGATAGDALVRHHDVRGVSFTGGTATGRNIMKNAGLKKYSMELGGNSPVLIFEDAEIERALEAALFTIFLINGERCTAGLSIFIQQSIYPEFVKRFAERANRLRVGDPTDPNTQVGALISQQHWEKVSGYIRLGIEEGATLLAGGAEKPTDLPAHLKGGNFLRPTVLADVDNRMRVQEEIFGPVACLLPFKDEAEGLRLANDVEYGLASYIWTQDVSKVLRLARAIEAGMVFVNTQNVRDLRQPFGGVKASGTGREGGEYSFEVFAEMKNVCISMGDHPIPKWGV

SEQ ID NO: 8464 - protein, 496 aa, Thlaspi arvense
MDLLYIVAALVIFASLLIAKSKRKPKKNLPPGPPRLPIIGNLHQLGEKPHRAMVELSKTYGPLMSLKLGSVTTVVATSVETVRDVLKTYDLECCSRPYMTYPARITYNLKDLVFSPYDKYWRQVRKLTVVELYTAKRVQSFRHIREEEVASFVRFNKQAASSEETVNLSQKILKMSGSVICRIGFGINLEGSKLENTYQEIIVQAFEVLGSLAAVDYFPVIGTIIDRITGLHAKCEKVFHGIDSFFDQAIQRHIDDPSIKDDIIDLLLKMERGEGSLGEYELTREHTKGILMNILTAGIDTSAQTMTWAMTHLLANPRVMKKLQAEIREKIKNIDEITDDDVEQLDYFKLVLKETFRISPIVPVLVPRVAAKDLKIAGYDVPEKTWIHVNMWAVHMSPSIWKDPETFNPERFIDNQTDFKGLNFELLPFGSGRRMCPGMGMGLAVVHLTLINLLYRFDWKLPNGMKAEELSIEENYGLICVKKLPLEAIPVLTQWT

SEQ ID NO: 8465 - protein, 181 aa, Brassica napus
MAYSMLSSAAVVTSPAQATMVAPFTGLKSSSAFPVTRKANNDITSIVSNGGRVNSMQVWPPVGKKKFETLSYLPDLTEVELGKEVDYLLRNKWIPCVEFELEHGFVYREHGSTPGYYDGRYWTMWKLPLFGCTDSAQVLKEVQECKTEYPNAFIRIIGFDNNRQVQCISFIAYKPPSFTGA

SEQ ID NO: 8466 - protein, 159 aa, Glycine max
  unsure (1)..(159): unsure at all Xaa locations
MAEEHRCQAPRLXAPNNCGFFGSPATXNMCSKCYRDFQLKEQQSSNAKMVLNQSLVPPPPPSVISQPSSSSAPAADPASAVVVDAPRAAEELKAPQQNRCMTCRRRVGLTGFKCRCGMMLCGTHRYPEQHACEFDFKGMGREQIAKANPVVKGEKLEKI

SEQ ID NO: 8467 - protein, 243 aa, Azotobacter vinelandii
IPPIPPVDFAKYGEIEEVPMTRLMQIGATNLHRSWLNVPHVTQFESADITELEAFRVAQKAVAKKAGVKLTVLPLLLKACAYLLKELPDFNSSLAPSGQALIRKKYVHIGFAVDTPDGLLVPVIRNVDQKSLLQLAAEAAELAEKARSKKLGADAMQGACFTISSLGHIGGTAFTPIVNAPEVAILGVSKASMQPVWDGKAFQPRLMLPLSLSYDHRVINGAAAARFTKRLGDLLADIRAILL

SEQ ID NO: 8468 - protein, 130 aa, Glycine max
  unsure (1)..(130): unsure at all Xaa locations
MAPAVMASSATTVXAPFQGLKSTAGLPVSRRSGSAGLSSVSNGGRIRCMQVWPIEGIKKFETLSYLPPLSTEALLKQVDYLIRSKWVPCLEFSKVGFVFREHNSSPGYYDGRYWTMWKLPMFGCTDATQV

SEQ ID NO: 8469 - protein, 293 aa, Synechocystis sp. PCC 6803
MKTAWVFPGQGSQAVGMGVDLLSTAIAKEKYQQAEEILGWSVVEKCQGDEASLALTQNTQPCLYVIEAILADLLRDKGFQPDYVAGHSLGEYSALYAAGVFDFATGLQLVKQRSEVMASASGGMMAALMKFDQTQLQQALTDNTEVVLANDNSPEQVVISGTVAGVEAILANVKARRAVPLKVSGAFHSSFMAQPSQSFAQTLTACHFNDATVPVLSNVDPSPTQNGDRLKEKLIQQMTGSVRWRETMVNLGEIGATDYWEVGPGKVLTGLCKRTCPDLNLKNIGQLDDLNSL

SEQ ID NO: 8470 - protein, 231 aa, Vibrio vulnificus CMCP6
MNKYLAELFGTFWLVLGGCGSAVLAAAFPDVGIGLLGVSLAFGLTVLTMAFAIGHISGCHLNPAVTIGLWAGGRFEAKEIVPYILAQVIGGVIAGGVLYTIASGQMGFDATSSGFASNGYGEHSPGGYSLTSALVTEVVMTMMFLLVILGATDQRAPQGFAPIAIGLCLTLIHLISIPVTNTSVNPARSTGVALYVGDWATAQLWLFWVAPILGALLGAVAYKLISGSNKD

SEQ ID NO: 8471 - protein, 634 aa, Xanthomonas campestris pv. campestris str. ATCC 33913
MSTATNPLDLDVCAREPIHIPGLIQPYGVLLVIDPADGRIVQASTTAADLLGVPMAALLGMPYTQVLTLPEAQPFAVDDQPQHLMHAEVRFPQRATPPDSAWVAAWHLYPQQWLVEMEPRDARLLDVTLREAMPLLRSVERDPGIAEAAVRVAKGLRSLIGFDRVMIYRFDEEWNGDIIAEARKPELEAYLGLHYPASDIPAQARALYLRNRVRQIADVGYQPSPIQPTVHPQLGTPVDLSDVSLRSVSPVHLEYLANMGVTATLVASIVVNDALWGLISCHHYSPHFTNHAMRDVTDAVARTLAGRIGALQAVARARLESVLLTVREKLITDFNDAEHMTVELLDDMAPDLMDVVDADGVAIFHGNDISRHGTTPDVAALRRIRDHIESEHHDALREDAVGALHVDAIGEVFPELADLAPLAAGFIFVPLMPQSRSALLWTRREQIQQIKWAGNPQLAKLEDIPNSRLSPRKSFDLWQQTVRGRARRWSPLHLESARSLRVLIELMERKRFQQDFTLLEASLSRLRDGVAIIERGTANAAHRLLFVNTAFADVCGSDVAELIGRELQTLYASDAPRANVELLQDALRNGRAAYVTLPLQVSDGAPVYRQFHLEPLPSPSGVTAHWLLQLRDPE

SEQ ID NO: 8472 - protein, 295 aa, Xanthomonas campestris pv. campestris str. ATCC 33913
MGLPVALNVLVAHQVLAGAVAGRAAIVVPLRSWWRQQCDNPPMSESPYTSGTTHFGFRDVAAKDKQKLVGEVFTSVARNYDLMNDLMSLGIHRAWKRYFVATAQVKPGDRVLDLAGGTGDIAVLLKERVGNEGAVVLGDINAGMLSVGRDRLTNRGLVAGFDYVQCNAEALPFPDQSFDLVTISFGLRNVTDKDAALREMYRVLKVGGQARVLEFSEVTADWFKPIYDFHSFKILPKLGQLFARDADSYQYLAESIRKHPPQDSLKGMMGEAGFARCHYKNLTGGIVAIHSGYKI

SEQ ID NO: 8473 - protein, 245 aa, Corynocarpus laevigatus
ALSIAGAVQSQKLAVCAISQLQSLPGGDIKLLCDTVVESVRELTGYDRVMVYKFHEDEHGEVVAESKRADLDLYIGLHYPATDIPQASRFLFKQNRVRMIVNCHASSVRVIQDEELRQPLCLVGSTLRAPHGCHAQYMANMGSIASLAMAVVINGTDEEGTGGRNSMRLWGLVACHHTSARCIPFPLRYACEFLMQAFGLQLNMELQLALQLSEKHVLRTQTLLCDMLLRDSPTGIVTQSPSIMD

SEQ ID NO: 8474 - protein, 374 aa, Crossosoma bigelovii
ALSIAGAVQSQKLAVRAISHLQSLPSGDIKLLCDTVVENVRELTGYDRVMVYKFHEDEHGEVVAESKRPDLVPYIGLHYPATDIPQASRFLFRQNRVRMIVDCNATPVKVIQDESLMQPLCLVGSTLRAPHGCHAQYMANMGSNASLAMAVIINGNEEEGVGGRSPMKLWGLVVCHHTSARCIPFPLRYACELLMQALGPQLNMELQLASQSSEKRVLRTQTLLCDMLLRDSPTGIVTQSPSIMDLVKCDGAALYYQGKYYPLGVTPTEPQIKDIVEWLLAFHGDSTGLSTDSLADAGYQGAATLGDAVCGMAVAYITKRDFLFWFRSHTAKEIKWGGAKHHPADKDDGQRMHPRSSFKAFLEVVKSRSLPWEN

SEQ ID NO: 8475 - protein, 193 aa, Glycine max
NELGCLTSCVGTRWFRAPELLYGSTDYGLEVDLWSLGCVFAELLTSKPLFPGTSDVDQLSRIVSVLGNINEETWPGCSKLPDYGSISLGNVENPSGLEACMPNCSPNEVSLVQRLVCYDPAKRTTAMELLQDKYFSEEPLPVPISELRVPLTRNGQDQDSPGGHNEMGSDSDLEELGTLEYTTTGFYLSIQIP

SEQ ID NO: 8476 - protein, 418 aa, Zea mays
SPSSPRPAPLAAREPIIGYLEAAGKTSDRSLTPRATRPIGCTALVVCTPLVTPHSLPHIPFPPTALLAARNNMSNRATHWCYACRRPIRLRGQDIICPNCNDGFIQEISEMGGVLNTYGLIEPDFEERQARRFGMMDAISSLMRQRLSEIGRDSLFDIHGRQGTGTEYGRRSTAIPTLVFGGIPSPAVGSSDVNVVIREGRRAGAARPNFSSLVVGPSLEALFEQLLLQNNRQGPPPAPQSAIDSMPVVKINRRHLDEDPQCAVCKDKFEVGAEAREMPCKHLYHTDCIIPWLVQHNSCPVCRHPLPSQRSGSSTSSARVPSAYYNETACPPAVARADFDPVPSAYYNETATDPPAVTRADFDPAPGNYGSESQESHDPFSFLWPFGPSSSYQYEENVDEPAVYDPNQIAYSAWHYDH

SEQ ID NO: 8477 - protein, 245 aa, Eucryphia billardieri
ALSIAGAVQSQKLAVRAISQLQSLPGGHIKLLCDTVVESVRELTGYDRVMVYKFHEDEHGEVVAESKRPDLEPYIGLHYPATDIPQASRFLFKQNRVRMIVDCHATPVRVIQDEGLIQPLCLVGSTLRAPHGCHAQYMANMGSTASLAMAVIINGNDEEAIGGRNSMRLWGLVVCHHTSARSIPFPLRYACEFLMRAFGLQLNMELQLALQLSEKHILRTQTLLCDMLLRDSPTGIVTQSPSIMD

SEQ ID NO: 8478 - protein, 245 aa, Eucryphia billardieri
ALSIAGAVQSQKLAVRAISQLQSLPGGHIKLLCDTVVESVRELTGYDRVMVYKFHEDEHGEVVAESKRPDLEPYIGLHYPATDIPQASRFLFKQNRVRMIVDCHATPVRVIQDEGLIQPLCLVGSTLRAPHGCHAQYMANMGSTASLAMAVIINGNDEEAIGGRNSMRLWGPVVCHHTSARSIPFPLRHACEFLMQAFGLQLNMELQLALQLSEKHILRTQTLLCDMLLRDSPTGIVTQSPSIMD

SEQ ID NO: 8479 - protein, 245 aa, Aleurites moluccana
ALSIAGAVQSQKLAVRAISRLQSLPGGDIKLLCDTVVECVKELTGYDRVMVYKFHEDEHGEVVAESKRPDLEPYIGLHYPSTDIPQASRFLFKQSRVRMIVDCHATAVSVIQDEALMQPLCLVGSTLRAPHGCHAQYMANMGSIASLAMAVIINGNDEEAIGGRNSMRLWGLVVCHHTSARSIPFPLRYACEFLMQAFGLQLNMDLQLASQFSEKHVLRTQTLLCDMLLRDSPTGIVTQSPSIMD

SEQ ID NO: 8480 - protein, 310 aa, Vibrio vulnificus YJ016
MKVAVIGAAGGIGQALALLLKNRLPAGSDLALYDIAPVTPGVAADLSHIPTPVSIKGYAGEDPTPALEGADVVLISAGVARKPGMDRADLFNVNAGIVKSLAERIAVVCPNACIGIITNPVNTTVPIAAEVLKKAGVYDKRKLFGVTTLDVIRSETFVAELKGQDPGEVRVPVIGGHSGVTILPLLSQVEGVEFSDEEIAALTKRIQNAGTEVVEAKAGGGSATLSMGQAACRFGLALVKALQGEEVIEYAYVEGNGEHASFFAQPVKLGKEGVEEILPYGELSDFEKAALDGMLETLNGDIQIGVDFVK

SEQ ID NO: 8481 - protein, 439 aa, Emericella nidulans
MSASSTLKKAFPQVDAEGHNLPPSPAPSSPHGSRRYNIATELVYTESNDQYNASSVPIYQSATFKQSSHEGGGEYDYTRSGNPTRTHLERHLAKIMSTQRALVVSSGMAALDVITRLLRPGDEVVTGDDLYGGTNRLLKYLSTNGGIIVHHVDTTNPDKVKEVLTDKTAMVLLETPTNPLIKIVDIPTIAAASHEANPNCLVIVDNTMMSPLLLSPLELGADVVYESGTKYLSGHHDVMAGVIAVNDPALGERLYFPINASGCGLSPFDSWLLMRGVKTLKVRMDQQQANAQRIAEFLESHGFKVRYPGLRSHPQYELHHSMARGAGAVLSFETGDVSVSERIVANASVGYQRYFGCVNTLISLPCRMSHASIDAETRKERAMPEDLIRLCVGIEDVDDLIDDLSERWYKLALSTSLWTALKRTRRSQRSQVMKEYGYG

SEQ ID NO: 8482 - protein, 143 aa, Triticum aestivum
  unsure (1)..(143): unsure at all Xaa locations
MAPTVMASSATSVAPFQGLKSTAGLPVSRRSNGASLGSVSNGGRIRCMQVWPIEGIKKFETLSYLPPLSTEALLKQVDYLIRSKWVPCLEFNKVGFIFREHNASPGYYDGRYWTMXGKLPMFGCTDATKXTKVEEVKEGVPDA

SEQ ID NO: 8483 - protein, 308 aa, Zea mays
MSPRVVLLFLAALRPCAALVRLHSTTFSFTFLDAPARFGPRVSGDGICGSLRAADPAEACETIKDRGGRRGAGRKAFVLIARGNCSFEEKVRAAQQAGFDASIVYDDEEKASLYSMVGESDGIHIPAIFVSKMAGETLKKFARGEDEECCINSSMDETAGTVLVMSFVSLVVIMSVLASFLFARNCRLLRHGVDNHPPYVKKQVVEKFPCSAYSAPCSSEDNFQEACAICLEDYNNGDMPRHLPCKHGKSLRYFSTCYLKLLLLIGSYQRYGGAQPYNCYFFFLSDRYKFTNTIIYIYIYIYIYIYIY

SEQ ID NO: 8484 - protein, 298 aa, Solanum tuberosum
MCGGAILYDIIPRDRRLSSTDLWPSSADFWQTSSFSKPISTQNVPPKPKRAQLSRGSEQMKKRQRKNLYRGIRQRPWGKWAAEIRDPRKRVRVWLGTFNTAEAARAYDREARKIRGKKAKVNFPNEDDDHYYSHPEPPPLNIVYESYDTTSTYNQESNNCYPFHSIENTEPVMEFAIANKNSSGSAYNGIEDQNVEGEEQTVKNSNNRIVEEEEKTEDEVQILSDELMAYESLMKFYEIPYVDGQSVAATVNPAADTEVGGGSMELWSFDDVSRLQPSYNVSLIIVLFKLLHLFSLLN

SEQ ID NO: 8485 - protein, 317 aa, Escherichia coli O6
MTDKLTSLRQYTTVVADTGDIAAMKLYQPQDATTNPSLILNAAQIPEYRKLIDDAVAWAKQQSNDRAQQIVDATDKLAVNIGLEILKLVPGRISTEVDARLSYDTEASIAKAKRLIKLYNDAGISNDRILIKLASTWQGIRAAEQLEKEGINCNLTLLFSFAQARACAEAGVFLISPFVGRILDWYKANTDKKEYAPAEDPGVVSVSEIYQYYKEHGYETVVMGASFRNIGEILELAGCDRLTIAPALLKELAESEGAIERKLSYTGEVKARPARITESEFLWQHNQDPMAVDKLAEGIRKFAVDQEKLEKMIGDLL

SEQ ID NO: 8486 - protein, 293 aa, Xylella fastidiosa Dixon
MIASFSSIAMPHVTLLPSPSPIAFIGGGNMARSLIAGMIRQGAPSTSICVIEPIAALRDALMADFNIKAVTTATEAATDTSTWVLAVKPQVMPDVCATLPLPVQPNTPLVISIAAGITTCKLKHWLGDTCAIVRAMPNTPALLGAGVTGLFATSQTTGTQRTLAEELFNSVGKTLWITEEALMDAVTAVSGSGPAYAFLLAEAMETAAIMQGLSTANARTLVQQTLLGAARMMTESGETPAALRHRVTSPHGTTEAAITTFQENDFQALVAKAIDAATLRARALGKINDTDPT

SEQ ID NO: 8487 - protein, 191 aa, Ustilago maydis 521
MQTIKCVVVGDGAVGKTCLLISYTTNKFPSEYVPTVFDNYAVTVMIGEDPYTLGLFDTAGQEDYDRLRPLSYPQTDVFLVCFSVTSPASFENVKEKWFPEVHHHCPGVPCLIVGTQVDLRDDHAVIEKLARSKQRPVPFEAGERLARELGAVKYVECSALTQKGLKNVFDEAIVAALEPPVIRKKSKCAIL

SEQ ID NO: 8488 - protein, 508 aa, Xylella fastidiosa Dixon
MVSAWNEEVTESLFMSRKHAFQFLDLPRQMPQRIPVELRTSGDWRELYGKFDKGEAQYQAGRCLDCGNPYCSWKCPVHNAIPQWLQLVQENRIDEAAALCHATNPLPEVCGRVCPQDRLCEGSCTLEEFGAVTIGAVEKYIVDTALQQGWRPDLSHVQPTGWRVAVVGAGPAGLACADRLARAGVQAVVYDRYEQIGGLLQFGIPSFKLDKAVMSTRRQVLEGMGVEFRLGVEIGKDLGIEALLEDYDAVFLGVGAYRYTDGGLPGQDLKNVLPALPFLVQNGRIVSGNDPYGRPIAGWEDQVQLPDVTGKSVVVLGGGDTGMDCVRSAIRLGATKVTCIYRRDEANMPGSAREVANAREEGVRFLFNRQPLSIQSGTDKQAIGVTVVETKLAEPDANGRRNAVPIQGTEAVLEADVVIIAFGFSPMLLEWLTAQGVQASSNGRIVVALSDTGDRLTYQTTHPKLFAGGDCVRGADLVVTAVAEGRDAAESIVRWLRATAQVMDVAVI

SEQ ID NO: 8489 - protein, 206 aa, Kluyveromyces lactis
MNSEYDYLFKLLLIGNSGVGKSCLLLRFSDDTYTNDYISTIGVDFKIKTVELDGKTVKLQIWDTAGQERFRTITSSYYRGSHGIIIVYDVTDRESFNGVKMWLQEIDRIATSTVLKLLVGNKCDLKDKRVVEYDVAKEFADANKMPFLETSALDSTNVEDAFLTMARQIKESMSQQNLNETTQKKEDKGNVNLKGQSLTNTGGGCC

SEQ ID NO: 8490 - protein, 245 aa, Aleurites moluccana
ALSIAGAVQSQKLAVRAISRLQSLPGGDIKLLCDTVVECVKELTGYDRVMVYKFHEDEHGEVVAESKRPDLEPYIGLHYPSADIPQASRFLFKQSRVRMIVDCHATAVSVIQDEALMQPLCLVGSTLRAPHGCHAQYMANMGSIASLAMAVIINGNDEEAIGGRNSMRLWGLVVCHHTSARSIPFPLRYACEFLMQAFGLQLNMDLQLASQFSEKHVLRTQALLCDMLLRDSPTGIVTQSPSIMD

SEQ ID NO: 8491 - protein, 245 aa, Goupia glabra
ALSIAGAVQSQKLAVRAISQLQSLPGGDIKVLCDTVVESVRELTGYDRVMVYKFHEDEHGEVVAENKRPDLEPYIGLHYPSTDIPQASRFLFKQNRVRMIVDCHATPVRVIQDKGLMQPLCLVGSTLRAPHGCHAQYMANMGPTASLAMAVIITGNDEEAIGGRNSMRLWGLVVCHHTSARCIPFPLRYACEFLMQAFGLQLNMELQLASQLSEKRVLRTQTLLCGMLLRDSPTGIVTQSPSIMD

SEQ ID NO: 8492 - protein, 421 aa, Erwinia carotovora subsp. atroseptica SCRI1043
MKNSELNQRRLAATPRGVGVMCDFYAERAENSTLWDVEGREFIDFAAGIAVLNTGHRHPKIVAAVREQLDRFTHTAYQIVPYGSYVTLAERINALAPIQGAAKTTFFTTGAEAVENAVKIARAYTKRPGVIAFNAAFHGRTLLTMTLTGKVAPYSTGFGPFPGSIFHALYPNEQTGITVEQALESVERLMHTDIAADQVAAIILEPVQGEGGFHVAPPAFISGLRKLCDEHGILLIADEVQTGFARTGKLFAMEYYTEKADLITMAKSLGGGFPISGVVGRAEVMDAPSPGGLGGTYAGNPLSVASALAVLDVIEEEKLCQRAQRLGAALVETLEKVKAQCPALVAIRAQGSMVAAEFNDPNTGKPSAEITRQFQKSALEAGLLLLTCGVHGNVIRFLYPLTVPDEQFSKAMNILTRVLTR

SEQ ID NO: 8493 - protein, 570 aa, Saccharomyces pastorianus
MSHVNASYAHSQGSSTSVSRVEMEKPATKEVFEDPTPKKFELDDDEAGKTSSVFNPDLNLEEEVRALDELGDSFKRDRSFWGKMKALEFEVEFENKKNMVLMLGTFAAFAGILSGIDQSIISGASIGMNKMLHLSTHEASLVSSLMPLGAVAGSILLTPFSEYFGRKKSLAISCVFYTIGAIVCAAASNHHEMYAGRFLIGVGVGLEGGGIGVYIAESVPSSVRGSLVSLYQFNIALGELFGYIVGVIFFDVKGGWRYMVGSSLVFSTTLFIGLLFLPESPRWLMHKGRVGESWNVWKRLRDVKEEGNKIEFLELRDVASHDRELHANESRFQSLFDLVRVPRNRRALVYSCMMIGLGQLTGINAIMYYMSTLMKNIGFDDKQSVAMSMVGGAALLIGTVPAILWMDRFGRRTWAMTIIIFIVGLVLVGVGYQINLKTHMAAAEGVYLTGQIIYNMAFGSYAALTWVLPSESFSLGTRSAGMTVSSALLYLFAFTVTYNFEKMKEAMTYTGLTLGFYGGIALAIGIPYQLLCMPETKNRTLEEIDDIFEKPTSQIIKENIAYLKKGQLSY

SEQ ID NO: 8494 - protein, 343 aa, Streptomyces vinaceus
MPTCRVIRNWGVTMDPVEYEMLRHMWFPVARVADLKNGVASGSILGEELVVYGDEGSVTVAQGFCPHRGVALRLGQLRDGALECPYHGWLFETGSGRCTRIPSLPPGRGRPHTALRTHPAEVAYGLVWSCLGDPFLPLPRLPEYVDDSWRLGAGEPYTLNCGMRLLTENFRDKAHFPFVHADSMGHVDKVVQPYRISRDGWRLGWSSSLGSEGVPEDLAEELSHRLDYHITMPVFASICVSSPSGGRRLVAQVATPVSADGKAVRQFWLAGTDAESTAQGAVLADVLGFERQVFEEDHPIVENQWPVEAPLDVHSQVHTPADRFSITYRKVYGELLMNFKESR

SEQ ID NO: 8495 - protein, 245 aa, Goupia glabra
ALSIAGAVQSQKLAVRAISQLQSLPGGDIKVLCDTVVESVRELTGYDRVMVYKFHEDEHGEVVAENKRPDLEPYIGLHYPSTDIPQASRFLFKQNRVRMIVDCHATPVRVIQDKGLMQPLCLVGSTLRAPHGCHAQYMANMGSTASLAMAVIITGNDEEAIGGRNSMRLWGLVVCHHTSARCIPFPLRYACEFLMQAFGLQLNMELQLASQLSEKRVLRTQTLLCDMLLRDSPTGIVTQSPSIMD

SEQ ID NO: 8496 - protein, 250 aa, Triticum aestivum
MAGAGALFFLFSFCLLARQAAAGGYGGWQSAHATFYGGGDASGTMGGACGYGNLYSTGYGTNTAALSTALFNDGAACGTCYELRCDNAGSSCRPGSILVTATNFCPPNYGLPSDDGGWCNPPRPHFDMAEPAFLHIAQYRAGIVPVSYRRVPCVKKGGIRFTINGHSYFNLVLVTNVAGAGDARSVSIKGTRTGWQAMSRNWGMNWQSNTFLDGQCLSFRVTPSDGRTVTSNNAAPAGWSFGQTFEGAQF

SEQ ID NO: 8497 - protein, 318 aa, Triticum aestivum
  unsure (1)..(318): unsure at all Xaa locations
TIGQCWRHERPPAGRRREHYQWNMDIFGMPKVRAEAELIQAIVLLFERLGITSSDVGIRLSSRKVLQAVLDMYSVPQHLFTQVCVIVDKLGKLSREEIEKELISTGLSSEAVQGIIEVLSLKSLSKLDDPLGSGXEAVADLKKFFSLAEQYGYADWICFDASVVRGLAYYTGIVFEAFDREGELRAICGGGRYDRLLSTFGTEDVPACGFGFGDAVIVELLKEKGLLPDLPRQIDDIVFPLDEELEGPASSVASSLRKKGRSVDLVEDKRLKWVFKHAERINASRLILVGKSEWERGMVRVKILSTREEFEVKAGELQ

SEQ ID NO: 8498 - protein, 245 aa, Afrostyrax sp. Cheek 5007
ALSIAGAVQSQKLAVRAISQLRSLPGGDIKLLCDTVVESVRELTGYDRVMVYKFHEDEHGEVVAESKRSDLEPYLGLHYPATDIPQASRFLFKQNRVRMIVDCNAMPVPVSQDEGLMQPLCLVGSTLRAPHDCHAQYMANMGSIASLAMAVIINGNDDEAIGGRNSMRLWGLVVCHHTSARCIPFPLRYACEFLMQAFGLQLNMELQLASQLLEKHVLRTQTLLCDMLLRDSPTGIVTQNPSTMD

SEQ ID NO: 8499 - protein, 245 aa, Afrostyrax sp. Cheek 5007
ALSIAGAVQSQKLAVRAISQLQSLPGGDIKLLCDTVVESVREHTGYDRVMVYKFHEDEHGEVVAESKRSDLEPYLGLHYPATDIPQASRFLFKQNRVRMIVDCNAMPVPVSQDEGLMQPLCLVGSTLRAPHDCHAQYMANMGSIASLAMAVIINGNDDEAIGGRNSMRLWGLVVCHHTSARCIPFPLRYACEFLMQAFGLQLNMESQLATQLVEKHVLRTQTLLCDMLLRDSPTGIVTQNPSTMD

SEQ ID NO: 8500 - protein, 399 aa, Ralstonia metallidurans CH34
MSTSPSRQSSLTEAPPRARDVVHALRASRIREVANAGIGLPDVLPFWFGESDQVTPSFIRDAASRALANGATFYNHNLGIAPLRAALSEYVTRLHGATPVDHIAVTSAGVNALMLAAQLVTGPGDRVVAVTPLWPNLVEIPRILGAAVETVTLDYGADGWTLDVDKLLAALTPGTRAVMINSPNNPTGWVMPRGAQQAVLDHCRRHGIWIIADEVYERLYYGDEGAVAPSFLDIAGRDERVIAVNSFSKAWLMTGWRLGWMVVPSSMMDDLGKLIEYNTSCAPSFVQEAGVVAVREGEAFTQDLVKRLRSARDHLVSALSALPGIDAHAPDGAMYVFFRLKGATDSLDLCKRLVRDAHLGLAPGSAFGDEGEGFVRWCYACDEARLDEGVKRLRGYLGR

SEQ ID NO: 8501 - protein, 345 aa, Arabidopsis thaliana
MFIAVEVSPVMEDITRQSKKTSVENETGDDQSATSVVLKAKRKRRSQPRDAPPQRSSVHRGVTRHRWTGRYEAHLWDKNSWNETQTKKGRQVYLGAYDEEDAAARAYDLAALKYWGRDTILNFPLCNYEEDIKEMESQSKEEYIGSLRRKSSGFSRGVSKYRGVAKHHHNGRWEARIGRVFGNKYLYLGTYATQEEAAIAYDIAAIEYRGLNAVTNFDISRYLKLPVPENPIDTANNLLESPHSDLSPFIKPNHESDLSQSQSSSEDNDDRKTKLLKSSPLVAEEVIGPSTPPEIAPPRRSFPEDIQTYFGCQNSGKLTAEEDDVIFGDLDSFLTPDFYSELNDC

SEQ ID NO: 8502 - protein, 427 aa, Cytophaga hutchinsonii
MSLIEEIVARQIFDSRGNPTIEVDVITENGLIGRAAVPSGASTGKHEAVELRDNDKSIYMGKSVLKAVANVNDIIAPELIGSHVFEQNLIDRLMIDLDGTANKGKLGANAILGVSLALAKAAAQEAGLPLYRYVGGVSANTLPVPMMNIINGGSHADNSIDFQEFMIMPTGAKSFTEAMRMGSEIFHNLAKVLKSKGMSTNVGDEGGFAPNIASNEDALITVIQAIEAAGYRPGEDVMIAFDAASSEFYDSETKLYHFKKSTGDKLTSSQMASYWADLVKRYPIVSIEDGMDEDDWSGWAELTKLVGDKVQLVGDDLFVTNVSRLQQGIDQGIANSILVKVNQIGSLTETISAVNLAKRNSYTSVMSHRSGETEDNTIADLAVALNCGQIKTGSCSRSDRMAKYNQLLRIEEELGEAAYFPGKNMRK

SEQ ID NO: 8503 - protein, 143 aa, Nicotiana tabacum
MADDDYDMDGGYVDEPIEPEPDEGAEIEEDNGNNEDIPDPLLGEGEEKTEQEPVERPRKTSKYMTKYERARILGTRALQISMNAPVMVELEGETDPLEIAMKELRERKIPFTIRRYLPDGSYEDWGVDELIVEDSWKRQVGGT

SEQ ID NO: 8504 - protein, 298 aa, Aegilops speltoides subsp. ligustica
FSLAPLVPRLSELLGIAVKKAEDVIGPEVEKLVADLENGAVLLLENVRFYKEEEKNDPEFAKKLASLADLFVNDAFGTAHRAHASTEGVTKFLKPSVAGFLLQKELDYLDGAVSNPKRPFAAIVGGSKVSSKIGVIESLLEKCDILLLGGGMIFTFYKAQGLSVGSSLVEEDKLELATSLLAKAKAKGVSLLLPSDVIIADKFAPDANSQTVPASAIPDGWMGLDIGPDSVKTFNDALDTTQTIIWNGPMGVFEFDKFAVGTESIAKKLAELSKKGVTTIIGGGDSVAAVEKVGVADV

SEQ ID NO: 8505 - protein, 298 aa, Aegilops speltoides subsp. speltoides
FSLAPLVPRLSELLGIEVKKAEDVIGPEVEKLVADLANGAVLLLENVRFYKEEEKNDPEFAKKLASLADLFVNDAFGTAHRAHASTEGVTKFLKPSVAGFLLQKELDYLDGAVSNPKRPFAAIVGGSKVSSKIGVIESLLEKCDILLLGGGMIFTFYKAQGLSVGSSLVEEDKLELATSLLAKAKAKGVSLLLPSDVIIADKFAPDANSQTVAASAIPDGWMGLDIGPDSVKTFNDALDTTQTIIWNGPMGVFEFDKFAVGTESIAKKLAELSKKGVTTIIGGGDSVAAVEKVGVADV

SEQ ID NO: 8506 - protein, 483 aa, Lycopersicon esculentum
MVSISKNNQKQQLLSKIATNDGHGENSPYFDGWKAYANNPFHPTDNPTGVIQMGLAENQLCFDLIQEWMVNNPKASICTVEGAENFQDIAIFQDYHGLPEFRQAVARFMEKVRGDRVTFDPNRIVMSGGATGAHEMLAFCLADPGDAFLVPTPYYPGFDRDLRWRTGVQLFPVVCESCNDFKVTTKALEEAYEKAQQSNIKIKGLLINNPSNPLGTLLDKDTLRDIVTFINSKNIHLVCDEIYAATVFDQPRFISVSEMVEEMIECNTDLIHIVYSLSKDLGFPGFRVGIVYSYNDTVVNISRKMSSFGLVSTQTQHMLASMLSDEIFVEKFIAESSERLGKRQGMFTKGLAQVGISTLKSNAGLFFWMDLRRLLKEATFDGELELWRIIINEVKLNVSPGCSFHCSEPGWFRVCFANMDDETMRIALRRIRNFVLQTKGLNNIAAIKKQCSRSKLQISLSFRRLDDFNSPAHSPMNSPLVRT

SEQ ID NO: 8507 - protein, 298 aa, Aegilops speltoides subsp. speltoides
FSLAPLVPRLSELLGIEVKKAEDVIGPEVEKLVADLANGAVLLLENVRFYKEEEKNDPEFAKKLASLADLFVNDAFGTAHRAHASTEGVTKFLKPSVAGFLLQKELDYLDGAVSNPKRPFAAIVGGSKVSSKIGVIESLLEKCDILLLGGGMIFTFYKAQGLSVGSSLVEEDKLELATSLLAKAKAKGVSLLLPSDVIIADKFAPDANSQTVPASAIPDGWMGLDIGPDSVKTFNDALDTTQTIIWNGPMGVFEFDKFAVGTESIAKKLAELSKKGVTTIIGGGDSVAAVEKVGVADV

SEQ ID NO: 8508 - protein, 403 aa, Vibrio vulnificus CMCP6
MTVEMKVERGLFDEVMVPCYNPMEMIPVKGQGSRIWDQNGNEYIDFAGGIAVSCLGHCHPVMVNALTEQAGKLWHLSNVMTNEPALRLAKKLTEVSFAERVFFANSGAEANEAALKLARRYAADVYGPEKSEIIAFKQGFHGRTFFTVTVGGQAAYSDGFGPKPGDVTHLPYNDIEALQAHISDRTCAVMMEPLQGEGGIIPPTAEFIQAVRELCDKHNALLVFDEVQTGNGRTGEFYAYQGLGVTPDILSTAKSLGGGFPIGAMLTTAKLAEHLKVGTHGSTYGGNPLACAVAEAVVTEVSKPETLQGVKEREQWFREGLAKLNEKYQIFAEIRGKGLLLGAALNEQWKGRARDVLVAAGKEGLLVLVAGANVVRFTPSLVITKQEIEEGFAKLDKAIASLV

SEQ ID NO: 8509 - protein, 546 aa, Streptomyces coelicolor A3(2)
MQHDRAGRPAGPEDLIDVARLVTAYYALHPDPGEPAQRVAFGTSGHRGSSLVAAFNDDHIAATSQAICEYRSAQGTDGPLFLGADTHALSEPARVTALEVFAANDVTVLIDSADGYTPTPAVSHAILTHNRGRTSGLADGVVVTPSHNPPADGGFKYNPPNGGPAGSDATSWIQDRANEIIAAGLKDVRRIPYARALAAPGTGRHDFLDAYVRDLPSVLDLDAIRSAGVRIGADPLGGASVAYWGRIAEQHRLDLTVVNPLADPTWRFMTLDWDGKIRMDCSSPHAMASLIQGRDRFDIATGNDADADRHGIVTPDAGLMNPNHYLATAIAYLYAHRADWPAGAGVGKTLVSSGMIDRVAADLGRRLVEVPVGFKWFVDGLVDGSLGFGGEESAGASFLRRDGSVWTTDKDGIILALLASEITAVTGKTPSEHYAALTARFGDPAYARIDAPATREEKARLARLSPAQVTADTLAGEPVTAVLTEAPGNGAPIGGIKVTTENAWFAARPSGTEDVYKIYGESFLGADHLRQVQDEAKLVVLGALGG

SEQ ID NO: 8510 - protein, 665 aa, Zea mays
MVTLLAFRLPPLFFFFLVLLPLIAAAADDGNMPQEGAEAMAALLNLKKSFADPTGRLEAWSAASPFAPCDAASPWPGVQCYKGSLVGIRLTHMNLSGTFDFGAVAKLPRLHSVNLKHNAFSGPLPPSLGTLRGLRALYLSSNNFSGPIPAAVFANMRWLKKLYLDNNRITGPLPADAIASAPRLIELHLDHNQIDGPVPSKLPDSLKRFNVSHNRLSGSIPPSVAVRYDASSFAGNPGLCGSQGSDAAVCVAAGPALPPAMPSPTEADYAATEEETSVFVVVGIILLVILLVSGAMVLMLRQDERNSAAPAWDYYAGTAAGAGASKSAAPRAGEMVAVDVAGGSSSHGGRRMGEFVLLNDHIPAFGLPDLMKASAEVLGNGTLGSAYKAAMRNGVTVAVKRLRDMNRVGREEFEQHVQMLGGLHHPNVLPPVGYHYRKEEKLIVSEYMPRGSLLYILHGDQSPNRLILDWQGRLRVAVGVVRGLAFLHERLGIPAGRLVSMDGADFDAPPPPPPHGNLKSGNILLDADMEPRLVDYGFFPLVNAAQAPQAMFAFRSPEGTTRGVVSARSDVYCLGVVLLELVTGRFPSQYLLNARGGTDVVNWAATAVAEGGERDLVDPAIAAAGRDAAVRLLRVGVRCANPEPERRPSVAEAASMVEEIGAGAS

SEQ ID NO: 8511 - protein, 360 aa, Magnaporthe grisea 70-15
MGYPETFEGFCVDSPKTWNKFSKQELKPKPFEDYDIDVEIAACGVCGSDIHTLTGGWGDFQGPLCVGHEVVGRAVRVGSKVRSEIKEGDRVGVGAQVWACLKCKVCESKNENYCPHMVDTYNAKYEDGSSAHGGYASHIRAHEYFTFKIPDGLETEIAAPLLCAGITVYSPLFRAGVGPGKKVAVVGIGGLGHLGVQFSKALGAETYAITHSKNKVEDAKKLGAKEVIVSSDKDWHKPYAFTFDFILNAADALDQFDLPAYMSTLNIEGQFHTVGISDKPVPQLTAFAFAPNAAKLTGSHLGNHQEMDAMLKLAAEKNVKPWVETIDVSEEGCKKAVEGVKDNKVRYRYTLTGFDKAFSR

SEQ ID NO: 8512 - protein, 251 aa, GIBBERELLA ZEAE PH-1
MSRRYDSRTTIFSPEGRLYQVEYALEAISHAGTAIGILAKDGIVLAAERKVTSKLLEQDTSAEKLYILNDNMICAVAGMTADANILINYARQAAQRYLLTYNEDIPCEQLVRRLCDLKQGYTQHGGLRPFGVSFIYAGWDPRRQFQLYLSNPSGNYGGWKATSAGANNASAQSLLKQDYKEDCTLKEACGMAVKVLSKTMDSTKLSSEKIEFATVGQTEDGKIYHRLWSADEITALLKEHDLAKNEETEEK

SEQ ID NO: 8513 - protein, 245 aa, Reinwardtia trigyna
ALSIAGAVQSQKLAIRAISQLQSLPGGDIKLLCNTVVDCVRELTGYDRVMVFKFHEDEHGEVVAENKRADLEPYLGLHYPATDVPQASRFLFKQNRVRMIVDCHASAVRVVQDEGLVQPLCLVGSTLRAPHGCHAQYMANMGSIASLAMAVVITGNDEEGTGGRNSTRLWGLVVCHHTSARCIPFPLRYACEFLMQAFGLQMNVELQLASQLLEKHVMRTQTLLCDMLLRDSPTGIVTQSPSIMD

SEQ ID NO: 8514 - protein, 441 aa, Ralstonia metallidurans CH34
MTHVFHRNPKQTLPVAVGGQGIELIDSNGRRYLDASGGAAVSCLGHGHPRVIEAIKAQVDTIAYAHTSFFTTEVSETLAQTLADAAPGDLDHVYFVSGGSEAVEAALKLARQYFVEIGQTQRRHFIARRQSYHGNTLGALAIGGNAWRREPFLPLLVPAHHVSPCYAYRDQAAGEADTQYAQRLADELEAKILELGPDSVAGFVAETVVGATAGAVPPVADYLKRIRAVCDKYGVLLILDEVMSGMGRTGYLFACEEDGVVPDIVTIAKGLGAGYQPIGAMLSTSRIYDAIIGGSGFFQHGHTYIGHATACAAALAVQRTIVEDKLLDNVLARGEQLRARLRESLGDHPNLGDVRGRGLFVGVEFVADRATKATLDPAKKTHAVLKRTCMEHGVLVYPMGGTVDGIHGDHVLFAPPFICTPTDIDNIVDRFTQAVKTVLPA

SEQ ID NO: 8515 - protein, 102 aa, Zea mays
  unsure (1)..(102): unsure at all Xaa locations
NPAVKRILQEVKXMQSNPSPDFMSLPLEEDIFEWQFAILGPRDSEFEGGIYHGRIQLPSDYPFKPPSFMLLTPSGRFEIQKKICLSISNYHPEHWQPSWSGE

SEQ ID NO: 8516 - protein, 365 aa, Averrhoa carambola
ALSIAGAVQSQKLAVRAISQLQLLPGGDIKLLCDTVVESVRELTGYDRVMVYKFHEDEHGEVVAESKRPDLEPYIGLHYPATDIPQASRFLFKQNRVRMIVDCNAKPVRVIQDEGLMQPLCLVGSTLRAPHGCHAQYMANMGSIASLAMAVIINGNDEEAIGGRNSMRLWGLVVCHHTSARCIPFPLRYACEFLMQAFGLQLNMELQLASQLSEKHVLRTQTLLCDMLLRDSPTGIVTQSPSIMDLVKCDGAALYYQGKYYRLGVTPTEAQIKDIIEWLLAFHGDSTGLSTDSLADAGYPGATSLGDAVCGMAVAYITKTDYLFWFRSHTAKEIKWGGAKHHPEDKDDGQRMHPRSSFKAFLEVV

SEQ ID NO: 8517 - protein, 365 aa, Averrhoa carambola
ALSIAGAVQSQKLAVRAISQLQLLPGGDIKLLCDTVVESVRELTGYDRVMVYKFHEDEHGEVVAESKRPDLEPYIGLHYPATDIPQASRFLFKQNRVRMIVDCNAKPVRVIQDEGLMQPLCLVGSTLRVPHGCHAQYMANMGSIASLAMAVIINGNDEEAIGGRNSMRLWGLVVCHHTSARCIPFPLRYACEFLMQAFGLQLNMELQLASQLSEKHVLRTQTLLCDMLLRDSPTGIVTQSPSIMALVKCDGAALYYQGKYYRLGVTPTEAQIKDIIEWLLAFHGDSTGLSTDSLADAGYPGATSLGDAVCGMAVAYITKTDYLFWFRSHTAKEIKWGGAKHHPEDKDDGQRMHPRSSFKAFLEVV

SEQ ID NO: 8518 - protein, 360 aa, Acanthothamnus aphyllus
AVQSQKLAVRAISHLQSLPGGDIKLLCATVVDSVRDLTGYDRVMVYKFHEDEHGEVVAESKRPDLEPYIGLHYPATDIPQASRFLFKQNRVRMIVDCRASPVGVRQDDGLMQPLCLVGSTLRAPHGCHAQYMENMGSKASLAMAVIINGNDEESIGGRNATRLWGLVVCHHTSARCIPFPLRYACEFLMQAFGLQLNMELQLAAQLSEKHVLKTQTLLCDMLLRDSPTSIVTQSPSIMDLVKCDGAALYYQGKYYPLGVTPAEAQIKDIVEWLLAFHGDSTGLSTDSLGDAGYPGAALLGNAVCGMAVAYITNRDFLLWFRSHTTKEIKWGGAKHHPEDKDDGQRMHPRSSFKAFLEVVK

SEQ ID NO: 8519 - protein, 350 aa, Burkholderia fungorum LB400
MSTTYAYAATDATAPLAPFEIQRRELRAHDVQMEVLFCGVCHSDLHQARNEWKNTVFPVVPGHEIVGRVTAVGPDVTKHKVGDLVGVGCLVDSCRTCASCEEGLEQYCENGFVGTYNGVDRVDGQITYGGYSTQLVVDEEFTLSVPDNLDPAGVAPLLCAGITTYSPLRTWGAGPGKKVGIVGLGGLGHMGVKLAHAMGAHVVLFTTSPSKIEDAKRLGAHEVVISKNAAEMEAHLNSFDFILNTVAAQHDLNPFLNLLKRDGTMTLVGAPEHDHPSPQVFNLIFKRRRLAGSLIGGIAETQEMLDFCGEHGITSDIEVIPMQGINEAYERMLKSDVKYRFVIDLDSLRK

SEQ ID NO: 8520 - protein, 363 aa, Vibrio vulnificus YJ016
MTDKTYKIAVLPGDGIGPEVMAQAHKVLDAIEKKHAIHFEREEHDVGGIAIDNHGCPLPQSTVTACEESDAVLFGSVGGPKWEHLPPNDQPERGALLPLRKHFQLFCNLRPAQIHSGLEAFSPLRADISGRGFDIVVVRELTGGIYFGQPKGREGEGANEKAYDTEIYHRFEIERIAKIAFESARLRRKKVCSIDKANVLQSSILWREVVEEIAKDYPDVELSHMYIDNATMQLIKDPAQFDVMLCSNIFGDIISDECAMITGSMGMLPSASLNESKFGLYEPAGGSAPDIAGKNIANPVAQILSAALMLRYSLGEEAAAQDIENAVSQALAAGELTADLAGDKPALSTAEMGDKIAQYILNS

SEQ ID NO: 8521 - protein, 298 aa, Secale cereale
FSLAPLVPRLSELLGIEVKKAEDVIGPEVEKLVADLANGAVLLLENVRFYKEEEKNDPEFAKKLASLADLFVNDAFGTAHRAHASTEGVTKFLKPSVAGFLLQKELDYLDGAVSNPKRPFAAIVGGSKVSSKIGVIESLLEKCDILLLGGGMIFTFYKAQGLSVGSSLVEEDKLELATSLLAKAKAKGVSLLLPSDVVIADKFAPDANSQTVAASAIPDGWMGLDIGPDSVKTFNDALDTTQTIIWNGPMGVFEFDKFAVGTEAIAKKLAELSKNGVTTIIGGGDSVAAVEKVGVADV

SEQ ID NO: 8522 - protein, 713 aa, Agrobacterium tumefaciens str. C58
MARKPNSTSSITATIHDQQLIRGAGGELHQIATGDEPVLTTAQGAPVADDQNSLRIGPRGPLVVDDFHFREKIFHFDHERIPERVVHARGYGAHGYFETYDSLATHTKADLFQRAGERTPAFVRFSTVAGNKGSADLARDVRGFAVKLYTKEGNWDLVGNNIPVFFIQDAIKFPDLVHAAKQEPDRAFPQAQTAHDTFWDFISLTPESMNMVMWIMSDRTIPRSFRFMEGFGVHTFRFINAKEQSTFVKFHWKPKLGLQSVAWNEAVKINGADPDFHRRDLWTAIQSGNFPEWELQVQLFDQDFADSFDFDVLDPTKIIPEEILAPKPVGRLVLDRMPDNFFAETEQVAFMTQNVPPGIDFSNDPLLQGRNFSYLDTQLKRLGGPNFTHLPINAPKCPFAHFQQDGHMAMRNPTGRANYQPNSFGEGQRESPTRGFQHFAAEEQGVKARLRPESFADHYSQARQFYISQTPPEQRHIASALTFELSKVETVEIRERMVSHLLNIDETLATTVAQKLGLQTMPEPANTAIPTRQDLEPSPALSIVERGPKRFEGRKLGILITDGVDAKLLKGLTQAVTAEKAVFEFIAPKVGGVTASNGTLIEAHHMIDGGPSVLFDAVALLTSEAAIAELTEEATARDFVADAFQHCKFIGYDRSALPLLEIAGIADAMDEGVLPLPGEEGLAAFVAELGKLRVWAREPSLKLGKASVPVNKE

SEQ ID NO: 8523 - protein, 298 aa, Hordeum vulgare subsp. vulgare
FSLAPLVPRLSELLGIEVKKADDVIGPEVEKLVADLANGAVLLLENVRFYKEEEKNDPEFAKKLASLADLFVNDAFGTAHRAHASTEGVTKFLKPSVAGFLLQKELDYLDGAVSNPKRPFAAIVGGSKVSSKIGVIESLLEKCDILLLGGGMIFTFYKAQGLSVGSSLVEEDKLELATSLLAKAKAKGVSLLLPSDVVIADKFAPDANSQTVAASAIPDGWMGLDIGPDSVKTFNDALDTTQTIIWNGPMGVFEFDKFAVGTEAVAKKLAELSKKGVTTIIGGGDSVAAVEKVGVADV

SEQ ID NO: 8524 - protein, 298 aa, Zea mays
FSLAPLVPRLSEFLGIQVIKADDVVGPEVEKLVSALPNGNVVLLENVRFYKEEEKNDPEFAKKLASLADLYVNDAFGTAHRAHASTEGVTKFLKPSVAGFLLQKELDYLVGAVSNPKRPFAAIIGGSKVSSKIGVIESLLEKCDILLLGGGMIFTFYKAQGHSIGSSLVEDDKLELATSLLRKAKEKGVSLMLPFDLVVADKFAPDASSQVVPASAIPDAWMGLDIGPDSISAFSSALETTQTVIWNGPIGVFEFDKFAVGTKAIAKKLAELSGKGVTTIVGGGDSIAAVEKVGVADS

SEQ ID NO: 8525 - protein, 464 aa, Oryza sativa
  unsure (1)..(464): unsure at all Xaa locations
TRSNPSSPSTRPPPPPPSAARASARRAVTACLATPTPTPPTPTSAPLAPAAAAARRELSAASRAVVEDEARYIGRTYNRSRVVLVAGRGCELYDADGREYLDMAAGIAVNALGHADPDWVAAVSAQAATLVHASNVQYTVPQVALAKRLVEASFADRVFFANTGTEANEAAIKFARKFQRVARPDGDAPTEFMSFTNCFHGRTMGSLALTSKVQYREPFAPVMPGATFAEYGNLEXGKKVIQSGKIAAVFVEPMQGEGGIHSATKEFLQGLRDACDEAGALLVFDEVQCGLGRTGYLWAYEAYGVVPDIMTLAKPLAGGLPIGVVLVTEKVASAINFGDHGTTFGGGPLVCQAALTTLDKIQKPGFLAEVAKKGENFKQLLSTKLSGNAHVKEIRGIGLIVGIELDVPAGPLVDACLDRGVIVLTAGKGNVVRLVPPLIISEKELEQAAEVIRDCLPALDASTS

SEQ ID NO: 8526 - protein, 492 aa, Cucurbita pepo
MDPYRHRPSSAFNAPFWTTNSGAPVWNNNSSMTVGPRGPILLEDYHLVEKLANFDRERIPERVVHARGASAKGFFEVTHDITNLSCADFLRAPGVQTPVIVRFSTVIHERGSPETLRDPRGFAVKFYTREGNFDLVGNNFPVFFIRDGMKFTRHVHPLKPNPKSHIQENWRILDFFSHHPESLNMFSFLFDDIGIPQDYRHMDGSGVNTYTLINKAGKAHYVKFHWRPTCGVKSLLEEDAIRVGGSNHSHATQDLYDSIAAGNYPEWKLFIQTIDPDHEDKYDFDPLDVTKTWPEDILPLQPVGRMVLNKNIDNFFAENEQLAFCPAIIVPGVYYSDDKLLQTRIFSYADTQRHRLGPNYLQLPANAPKCAHHNNHHEGFMNFMHRDEEVNYFPSRFDPSRHAERYPHPPAVCSGKRERCIIEKENNFKEPGERYRSWTPDRQERFVRRWVDALSDTRVTHEIRSIWISYWSQADRSLGQKLASHLNVRPSI

SEQ ID NO: 8527 - protein, 114 aa, Leavenworthia stylosa
LVEKFGIDPNNAFAFWDWVGGRYSVCSAVGVLPLSLQYGFSVVEKFLKGASSIDQHFKSTSLEENIPVLLGLLSVRNVSFLGYPARAILPYSQALEKFAPHIQQVSMESNGKGV

SEQ ID NO: 8528 - protein, 492 aa, Ricinus communis
MDPYRNRPSSGFNTPFWTTNSGAPVWNNNSSLTVGSRGPILLEDYHLIEKLANFDRERIPERVVHARGASAKGFFEVTHDVSHLTCADFLRAPGVQTPVIVRFSTVIHERGSPETLRDPRGFAVKFYTREGNFDLVGNNFPVFFIRDGMKFPDVVHAFKPNPKSHLQENWRIFDFLSHVPESLHMLTFLLDDLGIPQDYRHMEGSGVNTYTLINKAGKVHYVKFHWKPTCGVKCLLENEAIKVGGSNHSHATQDLYDSISAGNYPEWKLYIQIMDPAHEDKFDFDPLDVTKTWPEDILPLQPVGRLVLNKNIDNFFAENEQLAFCPGIVVPGVSYSEDKLLQTRIFSYSDTQRHRLGPNYLQLPVNAPKCAHHNNHHEGFMNFMHRDEEVNYFPSRCDPARNAESFPVPSAICSGKREKCVIEKENNFKQPGERYRSWAPDRQERFLNRLVGGLSDPRITHELRTIWISYWIQCDKSLGQKLATRLNVKPSI

SEQ ID NO: 8529 - protein, 492 aa, Triticum aestivum
MDPYKYRPSSSFNAPMWSTNSGAPVWNNDNSLTVGSRGPILLEDYHLVEKIADFDRERIPERVVHARGATAKGFFEVTHDVSHLTCADFLRAPGVQTPVIVRFSTVIHERGSPETLRDPRGFAVKFYTREGNWDLLGNNFPVFFIRDGIKFPDVVHALKPNPKSHVQEYWRVFDFLSHHPESLHTFFFLFDDVGMPADYRHMDGSGVNTYTLVNRAGKAHYVKFHWKPTCGVKSLLEEEAVTVGGTNHSHATKDLTDSIAAGNYPEWTFYIQTIDPDHEERFDFDPLDVTKTWPEDVVPLQPVGRLVLNRNIDNFFAENEQLAFCPGIIVPGVYYSDDKLLQTRIFSYSDTQRHRLGPNYLLLPANAPKCSHHNNHYDGLMNFMHRDEEVDYFPSRFDPAKHAPRYPIPSRTLNGRREKMVIEKENNFKQPGERYRSMDPARQERFINRWIDALSDPRLTHEIKAIWLSYWSQADKSLGQKLASRLSSKPSM

SEQ ID NO: 8530 - protein, 492 aa, Cucurbita pepo
MDPYKYRPSSAYNTPFCTTNSGAPIWNNTAVMSVGERGPILLEDYQLIEKIATFTRERIPERVVHARGASAKGFFEVTHDVSDLSCADFLRAPGVQTPVIVRFSTVIHERVSPETVRDPRGFAVKFYTREGNFDLVGNNFPVFFVRDAMQFPDVIRAFKPNPKSHLQESWRFLDFCSYHPESLLSFAWFYDDVGIPINYRHMEGFGVQAYSLINKAGKARLVKFHWKPTCGVKSMLEEEAIRVGGSNHSHATQDLYESIAAGNFPEWRLYIQTIDYEDQNNYDFEPLDTTIAWPEDVVPLRPVGRLVLNKNIDNFFAENEMLAFSMSLVPGIHYSDDKMLQARSFAYADTQRHRLGPNYLQLPVNAPKCPHHNNHHEGFMNFMHRDEEVNYFPSRYDACRHAEKYPMPPNVLSGKRERCVIPKENHNFKQAGDRYRSWAPDRQERFVNRFVEALSDSKVTHEVRNIWISYWTQADRSLGQKIASRMNARPNM

SEQ ID NO: 8531 - protein, 114 aa, Leavenworthia stylosa
LVEKFGIDPNNAFAFWDWVGGRYSVYSAVGVLPLSLQYGFSVVEKFLKGASSIDQHFKSTSLEENIPVLLGLLSVWNVSFLGYPARAILPYSQALEKFAPHIQQVSMESNGKGV

SEQ ID NO: 8532 - protein, 634 aa, Ustilago maydis 521
MCGILGCIHHPDAPAYRGKMLNMSRCIRHRGPDWSGCVVTQEEGSKGSILCHERLAIVGISTGAQPLVSTDGKLILAVNGEIYNHRQLRKNLKDQNAEFKTESDCEVILHLYREHGSDFVKMLDGMFSFILLDTTTTPHRVIAARDPIGITTLYQGASYKYPGAIYFSSELKAIHEECDRIRSFPPGHFYDSSLPEGKETVRYYTPSWLDGDAEGATIPTNPTDLKQIREALEKAVRKRLMSEVPYGVLLSGGLDSSLIASIAARETDKMADLQRKQWEERQARRSRGLTTPAGDANGAKLPVGLDEDADNEVENLAAWPRLHSFSIGLPGSPDLIAARKAAQFLGTVHHEYTFTVQEGLDAIADVIFHLETYDVTTVRASTPMYLLSRKIKAMGVKMVLSGEGSDEIFGGYLYFHAAPDKTSFHQECVRRVKNLHTADCLRANKSTMAWGLEARVPFLDKAFLDVAMNTDAADKMFSKGSLQQVDADGRPRMEKYILRKAFDVIPDDIEAGGDGSGSMLSASAPRKPYLPEDILWRQKEQFSDGVGYSWIDGIKDHAEKTVSDEKFQERAKRYPNDTPDTKEAYMIREIFESWFPSEAAASTAVRWIPRADWGCAADPSGRAVNIHESAYSTE

SEQ ID NO: 8533 - protein, 139 aa, Xylella fastidiosa 9a5c
MFAVVSIHQGERIIEYKGRIRTHAAVDANSHGHIESGHTFLFTLNDDYVIDANDAGNIARWINHSCSPNCEAVVEEDTGGNRRKDKIFIQAIRDIASGEELTYNYGIVLAERHTARLKKIWACLCGSDHCTHTMLQPKR

SEQ ID NO: 8534 - protein, 422 aa, Staphylococcus aureus subsp. aureus Mu50
MTAEKITQGTEGLNVPNEPIIPFIIGDGIGPDIWKAASRVIDAAVEKAYNGEKRIEWKEVLAGQKAFDTTGEWLPQETLDTIKEYLIAVKGPLTTPIGGGIRSLNVALRQELDLFTCLRPVRWFKGVPSPVKRPQDVDMVIFRENTEDIYAGIEFKEGTTEVKKVIDFLQNEMGATNIRFPETSGIGIKPVSKEGTERLVRAAIQYAIDNNRKSVTLVHKGNIMKFTEGSFKQWGYDLALSEFGDQVFTWQQYDEIVENEGRDAANAAQEKAEKEGKIIIKDSIADIFLQQILTRPAEHDVVATMNLNGDYISDALAAQVGGIGIAPGANINYETGHAIFEATHGTAPKYAGLNKVNPSSVILSSVLMLEHLGWQEAADKITDSIEDTIASKVVTYDFARLMDGAEEVSTSAFADELIKNLK

SEQ ID NO: 8535 - protein, 114 aa, Leavenworthia stylosa
LVEKFGIDPNNAFAFWDWVGGRYSVCSAVGVLPLSLQYGFSVVEKFLKGASNIDQHFKSTSLEENIPVLLGLLSVWNVSFLGYPARAILPYSQALEKFAPHIQQVSMESNGKGV

SEQ ID NO: 8536 - protein, 299 aa, Streptococcus pyogenes SSI-1
MAKIVECIPNFSEGQNQAVIDGLVATAKSIPGVTLLDYSSDASHNRSVFTLVGDDQSIQEAAFQLVKYASENIDMTKHHGEHPRMGATDVCPFVPIKDITTQECVEISKQVAERINRELDIPIFLYEDSATRPERQNLAKIRKGQFEGMPEKLLEEDWAPDYGDRKIHPTAGVTAVGARMPLVAFNVNLDTDNIDIAHKIAKIIRGSGGGYKYCKAIGVMLEDRHIAQVSMNMVNFEKCSLYRTFETIKFEARRYGVNVIGSEVIGLAPAKALIDVAEYYLQVEDFDYPKQVLENHLLG

SEQ ID NO: 8537 - protein, 374 aa, Acanthothamnus aphyllus
ALSIAGAVQSQKLAVRAISHLQSLPGGDIKLLCATVVDSVRDLTGYDRVMVYKFHEDEHGEVVAESKRPDLEPYIGLHYPATDIPQASRFLFKQNRVRMIVDCRASPVGVRQDDGLMQPLCLVGSTLRAPHGCHAQYMENMGSKASLAMAVIINGNDEESIGGRNATRLWGLVVCHHTSARCIPFPLRYACEFLMQAFGLQLNMELQLAAQLSEKHVLKTQTLLCDMLLRDSPTSIVTQSPSIMDLVKCDGAALYYQGKYCPLGVTPAEAQIKDIVEWLLAFHGDSTGLSTDSLGDAGYPGAALLGNAVCGMAVAYITNRDFLLWFRSHTTKEIKRGGAKHHPEDKDDGQRMHPRSSFKAFLEVVKSRSLPWEN

SEQ ID NO: 8538 - protein, 364 aa, Brexia madagascariensis
VQSQKLAVRAISRLQSLPGGDIKLLCDTVVESVRDLTGYDRVMVYKFHEDEHGEVVAESQRPDLEPYIGLHYPATDIPQASRFLFKQNRVRIIVDCHASSVRVIQDDGLMQPLCLVGSTLRAPHGCHAQYMENMGSIASLAMAVIINGNDEEVIGGRNPTRLWGLVVCHHTSARCILFPLRYACEFLMQAFGLQLNMELQLAAQLLEKHVLKTQTLLCDMLLRESPTGIVTQSPSIMDLVKCDGAALYYQGNFYPLGVTPTEAQIKDIVEWLLAFHGDSTGLSTDSFADAGYPGAALLGDAVCGMAVAYITNRDFLFWFRSHTAKEIKWGGAKHHPEDKDDGQRMHPRSSFKAFLEVVKRRSLP

SEQ ID NO: 8539 - protein, 295 aa, Zea mays
RGRLSRGQYRNPKEFAEDVRLTFHNAMTYNPKGQDVHFMAEQLSGIFEAQWPEIEAEVNYLASCPPLPKKFPPPPIDLHFLERSDSMRHHMALDTNSRPISHTPTYTRTPSMKKPRAKDPNKRDMTIDEKRKLSENLQNLPPEKLDAVVQVIKNKNLSVMQHDDEIEVEIDSMDAETLWELDRFVANYKKNLSKQKRKAERAMLARQDAELRAQRLIQQPQPTPVPQEPVGEKSLKQVAKGEQLPTSASEKNDENRQNVSGSSNSSSSSSDSGSSSSDSDSDSSSSDGSDAANSS

SEQ ID NO: 8540 - protein, 361 aa, Brexia madagascariensis
QSQKLAVRAISRLQSLPGGDIKLLCDTVVESVRDLTGYDRVMVYKFHEDEHGEVVAESQRPDLEPYIGLHYPATDIPQASRFLFKQNRVRIIVDCHASSVRVIQDDGLMQPLCLVGSTLRAPHGCHAQYMENMGSIASLAMAVIINGNDEEVIGGRNPTRLWGLVVCHHTSARCILFPLRYACEFLMQAFGLQLNMELQLAAQLLEKHVLKTQTLLCDMLLRESPTGIVTQSPSIMDLVKCDGAALYYQGNFYPLGVTPTEAQIKDIVEWLLAFHGDSTGLSTDSFADAGYPGAALLGDAVCGMAVAYITNRDFLFWFRSHTAKEIKWGGAKHHPEDKDDGQRMHPRSSFKAFLEVVKRRS

SEQ ID NO: 8541 - protein, 396 aa, Synechocystis sp. PCC 6803
MFGGSVNGKFDQSGTKNLAFQLCCKYLELIGLTTVVFLPKPNSAKVFNQPQRFVAGWYWLLRSKQLKRGQVKAVFLLGKDLAVYRTDSGKVVAVDAYCPHMGAHLAEGKVEEESLRCFFHNWRFDHHGHCVEVPCLAKSLPVKVNSWPVTEAYGLIWLWTGNQPSQTLPLPLELTKEKVVSALGKSFTKACHPNVVMVNAIDAHHFNTVHNFPVEIDFKSEVIDQNIINFANTTKGGNDSLLVRLIKPFYREAGTYNLSYWFGSTGTVTLGPDFLHFYIMFTLRLGKNGQTEGQTILLTKHRPGLWGWFINGIILWLTKLVGNYFAKGDTKIFQTIKFALKTPLAEDKSILEFIHHLEQQPVLQWETWQSLDEDKSLSVPVINNHNGSVKIHGTNC

SEQ ID NO: 8542 - protein, 363 aa, Campylostemon angolense
QSQKLAVRAISQLQSLPGGDIKLLCDTAVESVRNLTGYDRVMVYKFHEDEHGEVVAESRRPDLEPYIGLHYPATDIPQASRFLFKQNRVRIIVDCHASPVSVIQDDGLMQPLCLVGSTLRAPHGCHAQYMENMGSIASLAMAVIINGNDEDGIGGRNPTRLWGLVVCHHTSVRCIPFPLRYACEFLMQAFGLQLNMELQLAAQLLEKHVLKTQTLLCDMLLRESPTGIVTQSPSIMDLVKCDGAALYYQGNYYPSGVTPTEAQIKDIVNWLLAFHGDSTGLSTDSLADAGYPGATLLGDAVCGMAVAYITNRDFLFWFRSHTAKEIKWGGAKHHPEDKDDGQRMHPRSSFKAFLEVVKSRSLP

SEQ ID NO: 8543 - protein, 361 aa, Campylostemon angolense
QKLAVRAISQLQSLPGGDIKLLCDAAVESVRNLTGYDRVMVYKFHEDEHGEVVAESRRPDLEPYIGLHYPATDIPQASRFLFKQNRVRIIVDCHASPVSVIQDDGLMQPLCLVGSTLRAPHGCHAQYMENMGSIASLAMAVIINGNDEDGIGGRNPTRLWGLVVCHHTSVRCIPFPLRYACEFLMQAFGLQLNMELQLAAQLLEKHVLKTQTLLCDMLLRESPTGIVTQSPSIMDLVKCDGAALYYQGNYYPSGVTPTEAQIKDIVNWLLAFHGDSTGLSTDSLADAGYPGATLLGDAVCGMAVAYITNRDFLFWFRSHTAKEIKWGGAKHHPEDKDDGQRMHPRSSFKAFLEVVKSRSLP

SEQ ID NO: 8544 - protein, 95 aa, Glycine max
TDRPVGPWLKVKNPEHWAKRSSLKDVIADAFLQQILLRPAEYDVIACMNLNGDYISDALAAQVGGIGIAPGANIGDECALFEATHGTAPKYAGQD

SEQ ID NO: 8545 - protein, 492 aa, Ricinus communis
MDPYKFRPSSSNDTPFWTTNAGDPVSNNNSSMTVGPRGPILLEDYHMIEKLANFTRERIPERVVHARGMSAKGFFEVTHDVTDLTCADFLRAPGVQTPVIVRFSTVIHERGSPETLRDPRGFATKFYTREGNFDIVGNNFPVFFIRDGIKFPDVVHAFKPNPKSHIQEYWRIFDFCSHHPESLSTFAWFFDDVGIPQDYRHMEGFGVHTYCLINKAGKVTYVKFHWKPTCGVKCLMDDEAIKVGGANHSHATQDLYDSIAAGNFPEWKLMIQTMDPADEDKFSFDPLDMTKIWPEDMFPLHPVGRLVLNRNIDNWFAENEMLAFNPAHVVPGVYYSNDKLFQLRLFAYSDTQRHRLGTNYLQLPVNAPKCPYHNNHYDGFMNFMHRDEEVDYFQSRYDPVRHAEKVPIPNAICSGRREKCVIEKEDNFRQPGDRYRSWAPDRQERFLCRLVNALSEPRITHEIRSIWVSWWTQCDKSLGQKLASRLNVRPNI

SEQ ID NO: 8546 - protein, 492 aa, Cucurbita pepo
MDPYKYRPSSAYNTPFCTTNSGAPIWNNTAVMSVGERGPILLEDYQLIEKIATFTRERIPERVVHRRGASAKGFFEVTHDISNLTCADFLRAPGVQTPVIVRFSTVIHERGSPETLRDPRGFAVKFYTREGNFDLVGNNFPVFFVRDAMQFPDVIRAFKPNPKSHLQEPWRYLDFCSYHPESLLSFAWFYDDVGIPINYRHMEGFGVQAYSLINKSGKARLVKFHWKPTCGVKSMMEEEAIRIGGTNHSHATQDLYESIAAGNFPEWRLYIQTIDYEDQNKYDFEPLDTTITWPEDVVPLQPVGRLVLNKNIDNFFAENEMLAFSMSLVPGIHYSDDKMLQARSFAYADTQRHRLGPNYLQLPVNAPKCPHHNNHHEGFMNFMHRDEEVNYFPSRYDPCRHAEKFPMPPNVLTGKRERCVIPKENNNFKQAGDRYRSWAPDRQDRFVKRFVEALSDPRVTDEVRNIWISYWSQADRSLGQKIASRLNVRPNI

SEQ ID NO: 8547 - protein, 242 aa, Prochlorococcus marinus subsp. marinus str. CCMP1375
MKLPIRALLLAAGFGTRLRPLTLNTPKCLVSISNKPLLHIWLDKLVNLGCKSTLINTHYLSDQVNSSIREYDNSKINIYTTYEKTLLGTAGTLMVNRDFFRGSLGLIIHADNITNDNLEELIDTHVNKSKDSLLTMLTFKTDNPSQCGIVETNEKGVVTAFHEKTKNPPGFIANGAIYAFDQSFLDFLDQTHFSGQDISKDLLPKLLGRIQTCYSQTTFLDIGSPTTLSRAQELWKKESLNE

SEQ ID NO: 8548 - protein, 382 aa, Hibiscus syriacus
MSSAGQVIRCKAAVAWEAGKPLSIEEVEVAPPQKDEVRIKILFTALCHTDVYYWECKGYTPLFPRILGHEASGIVESVGEGVTDVKPGDHVLPIFTGECKQCRHCLSEESNNMCDLLRINCDRGVMLADGKTRFSINGKPIYHFVGTSTFSQYTVVHVGQVAKINPTAPLDKVCPISCGICTGFGATVNVAKPKKGQTVAIFGLGAVGLAAAEGARICGASRIIAVDLNPRRFEEAKRFGITEFVNPKDYDKPVQEVIVEMTGGGVDRSVECTGSVQAMISAFECVHDGWGVCVLVGVPKKDDAFKTHPMNLLSERTLKGAFYGNYKPRTDIPMVVDKYLNKELGLDMDKFITHSVPFADINKAFDYMLQGIGLRCMIHLDA

SEQ ID NO: 8549 - protein, 259 aa, uncultured marine bacterium
QPNAMGGREVEGMANLLAAHRNLASADDRQEVADYWGVDKISDKPGLTATEMFKALESGEMKAVWIVCTNPLVSLPDARQAERALKNAKFVVVQDISSKSDTADYADLVLPAAGWTEKEGTMTNSDRRISYLPQINEAPGEAIPDTDIPLKFAKAMGWEGFDYDSTEAVFNEHRELTRGTNIDITGLSYDYLKTKGTAQWPFVEGATEGTKRLFEDKVCWTPNQRAQIHTSLAANQSEKLPLDHPPGMSSGRIRDQWHT

SEQ ID NO: 8550 - protein, 114 aa, Leavenworthia stylosa
LVEKFGIDPNNAFAFWDWVGGRYSVCSAVGVLPLSLQYGFSVVEKRSYLTLKPLRNLLRTFKFLKGASSIDQHFKSTSLEENIPVLLGLLSVWNVSFLGYPARQVSMESNGKGV

SEQ ID NO: 8551 - protein, 500 aa, Xylella fastidiosa 9a5c
MDGWVVVAVALMVPQARCMMSFACVGLGGEERRGIARDAGIFWCVARGITDTGGVSDGRLPVLAGVGTAWRCSQAVAVIGGRLVGWTLGVYLLPDEPGQWRFVSIKEIEMSIVRMTDLALSGKRVLIRQDLNVPIDQGRITSEQRIIASLPTIRVALERGAAVMVTSHLGRPKEGVWSEEDSLAPVAKRLSQLLGIEVPLRRDWVDGVQVAPGQLVLLENCRMNVGEAENDEALARKYAALCDVFVMDAFGTAHRAQASTHGVICCAAIAAGGPLLMAELDALSRGLEHPVKPLLAIVGGSKVSTKLELLSNLVNNVEQLITGGGIANTFLAAAGYSIGKSLYEGDLIETAREIITAAKARGAEIPLPTDVVVAKQFLPGVTATVKTVDAIVADDLILDIGPQTARHYAALIETAATVVWNGPVGVFEFDAFSKGTEVLARAVAASSAFSIAGGGDTLAAIDKYGVADQISYISTGGGAFLEFLEGKTLPAVAALQARSG

SEQ ID NO: 8552 - protein, 259 aa, uncultured marine bacterium
QPNAMGGREVGGLANQLAIHRGFDPDSIKLISEFWQTDNLATRPGLKAIELFEAVERGDIQVIWIMATNPVVSMPDNVFIQRALQKCPLVIVSDVTHDSDITQYADLLLPAAGWGEKQGMVTNSERMLTRQRKFLPSKGEAKPDWQIIAEVGKKLCQRLDKPNAFEFKSESSVFREYAAMTGLNKDTPLLLDLSKYAEISDEEYESWNPVQWGSSRPFADGKFSTENRKARFVVTTAPLIKGESRLWLNTGRQRDQWHT

SEQ ID NO: 8553 - protein, 151 aa, Escherichia coli
GVARKPGMDRSDLFNVNAGIVKNLVQQVAKTCPKACIGIITNPVNTTVAIAAEVLKKAGVYDKNKLFGVTTLDIIRSNTFVAELKGKQPGEVEVPVIGGHSGVTILPLLSQVPGVSFTEQEVADLTKRIQNAGTEVVEAKAGGGSATLSMG

SEQ ID NO: 8554 - protein, 114 aa, Leavenworthia stylosa
LVEKFGIDPNNAFAFWDWVGGRYSVCSAVGVLPMSLQYGFSVVEKFLKGASSIDQHFKSTSLEENIPVLLGLLSVWNVSFLGYPARAILPYSQALEKFAPHIQQVSMESNGKGV

SEQ ID NO: 8555 - protein, 451 aa, Staphylococcus epidermidis
MANTRELNHKDAQYVWHPFTQMGVYAKNDNIIIEKGRGSYLYDTEGNKYLDGYASLWVNVHGHQHKKLNKAIHKQLDKIAHSTLLGSSNIPSIELAEQLVKLTPDRLQKVFYSDTGSASVEIAIKMAYQYWKNIDAERYAKKNKFLTLHHGYHGDTIGSVSVGGIDSFHKIFKDLIFENIQIETPCLYKSKYRNEAEMLNSILNQIENILSERNDEIVGFILEPLIQGATGLFVHPHGFLKAVEQLCRKYDVLLICDEVAVGFGRTGEMFACNHEDVQPDIMCLGKAITGGYLPLAATLTSQKIYDAFLSQSHGKNTFFHGHTYTGNQLVCSVALENINLFKKKHLIGHIQKTSQTLKQRLEALQPHKNIGDIRGRGLMYGVELVENKSTQTPLDIPTVELIIRRCKENGLMIRNLENVITFVPILSMSNKEIKKMVKIFNKALHQTLGKK

SEQ ID NO: 8556 - protein, 259 aa, uncultured marine bacterium
QPNAMGGREVGGLANQLAIHRGFDPDSIKLISEFWQTDNLATRPGLKAIELFEAVERGDIEVIWIMATNPVVSMPDNVFIQRALQKCPLVIVSDVTHDSDITQYADLLLPAAGWGEKQGMVTNSERMLTRQRKFLPSKGEARPDWQIIAEVGKKLCERLDKPNAFEFKSESSVFREYAAMTGLNKDTPLLLDLSKYAQISDEEYESRNPVQRGSSRPFADPKISTQNRKARVVVTTAPLIKGERRLWLNTGRQRDQWHT

SEQ ID NO: 8557 - protein, 114 aa, Leavenworthia stylosa
LVEKFGIDPNNAFAFWDWVGGRYSVCSAVGVLPLSLQYGFSVVEKFLKGASSIDQHFKSTSLEENIPVLLGLLSVWNVSFLGYPARAILPYSQALEKFAPHIQQVSMESNGKGV

SEQ ID NO: 8558 - protein, 590 aa, Asparagus officinalis
MCGILAVLGCSDDSQAKRVRVLELSRRLKHRGPDWSGLCQHGDCFLSHQRLAIIDPASGDQPLYNEDKSIVVTVNGEIYNHEELRRRLPDHKYRTGSDCEVIAHLYEEHGEDFVDMLDGMFSFVLLDTRNNCFVAARDAVGITPLYIGWGLDGSVWLSSEMKGLNDDCEHFEVFPPGNLYSSRSGSFRRWYNPQWYNETIPSAPYDPLVLRKAFEDAVIKRLMTDVPFGVLLSGGLDSSLVAAVTARHLAGSKAAEQWGTQLHSFCVGLEGSPDLKAAKEVAEYLGTVHHEFHFTVQDGIDAIEDVIFHIETYDVTTIRASTPMFLMARKIKSLGVKMVISGEGSDEIFGGYLYFHKAPNKEEFHHETCRKIKALHQYDCLRANKATSAWGLEARVPFLDKEFMDVAMSIDPESKMIKPDLGRIEKWVLRKAFDDEENPYLPKHILYRQKEQFSDGVGYSWIDGLKAHAAKHVTDRMMLNAARIYPHNTPTTKEAYYYRMIFERFFPQNSARLTVPGGPSIACSTAKAIEWDARWSNNLDPSGRAALGVHDSAYDPPLPSSISAGKGAAMITNKKPRIVDVATPGVVIST

SEQ ID NO: 8559 - protein, 268 aa, uncultured marine bacterium
QPNAMGGREVGGLANQLAAHMDFATPNAIELVQRFWQAPNMDRKMVSRPIDMFQAVEQGKIKVLWIMSTNPMVSLPDTEQVRRALEKCELVIVSDCKQSTDTTAYADVLLPALPWSEKDGTVTNSERRISRQRGLLPARGEAKADWWAICQVAGAMGYQSAFSYRSVHDIFREHAALSGFENHGKRDFDISLFSNISEQAYQDLLPIQWPVTKESPNGTARMFTDGRFFTADRKANFIPIDVKEPQVAPDEDWPFVLNTGRVRDQWHT

SEQ ID NO: 8560 - protein, 266 aa, Bradyrhizobium japonicum USDA 110
MNRRRLGGTMKNTPFDLTGKVAIVTGSSRGIGRSSAELLARLGAKVVVSSRKADACKEVADGINAAGGDAIVIPCNIARKAEVEALIAGATTHYGKIDILVCNAAVNPYYGPLLDITDEAFDKIMGSNVKSNIWLSALAIPQMAERGNGSVIIISSIGGLRGSTVIGAYGISKAADFALCRSLAGEWGPKGVRVNCIAPGLVKTDFARALWEDEALLKRRTATTPLRRIGEPDEIAGAVAYLASDASSFMTGQTIVIDGGVTTAAV

SEQ ID NO: 8561 - protein, 253 aa, Xylella fastidiosa 9a5c
MSESSEKTGTTHFGFRQVAAKDKKTLVAEVFTSVSRRYDLMNDLMSLGIHRAWKRYFVATAQVKSGDRVLDLAGGTGDIAMLLKNRVGAEGSIVLGDINASMLSVGRDRLIDRGVVAHLDYVQCNAEALPFQDKCFDLVTMSFGLRNVTDKDTALCEMFRVLKVGGQARVLEFSTVTAEWFKPIYDFHSFQVLPRLGRLFARDAASYRYLAESIRKHPPQEELQAMMGAAGFERCRYRNLTGGIVAIHSGYKY

SEQ ID NO: 8562 - protein, 400 aa, Zea mays
  unsure (1)..(400): unsure at all Xaa locations
ACLQAVIKRLMTDVPFGVLLSGGLDSSLVASVTKRHLVKTDAAGKFGTELHSFVVGLENRARDGTLTFFFTSLSTTDRPARTFQGSPDLKAAREVADYLGTTHHEFHFTDGIDAIEEVIYHDETYDVTTIRASTPMFLMARKIKSLGVKMVLSGEGSDELLGGYLYFHFAPNKEEFHRETCRKVKALHQYDCLRANKATSAWGLEVRVPFLDKEFINVAMGMDPEWKMYDKNLGRIEKWVMRKAFDDDEHPYLPKHILYRQKEQFSDGVGYNWIDGLKSFTEQQVTDEMMNNAAQMFPYNTPVNKEAYYYRMIFERLFPQDSARETVPWGPSIACSTPAAIEWVEQWKASNDPSGRFISSHDSAATDHTXAVSRRWPTAAATAPXNGTVNGKDVAVAIAV

SEQ ID NO: 8563 - protein, 268 aa, uncultured marine bacterium
QPNAMGGREVGGLANMLAAHMDIENPQHRQWVQEFWDSPTICTEPGLKAIDLFDSMDQGKAKAAWIMATNPLVSMPNRGKITPALENCDCAWCSDCVELNDTLALADVKLPATAWSEKEGTETNSERSISRQRAFKAAPGEAKNDWQIICDVAQKMGYSKGFDSQTPHQIFVEHARLSGVNNFGDRNSHILTLAGLSLQEYQRLKPVQWPVNKRYPDGCKRLFTYGRFFTPSGKALFIPLHPELPEQQTCRDYPLILNSGRIRDQWHT

SEQ ID NO: 8564 - protein, 188 aa, GIBBERELLA ZEAE PH-1
MSLDLEHHLTFYGAYHHNPVNVAIHMVCVPLILISGFSLATYSGTLIPTPSWLNFPYLELNLGVIAASVYSLLYLLLEPFAGFLLAIVCMAGAASANYLRQQNPDSTFQGALAVHIVCWIFQFIGHGKYEGRAPALLDNLVQAIFLAPMFVWLEILFKLGYRPELRARVNKKVQIEVEKFRAKNGKAQ

SEQ ID NO: 8565 - protein, 354 aa, GIBBERELLA ZEAE PH-1
MSLPSTMKAVVFDGLYKISVQDRPVPQIRDGRDIIIKVHAAGLCGSELHIYRGHQPSGTGFIMGHEFTGTVVQVGSDVKTIHIGDKVVAPFTASCGNCFFCNNGCSARCVESQLFGCEILNGGQAEYVRIPMADGTAVKAPETISDEALLLMADIFPTGFYGVKSAMELVPSQNIQEATMVVVGCGPVGLCAILAATHFKPRHLFAIDSVESRLEQARKLGAEPLNFETDRAGLEARIREVTEGRGADMVVEVVGQAPALRTAFDIVRPFGAISSIGVHNKEIPWTGDDAYTRNIRVQMGRCPVRSVFNEALHLLEQKQDKIGFLFDHKMPLAQAPEGYTLFEQRKTQKVVFTL

SEQ ID NO: 8566 - protein, 358 aa, Canotia holacantha
ESQKLAVRAISHLQSLPGGDIKLLCATVVESVRDLTGYDRVMVYKFHEDEHGEVVAESKRPDLEPYIGLHYPATDIPQASRFLFKQNRVRMIVDCCASPVGVIQDDGLMQPLCLVGSTLRAPHGCHAQYMENMGSKASLAMAVIINGKDEEIVGGRNATRLWGLVVCHHTSARCIPFPLRYACEFLMQAFGLQLNMELQLAAQLSERHVLKTQTLLCDMLLRDSPTGIVTQSPSIMDLVKCDGAALYYQGKYYPSGVTPSEAQIKDIVEWLLAFHGDSTGLSTDSLADAGYPGAAFLGDAVCGMAVAYITNRDFLFWFRSHTTKEIKWGGAKHHPEDKDDGQRMHPRSSFKAFLEVVK

SEQ ID NO: 8567 - protein, 451 aa, Saccharomyces cerevisiae
MLRTRLTNCSLWRPYYTSSLSRVPRAPPDKVLGLSEHFKKAKNVNKIDLTVGIYKDGWGKVTTFPSVAKAQKLIESHLELNKNLSYLPITGSKEFQENVMKFLFKESCPQFGPFYLAHDRISFVQTLSGTGALAVAAKFLALFISRDIWIPDPSWANHKNIFQNNGFENIYRYSYYKDGQIDIDGWIEQLKTFAYNNQQENNKNPPCIILHACCHNPTGLDPTKEQWEKIIDTIYELKMVPIVDMAYQGLESGNLLKDAYLLRLCLNVNKYPNWSNGIFLCQSFAKNMGLYGERVGSLSVITPATANNGKFNPLQQKNSLQQNIDSQLKKIVRGMYSSPPGYGSRVVNVVLSDFKLKQQWFKDVDFMVQRLHHVRQEMFDRLGWPDLVNFAQQHGMFYYTRFSPKQVEILRNNSFVYLTGDGRLSLSGVNDSNVDYLCESLEAVSKMDKLA

SEQ ID NO: 8568 - protein, 374 aa, Canotia holacantha
ALSIAGAVESQKLAVRAISHLQSLPGGDIKLLCATVVESVRDLTGYDRVMVYKFHEDEHGEVVAESKRPGLEPYIGLHYPATDIPQASRFLFKQNRVRMIVDCCASPVGVIQDDGLMQPLCLVGSTLRAPHGCHAQYMENMGSKASLAMAVIINGKDEEIVGGRNATRLWGLVICHHTSARCIPFPLRYACEFLMQAFGLQLNMELQLAAQLSEKHVLKTQTLLCDMLLRDSPTGIVTQSPSIMDLVECDGAALYYQGKYYPSGVTPSEAQTKDIVEWLLAFHGDSTGLSTDSLADAGYPGAAFLGDAVCGMAVAYITNRDFLFWFRSHTTKEIKWGGAKHHPEDKDDGQRMHPRSSFKAFLEVVKSRSLSWEN

SEQ ID NO: 8569 - protein, 196 aa, Schizophyllum commune
MQAIKCVVVGDGAVGKTCLLISYTTNAFPGEYIPTVFDNYSANVMVDGKTISLGLWDTAGQEDYDRLRPLSYPQTDVFLICFSLVSPPSFENVRTKWYPEISHHAPQTPVVLVGTKLDLREDPATIEKLRDRRMSPIQYSQGVAMMKDIGAVKYLECSALTQKGLKTVFDEAIRVVLYPSARSDNKRSKGRSCIVA

SEQ ID NO: 8570 - protein, 374 aa, Catha edulis
ASSIAGAVQSQKLAVRAISQLQSLPGGDIKLLCDTVVESVRDLTGYDRVMVYKFHEDEHGEVVAESKRPDLEPYIGLHYPASDIPQASRFLFKQNRVRMIVDCRASPVRVIQDDGLMRPLCLVGSTLRAPHGCHAQYMENMGSLASLAMAVIINGNDEEVTGGRNPTRLWGLVVCHHTSARCIPFPLRYACEFLMQAFGLQLNMELQLAAQSLEKHVLKTQTLLCDRFLRDPPTGIVTQSPSIMDLVKCDGAALYYQGNYYPLGVTPTEVQIKDIVEWLLAFHGDSTGLSTDSLADAGYPGAALLGDAVCGMAVAYITNKDFLFWFRSHTAKEIKWGGAKHHPEDKDDGQRMHPRSSFKAFLEVVKSRSLPWEN

SEQ ID NO: 8571 - protein, 1303 aa, Ceratodon purpureus
MSATKKTYSSTTSAKSKHSVRVAQTTADAALEAVYEMSGDSGDSFDYSKSVGQSAESVPAGAVTAYLQRMQREGLIQNFGCMVAVEEPNFCVIAYSENASEFLDLIPQAVPSMGEMDVLGIGTDIRTLFTPSSSAALEKAAATQDISLLNPITVHCRRSGKPLYAIAHRIDIGIVIDFEAVKMIDVPVSAAAGALQSHKLAARAITRLQALPGGDIELLCDTIVEEVRELTGYDRVMAFKFHEDEHGEVVAEIRRMDLEPYMGLHYPATDIPQASRFLLMKNRVRLIADCYASPVKLIQDPDIRQPVSLAGSTLRAPHGCHAQYMGNMGSIASLVMAVIINDNEEYSRGAIQRGRKLWGLVVCQHTSPRTVPFPLRSVCEFLMQVFGMQLNLHVELAAQLREKHILRTQTLLCDMLLRDAPIGIVSQTPNIMDLVKCDGAALYYGKRVWLLGTTPTENQIKEIADWLLEHHNDSTGLSTDSLADANYPGAHLLGDAVCGMAAAKITAKDFLFWFRSHTATEVKWGGAKHDPDEKDDGRKMHPRSSFKAFLEVVNKRSPPWEDVEMDAIHSLQLILRGSFRDIADSDTKTMIHARLNDLKLQGVEERNALANEMSRVLETAAAPILAVDSRGMINAWNAKIAQVTGLPVEEAMHCSLTKDLVLDESVVVVERLLSLALQGEEEQNVEIKLKTFGTQTTERAVILIVNACCSRDASDFVVGVFFVGQDVTEQRMFMDRFTRIQGGEKTTVQDPHPLMRPSFDGDEFGRTFKRNSALGGLKDHATGSVERLDLYLRRAEECMEVMETIPSPKFNNKQCQYLAGKLKAVLQSASLFLRISHHEHHELGASIDMGRHVEIFKLLLALAKEIESFIQGCCKDEWIKAAMTLTNVSEYVSSMGFNLELCKIAFCKSCAASGSLTLDQIEVICKDEAEVVKRNASIDVDTLFAKVIYDLTEKTLSSDQNDLAIYLLQRLKRAKPILPSFSSRPSWWNFYDDWSFSEKFFQWIQITGSLGSGSSATVEKAVWLGTPVAKKTFYGRNNEDFKREVEILAELCHPNITSMFCSPLYRRKCSIIMELMDGDLLALMQRRLDRNEDHDSPPFSILEVVDIILQTSEGMNYLHEKGIIHRDLKSMNILVKSVKVTKSEIGYVHVKVADFGLSKTKDSSTRYSNQTWNRGTNRWMAPEVINLGYESTEGEISFDGKVPKYPLKSDVYSFGMVCYEVLTGDVPFPEEKNPNNVKRMVLEGVRPDLPAHCPIELKALITDCWNQDPLKRPSFAVICQKLKYLKYLLMTGKLSSHSYLTSK

SEQ ID NO: 8572 - protein, 265 aa, Burkholderia fungorum LB400
MLPIVDKPLIQYAVEEAMAAGITEMIFVTGRSKRAIEDHFDKSYEVEAELEARGKDKLLQLVRSIKPSHVDCFYVRQPEALGLGHAVLCAEKLVGDSPFAVILADDLLYGSPPVMTQMIEVFDHYHSSVIGVEEIPAQDTKSYGIVDGKEWEQSIIKMSGIVEKPEPSAAPSNLGVVGRYVLKPRIFKHLRTIKPGAGGELQLTDAIESLLADEQVLAYKYRGTRFDCGSKIGYLKATVEFAVRHPEVGVEFREYLEEYLSLLPM

SEQ ID NO: 8573 - protein, 1035 aa, Pichia pastoris
MSDTSNDEVIKDILKKIERERNIAQGASNIRKKTNNAEIIQNCNTSIREAQQNIEYLEQTLSKLQLEQHNRAARGSNQGELTQQKVLKTSPPTFTFLDLLKYDCPSLGHRIHYMLQLLEFKLQVEKQYREANEKISRLYQVDGDRRSIAAAEGGKVESDMKIHLMKMALKNYHDVHVNIDEVARDTEVMNTFRKKPLSGTLSITINSIRDILHVSSIFSKKLETLVSIRLMTVEKARTKPTKNQRVNDSFQIHVEKGNELSLIVYDKVGDTLTPVAMIWFLLSDIVEEIRKKKVDRELNATGWMSASNLAGRPEQQQPQQLGSHPFDNQQGNLQSLQTHTSHSNGDTDPAQLSASAWFVLAPAGQILLTMGFNKTNDAGQKKEFMGGLGRHGAIRQRKEEVLEQHGHKFVPRQFCNIMMCAMCGDFLPYSGYQCEDCRFLCHKKCYQKVITKCISKSSIDVDPEETKLNHRIPHKFEPFSNHGTKWCCHCGYILPWSRKNVYKCSECGVVCHAQCTHLVPDFCGMSMEMASKILSTIKETTATRQQRQAMSMSSKSSGKSDTHISQKQLPPVPSAAQRLSQSDEAPKTKPIRRPPPPPPPVSNEQRVLPQREEPQVEPERTPNQAIAEAEYALEKQISSTSSSKETDHHHQHHHYHPQQQPQQQVKTVKTAVASDVSPTKVAVKKQEAARRSSERHHGRHRQKYGLDDFRFIAVLGKGNFGKVMLAESIHTGQLCAIKVLKKDFIIKNDEVASTKSEKRVFIIANRGKHPFLLNLHQCFQTENRIYFVMEYVSGGDLMWHAQQRTFSPSRAKFYAAEVLLALQYFHENGVVYRDLKLDNILLTADGHIKLADYGLCKEEMWYGSTTATFCGTPEFMAPEILKEQKYDKAVDWWAFGVLLYQMMLGKSPFKGEDEDEVFNSILTDEPRYPIQMDRESVDILQQLLTKDPYKRLGASEEDAEEIKRHPYFHGINWDDIMQCKVPPPLIPTIKDRHDVSNFDVEFTTEAPKLTPVNSVLSLSMQEQFRGFTYVNDDHT

SEQ ID NO: 8574 - protein, 374 aa, Celastrus orbiculatus
ALSIAGAVQSQKLAVRAISRLQSLPGGDIKLLCDTVVESVRDLTSYDRVMVYKFHEDEHGEVVAESKRPDLEPYFGLHYPSTDIPQASRFLFKQNRVRMIADCRASPVGVIQDDGLMQPLCLVGSTLRAPHGCHAQYMENMGSRSSLAMAVIIHGNDEEVIGGRNATRLWGLVVCHHTSVRCIPFLLRYACEFLMQAFGLQLNMELQLAAQLSEKHVLKTQTLLCDMFLRDSPTGIVTQSLSIMDLVKCDGAALYYQGKYYPIGVTPAEAQIKDIVEWLLTFHGDSTGLSTDSLADAGYPGAALLGDAVCGMAVAYITKRDFLFWFRSHTTKEIKWGGAKHHPEDKDDGQRMHPRSSFKAFLEVVKSRSLPWEN

SEQ ID NO: 8575 - protein, 232 aa, Cytophaga hutchinsonii
MQTFFLHRYAAHQMFTMSKGWEKFFYILTWLFQGSSYLSPYAYGVMHRLHHTYADTDKDPHSPKYSTGMFDMMWKTKNIYNDILHGRIELDPKYKKNVPYWGFIEKMGDNWFSRVAWGTAYTLFYVYFATHWWMFLLLPIHYLMGPVHGAIINWFAHKYGYVNFVVNDTAKNLLPVDFLMFGESYHNNHHKLGGRANFGVKWHEFDPAYPIILFFNAFHIIKLKRNNDLNYM

SEQ ID NO: 8576 - protein, 373 aa, Celastrus scandens
ALSIAGAVQSQKLAVRAISRLQSLPGGDIKLLCDTVVESVRDLTSYDRVMVYKFHEDEHGEVVAESKRPDLEPYFGLHYPSTDIPQASRFLFKQNRVRMIADCRASPVGVIQDDGLMQPLCLVGSTLRAPHGCHAQYMENMGSKSSLAMAVIINGTDEEVIGGRNATRLWGLVVCHHTSARCIPFPLRYACEFLMQAFGLQLNMELQLAAQLSEKHVLKTQTLLCDMLLRDSPTGIVTQSPSIMDLVKCDGAALYYQGKYYPIGVTPVEAQIKDIVEWLLTFHGDSTGLSTDSLADAGYPGAALLGDAVCGMAVAYITKKDFLFWFRSHTTKEIKWGGAKHHPEDKDDGQRMHPRSSFKAFLEVVKSRSLPCE

SEQ ID NO: 8577 - protein, 439 aa, Streptococcus agalactiae NEM316
MKKYDVIVLGFGKAGKTLAAKLATQGKSVAMVEEDDKMYGGTCINIGCIPTKTLLVSASKNHDFQEAMTTRNEVTSRLRAKNFAMLDNKDTVDVYNAKARFISNKVVELTGGADKQELTADVIIINTGAKSVQLPIPGLADSQHVYDSTAIQELAHLPKRLGIIGGGNIGLEFATLYSELGSKVTVIDSQSRIFAREEEELSEMAQDYLEEMGISFKLSADIKSVQNEDEDVVISFEDEKLSFDAVLYATGRKPNTEGLALENTDIKLTERGAIAVDEYCQTSVENIFAVGDVNGGPQFTYISLDDSRIVLNYLNGDKDYSLKNRGAVPTSTFTNPPLATVGLDEKTAKEKGYQVKSNSLLVSAMPRAHVNNDLRGIFKVVVDTETNLILGARLFGAESHELINIITMAMDNKIPYTYFQKQIFTHPTMVENFNDLFNF

SEQ ID NO: 8578 - protein, 271 aa, uncultured marine bacterium
QPNAMGGREVGVSQYSSKRTLSLGDPQSYRIVSEFWQTDNLATYAGLKAIDLFDAMNEGKIKAVWIMATNPVVSLPDSEKIKTALEKCPFVVVSDCIADTETTRLADVVLPAQGWSEKSGTVTNSERRISRQRRVLPSPGEAKPDWWILKEVAQKMGFKDQFDYRHEGQIFKEYCEMTALGNETGKARDLCLIGLTKLDEQGYGELTPQQWPVMEYQPEIIEQRMFTNGEFFTESGKAQFIAVEHDKPIADTSVEFPLIMNTGRIRDQWHT

SEQ ID NO: 8579 - protein, 268 aa, uncultured marine bacterium
QPNAMGGREVGGLANMLAAHMDIENPEHRQWVQEFWNSPTICTQPGLKAIDLFDSMEQGKVKAVWIMATNPLVSMPNRGKIFRALENCDFVVVSDCVEQNDTLALADVKLPATAWSEKEGTVTNSERRISRQRAFKAAPGGAKNDWQIICDVAQKMGYSEGFDFQTPHQIFVEHARLSGVNNFGDRDFDISALADLSLKDYQQLKPVQWPVNQRYPDGCKRLFTDGRFFTPSGKARFIPLHPELPQQQTCRDYPLILNSGRIRDQWHT

SEQ ID NO: 8580 - protein, 450 aa, Streptococcus mutans
MTKQYDYIVIGGGSGGIASANRAAMHGAKVILFEGKQVGGTCVNVGCVPKKVMWYGAQVAETINNYAADYGFDVTTQTFHFDALKQNRQAYIDRIQDSYERGFDSNGVERVYSYATFVDAHTVEVAGEHYTAPHILIATGGHALLPDIPGSEYGITSDGFFELDAIPKRTAVVGAGYIAVEISGVLHALGGETHLFVRRDRPLRKFDKEIVGTLVDEMKKDGPHLHTFSVPKEVIKNTDNSLTLILENGEEYTVDTLIWAIGRAANTKGFNLEVTGVTLDSRGFIATDAFENTNVEGLYALGDVNGKLELTPVAVKAGRQLSERLFNHKPQAKMDYKDVATVIFSHPVIGSIGLSEEVALDQYGEENVTVYRSTFTSMYTAVTSHRQACKMKLVTVGEDEKIVGLHGIGYGVDEMIQGFAVAIKMGATKADFDNTVAIHPTGSEEFVTMR

SEQ ID NO: 8581 - protein, 259 aa, uncultured marine bacterium
QPNAMGGREVGGLANQLAIHRGFDPDSIRLISEFWQTDNLATRPGLKAIELLEAVERGDIEVIWIMATNPVVSMPDNVFIQRALQKCPLVIVSDVTHDSDITQYADLLLPAAGWGEKQGMVTNSERMLTRQRKFLTSKGEAKPDWKIIAEVGKKLCERLDKPNAFDFKSESSVFREYAAMTGLNKDTPFLLDLSKYAEISDEEYEPWNPVQWGSSRPFAAGKFSTENRKARFVGTTAPLIKGESRLWLNTGRQRDQWHT

SEQ ID NO: 8582 - protein, 194 aa, Zea mays
MAIKKVFARSVYDSRGNPTVEVDVVTETGLHRAIVPSGASTGQHEACELRDGDKSKWNGKGVTKAVENVNTVIAPALIEKNLDVKDQSAVDAFLKSCNALLLKVNQIGTLTESIQAAKDSYADGWGVMVSHRSGETEDVTIADIAVGLRAGEIKTGAPARSERLAKLNQILRIEEELGDQAIYPGKDFRKSVNL

SEQ ID NO: 8583 - protein, 474 aa, SYNECHOCOCCUS SP. WH 8102
MAQFEKLTAPSQGTPIRFENGQPVVADNPIIPFIRGDGTGVDIWPATQKVLDAAVAKAYGGVKTIEWFKVYAGDEACDLYGTYQYLPEDTLEAIRTYGVAIKGPLTTPVGGGIRSLNVALRQIFDLYSCVRPCRYYEGTPSPHKRPQDLDVIVYRENTEDIYMGVEWEADDAVGQELRKHLNEVVIPANGKLGKRQIPEGSGIGIKPVSKHGSQRHIRKAIQHALRLEGNKRHVTLVHKGNIMKFTEGAFRDWGYELATTEFRDVCITERESWILGNLEKDSGLSVQANARMIEPGYDSLTPEKKADIDAEVQAVIDAIGSSHGGGKWRSMVLVDDRIADSIFQQIQTRPQEYSILATLNLNGDYISDAAAAMVGGLGMAPGANIGETAAIFEATHGTAPKHAGLDRINPGSVILSGVMMLEFLGWQEAADLVTKGLSAAITDKQITYDLARLMEPQVDPVSCSGFAEAIIQRF

SEQ ID NO: 8584 - protein, 456 aa, Haemophilus somnus 129PT
MTKHYDYIAIGGGSGGIASINRAASYGKKCAIIEAKYLGGTCVNVGCVPKKVMFYGAQVAEAITKYAPDYGFDVTLNHFDFAKLVESRQAYIDRIHTSYNNVLAKNNVDVLNGFAKFFDAKTIEVSYANGEKELVTADHILIATGGRPSRPTIPGAEYGIDSDVFFALTELPKRIAVVGAGYIAVELAGVVNSLGAETHLFVRRQTPIRSFDPLIIETLVEVMKQDGIQLHTQAIPQEIIKNADNSLTIKLEDGRTQDVDCLIWAIGREPATDVINLASTGVETNERGFIKVDKYQNTNVEGIYAVGDIIEGGIELTPVAVAAGRRLSERLFNNKPDEHLDYHLVPTVVFSHPTIGTVGLTEPKAIEQYGAEAVKVYTSSFTPMYSAVTSHRQPCRMKLVCVGKEEKIVGLHAIGFGVDEMIQGFAVAIKMGATKADFDNTVAIHPTGSEEFVTMR

SEQ ID NO: 8585 - protein, 261 aa, uncultured marine bacterium
QPNAMGGREVGGLANQLAVHRTFDAESIKQVQTFWDSPEIATQPGLKAVELFEAVERGEIKVLWIMATNPVVSLPDNQLVKRALEVCPFVIVSDITADSDVAHYADLLLPAAGWGEKQGMVTNSERRLSRQRQFQTPPGEAKSDWWAISQVGQALCTLENTRNGFAFSSERAVLREYAAMAGMNADSPLKLDLSQYANLTEQEYEEWVPTQWGGESPFADGVYSHPDGKARFVVTSESPMRLERTKGWWLNTGRQRDQWHT

SEQ ID NO: 8586 - protein, 412 aa, Saccharomyces cerevisiae
SATLFNNIELLPPDALFGIKQRYGQDQRATKVDLGIGAYRDDNGKPWVLPSVKAAEKLIHNDSSYNHEYLGITGLPSLTSNAAKIIFGTQSDALQEDRVISVQSLSGTGALHISAKFFSKFFPDKLVYLSKPTWANHMAIFENQGLKTATYPYWANETKSLDLNGFLNAIQKAPEGSIFVLHSCAHNPTGLDPTSEQWVQIVDAIASKNHIALFDTAYQGFATGDLDKDAYAVRLGVEKLSTVSPVFVCQSFAKNAGMYGERVGCFHLALTKQAQNKTIKPAVTSQLAKIIRSEVSNPPAYGAKIVAKLLETPELTEQWHKDMVTMSSRITKMRHALRDHLVKLGTPGNWDHIVNQCGMFSFTGLTPQMVKRLEETHAVYLVASGRASIAGLNQGNVEYVAKAIDEVVRFYA

SEQ ID NO: 8587 - protein, 259 aa, uncultured marine bacterium
QPNAMGGREVGGLANQAAIHRGFDPDSIKLISEFWQTDNLATRPGLKAIELFEAVERGDIQVIWIMATNPVVSMPDNVFIQRALQKCPLVIVSDVTHDSDITQYADLLLPAAGWGEKQGMVTHSERMLTRQRKFLPSKGEAKPDWQIIAEVGKKLCERLDKPNAFEFKSESSVFREYAAMTGLNKDTPLLLDLSKYAEISDEEYESWNPVQWGSSRPFADGKFSTENRKARVVGTTAPLIKGESSLWLNTGRQGDQWHT

SEQ ID NO: 8588 - protein, 586 aa, Xylella fastidiosa 9a5c
MSPQTSLSILLHPGSPAPMSSSSIEDIKGKSHRLRGSLLESLANPTTGALHESDQTLIKYHGSYQQDDRDLREERRRQKLEPAYQFMIRTRTPGGVITPQQWLQLDAIATRYANHSLRVTTRQAFQFHGVIKRELKATMQAINAALIDTLAACGDVNRNVQVAANPLLSRAHADLYTDAAHLSEHLLPNTRAYYEIWLDEKKVAGAGEEEEPIYGPHYLPRKFKIGFAAPPINDVDVFANDLGFIAVIVDNTLLGYNVAIGGGMGTTHGDPDTWPRVGNIIGFITRADLIAISTAIVTTQRDFGNRTLRKRARFKYTIDDRGLDCIVGEIQQRAGITLQPARPFVFEHNGDRYGWIEGEDRHWHLTLSLPAGRIADTESSPLLSGFRAIAQLGIGQFRMTPNQNVVIAGISPGQRATIDALVTQYGLDTGNRAPTALARHAMACVALPTCGLAMAEAERYLPDFNVKLQPILEKYGLAEKPILLRISGCPNGCSRPYLAEIALVGKAPGRYNLMLGGDQRGQRLNTLYRENITETEILAALEPLLGRYQQKRLPGEGFGDFLHRTGIIALPPYPTHRHVISSTLQA

SEQ ID NO: 8589 - protein, 255 aa, Bradyrhizobium japonicum USDA 110
MPLVVDNTTTPLICRPSDLGAAVTTYSATKYISGHGTTLGGLIVDSGKFSYRGASRFPLFNGPDEAHGGIVWHNAVRDVDDLGKSEFLLKARMTWLRDTGAAISPFASFQLIQGLETLPLRMKQHCANARIVAGVLKEHPKVRRVFYPGLFEGADREIVEQTLNTAYGHGAMVMFEVEDELAGRKFIQNIDLMYHVSNVGDARTLVTHPVSTTHTTVPREKREAAAIFGGSIRLCVGIEDVNDILRDLDKALSAI

SEQ ID NO: 8590 - protein, 320 aa, Arabidopsis thaliana
MASTAATAALSIIKSTGGAAVTRSSRASFGHIPSTSVSARRLGFSAVVDSRFSVHVASKVHSVRGKGARGVITMAKKSVGDLNSVDLKGKKVFVRADLNVPLDDNQNITDDTRIRAAIPTIKFLIENGAKVILSTHLGRPKGVTPKFSLAPLVPRLSELLGIEVVKADDCIGPEVETLVASLPEGGVLLLENVRFYKEEEKNEPDFAKKLASLADLYVNDAFGTAHRAHASTEGVTKFLKPSVAGFLLQKELDYLVGAVSNPKRPFAAIVGGSKVSSKIGVIESLLEKCDILLLGGGMIFTFYKAQGLSVGSSLVEEDKL

SEQ ID NO: 8591 - protein, 271 aa, Bradyrhizobium japonicum USDA 110
MSLQQPERARAVVGVTSNRLLVDGVHRDWLRRKYVQALHRHGGVACVVLPTVDAEDAGEAFATAIMRRLDGVVLTGDESNVDPAVLSAPASLVDPDRDVEAGILDRPRDRLSAVAIQSAIALGMPILGICRGLQELNVYFGGTLRPSLAEWSLESGAMHAEKPDRPRDRQYDAAHSVRISSDGALFPIARTIEAQVNSLHNQGIEALAPALRREAWAPDGLVEAASVIGAPTLQIGVQWHPEWHVSTDLLGKQLFKAFGEACVVYRGTKNH

SEQ ID NO: 8592 - protein, 364 aa, Celastrus scandens
VQSQKLAVRAISRLQSLPGGDIKLLCDTVVESVRDLTSYDRVMVYKFHEDEHGEVVAESKRPDLEPYFGLHYPSTDIPQASRFLFKQNRVRMIADCRASPVGVIQDDGLMQPLCLVGSTLRAPHGCHAQYMENMGSKSSLAMAVIINGTDEEVIGGRNATRLWGLVVCHHTSARCIPFPLRYACEFLMQAFGLQLNMELQLAAQLSEKHVLKTQTLLCDMLLRDSPTGIVTQSPSIMDLVKCDGAALYYQGKYYPIGVTPVEAQIKDIVEWLLTFHGDSTGLSTDSLADAGYPGAALLGDAVCGMAVAYITKKDFLFWFRSHTTKEIKWGGAKHHPEDKDDGQRMHPRSSFKAFLEVVKSRSLP

SEQ ID NO: 8593 - protein, 496 aa, Haloferax volcanii
MALKEFKLPDVGEGVAEGELVTWHVAPGDEVTEDQVLAEVETDKALVDVPSPFDGTVKELLAEEGEVVPVGDVIITIQEDGDDEEAAEAADADAEAAGSESAEGDDGASDDESGSGGRVFAPPSVRRLARELGVDLDAVDGSGPSGRVTEGDVRAAADDDGDEDDEPSGPRTVQTNGKSATAKRDEGTSASASSSAPTESADREQTLAAPATRALAKEEGVDIDAVPATEMRDGEAFVSPEAVQEYAQAQREAQAADAEAVSAEADAGTATAEATVDAASEPAPPEAGPGAGERVPYKGVRKAIGDQMQRSKYTAPHVTHHDEVDVTELVELREQLKPVAEERGSRLTYMPFVMKAVVAALKGFPYLNSQLDEENEEIVLRDEYNIGVAAATDAGLLVPVVHDADRKGMLELADEMNEKVEKARNRKIAPEEMRGGTFTITNVGGIGGEYATPIINYPEVAILALGAIKEKPRVVDGEVVPRNVLTLSLSFDHRVV

SEQ ID NO: 8594 - protein, 370 aa, Celastrus scandens
ALSIAGAVQSQKLAVRAISRLQSLPGGDIKLLCDTVVESVRDLTSYDRVMVYKFHEDEHGEVVAESKRPDLEPYFGLHYPSTDIPQASRFLFKQNRVRMIADCRASPVGVIQDDGLMQPLCLVGSTLRAPHGCHAQYMENMGSKSSLAMAVIINGTDEEVIGGRNATRLWGLVVCHHTSARCIPFPLRYACEFLMQAFGLQLNMELQLAAQLSEKHVLKTQTLLCDMLLRDSPTGIVTQSPSIMDLVKCDGAALYYQGKYYPIGVTPVEAQIKDIVEWLLTFHGDSTGLSTDSLADAGYPGAALLGDAVCGMAVAYITKKDFLFWFRSHTTKEIKWGGAKHHPEDKDDGQRMHPRSSFKAFLEVVKSRSL

SEQ ID NO: 8595 - protein, 247 aa, Synechocystis sp. PCC 6803
MKKYIAEFIGTFWLVLGGCGSAVFAAFIAAPGGGNTNEFGLGYLGVALAFGLTVFTGAYALGHISGGHFNPAVSFGLWMGKRFPGSQLAPYIGAQVLGAIVASLFIFIVAQGGPNFSLDGSNPLATNGFGDHSPQGYGFLAALLIEFVLTFIFLIVILGVTDKTAPAGFAPAAIGLALTLIHLISIPITNTSVNPARSTGVALFCGNPALIGQLWLFWLAPIAGALLAGFVYHNVLEDLGRPEPEAE

SEQ ID NO: 8596 - protein, 221 aa, Glycine max
MKNCELCKLPARTFCESDQASLCWDCDAKVHGANFLVERHTRTLLCHACQSPTPWKASGAALGNTVSLCERCAGGTTEQGQESQGGNDDDIDTDIDTDDEDDYDESEDEVAADEEDGDNQVVPWSSEPPPPAPSSSSSEESVSRCNNVDEVSTTLKRRRQEDNDFQGWNSNNWGCERSEVERGGWLVRLRRRTADDVAVEQRSARAASPDGCCGDRASEDV

SEQ ID NO: 8597 - protein, 374 aa, Crossopetalum rhacoma
ALSIAGAVQSQKLAVRAISQLQSLPGGDIKLLCDTVVESVRHLTGYDRVMVYKFHEDEHGEVVAERKRPDLEPYIGPHYPATDIPQASRFLFKQNRVRTIVDCHASPVRVIQDDGLMQPLCLVGSTLRAPHGCHAQYMENMGSIASLAMAVIINGNDEEVIGGRNTTRLWGLVVCHHTSARCIPFPLRYACEFLMQAFGLQLNMELQLAAQLSEKHVWKTRTLLCDMLLRDSPTGIVTQSPSIMDLVKCDGAALYYQGNYYPLGVTPTEAQITDIVGWLLDFHGDSTGLSTDSLADAGYPGAALLGDAVCGMAVAYITNRDFLFWFRSHTAKEIKWGGAKHHPEDRDDGQRMHPRSSFQAFLEVVKSRSLPWEN

SEQ ID NO: 8598 - protein, 216 aa, Oryza sativa (japonica cultivar-group)
CGAFPWDASPSCSNPSVEVSSYVNTTSYVLKEPGSNKRVRSGSCGRPTSKASREKIRRDKMNDRFLELGTTLEPGKPVKSDKAAILSDATRMVIQLRAEAKQLKDTNESLEDKIKELKAEKDELRDEKQKLKVEKETLEQQVKILTATPAYMPHPTLMPAPYPQAPLAPFHHAQGQAAGQKLMMPFVGYPGYPMWQFMPPSEVDTSKDSEACPPVA

SEQ ID NO: 8599 - protein, 374 aa, Crossopetalum rhacoma
ALSIAGAVQSQKLAVRAISQLQSLPGGDIKLLCDTVVESVRHLTGYDRVMVYKFHEDEHGEVVAERKRPDLEPYIGPHYPATDIPQASRFLFKQNRVRTIVDCHASPVRVIQDDGLMQPLCLVGSTLRAPHGCHAQYMENMGSIASLAMAVIINGNDEEVIGGRNTTRLWGLVVCHHTSARCIPFPLRYACEFLMQAFGLQLDMELQWRAQLSKKHVWKTRTLLCDMVLRDSPTGIVTQSPSIMDLVKCDGAALYYQGNYYPLGVTPTEAQITDIVGWLLDFHGDSTGLSTDSLADAGYPGAALLGDAVCGMAVAYITNRDFLFWFRSHTAKEIKWGGAKHHPEDRDDGQRMHPRSSFQAFLEVVKSRSLPWEN

SEQ ID NO: 8600 - protein, 549 aa, Malus x domestica
MWDLNDSPDQRPRGEESEGCSSQKTSADGDEEKRKRVGSVSNSSSSAVVIEEDGSDQEEDQDDGPTKLAKKQGGGGGKIFGFSVAHEESMDSDPPATVTRQFFPVELDYSSSSNLDVMGPAEGGGSIPPPPSTSSSFPRAHWVGVNFGQSDSGSPGNPPPAGEASHQPMKKSRRGPRSRNSQYRGVTFYRRTGRWESHIWDCGKQVYLGGFDTAHAAARAYDRAAIEFRGVEADINFSIEDYEEDLKQMRNLTKEEFVHVLRRQSTGFPRGSSKYRGVTLHKCGRWEARMGQFLGKTYVYLGLFDTEVDAARAYDKAAIKCNGKEAVTNFDPSIYDNELNSSESSGVIAADHNLDLSLGSTNSKKNNQALGNDHHSQNVAMEHQHSVSMQLDANWRSQGLRPKLNIQRDRSRDDIDAQRRDGYSESEAMQLLLRTNLQSQAPAEVHKYGQFNRRLTAGDIQMSHNFPPNFNSPNYHHIQFPSSSEGGGRIGSDLSLSTSDHQQQWQSATPTSNLFATAAASSGFPPQLRPLPTQNSWLQKNGFHTLARR

SEQ ID NO: 8601 - protein, 374 aa, Cuervea integrifolia
ALSIAGAVQSQKLAVRAISQLQSLPGGDIKLLCDTAVESVRNLTGYDRVMVYKFHEDEHGEVVAESRRPDLEPYIGLHYPATDIPQASRFLFKQNRVRIIVDCHASPVSVIQDDGLMQPLCLVGSTLRAPHGCHAQYMENMGSIASLAMAVIINGNDEDGIGGRNPTRLWGLVVCHHTSARCIPFPLRYACEFLMQAFGLQLNMELQLAAQLLEKHVLKTQTLLCDMLLRESPTGIVTQSPSIMDLVKCDGAALYYQANYYPLGVTPTEAQIRDIVEWLLAFHGDSTGLSTDSLADAGYPGATLLGDAVCGMAVAYITNRDFLFWFRSHTAKEIKWGGAKHHPEDKDDGQRMHPRSSFKAFLEVVKSRSLPWEN

SEQ ID NO: 8602 - protein, 384 aa, Arabidopsis thaliana
MSGSLMNLFSLCFKPFGHVCDNSEAGSGGGGGVSGGTGGEGKDGLLWFRDLGKYCGGDFSMAVIQANQVLEDQSQVESGNFGTFVGVYDGHGGPEAARYVCDHLFNHFREISAETQGVVTRETIERAFHATEEGFASIVSELWQEIPNLATVGTCCLVGVIYQNTLFVASLGDSRVVLGKKGNCGGLSAIQLSTEHNANNEDIRWELKDLHPDDPQIVVFRHGVWRVKGIIQVSRSIGDMYMKRPEFNKEPISQKFRIAEPMKRPLMSATPTILSHPLHPNDSFLIFASDGLWEHLTNEKAVEIVHNHPRAGSAKRLIKAALHEAARKREMRYSDLRKIDKKVRRHFHDDITVIVVFLNHDLISRGHINSTQDTTVSIRSALEH

SEQ ID NO: 8603 - protein, 416 aa, Myxococcus xanthus
MAIFEFKLPDLGEGVMEGELVKWHVKAGDSVKEDQVLAEVMTDKATVTVPAPKAGRVVKTHGNEGDMAKVHQLLVTLEVEGAAPAQAGGHSEASAPAAAPVAGGHVGGAPASASKVLATPVTRRMAREHGLDLASIAGTGPQGRVTKADVVAALEGGEKNVVAAPAEQKARPAAPAVSSGAADERVPLRGLRKKIAEKMVRSKFTAPHFAFVEEVDATELVALRARLNAQLAAAGENIKLNYLPFIIKATVAALKKFPHLNANFDEASQELVVRGEFNIGMAAATPDGLTVAVVKSADRLTLAELARETARLGAAARDRKLKMEELTGGTFTISSLGQSGGLFATPIINHPEVGILGVHRLKKRPAVVGDQVVVRDMMNLSLSCDHRVIDGSVAADFTYEIIKYLEKPDLLFLAMA

SEQ ID NO: 8604 - protein, 431 aa, Escherichia coli
MVSLEKNDHLMLARQLPLKSVALILAGGRGTRLKDLTNKRAKPTVHFGGKFRIIDFALSNCINSGIRRMGVITQYQSHTLVQHIQRGWSFFNEEMNEFVDLLPAQQRMKGENWYRGTADAVTQNLDIIRRYKAEYVVILAGDHIYKQDYSRMLIDHVEKGARCTVACMPVPIEEASAFGVMAVDENDKIIEFVEKPANPPSMPNDPSKSLASMGIYVFDADYLYELLEEDDRDENSSHDFGKDLIPKITEAGLAYAHPFPLSCVQSDPDAEPYWRDVGTLEAYWKANLDLASVVPELDMYDRNWPIRTYNESLPPAKFVQDRSGSHGMTLNSLVSGGCVISGSVVVQSVLFSRVRVNSFCNIDSAVLLPEVWVGRSCRLRRCVIDRACVIPEGMVIGENAEEDARRFYRSEEGIVLVTREMLRKLGHKQER

SEQ ID NO: 8605 - protein, 226 aa, Zea mays
  unsure (1)..(226): unsure at all Xaa locations
MAGADVDVGTELRLGLPGGGADAAKAAKRGFEDTIDLKLKLPTAGMEEAAAAAAAKPEPAAEKAKRPAEAPAADAEKPPAPKAQAVGWPPVRSYRRNVMTVQSVKSKKEEEPEKQQSAANAGGNGSAFVKVSMDGAPYLRKXDLKMYNSYTELSVALKKMFSTFNXPGNNMNEGKLVDPVSGADVVTTYEDKDGDWMLVGDVPWEMFVESCRRLRIMKSSEAIGLG

SEQ ID NO: 8606 - protein, 312 aa, Zea mays
MVSPDAIRTVIGVIGNGTALVLFLSPVPTFISIWKKKTVEQYSAVPYLATLLNCMMWVLYGLPLVHPHSMLVITINGTGMLIELTYIALFLTFSVGAARRRVLLLLVAEVAFVAGVAALVLSLAHTHDRRSMVVGILCVLFGTGMYAAPLSVMKMVIQTKSVEYMPLFLSVASLVNGICWTAYALISFDLYITIPNGLGVMFAVGQLVLYAIYYKSTQEIIEARKRKADQIAMTGVVVDGGKTNNQAGAGQYAQARSQRQINYVAAGFYVFCDSICTLAACPSRPMEKKGGRKNVCRYMCSRRITLAHSWWG

SEQ ID NO: 8607 - protein, 759 aa, Streptomyces coelicolor A3(2)
MSEANPLKRVARKVTEGLHGEAGGPPDGIPGRPGPESPSAAEPTEPREPLPPKPDQTGPDTVSPTGQPTGADQARVAQSGSYLTNAQGTRLYDTDHSLKAGPRGPVLLQDHHLREKVMHFDHERIPERVVHARGAGAHGVFQSYGTAASVTKAGFLAADVETPVFTRFSTVVGSRGSSDTVRDTRGFATKFYTSEGVFDLVGNNIPVFFIQDAIKFPDVVHAAKPHPDREIPQAQSAHDTFWDFVSLHTEATNHTIFFMGDRGIPRSFRMMEGFGVHTFRLVNAEGATTLVKFHWKPKLGVHSLVWDEAQLINGVDPDFHRRDLADAIEAGAYPQWELGIQTFPDNPEQTFEGIDLLDPTNFVPEELAPVQPVGLLTLNRNPSNFFAETEQVAFHVGHLVPGIDVTDDPLLAGRLFSYLDTQITRLGGPNFPQLPINRPQAPVNDMLRDGMHQSAVHRGVAPYRPNSLDGGCPFTAGADTSAFVEAPVRVPEGRKVREASESFADHFSQPRRFWLSMSPVEREHIIGAYTFELGKCYEQAIRERTLQVLANIDPELCAGVAEGLGLPAPEPTVPLAEVEPSPALSQVGGVWPLDGRVVGIVTGGADLEGVGAVREAVLNAGMVPLVVAPTGGTLGSGDAALTVQRSYVTARSVEFDAVLIAGTPDMGGDAYTPRDYKAGPAPAGPGTVDPRVSLLLSEAFRHGKAIGVWAGGTPALEASGVPADAPGVIVADSGTAALERVTELMGSHRVWERFTTPRG

SEQ ID NO: 8608 - protein, 115 aa, Glycine max
  unsure (1)..(115): unsure at all Xaa locations
QVNGEIYNHEELRKQLPNHKFRTGCDCDVIAHLYEEHGEDFVDMLDGIFSFVLLDTRDNSFIVARDAIGVTSLYIGWGLDGSVWISSXMKGLNDDCEHFXVFPPGHLYSSKERGF

SEQ ID NO: 8609 - protein, 467 aa, Deinococcus radiodurans R1
MTNNFDYDVLVIGAGPGGYHAAIRASQLGLKTACVERGAVGGVCLNIGCIPTKALLHAAETMQASKHAAEFGLTFSGQALDIARLNGWKDSIVKKLTGGVSGLFKANKVTLLTGQASFVDDHTVQVGDKTYTAANIIIATGSDPAKLPGLEVDQQQIVDSTGALVMPDPVPARMLCVGGGVIGFEFAQVYNNLGSQVKIIEFLPSVIPGADADAVKEFSKIMSRQGIEIVTQMKANRAEKKSDGVHVELENVKTGEKTTEVFDRVLVAVGRRPRTDGLNPEQAGVTVTERGFIPADKQQRTNVPHIFSIGDVAGNPMLAHKAMKEGLVAAEVIAGKPAEQDAVAIPGVVYTNPELAWVGLTEAEAQEKGYEVKTGVFPMSASGRAMTLQATEGFVKMVVEKDTDLLLGVHIVAPHASDMLAEAGLALEMAATATDISLTIHAHPTLGESILEAAEASHKQAIHIVNR

SEQ ID NO: 8610 - protein, 363 aa, Cuervea kappleriana
SQKLAVRAISQLQSLPGGDIKLLCDTAVESVRNLTGYDRVMVYKFHEDEHGEVVAESRRPDLEPYIGLHYPATDIPQASRFLFKQNRVRIIVDCHASPVSVIQDDGLMQPLCLVGSTLRAPHGCHAQYMENMGSIASLAMAVIINGNDEDGIGGRNATRLWGLVVCHHTSARCIPFPLRYACEFLMQAFGLQLNMELQLAAQLLEKHVLKTQTLLCDMLLRESPTGIVTQSPSIMDLVKCDGAALYYQANYYPLGVTPTEAQIRDIVEWLLAFHGDSTGLSTDSLADAGYPGATLLGDAVCGMAVAYITNRDFLFWFRSHTAKEIKWGGAKHHPEDKDDGQRMHPRSSFKAFLEVVKSRSLPG

SEQ ID NO: 8611 - protein, 175 aa, Triticum aestivum
MAPAVMASSATTVAPFQGLKSTAGLPVSCRSGSTGLSSVSNGGRIRCMQVWPIEGIKKFETLSYLPPLSTEALLKQVDYLIRSKWVPCLEFSKVGFVFREHNSSPGYYDGRYWTMWKLPMFGCTDATQVLNEVEEVKKEYPDAYVRVIGFDNMRQVQCVSFIAFRPPGCEESGKA

SEQ ID NO: 8612 - protein, 134 aa, Zea mays
PSIPYDPMALRKAFDKPVSLVTAVAVRHLAGTEAARRLGTKLHSFYVGLKGSPDLKAAREDDIDAIEDVIYHTEAYDVTTIRASTPMFLMSHKIKSLGVKMVISGEGSDELFGGYLYFHKAPNKEELHRETCRK

SEQ ID NO: 8613 - protein, 831 aa, Ralstonia metallidurans CH34
MPLTRRDFIKQTAIAATASVAGVSLPTDAANFVTDSEVTKLKWSKAPCRFCGTGCGVTVAVKDNKVVATQGDPLCEVNKGLNCVKGYFLSKIMYGQDRLTKPLLRMKNGKYDKNGEFAPVSWDRAFDEMEAQFKRVLKEKGPTAVGMFGSGQWTVWEGYAASKLYKAGFRSNNIDPNARHCMASAVTGFMRTFGMDEPMGCYDDIEAADVFVLWGSNMAEMHPILWTRITDRRLSHPKTRVAVLSTFTHRSFDLADIPVIFKPQTDLAMLNFIANYIIRNNKVNKDFVNKYTVFKEGVTDIGYGLRPDNPLQKAAKNAGNPNDSKLITFDDFAKFVSKYDADYVSKLSGVPKKQLEQLAELYADPNLKVMSLWTMGFNQHTRGTWVNNMAYNVHLLTGKIATPGNSPFSLTGQPSACGTAREVGTFSHRLPADMVVTNPKHREEAERIWKLPPGTIPDKPGYHAVLQNRMLRDGKLNAYWVQVNNNMQAAANMMEETLPGYRNPTNFIVVSDAYPTVTALSADLILPTAMWVEKEGAYGNAERRTQFWHQLVDAPGEARSDLWQLMEFSKRFKVEDVWPAELIAKKPEYKGKTLFDVLYRNGQVDKFPLKETASDYNNYESKAFGFYVQKGLFEEYATFGRGHGHDLAPFDMYHEARGLRWPVVNGKETRWRYREGSDPYVKAGTGFQFYGNPDGKAVIYALPYEPPAESPDKEYPFWLATGRVLEHWHSGSMTRRVPELYRAFPNAVCFMHPEDAKALGLRRGVEVEVVSRRGRMRTRIETRGRDAPPRGLVFVPWFDASQLINKVTLDATCPISLQTDFKKCAVKIVKV

SEQ ID NO: 8614 - protein, 364 aa, Dicarpellum baillonianum
VQSQKLAVRAISQLQSLPGGDIKLLCDTVVECVGDLTGYDRVMVYRFHEDEHGEVVAESKRPDLEPYLGLHYPATDIPQASRSLFKQNRVRMIVDCHASPVRVIQDDGLMQALCLVGSTLRAPHGCHAQYMENMGSIASLAMAVIINVNDEEATAGRNPTRLWGLVVCHHTSARCIPFPLRYACEFIMQAFGLQLNMELQLAAQLLEKHVLKTQTLLCDMLLRDSPTGIVTQSPSIMNLVKCDGAALYYQGNYYPLGVTPAEAQIKDIVEWLLAFHGDSTGLSTDSLADAGYPGAALLGDAVCGMAVAYITNRDFLFWFRSHTAKETKWGGAKHHPEDKDDGQRMHPRSSFKAFLEVVKSRSLP

SEQ ID NO: 8615 - protein, 362 aa, Dicarpellum baillonianum
QSQKLAVRAISQLQSLPGGDIKLLCDTVVECVGDLTGYDRVMVYRFHEDEHGEVVAESKRPDLEPYLGLHYPATDIPQASRSLFKQNRVRMIVDCHASPVRVIQDDGLMQALCLVGSTLRAPHGCHAQYMENMGSIASLAMAVIINVNDEEATAGRNPTRLWGLVVCHHTSARCIPFPLRYACEFIMQAFGLQLNMELQLAAQLLEKHVLKTQTLLCDMLLRDSPTGIVTQSPSIMNLVKCDGAALYYQGNYYPLGVTPAEAQIKDIVEWLLAFHGDSTGLSTDSLADAGYPGAALLGDAVCGMAVAYITNRDFLFWFRSHTAKETKWGGAKHHPEDKDDGQRMHPRSSFKAFLEVVKSRSL

SEQ ID NO: 8616 - protein, 425 aa, Spinacia oleracea
GASFSLHVLSKINSYKSQSTKPIRGVASMAKKSVGDLTSADLKGKKVFVRADLNVPLDDSQNITDDTRIRAAIPTIKHLINNGAKVILSSHLGRPKGVTPKFSLAPLVPRLSELLGLQVVKADDCIGPDVEKLVAELPEGGVLLLENVRFYKEEEKNDPEFAKKLASLADLYVNDAFGTAHRAHASTEGVTKFLKPSVAGFLLQKELDYLVGAVSNPKRPFAAIVGGSKVSSKIGVIESLLEKCDILLLGGGMIFTFYKAQGMSVGSSLVEEDKLDLATSLLAKAKEKGVSLLLPTDVVIADKFAADADSKIVPASGIPDGWMGLDIGPDSIKTFSEALDTTQTVIWNGPMGVFEFEKFAAGTEAIAKKLEEISKKGATTIIGGGDSVAAVEKVGVAEAMSHISTGGGASLELLEGQTASWSTCS

SEQ ID NO: 8617 - protein, 365 aa, Dicarpellum pancheri
QSQKLAVRAISQLQSLPGGDIKLLCDTVVECVGDLTGYDRVMVYRFHEDEHGEVVAESKRPDLEPYLGLHYPATDIPQASRFLFKQNRVRMIVDCHASPVRVIQDDGLMQALCLVGSTLRAPHGCHAQYMENMGSIASLAMAVIINGNDEEATAGRNPTRLWGLVGCHHTSARCIPFPLRYACEFIMQAFGLQLNMELQLAAQLLEKHVLKTQTLLCDMLLRDSPTGIVTQSPSIMNLVKCDGAALYYQGNYYPLGVTPAEAQIKDIVEWLLAFHGDSTGLSTDSLADAGYPGAALLGDAVCGMAVAYITNRDFLFWFRSHTAKETKWGGAKHHPEDKDDGQRMHPRSSFKAFLEVVKSRSLPGR

SEQ ID NO: 8618 - protein, 397 aa, Lycopersicon esculentum
MSSSLHSPLYSSLSSSSALQDRKLRNAVNFAKPNLIFKPRRSFPLIRASAGFSSSLDTGLSTELDAVANHSEIVPDTVIFDDFEKFPPTAGTASSSLLLGICGLPDTKFKSAVDRALSDSECYGLESSDLQMSCFFNKALAHVGGDLAKLVPGRVSTEVDARLAYDTHGIVRKVHDLLKAYTEIEVPPERLLFKIPATWQGIEASRVLEAEGIQTHLTFVYSFCQAAAAAQAGASVIQIFVGRLRDWSRNHTGDSEVESALRRGEDPGLALVTKTYNYIHKYGHKTKLMAAAVRNKPDVFNLLGGGYIITPLKVLQSLKESVTLLDEKYSFTRRLSPQSAAAFNFTQDELQKWDQYSFSSAMGPASVELLTIGLDGYINQAKRVEELFGKIWPPPNV

SEQ ID NO: 8619 - protein, 467 aa, Agrobacterium tumefaciens str. C58 (U. Washington)
MTIDIKNIAEMDRNAVLHPFTQLKDFASGKLGEPTIVETGKGIRIQDAHGKQLIDGFAGLYCVNVGYGRTEVAEAISRQAYRLAYYHSYAAHTTDELAILSDRLVRMAPGKMSKVFYGMSGSDANETQAKLVWYYNNLRGKPQKKKIISRERGYHGCSVVAGSMTGMSFYHDHMDLPRVGILHTGVPHHYWGAEAGETELEFSKRRAAELEALILREGPDTIGAFIAEPVLGTGGITPPPEGYWPAIQEVLKKYDVLLIADEVITGFGRTGSMFGSQHYGIEPDLITVAKGLTSAYFPLSGAIVGEKVYTVMEDGADRVGAFSHGYTYSGHPIGAAAANAVLDIVEKEDLPGNAQAVGSYFQEQLKAKFAQLPIVGEVRGVGLMGAIEFVADREKKTRFAPHLTVGARVSKAARNGGLIARAMPHGDILGFAPPLVTTKAEVDEIIAIAEAAVRTVMDDLVQAGEKI

SEQ ID NO: 8620 - protein, 364 aa, Dicarpellum pancheri
VQSQKLAVRAISQLQSLPGGDIKLLCDTVVECVGDLTGYDRVMVYRFHEDEHGEVVAESKRPDLEPYLGLHYPATDIPQASRFLFKQNRVRMIVDCHASPVRVIQDDGLMQALCLVGSTLRAPHGCHAQYMENMGSIASLAMAVIINGNDEEATAGRNPTRLWGLVGCHHTSARCIPFPLRYACEFIMQAFGLQLNMELQLAAQLLEKHVLKTQTLLCDMLLRDSPTGIVTQSPSIMNLVKCDGAALYYQGNYYPLGVTPAEAQIKDIVEWLLAFHGDSTGLSTDSLADAGYPGAALLGDAVCGMAVAYITNRDFLFWFRSHTAKETKWGGAKHHPEDKDDGQRMHPRSSFKAFLEVVKSRSLP

SEQ ID NO: 8621 - protein, 180 aa, Triticum aestivum
  unsure (1)..(180): unsure at all Xaa locations
MAPTXMAXSAXSVXPFQGXKSXAXLPXXRRSNGASLGSVSNGGRIRCMQVWPIEGIKKFETLSXLPPLNTEALLKQVDYLIRSKWVPCLEFNXVGFIFREHNASPGXYDGRYWTMWKLPMFGCTDXHTXVXNXVXGGXKKEXPRRYRNQSGFNAPKCKCVLSILQNQPGLRRIPKGKLHS

SEQ ID NO: 8622 - protein, 561 aa, Burkholderia fungorum LB400
MELAMNISPLAGKRLPDAMLVNVPRLVTAYYTDKPDAAIPAHRVAFGTSGHRGSAFARSFNEWHVLAITQAICYYRKQQAIDGPLFIGIDTHALSEPAYASALEVLAANGVEVMIAQNGEYTPTPAVSHAILAYNRGRSAGLADGIVMTPSHNPPESGGFKYNPPNGGPADETVTGWIERAANGLLESRLDGVLRICLSKALRATTTHRHDFLNAYVGDLVNVLDMDVVRGAPIRLGVDPLGGAGVHYWGPIAERYNLNLSVVNDEVDPTFRFVSVDWDGRIRMDPSSPYAMQTLIDQKDRFDVAFACDTDHDRHGIVTRHAGLLPPNHYLAVLVHYLYANRPQWRAHVAVGKTIVSSQMIDRVTEKLGRTLYEVPVGFKWFVDGLLDGSLGFAGEESAGASCLRLDGTAWSTDKDGIVPALLAAEMTTRTGRDPAEIYRDLTQRLGEPVERRVQAAATAPQRALLARLSPAQFPHTELAGEKIEQVLDRAPGNGAAIGGIKVVTKSGWFAARPSGTEDVYKIYAESFRGEAHLTRIVGEAQAMVDSVFEAQVATDDGARP

SEQ ID NO: 8623 - protein, 292 aa, Vibrio cholerae
MKGIILAGGSGTRLYPITRGVSKQLLPIYDKPMIYYPLSTLMLAGIRDVLIITTPEDNESFKRLLGDGRDFGIHLQYAIQPSPDGLAQAFLIGEEFIGNDSVCLVLGDNIFYGQSFSKTLRHAASREHGATVFGYQVKDPERFGVVEFDEQMRAISIEEKPLKPKSNYAVTGLYFYDSRVVELAKQVKPSARGELEITTLNEMYLNDGSLNVELLGRGFAWLDTGTHESLHEASSFVETVQHIQGLKIACLEEIAWRNGWLTSEQLLECAKPMLKNDYGQYLERLVKEERHG

SEQ ID NO: 8624 - protein, 464 aa, Mycobacterium bovis AF2122/97
MSFVNVAPQLVSTAAADAARIGSAINTANTAAAATTQVLVAAQDEVSTAIAALFGSHGQHYQAISAQVAAYQERFVLALSQAGSTYAVAEAASATPLQNVLDAINAPVQSLTGRPLIGDGANGIDGTGQAGGNGGWLWGNGGNSGSGAPGQAGGAGGAAGLIGNGGAGGAGGQGLPFEAGANGGAGGAGGWLFGNGGAGGNGGIGGAGTNLAIGGHGGNGGNAGLIGAGGTGGAGGTGGGEPSAGASGGNGGNGGNGGLLIGNSGDGGAAGNGAGISQNGPASGFGGNGGHAGTTGLIGNGGNGGAGGAGGDVSADFGGVGFGGQGGNGGAGGLLYGNGGAGGNGGAAGSPGSVTAFGGNGGSGGSGGNGGNALIGNAGAGGSAGAGGNGASAGTAGGSGGDGGKGGNGGSVGLIGNGGNGGNGGNGGAGSLFNGAPGFGGPGGSGGASLLGPPGLAGTNGADG

SEQ ID NO: 8625 - protein, 374 aa, Solanum tuberosum
MNYSTYTQFVASRRMGICEPIHQMGMWDDFNASCPSTSATMILEVEKCLEDQIPIIDKRLDIETEDTSHGTVGTSNRYEAETSKPIEKVLRRLAQNREAARKSRLRKKAYVQQLENSKLKLIQLEQELDRARKQGLYVGAGLDASQLSYSGTASSGTAVFDTEYGQWVEEQNRQTNDLRNALHHSQISEAELRIIVDGCLNHYFELFRVKATAAKADVLYIMSGMWKTSAERFFMWIGGFRPSELLKVLTPHLELLTEQQLREVCNLRQSCQQAEDALSQGMVKLHQILGEAVAAGRLGEGNYSLPQMGPAIEKLEALVRFVNQADHLRQETLQQMSRILNTHQAAQGLLALGEYFEQLRVLSSHWATRLHEPA

SEQ ID NO: 8626 - protein, 628 aa, Haemophilus somnus 129PT
MAKEIQIPDIGGDEVTVTEVMVKAGDTIIVDQSVINVEGDKASMEVPSPEAGVIKEVLVKVGDKVSTGTPMFVLENAELASTETASKSMQTEKTQSAVASIIEIYVPDIGGDEVNVTDIMVSVGETVAEEQSILNVEGDKASMEVPAPTAGIVKEILIKVGDKVSTGSLVMKFEVAGVVSAAETAQVSSSAQVTGESAVQDVHVPDIGGDEVNVTEIMVAVGDSVTEEQSLITVEGDKASMEVPAPFAGVVKEILVKSGDKVSTGSLIMRFEVQGKAPTPEASSAVTEAKVDPSPAAQENQMTPVSQADVTASAVFAHATPVVRRLAREFGVNLDKVKGTGRKGRILKEDVQAYVKAAIKAVESGNVSPTSAGNGAVNGAGLGLLPWPKVDFSKFGDIEQVELGRIQKISGANLHRNWVMIPHVTQWDKADITELEKFRKEQNVLAEKQKLDVKITPLVFIMKAVAKALENYPRFNSSLSEDAQSLILKKYINIGVAVDTPNGLVVPVFKDVNKKGIIELSRELAEISKKARAGKLTASDMQGGCFTISSLGGIGGTHFTPIVNAPEVAILGVSKSEMTPVWNGKDFTPRLMLPLSLSYDHRVIDGADGARFITFINSVLSDLRRLVM

SEQ ID NO: 8627 - protein, 474 aa, Haemophilus somnus 129PT
MNKEIKTQVVVLGAGPAGYSAAFRCADLGLETVIVERFSTLGGVCLNVGCIPSKALLHVAKVIEEAKSLSAHGIVFGEPTTDIDKIRGWKEKVINQLTSGLAGMAKQRKVQVVNGYGKFSGPNAIIVAGDEGETKITFDNAIIAAGSRPIQLPFIPHEDPRIWDSTDALKLKEVPENLLIMGGGIIGLEMGTVYHALGSKIDVVEMFDQVIPAADKDMVQIYTKRIEKKFNLLLETKVTAVEAKEDGIYVSMEGKAASETRRYDAVLVAIGRVPNGKLIDAGIAGVEVDDRGFIRTDKQMRTNVPHIFAIGDVVGQPMLAHKGVHEGHVAAEVIAGQKHYFDPKVIPSIAYTEPEVAWVGKTEKECKAEGINYEVAKFPWAASGRAIASDCADGMTKLIFDKDTHRVIGGAIVGTNGGELLGEIGLAIEMGCDAEDLALTIHAHPTLHESVGLAAEVFEGSITDLPNPKAKKKK

SEQ ID NO: 8628 - protein, 580 aa, Schizosaccharomyces pombe
MDSPLSSLSFTNTLSGKRNVLRPAARELKLMSDRNANQELDFFFPKSKHIASTLVDPFGKTCSTASPASSLAADMSMNMHIDESPALPTPRRTLFRSLSCTVETPLANKTIVSPLPESPSNDALTESYFFRQPASKYSITQDSPRVSSTIAYSFKPKASIALNTTKSEATRSSLSSSSFDSYLRPNVSRSRSSGNAPPFLRSRSSSSYSINKKKGTSGGQATRHLTYALSRTCSQSSNTTSLLESCLTDDTDDFELMSDHEDTFTMGKVADLPESSVELVEDAASIQRPNSDFGACNDNSLDDLFQASPIKPIDMLPKINKDIAFPSLKVRSPSPMAFAMQEDAEYDEQDTPVVRRTQSMFLNSTRLGLFKSQDLVCVTPKQSTKESERFISSHVEDLSLPCFAVKEDSLKRITQETLLGLLDGKFKDIFDKCIIIDCRFEYEYLGGHISTAVNLNTKQAIVDAFLSKPLTHRVALVFHCEHSAHRAPHLALHFRNTDRRMNSHRYPFLYYPEVYILHGGYKSFYENHKNRCDPINYVPMNDRSHVMTCTKAMNNFKRNATFMRTKSYTFWPKCVSFPRR

SEQ ID NO: 8629 - protein, 292 aa, Vibrio cholerae
MKGIILAGGSGTRLYPITRGVSKQLLPIYDKPMIYYPLSTLMLAGIRDVLIITTPEDNESFKRLLGDGRDFGIHLQYAIQPSPDGLAQAFLIGEEFIGNDSVCLVLGDNIFYGQSFSKTLRHAASREHGATVFGYQVKDPERFGVVEFDEQMRAISIEEKPLKPKSNYAVTGLYFYDSRVVELAKQVKPSARGELKIPTLNEMYLNDGSLNVELLGRGFAWLDTGTHESLHEASSFVETVQHIQGLKIACLEEIAWRNGWLTSEQLLECAKPMLKNDYGQYLERLVKEERHG

SEQ ID NO: 8630 - protein, 177 aa, Neisseria meningitidis Z2491
MGIYDFQMKDAEGNAVDLSGYRGKVLLIVNTATRCGLTPQYEALQKLYAQYTAEGLEILDFPCNQFREQAPESSGEIAQVCMMKFGTKFKIFDKIEVNGANTAPLYAYLKSVKPQDKGNHLFKDFVLKLAALGEKRDEGDIKWNFTKFLVNRDGEVVERFAPSVTPEEIEADIRALL

SEQ ID NO: 8631 - protein, 324 aa, Vigna unguiculata
MVKAIRVHEQGGPQVLKWEDVEIGEPKEGEVRVRNKAVGVNFIDVYFRKGVYKPPSFPFTPGMEAVGVVTAVGAGLTGRQVGDLVAYAGQPMGSYAEEQILPANKVVPVPSSIDPPIAASIMLKGMTTHFLVRRCFKVEPGHTILVHAAAGGVGSLLCQWANALGATVIGTVSNKEKAAQAKEDGCHHVIIYKEEDFVARVNEITSGNGVEVVYDSVGKDTFEGSLACLKLRGYMVSFGQSSGSPDPVPLSSLAAKSLFLTRPSLMQYVVTRDELLEAAGELFANVASGVLKVRVNHTYPLSEAAKAHEDLENRKTSGSIVLIP

SEQ ID NO: 8632 - protein, 492 aa, Acacia ampliceps
MDPYKYRPSSTFNTPFWTTNSGTPVYNNDSALTIGSRGPILLEDYHLVEKIANFTRERTPERVVHARGASAKGFFEVTHDITHLTCADFLRGPGVQTPVIVRFSTVIHERGSPETIRDPRGFAVKFYTREGNFDLVGNNFPVFFIRDGMKFPDVIHAFKPNPKSHIQEYWRVLDFCSYLPESLHTFMFLFDDVGVPQDYRHMEGSSVNTYTLINKAGKVHYVKFHWKPTLGVKCLLEEEAIRVGGANHSHATQDLYDSIAAGNYPEWKLYIQTIDPDFEDRFDFDPLDGTKTWPEDLVPLQPVGRLVLNRNIDNFFAENEQLAFSPSLVVPGIYFSDDKVLQARIFAYGDTQRHRIGPNYLQLPVNAPKCAHHNNHYDGTMNFMHRDEEVDYFPSRYDTARHAEKFPIPPVNLIGRRDRRIIEKENNFKQPGDLYRTWAPDRQERFIRRWIGVLSDPKVTHEVRSIWISYLSQADRSLGQKVASHLNMRPSI

SEQ ID NO: 8633 - protein, 203 aa, Triticum aestivum
MGFPVGYSELLLPKQLLHLLLLLGYLRRFLLWAFDAVGLGDLLDLGDEHLPQDHARADHAAAAAQLLQHRRPEFRPVTAMVIEEVLPVVRFDELEAAACVDGDCAVCLSGIGGGDEVRRLSNCRHAFHRGCLDRWMEHDQRTCPLCRAPLIPDEMAGALWAAAAGVPDASDFDFFYLGAASAPATPTLLRPHELLLTGLGGYQ

SEQ ID NO: 8634 - protein, 467 aa, Mesorhizobium loti
MSAIDAGARAPENLWRQEIRATLALAWPMVLTNLGQTAMTATDVMMMGRLGPDTLASGALGANLYFMPLIFGLGLMLATSPMIATELGRRRYSVRDLRRTVRQGLWLAILISIPIWIVLWHGEAILLAMGQEPALAHQAGIYLRWLEWAVLPFYGYIVLRSFISALERPGWALIIVFVAVACNALFNWVFMFGNLGFPAMGIAGSGLATSLSSTLMFAGMAAVVMLEKKFRRYRLFGRFWRSDWPRFNGLLRLGLPIAGILAFEVTIFNAAALLMGLIDADSLAAHAIAIQIASISFMVPLGLNQAVTVRVGLAHGAGNPEGVSRAGWTAFVIGVSFMALMGLVMVLWPHLLISAFIDLANPANARVIALAVSFLVFAALFQVFDGAQAVAAGMLRGLHDTKVPMIYAAIGYWGVGLPLGVLLAFHFGFHGVGIWIGLSSGLAVVAALLLTRWLRRDRIAPPLAFGH

SEQ ID NO: 8635 - protein, 361 aa, Elaeodendron orientale
QKLAVRAISQLQSLPGGDIKLLCDTVVECVRDLTGYDRVMVYKFHEDEHGEVVAESKRPDLEPYIGLHYPSTDIPQASRFLFKQNRVRIIVDCHASPVCVIQDDGLMQPLCLVGSTLRAPHGCHAQYMENMGSIASLAMAVVINGNDEEVIRGKNLTRLWGLVVCHHTSARCIPFPLRYACEFLMQAVGLQLNMELQLAAQLLEKHVLKTQTLLCDMLLRDSPIGIVTQSPSIMDLVKCDGAALYYQGNYYPLGVTPSEVQIKDIVEWLLAFHGDSTGLSTDSLADAGYPRAALLGDAVCGMAVAYITNRDFLFWFRSHTAKEIKWGGAKHHPEEKDDGQRMHPRSSFKAFLEVVKSRSLP

SEQ ID NO: 8636 - protein, 363 aa, Zea mays
VDQASAPKYHKHPQSHPESGGSQANLRPPSMGEQSLSQPKAQPLSPFPSPPASAALPPPASASASASAASTSRTTSAAASRPKKKVTNPSPDRNPAKKPRLTFSIPGRPLSAVGEVGVAIRYLRAADPALAAVIDAHEPPVFQCPHRPFHSLVRSILYQQLAFKAAASVYSRFLALLGGESCVAPDAVLALTPHQLRQIGVSPRKASYLHDLARKYASGILSDAAIVNMDDRSLAAMLTMVKGIGSWSVHMFMIFSLARPDVLPSADLGVRKGVQMLYALEDVPRPSQMDKLCERWRPYRSVGAWYMWRLIESKVPQPAPAIPVGSLAFPSPDGQSMLQQQEQQQQQTVIQMIDPLQMLPGMG

SEQ ID NO: 8637 - protein, 168 aa, Xylella fastidiosa Ann-1
MSSIYTFTFTRLDGRPQALADWRGQVLLLVNVASRCGFTPQYAGLEMLWQRYRDAGLIVIGFPCDQFAGQEPGDEAKIAEFCTLTYGVDFPMAAKIKVNGADAHPLWQWLKHRRRGLFGVAAIKWNFTKFLIGRNGQPIARYSPIKSPEQLEVHIVRALGEEGGGNTH

SEQ ID NO: 8638 - protein, 154 aa, Synechocystis sp. PCC 6803
MPLPTSLTTLDGTPLAPEVIADKVVLFVNVASKCGLTPQYSGLVALDKAYGEKGLVIIGVPCNQFGAQEPGSPEEIKDFTKTKYDVDFTLLEKQDVNGPNRSPLYQFLVGDGEDISWNFGKFLIGRDGQVVARFDPQTKPDDTNLKAAIEKALG

SEQ ID NO: 8639 - protein, 362 aa, Elaeodendron orientale
QSQKLAVRAISQLQSLPGGDIKLLCDTVVECVRDLTGYDRVMVYKFHEDEHGEVVAESKRPDLEPYIGLHYPSTDIPQASRFLFKQNRVRIIVDCHASPVCVIQDDGLMQPLCLVGSTLRAPHGCHAQYMENMGSIASLAMAVVINGNDEEVIRGKNLTRLWGLVVCHHTSARCIPFPLRYACEFLMQAVGLQLNMELQLAAQLLEKHVLKTQTLLCDMLLRDSPIGIVTQSPSIMDLVKCDGAALYYQGNYYPLGVTPSEVQIKDIVEWLLAFHGDSTGLSTDSLADAGYPRAALLGDAVCGMAVAYITNRDFLFWFRSHTAKEIKWGGAKHHPEEKDDGQRMHPRSSFKAFLEVVKSRSC

SEQ ID NO: 8640 - protein, 503 aa, Ralstonia metallidurans CH34
MLITDPQATASTGNQSGARAKEIHNFINGEYVPGQRWFEKRSPLNNAVIAKVAEAGRAEVDAAVAAAQAALKGAWGRMSLAQRVEVLYAVADGINRRFDDFLAAEVEDTGKPMSLARHVDIPRGAANFKIFADVVKNVPTEFFEMPTPDGVGAINYAMRRPVGVVGVICPWNLPLLLMTWKVGPALACGNTVVVKPSEETPQTAALLGEVMNAAGVPRGVYNVVHGFGPNSTGEFLTTHRGINAITFTGETRTGAAIMKAAADGARPVSLEMGGKNAAIVFADCDFDAAIEGTLRSCFANCGQVCLGTERVYVERPIFDRFVSALKKGAEGMQLGRPEDPATGMGPLISQEHRDKVLSYYKKAVEAGATVVAGGGVPDMPDALKGGAWVQPTIWTGLGDDSVIAREEIFGPCVLVMPFDSEEEVIRRANDNDYGLATAIWTTNLSRAHRVAGAIEVGIAWVNSWFLRDLRTPFGGAKQSGIGREGGVHSLEFYTELKNVCIKL

SEQ ID NO: 8641 - protein, 374 aa, Elaeodendron xylocarpum
ALSIAGAVQSQKLAVCAISQLQSLPGGDIKLLCDTVVESVGDLTGYDRVMVYKFHEDEHGEVVAESKRPDLEPYIGLHYPSTDIPQASRFLFKQNRVRIIVDCHASPVRVIQDGGLTQPLCLVGSTLRAPHGCHAQYMENMGSIASLAMAVVINGNDEEVIGGRNPTRLWGLVVCHHTSARCIPFPLRYACEFLMQAFGLQLNMELQLAAQLLEKHVLKTQTLLCDMLLRDSPIGIVTQSPSIMDLVKCDGAALYYQGNYYPLGVTPSEAQIKDIVEWLLAFHGDSTGLSTDSLADAGYPGAALLGDAVCGMAVAYITNRDFLFWFRSHTAKEIKWGGAKHHPEDEDDGERMHPRSSFKAFLEVVKSRSLPWEN

SEQ ID NO: 8642 - protein, 171 aa, Triticum aestivum
  unsure (1)..(171): unsure at all Xaa locations
MAPTVMASSATSVAPFQGLKSTAGLPVSRRSNGASLGSVSNGGRIRCMQVWPIEGIKKFETLSYLPPLSTEALLKQVDYLIRSKWVPCLEFSKVGFIFREHNASPGYYXGRYWXTMWKLPMFGCTDATXVINEXEESRKEYLTPXVRIIGFTTSSVXCVSSSPARAQDPQG

SEQ ID NO: 8643 - protein, 374 aa, Elaeodendron xylocarpum
ALSIAGAVQSQKLAVRAISQLQSLPGGDIKLLCDTVVESVRDLTSYDRVMVYKFHEDEHGEVVAESKRPDLEPYIGLHYPSTDIPQASRFLFKQNRVRIIVDCHASPVRVIQDGGLTQPLCLVGSTLRAPHGCHAQYMENMGSIASLAMAVVINGNDEEVIGGRNPTRLWGLVVCHHTSARCIPFPLRYACEFLMQAFGLQLNMELQLAAQLLEKHVLKTQTLLCDMLLRDSPIGIVTQSPSIMDLVKCDGAALYYQGNYYPLGVTPSEAQIKDIVEWLLAFHGDSTGLSTDSLADAGYPGAALLGDAVCGMAVAYITNRDFLFWFRSHTAKEIKWGGAKHHPEDKDDGERMHPRSSFKAFLEVVKSRSLPWEN

SEQ ID NO: 8644 - protein, 451 aa, Zea mays
MASGRESFSHLLPAQSPATRPPVLSSSARAKSSAPHPEAPCSAPEIPPMAGVRSLRSSDRTPWPSRLPFPHAQEFTSVRSARSLPPSSAAHLHGQSSFISLLSASSPCSRSAPPMAGIPFLPSSHGGAHPLLPPVLPTTPTAGLCARALLPCRAPRPAVVEVGPEVAKYGVGDVVGVGVIVGCCRECSPCKANVEQYCNKKIWSYNDVYTDGRPTQGGFASTMVVDQKFVVKIPAGLAPEQAAPLLCAGVTVYSPLKHFGLTTPGLRGGILGLGGVGHMGVKVAKAMGHHVTVISSSSKKRAEAMDHLGADAYLVSSDAAAMAAAADSLDYIIDTVPVHHPLEPYLALLKLDGKLVLLGVIGEPLSFVSPMVMLGRKAITGSFIGSIDETAEVLQFCVDKGLTSQIEVVKMGYVNEALERLERNDVRYRFVVDVAGSNVEAEAAAADAASN

SEQ ID NO: 8645 - protein, 374 aa, Euonymus alatus
ALSIAGAVQSQKLAVRAISQLQSLPGGDIKLLCDTVVETVRDLTGYDRVMVYKFHDDEHGEVVAENKKPDLEPYIGLHYPATDIPQASRFLFKQNRVRMIVDCHASTVRVIQDDRLVQPLCLVGSTLRAPHGCHAQYMENMGSQASLALAVISNGNDEEVIGGRNATRLWGLVVCHHTSARCIPFLFRYACEFLMQAFGLQLNMELQLAAQVSEKHVLKTQTLLCDMFLRDSPTGIVTKSPSIMDLVKCDGAAFYYQGKYYPLGVTPAEAQIKDIVEWLLAFHGDSTGLSTDSLADAGYPAAASLGDSVCGMAVAYITNRDFLFWFRSHTTEEIKWGGAKHHHEDKDDGQRMHPRSSFKAFLEVVKSRSFPWEN

SEQ ID NO: 8646 - protein, 492 aa, Soldanella alpina
MDPYKYRSSSAFNTPFWTTNSGAPVWNNNSSLTVGTRGPILLEDYHLVEKLANFDRERIPERVVHARGASAKGFFEVTHDISHLTCADFLRAPGVQTPVIVRFSTVIHERGSPETLRDPRGFAVKFYTREGNFDLVGNNFPVFFVRDGMKFPDMVHALKPNPKSHIQENWRILDFFSHHPESLHMFTFLFDDLGVPQDYRHMEGSGVNTYTLINKAGKAQYVKFHWKPTCGVKCLLEDEAIKVGGANHSHATKDLYDSISAGNYPEWKLFIQIIEPDHEDKFDFDPLDVTKTWPEDIIPLMPVGRLVLNKNIDNFFAENEQLAFCPALIVPGVYYSDDKLLQTRIFSYADTQRHRLGPNYLQLPPNAPKCAHHNNHHEGLMNFMHRDEEVNYFPSRFDPVRHAERHPIPPPVLTGKRDRCMIEKENNFKQPGERYRTFAPDRQERFVCRWVDALSDPRVTHEIRSIWISYWTQADKSLGQKLASRLNVRPTM

SEQ ID NO: 8647 - protein, 290 aa, Vibrio cholerae
MKGIILAGGSGTRLYPITRGVSKQLLPIYDKPMIYYPLSTLMLAGIRDVLIITTPEDSESFKRLLGDGRDFGIHLQYAIQPSPDGLAQAFLIGEEFIGNDSVCLVLGDNIFYGQSFSKTLRHAASREHGATVFGYQVKDPERFGVVEFDEQMRAISIEEKPSKPKSNYAVTGLYFYDNRVVELAKQVKPSARGELEITTLNEMYLNDDSLNVELLGRGFAWLDTGTHESLHEASSFVETVQHIQGLKIACLEEIAWRNGWLSNELILSIGESMKKNEYGKYLISLVKIKG

SEQ ID NO: 8648 - protein, 293 aa, Vibrio cholerae
MKGIILAGGSGTRLYPITRGVSKQLLPIYDKPMIYYPLSTLMLAGIRDVLIITSPEDNESFKRLLGDGRDFGVHLQYAIQPSPDGLAQAFLIGEEFIGNDSVCLVLGDNIFYGQSFSKTLRHAASREHGATVFGYQVKDPERFGVVEFNEQMRAVSIEEKPLKPKSNYAVTGLYFYDSRVVELAKQVKPSARGELEITTLNEMYLNDGSLNVELLGRGFAWLDTGTHESLHEAFLLCRNGAAHFKGLKIACLKEIAWRNGWLTSEQLLECAKPMLKNDYGQYLERLVKEERHG

SEQ ID NO: 8649 - protein, 405 aa, Xylella fastidiosa 9a5c
MSIHDVHEGTCHVTTSAVRAGIDSDTAHGAVTPPIVLSSNFSFERFGHKRKYDYTRSANPTRDLLGEALAELEGGVGGVVTATGIAAIMLVLHALLRPGDRLVVPHDAYGGSWRLFNALAQKGHFELITVDLTDARSVVEALALPPKLVLIETPSNPLLRITDLGAVIEAAHRVGALTVVDNTFMSPVLQRPLEFGADLVLHSTTKYINGHSDVVGGVVVARDVAHYQQLVWWANALGLTGSPFDAFLTLRGVRTLDARLRVHQENAQMIAALLEGHGVVKHVHYPGLASHPGHVLAGRQQKGFGAMLSFELQGGEAAVRAFVSGLRYFTLAESLGGVESLIAHPASMTHAAMTPQARAKAGISDGLLRLSVGIEASEDLIVDLVAGLGRAQAVCDGAAREECNV

SEQ ID NO: 8650 - protein, 516 aa, Crocosphaera watsonii WH 8501
MVQSTQPKKKVKLNKFEKLKAEKDGLDIKDQLEHFAEIGWQAMDKSDLELRLKWVGIFYRPLTPGKFMLRLRMPNGILTSEQMRVLGHIVQRYGEDGNADITTRQNLQLRGIRLEDIPDIFNRLQEVNLTSMQSGMDNVRNITGSPMAGLDADELIDTRELVQKVQDMITNHGAGNYDFTNLPRKFNIALEGGRDNSVHAEINDIAFVPAYKNGELGFNVVVGGFFSASRCDAAIPLNAWVPPTEAAVIDLCRAILTIFRNNGLRGNRQKARLMWLIDEWGLNKFRAEVEQELGYQLETEAEKDAIDWEKRDHLGVFPQKQAGLNYVGMHVPVGRLYAEDMLDFARLAEVYGNGELRLTVEQNVLISHIPQENLETFLEEPILEKFSISPKPLQRALVSCTGAQFCSFALVETKNRAVALAKELDEALEIPKTVRIHWTGCPNSCGQPQVADIGLMGTKVRKDGQTVEGVNLYMGGKVGKDAHLGTCVQKRIACDDLIPVLTDILIENFGAKRKLP

SEQ ID NO: 8651 - protein, 160 aa, Glycine max
EWAGNDRFIRVMPNTPAAVGEAASVMSLGGSATEEDGNIIAKLLGSIGKIWKAEEKYFDAITGLSGSGPAYVYLAIEALADGGVAAGLPRDLSLSLASHTVLGAASMGIQTGKHPGQLKDDVTSPGGTTITGIHELENGGFRGTLMNAVVAATKRSRELS

SEQ ID NO: 8652 - protein, 430 aa, SYNECHOCOCCUS SP. WH 8102
MSQLQSLRGMVDLLPETLQCWQAVEAVAREHFRRSGFGEIRTPLLETTDLFCRGIGEGTDVVGKEMYSFTDRGERACTLRPEGTASVVRAALQHGLLSQGAQKLWYAGPMFRYERPQAGRQRQFHQIGVEWLGAESARSDVEVIALAWDLLAQLGVGGLELEINSLGTPEDRQAYRTALVAWLEQRLDQLDDDSRARLSTNPLRILDSKNKDTQALLEQAPTLADALSSESRQRFDAVQQGLTALGIPFRLNPRLVRGLDYYGHTAFEITSDQLGAQATVCGGGRYNGLIAQLGGAPTPAIGWALGMERLLLVLEAAATADPDGAAARLVATSAPDAYVINRGDQAETMALTLTRGLRAAGLAVELDGSGSAFGKQFKRADRCGARWALVLGDDEAARAEVRLKPLQHEGEDRSWAVADIAAIVETLRTP

SEQ ID NO: 8653 - protein, 291 aa, Zea mays
RKKNPPSPPSRRPGSASPLPSPAIYLSLSAIDSAWQLLIANFTEFQLATVVTFLLHETVFFLSGLPSLLFERFGLFAKYKIQKKSNTSAYQNRCVLRLILYHVCVNLPVMIFSYPAFKFMGLRSSLPLPHWSVVVSQVLFYFVLEDFIFYWGHRALHTKWLYKHVHSVHHEYATPFGLTSEYAHPAEILFLGFATVVGPALTGPHLFTLWLWMVLRVLETVEAHSGYHFPWSPSNFLPLYGGSDFHDYHHRVLYTKSGNYASTFVYMDWLFGTDKDYRKAKTIEEKEGKNL

SEQ ID NO: 8654 - protein, 304 aa, Streptococcus pyogenes MGAS8232
MTKVRKAIIPAAGLGTRFLPATKALAKEMLPIVDKPTIQFIVEEALKSGIEEILVVTGKAKRSIEDHFDSNFELEYNLQAKGKNELLKLVDETTAINLHFIRQSHPRGLGDAVLQAKAFVGNEPFVVMLGDDLMDITNASAKPLTKQLMEDYDKTHASTIAVMKVPHEDVSSYGVIAPQGKAVKGLYSVDTFVEKPQPEDAPSDLAIIGRYLLTPEIFDILERQTPGAGNEVQLTDAIDTLNKTQRVFAREFKGNRYDVGDKFGFMKTSIDYALEHPQVKEDLKNYIIKLGKALEKSKVPTHSK

SEQ ID NO: 8655 - protein, 478 aa, Arabidopsis thaliana
MASTAATAALSIIKSTGGAAVTRSSRASFGHIPSTSVSARRLGFSAVVDSRFSVHVASKVHSVRGKGARGVITMAKKSVGDLNSVDLKGKKVFVRADLNVPLDDNQNITDDTRIRAAIPTIKFLIENGAKVILSTHLGRPKGVTPKFSLAPLVPRLSELLGIEVVKADDCIGPEVETLVASLPEGGVLLLENVRFYKEEEKNEPDFAKKLASLADLYVNDAFGTAHRAHASTEGVTKFLKPSVAGFLLQKELDYLVGAVSNPKRPFAAIVGGSKVSSKIGVIESLLEKCDILLLGGGMIFTFYKAQGLSVGSSLVEEDKLELATTLLAKAKARGVSLLLPTDVVIADKFAPDANSKIVPASAIPDGWMGLDIGPDSVKTFNEALDTTQTVIWNGPMGVFEFEKFAKGTEAVANKLAELSKKGVTTIIGGGDSVAAVEKVGVAGVMSHISTGGGASLELLEGKVLPGVVALDEATPVTV

SEQ ID NO: 8656 - protein, 455 aa, SYNECHOCOCCUS SP. WH 8102
MAPLFGRPMHPTWTEQWWPISYLQDLDPQRPNRFTLLERDLVIWWDQSGESWRVFPDVCPHRLVPLSEGRINDAGQLECPYHGWSFDGDGQCRQIPQALENTQPDSRRSRCASLPTASAQGLLFVWMGSPDSADPEQLPLVPALEENPDSWTVQDTFRDLPMDAVTLLENVLDVSHVPFTHHKTVGKRENAAPVEATITAEDASGFKAYWEEGPRRGKLGAQSTTFLAPQLMWHDLTAKGFGRILTVVYAVPIRRGECRLFARFPFQFQSALPRLLIGLRPRWLQHIGNHKVLEDDQVFLHWQERTLEAAGGSAAAERAFFLPTAADVYVAALHRWLNHNGGEPFAGQPLPNRQPTTALMDRYVSHTIHCRSCSTALIWIRRAQPVCWGLLWLGAILIGINGGWGLISIGLIVSAGGALGLRQTKRWERGLLAGDGQAPRNQPKSLRRVPLSDGR

SEQ ID NO: 8657 - protein, 271 aa, Xylella fastidiosa Dixon
MFGELISEAIAMFIIIALGESAAAMYILYDPSPYQNAYWGLCICWGLAVTIAIYVTASVSGTHANPAVTLALALYRGFPWKKVLPYWAAQVIGAFIGAMIVYQLYSPVIDYYNHIHQLTRDAGGAAGVFFTSTGMAITPIHALGDEIILTAFLIFGIFAITERFNEAAPTANSGALVIGLLVATIGACMGYLEGWAINPARDLGPRLFAFLAGWGESAFPGKDHYWWIPIIGPLIGGVMGATAFQCLIYPFLPARVQAKQQAAILLHRKHP

SEQ ID NO: 8658 - protein, 315 aa, SYNECHOCOCCUS SP. WH 8102
MLITRSLPFPPLQRRALTTLQVNLGYRCNQSCSHCHVNAGPTRTEMMSAELVALIPSVLGRRAIRCLDLTGGAPELHPDFRSLVRRARDQGVAVIDRCNLTILSEPGHDTLAQFLADHRVGVIASLPCYSAANVDQQRGDGVFERSLEGLRMLNDLGYGSGDPERSLDLVFNPHGPSLPPAQGLLEADYKRELGSMGIRFDRLLTLANMPIQRFSRQLELQGRLTAYQRLLEEAHNPANLAAVMCRQLLSVDWQGHLYDCDFNQQLALSAQGGVRHLRDLLDDSMVIEGDPIRTAQHCFGCTAGAGSSCGGALQG

SEQ ID NO: 8659 - protein, 353 aa, GIBBERELLA ZEAE PH-1
MLKTSPALSASANASPTAFRYATSSPQHSSKPSPALRRRPSTRSNASSATDAMKSSPIQRPRQYVANDPGIHGSPNEAQRPPSSLSQKASAQPSQSPHPAPPSRSSQDQPVQPGQSLSGVSPTKRRSSPAPIDPLATVAADSSPQTSKRPKPDTPLSKVLPDRYEFCAIEDMVELVAHMLSELITTNDAIRISNGGLTRFHSRTPPGISVRDYLHRLARHATLTPPLLLAMVYYIDRLCAMYQEFTINTLTVHRFLITAATVAAKGLSDSFWNNTTYARVGGVRVAELKLLELEFLYRVDWKIVPNPEVLVAYYKGLVERTPGYVLESDGSDEEDEEDDDEDIEDCDNAASEN

SEQ ID NO: 8660 - protein, 291 aa, Triticum aestivum
RPPARPSARPGAHHTTPPKPDRQTEPAPSSDEASQAKPRSNPPPPESMDGSHSHAAGGGEGTQRTLNPYVTGNSVIAMKYKDGVIMACDTGASYGSTLRYKSVERIKEVGKHSLIGGSGEFSDFQEILRYLDELTLNDHMWDDGNSLGPKEIHAYLTRVMYNRRNKFDPLWNSLVLGGVKKGPKGDEKYLGMVNMIGTHFEENHIATGFGNHMAIPILRGEWREDMTFEEAVKLIEKCLLVLLYRDRSSINKFQIAKITTEGSTIYPPYALKTNWGFAAFENPSKGAVGTW

SEQ ID NO: 8661 - protein, 374 aa, Euonymus europaeus
ALSIAGAVQSQKLAVRAISQLQSLPGGDIKLLCDTVVESVRDLTGYDRVMVYKFHDDEHGEVVAESKRPDLEPYFGLHYPATDIPQASRFLFKQNRVRMIVDCHASPVCVIQDYRLIQPLCLVGSTLRAPQGGHAQYMENMGSKASLAMPVIINGNDEEVIGGRNATRLWGLVVCHHTSARCTPFPLRYACEFLLQAFGLQLNMELQLAAQLSEKHVLKTQTLLCDMLLRDSPTGIVTKSPSIMDLVKCDGAALYYQGKYYPLGVTPAQAQMKDIVEWLLAFHGDSTGLSTDSLADAGYPGAALLGDAVCGMAVAYITKRDFLFWFRSHTAKEIKWGGAKHHPEDKDDGQRMHPRSSFKAFLEVVKSKSLPWEN

SEQ ID NO: 8662 - protein, 756 aa, GIBBERELLA ZEAE PH-1
MARKAGSGCITCRIRRVKCDMAKPACQRCLSCKRQCDGYLPEGSTITRRQLAEAARRISVVGPISQALCQYPISAGTKSANLTLFDVFRTLTAPSTASFIPSQFWTREILQLAHSEPAVWHATLALGAIHQRHELYFQGCNDKSEQMWLEANVSYGRAMSCAREVKDPTKLLSLCLALVSITHLIGRWSDSQVHIMAAHGLLNQAGYSVETSSAAEMLTRLDLHAMTFSDSSAPYPYKNAPSRVWIDEDMQRIAGFESYAQAGTALFGVMRRLMMMGQKADDEDQETMGDSQDMMAITKRDLAAWEYKMAEFERNHARPHDQRGAISIGLYHTLMRTFLAGGAFGPEMRWDNLVGLYERILTLAETLYANKQSFHVNSPLSLEPGVIVPVFMVAQRCRHPWLRRRAIAFLYKLKRQEGMWFSDGAAAVSKKIMEIEGQTYFESDLANDDDENKSSALALGDVPWEAWAAVDVEGLPSRTSWAGIERVPEEKRMRETMVMVFTEERRIELSLIMSSGDELGTYGEAVNATAKIPLHPYSPLNAALPEYVTNTLSSRTLVASFVVGSIAIFAVTLLFINSAPRKLSKGEIFVTLWFALCGCIHFFFEGYYVANFTDLSSRLSLFAQLWKEYSLSDSRYLTQDSFLVPMEAITAILWGPMSFFCAWSIVKEHPLRHPIQLIISVGQLYGDVLYFATCYFNEVVHNIVYCRPEQFYFYMYYVFCNAIWIVIPSALVVHSVVATKRAFAKVQAVETRKKAL

SEQ ID NO: 8663 - protein, 374 aa, Euonymus europaeus
ALSIAGAVQSQKLAVRAISRLQSLPGGDIKLLCDTVVESVRDLTGYDRVMVYKFHDDEHGEVVAESKRHDLEPYFGLHYPATDIPQASGFLFKQNRVRMIVDCHASPVRVIQDDRLIQPLCLVGSTLRAPHGCHAQYMENMGSKASLAMAVIINGNDEEVIGGRNATRLWGLVVCHHTSARCTPFPLRYACEFLLQAFGLQLNMELQLAAQLSEKHVLKTQTLLCDMLLRDSPTGIVTKSPSIMDLVKCDGAALYYQGKYYPLGVTPAEAQIKDIVEWLLAFHGDSTGLSTDSLADAGYPGAASLGDSVCGMAVAYITNRDFLFWFRSHTTEEIKWGGAKHHPEDKDDGQRMHPRSSFQAFLEVVKSRSFPWEN

SEQ ID NO: 8664 - protein, 475 aa, GIBBERELLA ZEAE PH-1
MATATAAGKNASPFPDGTKDYVPLRAGAAKKDTNKPHISDTPMTWSNWPQHINWLNTTLVVFVPLMGFISAYWVPLQLKTALWAVFYYVHTGLGITAGYHRMWSHSAYKGTTPLKIYLAAVGAGAVQGSIRWWSYGHRVHHRYTDTDKDPYSVRKGLMYSHMGWMVLKQNPKRQGRTDITDLNEDAVVVWQHKNYIKCVLFMALAFPAIVAGLGWGDWWGGLVYAGILRVCFVQQATFCVNSLAHWLGDQPFDDRNSPRDHVITALVTLGEGYHNFHHEFPSDYRNAIEWWQYDPTKWSIWLWKQLGLAYELKEFRANEIEKGRVQQLQKKLDQKRATLDWGIPLEQLPVVDWDDFVAQSKAGKGLVAIAGVIHDVTDFIKDHPGGKALINSAIGKDATAIFNGGVYLHSNAAHNLLSTMRVGVLRGGCEVEIWKRAQFENKDITYMNDSAGQRIIRAGSQATKIVQPAASADAA

SEQ ID NO: 8665 - protein, 374 aa, Gyminda tonduzii
ALSIAGAVQSQKLAIRAISQLQSLPGGDIKLLCDTVVESVRELTGYDRVMVYKFHEDEHGEVAAESKRTDLEPYFGLHYPATDIPQASRFLFRQNRVRMIVDCHASPVRVIQDDGLMQPLCLVGSTLRAPHGCHAQYMENMGSKASLAMAVIINGNDEEVIGGRNATRLWGLVVCHHTSARCIPFPLRYACEFPMQAFGLQLNMELQLAAQLSEKHVLKTQALLCDMLLRDSPTGIVTQSPSIMDLVKCDGAALYYQGKYFPIGVTPTEAQIKDIVEWLLVFHGDSTGLSTDSLADAGYPGAALLGDAVCGMAVAYITKKDFLFWFRSHTTKEIKWGGAKHHPEDKDDGQRMHPRSSFKAFLEVVKSRSLPWES

SEQ ID NO: 8666 - protein, 128 aa, Glycine max
  unsure (1)..(128): unsure at all Xaa locations
QRHPTSALDKVDSLIVCGGMAFTFKKTIEGVSIGNSLFDEPGSQKVQGIMGKAKKNGVKLVFPVDYVTADKFDKDATVGAATDAEGIKDGLMGLDAGPESCKLFAETIKASQTIXWNGPAGVIEFENF

SEQ ID NO: 8667 - protein, 245 aa, Gymnosporia mossambicensis
ALSIAGAVQSQKPAVRAISQLQSLPGGDIKLLCDTVVESVRNLTGYDRVMVYKFHEDEHGEVVAESKRSDLEPYIGLHYPASDIPQASRFLFKQNRVRMIVDCHASPVRVIQDDGLMQPLCLVGSTLRAPHGCHAQYMENMGSLASLAMAVIINGNEEEAIGGRSPTRLWGLVVCHHTSARCIPFPLRYACEFLMQAFGLQLNMELQLAAQLLEKHVLKTQTLLCDMLLRDSPTGIVTQSPSIMD

SEQ ID NO: 8668 - protein, 207 aa, Dahlstedtia pinnata
VMAYKFHEDDHGEVIAEITKPGLEPYLGLHYPATDIPQAARFLFMKNKVRMIVDCHAKHVKVLQDEKTPFDLTLCGSTLRAPHSCHLQYMANMDSIASLVMAVVVNDNEEDGDSSDAVQPQKRKRLWGLVVCHNTTPRFVPFPLRYACEFLAQVFAIHVNKEIELEYQIIEKNILRTQTLLCDMLMRDAPLGIVSQSPNIMDLVKCD

SEQ ID NO: 8669 - protein, 245 aa, Gymnosporia mossambicensis
ALSIAGAVQSQKLAVRAISQLQSLPGGDIKLLCDTVVESIRNLTGYDRVMVYKFHEDEHGEVVAESKRSDLEPYIGLHYPASDIPQASRFLFKQNRVRMIVDCHASPVRVIQDDGLMQPLCLVGSTLRAPHGCHAQYMENMGSLASLAMAVIINGNEEEAIGGRSPTRLWGLVVCHHTSARCIPFPLRYACEFLMQAFGLQLNMELQLAAQLLEKHVLKTQTLLCDMLLRDSPTGIVTQSPSIMD

SEQ ID NO: 8670 - protein, 344 aa, Burkholderia fungorum LB400
MKTHMQAAVVEQFGKPLVLKELAIPTPGPGQVLVKTEACGVCHTDLHATNGDWPLKPGLPFTPGHEGIGIVAALGAGVTAVKEGDRIGVPWLYSACGHCEYCLAAREPVCAEAQFGGYTKNGGFAEYIVADPNYVAHIPAGLAAREAAPLICAGITSYKGIKETQARPGEWVVISGVGGLGHLGIQYAKAMGLQVCAVDIDDGKLAHAKRLGADAVVNANDGDPIAAVIRATGGGAHGVLITAPSLGAFKQGVGMTRKCGTCVLVGLPPGEFPTPLFDVVANCITIRGSFVGNRRDMAEALAFAADGKVRADIELQPLSAINNVFQRLGHGDVPSRVVLEFASH

SEQ ID NO: 8671 - protein, 978 aa, Bacillus cereus ATCC 10987
MAEQTVRVTVDGKECSTSGEKTILQLFNESNLEHPQICHVPEVDPIQTCDTCIVEVDGKLMRACSTKLENGMHIERQSQRAKEAQTEAMDRILENHLLYCTVCDNNNGNCKVHNTVHMMGIEEQKYPYEPKVSACEVDMSHPFYRYDPNQCIACGQCVEVCQNLQVNETISIDWSLDRPRVIWDNGVSINDSSCVSCGQCVTVCPCNALMEKSMLGEAGFMTGLKPDVLNPMIDFVKDVEPGYSSILAVSEVEAAMRKTKVNKTKTVCTFCGVGCSFEVWTKDRHILKVQPVSDAPVNGISTCVKGKFGWDFVNSEDRITKPLIRQGDMFVEASWEEALEVVASNMQHIKSEYGSDAFGFISSSKVTNEENYLMQKLARQIYGTNNVDNCSRYCQSPATDGLFKTVGMGGDAGTVKDIAEAGLVIIVGANPTEGHPVLATRVKRAHKLHEQKLIVADLRKHEMAERADLFIHPRQGTDYVWLAGITKYIIDQDWHDKKFIAENVKNFDEYSTMLEKYTLDYTEEITGISKENLKEMARMVCEADGTCILWGMGVTQNTGGSTTSAAISNLLLVTGNYRRPGAGAYPLRGHNNVQGACDMATLPNWLPGYQAVSDDTLRAKFEKAYGTTIPKAPGLNNIAMLLAAEEGKLRGMYVMGEEMALVDSNANHVQHILANLDFLVVQDMFLSKTARFADVILPAAPSLEKEGTFTNTERRIQRLYEVLKPLGDSKPDWWILQKVARALGGDWNYESPSEIMDEIASLAPLYSQATYDRLEGWNSLCWGSHDGSDTPLLYVDGFNFPDKLARLSLDEWIPPVVAPDEYDLLLNNGRMLEHFHEGNMTNKSAGILSKVSEVFVEISPELAIERNVKDGGLVELASPFGKIKVQALITDRVTGKELYLPMHATINEEAINILTGTATDLYTCTPAYKQTMVKMRVLREKGNRPLPSSNPRDKKRNPQNGVEIEQKWQRKQYVSLVD

SEQ ID NO: 8672 - protein, 603 aa, Xylella fastidiosa 9a5c
MTVIEIKVPDIGDYSKVPVIEVLVTVGDHVVKNQGILTLESDKATLEVPSMNNGVVKELKVNVGDLLSQGDVILLLETEDTTAPPSPSNTATSDTTSPPPPSPQPAASKPTAPDQQHADITCRMVVLGAGPGGYTAAFRAADLGLDTVLVERYPNLGGVCLNVGCIPSKALLHAAAVIDEAAHASTFGIDFGKPKITLDTLREYKQNVVNKLTAGLAGMAKQRKVRTVTGIAHFVSPNTLDITTADGSTQRLHFQQCIIATGSHPVKLPNFPWDDPRIMDSTDALELAEVPKKLLVVGGGIIGLEMATVYNALGSHVTIVEFMDQIIPGTDKDLVKPLADRMKKQGIEIHLNTKASHVKADKKGITVSFEAPTQGTQPALKTSTYDRVLVAVGRTPTGNNIGAEKAGVNVTERGFIPVDRQMRSNVPHIFAIGDIVGNPMLAHKATHEGKLAAEVAAAETESGKHREWVARVIPSVAYTNPEIAWIGMTETEAKAKSLNIGVAKFPWAASGRAIGIGRTEGFTKLIFDEDTHRIIGGAIVGVHAGDLLAEIGLAIEMGAEAEDISHTIHAHPTLSESIAMSAEVYDGTITDLYLPKKPATSAK

SEQ ID NO: 8673 - protein, 551 aa, Xylella fastidiosa 9a5c
MTEIKEAFVPDIGDYSNVPVIEVLVAVGDTVSKGQSLITLESDKATMEVPSSTAGIIKEIKVKVGDTLSQGHVVALIEVSEETAGVTTPMTVNTPATRAHNAAPPEDGGSLIEVRVPDIGDYSNVPVIEVLVTVGDTVSKDQSLITLESDKATLEVPSSATGVIKQLKVNVGDTLSQGDIVVVLQSAESTPLTPATNKPALPPNSSPARDAISAPASPAGTPSTPPITFDANTVLPSKIPYASPAVRLLARQLGVDLSRIKGSEKNGRITREDVQKFVNATVGTGIPEGRTPSASITTNGGLNLLPWPNVDFSKFGEIETQPLSRIKKISGANLARNWAMIPHVTQFDQADITELEALRVQINKENAAPNKNGTGIKLTVLAFLIKASAAALKKFPTFNASLDATGETLTLKKYFHIGFAADTPNGLVVPVIRNVDQKGIVEIAQETSDLAKKARDGKLTPADMSGGCFSISSLGGIGGTAFTPIINAPEVAILGVSKSLIQPIWDGTQFAPKMLLPLSLSYDHRVIDGALAAHFTTYLSQILADMRRVLL

SEQ ID NO: 8674 - protein, 287 aa, Vibrio cholerae
MKGIILAGGSGTRLHPITKGVSKQLLPIYDKPMIYYPLSVLMLAGINEILIITTPEEQDGFIRLLGDGSQFGIRLSYAVQPSPDGLAQAFIIGEEFIGKDDICLALGDNIFFGQAFGKQLKHAVQNLTGATVFGYQVMDPERFGVVEFDADFKALSIEEKPADPKSNWAVTGLYFYNNSVIDIAKKVKPSERGELEITSVNQAYLEQGSLKVEQLGRGFAWLDTGTHDSLLEASQFVQTVEKRQGFKIACLEEIALLQGWLTKQQVRETAMTLSKTGYGQYLLNITK

SEQ ID NO: 8675 - protein, 484 aa, Triticum aestivum
  unsure (1)..(484): unsure at all Xaa locations
MAATVAVDNLNPKVLKCEYAVRGEIVIHAQRLQQQLQTQPGSLPFDEILYCNIGNPQSLGQQPVTFFREVLALCDHPDLLKKEEIKTLFSADSISRAKQILALIPGRATGAYSHSQGIKGLRDAIASGIASRDGFPANADDIFLTDGASPGVHLMMQLLIRNEKDGILVPIPQYKGYXASIALHGGSLVPYYLNESTGWGLEISDVKKQLEDARSRGIDVRALVVINPGNPTGQVLAEENQYDIVKFCKNEGLVLLADEVYQENIYADNKKFHSFKKIXVRSLGYGEXDLPLVSYQSVSKGYYGGSVVKEGGYXEITGFSAPVREQIYKIASVNLCSNITGQILASLVMNPPKASDESYASYKAEKDGILASLARRAKALEIAFSKLEGITCNKAEGAMYLFPQICLPQKAIEAAKAANKAPDAFYALRLLESTGIVVVPGSGFGQVPGTWHFRCTILPQEEKIPAIISRFTVFHETFMAEYRD

SEQ ID NO: 8676 - protein, 471 aa, Mycobacterium bovis AF2122/97
MVTRIVILGGGPAGYEAALVAATSHPETAQVTVIDCDGIGGAAVLDDCVPSKTFIASTGLRTELRRAPHLGFHIDFDDAKISLPQIHARVKTLAAAQSADITAQLLSMGVQVIAGRGELIDSTPGLARHRIKATAADGSTSEHEADVVLVATGASPRILPSAQPDGERILTWRQLYDLDALPDHLIVVGSGVTGAEFVDAYTELGVPVTVVASQDHVLPYEDADAALVLEESFAERGVRLFKNARAASVTRTGAGVLVTMTDGRTVEGSHALMTIGSVPNTSGLGLERVGIQLGRGNYLTVDRVSRTSATGIYAAGDCTGLLPLASVAAMQGRIAMYHALGEGVSPIRLRTVAATVFTRPEIAAVGVPQSVIDAGSVAARTIMLPLRTNARAKMSEMRHGFVKIFCRRSTGVVIGGVVVAPIASELILPIAVAVQNRITVNELAQTLAVYPSLSGSITEAARRLMAHDDLD

SEQ ID NO: 8677 - protein, 208 aa, Sagittaria montevidensis
MGRGKIEIKRIENSANRQVTYSKRRNGIIKKAREISVLCGCEVSLVIFSSSGKMSEFHSTTLSKILETFQQNQGQTLWGAKHESLKAEIDRMKKENDNMRIQLRHMKGEDLTSMEPRDLYTIETALINGIANVRGKQMEIFKKKAKNQKALEEENKQLAYILHQQSLAMNGNLREMPQDYHQKDRDFTAPVPFGFRVQPMQPNLQENK

SEQ ID NO: 8678 - protein, 289 aa, Vibrio cholerae
MKGIILAGGSGTRLYPLTRGVSKQLLPIYDKPMIYYPLSTLMLAGIRDILIITTPEDNEAFRRLLGNGSDFGINLSYAVQPSPDGLAQAFIIGEEFIGNSNVCLVLGDNIFYGQSFSKTLKNAATRPTGATVFGYQVKDPERFGVVEFDADMKAVSIEEKPAKPKSNYAVTGLYFYDNKVVELAKEVKPSHRGELEITTLNDMYLKAGELNVELLGRGFAWLDTGTHESLHEASSFVQTIEHVQGLKVACLEEIAFRNGWLSADELKNIAKLMLKNEYGQYLAQLADKK

SEQ ID NO: 8679 - protein, 229 aa, Chlamydia muridarum
MTNFQDKPNIRIMFDSLAPTYDKINKILSLGLHLTWNHSFVSLLGRSDHLLDLCAGTGHVALSYIQKYPQASATLVDFSTKMLENVQECHPLAPFSYVISDVTSMPLPNDTFHLASMAYGLRNLSSPLEALKEVHRVLKPKGRLGILELTRPATYNPVHLLHKLYLNLVVPSVGRFYSGNSYAYSYLKESIRNLPCDTSLERVFHKSGLHIIRKRKLLFGTATIWILEK

SEQ ID NO: 8680 - protein, 283 aa, Oryza sativa
MGFISGEELAVTLAPVAVYWLYSGIYEALGSVRALDRYRLHSRRDEESNNMASKKEVVKGVLLQQAIQVAISLAVLKLTSEKDGGAGDVKAGHASAPAAAPSSSSAAAALLDVAARFGVAMFVLDAWQYFAHRLMHSSRYMYRRFHSWHHRVVAPYAFAAQYGHPVDGVLTEALSGAAAYLASGLPPRAAAFFLAFATVKGIDDHCGLLVPWNPLHAAFANNTAYHDVHHQLSGGRRNFSQPFFVVWDRLLGTHAGYTVTARERNNGGGLEAKPICNDRHVLL

SEQ ID NO: 8681 - protein, 534 aa, Mycobacterium bovis AF2122/97
MTPENWIAHDPDPQTAAELAACGPDELKARFSRPLAFGTAGLRGHLRGGPDAMNLAVVLRATWAVARVLTDRGLAGSPVIVGRDARHGSPAFAAAAAEVLAAAGFSVLLLPDPAPTPVVAFAVRHTGAAAGIQITASHNPATDNGYKVYVDGGLQLLAPTDRQIEAAMATAPPADQIARKTVNPSENRASDLIDRYIQRAAGVRRCAGSVRVALTPLHGVGGAMAVETLRRAGFTEVHTVATQFAPNPDFPTVTLPNPEEPGATDALLTLATDVDADVAIALDPDADRCAVGIPTVSGWRMLSGDETGWLLGDYILSQTDDRASPPETRVVASTVVSSRMLAAIAAHHAAVHVETLTGFKWLARADANLPGTLVYAYEEAIGHCVDPTAVRDKDGISAAVLVCDLVAALKGQGRSVTDALDELARCYGVHEVAALSRPVGGAVETTDLMRRLREDPPRRLAGFPATVTDIGDTLILTGGDDNMLVRVAVRPSGTEPKLKCYLEIRCAVTGDLPAARQLVRARIDELSASVRRWW

SEQ ID NO: 8682 - protein, 432 aa, Enterococcus faecium
MSIITDVYAREILDSRGNPTIEVEVYTESGAFGRGMVPSGASTGEYEAVELRDGDKARYGGKGVTKAVDNVNNIIAEAIIGYDVRDQMAIDKAMIALDGTPNKGKLGANAILGVSIAVARAAADYLEVPLYHYLGGFNTKVLPTPMMNIINGGSHADNSIDFQEFMIMPVGAPTFKEALRMGAEVFHALASILKARGLATSVGDEGGFAPNLGSNEEGFEVIIEAIEKAGYVPGKDVVLAMDAASSEFYDKEKGVYVLADSGEGEKTTDEMIKFYEELVSKYPIISIEDGLDENDWDGFKKLTDVLGDKVQLVGDDLFVTNTQKLSEGIEKGIANSILIKVNQIGTLTETFEAIEMAKEAGYTAVVSHRSGETEDSTISDIAVATNAGQIKTGSLSRTDRIAKYNQLLRIEDQLGEVAEYKGLKSFYNLKNK

SEQ ID NO: 8683 - protein, 552 aa, Bradyrhizobium japonicum USDA 110
MVRLGFIIGFIALLGAMLSGLAAYRVHDQELALDRIALARAIDVHASLVQDRLTERELLARVASGLFRAPSVLKPNMLEPLRSAIYAFKTDFVVAGWVARLQPNELAAAQAAIAAAGFPKPQIRDYGDKPIDPASLTQPIDVLMDLEPRSDETKGLPGRSYDRDPVRSAMLARARIEKRSVASDPVPLLRNNGPVGVIVAAPVIPEGATEPVGFITFSYELASLMLTNDDMSLFAVALKDPRKDGGELVANDQGIVSTRMTAADGPAPSATRTVSFGGRDWQLGYYAKTNSARRAEQTAIIVAAIGFAITAMVCGLFGYVAYNNLRLSREIQVRIGFERRLTAVIDELNHRVKNILAVIQSIVTRTLRHGADIDGARELLIGRIHAMSNVVSLLSESQWQGVKLKGLFEARAIPHADRIAVTGPDIAVSARAAQSLSLLFFELASHSDEGLSLVGKHPHITANWTVTGEGTDEVFHFRWEEFNTSEATRRPDSDFGLILLDRVAPEALGGTAKRYFTDVSYVYELIAPMETVVDMSERDRTDKLSAPVRPVR

SEQ ID NO: 8684 - protein, 556 aa, Emericella nidulans
MEHSSPLAAMQPPSVMLGHCFRSDAPTSYHGFSPLPGLGPGGFNFKDLSMKRSNGDYFGTKVVRGSSPTASLAADLSQNFHIDQSPQVATPRRSLFSACLLGNGNRRGVDDAMTTPPLPSSSPAPAMDIMDMSPLPHKPPFISTPEIELDSPTLESSPMDTTMMSTDGLVPDSPTVLPKDGKQERRRPTFLRPSLARSKAQSFQVGMTRPAPESQGPPFKFQTNGINKTSSGVAASLEDMFGESPQRERPMMRINSTSGLNSRLRPPLGSGSHVRGNGSPSAASVRKSAHPNMRPRKQCRRSLSMYEHPEDVIADSEVSYTSNAPLQSISDFEETQALQLPHFIPEEQADNLGRIDKATLVDIKEGKYDNMFDNIMIIDCRFEYEYDGGHIVGAVNYNDKENLAAELFADPKPRTAIVFHCEYSVHRAPLMAKYIRHRDRAYNVDHYPQLSYPDMYILEGGYSGFFAEHRSLCYPQNYVEMSAKEHEFACERGLGKVKQRSKLSRAQTFAFGQQSPEMEDSPTGRCRNNPGDRKLLASPFNDSPGSRFPGRRMLSY

SEQ ID NO: 8685 - protein, 296 aa, Tropheryma whipplei TW08/27
MLRSLPQSKPLDDLIGRTIAVIGLGTMGAAIAEGIARARKAMNEEIPRGQFYCTKREYKFERNSVITSESVVLYIQDDPDANITVTQRSDLIIIAVRPEHIKHVLNSISPALDRKKLIVSLAKDVNLSNLAAMLPSGTAIVRCATNLPITVRHGFTGLSCNKHVLPSDVKAVYTLFELLGRCTMLSEEHLTIVSAITGFYPVYMLYMLTKIKEATEKLGLPRDISQAAVETAWIGYAQVVLKHKTTAKGLLRLIPRGPRSAVVKCLDRTDLGSVTYKVLLASIEQDSELLDGIIDQ

SEQ ID NO: 8686 - protein, 105 aa, Oryza sativa
  unsure (1)..(105): unsure at all Xaa locations
QVLFLPGGGVTHRFAHRLTDSQNTXAMLTTFHEVGMTHLMKLRSCYKDEFGTRHGVQLGLMSCFVRGDVTGLXNQPIGNAVIDGDDIIYRDYVDFXVAWWSXQGL

SEQ ID NO: 8687 - protein, 241 aa, Deinococcus radiodurans R1
MTAENRPPVGDKQDKGQAVQEMFASIAPRYDLLNRVLSLGVDRGWRRAAAAEALAHSPRRVLDVATGTGDFAIELKERAPQVEIVGSDFVPQMLDLARQKAGAKQLSIRFEEGDALRLPYPDASFDAVTCAFGFRNFADYTQGLAEMWRVLTPGGRLVLLEFPPPASGLFGAVFRLYFQHVLPRIGALVSGNAGAYTYLPESVLAFPEPERLAQMMRATGFRTRYRALTFGIAGMWVGDKR

SEQ ID NO: 8688 - protein, 329 aa, Schizosaccharomyces pombe
MGKTLIFIKLSSLNECIKYSTIISKIARELSIHKGNELYIWVSCSEMCQKRTKHLFRELQNALCELYLSSATTNDSSLLSVVPTIVLFEYWSNIQLGSITDSWNSVYYSENAKDQILNIPAKSFQSIGPDVLNEIHNIEHLPKKDESEDSGKEINNMVSAVGGTFDHLHVGHKVLLTLTAWFGVKEVIVGVSGTKNENGRTLIILGDELLKKKVQKEFLENIQKRKEEVSNFLHSIKEDINCRVVTIHDPFGPTITDAEIDSLIVSEETKTGATAVQEERVKRGLPELSIYCIDLLYPAQELNLKDNNSLKVSSTAIREELAKLAYKNK

SEQ ID NO: 8689 - protein, 200 aa, Xeroderris stuhlmannii
HEDDHGEVIAEVKKPGLEPYLGLHYPATDIPQATRFLFMKNKVRMIVDCRAKHVNVLQDKKVPFDLTLCGSTLRAPHSCHLQYMENMNCSASLVMAVVVNDNDEDGDSDAVQPQKRKRLWGLVVCHNTTPRFVPFPLRYACEFLAQVFAIHVNKELELEYQIVEKNILRTQTLLCDMLMRDAPLGIVTQRPNIMDLVKCD

SEQ ID NO: 8690 - protein, 357 aa, Pyrobaculum aerophilum str. IM2
MAECGIILAGGFATRLRPLSYTKPKPLFPILGRPVIDWVIEKVSEVAEPVISARYLSYIIRNHVNAKWGGRVRVVEEDRPLGDGGAVVNVIKSLGLRGPVIVANGDVFTDISIREMWDFHKKMGGAVTIALIEVPPEEIGRFGIAVLEGERVKRFVEKPKEPVGSNLANAGIYIFEPEAIAQFPDINSGELKIAKHIIPKLMQKFDIYGYVHRGLWFDIGTHGDYLKANFAALERCNCHREVPGVKIIPPVYIGEGAVVGPGSVLGPYVVIGNGSRLGPNVRIRESVLMDGVVAEAGAYVAKSIIGEGVVLGKWTRVIEAVVADGVYIRDEVLVGRGASIGPNREVEQDVKEGEILP

SEQ ID NO: 8691 - protein, 561 aa, Oryza sativa
MYSTAISLSAAATAAAAVGGARPGAIRPAELRFCGLRREALGLRSLRAPPRAAATPRKAAAATGNGAAGSGGFDYDLVIIGAGVGGHGAALHAVEKGLKTAIIEGDVVGGTCVNRGCVPSKALLAVSGRMRELQDEHHMKSLGLQVSTAGYDRQAVADHANNLASKIRSNLTNSMKALGVDILTGFGTIVGKQKVRYGKVGFPDNEITARNIIIATGSVPFVPNGIEIDGKTVFTSDHALKLESVPDWIAIVGSGYIGLEFSDVYTALGSEVTFVEALDQLMPGFDPEIAKLAQRILINPRKIDYHTGVFASKITPAKDGKPVLIELIDAKTKEHKETLEVDAALIATGRAPFTKGLGLENVNVVTQRGFVPVDERMQVMDADGNAVPNLYCIGDANGKLMLAHAASAQGISVVERISGKDNILNHLSIPAACFTHPEISMVGLTEPQAREKADKEGFEISVVKTSFKANTKALAENEGDGLAKMIYRPDTGEILGVHILGLHAADLIHEASNAIALGTRVQDIKFAVHAHPTLSEVLDELFKAAKVNAGVPHSVNEPVAA

SEQ ID NO: 8692 - protein, 207 aa, Millettia dura
VMAYKFHEDDHGEVIAEITKPGLEPYLGLHYPATDIPQAARFLFMKNKVRMIVDCHAKHVKVLQDEKIPFDLTLCGSTLRAPHSCHLQYMANMDSIASLVMAVVVNDNEEDGDSSDAVQPQKRKRLWGLVVCHNTTPRFVPFPLRYACEFLAQVFAIHVNKEIELEYQIIEKNILRTQTLLCDMLMRDAPLGIVSQSPNIMDLVKCD

SEQ ID NO: 8693 - protein, 193 aa, Millettia dura
MAYKFHEDDHGEVVSEIRRSDLEPYLGLHYPATDIPQASRFLFKQNRVRMICDCGAKPVKVIQSEELRQPLCLVNSTLRSPHVCHTQYMANMGSTASLVLAIIVNGNDTTRLWGLLVCHHTSPRYVPFPVRYACEFLMQAFGLQLYMEIQLASQKAEKRMLKTQTLLCDMLLRDAPLGIVTQSPNIMDLVKCD

SEQ ID NO: 8694 - protein, 398 aa, Wolbachia endosymbiont of Drosophila melanogaster
MNIPSIENCDLHNKTVLLRVDFNVPIKDGEIRDVTRILRALPTIQYLVNASAKIIIISHFGRPKARDNNLSLKNVIDTLSQLLNKKVKFIDDCFGEKVQRAVSVMDAGDIILLENLRFYKEEEQSDSNFAKQLASLADIYVNDAFSCSHRAHASISRITEFLPSYAGFCLQDELKYLEKAVSFKAKPITAIVGGAKISTKIKVLMKLTEKVNYLVLGGAIANNFLSFSKVNIGKSFFQNGVDDLLHNILETANKNNCKIVVPEDVLVAVNSDYSTSISRRTESILDGDIILDIGPQTLSTISSIIASSKTLLWNGPIGVFEHSAFASGTIGVMKIVSDLTHKGKLTSIIGGGDSLSAISAAGLADKDFTYVSTGGGAFLDWLSGDEMPGVAALQKRLD

SEQ ID NO: 8695 - protein, 541 aa, Brucella melitensis biovar Abortus
MTVKTIATTPYQDQQPGTSGLRKKVPVFQQPNYAENFIQSIFDVLEGFKGKTLVVGGDGRFYNREVIQKLIKIAAANGFGRIMVGQGGILSTPAASNMIRKYKAFGGMILSASHNPGGPTQDFGIKYNIGNGGPAPEKITEAIFARSKVIDQYKIADAADIDKIGTSKIGDTEVVIFDPVADYAELMESLFDFAAIRAMIKGGFQMKFDAMHAVTGPYAKEIFERRLGAPEGSVVNFVPLPDFGGHHPDPNLVYAKDLYDLLMSSHAPDFGAASDGDGDRNLILGRGIFITPSDSLAMLAANAHLAPGYKGGIKGIARSMPTSAAADRVAEKLGIGMYETPTGWKFFGNLLDSGKVTICGEESSGTGSDHVREKDGLWAVLLWLNILAVRKESVKAIADDHWARFGRNYYTRHDYEAVDSDIATKLVADLRGKLAGLPGTSVNGLRIEKADDFAYHDPVDGSTSEHQGIRIYFEGGARIVLRLSGTGTSGATIRIYIERYEADPAKHNLDTQATLAPLIDAAEQIAEVKKRSGRTEPSVVT

SEQ ID NO: 8696 - protein, 553 aa, Aspergillus oryzae
MPAFSQATDLSAWKELQEHHTAVGRNIVLKEAFEKDPQRFEKFSRTFKNTVDNSDILFDFSKNFLTEETLSLLVKLAKEANVEELRDAMFKGEHINFTEDRAVYHAALRNVSNEPMQVDGKSVVEDVNSVLEHMKEFSEQVRSGEWKGYTDKKIDTIINIGIGGSDLGPVMVTEALKPYGAPGMKLHFVSNIDGTHIAEALKDSNPETTLFLIASKTFTTAETTTNANSAKKWFLETAKDESHIAKHFVALSTNEAEVTKFGIDKKNMFGFESWVGGRYSVWSAIGLSVALYIGYDNFHQFLAGAQAMDKHFREAPLEQNIPAIGGLLSVWYSDFFGAQTHLVAPFDQYLHRFPAYLQQLSMESNGKAITRSGEYVKYTTGPILFGEPATNAQHSFFQLLHQGTKLIPSDFIMAAESHNPVEGGKHQRMLASNFLAQSEALMVGKTPEQVKTEGAPDNLVPHKTFLGNRPTTSILAQKITPSTLGALIAYYEHLTFTEGAVWNINSFDQWGVELGKVLAKKIQQELETSGAGAGHDASTSGLLAAFKQKANLA

SEQ ID NO: 8697 - protein, 291 aa, Vibrio cholerae
MAYKGIVLAGGSGTRLYPITRGVSKQLLPIYDKPMVYYPISTLMLAGIRDILIISTPDDIGGFKRLLGDGSAFGVNFSYAVQPSPGGLAQAFLIGEEFIGNDNACLVLGDNIYYGQSFSKTLKNAAARVSGATVFGYMVKDPERFGVVEFDKDMKAVSIEEKPVKPKSNYAVTGLYFYDNDVVELAKQVKPSARGELEITTLNQMYLEAGKLNVEILGRGFAWLDTGTHESLHEASSFVQTIEHVQGLKIACLEEIAWRNGWLTTEQVLQLAKPMLKNEYGQYLTRLVSCS

SEQ ID NO: 8698 - protein, 357 aa, Glycine max
  unsure (1)..(357): unsure at all Xaa locations
MSRTLVQPIRQKMLTNVAVVRLKKHGMRFEIACYPNTVLSWRSGVEKDLDEVLQSLTVDTSASKGVLAKSTELIAAFGADDHSKICLDILKKGELRVARVDPRARLSSQFRDIATIVMHKTYNPETQRPYTISMIERLMREIHFAVDPHSTSKKQALELIQELQKHFPIKRCPLRIRATAPDDQVPELLGKLNEWNATVISKEGSSXAAVIFELEPGLYKDCHDFVMNKMHGRFEVLAHSLYVEGDTQVEQYNDYEDIPEALPKETYDSVLKLNEKLQKQTISSTSRPTEGQQKQNKCSTCNVSFDDSKLYREHHKSEWHKHNIKRKTRQLPPLTEEECMADMELGDSKSDLKDYSF

SEQ ID NO: 8699 - protein, 184 aa, Xylella fastidiosa Ann-1
MSNFTISQILARADLLVDRPSIDVAIAHIADDIVRDYQGDVPLFVTIMHGGLPFAGQLALELGQRGQDIELDSLHATRYRGEQTGGALVWRHYPVSAMSGRRVILVDDILDEGHTLSEIRQWCLKRGATDVSLVVLMIKCHDRCIPNMRADYYGVEVPDRYVFGFGMDIAGQLRGIPAIYAMRQ

SEQ ID NO: 8700 - protein, 541 aa, Deinococcus radiodurans R1
MSRLTDLPAWQALEDHYYELQGTHLRELFAADPERGEKMNAEGAGLYLDYSKHRVTDETLRLLRELAQATGVEARRDAMFRGEKINVTEGRAVLHTALRAPRDAVIEVDGKNVVPEVHEVLDRMATFADAVRSGEWLGYTGKPIKNIVNIGIGGSDLGPVMAYEALKHYAQRDLTVRFVSNVDGTDLTEKTRDLDPEVTLFIVSSKTFTTQETMTNARSARKWLLGSLKDDAAVTRHFVAVSTNAEEVQKFGIDTANMFGFWDWVGGRYSMDSAIGLSLMVAVGPEHFREMLAGFHDMDEHFRTAPAEQNLPMLMGLLGVWYGDFFGAESLAVLPYDQYLASFPAYLQQLDMESNGKHVTLGGEPVDYQTGPIVWGQAGTNGQHAFYQLIHQGTKLIPCDFIGFCQTLNPLPPHHDLLMANVFAQTEALAFGKTLEQVLADGVAPEVAPHRVFEGNRPTSTILADRLTPRTLGALIALYEHKVFVQGAVWDINSFDQWGVELGKVLAKKIDGELQSEGEPELQHDSSTNALIRRYRARRQG

SEQ ID NO: 8701 - protein, 191 aa, Millettia richardiana
YKFHEDDHGEVVSEIRRSDLEPYLGLHYPATDIPQASRFLFKQNRVRMICDCHAKPVKVIQSEELRQPLCLVNSTLRSPHVCHTQYMANMGSIASLVMAIIVNGNDKTRLWGLLVCHHTSPRYVPFPVRYACEFLMQAFGLQLYMEIQLASQMAEKRMLKTQTLLCDMLLRDAPLGIVTQSPNIMDLVKCD

SEQ ID NO: 8702 - protein, 255 aa, Populus deltoides
MGRGRVQLKRIENNISRQVTFSKRRTGLLKKAHEISVLCDADVAVIVFSTKGKLFEYSTDSSMESILERYERCSYAEQQFVPHGPEHQGSWFLEHPKLRARVELLQRNLRNYTGQDLDPLSYKELHHLEQKIDTALKSVRSRKNQLVHESLAEMQKKEKALQDQNNILVEQVKKKLKALTEQAQWEQQNLGQNSSSFMLPQAQPPLQPSMLSHPPPTLGGSFQIRGFLNGNKDVEVQTQPSTMPHWMLRHVNDRI

SEQ ID NO: 8703 - protein, 287 aa, Suaeda maritima subsp. salsa
GVHTFTLINRSGKVTYVKFHWRPTCGEKNLLEDEAIRVGGENHSHATQDLYETIAAGNFPEWKLYIQTMDPADEDKFDFDPLDTTKTWPEDILPLQPVGRLVLNKNVDNFFTENEQLAFYPAHVVPGIYFSNDKMLQARTFAYADTHRYRLGVNYLQLPVNAPKCPHTNNHRDGAMTMIHRDEEIDYFPSRFDPVREAERHPIPTAIISGRREKQIIPKENNFKEPGDRYRSWDPARQERFVGRFVKALSDPRLTYEICSIWETYLSQADKSLGMKVASRLNVRPTM

SEQ ID NO: 8704 - protein, 139 aa, Millettia richardiana
MAYKFHEDDHGEVIAEITKPGLEPYLGLHYPATDIPQAARFLFMKNKVRMIVDCHAKHVKVLQDEKLPFDLTLCGSTLRAPHSCHLQYMANMDSIASLVMAVVVNDNEEDGDSSDAVQPQKRKRLWGLVVCHNTTPRFV

SEQ ID NO: 8705 - protein, 490 aa, Escherichia coli O157:H7
MSRMAEQQLYIHGGYTSATSGRTFETINPANGNVLATVQAAGREDVDRAVKSAQQGQKIWAAMTAMERSRILRRAVDILRERNDELAKLETLDTGKAYSETSTVDIVTGADVLEYYAGLIPSLEGSQIPLRETSFVYTRREPLGVVAGIGAWNYPIQIALWKSAPALAAGNAMIFKPSEVTPLTALKLAEIYSEAGLPDGVFNVLPGVGAETGQYLTEHPGIAKVSFTGGVASGKKVMANSAASSLKEVTMELGGKSPLIVFDDADLDLAADIAMMANFFSSGQVCTNGTRVFVPAKCNAAFEQKILARVERIRAGDVFDPQTNFGPLVSFPHRDNVLRYIAKGKEEGARVLCGGDVLKGYGLDNGAWVAPTVFTDCSDEMTIVREEIFGPVMSILTYESEDEVIRRANDTDYGLAAGIVTADLNRAHRVIHQLEAGICWINTWGESPAEMPVGGYKHSGIGRENGVMTLQSYTQVKSIQVEMAKFQSIF

SEQ ID NO: 8706 - protein, 201 aa, Millettia richardiana
FPEDDHGEVIAEITKPGLEPYLGLHYPATDIPQAARFLFMKNKVRMIVDCRAKHVNVLQDKKVPFDLTLCGSTLRAPHSCHLQYMENMNCSASLVMAVVVNDNDEDGDSDAVQPQKRKRLWGLVVCHNTTPRFVPFPLRYACEFLAQVFAIHVNKELELEYQIVEKNILRTQTLLCDMLMRDAPLGIVTQRPNIMDLVKCD

SEQ ID NO: 8707 - protein, 300 aa, Burkholderia fungorum LB400
MASNPVWTHLAPGEWWPSRRLPLYRYFGGSGAMQLPVPMMNIVNGGAHANNSLDIQEFMIVPVSQPSFREALRCGAEVFHALKKILSDRGMSTAVGDEGGFAPNFGSNDECLSTILQAIEKAGYRAGEDVLLALDCAASEFYHDGKYQLAGEGLQLSSTEFADYLANLADKFPIVSIEDGMHESDWAGWKTLTDKLGKKIQLVGDDLFVTNTRILKEGIEKGIANSILIMINQIGTLTGNFRGDRNGQARRLHGCDLASFGRNRRFDDCGYRRRSERRADQDGFAVAFGPHFEVQPVAAH

SEQ ID NO: 8708 - protein, 178 aa, Piscidia piscipula
LHYPATDIPQATRFLFMKNKVRYIVDCRAKHVKVLQDKKVPFDITLCGSTLRAPHSCHLQYMENMNCSASLVMAVVVNDNDEDGDSDAVQPQKRKRLWGLVVCHNTTPTFVPFPLRYACEFLAQVFAIHVNKELELEYQIVEKNILRTQTLLCDMLMRDAPLGIVTQRPNIMDLVKCD

SEQ ID NO: 8709 - protein, 152 aa, Piscidia piscipula
AYKFHEDDHGEVIAEITKPGLEPCLGLHYPATDIPQAARFLFMKNKVRMIVDCHAKHVKVLQDEKLPFDLTLCGSTLRAPHSCHLQYMANMDSIASLVMAVVVNDNEENGDGSDAVQPQKRKRLWGLVVCHNTTPRFVPFPLRYACEFLAQV

SEQ ID NO: 8710 - protein, 454 aa, Wolbachia endosymbiont of Drosophila melanogaster
MPIEILMPALSPTMSKAGGKIVKWHKKEQDKVEVGDVIAEIETDKAIMEFESIDEGVLAKILVTEGTSGVPVNQPIALMLEEGEDESALNNYTSTSINSAVKKEVTKSAVDNQKSEHQDLNGKPISHSSVSFQRVTLESNPSMSSQCLTLGSRKEEWIPVSATQMTEGYAEGRTKISPLAKKIAQNEGVNVQQLKGTGPYGRIIKADVLEFLGSGIHTESPEKDTIVEVSNMRQVIAQRLTESKQNVPHFYLTVDCQVDKLISLKNEINSADENNKVTINDLIIKAAAFSMKKFPDINSSWIDNKILRYSNIDISIAVALEDGLITPIVKNADKKGILSISKEVKDLVSRARSGKLKPEEFQGGGFTISNLGMFGIKAFSAIINPPQSCIMAVGASKKQPIVMNEKIEIAEIMTVTLSVDHRAVDGALGAKFLNAFKHYIENPLVMLIETAVIY

SEQ ID NO: 8711 - protein, 276 aa, Zea mays
  unsure (1)..(276): unsure at all Xaa locations
MAPRQAVLAVVVLAALLPFALSRGLRLGHHRAQPHPRPHGHAPLGGGAWSSAHATFYGGGDASGTMGGACGYGNLYSQGYGTNTAALSTALFNNGLSCGACFEVRCDAAGGGGRSCLPGSVVVTATNFCPPNNALXSDDGGWCNPPRAHFDMSQPVFQRIALYRAGIVPVSYRRVACNKKGGIRFTINGHSYFNLVLVTNVGGAGDVHAVAVKAERSXGWQALSRNWGQNWQSNTLLDGQALSFRVTTSDGRSVLSNNAAPRGWSFGQTFSGAQFN

SEQ ID NO: 8712 - protein, 502 aa, Xylella fastidiosa 9a5c
MHNGFDALQLHANRLRGVTIPDLLAAELKRPEQYARQVGPLYFNFARQKYDCVALEALFALARNHNVAGAFQRMFCGEQVNVTEGRAVLHTALRGDLSGTSVAVAAYTAAAKVRERMYALIAGLDASEVTDIISVGIGGSDLGPRLVVDALRPISQGRFRVHFVSNVDGAAMRRTLDMLDPSRTAGILISKTFGTQETLLNGRILYDWLGGSERLYAVSANPERAAHAFDIVPTQVLPIWDWVGGRYSLWSAVGFPIALAIGSQRFEELLAGAAEFDAYALRVPLEENVAVLHGLTAVWNRNFLGCATYAVMAYDQRLALLPAYLQQLVMESLGKRVKCDGTPVDRDTVPVWWGGVGTDVQHSFFQALHQGTNIVPADFIGTIRNDDPYTENHFALNANLLAQIEVLANGQLSDDPHRVYPGGNPSTLILLDALTPQALGGLIAMYEHSVYVQSVIWGINAFDQFGVELGKHLAVQLLPALKGESVEVVDPVTRAVLVRLRG

SEQ ID NO: 8713 - protein, 497 aa, Pseudomonas saccharophila
MKNQVQLITYVDRLGGQRDGADLARLKKLLCEPGQPLADVFGGVHLLPFFHAIDGADAGFDPIDHTLVDPRLGDWSDIKALTEGLEVMGDVIVNHMSSESPQFQDFSAKGRESAYDGLFLTLDAVFPNGATERDLLTVYRPRPGPAAELCDAEERRARILWTTFTAAQIDIAVHHPQGRAYLESILQTFAANGIRMVRLDAVGYAIKKAGASCFMMPETFGFIAEFAQAARALGIEVLVEIHAYYQRQIEIASQVDWVYDFALPPLVLHAFEFKTAGALKRWIAVRPTNALTVLDTHDGIGIIDIGADASDRAAHPGLVPPEELDALVERIHAASQGQSRKPTGAAASNLDLYQVNCSFFDAMGRNETAYLLARAIQFFLPGVPQVYYVGLLAGHNDMELLARTQVGRDINRHYYDAAEIASDCERPVVRRLIELIRLRNRHPAFGGVFSVEAGGDDELHLRWQQGGDWGPLRVNFASLDHELSCSRRRRDRAFAFS

SEQ ID NO: 8714 - protein, 559 aa, Schizosaccharomyces pombe
LTMCGILAVHHVAEDIEAFKPKALHLSKQLRHRGPDWSGKAIRNQTILCHERLAIVGVESGAQPLVSDDGKLVLTVNGEIYNHLKLRENLKGNYKFKTYSDCEVILYLYREHGPACANMLDGMFSWVLYDQDKDKVVAARDPIGITTLYQGFSSDSPDTAYFASELKALHPVCDKIIAFPPGHYYDSETKQTVRYFKPSWWDENKIPSNPVDYKLLRETLEASVRKRLMAEVPYGVLLSGGLDSSLIASIAARETEKLANSTSQSEEARTITAWPKLHSFAIGLPGSPDLLAARKVADFLHTFHHEHTFTIDEVLMLFVTLFTILRHMMLPLSVQVPPCIYYLVKSRLKVLKWFCLVRDLTKSLVDTYISVMPPLVRPSIPSVCVVLRTCTYPNACVLTSQLWLGVLRLVFLSWIRTFWKLLLTLILRRKCILTVVKKNIFFAKALDTTHDSSLQPYLPQDILWRQKEQFSDGVGYSWIDALKDTAELCISDDEFALPRREWGDDIPTTKEAFWYRKLFDEIFPRQCADTVMRWVPKAEWGCPEDPSGRYQAGHVAALK

SEQ ID NO: 8715 - protein, 506 aa, Oleomonas sagaranensis
MIHQTIEEISKSIAFRSRYDNFIGGKWVAPVRGQYFDNITPITGMPVAQIARSTAEDIELALDAAHAAKDAWGRTSVAERARLLNKIADRMEEKLDLLAMVETIDNGKPIRETKAADLPLAIDHFRYFASCVRAQEGSIGEVDHDTMAYHFHEPLGVVGHIIPWNFPLLMACWKLAPALAAGNCVVLKPAEQTPLSIMVWADLIGDILPPGVLNIVNGFGIEAGKPLASNKRIAKIAFTGETTTGRLIMQYASENLIPVTLELGGKSPNIFHEDVAAEDDDYFDKAIEGFVLFALNQGEVCTCPSRAIIHEKIYDKFMERALARVAAIKQGSPLEAATMLGAQASNDQLEKILSYIDIGKAEGAELLIGGERNILGGELAGGYYVKPTVFRGNNKMRIFQEEIFGPVVSVTTFKDEAEALSIANDTLYGLGAGVWTRDGNRAYRFGRAIQAGRVWTNCYHLYPAHAAFGGYKQSGIGRETHKMMLDHYQQTKNLLVSYSPKALGFF

SEQ ID NO: 8716 - protein, 466 aa, Bradyrhizobium japonicum USDA 110
MTMLDTVQHHSQPQSGVPQNHLADEFVETLRLAVPMMLTQLGQIAMITTDLALIGRLGEDAVAAAALAHTVYFVSFTFGLGLMAAVSPLVAQAFGAGDVRRIRRALRVGLWVALLISLPMMASPLYGEHILIALGQVPQSAALAQRYLNGLAWGIAPALGFIALRGMMSAVNRPQPPLWITVAAIPVNAALVYVLIHGLFGLPELGLFGAGLATTLVNLGTFLAVLAIAAWRKPFSDYRPLAHLWRIDWPLVRQLIALGAPISSSLLLEYGLFSSAALLMGLISTTALAAHQIALQVTAVLFMVPLGIGMAATVRVGHAFGRNDPAAVRRAGLVAAVLGVALVSALTVAIILGRYELGRLFFGGSEASAATVELTATLLLVGATFFIADGLQTIMGGALRGINDTRMTLAFAAIGYWCVAFPVAWVLAFHTGLGAVGVWIGFSIGTFVYAGLLVLRFRMLARRLVG

SEQ ID NO: 8717 - protein, 551 aa, Bradyrhizobium japonicum USDA 110
MYAYDEIDRTLVNERVSEFRDQVQRRLSGELTEDEFKMLRLQNGVYLQLHAYMFRVAIPYGTLASNQLRALAHVARKYDRGYGHFTTRQNIQFNWIKLSDLPDALADLAEVGIHAMQTSGNNMRNVTSDQWAGVAPGEIEDPRIWSELIRQHTTLHPEFSFLPRKFKIAITASDHDRAAIKVHDIGLRLIKNEKGETGFEVLVGGGLGRTPFIGKTIKHFVHGRDLLSYIEAILRVYNQYGRRDNIYKARIKILVHELGIEKFSREVEEEWQHIRNSSLQIDDEVIEDIRSRFIYPAYEKLPHMPDELRQAAADPEFEAWRKNSVAPHKNPGYSIVTISLKPIGAPPGDATAEQMDALADLADRYSFGEIRVGHEQNLALPHVAKRDLPALWKALDKLGLATPNVNLITDIIACPGLDYCSLANARSIPIAQELTRRFANHELANLIGRLHINISGCINACGHHHVGHIGILGVEKNGEEVYQITIGGRADEGAALGNLIGPGVKFDEVADVVEDIVEAYLALRARPEELFIDTVKRLGVEPFKERVYATR

SEQ ID NO: 8718 - protein, 1167 aa, Pyrobaculum aerophilum str. IM2
MTAVTRRGFLKLAALATSALSIGAEAQVPFKATKATWEIGEIGGKLDLPKATVTPVICPYCSVGCSIDLYVSGGRIVWSRGSADSPINWGALCPKGKAAFQLVENDLRVTKPLIRTGPKPPPEEILAAKSWDELIAVVRKYPPMWREATWDEALQLVANRLARILNEWRASTGSPKQKDGYYYVGRNVPIQIIGSSILVNEEAYLSKKLATYLGTSNMDSQYRKCHSSTVSSLAVTYGWGAETASIEDVALADVVLFWSSPAEAHPLSFAYFLKGKRERGTIFITFDPRYSRTAAASDLWVPFRPGTDTAILLYILHYAFFERNPPIDQLDEFQRLRSRWNITDDDLADLKELLKEYDADTVSNISGVPKDLLRTVASIYVENSGVVTNHEKHGIIQWAMGFTQHTNATINIIRAAAIVQLLLGNVGYPGGGTHPFRGHSNVQGANDVQGGGVDGLPGYHGFPASVFEIRLYQDWKLQGMPDAWNWSVPEWARASFSTTAPDAGKADLSKVLQVFKFYGWRRFELAWRMFCGTIPEDDPQNGVVVCDFPLGTGTTEVVFPRRALAGEIKAAFVFGENPAVTNPNAKIIMAGLAALDLLVVSDIFETETAWFADVLLPAASFAEKEGSRTNGNRVIQWSYRAVPPKGDSRPDYWIITKLYQYLRREGAVVLPSEVAGVKKEEVKFRKGGKLVFVYERPLRPDNSWDYSGGTGKSAPISPIEAEVNPRIIYKEINFTTLIYQGIYDPIRDEIITMKRIAQLRRPGQIDGTFSSKFEVYKDWGWSWPMNVRFLYNYDSLKAVLGVTDKVYAAGREWEVAGETGEWIDEYTGEYKPAFIPGHNFWVPRSFKRRLSGVADVYGGMDIMHFIKTGEVRILGKFIVEEGGEVKTLTYEEYVARTGMKYLWVNDSLYWDADTTSFKAALKRPFFSGGDWRSFKPVYQKMRDLLGQYYSQFGNLKDAVLKVISDMGGWYKGYSFQWPIHTEPVESPLPELAVRYPSLAWLNPYNLQVLQDQPDIVKGKNVGVALTPDDLKDIPGELVVITSNRLTEHFHGGSMSRNVPYLAELAPEPFVYLPRALAERLGVKSGDYVDVITLRGGLRMKAYVTDGEAYLTVNGKELPVVNVIWAFSFEGYVTGPQGNFLNPDVGDVVTTIQESKAWIGKIRKASLA

SEQ ID NO: 8719 - protein, 476 aa, Triticum aestivum
ESRRGGGGPAAAAAAAGDPRGPMPGFGAPQHTIPTNVNVMQPSRVADLGALAHSAGFRIEDLANFSTNNLFNLKPNTHAYTSDPLQFGNYGKSISPTDLATTAAAAAAVTAVDPQALLQQKGVQPNLVALRTHNNDNWGESSMADTSPRTDTSTDPDIDIDERNQMFEQGQLAAPTASDSSDKSRDKLDHKSLRRLAQNREAARKSRLRKKAYIQNLESSRLKLTQLEQELQRARQQGIFISSSGDQSQSASGNGAVAFDMEYARWLEEHNKHINELRAAANAHAGDDDLRKIVDSIMSQYDEFFRLKGVAAKADVFHVLSGMWKTPAERCFMWLGGFRSSELLKLLAGQLEPLTEQQLTGICNLQQSSQQAEDALSQGMEALQQSLAETLASGSLGPAGSSGNVASYMGQMAMAMGKLGTLENFLRQADNLRLQTLQQMQRILTTRQSARALLAISDYFSRLRALSSLWLARPRE

SEQ ID NO: 8720 - protein, 243 aa, Neurospora crassa
MLTCLTFRVPTASPLHPTSSPSLSRLDRSPPPPPPKNPADDATRYDYLFKLLLIGDSGVGKSCLLLRFADDTYTESYISTIGVDFKIRTIELDGKTVKLQIWDTAGQERFRTITSSYYRGAHGICVVYDVTDMDSFNNVKQWLQEIDRYATEGVNKLLVGNKSDMTDKKVVEYTVAKEFADSLGIPFLETSAKNASNVEQAFLTMARQIKERMGSSIATNNTKASVNVSPGHGVSNNSSGGCC

SEQ ID NO: 8721 - protein, 192 aa, Piscidia piscipula
AYKFHEDDHGEVVSEIRRSDLEPYLGLHYPATDIPQASRFLFRQNRVRMICDCHAKPVKVIQSEELRQPLCLVNSTLRSPHVCHTQYMSNMGSIASLVMAIIVNGNDKRRLWGLLVCHHTSLRYVPFPVRYACEFLMQAFGLQLYMEIQLASQMAEKRMLKTQTLLCDMLLRDAPLGIVTQSPNIMDLVKCD

SEQ ID NO: 8722 - protein, 392 aa, uncultured bacterium pCosFS1
MSVTDSDLEFDQRHIWHPYTSMSHPLPCYPVEAASGVELQLADGRRLIDGMSSWWAAIHGYNHPQLNLAATQQLEKMSHVMFGGITHPAANELCRKVVAMTPEALQCVFLADSGSVAVEVSLKMALQYWQARGERRQRILTLRHGYHGDTFGAMSVCDPDNSMHSLYQGYLAPHLFATAPQCGFDQAWDENDIAPFAALLEQHAGEVAAVILEPVVQGAGGMRIYHPTYLERVRELCDRYQVLLIADEIATGFGRTGKLFACEHAEVVPDILCLGKALTGGYMTLSATLTTRHVAETISNGAAGCFMHGPTFMGNPLACAVANASLSLLAENRWQQQVAAIETQLKQQLLPLKMQPKVADVRVLGAIGVVEMREPVDMAQLQRGFVERGVWI

SEQ ID NO: 8723 - protein, 448 aa, Xylella fastidiosa Temecula1
MISRFGSEVRPTLLLALPLVLGHVSTGLIGFVLNVIAGHHSTVTLAASTIGTALLWLPMLVPMGTLISLTVLVSQLHGAERERDIGPLFRQALWLAMLLGLVMFTFLSVVPALLPLFGIVPDIVPGAAKFLHVVRWGSLAFPLYFCMRYFCEGMHCTFPTMLLGFGGLLVLVPLSYALTYGRFGFAEYGVEGLGIATVTVMWLQAVVFALYLWRSRRFAHLQLFAHLELPCWARIRDLLNIGLPIGISILMEGGLFIVTTLLIGRFGTDEIAAHQIALSVAQLCFMIPMGVAEATTVRIGHAVGRCDLLVMRRVAWAGYAIVIGTQTLSASVLLLGYDVIVAAYTDDLVVASLASKLLLFAAIFQFPDGLQMLSSGVLRGMKDTRVPMLLAMISYWGLGMPLGLGLGFALEWNSRGMWIGLIIGLTAAALLLGWRFRVVSERMFAGIP

SEQ ID NO: 8724 - protein, 186 aa, Millettia grandis
EDDGEVVSEIRRSDLEQCLGLHYPATDIPQASRFLFKQNRVRMICDCHAKPVKVIQSEELRQPLCLVNSTLRSPHVCHTQYMANMGSIASLVMAIIVNGNDTTRLWGLLVCHHTSPRYVPFPVRYACEFLMQAFGLQLYMEIQLASQMAEKKTLKTQTLLCDMLLRDAPFGIVTQSPNIMDLVKCD

SEQ ID NO: 8725 - protein, 478 aa, Pseudomonas fluorescens PfO-1
MSQKFDVVVIGAGPGGYVAAIKAAQLGLSTACIEKYTDAEGKQALGGTCLNVGCIPSKALLDSSWKYKEAKESFNVHGISTGEVKMDVAAMVGRKAGIVKNLTGGVATLFKANGVTSIQGHGKLLAGKKVEVTKPDGSVEVIEAENVILAPGSRPIDIPPAPVDQKVIVDSTGALEFQSVPKRLGVIGAGVIGLELGSVWSRLGAEVTVLEALDTFLMAADTAVSKEALKTLTKQGLDIKLGARVTGSKVNGDEVVVNYTDANGEQTITFDKLIVAVGRRPVTTDLLAADSGVTLDERGFVHVDDHCATTVPGVYAIGDVVRGMMLAHKASEEGIMVVERIKGHKAQMNYDLIPSVIYTHPEIAWVGKTEQALKAEGVEVNVGTFPFAASGRAMAANDTGGFVKVIADAKTDRVLGVHVIGPSAAELVQQGAIGMEFGTSAEDLGMMVFSHPTLSEALHEAALAVNGGAIHIANRKKR

SEQ ID NO: 8726 - protein, 203 aa, Millettia grandis
MAYKFHEDDHGEVIAELKKPGLEPYLGLHYPATDIPQATRFLFMKNKVRMIVDCRAKHVKVLQDKKIPFDLTLCGSTLRAPHSCHLQYMENMNSSASLVMAVVVNDNDEDGDSSDAVQPQKRKRLWGLVVCHHTTPRFVPFPLRYACEFLAQVFAIHVNKELELEYQIVEKNILRTQTLLCDMLMRDAPLGIVSQRANIMDLV

SEQ ID NO: 8727 - protein, 407 aa, Pseudomonas fluorescens PfO-1
MAIEIKAPTFPESVADGTVATWHKQPGDAVKRDELIVDIETDKVVLEVLATADGVLGAIVKGEGETVLSDEVLGSIVEGGAASAAPAAAAAPAAAAAAPAAADGEDDPIAAPAARKLAEENGINIASVAGTGKGGRVTKEDVVAAVAAKKAAPAAAPAKAAAPAAAAPVFAAGDRIEKRVPMTRVRATVAKRLVEAQSNMAMLTTFNEVDMTEVMALRSKYKDLFEKSHNGVRLGFMSFFVKAATEALKRFPAVNASIDGNDIVYHGYADIGVAVSSDRGLVVPVLRNAEHMSLAEIEGGIATFGKKARDGKLSMDEMTGGTFTITNGGTFGSMMSTPIVNPPQAAILGMHNIIQRPMAINGQVVIRPMMYLALSYDHRLIDGKEAVTFLVTIKNLLEDPARLLLDI

SEQ ID NO: 8728 - protein, 205 aa, Millettia grandis
AYKFHEDDHGEVIAEVKRPGLEPYLGLHYPATDIPQAARFLFMKNKVRMIVDCHAKHVKVFQDEKLPIDLTLCGSTLRAPHSCHLQYMANMDSIASLVMAVVVNDNEEDGDSSDAVQPQKRKRLWGLVVCHNTTPRFVPFPLRYACEFLAQVFAIHVNKEIELEYQIIEKNILRTQTLLCDMLMRDAPLGIVSQSPNIMDLVKCD

SEQ ID NO: 8729 - protein, 129 aa, Triticum aestivum
  unsure (1)..(129): unsure at all Xaa locations
MAPTVMASSATSVAPFQGLKSTAGLPVSRRSNGASLGSVSNGGRIRCMQCXPSEGIKNSETLSYLPPLKHGGLLKQVDYLDSVQSGCLSFDFNKSVYPSRLTQCVSPGTNNGRYWTMLXXPIFGCTDAS

SEQ ID NO: 8730 - protein, 402 aa, Zea mays
TGRDEAAWDMDDVAGCFEYFTDQAEALDKRQNSPVSLPMETFKCHLRREPIGVVGLITPWNYPLLMATWKVAPALAAGCAAVLKPSELASVTCLELADICKEVGLPPGVLNIVTGLGPDAGAPLSAHPDVDKVAFTGSFETGKKIMAAAAPMVKPVTLELGGKSPIVVFDDVDIDKAVEWTLFGCFWTNGQICSATSRLLVHTKIAKEFNEKMVAWAKNIKVSDPLEEGCRLGPVVSEGQYEKIKKFILNAKSEGATILTGGVRPAHLEKGFFIEPTIITDITTSMEIWREEVFGPVLCVKEFSPEDEAIELANDTQYGLAGAVISGDRERCQRLSEEIDAGIIWVNCSQPCFCQAPWGGNKRSGFGRELGEGGIDNYLSVKQVTEYISDEPWGWYRSPSKL

SEQ ID NO: 8731 - protein, 180 aa, Tephrosia villosa
GLHYPATDIPQAARFLFMKNKVQMIVDCHAKHVKVLQDEKLPLDLTLCGSTLRAPHSCHLQYMANMDSIASLVMAIVVNDNEEDGDSSDAVQPQKRKRLWGLVVCHNTSPRFVPFPLRYACEFLAQVFAIHVNKEIELEYQIIEKNILRTQTLLCDMLLRDAPLGIVSQSPNIMDLVKCD

SEQ ID NO: 8732 - protein, 451 aa, Pichia angusta
MGTKSMTDVTAEELSKDSVAMMLAKDRELKNKYLKQKHISEQPWTWENWHRHINWLNFILVLAVPFAGLISTKWVPLKLHTFVTAVILYCFGGISITAGYHRHWAHRAYDCKLPVKIFFALFGASAVEGSIKMWGHQHRVHHRYTDTPRDPYDAKRGFWYSHMGWMLLVPNPRYKARADISDLLDDWVVRVQHRHYLLLMVVMAFLFPAVLTHYLFNDFWGGFIYAGLLRAVVIQQATFCVNSLAHWIGEQPFDDRRTPRDHVLTALVTFGEGYHNFHHEFPSDYRNALKWYQYDPTKVVIYLLSKVGLAYNLKKFSQNAIDQGILQQQQKKLDRMRAKLNWGPQLSELPVWDKSTFFEKAKEQKGLVIISGIVHDCANFLTEHPGGQALLKTSFGKDATMAFNGGVYAHSNAAHNLLATMRVAVIRDGGANGDTFDAQLRYLASKENKKE

SEQ ID NO: 8733 - protein, 178 aa, Lactobacillus gasseri
MNNDIERILYTQSDLDSRMDEMAAELNVKYKDEEPIVVPVLNGAMIFASDMIKRLNFKLTIDPIKASSYAGTQSTGEVKITQDIKSDVKDRPVIFMEDIIDTGRTLQALSEVMKGRGAKSVEVVAMLDKPETRVVDFHADYYGFKAPDEFLVGYGLDYNGLYRNLPYVGILKHEVYAN

SEQ ID NO: 8734 - protein, 195 aa, SYNECHOCOCCUS SP. WH 8102
MRTLVIASGNAGKIREFQGLLQHLPLNVQAQPQGFDVEETGSTFAANARIKATAVAAMAGSWALADDSGLSVNALGGAPGVHSARYAPTDPERIEKLLGALSNASERHAQFCAALCVAAPDGSVLIEVEGRCDGWITTTPRGDGGFGYDPIFEVSCTGLTFAQMPLTEKKSHGHRGKAFALLEPQLQDLLSAEPR

SEQ ID NO: 8735 - protein, 277 aa, Arabidopsis thaliana
MEDLDHEYKNYWETTMFFQNQELEFDSWPMEEAFSGSGESSSPDGAATSPASSKNVVSERNRRQKLNQRLFALRSVVPNISKLDKASVIKDSIDYMQELIDQEKTLEAEIRELESRSTLLENPVRDYDCNFAETHLQDFSDNNDMRSKKFKQMDYSTRVQHYPIEVLELIIPNCFYINMKKQMKVTWMGEKTVVVCITCSKKRETMVQLCKVLESLNLNILTTNFSSFTSRLSTTLFLQVTLSLSPSLISLFGNVITSTNYKILNASREYCTCLVLV

SEQ ID NO: 8736 - protein, 349 aa, Xylella fastidiosa Ann-1
MFINAYGAHAGDKPLESMQIARRAPGAHDVQIDIHYCGVRHSDIHQVRAEWAGTLFPCVPGHEIVGRVSAIGTHVQGFKAGDLVAVGCMVDSCKDCQECDAGLENYCDGMIGTYNFPTQDAPGHTLGGYSQKIVVHERFVLRIRHPEAQLAAVAPLLCAGITTYSPLRHWNAGPGKKVGIVGIGGLGHMGIKLAHAMGAYVVAFTTSESKRQDAKALGADEVVVSRDEERMAAHVKSFDLILNTVAASHSLDSFLTLLKRDGTLTLVGAPVTPHPSPEVFNLIFKRRSIAGSLIGGIAETQEMLDFCAEHGIVADIELIRADGINEAYERMMKGDVKYRFVIDNSTLAA

SEQ ID NO: 8737 - protein, 501 aa, Magnaporthe grisea 70-15
MPPSISSRSATAHEEEAIETTALLPRQQQQQQHRSRAEYAAWLREIWFLTKACVPVILAYMLQNSLQTISVLIVGRLSPEALSAAAFAYMFAMATAWLIALGGTSALDTLASSSFTRSRDKTSLGLLLQRGFLVLTALYAVVVVVWWFAEDVFRALGQPEEICVMSARFLRLLAPGGLGYVWFECMKKFLQAQAIYRPGTYALMLTSPLNALLNYLLIYKLDMGLDGAPIATGISYWLSFFFLVGYAVFVQGSECWGGFDLRRAATNVGPFARLAALGVVHVGTEWWAFEIVALAAGRLGTLPLAAQSVIMTADQIINTIPFGLGVAESARLGNLLGAGDVRGARRSAHSAAILSVVFGTTLLVVLMAARHRVGALFNDDEQVIALVAEVVPYVALFQIADGLNGSCGGALRGMGRQWVGALVNCVSYYGGALPGGIYLAFNGWGLAGLWMGQCVALSLVGVLEWVIVGMSDWPEEVRRAIDRLRDDEDGNKSVVEEEVVE

SEQ ID NO: 8738 - protein, 476 aa, Cyanidioschyzon merolae
MTAKVESKVREEEKGSNPSTAAADDSGAVIPTLKPRPKPAVEPLEREGVEFDPQRGLVFEKTRSSKWMSEKELNELPLLQRINWLSTSIIFTPLIGTLIGIWFVPLQRKTLVLAIVTYFCCGLGITGGYHRLWSHRSYEAHWLVQVILACFGAAAFEGSARYWCRLHRAHHRYVDSDRDPYAVEKGFWYAHLWWMVFKLPRQRQGRVDITDLNANPILRFQHRYYLQIAILFSFVIPLTISTLGWGDFWGGLVYACLGRMLFVQQSTFCVNSLAHWWGEQTFSRRHTSYDSVITALVTLGEGYHNFHHEFPHDYRNGVVWYHWDPTKWVIRLLSWAGLAWHLVRFPRNELVKARLQVRQEILDEAKKRVDWGKPIESLPVWTWKDVQRLAKEENRLLVVIEGIVHDCTRFKVQHPGGQRILEFWNVRDATQAFNGDVYNHTKAARNLLAHLRVAQLKEIYEPECDESTTEMSTKSS

SEQ ID NO: 8739 - protein, 242 aa, Zymomonas mobilis
MEKVSFGFSDVSPQEKTHLVGDVFRRVASRYDLMNDAMSGGLHRLWKDDFVRLVQPKASEHILDMAGGTGDIAFRLAKYGTNVTIADINPAMLEVGKKRAIARSIENLTWKEENAEALSFNDNVFDAYTIAFGIRNVTHIQKALDEAWRVLKVGGRFFCMEFSQTKWSGFSNLYKMYSTHIVPKIGQLLANDEDSYRYLIESIETFPNIEKFSDMIKSAGFVQIRARPILGGLVAIHSGWKV

SEQ ID NO: 8740 - protein, 160 aa, Oryza sativa
  unsure (1)..(160): unsure at all Xaa locations
LEGMRHPHLYTPLDLHLPNFVPLXLSQGEIIVPYLGTSIFIVFAIWFISGTRHSKTDRLLMCWWAFTGLAHIMEGTYAFAXHEKKVKVLFSNQNPSFSDEVWKEYSKGDSRYVARDPATVTVEAITAVLEGPGLLLSVYAIARQKSDSHILQFTVCLGHL

SEQ ID NO: 8741 - protein, 72 aa, Triticum aestivum
  unsure (1)..(72): unsure at all Xaa locations
MGKMPVRMKAVVYALSPFQQQVMPGXWKDITTKIHHKVSEEWXSATLLITPVVXTYXYAMWYXEQGXLSHXY

SEQ ID NO: 8742 - protein, 549 aa, Streptomyces avermitilis MA-4680
MSDSPRLTRRPEWTELEDHRAGPLLHPALRELFAADPERAERYVVRAGDLRLDYSKHLITDETLALLQELATATDVFGLRDAMFRGEKINVTENRAVLHTALRAPRDAVIEVDGENVVPAVHAVLDRMADFADRVRSGEWTGHTGSRIRTVVNIGIGGSDLGPAMAYEALRAFTDRSLTVRFVSNVDGADLHEAVRDLDPAETLFVIASKTFTTIETITNATSARSWLLAGLDGDEKAVAKHFVALSTNAGKVSDFGIDTANMFEFWDWVGGRYSFDSAIGLSLMIAIGPERFRELLDGFRIVDEHFRTAPAEANAPLLLGLLGVWYGSFFGAQSHAVLPYSHYLSKFTAYLQQLDMESNGKSVDRDGHPVEWQTGPVVWGTPGTNGQHAYYQLLHQGTKVIPADLIGFINPVDGLSDELAAQHDLLMANLFAQGQALAFGKTGDEVRAEGVPEEQVPHRTFRGNHPTTTILAAELTPSVLGQLIALYEHKVFVQGAIWNIDSFDQWGVELGKVLAKRVEPALTEGADVPGLDPSTAALVAAYRTHRKK

SEQ ID NO: 8743 - protein, 428 aa, Tropheryma whipplei TW08/27
MCLIDSVHARQILDSRGTPTVEVEVTLEDGSMGRSAVPSGASTGAFEAHELRDQDNNEYLGKGVTRAVRSVNSEIAPVLIGFDAFDQVGLDHRMIELDGTNNKSRLGANAILGVSLASASAAARAADLSLFRYLGGPSSRILPVPMMNIINGGAHADTGVDIQEFMILPVGARSFSESLRWGCEVYHSLKVQLRESGLSSGLGDEGGFAPALRSNRTALDLILSAIEKAGFSPGIDIVLALDIAASEFCKAPGHYRFEGKDITSDELISYYEGLLSSYPLVSIEDPLDQDDWEGYRTLTTHIGDRVQIVGDDLFVTNTSRLSRGIQSGVANSILVKVNQIGTLTETFDAVDMAAKGGYTAVLSHRSGETEDTTIADMAVATNCGQIKTGAPARGERIAKYNQLLRIEEKLGRSARYAGWLSYPRWQGK

SEQ ID NO: 8744 - protein, 426 aa, Tropheryma whipplei TW08/27
MKIVPPRGMQDFLPHEKEHRDRITEVIYKSYISHGFNPIETPSLENIERLACGVGQENEKLTYKIIRRGLTGAQTVQHPDELIDLGLRFDLTIPLVRFWNTNRARLPKIFRSLQIGHVWRAEKPQKGRRRQFIQCDIDIIGQPEILAEIELLVATLSTLEQLGIRTPKLHINDRRILFSMLNNLGVPHSCHVYVSIVLDKLRKIGLDLVKQELCEFPALVAYLASSVNSNTGSTDLCFDVSSTKDITHIRRTIQSALPHGCKFDCEDLCRIIASVNEFTQTGVFFDPLLVRGMGYYTGPIFEILHDDYSIAGGGRYDGLVERLGGLPTPACGFSIGFERVLGLIKESVSLDPKKMILLYDPKVDPNLVVSVKLEFISKGFIVRPELASRSRRNQIELAKREGFGAFLYLDPLSPPDGLLAKVKPIL

SEQ ID NO: 8745 - protein, 902 aa, Eremothecium gossypii
MHRVNVTPAQRHTGQRKHYALKQVIGKGAYGVVYKAVNRATDQVIAIKAIEYENEEELHEHMLEIDLLKNLKHENIVKYHGFIQSSHELYILLEYCIRGSLRDLIKKEALSEAKAKTYVRQTLRGLQYLHDQGVIHRDIKAANLLLTENGVVKLADFGVSTRVNNMAMTYAGSPNWMAPEVMLGKGASTVSDIWSLGATVVELLTGNPPFYNLVNEAACYAIVNDVYYPPEHLSAECKAFMELCFQKNMFKRPQAHQLLQHGWLKEGRDKLEQFKEDDLVEDRWDQDFLEVNTVVSQSSPGKKQLDGPYKYIEQLRSGQFISSPETILQNITAEDITDLMFELCNLDEPNRASLLFGVFSFDKEYVSGAGTKGFIALGGIPQVLPFEEILVTYFSSSIPLLVQCGILSRINDLHDSTLLLKIVDHVQRMFSFERWCKWCSSISSLQEVLLKELLHGNKLSEVIMLQLSTSRAFRFDLSKLMLPSFRGSVRLQHIIFKCLNNILKRTHAVDFTQTPPNSVSVSSSASSISFKMDSTLYPAGETLPDNFIDWLLNFIPPADATPKNVKIFLEVCYYASHLNSLRLSELIESHAFLDFIAHLQSNVRFLHWSACLNICVDLSNELNRDALPEMLLIGNRFFEQPDLFTGTVEILLNCMLFALREGCAYHIDKRSSDIEITQDSLPSGTIPCDKLIVNFFEKEDQFPKFITKFTRLVSLPPCGKLCYDLVMAPKFVEKMVRIFKLYQASLIIQIDALKFLKIVLTKALEYTPAGRPSKLVTPARLLESALGKQIKNTDEQHLLHVVSQLSKFLLANWSSSRPSSQLHVAAAGPTSLLETPLASASHSPPPSRKGHLGKVGNDSILIRQLCEDIASLNNKENGNNNNGRPLHDSDGFLVPRRLPSGC

SEQ ID NO: 8746 - protein, 440 aa, Tropheryma whipplei TW08/27
MPEVTFLLTDPGEGLVEAEIVSLRVTEGDAVDVNQIVVEVETAKSLVELPSPFKGVVRKLLVAVGELVKVGSPIMLIDTDETPPAGLPKTGKMPVSDVRDGGHDTAKNTHPRDTGSSKDIHDAFGKEDGREIDFGRNVLVGYGPCEDNARVRGDDITGRPSLDETLERPVAKPSVRKFAKELGVDLYGVKPTGIGGTITRRDVLNATSTQEEATTRVPVKGLRRQTAQNVTLSAFSVPHVSVFVDVDVTRTIELVDRLKRDPLYEQVRISPLLILSRAVTWAVKRSPIVNSTWSEQEILLHKSVNLGIAVATDRGLVVPNIKNAQCLSMLDLAKAIESLVDDARSSRIRPEDTLNGTITITNIGVFGVDSGTPILNVGESSIVFIGAIKPRPWVVNGEISVRRVATIGGSFDHRVMDGDTASRFLVNVASILEEPALLVE

SEQ ID NO: 8747 - protein, 161 aa, Pseudomonas aeruginosa PAO1
MSDSLLSIPCTTIKGEQKTLADFGGKALLVVNTASKCGFTPQYQGLEALWEKYRERGLVVLGFPCNQFGKQEPGDEGEISQFCELNYGVSFPLFRKIEVNGAGAHPLFVSLKKRAPGLLGSQGIKWNFTKFLIGRDGQVVKRYAPTTKPEELSSAIEALLE

SEQ ID NO: 8748 - protein, 403 aa, Pseudomonas aeruginosa PAO1
MQVSKSNKLANVCYDIRGPVLKHAKRLEEEGHRILKLNIGNPAPFGFEAPEEILQDVIRNLPTAQGYSDSKGLFSARKAVMQYYQQKQVEGVGIEDIYLGNGVSELIVMSMQALLNNGDEVLIPAPDYPLWTAAVSLAGGKPVHYLCDEQANWWPDLEDIKAKITPNTRAMVIINPNNPTGAVYSREVLEGMVELARQHNLVLFSDEIYDKILYDGAVHVSTASLAPDVLCLTFNGLSKSYRVAGFRSGWVAISGPKQRAQSYIEGLDILANMRLCANVPAQHAIQTALGGYQSINDLVLPPGRLLEQRNRAWELLNDIPGVSCVKPMGALYAFPRIDPKVCPIHNDEKFVLDLLLSEKLLIVQGTAFNWPWPDHFRVVTLPRVDDLEQAILRIGSFLKGYQQ

SEQ ID NO: 8749 - protein, 170 aa, Shigella sonnei
MFKPFSAEFFGTFWLVLGGCGSALISAAFPQLGIGFLGVALAFGLTVVTMAYAVGHISGAHFNPAVTLGLWAGGRFPAARVLPYIIAQVIGGIAAAAVLYGIASGKAGFDATTSGFAANGYGLHSPGGYALSACMLSEFVLSAFFVRSDRKTRSCGLCATGDWSGNHPVN

SEQ ID NO: 8750 - protein, 532 aa, Mesoplasma florum L1
MNVKKPVILAILDGWGIEEAGVGNAVANADQKFVKEMMGMYPWVKAHASGEWVGLPEGQMGNSEVGHIHLGAGRINMESLAKLNHEVKVDGFLTNEVLVDTFKYVKEHNSALHLMGLFSDGGVHSHMNHMISMYKAAVKFGLTNIKFDLITDGRDTAPKVAEQYINQLLQVIKDNNNIGEIASISGRYFAMDRDKRFERSAAAYITMTERKVDQPKFTDPIEYVKAAYENGLDDEMIVPAYNASVVDSELKANDAMIFTNFRPDRAIQMASIMTNNNYPAWNDEAFKDVEFIGDKIRFVSTMKYADSVTSQFIAYPPTPLTNTLGEYISSLGLKQLRIAETEKIAHVTFFFDGGNDYFKNGLAKPEEISLPHASIDLISSPKVATYDLKPEMSAVEITDKLLEEVKKDEFDLIVLNFANCDMVGHTGNNDATVKGVKVLDEQLKRIHDEFVLKHNGVMVITADHGNAEIMIDETGGPNKKHTTSLVPIIVTDKTIELSDFDPAIAKVAPTILDIMGLEIPKEMTQPSMIIKK

SEQ ID NO: 8751 - protein, 552 aa, Paxillus involutus
MSGKLATEYSSWKKLQQIYDAEHPRLILKELFSQDPHRFSKFSKEYVDPTDPNTTFLLDYSKNLVTQPILDTLLSLASEAQLETYRDKMFAGERINTSEDRAVLHVALRNFDDFKIQENGVEEVASVLAHMKEFSEAIRSGSWKGYTGKTINTIVNIGIGGSDLGPVMVTEALKPYAKRDLTALFVSNIDGTHLAETLRECDPERTLFIIASKTFTTQETITNAESARAWFLSFAKDKAHVAKHFVALSTNTKAVTAFGIDEANMFQFWDWVGGRYSLWSAIGLSIALYIGYDNFESLLKGAHGMDKHFKETPLESNLPVLLAVVGVWYNDFYGAQTHALLPYDQYLHKFADYFQQGDMESNGKFVTKSGERVDYQTGPIIWGAAGTNGQHSFYQLVHQGTKLIPADFLAPATSHNPIADSKHHRILLSNFFAQPEALAFGKTEEEVRKELGSGASEALVKSKVFEGNRPSNSIMFPLLTPRTLGALIALYEHKIFTQGVIWGINSFDQMGVELGKVLAKNILSQLGKPSDVTGHDSSTAGLIHYYQKNRKE

SEQ ID NO: 8752 - protein, 196 aa, Tephrosia villosa
DRVMAYKFHEDDHGEVIAEIRRSDLEPYLGLHYPATDIPQASRFLFKQNRVRMICDCHAKPVKVIQSEELRQSLCLVNSTLRSPHVCHTQYMANMGSIASLVMAIIVNGNDTTRLWGLLVCHHTSPRYVPFPVRYACEFLMQAFGLQLYMEIQLASQMAEKRILKTQTLLCDMLLRDAPLGIVTQSPNIMDLVKCD

SEQ ID NO: 8753 - protein, 196 aa, Brassica rapa
MGRKKLEIKRIENKSSRQVTFSKRRNGLIEKARQLSVLCDASVALLVVSASGKLYNFSAGDNLVKILDRYGKQHADDLKALDLQSKAPKYGSHHELLELVESKLVESNSDVSVDSLVQLEDHLETALSVTRARKTELMLKLVDSLKEKEKLLKEENQGLASQMEKNNLAGAEADKMEMSPGQISDINRPVTLRLLY

SEQ ID NO: 8754 - protein, 416 aa, Methanothermobacter thermautotrophicus str. Delta H [sequence omitted]

SEQ ID NO: 8755 - protein, 349 aa, Agrobacterium tumefaciens str. C58
MVPGRWRLWSWGFPAAFCKEMNLHRLAWHNAERDESELHDSLVLALLDSGETVMLQDWNRDYIFVANLPDVWKLPADSHPTDENLFGNDLSVRLAELKRDMNTAGSRGMLEVNAGNDRVFQFQVHSTFNQSNQVVMKTTIREVTAERRREQLLRSLLREVSHRSKNLLAIIQSLAGQTARFSLTKDDFLRKFRGRLHALAQSQDLITDSDWRGARIFELLRQQFDLYVPEYPNLIHIEGENLLLNPNGALYIGLAFHELVVNTVSHSGNLAYHPPISLQCRQDGDFYIVEWNEPMMPSKEPAEARRGSFGSVVLEKVVPSALGGVAEYKLTPERIVYSLKFPSGDAAVA

SEQ ID NO: 8756 - protein, 564 aa, Plasmid NR1
MSTLKITGMTCDSCAVHVKDALEKVPGVQSADVSYAKGSAKLAIEVGTSPDALTAAVAGLGYRATLADAASVSTPGGLLDKMRDLLGRNDKTGSSGALHIAVIGSGGAAMAAALKAVEQGARVTLIERGTIGGTCVNVGCVPSKIMIRAAHIAHLRRESPFDGGIAATTPTIQRTALLAQQQARVDELRHAKYEGILEGNPAITVLHGSARFKDNRNLIVQLNDGGERVVAFDRCLIATGASPAVPPIPGLKDTPYWTSTEALVSETIPKRLAVIGSSVVALELAQAFARLGAKVTILARSTLFFREDPAIGEAVTAAFRMEGIEVREHTQASQVAYINGEGDGEFVLTTAHGELRADKLLVATGRAPNTRKLALDATGVTLTPQGAIVIDPGMRTSVEHIYAAGDCTDQPQFVYVAAAAGTRAAINMTGGDAALNLTAMPAVVFTDPQVATVGYSEAEAHHDGIKTDSRTLTLDNVPRALANFDTRGFIKLVVEEGSGRLIGVQAVAPEAGELIQTAALAIRNRMTVQELADQLFPYLTMVEGLKLAAQTFNKDVKQLSCCAG

SEQ ID NO: 8757 - protein, 572 aa, Agrobacterium tumefaciens str. C58
MPRPGNRLKETISALRRRSANFFPTASIGTYLVVMATVITLPLILFVGYLMLRLEAEKRDDLQRETIEDVRVVSRNIDRRLQEIATSLNLLSQFPELENGNLAAFQGRVAESLKREGLYALLATKDGQQRLNTRVPYGQPLGKIPAEANLAKAIESRRITVSDLFFGSTSKEWVFNITMPLDPELGSAGDALILTQNASDLSRLIPTENLPRHWAVAIIDGTNRVVVSSAQDEAEVGKPFVNPAILSEMQAFSGNFFDGKGNLYAYAQLPGWQWKTVMWGPLAASQAALIDTWRQMMIGSLVLVLIAIGGAYLVGRQLRSSIRDLTHMAERIGEGEIVAPVDTKIKEANQVAIALSNASFDRSQSEERLQLLLHELVHRSKNILTLVQAMIRQLGRENKSIPEFQKEVDHRLRGLGMSIRALAEVQWQGLPIRKLIETHLDVFGTVVERFRLEGDDFMLSPEAAQNFGLVVHELTTNSIKYGALSVPPGKITVSWKALEKDGRQMLHLVWTETGGPPATEPSRKGFGTTVIKRHAEGAFGGNVTTEYRETGFEWSLEAPMRYFIPKRTEQTH

SEQ ID NO: 8758 - protein, 206 aa, Lonchocarpus phaseolifolius
RVMAYKFHEDDHGRVIAEVKKPGLEPYLGLHYPATDIPQATRFLFMKNKVRMIVDCRAKHVKVLQDKKVPFDLTLCGSTLRAPHSCHLQYMENMNCSASLVMAVVVNDNEEDGDSDAVQPQKRKRLWGLVVCHNSIPRFVPFPLRYACEFLAQVFAIHVNKELELEYQIVEKNILRTQTLLCDMLMRDAPLGIVTQRPNIMDLVKC

SEQ ID NO: 8759 - protein, 202 aa, Cicer arietinum
MNPEYDYLFKLLLIGDSGVGKSCLLLRFADDSYLDSYISTIGVDFKIRTVEQDGKTIKLQIWDTAGQERFRTITSSYYRGAHGIIVVYDVTDQESFNNVKQWLNEIDRYASENVNKLLVGNKCDLAANKVVSSETAKAFADEIGIPFMETSAKNATNVEQAFMAMAAEIKNRMASQPANNARPPTVQIRGQPMNQKSGCCST

SEQ ID NO: 8760 - protein, 197 aa, Cicer arietinum
MSGSRFIKCVTVGDGAVGKTCLLISYTSNTFPTDYVPTVFDNFSANVVVDGSTINLGLWDTAGQEDYNRLRPLSYRGADVFLLAFSLISRASYENIAKKWIPELRHYAPGVPIILVGTKLDLRDDKQFFQDHPGAVPITTAQGEELRKLIGAPVYIECSSKTQKNVKAVFDAAIKVVLQPPKQKKTKRKGQKACSIL

SEQ ID NO: 8761 - protein, 176 aa, Zea mays
  unsure (1)..(176): unsure at all Xaa locations
MAATIQYNRSNPAVKRILQEVKEMQSNPSPDFMSLPLEEDIFEWQFAILGPRXQLPSDYPFKPPSFMLLTPSGRFEIQKKICLSISNYHPEHWQPSWSARTALVALTAFMPTNPGGALGSLDYKPEDRRALAIKSREVPPKFGSPQRQKLIDEIHEQMLSKAPPIPQTLPNVPNEE

SEQ ID NO: 8762 - protein, 328 aa, Zea mays
MARPPCCDKEGVKKGPWTPEEDLVLVSYIQDHGPGNWRAVPTRTGLMRCSKSCRLRWTNYLRPGIRRGNFTEQEEKLIVHLQALLGNRWAAIASYLPERTDNDVKNYWNTHLKRKLQAGSGDGDGDGAAKPPAHRPPPSNSKGQWERRLQTDINLARRALREALTPLGDLKPQPQPQPQPQRDGAGVGIVGGDSPAASSLSSQCSPPPAPAALGTYVLTADNVSRMLDGWAGLNGKRRGGAPGTPGGAETASTGSSSEVSYGGGTAVVAPAAGGPVFEYETKPPAAPFQLMMPLSAIESWLFDDDTHFHRPVQSASLLDAAPMDYYLL

SEQ ID NO: 8763 - protein, 145 aa, Glycine max
  unsure (1)..(145): unsure at all Xaa locations
MKFSMTGSSQAASTFWWIWAFWVWIRPGGVDVGKDNFHFGRKMNRQILQAQEHLKKQPEXESNLERRHKEESEVIRSXIALQSPNSETIKVISELEKEISAFTQNRFVELRKKQLALLLHWGGPYLLFFMENQWYLGFLPKPNLF

SEQ ID NO: 8764 - protein, 409 aa, Glycine max
MAAAPAATFAIGTTGSLGQRGSSLPQSKSFGLKFNSLNHLKSFCGLKAMSSVRCESESSFFGNKTGAALRASFASKAQKENNHNSQPQASYKVAVLGAAGGIGQPLSLLIKMSPLVSNLHLYDIANVKGVAADISHCNTPSQVRDFTGASELPNCLKDVNVVVIPAGVPRKPGMTRDDLFNINAGIVRDLVSAVADYCPDAFVQIISNPVNSTVPIAAEVLKQKGVYDPKKLFGVTTLDVVRANTFVAQRKNLKLIDVDVPVVGGHAGITILPLLSKTRPSASFTDEEIDELTVRIQSAGTEVVEAKAGTGSATLSMAYAAARFVESSLRALDGDGDVYECSFVESNLTDLPFFASRVKLGRTGVEALIPSDLQGLTDYEQKALEALKPELKASIEKGIAFAQKQTVAA

SEQ ID NO: 8765 - protein, 280 aa, Zea mays
  unsure (1)..(280): unsure at all Xaa locations
MNLAALTSTAVRPHAHGLMPLNLPSAASSSLRRSLFASLRKKISPMASAPASASAALSTAAPADNGAAKPAEQRPVQVAKRLEKFKTTIFTQMSMLAVKHGAINLGQGFPNFDGPDFVKEAAIEAIKAGKNQYARGYGVPELNSAVAERFLKDSGLQIDPDKEVTVTSGCTEAIAATILGLINPGXDEVILFAPFYDSYEATLSMAGANVKAITLRPPDFAVPLEELKAAVSKNTRAIMINTPHNPTGKMFTREELEFIADLCXENDVLLFADEVYDQLA

SEQ ID NO: 8766 - protein, 490 aa, SYNECHOCOCCUS SP. WH 8102
MTTAFHSPTSRRRKTLQEANLLEGPLMLIKSIRGFSSNRAMTWLACAPLALMGLGIFTLSAKAEELPDLNAAFLANNLWLLVATILVIFMNAGFAMVEAGMCRQKNAVNILAKNLFVFALAVTAYWFVGYSFMYGDAAIDGWLYFGGLFFDPTVTAETISDAGLVPTVDFLFQAAFAGTAATIVSGLVAERIKFGEFVVFALILTAFIYPVAGSWEWNGGWLNSVGNAEFIDFAGSSIVHSVGAWAGLVGAALLGPRIGKYVGGNVQAIPGHNMSIATLGALILWIGWYGFNPGSQLAMDQWVPYVAVTTTLGAAGGAIGATVISTITSKKPDLTMIINGILAGLVSVTAGCGNLTLTGSWVAGLVGGIIVVFSVSALDSAGIDDPVGAFSVHGVCGVWGTLVIGLWGFDVQGDGSPLGLLVGGGIEQLGIQALGTAAYAIWTVVTCFIAWQIIGALFGGIRVTEQEETEGLDIGEHGMEAYAGFSTTNN

SEQ ID NO: 8767 - protein, 79 aa, Glycine max
  unsure (1)..(79): unsure at all Xaa locations
MATAMIAWAAVTTADRADPRMHAPFTGLKSMAGFTTRKTNHDISSIATNAVRVLCMHEWTPVLMKKYETLYXLPDLDDP

SEQ ID NO: 8768 - protein, 614 aa, Eremothecium gossypii
MTKQFTHTADEQRSSVVYSNSIGKGGLFQPRDYIGAKTTTAAEDEVTNLLGDLEQCNGRYVPMQAHGGHDESDLTPFGTPSHRRTLSMQQSLLEQERELLIDNKLYDARHGSDCAISLVASECGSGNGALLSEQEAQNVMSAWEHAIESGKTITTSYKRESTVLTKNALPLVATFILQNSLSLASVFSVSHLGTKELGGITLGSMTANITGFAAIQGLCTCLDTLCSQAYGARNYTLVGLLLQRCCIISLLVFAPVVWLWVCYSEQVLGYLVSDPELCLFAAKYLRIVAAGLPAFILFECGKRYLQCQDIYHASTIVLLFCAPANAFLNYLLVWNSKVGIGYLGAPVSVVLNYWLMVLGLLLYTIFTKSEIQPRKCWTGWIKPHQIFKNYDKMLGLALPGIIMVEAEFLGFEILTIFASHISVNALAAQSIIATIASLAYQIPFSISISTSTRVANFIGASLYRSCIITCKVSLLLSFGVSLTSMLAIFVFRSNLAHILFLNEAEVIMLIETTLPILAVMQIFDSFNASTAGCLRGQGQQKDWWLLSNVFAFYCIGIPMSYFLSFHCDLGVKGLWYGITCALIVMSVCQSYAVFNCSWEELVKAANLRTSEDVF

SEQ ID NO: 8769 - protein, 402 aa, Oryza sativa
MLAAVMDYFRSCWGPRSPAGHRVRGSDVAGRQDGLLWYKDAGQLVTGEFSMAVVQANNLLEDQSQVESGALSMAEPGPQGTFIGVYDGHGGPETARFINDHMFHHLRTRRGFATEHKCMSTDVIRKAFQATEEGFLSLVSKQWSLKPQIAAVGSCCLVGVICSGTLYVANLGDSRAVLGRFVKSTGEVVATQLSSEHNACYEEVRQELQASHPDDPQIVVLKHNVWRVKGLIQISRSIGDVYLKRPEYNREPLHSKFRLRETFKRPILSSEPAIAVHQIQPNDHFVIFASDGLWEHLSNQEAVDLVQNNPRNGIARRLVKVAMQEAAKKREMRYSDLKKIDRGVRRHFHDDITVIVVFLDSNAISKANWSRGPSVSLRGGGVTLPANSLAPFSAPTVLSSTY

SEQ ID NO: 8770 - protein, 518 aa, Saccharum hybrid cultivar H65-7052
MAGGGMAALGVKTERAAQYKGRMTLAVAMTCLVAAVGGAIFGYDIGISGGVTSMDPFLEKFFPVVFHRKNSGGKNNYCKYDNQGLAAFTSSLYLAGLVASLVASPVTRNYGRKASIVCGGVSFLIGAALNVAAVNLAMLILGRIMLGVGIGFGNQAVPLYLSEMAPAHLRGGLNIMFQLATTLGIFTANLINYGTQNIKPWGWRLSLGLAAAPALLMTLAGLFLPETPNSLIERGRVEEGRRVLERIRGTADVDAEFTDMVEASELANTIEHPFRNILEPRNRPQLVMAVCMPAFQILTGINSILFYAPVLFQSMGFGGNASLYSSVLTGAVLFSSTLISIGTVDRLGRRKLLISGGIQMIVCQVIVAVILGAKFGADKQLSRSYSIAVVVVICLFVLAFGWSWGPLGWTVPSEIFPLETRSAGQSITVAVNLLFTFAIAQAFLSLLCAFKFGIFLFFAGWITVMTVFVCVFLPETKGVPIEEMVLLWRKHWFWKKVMPVDMPLEDGWGAAPASNNHK

SEQ ID NO: 8771 - protein, 396 aa, Chloroflexus aurantiacus
MTLSLSAERVRQFGTTIFAEISALAVQCGAVNLGQGFPDFAGPEWVKQAAIEAITADANQYAPYIGVPRLREAIAATWQAQGWRTVDPVTEVTVTSGATEALFGAVQALVNPGDEVILFEPFYDAYLPDVTMAGGIPRFVRLHPPGDGHATWWFDPAELQAAFSPRTRLLMLNTPHNPTGKVFRRDELEQIADLCQTYDVIVISDEVYDQLVFAGATHIPIATLPGMWERTLTINSLGKTFSLTGWKIGYAVGPASLNAALRAAHQWITFATATPLQFAAAAALEGALHNGYYEQFRAEYTARYRLLEEILVSVGFPVLPTEGSYFLMADITPTGFHDDVTFCRYLTQEVGVAAIPPSAFYARQHDLPLLARFCFAKRPETLRAAQQRLLAWRQRS

SEQ ID NO: 8772 - protein, 494 aa, Xylella fastidiosa Temecula1
MSRKHAFQFLDLPRQMPQRIPVELRTSGDWRELYGKFDKGEAQYQAGRCLDCGNPYCSWKCPVHNAIPQWLQLVQENRIDEAAALCHATNPLPEVCGRVCPQDRLCEGSCTLEEFGAVTIGAVEKYIVDTALQQGWRPDLSHVQPTGWRVAVVGAGPAGLACADRLARAGVQAVVYDRYEQIGGLLQFGIPSFKLDKAVMSTRRQVLEGMGVEFRLGVEIGKDLGIEALLEDYDAVFLGVGAYRYTDGGLPGQDLKNVLPALPFLVQNGRIISGNDPYGRPIAGWEDQVQLPDVAGKSVVVLGGGDTGMDCVRSAIRLGATKVTCIYRRDEANMPGSAREVANAREEGVRFLFNRQPLSIQSGTDKQAIGVTVVETKLAEPDANGRRNAVPIQGTEAVLEADVVIIAFGFSPMLLEWLTAQGVQASSNGRIVVALSDTGDRLTYQTTHPKLFAGGDCVRGADLVVTAVAEGRDAAESIVRWLRATAQVMDVAVI

SEQ ID NO: 8773 - protein, 497 aa, Emericella nidulans
MSDLFTTIETPVIKYEQPLGLFINNEFVKGVEGKTFQVINPSNEKVITSVHEATEKDVDVAVAAARAAFEGPWRQVTPSERGILINKLADLMERDIDTLAAIESLDNGKAFTMAKVDLANSIGCLRYYAGWADKIHGQTIDTNPETLTYTRHEPVGVCGQIIPWNFPLLMWSWKIGPAVAAGNTVVLKTAEQTPLSALYAAKLIKEAGFPAGVINVISGFGRTAGAAISSHMDIDKVAFTGSTLVGRTILQAAAKSNLKKVTLELGGKSPNIVFDDADIDNAISWVNFGIFFNHGQCCCAGSRILVQEGIYDKFVARFKERAQKNKVGNPFEQDTFQGPQVSQLQFDRIMEYINHGKKAGATVATGGDRHGNEGYFIQPTVFTDVTSDMKIAQEEIFGPVVTIQKFKDEAEAIKIGNSTDYGLAAAVHTKNVNTAIRVSNALKAGTVWINNYNMISYQAPFGGFKQSGLGRELGSYALENYTQIKTVHYRLGDALFA

SEQ ID NO: 8774 - protein, 207 aa, Pongamiopsis amygdalina
RVMAYKFHEDDHGEVIAEVKKPGLEPYLGLHYPATDIPQATRFLFMKNKVRMIVDCRAKHVNVLQDKKVPFDLTLCGSTLRAPHSCHLQYMENMNCSASLVMAVVVNDNDEDGDSDAVQPQKRKRLWGLVVCHNTTPRFVPFPLRYACEFLAQVFAIHVNKEIELEYQIIEKNILRTQTLLCDMLMRDAPLGIVSQSPNIMDLVKCD

SEQ ID NO: 8775 - protein, 497 aa, Emericella nidulans
MSDLFTTIETPVIKYEQPLGLFINNEFVKGVEGKTFQVINPSNEKVITSVHEATEKDVDVAVAAARAAFEGPWRQVTPSERGILINKLADLMERDIDTLAAIESLDNGKAFTMAKVDLANSIGCLRYYAGWADKIHGQTIDTNPETLTYTRHEPVGVCGQIIPWNFPLLMWSWKIGPAVAAGNTVVLKTAEQTPLSALYAAKLIKEAGFPAGVINVISGFGRTAGAAISSHMDIDKVAFTGSTLVGRTILQAAAKSNLKKVTLELGGKSPNIVFDDADIDNAISWANFGIFFNHGQCCCAGSRILVQEGIYDKFVARFKERAQKNKVGNPFEQDTFQSPQVSQLQFDRIMEYINHGKKAGATVATGGDRHGNEGYFIQPTVFTDVTSDMKIAQEEIFGPVVTIQKFKDEAEAIKIGNSTDYGLAAAVHTKNVNTAIRVSNALKAGTVWINNYNMISYQAPFGGFKQSGLGRELGSYALENYTQIKTVHYRLGDALFA

SEQ ID NO: 8776 - protein, 284 aa, Xylella fastidiosa Temecula1
MPHVTLLPSPSQIAFIGGGNMARSLIAGMIRQGAPSTSICVIEPIAALRDALIADFKIKAVTTATEAATDTSTWVLAVKPQVMPDVCATLPLPVQPNTPLVISIAAGITTCKLKHWLGDTCAIVRAMPNTPALLGAGVTGLFATSQTTGTQRTIAEELFNSVGKTLWITEEALMDAVTAVSGSGPAYAFLLAEAMETAAIMQGLSTANARTLVQQTLLGAARMMTESGETPAALRHRVTSPHGTTEAAITTFQENDFQTLVAKAIDAATRRARALGKINDTDPT

SEQ ID NO: 8777 - protein, 145 aa, Pongamiopsis amygdalina
VMAYKFHEDDHGEVIAEITKPGLEPYLGLHYPATDIPQAARFLFMKNKVRMIVDCHAKHVKVLQDEKLPFDLTLCGSTLRAPHSCHLQYMANMDSIASLVMAVVVNDNEEDGDSCDAVQPQKRKRLWGLVVCHNTTPRFVPFPLR

SEQ ID NO: 8778 - protein, 199 aa, Triticum aestivum
SRVDKLIKLRGELNPLQEASGGKKISINDLVIKAAALALRKVPECNSSWMNDFIRQYHNVNINVAVQTEHGLFVPVVRDADKKGLGTIGEEVKQLAQRARDNSLKPQDYEGGTFTVSNLGGPFGIKQFCAIINPPQSAILAIGSAEKRVIPGSADGLYEFGSYMSVTMSCDHRVIDGAIGAEFLKAFKGYIENPTTMLL

SEQ ID NO: 8779 - protein, 426 aa, Clostridium cellulolyticum
MIRKEMIAMLLAGGQGSRLGVLTKNVAKPAVLYGGKYRIIDFSLSNCTNSGIDTVGVLTQYQPLKLNAHIGIGKPWDMDRIEGGVTILSPYLKAEMGEWFKGTANAVYQNIQYIDKYSPHYVIILSGDHIYKMDYSKMLDFHKENHADATISVINVPYEEASRYGIMNCHENGKIYEFEEKPKNPKSTLASMGVYIFTWSTLREYLIKDNECSDSVNDFGKNIIPAMLGDGKSMWAYQYSGYWRDVGTIQAFWESSMDLVSRVPQFNLFDPEWRIYTPNPVKPAHYIASSACVKKSIIAEGCSVHGTVINSILFPGAYIEEGAVIQDSIIMSNSRVCKNAYINRSIISEQAIIGEKARLGEGPDVPNEYKPGIYDSGITVVGEKSSIPADPVIGKNVMIDIGASAVDFTSLNVQSGKSVFKGGVAE

SEQ ID NO: 8780 - protein, 533 aa, Schizosaccharomyces pombe
MKRFFSKLFSKSPTSGRVPSPDSDYSEEEQRLLAEENGYFQDSNEYVEPNIPAVYGSMIPVAQQLQQHHVHTPGESFADNASGYPVIKHELSELLRLGSPTVIAYLLQSSEQFSTVFTLGHLGKEYLAASSLSTMTAAISAFSIFQGVISSLDTLATQAFGANKPYNVAIYLQRCLLILAVLHIPVALIWLNLEHILIFLHQDPMVAHLCGRYMRVFILAAPGYAVFEALKRYLQAQGIFTPITYVLCFAAPLNILLNYLLVWHPTIGFGFLGAPVAVATTFWFQSICLILYICFSSTPIPWPGFSRQALKNLSPMLHFSFHGMLMIVTEWAAYEMTSLGAGYLGTAPLASQSILLTSTSLLFQIPFAFAVASSTRVGHLIGSGRANLARLCSRVAYSLALCISIFDGSLIFCFRDVWGSLFTSDPEVLAVVKDIFPILSLFIVTDGLNAVGGGLLRGTGKQYIGGLISIGSSYLFALPVTVFVVVYFNTGLKGIWCGMILSSVTAITCQFTVLFNTDWHRVLQEARHRLTHV

SEQ ID NO: 8781 - protein, 151 aa, Pongamiopsis amygdalina
RVMAYKFHEDDHGEVIAEVKKPGLEPYLGLHYPATDIPQAARFLFMKNKVRMIVDCRAKHVNVLQDKKVPFDLTLCGSTLRAPHSCHLQYMANMDSIASLVMAVVVNDNEEDGDSSDAVQPQKRKRLWGLVVCHNTTPRFVPFPLRYACEF

SEQ ID NO: 8782 - protein, 211 aa, Paxillus involutus
MAEGSNYDFLFKVVLIGDSGVGKSNLLSRFTRNEFNLDSKSTIGVEFATRSINVDSKTVKAQIWDTAGQERYRAITSAYYRGAVGALLVYDISKHATYVNVTRWLKELRDHADSNIVIMLVGNKSDLKHLRAVPTEEAKNFSAENELSFIETSALDASNVESAFQTILTDVYRIVSTKSLEQSSDPIRAPTSDTIPVAIDSSAPTKNGSCC

SEQ ID NO: 8783 - protein, 295 aa, Xylella fastidiosa 9a5c
MTQRKGIILAGGAGTRLYPITQGIGKQLLPVYDKPMIYYPLSVLMLAGIRQVLVITMLHEQPLFQRLLGDGTQWGMEICYAVQASPDGVAQSYLIGRAFVDDKPSCLILGDNIFYGHGLTDTLCHADARTVGATVFGYWVSDPERYGVAEFDGDGRVINIEEKPAQPRSNYAVTGLYFYDGRAPAFAAELTPSARGELEITDLNRRYLAEGALHLEALGRGYAWLDTGTHQSLQDASNFIGTIQTRQGLQVCCPEEVAFWKGWIDATHLERLAAPLAKNAYGQYLLNLAQRGRSL

SEQ ID NO: 8784 - protein, 124 aa, Pongamiopsis amygdalina
MAYKFHEDDHGEVIAEITKPGLEPYLGLHYPATDIPQAARFLFMKNKVRMIVDCHAKHVKVLQDEKLPLDLTLCGSTLRAPHSCHLQYMANMDSIASLVMAVVVNDNEEDGDSSDAVQPQKRKR

SEQ ID NO: 8785 - protein, 80 aa, Triticum aestivum
  unsure (1)..(80): unsure at all Xaa locations
VGCREKEYDYLSIKDGKQMFKLSSDKELHQYFPEEPPEWDVKDGGVLFQKGKESQPCKEIRGGRVINQTFGXGRELERIV

SEQ ID NO: 8786 - protein, 170 aa, Callerya megasperma
QATRFLFMKNKVRMIVDCRAKHVKVLQDKKFPFDLTFCGTTLRAPHSCHLQYMENMNAIASLVLAVVVNDNDGYEDSSDDVQPQKRKRLWGLVVCHHITPRFVPFPLRYACEFLAQVFAIHVSKEIELEYQIIEKNILRTQTLLCDMLMRDAPLGIVSQSPNIMDLVKCD

SEQ ID NO: 8787 - protein, 238 aa, Zea mays
MPSQSTHTSSSLSSSTAPILPCSSAAALFRSVMAAVATETPFHVLAVDDSLPDRKLIERLLKTSSFQVTTVDSGSKALQFLGLHDQDSTVPPVHTHQLDVAGNQDVAVNLIITDYCMPGMTGYDLLKKIKESSSLRDIPVVIMSSENIPSRINRCLEEGADEFFLKPVRLSDMNKLKPHILKSRCNQEQHQQSDSHSGECRNPTISSSSSSDSINNRKRKGAGTEEILPQLANRSRHS

SEQ ID NO: 8788 - protein, 511 aa, Agrobacterium tumefaciens str. C58 (Cereon)
MRREPIMHEPLTAAEYKAIASDLQFPANAFIDGAFRPAGSGKTFKTINPATGETLADISACDVSDVDYAVGKARAAFDDGRWRLLPPGERKAILLTFAKLLEQHRHELAVMESLDSGKPVSECQTVDIPDTIHTIRWHAELIDKLYDNTAPVGSNALALVVREPVGVVGCVLPWNFPLLMLAWKIGPALASGCSVIVKPAEETTLTTLRVAELAHEAGIPAGVFNVVPGGGKEVGEPIGMHMDVDMVAFTGSTPTGRRFLRYAADSNLKRIVLECGGKNPAVVLDDAEDLDLVAEQVVNGAFWNMGENCSASSRLIVHAKIKDELLQRIGAYMREWRMGDPLDPQNRVGALVSKAHFDKVHSFLEDVKAENLTIVHGGKTEKGIFIEPTVVDAVPPASRLFREEIFGPILSVTTFNTLAEAVALANDTNYGLAASVYTGSLRKAIKLSREIRAGVVTVNCFGEGDATTPFGGYKESGFGGRDKSIFAHDNYCELKTIWIDVSDRSVDETVR

SEQ ID NO: 8789 - protein, 101 aa, Zea mays
  unsure (1)..(101): unsure at all Xaa locations
CRERMRRNGRHDRFRELGSALQPGKPVNAHKAAILNDATRMAIHLLSESHPLNETNDSLQEKIKELIAEKDDLGYXQHKLELVKESLYHLMKLMAQAPAYM

SEQ ID NO: 8790 - protein, 492 aa, Agrobacterium tumefaciens str. C58
MNGGSRPMTSPLQHLQQSGRLKKFYIDGKWVLPSGSDKVAVINPATELEFAEIALGNDEDVALAVAAARGAFAGWARTGPADRSELLNRVHQLMQQRLELLAQALTMEMGAAINYARSVQVPLAAEHIKVARDNAASYSFLSQRGHTAILREPIGVCGLITPWNWPLYQITAKVGPALAAGCTVVLKPSELSPLSALLFAEIIEDAGFPPGVFNLVNGEGTIVGAGLSAHPDVDMISITGSTRAGILVAQAAAPTVKRVAQELGGKSPNIILADADMTRAVPLGVAAAFRNLGQSCSAPTRMIVPRSHQKHIEELAAAAALEIVVGDPLSEHTTHGPVANHAQFDRIQRMISIGMDEGAKLVVGGTGRPDGLDTGFYVRPTIFSDVDPKMQIAQQEIFGPVLSIISYDTLEEAIEIANDTVYGLGAHVQGTDLQTVRIVAEQIRSGQVHLNYPAWDPNAPFGGYKQSGNGREYGTEGMEEYLEIKSILGFYP

SEQ ID NO: 8791 - protein, 369 aa, Escherichia coli K12
SYYHHHHHHLESTSLYKKAGLKIKAVGAYSAKQPLEPMDITRREPGPNDVKIEIAYCGVCHSDLHQVRSEWAGTVYPCVPGHEIVGRVVAVGDQVEKYAPGDLVGVGCIVDSCKHCEECEDGLENYCDHMTGTYNSPTPDEPGHTLGGYSQQIVVHERYVLRIRHPQEQLAAVAPLLCAGITTYSPLRHWQAGPGKKVGVVGIGGLGHMGIKLAHAMGAHVVAFTTSEAKREAAKALGADEVVNSRNADEMAAHLKSFDFILNTVAAPHNLDDFTTLLKRDGTMTLVGAPATPHKSPEVFNLIMKRRAIAGSMIGGIPETQEMLDFCAEHGIVADIEMIRADQINEAYERMLRGDVKYRFVIDNRTLTD

SEQ ID NO: 8792 - protein, 473 aa, Pyrobaculum aerophilum str. IM2
MNVRAQITMAMNLDKCIGCHTCSVTCKNVWTNRAGAEYMWWNNVETRPGPGYPRQWEDQNKYNGGWALDGGKLKLKIELTKNYKPPSLKDYYEPWTYDYEALFSDKQTDQQPVARPISLITDEPMDVAYGPNWNDDLAGTDYILEDPNLDGLQREIYAQFKDVFMMYLPRICNHCLNPSCLAACPRKAIYKREEDGIVLIDQNRCRGYRYCVAACPYKKVYYNWKTGKSEKCILCYPSVEAGQPTVCSLTCVGKIRYMGVLLYDADKVLDVAATPDPAQLVRRFIDEVLLDPFDPAVIEAARKNGIPDYWITAAQRSPVYKIVKKWKVGFPLRPEFRVLPMVFYVPPLSPVVTTFEKTYGAQIADIFPKVSELRIPIKYLANMFTGGDTALIESALKKLIAVRIYERAKNVAEPGLADKAKAALAEAGLSEADAEEMYRLFALARYEDRFVIPTNPKRYAAQPQIMRGTVGLP

SEQ ID NO: 8793 - protein, 642 aa, Glycine max
MLLRPEGWLGLLAVMEPVVVGLGVGLVVLNEAGLGLLIDPLLVLIDDSDRVEIRGNGERGFEGDVGFFVVGFCNQQATTLLLLALHVERSDLIDIEAVEGLKDALDLDLRGRRNGLESDFVDVGEAVRHQKLYGEFLFAAAMCGILAVLGCVDNSQTKRARIIELSRRGPDWSGIHCYEDCYLAHQRLAIVDPTSGDQPLYNEDKTVIVTYEEHGEEFVNMLDGMFAFILLDTRDKSFIAARDAIGITPLYLGWGHDGGLRRWYNPPWFSEDIPSTPYDPTLLRETFERAVVKRMMTDVPFGVLLSGGLDSSLVAAVVNRYLAESESARQWGSQLHTFCIGLKGSPDLKAAKEVADYLGTRHHELYFTVQEGIDALEEVIYHIETYDVTTIRASTAMFLMSRKIKALGVKMVLSGEGSDEIFGGYLYFHKAPNKKEFHEETCRKIKALHLYDCLRANKSTAAWGVEARVPFLDKEFINVAMSIDPEWKMIRPDLGRIEKWVLRNAFDDDKNPYLPKHILYRQKEQFSDGVGYSWIDGLKDHANKQVTDATMMAANFIYPENTPTTKEGYLYRTIFEKFFPKNAAKATVPGGPSVACSTAKAVEWDAAWSKNLDPSGRAALGIHDAAYDAVDTKIDEPKNGTL

SEQ ID NO: 8794 - protein, 171 aa, Callerya australis
PQATRFLFMRNKVRIIVDCRAKHVKVLQDKKIPFDLTFCGSTLRAPHSCHLQYMENMDASASLVLAVVDNDNDEYEDSSDDVQPQKRKRLWGLVVCHHISPRFVPFPLRYACEFLAQVFAIHVSKEIELDYQIIEKNILRTQTLLCDMLMRDAPLGIVSQSPNIMDLVKCD

SEQ ID NO: 8795 - protein, 275 aa, Schizosaccharomyces pombe
MLGSFVKLNNGLKCPQFAYGSYMVNRTKCFDSVYAALQCGYRHIDSAQMYHNEADCGRAILKFMEETGTKREDIWFTSKLNDLSGYKSTLSSIDASVKACGLGYIDLFLLHSPYGDRIESWKALEKGVEEGKLRAIGVSNFGPHHIQELLDSHPKIIPCVNQIELHPFCSQQKVVDYCESKGIQLAAYAPLVHGEKFGNKQLLAIASKYNKSEAQIMIRYCLQRGFIVLPKSSTPRRIKENGDVFDFEISKEDMEKLYNLDEDYHSDWNPCVSPL

SEQ ID NO: 8796 - protein, 632 aa, Glycine max
  unsure (1)..(632): unsure at all Xaa locations
MALSRLRHPLFSRSLRILSSPARSLSRTSNSSIFTLGGDHHNIIRPAFCSRLTGIHDRSLKSKWTDVKYFSSSDSSHEVLGMPALSPTMTQGNIAKWRKKEGEKIEVGDVLCEIETDKATLEFESLEEGFLAKILVPEGSKDVPVGQPIAITVEDENDIQNVPASGGGXRLRVEEKKPTLGGVSDERKSESTSSVVNASELPPHLLLEMPALSPTMNQGNIAKWRKQEGDKIESXVGNILCEIETDKATLEXGFESLEEGYLAKILAPEGSKEVAVGHSIAITVEDASDIEAIKNSVSSSTNQQKAPQRGTKSEVKAQKNNITRISPAAKLLIAEYGLDAPTLNATGPYGTLLKGDVLSAIKSGKLSPKPASSKEKALPSQSHQQVAASQESKSDLKKSHAYEDVPNSQIRKAIAKRLLDSKQNTPHLYLSSDVILDPLLSLRKGLKEQYDVKVSVNDIIVKVVAAALRNVPEANAYWNVETGEVVLNDSIDISIAVATEKGLMTPIIKNADQKTISAISSEVKELAAKARAGKLKPHEFQGGTFSISNLGMFPVDKFCAIINPPQACILAVGRGNKVVEPVIGTDGIEKPSIATKLSLTLSADHRVFDGKVGGAFLSALQSNFSDIRRLLL

SEQ ID NO: 8797 - protein, 494 aa, Paxillus filamentosus
KLQQIYDAEHPRLILKELFAQDPDRFSKFSKEYVDPTDPNTTFLIDYSKNLITQPILDTLLSLASEAELETYRDKMFAGERINTSEDRAVLHVALRNFDDFKIQEKGVEEVASVLAHMKEFSDAIRSGSWKGYTGKTINTIVNIGIGGSDLGPVMVTEALKPYAKRDLTALFVSNIDGTHLAETLRECDPERTLFIIASKTFTTQETITNAESARDWFLSFAKDKAHVAKHFVALSTNTKAVTAFGIDGANMFQFWDWVGGRYSLWSAIGLSIALYIGYDNFESLLKGAHGMDKHFKETPLESNLPVLLAVVGVWYNDFYGAQTHALLPYDQYLHKFADYFQQGDMESNGKFVTKNGERVDYQTGPIIWGAAGTNGQHSFYQLVHQGTKLIPADFLAPATSHNPIADSKHHRILLSNFFAQPEALAFGKTEEEVRKELGRGASEALVKSKVFEGNRPSNSIMFPLLTPRTLGALISLYEHKIFTQGVIWGINSY

SEQ ID NO: 8798 - protein, 348 aa, Kluyveromyces marxianus
MAIPETQKGVIFYEHGGELQYKDIPVPKPKPNELLINVKYSGVCHTDLHAWQGDWPLDTKLPLVGGHEGAGIVVAMGENVTGWEIGDYAGIKWLNGSCMSCEECELSNEPNCPKADLSGYTHDGSFQQYATADAVQAARIPKNVDLAEVAPILCAGVTVYKALKSAHIKAGDWVAISGACGGLGSLAIQYAKAMGYRVLGIDAGDEKAKLFKELGGEYFIDFTKTKDMVAEVIEATNGVAHAVINVSVSEAAISTSVLYTRSNGTVVLVGLPRDAQCKSDVFNQVVKSISIVGSYVGNRADTREALDFFSRGLVKAPIKILGLSELASVYDKMVKGQIVGRIVVDTSK

SEQ ID NO: 8799 - protein, 435 aa, Rubrobacter xylanophilus DSM 9941
MPQLGESVTEGTIARWLKAEGDEVEKDEPIAEVDTDKVSAELPSPLAGRIERLLVPEGATVEVGTEIALVATGEEPGPDGPAREDARSEGPTEEFPAAGTRAQPVAAGPGESRAAGRGEGDGRGARVPSAEELRLRRSSPVVRRLAAEHGVEISSIRGTGVGGRVTKKDIEAYIREREARPREEAPPRPAPPPPRERVEVHEGDEVVEVTSVRRAIAERMSRSKREAPHAWTLVEADVSGLVGLREARKEEFRRREGVNLTYLPFVVRAVVESLKEHPVLNSVWDGDRIVLRKRINIGIAVDLEEGALIVPVIKDADDYGIVGLARRIDEVVRRARQRRLSPDDVSGGTFTVNNPGALGSVVSTPIINHPQAAILSAEAIVKRPVVLEDDAIAVRSMMNLEVSFDHRILDGGAALRFLNAVKRRLESYTPESEIG

SEQ ID NO: 8800 - protein, 615 aa, Bacillus cereus ATCC 10987
MCGITGWVDYKRSLEGERDVVTKMAETLAKRGPDDNKVWIKGNVAFGHKRLIVVDPEGGKQPMTCLKGETNYAICYNGELYNTEDIRKELLRRGYTFKGHSDTEVLLASYMEWKEECVDHLNGIYAFAVWDEQKEQVFIARDRLGVKPLFYKYDSGRLLFGSELKAILAHPDVKAEVTLEGLSEIFGLGPSRTPGHGIYAGIKELRPGHAMTFSKNGLCIWRYWNVESKKHEDSFEETVEKTRFLLQDAITRQLVSDVPLCTFLSGGVDSSAITAIAAKEYERSGKGQLHTYSIDYEDNDKYFKANAFQPNSDAPFIHLMTETFQTIHHRCVISNEQLAQYLTEAVLVRDLPGMADIDSSLLWFCREIKQDFVVGLSGECADEIFGGYPWFYREDDLQSSAFPWMRSTEAREQLLKKEWRNKLNLQQYVQRRYEESIQEVPILEGESPIEAKRRQLFYLNMVWFMTTLLDRKDRMSMGASLEVRVPFADHRLVEYAWNIPWEMKMYKNREKGLLRKALEGLLPNDILYRKKSPYPKTHNPHYTKAVTVWLQDLLTDKGSILHELFDKEQLSGLIESGGSAFQTPWFGQLMTGPQLLAHLAQIHVWFKEYGVNIKE

SEQ ID NO: 8801 - protein, 256 aa, Rubrobacter xylanophilus DSM 9941
MRLEDRVAVITGAASGQGRAAAKLFASEGAKVVAADIDEGGAQRTVEEIKEAGGEATAVKVDVSREPDVRAMVESATDRYGRLDVLFNNAGVGYSASGRMKMASVVETPEKDWDAILAINLKGVALGCKHAIPVMERQGYGSIINNASINALVGLPGADAYTAAKGGVVAFSRVLAVEWGPRGIRVNCICPGGVDTPMIAPVISDERVMQSMRQNTPLGRLARPEEIASVALFLASEEASYLNGAIIPVDGGWTAH

SEQ ID NO: 8802 - protein, 449 aa, Bacillus cereus ATCC 10987
MNPNNRLTTNQGAPVGDNQNSRTAGRRGPVLLEDYHLVEKLAHFDRERIPERVVHARGAGAHGVFVTKNSMKQYTKAAFLQNEGTETPVFVRFSTVIHGQGSPETARDPRGFAVKFYTEEGNYDIVGNHLPVFFIRDAIKFPDMVHSLKPAPDTNIQTPDRYWDFMTLSPESTHMMTWVFSDYGTPASYREMEGFGVHSFKWINAEGKIVYIKYHWKPQQGVRNLSAKEVQEVQGKDFNHATRDLFDAIEKGNYPKWDLHVQVMQLEETDSLDFDPLDPTKVWPEDRFPLMEVGTMTLNRNPKNFFAEVEQVAFSPSATVNGIEPSEDKLLQGRLFSYPDTQRYRLGANYLQIPVNCPYAAVHNQQRDGAMQTNQNPSTINYEPSRHAENPVEDPAYRDSTMKVEGYVSREKIDKPNDFKQAGERYRSFSKEEQDNLIANLTNDLKRRK

SEQ ID NO: 8803 - protein, 370 aa, Magnaporthe grisea 70-15
MAVDHDDFLHLSKPLAPSAVGFNANVAPLTVTIQPQAILSILDHAVRRDIRDTQATRVIGALVGVRSEDGTDVEVRSTFAIPHTENEDQVEVDVEYQKNMLALTLKASPRESLLGWYTTSHELNSFSALIQNFFASPETGTFPHPAVHLTMSTDPGADIEPRCYISAPAAVSPDRAAESCFFIQVPHRTPPTNESDRAALEAIAAGKDDEARTAPVLSDVEALARSLEQTIDMLDRTSEYVGAVLDEEREPSHALGQYLMNNLSLAPKVDSVSIEHDFNNHIQDVLMVSYLTNTIRTQVDLAQRLALANLTDKDEKKEGEDGKAERGGGGRGGRGGKRGGGRGGGQQREPREPREPRESREPREPRESGE

SEQ ID NO: 8804 - protein, 492 aa, Homogyne alpina
MDPYKQRPASAYNSPFLTTNAGLPVYNNTASLTVGNRGPILLEDYHLIEKLANFTRERIPERIVHARGASAKGFFEVTHDITHLTCADFLRAPGVQTPTIVRFSTVIHERGSPETIRDPRGFATKFYTREGNFDIVGNNFPVFFTRDAMAFPDVIHAFKPNPKSHIQEDWRILDFLSHHPESLNTMTFWLDDIGIPTDYRHMEGSSVNALTLVNKEGKMHYVKFTWKPTCGVKCLMDEEAIKIGGANHSHATQDLYDSIQAGNFPEWKLFLQVIDPDHEDRLDFDPLDGTMTWPDDIIPLQPVGRMVLNKNIDNFFAENEQLALNPGLVVPGIYYSDDKMLQGRIFAYSDTQRHRLGPNYLQLPVNAPKCAHRNNHYDGNMNFMHRDEEVDYFPSRYDRVQHAQKYPISPAKVTGTRDRTVIPKANDFKQPGERYRSWEPDRQERFIIRMVKMLSDPRVTHELRSIWISYWTQADQSLGQKIASRLNVRPNY

SEQ ID NO: 8805 - protein, 479 aa, Synechococcus elongatus PCC 7942
MSSEFDYDVIVIGAGYGGFDAAKHACEKGLKTAIVEARDLGGTCVNRGCVPSKALLAASGRVREITDTDHLQNFGIQVQGVSFDRQAIADHAANLVDTVRTNLGNTLKRLGAEILMGRGRLAGSQRVTVTAADGTEKTYSARDVILATGSDPFVPPGIEIDGKTVFTSDDALKLETLPQWIAIIGSGYIGLEFSDVYTALGCEVTMIEALDRLLPTFDPDVAKVAQRSLLDGRDIETRTGVLARKITPGSPVVIELADFETKELVEVLEVDACLVATGRIPSTKNLGLETVAVEVDRRGFIPVDDGMRVLRDSKPVPHLFAVGDATGKLMLAHAAAAQGVVAIENITGHPRSVDYRSIPAATFTHPEISSVGLSEADAKALGGQEGFEVGSVRSYFKANSKALAEADADGFAKVLFRKDTGEVLGAHIFGLHAADLIQEVANAIARRQSVKELAFEVHTHPTLSEVIESAYKQAATAIA

SEQ ID NO: 8806 - protein, 269 aa, Escherichia coli O157:H7 EDL933
MEKKIGFIGCGNMGKAILGGLIASGQVLPGQIWVYTPSPDKVAALHDKFGINAAESAQEVAQIADIIFAAVKPGIMIKVLSEITSSLNKDSLVVSIAAGVTLDQLARALGHDRKIIRAMPNTPALVNAGMTSVTPNALVTPEDTADVLNIFRCFGEAEVIAEPMIHPVVGVSGSSPAYVFMFIEAMADAAVLGGMPRAQAYKFAAQAVMGSAKMVLETGEHPGALKDMVCSPGGTTIEAVRVLEEKGFRAAVIEAMTKCMEKSEKLSKS
